United States Patent Application Publication US 2023/0272434 A1 - sequence listing, part 4

SEQ ID NO: 5231 - protein, 1192 aa, Notocelia uddmanniana
MITRTRSRAAQRARPPSPPAPSSSSPSSSGDERGPPSPPPRPPARRGRPPLPARLGPVGHSALPTAPAAGGVVRRMRWTQEMNENCMRAYFGATEGETNLSAYRVRMLPLFQALEPTITVTAQRLSDQVRVIQRLKRLDDATLDRLRLEALSARTASALARDPPATSPAPVPTPDMAPGVPRVDPSVDEDCANQTVSTQTNEQLRRALEEAITRYRSTPNSRPRLPRLPVNRRNLALMGALNDLLDPYLRASEDLIDTHSILYCGAIAACRVARVKFPDADRAPRTAGGVPAWQVRIERRINTFRTLIAKLICFRGGNDRPRVMRFVNQAFAGTGVRPRDYVTCVTERIDFLKQKVYAWASRIRRYRERVDRYQQNRLFQSDQRKVYRKWEGTDHRVCDGQRPDATAMGNFWRSIWSVPVEHTEGAWIGVVERECESIEPMGSVTISPEDISCAIRTAPNWKSPGPDGLHNFWLKWFRCSYERLATQFQQALELGSLPHLLTTGVTSLLYKSGSTTEAKNYRPITCLPTLYKLLTSILRAKINTHIVANNILAPAQNGCRVGSRGTKELLLIDMTICQRVRRSRGALSAAWIDYKKAYDSVPHSWLRRILELYKVDAALRSFLSACMGQWTTVLRQPGGGDGSSGPQDSIRIERGIFQGDSLSPLWFCLALNPLSTLLKDSGLGCQLRRGGEVISHLLYMDDLKLFAPNRQDLLELLKTTEVFSSAIKMEFGVDKCAVMHVQRGKVVNSTNLQLSETMSLRSLSEAETYKYLGMSQSLGIEGEGIKQAVKERFFCRLTKVLNSFLSGGNKVRAFNAWVMPLLTYSFGILRWTQTELDALDRRVRVLLTTHRMLHPRSSVMRLYIPRKCGGRGFLNAKDLHNREVCSLRDYFLNSECGMHRDVVAVDASFTPLSMANENWRRFKVLSTEDRKAEWKSRELHGRFYKALTGPDVDLLASVNWLRFGDLFGETEGFVCAVADEVIMTNNYRKYILKDGTVDICRACRRPGESLRHIISGCGHLANGEYLHRHNLVARIIHQQLALSYGLVNFEVPYYKYLPAPVLENGRATLYWDRSIITDRTIVANKPDIVLIDRSKRQAVLVDITIPHDENLVKAEKDKVSKYLDLAHEVTAMWDVDSTIIVPIVVSANGLIAKSLDQHLKRLSLDGWVKGQIQKAVLLDTARIVRRFLSLSP

SEQ ID NO: 5232 - protein, 1089 aa, Notocelia uddmanniana
MGRQTEEQICPRTVIGCFLCFGRLNLPSLYLRNGYRIKCASSNGSSGLEALSARAASASARNPSATLPAPVPALDTAPGADPSADEGCANQSVSSQAYEQLRRALEEAITQYHSTPNSRPRLPRLPVNRRNLALMGALNDLLVPYLGASEDLIDTHSIMYCGAIAACRVARVKFPDADRPPRTAGSVPTWQVRIERRVDTYRTLIAKLICFRGGNSRPRVMRFVNQAFAGTGIRPRDYMTCVTERIDFLKHKVYAWASRIRRYRERLDRYQQNRLFQSDQRKVYRKWDGTDHRVSDGQRPDATAMVNFWRSIWSVPVEHNEGAWMGVVERECESIEPMGSVTISPADVSCAIRTAPNWKSPGPDGLHNFWLKWFRCSHARLAAQFQQALELGSLPPPLTTGVTSLLYKSGSTTEAKNYRPITCLPTLYKLPTSILRAKINTHIVANNILAPAQNGCRVGSRGTKELLLIDMTICQRVRRNRGTLSTAWIDYKKAYDSVPHSWLRRILELYKVDAVLRSFLVACMGQWTTVLRQPGGGEGPSDPQDSISIERGIFQGDSLSPLWFYLALNPLSTLLKDSGLGCQLRRESEVISHLLYMDDLKLFVPNKHDLLELLKTTEAFSSAIKMEFGVDKCAVMHVQRGKVVNSTNLQISETMDLRSLSEAETYKYLGMSQSLGIEGGDIKRAVEERFFCRLTKVLNSFLSGGNRVRAFNAWVMPLLTYSFGILRWTQTELDFLDRRVRVLLTAHRMLHPRSSVMRLYIPRKFGGRGFLNAKDLHNREVCSLRDYFLNSECEMHRDVVAADASFTPLSMANENWRRFKVLSTEDRRAVWKSKELHGRFYKALMGPDVDLLASVNWLRFGDLFAETEGFVCAIADEVIMTNNYRKYILKDGTVDICRACRRPGESLRHIISGCGHLANGEYLHRHNLVAKIIHQQLALLYGLVDFEVPYYKYTPAPVFENGRATLYWDRSVITDRTIIANKPDIVLTDRLKRQAVLVDITIPHDENLVKAEKDKVSKYLDLAYEVTAMWDVDSTIIVPIVVSANGLIAKSLDQHLKRLSLDGWVKGQMQKAVLLDTARIVRRFLSLSP

SEQ ID NO: 5233 - protein, 1206 aa, Notocelia uddmanniana
MNTRLRSRAEQRARLPSPPAPSSSSPSSSDDEFATAPDSSESSSDERGPSPPPPQTSARRGRRPLPARLGPTGHSAPPTAPAAGGVVRRMRWTQEMNENCMRAYFGATEGETNLSAYRVRMLPLFQALEPTITVSAQRLSDQVRVIQRNKRLDDLTLDRLRLEALSARAAPTSARDLPATSPAPVPAPNTAPRAPRVDPSADGDCADQSVSTQAHEQLRRALDEAITRYRSTPNSRPRLPRLPVNRRNLALMGALNDLLDPYLRASDDLIDTHSIMYCGAIAACRVARVKFPDADRATRTAGGVPAWQVRIERRINTFRTLIAKLICFRGGNNRPRVMRFVNQAFAGTGVRPRDYMACVTERIDFLKQKVYAWASRIRRYRERVDRYQQNRLFQSDQRKVYRKWEGTDHRVCDAQRPDATAMVNFWRSIWSVPVEHTEGAWIGVVERDCESIEPMGSVTISPEDVSCAIRTAPNWKSPGPDGLHNFWLKWFRCSHERLAAQFQQALELGSLPPPLTTGVTSLLYKSGSTTEAKNYRPITCLSTLYKLLTSILRAKINTHIVTNNILAPAQNGCRVGSRGTKELLLIDMTICQRVRRNRGTLSASWIDYKKAYDSVPHSWLRRILELYKVDAALRSFLSACMGQWTTVLRQPGGGDGPSGPQDSIRIERGIFQGDSLSPLWFCLALNPLSTLLQDSGLGCQLRRGGEVISHLLYMDDLKLFAPNRQDLLELLKTTEVFSSAIKMEFGVDKCAVMHVQRGKVVNSTNLQLSETMSLRSLSEAETYKYLGMSQALGIEGEGIKQAVKERFFCRRTKVLNSFLSGGNKARAFNAWVMPLLTYSFGILRWTQTELDALDRRVRVLLTAHRMLHPRSSVMRLYIPRKCGGRGFLNAKDLHNREVCSLRDYFLNSECGMHRDVVAVDASFTPLSMANENWRRFKVLSAEDRKAEWKSKELHGRFYRALTGPDVDLLASVNWLRFGDLFGETEGFVCAIADEVIMTNNYRKYILKDGTVDICRACRRPGESLRHIISGCSHLANGEYLHRHNLVARIIHQQLALSYGLVDFEVPYYKYLPAPVLENGRATLYWDRSIITDRTIVANKPDIVLIDRSKRQAVLVDITIPHDENLVKAEKDKVSKYLDLAHEVTAMWDVDSTIIVPIVVSANGLIAKSLDQHLKRLSLDGWVKGQIQKAVLLDTARIVRRFLSLSP

SEQ ID NO: 5234 - protein, 955 aa, Notocelia uddmanniana
MGALNDLLDPYLRASDDLIDTHSIMYCGAIAACRVARVKFPDADRATRTAGGVPAWQVRIERRINTFRTLIAKLICFRGGNNRPRVMRFVNQAFAGTGVRPRDYMACVTERIDFLKQKVYAWASRIRRYRERVDRYQQNRLFQSDQRKVYRKWEGTDHRVCDGQRPDATAMVNFWRSIWSVPVEHTEGAWIGVVERDCESIEPMASVTISPEDVSCAIRTAPNWKSPGPDGLHNFWLKWFRCSHERLATQFQQALELGSLPPPLTTGVTSLLYKSGSTTEAKNYRPITCLPTLYKLLTSILRAKINTHIVTNNILAPAQNGCRVGSRGTKELLLIDMTICQRVRRNRGTLSASWIDYKKAYDSVPHSWLRRILELYKVDAALRSFLSACMGQWTTVLRQPGGGDGPSGPQDSIRIERGIFQGDSLSPLWFCLALNPLSTLLQDSGLGCQLRRGGEVISHLLYMDDLKLFAPNRQDLLELLKTTEVFSSAIKMEFGVDKCAVMHVQRGKVVNSTNLQLSETMSLRSLSEAETYKYLGMSQALGIEGEGIKQAVKERFFCRLTKVLNSFLSGGNKARAFNAWVMPLLTYSFGILRWTQTELDALDRRVRVLLTAHRMLHPRSSVMRLYIPRKCGGRGFLNAKDLHNREVCSLRDYFLNSECGMHRDVVAVDASFTPLSMANENWRRFKVLSTEDRKAEWKSKELHGRFYRALTGPDVDLLASVNWLRFGDLFGETEGFVCAIADEVIMTNNYRRYILKDGTVDICRACRRPGESLRHIISGCGHLANGEYLHRHNLVARIIHQQLALSYGLVDFEVPYYKYLPAPVLENGRATLYWDRSIITDRTIVANKPDIVLIDRSKRQAVLVDITIPHDENLVKAEKDKVSKYLDLAHEVTAMWDVDSTIIVPIVVSANGLIAKSLDQHLKRLSLDGWVKGQIQKAVLLDTARIVRRFLSLSP

SEQ ID NO: 5235 - protein, 1111 aa, Notocelia uddmanniana
MNENCMRAYFGATEGETNLSAYRVRMLPLFQALEPTITVSAQRLSDQVRVIQRNKRLDDLTLDRLRLEALSARAAPTSARDLPATSPAPVPAPNTAPRAPRVDPSAEGDCADQIVSTQAHEQLRRALDEAITRYRSTPNSRPRLPRLPVNRRNLALMGALNDLLDPYLRASDDLIDTHSIMYCGAIAACRVARVKFPDADRATRSAGGVPAWQVRIERRINTFRTLIAKLICFRGGNNRPRVMRFVNQAFAGTGVRPRDYMACVTERIDFLKQKVYAWASRIRRYRERVDRYQQNRLFQSDQRKVYRKWEGTDHRVCDGQRPDATAMVNFWRSIWSVPVEHTEGAWIGVVERDCESIEPMGSVTISPEDVSCAIRTAPNWKSPGPDGLHNFWLKWFRCSHERLATQFQQALELGSLPPPLTTGVTSLLYKSGSTTEAKNYRPITCLPTLYKLLTSILRAKINTHIVTNNILAPAQNGCRVGSRGTKELLLIDMTICQRVRWNRGTLSASWIDYKKAYDSVPHSWLRRILELYKVDAALRSFLSACMGQWTTVLRQPGGGDGPSGPQDSIRIERGIFQGDSLSPLWFCLALNPLSTLLQDSGLGCQLRRGGEVISHLLYMDDLKLFAPNRQDLLELLKTTEVFSSAIKMEFGVDKCAVMHVQRGKVVNSTNLQLSETMSLRSLSEAETYKYLGMSQALGIEGEGIKQAVKERFFCRLTKVLNSFLSGGNKARAFNAWVMPLLTYSFGILRWTQTELDALDRRVRVLLTAHGMLHPRSSVMRLYIPRKCGGRGFLNAKDLHNREVCSLRDYFLNSECGMHRDVVAVDASFTPLSMANENWRRFKVLSAEDRRAEWKSKELHGRFYRALTGPDVDLLASVNWLRFGDLFGETEGFVCAIADEVIMTNNYRKYILKDGTVDICRACRRPGESLRHIISGCSHLANGEYLHRHNLVARIIHQQLALSYGLVDFEVPYYKYLPAPVLENGRATLYWDRSIITDRTIVANKPDIVLIDRSKRQAVLVDVTIPHDENLVKAEKDKVSKYLDLAHEVTAMWDVDSTIIVPMVVSANGLIAKSLDQHLKRLSLDGWVKGQIQKAVLLDTARIVRRFLSLSP

SEQ ID NO: 5236 - protein, 1208 aa, Crocallis elinguaria
MITRSRTKKAGTASARKTPPPASSSPSSSSGVEYGTPLDTSASSDEDGPPSPPPPPPPARRGRPPLPARLGPAGHSVPRAAPATGGIVRRMRWTSDMNENCMRAYYGATEGGTNMSAYRDRMLPLFQTLEPSVAVSTQRLSDQVRAIQRLKLLDESVLDRLRLEALPIRATSASARDLSVAPPVPAPLPAPSSVATRIDPVVDEDDCANISVSTQVNEQLRRALEDAILEYQYTPDSRPRLPRLPTNRRNLALMGALNVLLAPYLRASENLFDTHSIMYCGAIAVCRVARVKFPDADRAPRPAGSAPAWQVRIERRINTFRTLIAKLICFSRGNKRPRVMRFVNQAFAGTGIRPQNYMAGVTERIDFLKQKIYAWVNRIRRYRERVDRYHQNRLFESDQRKVYRNWEGTDQRVSDGQLPDTNAMINFWRGIWSVPVEHTEGDWMRTVEQSCESIETMGSVTIDPIDVSCAIRTAQNWKSPGPDGLHNFWIKWIRCSHECLAVQFQEALELGSLPRFLTTGVTSLLHKSGSTTEAKNYRPITCLPTLYKLLTSILRAKINSHVVANNILAPAQNGCRVGSRGTKELLLIDTAICQQVRRNKGALSTAWIDYKKAYDSVPHSWLERILELYKIDTTLRTFLSTCMRQWTTVLRQPGSGNSPSGPENFIKIERGIFQGDSLSPLWFCLALNPLSTLLRDSRLGCKLRREGEIISHLLYMDDLKLLAPKSPDLMKLLKITEIFSSAIKMEFGVDKCAVMHVQRGKVVNSDNLQLSETMTLRSLSEAETYRYLGMSQSLGITVGDIKQSVKERFFCRLTKVLNSLLSGGNKARAFNGWVMPLLIYSFGILKWTQTELDSLDRRVRQLLTYHRMLHPRSSVMRLYIPRKWGGRGFLNAKTLHNREVCSLREYFLNNECGMHRDVVAVDRNLTPLSLANENWHKPVVMTTEDRKEVWKGKELHGRFYRALTGSDVDLLASVNWLRFGDLFGETEGFVCAIMDEVIKTNNYRKYIMKDGTVDICRACRRPGESLRHIISGCSHLANGEYLHRHNLVARIIHQQIALQYGLVESEVPYYKYAPVPVLENGCALLYWDRSIITDRTIVANKPDIVLVDRSQRRAVLVDITVPHDENLVKAEKDKLSKYLDLAHEVTTMWNVDSTIIVPIVVSANGLVAKSLDQHLKRLSLDGWIKGRMQKAVLLDTARIVRRFLTLQP

SEQ ID NO: 5237 - protein, 1088 aa, Pammene fasciana
MLIMTYSTRYSNRIIIIISDQVRVIQRLKRLDDATLDRLRLEALSARAASTSARDPPATSPDPMPAPDLASGAPRIDPSADEEYIASQSVSSTANEQLRRTLEEAITQYRSTNIPRPRLPRLPMNRRNLALMGALNDLLDPILRTSKDLDDTHSIMYCGAIAACRVARIKFPDAERAPRTAGGVPAWQVRIERRINSFRTLIAKLICFRGGNNRPRVMRFVYQAFAGTDIEPRDYMANITERIDFLRQKVYAWASRIRRYRERVDRFRQNRLFQSDQRKVYRRWEEADPRVSDVRLPDATAMTDFWRSIWSAPVEHTEGEWMNVVERECESIEPMGAITISPDDVSCAIRTSQNWKSPGPDGLHNFWLKWFRCSHSRLATQFQHALELGSLPPSLTTGVTFLLYKSGSTTEAKNYRPITCLPTLYKLLTSILRAKINAHMVANNILASAQNGCRVGSRGTKELLLIDMTICQRVRRNRGALSAAWIDYKKAYDSVPHSWLERILELYKVDAALRSFLGACMRQWTTVLRQPGGGDDPPGPQDFIRIERGIFQGDSLSPLWFCLALNPLSTLLKDSGLGCRLRREGEVISHLLYMDDLKLFAPNNRDLLELLKTTEVFSSSIKMEFGVDKCAVMHVQRGKVVNSTNLQLSETMTFRSISESETYKYLGMSQSLGIEDVGIKQALKERFFGRLTKVLNSLLSGGNKVRAFNAWVMPLLTYSFGILRWTQTELDALDRRVRLLLTTHRMLHPRSSVMRLYIPRKCGGRGFLNAKNLHNREVYNLRNYFLNNECGMHRDVVTVDKNLTPLSLANENWRKPVVLSTEDRKAVWKSKELHGRFYGALTGPDVDLLASVNWLRFGDLFGETEGFACAIADEVIMTNNYRRYILKDGTVDICRACRRPGESLRHIISGCSHLANGEYLHRHNLVARIIHQQLALLYGLVAHEVPYYKYTPAPVLENGRATLYWDRSIITDRTIVANKPDIVVIDRPQRRAMLVDITVPCDVNLVKAEKDKSSKYLDLAHEVTAMWEVDSAIIVPIVVSANGLIAKSLDQHLERLSLRGCGWIKGQIQKAVILDTARIVRRFLSLRP

SEQ ID NO: 5238 - protein, 1199 aa, Pammene fasciana
MITRSKSRQQRASPPNARPPSSPASSVSSPSSSGDEFATAPDTSESSDECGPPPLPARLGLAGHPAPPRAPAAGGIVRRMRWTQTMNENVMRAYYGATEGGTNLCAYRVRLLPLFQALEPTTNVTAQRLSDQVRVIQRDKRLDDSTLDRLRLEALSAHAASTSARDPPATAPDPMPAPDLASGAPRVDPSADEEEIATQSVSSTANEQLRRTLEEAITQYRSTNIPRPRLPRLPMNRRNLALMGALNDLLDPFLRTSKDLDDTHSIMYSGAIAACRVARVKFPDAERAPRTAGGVPAWQVRIERRINSFRTLIAKLICFRGGNNRPRVMRFVHQAFAGTDIEPRDYMANVTERIDFLKQKVYAWASRIRRYRERVDRFRQNRLFQSDQRKVYRRWEEADPRVSDVRLPGATAMSDFWRSIWSVPVEHTEGEWMSVVERECETIEPMGAITISPDDVSCAIRTAQNWKSPGPDGLHNFWLKWFRCSHSRLATQFQQALELGSLPPSLTTGVTFLLYKSGSTTEAKNYRPITCLPTLYKLLTSILRAKINAHMVANNILASAQNGCRVGSRGTKELLLIDMTICQRVRRNRGALSAAWIDYKKAYDSVPHSWLERILELYKIDAALRSFLGACMRQWTTVLRQPGGGDDPPGPQDFIRIERGIFQGDSLSPLWFCLALNPLSTLLKDSGLGCRLRREGEVISHLLYMDDLKLFAPNNRDLLELLKTTEVFSSSIKMEFGVDKCAVMHVQRGKVVNSTNLQLSETMTFRSISESETYKYLGMSQSLGIEDAGIKQALRERFFGRLTKVLNSLLSGGNKVRAFNAWVMPLLTYSFGILRWTQTELDALDRRVRQLLTTHRMLHPRSSVMRLYIPRKCGGRGFLNAKNLHNREVYNLRNYFLNNECGMHRDVVAIDKGLTPLSLANENWRKPVVLSTEDRKAVWKSKELHGRFYGALTGPDVDLLASVNWLRFGDLFGETEGFACAIADEVIMTNNYRRYILKDGTVDICRACRRPGESLRHIISGCSHLANGEYLHRHNLVARIIHQQLALLYGLVDHEVPYYKYTPAPVLENGRATLYWDRSIITDRTIVANKPDIVVIDRPQRRAMLVDITVPCDVNLVKAEKDKSSKYLDLAHEVTAMWEVDSAIIVPIVVSANGLIAKSLDQHLERLSLRGCGWIKGQIQKAVILDTARIVRRFLSLRP

SEQ ID NO: 5239 - protein, 1209 aa, Pammene fasciana
MITRSRTKAASTNARPPSSPASSVSSPSSSGDEFATAPDTSESSDECGPPPPPPRPPARRGRPPLPARLGLAGHPVPPRAPAAGGIVRRMRWTPAMNENVMRAYYGATEGGTNLSAYRDRMLPLFQALEPTIDTTAQRLSDQVRAIQRLKRLDDATLDRLRLEALSAHADSTSVRDPPATSPDPMPVPDLASGAPRIDPSADEEYIASQSMSSTANEQLRRTLEEAIMQYRSTNIPRPRLPRLPMNRRNLALMGALNDLLDPILRTSKDLDDTHSIMYCGAIAACRVARVKFPDAERAPRTAGGVPVWQVRIERRINSFRTLIAKLICFRGGNNRPRVMRFVHQAFAGTGIEPRDYMANVTERIDFLKQKVYAWASRIRRYRERVDRFRQNRLFQSDQRKVYRRWEEADPRVSDVRLPDATAMADFWRSIWSAPVEHTEGEWMSVVERECESIEPMGAITISPDDVSCAIRTAQNWKSPGPDGLHNFWLKWFRCSHSRLATQFQQALELGSLPPSLTTGVTFLLYKSGSTTEAKNYRPITCLPTLYKLLTSILRAKINAHIVANNILASSQNGCRVGSRGTKELLLIDMTICQRVRRNRGALSAAWIDYKKAYDSVPHSWLERILELYKVDAALRSFLGACMRQWTTVLRQPGGGDDPPDPHDFIRIERGIFQGDSLSPLWFCLALNPLSTLLKDSGLGCRLRREGEVISHLLYMDDLKLFAPNNRDLMELLKTTEVFSSSIKMEFGVDKCAVMHVQRGKVVNSTNLQLSETMTFRSISESETYKYLGMSQSLGIEDAGIKQALKERFFGRLTKVLNSLLSGGNKVRAFNAWVMPLLTYSFGILRWTQTELDALDRRVRLLLTTHRMLHPRSSVMRLYIPRKCGGRGFLNAKNLHNREVYNLRNYFLNNECGMHRDVVAVDKSLTPLSLANENWRKPVVLSTEDRKAVWKSKELHGRFYGALTVPDVDLLASVNWLRFGDLFGETEGFACAIADEVIMTNNYRRYILKDGTVDICRACRRPGESLRHIISGCSHLANGEYLHRHNLVARIIHQQLALLYGLVDHEVPYYKYTPEPVLENGRATLYWDRSIITDRTIVANKPDIVIIDRSQRRAMLVDITVPCDVNLVKAEKDKSSKYLDLAHEVTAMWEVDSAIIVPIVVSANGLIAKSLDQHLERLSLRGCGWIKGQIQKAVILDTARTVRRFLSLRP

SEQ ID NO: 5240 - protein, 1205 aa, Bembecia ichneumoniformis
MLLRKRKDRAEQSARPPSLPVSSSPCSSADEFLNADDKSTSSDDDGPTPPSPPRRPARRGRPPLPASLGPARPSASRSAPATGGVVRRMRWTHTMNENCMRAYYGATEGATNLTAYRARMLSLFQALEPAVTVTAQRLSDQVRAIQRCQLLEQSVLDRLRLDSLPARTTSAATQDLRAALPLPESASIPTSAALLTDPVDQENCASTNVSTETKEQLRRALEEAISRYHTKPNDRPRLPRLPMHKQNIALMGALNTLLAPYIKASRDLTDTHSILYCGAIAACRVARVKFLNFDRATRDAEDVPAWQVRIERRISKFRTFIAKLISFCRGNTRPRVMRFVAQAFVGTNIKSKDYLTWATERIDYFKQKVYALANRVRRYKERVHRYRQNRLFQSDQRKVYRDWERTNQSVNVGHPPDPEVMLKFWRDIWSVSDEHTEGDWISIVEQACESITTMKAINISPTDVSCAIRSTQNWKSPGPDGLHNFWIKMIQCSHECLAMQFQKALELGTLPNFLTTGITFLLHKSGSTTEAKNYRPITCLPTIYKLLTSILRTKINSHILENNILDTAQNGCKIGSRGTKELLLIDMTICQRVRRNSGALSVAWIDYQKAFDSVPHSWLRRILELYKIDTTLRSFLAMCMGQWITVLRQPGYRGGDAGLRDTIKIERGIFQGDSLSPLWFSLALNPLSTLLRNLKLGYRLRRGGEVISHLLYMDDLKLFAPKPKDLLELLKITQCFSNAIRMDFGVDKCVVMHVQKGKVVNSPNLQLSDEMSFKSLSEVETYKYLGMSQSLGISDKDIKQTVKTRFFGRLTKVLNSFLSGGNKVRAFNGWVMPLLTYSFGILRWTQTELDGLDRRVRQLLTAHRMLHPRSSVMRLYIPRKLGGRGFLNAKNLHNREVYSLREYFLNHGSGVHRDVVAIDKNFTPLSLANGNWRRLVVLSTEDRKSVWKGKELHGRFYKALTGPEVDSLMSVNWLRFGDLFGETEGFVCAIADEVIKTNNYRKYILKDGTVDICRACHRPGETLRHIISGCAHLSNGEYLHRHNQVARIIHQQLAIRYGLIESEVPYYKYVPAPVLENGHATLYWDRSIITDRTIVANKPDIVVIDRSQRRTMLVDIAVPHDENLVKAEKEKLTKYIDLAHEVTAMWDVDSTIIVPIVVSANGLIAKSLDQHLKRLSLDGWIKGQIQKAVLLDTARIVRRFLTLQP

SEQ ID NO: 5241 - protein, 1206 aa, Bembecia ichneumoniformis
MILRKRTRNTAEQSARPPPLPVSSSPCSSADEFLTADDKSTSSDEDGSTPPSPPRRPARRGRPPLPASLGPVRPSASRPAPATGGVVRRMRWTHTMNENCMRAYYGATEGATNLTAYRARMLSLFQALEPAVTVTAQRLSDQVRAIQRCQLLEQSALDRLRLDSLPARTTSAATQHLRAALPLSESASIPTSAALLTDPVDQEFCASTNVSTETKEQLRRALEEAISRYHTKPNDRPRLPRLPMHKQNIALMGALNTLLAPYIKASRDLTDTHSILYCGAIAACRVARVKFLNFDRATRDAGDVPAWQVRIERRISKFRTLIAKLIAFSKGNTRPRVMRFVAQAFVGTNIKSKDYLTWATERIDYFKQKVYALANRVRRYKERVERYQQNRVFQSDQRKVYRQWEGTVNRVDAGQLPDADAMTNFWRGIWSVSDGHTEGDWINIVKQTCEPIEPMGAVTISPADVSCAIRTVQNWKSPGPDGLHNFWIKWFRCSHECLAMQFQKALDLGALPSLFTTGITFLLHKSGSTTEAKNYRPITCLPTLYKLLTSILRSKINSHIVANNILAPAQNGCKIGSRGTKELLLIDMTICQRVRRSGGALSVAWIDYQKAYDSVPHSWLRRILELYKIDMTLRSFLAMCMGQWITGLCQPGYRGGAADLRDMIKIERGIFQGDSLSPLWFSLALNPLSTLLRNLKLGYRLRRGGEVISHLLYMDDLKLFAPKPKDLLELLKITQCFSNAIRMDFGVDKCAVMHVQKGKVVNSPNLQLSNEMSFRSLSEVETYKYLGMSQSLGISDKDIKQTVGTRFFGRLIKVLNSFLSGGNKVRAFNGWVMPLLTYSFGILRWTQTELDGLDRRVRRLLTAHRMLHPRSSVMRLYIPRKLGGRGFLNAKNLHNREVYSLREYFLNHESGVHRDVVAIDKNYTPLSLANGNWRRLVVLSAEDRKNVWKGKELHGRFYKALTGPDVDSLMSVNWLRFGDLFGETEGFVCAIADEVIKTNNYRKYILKDGTVDICRACHRPGETLRHIISGCAHLANGEYLHRHNQVARIIHQRLALRYDLIESEVPYYKYVPAPVLENGHATLYWDRSIITDRTIVANKPDIVVIDRSQRRTMLVDIAVPHDENLVKAEKEKLTKYIDLAHEVTAMWDVDSTIIVPIVVSANGLIAKSLDQHLKRLSLDGWVKGQIQKAVLLDTARIVRRFLTLQP

SEQ ID NO: 5242 - protein, 1118 aa, Ennomos quercinarius
MRWTQAMNENCMRAYYGATEGGSSLTAYRDRMLSLFQDLEPAVAVSAQRLSDQVRAIQRCKMLDEPTLDRLRLEALPIRATSPSPRVLPAALPDPGPIMGPLPVTPRDDPAIDGEESVSDSVSTQANEQLRSALEDAILRYRSAPTSRPRLPRLPTNRRNLVLMGALNTLLAPYLRTSEDLVDTHSILYCGAIAACRVARVKFPDTDRAPRPADGAPAWQVRIEKRITTFRTLIAKLVCFSRGNHRPRVMRFVTQAFAGTGIRPQDYMACVTERIDFLKQKVYAWASRIRRYRERVDRYQQNRLFQSDQRKVYRNWEGTGQRVVDGQLPDANAMNEFWRSIWSVPVEHTEGDWMRVVERVCEPIESMGSITIDPEDISCAIRTAQNWKIPGPDGLHNFWIKWIQCSYPCLAIQFQEALEAGSLPSFMTTGVTFLLHKSGSTTEAKNYRPITCLPTLYKLLTSILRTKINSHIVANNILAPAQNGCRVGSRGTKELLLIDTAICQQIRRNRGALSTAWIDYKKAYDSVPHSWLERILELYKIDATLRSFLSACMRQWTTVLRQPGGGESVSDPQDFIRIERGIFQGDSLSPLWFCLALNPLSTLLGDSGLGYRLRRGGEIISHLLYMDDLKLFAPQRPQLIELLKITENFSNSINMEFGVDKCAVMHVHGGKVVNSTNLQLSETMALRSLSESETYRYLSMSESFGISVGDVKRTVKERFFCRLTKVLNSLLSGGNKVRAFNGWVMLLLIYSFGILRWTQTELDALDRKVRQLLTSHRMLHPRSSVMRLYIPRKWGGRGFLNAKNLHNREACSLREYFLNNECGMHRDVVAVDKGLTPLSLANENWRKPVVLSTEDRRDVWKGKELHGRFYRALTGPDVDLHASVNWLRFGDLFGETEGFFCAIADEVIKTNNYRKYIMKDGTVDICRACRRPGESLRHIISGCSHLANGEYLHRHNLVARIIHQQLALQYGLVESEVPYYKYTPGPVLENGRALLYWDRSIITDRTIVANKPDIMLVDRSQRRAVLVDITIPHDENLVKAEKDKLSKYLDLAHEVTAMWNVDSTSIVPIVVSANGLIAKSLDQHLERLSLDGWIKGQIQKAVLLDTARIVRRFLTLQP

SEQ ID NO: 5243 - protein, 1208 aa, Ennomos quercinarius
MITRSKAKTAGNECARLPPPPSPSSPSSSSGDEYGTPPDTTASSDEDGPPSPPPPPPPVRRGRPPLPARLGPAGQPAPRPAPASGGIVRRMRWTQTMNENCMRAYYGATEGGSNLTAYRDRMLSLFQVLEPAVAVSAQRLSDQVRAIQRCKMLDEPTLDRLRLEALPIRATSPSPRVLPAALPDPGPIMGPLPVTPRGDPAIDGEENANDSVSTQANEQLRSALEDAILRYRSTPTSRPRLPRLPTNRRNLVLMGALNTLLAPYLRTSEDLVDTHSILYCGAIAACRVARVKFPDTDRAPRPADGAPAWQVRIEKRITTFRTLIAKLVCFSQGNHRPRVMRFVTQAFAGTGIRPQGYMACVTERIDFLKQKVYAWASRIRRYRERVDRYQQNRLFQSDQRKVYRNWEGTGQRVVDGQLPDANAWNEFWRSIWSVPVEHTEGDWMRVVERVCEPIESMGSITIDPEDISCAIRTAQNWKSPGPDGLHNFWIKWIRCSYPCLAIQFQEALEAGSLPSFMTTGVTFLLHKSGSTTEAKNYRPITCLPTLYKLLTSILRTKINSHIVANNILAPAQNGCRVGSRGTKELLLIDTAICQQVRRNRGALSTAWIDYKKAYDSVPHSWLERILELYKIDATLRSFLSACMRQWTTVLRQPGGGESVSDPQDFIRIERGIFQGDSLSPLWFCLALNPLSTLLGDSGLGYRLRRGGEIISHLLYMDDLKLFAPQRPQLIELLKITENFSNSINMEFGVDKCAVMHVHGGKVVNSTNLQLSETMTLRSLSESETYRYLGMSESLGISVGDVKRTVKERFFCRLTKVLNSLLSGGNKTRAFNGWVMPLLMYSFGILRWTQTELDALDRKVRQLLTSHRMLHTRSSVMRLYIPRKWGGRGFLNAKTLHNREVCSLRDYFLNNECGMHRDVVAVDKGLTPLSLANENWRKPVVLSTEDRRDVWKGKELHGRFYRALTGPDVDLHASVNWLRFGDLFGETEGFVCAIADEVIKTNNYRKYIMKDGTVDICRACRRPGESLRHIISGCSHLANGEYLHRHNLVARIIHQQLALQYGLVESEVPYYKYTPGPVLENGRALLYWDRSIITDRTIVANKPDIVLVDRSQRRAVLVDITIPHDENLVKAEKDKLSKYLDLAHEVTAMWNVDSTSIVPIVVSANGLIAKSLDQHLERLSLDGWIKGQIQKAVLLDTARIVRRFLTLQP

SEQ ID NO: 5244 - protein, 1043 aa, Cydia splendana
MITRSRTKAATTSARPPPPPASSTSSSTSSSGDEFATAPDTDGSSEESGPPPPPPRPPARRGRPPLPARLGPAGHPAPPTAPATGGIVRRMRWTRDMNENVMRAYYGATHSIMYCGAIAACRVARIKFPDAERAPRTAGGVPAWQARIERRISSFRTLIAKLICFRGGNNRPRVMRFVNQAFAGTDIRPRDYMANVTERIDFLKQKVYAWANRIRRYRERVDRFQQNRLFQSDQRKVYRRWEETNLRTPDTQPPDATAMTNFWRSIWSVPVGHTEGSWMSVVERECESIEPMGAVTISPDDVSCAIRTAQNWKSPGPDGLHNFWLKWFRCSHSRLAAQFQQALELGSLPPSLTTGVTFLLYKSGSTTEAKNYRPITCLPTLYKLLTSILRAKINAHIVANNILASAQNGCRVGSRGTKELLLIDMTICQQIRRTKGALSAAWIDYKKAYDSVPHSWLGRVLELYKVDAALRAFLSACMGQWTTVLRQPGGGDDQPGPQDFIRIERGIFQGDSLSPLWFCLALNPLSTLLKDLGLGCRLRREGEVISHLLYMDDLKLFAPNTQGLLELLKTTEVFSSAINMEFGVDKCAVMHVQRGRVVNSTNLQLSETMSFRSISESETYKYLGMSQSLGIEDEGIRRSVKERFFSRLTKVLNSLLSGGNKVRAFNAWVMPLLTYSFGILRWTQTELDALDRRVRSLLTTHRMLHPRSSVMRLYIPRKCGGRGFLNAKDLHNREVYNLRNYFLNNECGMHRDVVAVDRNLTPLSLANENWRKPVVLSTADRKAAWENKVLHGRFYKALTGPDVDLLASVNWLRFGDLFGETEGFACAIADEVMMTNNYRKYILKDGTVDICRACRRPGESLRHIISGCSHLANGEYLHRHNLVARIIHQQLALLYGLVDREVPYYKYLPAPVLENGRATLYWDRSIITDRTIVANKPDIVLIDRSQRRAVLADVTIPHDENLVKAEKDKSSKYLDLAHEITAMWDVDSTIIVPIVVSANGLIAKSLDQHLERLSLGGWIKGQMQKAVILDTARIVRRFLSLQP

SEQ ID NO: 5245 - protein, 1208 aa, Cydia splendana
MITRSRTKAVTTSARPPPPPASSTSSSTSSSGDEFATAPDTDGSSDESGPPPPPPRPPARRGRPPLPARLGPAGHPAPPTAPATGGIVRRMRWTRDMNENVMRAYYGATERGTQLSAYRSRILPLFQTLEPTITVSEQRLSDQVRVIQRLKRLDDATLDRLRQEALSARADSTSVRDLPATSPDPVPVPDLAPEAPRVDFCTDEGDFASQNVSTTANEQLRRTLEEAITQYRATTNSRPRLPRLPMNRRNLALMGALNALLEPYLRTSKDLDDTHSIMYCGAIAACRVARVKFPDAERAPRTVGGVPAWQVRIERRISSFRTLIAKLICFRGGNNRPRVMRFVNQAFAGTDIGPRDYMANVTERIDFLKQKVYAWANRIRRYRERVDRFQQNRLFQSDQRKVYRKWEETNLRTPDTQPPDATAMTDFWRSIWSMPVGHTEGGWMSVVERECEFIEPMGAVTISPDDISCAIRTAQNWKSPGPDGLHNFWLKWFRCSHSRLAAQFQQALELGSLPPSLTTGVTYLLYKSGSTTEAKNYRPITCLPTLYKLLTSILRAKINAHIVANNILASAQNGCRVGSRGTKELLLIDMTICQQIRRNKGALSAAWIDYKKAYDSVPHSWLGRVLELYKVDAALRAFLSACMRQWTTVLRQPGGGDDPPDPQDFIRIERGIFQGDSLSPLWFCLALNPLSTLLKDLGLGCRLRREGEIISHLLYMDDLKLFAPNSQDLSELLKTTEGFSSAINMEFGVDKCAVMHVQRGRVVNSTNLQLSETMSFRSISESETYKYLGMSQSLGIEEEGIRRSVKERFFSRLTKVLNSLLSGGNKVRAFNAWVMPLLTYSFGILRWTQTELDALDRRVRSLLTTHRMLHPRSSVMRLYIPRKCGGRGFLNAKDLHNREVYNLRNYFLNNECGMHRDVVAVDRNLTPLSLANDNWRKPVVLSTADRKAAWESKVLHGRFYKALTGPDVDLLASVNWLRFGDLFGETEGFACAIADEVMMTNNYRKYILKDGTVDICRACRRPGESLRHIISGCSHLANGEYLHRHNLVARIIHQQLALLYGLVDREVPYYKYLPAPVLENGRATLYWDRSIITDRTIVANKPDIVIIDRSQRRAVLVDITIPHDENLVKAEKDKSSKYLDLAHEITAMWDVDSTIIVPIVVSVNGLIAKSLDQHLERLSLGGWIKGQMQKAVILDTARIVRRFLSLQP

SEQ ID NO: 5246 - protein, 1209 aa, Cydia splendana
MITRSKTRSQASITTNARPPPSPVSSVSSQASSGDEFATAPDTSESSDECGPPPPPPRPPARRGRPPLPARLGPAGHHAPPTVPAAGGVVRRMRWSQTMNENVMRAYYGATEGGTDLCAYRVRMLPLFQALEPTIDVTAQRLSDQVRVIQRLKRLDDSTLDRLRLEALSTRAASTSVRDPPATSPDPVPAPDQAPEAPRVDLCADEEEFAQSVSSTANEQLRRTLDEAITQYRSTPNIRPRLPRLPMNRHNLALMGALNALLEPYLRTSKDLDDTHAIMYCGAIAACRVARVKFPDSERAPRTAGGAPAWQIRIERRISSFRTLIAKLICFRGGNNRPRVMRFVNQAFAGTDIRPRDYMANITERIDFLKQKVYAWANRIRRYRERVDRFQQNRLFQSDQRKMYRKWEETNPRASDSQPPEATVMNDFWRSIWSVPVGHTEGSWMSVVERECESIEPMGAVTISPDDVSCAIRTAQNWKSPGPDGLHNFWLKWFRCSHSCLAAQFQQALELGSPPPSLTTGVTFLLYKSGSTTEAKNYRPITCLPTLYKLLTSILRAKINAHIVANNILASAQNGCRVGSRGTKELLLIDMTICQQIRRNRGALSAAWIDYKKAYDSVPHSWLERVLELYKVDTALRAFLSACMRQWTTVLRQPGGGDGSPGPQDFIRIERGIFQGDSLSPLWFCLALNPLSTLLKDLELGCRLRRGGEVISHLLYMDDLKLFAPNSQDLVELLKTTEVFSNAINMEFGVDKCAVMHVQRGKVVNSTNLQLSETMSFRSISESETYKYLGMSQSLGIEEEGIRRSVKERFFSRLTKVLNSLLSGGNKVRAFNAWVMPLLTYSFGILRWTQTELDALDRRVRQLLTTHRMLHPRSSVMRLYIPRKCGGRGFLNAKNLHNREVYNLRNYFLNNECGMHCDVVAADKGLTPLSLANENWRKPVVLSTEDRKAVWKDKQLHGRFYKALTGPDVDLLASVNWLRFGDLFGETEGFACAIADEVMMTNNYRKYILKDGTVDICRACRRPGESLRHIISGCSHLANGEYLHRHNLVARIIHQQLALLYGLVDREVPYYKYSPAPVLENGRATLYWDRSIITDRTIVANKPDIVLIDRSQRRTVLVDVTIPHDENLVKAEKDKSSKYLDLAHEITAMWDVDSTIIVPIVVSANGLIAKSLDQHLERLSLGGWIKGQMQKAVILDTARIVRRFLTLRP

SEQ ID NO: 5247 - protein, 1209 aa, Cydia splendana
MQTRSKTRAQLASPRNARPPPPSASSVSSQSSSGDEFATAPDTSESSDECGPPPPPSRPPARRGRPPLSARLGPAGHPAPPTAPAAGGVVRRMRWSQTINENVMRAYYGATEGGTNLCAYRVRMLPLFQALEPTIDVTAQRLSDQVRVIQRQKRLDDSTLDRLRLEALSARAASTSARDPPATSPDPVPAPDQAPGAPRVDLSADEEEFAQSVGSTANEQLRRTLDEAITRYRSTPDTRPRLPRLPMNRHNLALMGALNALLEPYLRTSKDLDDTHAIMYCGAIAACRVARVKFPDSEHAPRTAGGAPAWQIRIERRISSFRTLIAKLICFRGGNNRPRVMRFVNQAFVGTDIRPRDYMANVTERIDFLKQKVYAWANRIRRYRERVDRFQQNRLFQSDQRKMYRKWEETNLRASDSQPPDATVMNDFWRSIWSVPVGHTEGSWMSVVERECESIEPMGAVTISPDDVSCAIRTAQNWKSPGPDGLHNFWLKWFRCSHSYLAAQFQQALELGSLPPSLTTGVTFLLYKSGSTTEAKNYRPITCLPTLYKLLTSILRAKINAHIVANNILASAQNGCRVGSRGTKELLLIDMTICQQIRRTRGALSAAWIDYKKAYDSVPHSWLGRVLELYKVDAALRAFLSACMGQWTTVLRQPGGGDDRPGPQDFIRIERGIFQGDSLSPLWFCLALNPLSTLLKDLGLGCRLRREGEVISHLLYMDDLKLFASNTQGLLELLKTTEVFSSAINMEFGVDKCAVMHVQRGKVVNSTNLQLSETMSFRSISESETYKYLGMSQSLGIEDEGIRRSVKERFFSRLTKVLNSLLSGGNKVRAFNAWVMPLLTYSFGILRWTQTELDALDRRVRSLLTTHRMLHPRSSVMRLYIPRKCGGRGFLNAKDLHNREVYNLRNYFLNNECGMHRDVVAVDRNLTPLSLANENWRKPVVLSTADRKAAWESKALHGRFYKALTGPDVDLLASVNWLRFGDLFGETEGFACAIADEVMMTNNYRKYILKDGTVDICRACRRPGESLRHIISGCSHLANGEYLHRHNLVARIIHQQLALLYGLVDREVPYYKYLPAPVLENGRATLYWDRSIITDRTIVANKPDIVLIDRSQRRVVLADVTIPHDENLVKAEKDKSSKYLDLAHEITAMWDVDSTIIVPIVVSANGLIAKSLDQHLERLSLGGWIKGQMQKAVILDTARIVRRFLTLRP

SEQ ID NO: 5248 - protein, 963 aa, Cydia splendana
MNRHNLALMGALNALLEPYLRTSKDLDDTHAIMYCGAIAACRVARVKFPDSERAPRTAGGAPAWQILIERRISSFRTLIAKLICFRGGNNRPRVMRFVNQAFAGTDIRPRDYMANITERIDFLKQKVYAWANRIRRYRERVDRFQQNRLFQSDQRKMYRKWEETNPRASDSQPPEATVMNDFWRSIWSVPVGHTEGSWMSVVERECESIEPMGAVTISPDDVSCAIRTAQNWKSPGPDGLHNFWLKWFRCSHSCLAAQFQQALELGSPPPSLTTGVTFLLYKSGSTTEAKNYRPITCLPTLYKLLTSILRAKINAHIVANNILASAQNGCRVGSRGTKELLLIDMTICQQIRRNRGALSAAWIDYKKAYDSVPHSWLERVLELYKVDTALRAFLSACMRQWTTVLRQPGGGDGSPGPQDFIRIERGIFQGDSLSPLWFCLALNPLSTLLKDLELGCRLRRGGEVISHLLYMDDLKLFAPNSQDLVELLKTTEVFSNAINMEFGVDKCAVMHVQRGKVVNSTNLQLSETMSFRSISESETYKYLGMSQSLGIEEEGIRRSVKERFFSRLTKVLNSLLSGGNKVRAFNAWVMPLLTYSFGILRWTQTELDALDRRVRQLLTTHRMLHPRSSVMRLYIPRKCGGRGFLNAKNLHNREVYNLRNYFLNNECGMHCDVVAADKGLTPLSLANENWRKPVVLSTEDRKAVWKDKQLHGRFYKALTGPDVDLLASVNWLRFGDLFGETEGFACAIADEVMMTNNYRKYILKDGTVDICRACRRPGESLRHIISGCSHLANGEYLHRHNLVARIIHQQLALLYGLVDREVPYYKYSPAPVLENGRATLYWDRSIITDRTIVANKPDIVLIDRSQRRTVLVDVTIPHDENLVKAEKDKSSKYLDLAHEITAMWDVDSTIIVPIVVSANGLIAKSLDQHLERLSLGGWIKGQMQKAVILDTARIVRRFLTLRP

SEQ ID NO: 5249 - protein, 963 aa, Cydia splendana
MNRRNLALMGALNALLEPYLRTSKDLDDTHSIMYCGAIAACRVARIKFPDAERAPRTVGGVPAWQARIERRISSFRTLIAKLICFRGGNNRPRVMRFVNQAFAGTDIRPCDYMANVTERIDFLKQKVYAWANRIRRYRERVDRFQQNRLFQSDQRKVYRRWEEANLRAPDTQPPDATAMTDFWRSIWSVPVGHTEGGWMSVVERECESIEPMGAVTISPDDVSCAIRTAQNWKSPGPDGLHNFWLKWFRCSHSCLAAQFQQALELGSLPPSLTTGVTFLLYKSGSTTEAKNYRPITCLPTLYKLLTSILRAKINAHIVANNILASAQNGCRVGSRGTKELLLIDMTICQQIRRNKGALSAAWIDYKKAYDSVPHSWLGRVLELYKVDAALRAFLSACMRQWTTVLRQPGGRDDRPGPQDFIRIERGIFQGDSLSPLWFCLALNPLSTLLKDLGLGCRLRREGEVISHLLYMDDLKLFAPNSQDLLGLLKTTEVFSSAIHMEFGVDKCAVMHVQRGRVVNSTNLQLSETMSFRSNSESETYKYLGMSQSLGIEDEGIRRSVKERFFSRLTKVLNSLLSGGNKVRAFNAWVMPLLTYSFGILRWTQTELDALDRRVRSLLTAHRMLHPRSSVMRLYIPRKCGGRGFLNAKDLHNHEVYNLRNYFLNNECGMHRDVVAVDRNLTPLSLANENWRKPVVLSTADRKAAWESKVLHGRFYKALTGPDVDLLASVNWLRFGDLFGETEGFACAIADEVMMTNNYRKYILKDGTVDICRACRRPGESLRHIISGCSHLANGEYLHRHNLVARIIHQQLALLYDLVDREVPYYKYLPAPVLENGRATLYWDRSIITDRTIVANKPDIVIIDRSQRRAVLVDITIPHDENLVKAEKDKSSKYLDLAHEITAMWDVDSTIIVPIVVSVNGLIAKSLDQHLERLSLGGWIKGQMQKAVILDTARIVRRFLSLQP

SEQ ID NO: 5250 - protein, 1212 aa, Agriopis aurantiaria
MITRSRTKQADTKSARLPSPPASSSSPSTSSGEDEYHTTREPSGSSSDTSGPGTPPPPPPARRGRPPLPARLGLVGHSATRPAPATGGVVRRMRWSTIMNEDCMRAYYRATEGGTNLSAYCARMLPLFQALQPTITVSAQRLSDQVRAIHRCKLLDDSVLDRLRQEELRARPIPVSTRDPPVASSAPTLASVPASVVTLAALADPVVDEGDLASGVSDQVREQLRGALEDAISQYRFTPDSRPRLPRLSTHRRNLALMGALNALLAPYLRASEDLVDTHSILYCGAIAACRVARVKFPDTNRAPRTAGGVPAWQVRIERRISTFRTLIAKLVCFRRGNNRPRVMRFVTQAFAGTDIRPQHYLANVTERIDYLKQKVYAWANRIRRYRERVDRYWQNRLFQSDQRKVYRGWEETDQRVSDGQLPDASAMINFWRGIWSMPVEHTEGDWMRVVERECESIEPMGSILIDSIDVSCAIRTAQNWKSPGPDGLHNFWIKWIRCSHDRLATQFQEALELGSLPSFMTTGVTFLLHKSGSTTEAKNYRPITCLPTIYKLLTSILRNKINAHIVANNVLAHAQNGCRVGSRGTKELLLIDTAISQQVRRNKGALSAAWIDYKKAYDSVPHSWLERVLELYKIDTTLKSFLGACMRQWTTVLRQPGGGDGAFGPQDLLRIERGIFQGDSFSPLWFCLALNPLSTLLRDSGLGYRLRRDGQVISHLLYMDDLKLFTPKRQDLVELLKITEVFSSAIRMEFGVDKCAVMHVQRGKVVNSPNLQLSEVMTLRSLSEAETYKYLGMSESLGISVENIKKSVKERFFCRLTKVLNSLLSGGNKVRAFNGWVMPLLIYSFGILRWTQTELDALDRRVRQLLTSHRMLHPRSSVMRLYIPRKWGGRGFLNAKNLHNREVCSLRDFFRNSESGMHRDVVAVDRGLTALSLANENWRKPSVLSIEDRRDVWKGKELHGRFYRALTGPDVDLLASVNWLRFGDLFGETEGFACAIADEVIKTNNYRKYIMKDGTVDICRACHHPGESLRHIISGCSHLANGEYLHRHNLVARIIHQQLALRYSLVESEVPYYKYAPAPVLENGRALLYWDRSIITDRTIVANKPDIVLVDRSQRRAVLVDITIPHDENLVKAEKDKLSKYLDLAHEVTAMWDVDSTIIVPIVVSVNGLIAKSLDQHLKRLSLDGWVKGQMQKAVILDTARIVRRFLTLQP

SEQ ID NO: 5251 - protein, 1216 aa, Erannis defoliaria
MITRSKAIRNAAEQHSARPPSPPAPSSPSASSGEDVFVTPRESSASSSDSDVSGPRTPAPPPPARRGRLPLPARLGPAGLPASRPALAAGGVVRRMRWSQTNNENCMRAYYRATEVGTNLTAYRVRMLSLFQALEPTVTVSAQRLSDQVRAIQRLNLLDQSLLDRLRLEAQSARSTPVSTRDSHVASSAPTLASMPTSVATLATPADPVVDEGDGTGMSVTTQVSEQLRRALEDAISQYRFALNSRPRLPCLPTHRRNLALMGALNPLLAPYLRASEDLTDTHSILYCGAVAACRVARVKFPDSNRAPRTAGDVPAWQARIERRISTFRTLIAKLICFSRGNNRPRVMRFVTQAFAGTGIRPQQYMASVTERIDYLKQKVYAWASRIRRYRERVDRYWQNRVFQSDQRKVYRDWEGAEQRVSDGHLPDANAMTNFWRGIWSVPVEHTEGDWMRVVERECESIEPMGSILIDPVDVSCAIRTAQNWKSPGPDGLHNFWIKWFRCSHDRLATQFQEALELGSLPSFMTTGVTFLLHKSGSTTEPKNYRPITCLPTIYKLLTSILSTKINTHIVANNVLAPAQNGCRVGSRGTKELLLIDMAISQQVRRNKGALSAAWIDYKKAYDSVPHSWLERILELYKIDTTLKSFLSACMRQWTTVLRQPGGGNDSSDPQDLIRIERGIFQGDSLSPSWFCLALNPLSTLLKDSGLGYRLRRGGEVISHLLYMDDLKLFAPKHQDLLELLKTTQVFSSAIRMEFGVDKCAVMRVQRGKVVNSPDLQLSEIMTLRSLSEAETYKYLGMSESLGISVVDIKKSVKERFFCRLTKVLNSLLSGGNKARAFNGWVMPLLIYSFGILRWTQTELDALDRRVRQLLTAHRMLHPRSSVMRLYIPRKWGGRGFLNAKNLHNREVCSLRDYFLNNECGMHRDVVTVDKGLTPLSLANENWRRPSVLSTDDRKDVWKSKELHGRFYRALSGPDVDLLASVNWLRFGDLFGETEGFACAIADEVIKTNNYRKYIMKDGTVDICRACHRPGESLRHIISGCSHLANGEYLHRHNQVARIIHQQLALQYGLVESEVPYYKYAPAPVLENGRALLYWDRSIITDRTIVANKPDIVMVDRSQRRAVLVDVTIPHDENLVKAEKDKLSKYLDLAFEITAMWDVDSTIIVPIVVSANGLIAKSLDQYLKRLSLDGWVKGQIQKAVVLDTARIVRRFLTLQP

SEQ ID NO: 5252 - protein, 1215 aa, Erannis defoliaria
MITRSQSRRNTAERNARPPSPPAPSSPSASSGDDVFLTPRESSVSSSNSDVSGPRTPAPPPPARRGRPPLPARLGPAGLPASRPALAAGGVVRRMRWSQTNNENCMRAYYGATEGGTNLSAYRVRMLPLFQALEPTVTVSAQRLSDQVRAIQRLNLLDQSLLDRLRLEAQSARPTPASTRDLDVASSAPTLALVPTSAATLVTSADPVVDEGDCTGMSVSTQVSEQLRRALEDAIGQYRFTPNSRPRLPRLPTHRRNLALMGALNALLAPYLRASEDLTDTHSILYCGAIAACRVARVRFPDTNRAPRPAGDVPAWQLRIERRISTFRTLIAKLICFSRGNNRPRVMRFVTQAFAGTGIRPQQYMANVTERIDYLKQKVYAWANRIRRYRERVDRYWQNRLFQSDQRKVYRNWEGNEQRVSDGQLPDASAMTNFWRGIWSVPVEHTEGDWMRVVERECESIEPMGSILIDPVDVSCAIRTAQNWKSPGPDGLHNFWIKWFRCSHDRLATQFQEALELGSLPSFMTTGVTFLLHKSGSTTEPKNYRPITCLPTIYKLLTSILSTKINAHIVANNVLAPAQNGCRVGSRGTKELLLIDMAISQQVRRNKGALSAAWIDYKKAYDSVPHSWLERILELYQIDATLKSFLGACMRQWTTVLRQPGGGNGSSDSQDLIRIERGIFQGDSLSPSWFCLALNPLSTLLKDSGLGYRLRRGGEVISHLLYMDDLKLFAPKHQDLLELLKTTQVFSSAISMEFGVDKCAVMRVQRGKVVNSPDLQLSEIMTLRSLSEAETYKYLGMSESLGISVVDIKKSVKERFFCRLTKVLNSLLSGGNKARAFNGWVMPLLIYSFGILRWTQTELDALDRRVRQLLTVHRMLHPRSSVMRLYIPRKWGGRGFLNAKNLHNREVCSLRDYFLNNECGMHRDVVTVDKGLTPLSLANENWRTPSVLSTDDRKEVWKSKELHGRFYRVLSGPDVDLLASVNWLRFGDLFGETEGFACAIADEVIKTNNYRKYIMKDGTVDICRACHRPGESLRHIISGCSHLANGEYLHRHNQVARIIHQQLALQYGLVESEVPYYKYAPAPVLENGRALLYWDRSIITDRTIVANKPDIVMVDRSQRRAVLVDVTIPHDENLVKAEKDKLSKYLDLAFEITAMWDVDSTIIVPIVVSANGLIAKSLDQYLKRLSLDGWVKGQIQKAVVLDTARIVRRFLTLQP

SEQ ID NO: 5253 - protein, 1215 aa, Erannis defoliaria
MITRSKSTQAGNDNNARPPPPPAPSSPSASSGDDEFHTPRESSASSSGSDVSGPRTPAPRPPARRGRPPLPARLGPAGQPASRPALAAGGVVRRMRWSQINNENCMRAYYGATEGGINLSAYRVRMLPLFQALEPTVTVSAQRLSDQVRAIQRLNLLDQSLLDRLRLEAHSARPTPASTRDSHVASSAPTLASVPTSAATLATPADPVVDEGDCTSMIVSSQVSEQLRRTLEDAIGQYRFALNSRPRLPRLPTHRRNLALMGALNALLAPYLRASEDLTDTHSILYCGAIAACRVARVKFPDTNRAPRPAGDVPAWQLRIERRISTFRTLIAKLICFSRGNNRPRVMRFVTQAFAGTGIRPQQYMANVTERIDYLKQKVYAWANRIRRYRERVDRYWQNRLFQSDQRKVYRNWEGNEQRVSDGQLPDASAMTNFWRGIWSVPVEHTEGDWMRVVERECESIEPMGSILIDPVDVSCAIRTAQNWKSPGPDGLHNFWIKWFRCSHDRLATQFQEALELGSLPSFMTTGVTFLLHKSGSTTEPKNYRPITCLPTIYKLLASILSTKINAHIVANNVLAPAQNGCRVGSRGTKELLLIDMAISQQVRRNKGALSAAWIDYKKAYDSVPHSWLERILELYQIDATLKSFLGACMRQWTTVLRQPGGGNGSSDSQDLIRIERGIFQGDSLSPSWFCLALNPLSTLLKDSGLGYRLRRGGEVISHLLYMDDLKLFAPKHQDLLELLKTTQVFSSAISMEFGVDKCAVMRVQRGKVVNSPDLQLSEIMTLRSLSEAETYKYLGMSESLGISVVDIKKSVKERFFCRLTKVLNSLLSGGNKARAFNGWVMPLLIYSFGILRWTQTELDALDRRVRQLLTAHRMLHPRSSVMRLYIPRKWGGRGFLNAKNLHNREVCSLRDYFLNNECGMHRDVVTVDKGLTPLSLANENWRTPSVLSTDDRKEVWKSKELHGRFYRVLSGPDVDLLASVNWLRFGDLFGETEGFACAIADEVIKTNNYRKYIMKDGTVDICRACHRPGESLRHIISGCSHLANGEYLHRHNQVARIIHQQLALQYGLVESEVPYYKYAPAPVLENGRALLYWDRSIITDRTIVANKPDIVMVDRSQRRAVLVDVTIPHDENLVKAEKDKLSKYLDLAFEITAMWDVDSTIIVPIVVSANGLIAKSLDQYLKRLSLDGWVKGQIQKAVVLDTARIVRRFLTLQP

SEQ ID NO: 5254 - protein, 1215 aa, Biston betularia
MWTRSRTAAASGLHDAHIPSPPAPSTPSASSGDEEFATPLATSASSSSSDVSGPRTPAPPPPARRGRPPLPARLGPAGQSASRSALAAGGVVRRMRWSQTNNENCMRAYYGATEGGINLSAYRVRMLPLFQALEPTVAVSTQRLSDQVRAIQRLQLLDQSVLDRLRLEALPARPTPVSTRDSPVASSAPTLVSVPTSMATLATPTDPVVDVGECTSMAVCSQVSEHLRRTLEDAICQYRFAPDSRPRLPRLPTHRRNLALMGALNALLAPYLRASEDLTDTHSILYCGAIAACRVARVKFPDTNRAPRPAGGVPAWQLRIERRISTFRTLIAKLICFSRGNNRPRVIRFVTQAFAGTDIRPQHYLASVTERIDYLKQKVYAWANRIRRYRERADRYWQNRVFQSDQRKVYRDWEGTGQRVSDRQLPDTSVMTEFWRGIWSLPVEHTEGDWMRVVERECESIESMGSVLIDPVDVSCAIRTAQNWKSPGPDGLHNFWIKWIRCSHDRLATQFQEALELGSLPCFMTTGVTFLLHKTGSTTEAKNYRPITCLPTIYKLLTSILRTKINAHVVANNVLAPAQNGCRVGSRGTKELLLIDMTISQQVRRNKGALSTAWIDYKKAYDSVSHSWLERVLELYKIDTTLKSFLGACMRQWTTVLRQPGSGDGSSEPQDLIRIERGIFQGDSLSPLWFCLALNPLSTLLKESGLGHRLRRGGEVISHLLYMDDLKLFAPKRPDLMELLKTTQVFSNAIKMEFGVDKCAVMHVQRGEVVNCPDLQLSETMTFRSLSEAETYKYLGMSESLGIAVVDIKRSVKERFFCRLTKVLNSFLSGGNKVRAFNGWVMPLLIYSFGILRWTQTELDALDRRVRQQLTTHRMLHPRSSVMRLYIPRKLGGRGFLSAKNLHNREVCSLRDYFRDNECGMHRDVVAVDKGLTPLSLANENWRKPSVLSTEDRKEVWKSKQLHGRFYRVLTGPDVDMLASVNWLRFGDLFGETEGFACAIADEVIKTNNYRKYIMKDGTVDICRACHRPGESLRHIISGCSHLANGEYLHRHNQVARIIHQQLALQYGLVESEVPYYKYAPAPVLENGRALLYWDRSIITDRTIVANKPDIVVVDRAQRRAVLVDITIPHDENLVKAEKDKLSKYLDLAHEITAMWDVDSTIIVPIVVTVNGLIAKSLDQHLKRLSLDGWVKGQLQKAVILDTARIVRRFLTLQP

SEQ ID NO: 5255 - protein, 869 aa, Biston betularia
MRFVTQAFAGTDIRPQHYLASVTERIDYLKQKVYAWANRIRRYRERADRYWQNRVFQSDQRKVYRDWEGTGQRVSDRQLPDTSVMTEFWRGIWSLPVEHTEGDWMRVVERECESIESMGSVLIDPVDVSCAIRTAQNWKSPGPDGLHNFWIKWIRCSHDRLATQFQEALELGSLPCFMTTGVTFLLHKTGSTTEAKNYRPITCLPTIYKLLTSILRTKINAHVVANNVLAPAQNGCRVGSRGTKELLLIDMTISQQVRRNKGALSTAWIDYKKAYDSVPHSWLERVLELYKIDTTLKSFLGACMRQWTTVLRQPGSGDGSSEPQDLIRIERGIFQGDSLSPLWFCLALNPLSTLLKESGLGHRLRRGGEVISHLLYMDDLKLFAPKRPDLMELLKTTQVFSNAIKMEFGVDKCAVMHVQRGEVVNCPDLQLSETMTFRSLSEAETYKYLGMSESLGIAVVDIKRSVKERFFCRLTKVLNSFLSGGNKVRAFNGWVMPLLIYSFGILRWTQTELDALDRRVRQQLTTHRMLHPRSSVMRLYIPRKLGGRGFLSAKNLHNREVCSLRDYFRDNECGMHRDVVAVDKGLTPLSLANENWRKPSVLSTEDRKEVWKSKQLHGRFYRVLTGPDVDMLASVNWLRFGDLFGETEGFACAIADEVIKTNNYRKYIMKDGTVDICRACHRPGESLRHIISGCSHLANGEYLHRHNQVARIIHQQLALQYGLVESEVPYYKYAPAPVLENGRALLYWDRSIITDRTIVANKPDIVVVDRAQRRAVLVDITIPHDENLVKAEKDKLSKYLDLAHEITAMWDVDSTIIVPIVVTVNGLIAKSLDQHLKRLSLDGWVKGQLQKAVILDTARIVRRFLTLQP

SEQ ID NO: 5256 - protein, 1215 aa, Biston betularia
MWTRSRTAAASGLHDAHIPSPPAPSTPSASSGDEEFATPLATSASSSSSDVSGPRTPAPPPPARRGRPPLPARLGPAGQSASRSALAAGGVVRRMRWSQTNNENCMRAYYGATEGGINLSAYRVRMLPLFQALEPTVAVSTQRLSDQVRAIQRLQLLDQSVLDRLRLEALPARPTPVSTRDSPVASSAPTLVSVPTSMATLATPTDPVVDVGECTSMGVCSQVSEHLRRTLEDAICQYRFAPDSRPRLPRLPTHRRNLALMGALNALLAPYLRASEDLTDTHSILYCGAIAACRVARVKFPDTNRAPRPAGGVPAWQLRIERRISTFRTLIAKLICFSRGNNRPRVMRFVTQAFAGTGIRPQHYLASVTERIDYLKQKVYAWANRIRRYRERADRYWQNRVFQSDQRKVYRDWEGTGQRVSDRQLPDTSVMTEFWRGIWSLPVEHTEGDWMRVVERECESIESMGSVLIDPVDVSCAIRTAQNWKSPGPDGLHNFWIKWIRCSHDRLATQFQEALELGSLPCFMTTGVTFLLHKTGSTTEAKNYRPITCLPTIYKLLASILRTKINAHVVANNVLAPAQNGCRVGSRGTKELLLIDMTISQQVRRNKGALSTAWIDYKKAYDSVPHSWLERVLELYKIDTTLKSFLGACMRQWTTVLRQPGSGDGSPEPQDLIRIERGIFQGDSLSPLWFCLALNPLSTLLKESGLGHRLRRGGEVISHLLYMDDLKLFAPKRPDLMELLKTTQVFSNAIKMEFGVDKCAVMHVQRGEVVNCPDLQLSETMTFRSLSEAETYKYLGMSESLGIAVVDIKRSVKERFFCRLTKVLNSFLSGGNKVRAFNGWVMPLLIYSFGILRWTQTELDALDRRVRQQLTTHRMLHPRSSVMRLYIPRKLGGRGFLSAKNLHNREVCSLRDYFRDNECGMHRDVVAVDKGLTPLSLANENWRKPSVLSTEDRKEVWKSKQLHGRFYRVLTGPDVDMLASVNWLRFGDLFGETEGFACAIADEVIKTNNYRKYIMKDGTVDICRACHRPGESLRHIISGCSHLANGEYLHRHNQVARIIHQQLALQYGLVESEVPYYKYAPAPVLENGRALLYWDRSIITDRTIVANKPDIVVVDRAQRRAVLVDITIPHDENLVKAEKDKLSKYLDLAHEITAMWDVDSTIIVPIVVTVNGLIAKSLDQHLKRLSLDGWVKGQLQKAVILDTARIVRRFLTLQP

SEQ ID NO: 5257 - protein, 1213 aa, Biston betularia
MWTCSRAAAGLRDAQVPSPPAPSTPSTSSGDEEFATPLATSASSSSSDVSGPRTPAPPPPARRGRPPLPARLGPAGQSASRSALAAGGVVRRMRWSQTNNENCMRAYYGATEGGINLSAYRVRMLPLFQALEPTVAVSTQRLSDQVRAIQRLQLLDQSVLDRLRLEALPARPTPVSTRDSPVASSAPTLVSVPTSMATLATPTDPVVDVGECTSMGVCSQVSEHLRRTLEDAICQYRFAPDSRPRLPRLPTHRRNLALMGALNALLAPYLRASEDLTDTHSILYCGAIAACRVARVKFPDTNRAPRPAGGVPAWQLRIERRISTFRTLIAKLICFSRGNNRPRVMRFVTQAFAGTDIRPQHYLASVTERIDYLKQKVYAWANRIRRYRERADRYWQNRVFQSDQRKVYRDWEGTGQRVSDRQLPDTSVMTEFWRGIWSLPVEHTEGDWMRVVERECESIESIGSVLIDPVDVSCAIRTAQNWKSPGPDGLHNFWIKWIRCSHDRLATQFQEALELGSLPCFMTTGVTFLLHKTGSTTEAKNYRPITCLPTIYKLLTSILRTKINAHVVANNVLAPAQNGCRVGSRGTKELLLIDMTISQQVRRNKGALSTAWIDYKKAYDSVPHSWLERVLELYKIDTTLKSFLGACMRQWTTVLRQPGSGDGSSEPQDLIRIERGIFQGDSLSPLWFCLALNPLSTLLKESGLGHRLRRGGEVISHLLYMDDLKLFAPKRPDLMELLKTTQVFSNAIKMEFGVDKCAVMHVQRGEVVNCPDLQLSETMTFRSLSEAETYKYLGMSESLGIAVVDIKRSVKERFFCRLTKVLNSFLSGGNKVRAFNGWVMPLLIYSFGILRWTQTELDALDRRVRQQLTTHRMLHPRSSVMRLYIPRKLGGRGFLSAKNLHNREVCSLRDYFRDNECGMHRDVVAVDKGLTPLSLANENWRKPSVLSTEDRKEVWKSKQLHGRFYRVLTGPDVDMLASVNWLRFGDLFGETEGFACAIADEVIKTNNYRKYIMKDGTVDICRACHRPGESLRHIISGCSHLANGEYLHRHNQVARIIHQQLALQYGLVESEVPYYKYAPAPVLENGRALLYWDRSIITDRTIVANKPDIVVVDRAQRRAVLVDITIPHDENLVKAEKDKLSKYLDLAHEITAMWDVDSTIIVPIVVTVNGLIAKSLDQHLKRLSLDGWVKGQLQKAVILDTARIVRRFLTLQP

SEQ ID NO: 5258 - protein, 1207 aa, Blastobasis lacticolella
MITRSKRKNQTVNAQPPPTPAPVSSSPSSSNDEFTTASDTSESSDERGLSAAPPPPPARRGRPLPARLGPTGRPAPPMAPATGSVVRRMRWTQSINENVMRAYYGATEGGTNLSAYRDRMLPLFQVLEPAIDVTAQRLSDQVRAIQRLKRLDDSVLDRLRLESLPVRAVPISTMSLPATSPPQVSPPSPAPRVPRTDATVGVEDCTNVSSVSTETNEYVRRTLEETIARYRFAPNSRPRLPHLPTNRRNLALMGAINVLLDSYIRASDNLVDTHSIMYCGAITACRVARVKFSDADRAPRVAGGAPAWQKRIERRINTFRTLIAKLICFKEGNNRPRVMRFVDQAFAGTGISSRDYMACATERIDFLKQKVCAWANRIRRYRERVDRFRLNRLFQSDQRKVYRKWEGTNQSGSDGSLPDASASNNFWRSIWSVPVEHSEGDWMNVVKRECEIIEPMAAVSICPEDVSCAIDTAQNWKCPGPDGLHNFWIKWFRCSHERLATQFQEALEHGSLPTLFTTGITFLLYKSGSTTEAKNYRPITCLPTLYKLLTSILRKKINNHIIENNILAMSQNGCRVGSRGTKELLLIDMTICQQVRRSRRSLSAAWIDYKKAYDSVPHSWLRRVLELYKINATLRSFLDACMRQWITVLSQPVGGIDHSPPQDFIRIERGIFQGDSLSPLWFCLALNPLSTLLKHSELGCRLRREGEIISHLLYMDDLKLFAPKRQDLMELLKITEIFSNAIRMEFGADKCAVMHVQRGKVANTTNLQLSETMSFRSLSEAETYKYLGMSQSLGIVDEGVKQAVKERFFCRLTKVLNSLLSGGNKVRSFNAWVMPLLTYSFGILRWTQTELDALDRRVRLLLTTHRMLHPRSSVMRLYIPRKCGGRGFLSAKTLHNREVCSLRDYFLNNECGMHRAVVAVDRGLTPLSLANENWRKPKVLSTIDRKDVWKSKELHGRFYRALTGPDVDLLASVNWLRFGDLFGETEGFVCAIADEVIMTNNYRRYILKDGTVDICRACRCPGESLRHITSGCGRLANGEYLHRHNLVARIIHQQLALQYGLVESEVPYYKYVPAPVLENGLATLYWDRSVITDRTIVANRPDIVLTDRSKRRAVLVDVTIPHDGNLVKAEKDKQCKYLDLAHEVTAMWDVDSTIIVPIVVSVNGLIAKSLDQHLKSLSLDGWVKGQIQKAVLLETARIVRRFLSLQP

SEQ ID NO: 5259 - protein, 1207 aa, Blastobasis lacticolella
MITRSKRKNQTVNAQPPPTPAPVSSSPSSSNDEFTTASDTSESSDERGLSAAPPPPPARRGRPLPARLGPTGRPAPPMAPATGSVVRRMRWTQSINENVMRAYYGATEGGTNLSAYRDRMLPLFQVLEPAIDVTAQRLSDQVRAIQRLKRLDDSVLDRLRMESLPVRAVPISTMSLPATSPPQVSPLSPAPRVPRTDATVGVEDCTNVSSVSTETNEYVRRTLEETIARYRFAPNSRPRLPRLPTNRRNLALMGAINVLLDSYIRASDNLVDTHSIMYCGAITACRVARVKFSDADRAPRVAGGAPAWQKRIERRINTFRTLIAKLICFKEGNNRPRVMRFVDQAFAGTGISSRDYMACATERIDFLKQKVCAWANRIRRYRERVDRFRLNRLFQSDQRKVYRKWEGTNQSGSDGSLPDASASNNFWRSIWSVPVEHSEGDWMNVVKRECEIIEPMAAVSICPEDVSCAIDTAQNWKCPGPDGLHNFWIKWFRCSHERLATQFQEALEHGSLPTLFTTGITFLLYKTGSTTEAKNYRPITCLPTLYKLLTSILRKKINNHIIENNILAMSQNGCRVGSRGTKELLLIDMTICQQVRRSRGSLSAAWIDYKKAYDSVPHSWLRRVLELYKINATLRSFLDACMRQWITVLSQPVGGIDHSPPQDFIRIERGIFQGDSLSPLWFCLALNPLSTLLKHSELGCRLRREGEIISHLLYMDDLKLFAPKRQDLMELLKITEIFSNAIRMEFGADKCAVMHVQRGKVANTTNLQLSETMSFRSLSEAETYKYLGMSQSLGIVDKGVKQAVKERFFCRLTKVLNSLLSGGNKVRSFNAWVMPLLTYSFGILRWTQTELDALDRRVRLLLTTHRMLHPRSSVMRLYIPRKCGGRGFLSAKTLHNREVCSLRDYFLNNECGMHRAVVAVDRGLTPLSLANENWRKPKVLSTIDRKDVWKSKELHGRFYRALTGPDVDLLASVNWLRFGDLFGETEGFVCAIADEVIMTNNYRRYILKDGTVDICRACRCPGESLRHITSGCGRLANGEYLHRHNLVARIIHQQLALQYGLVESEVPYYKYVPAPVLENGLATLYWDRSVITDRTIVANRPDIVLTDRSKRRAVLVDVTIPHDGNLVKAEKDKQCKYLDLAHEVTAMWDVDSTIIVPIVVSVNGLIAKSLDQHLKSLSLDGWVKGQIQKAVLLETARIVRRFLSLQP

SEQ ID NO: 5260 - protein, 1207 aa, Apotomis turbidana
MITRSRRKKAEQTNARPPPPPASSSSSPSSSGDEFATAADTSESSDERGPPPPPPQPPARRGRPQLPARLGPTGQPAPTTAPATGGVVRRMRWTRVMNENCMRAYYGATEGGINLSAYRDRMLPLFQVFDPTIAVSAQRLSDQVRFIQRRKLLDDATLDRLRLEVLAARAASVPARDPPATSPVPAPAPNLVPGVPLTDPEADVEDYASSVSTQANEQLRRALEEAIGRYRFAPEPRPRLPRLPIHKRNLALMGALDALLDPYLRASEDLADTHSIMYCGAIAACRVARVRFPDTDRAPRTARGVPAWQVRIERRISSFRTLIAKLICFRGGNNRPRVMRYVTQAFAGTGTRPCDYMACVTERIDYLKQKVYAWASRIRRYRERVDRFQQNRLFQSDQRKVYRKWEGADQCVSDGQLPDPTAMINFWRSIWSVPVEHTEGEWMNVVRRECEPIEAMGAVTISPDDVRCAARTIQNWKSPGPDGLHNFWIKWFRSSHERLATQFQDALELGSLPSFMTTGVTFLLHKSGSTTEAKNYRPITCLPTLYKLLTSILRTKINTHIVANNVLAFSQNGCRVGSRGTKELLLIDTTICQQVRRNRGSLSTAWIDYKKAYDSVPHSWLERILELYKIDTALRSLLGACMRQWTTVLRQPGGGDGPPGPQDLIRIERGIFQGDSLSPLWFCLALNPLSTLLKDSGLGCRLRRGGEVISHLLYMDDLKLYAPKRQDLVELLEVTEAFSSAIKMEFGVDKCAVMHVQRGKVVNSANLQLSETMSLRSISEVETYKYLGMSQSLGIADGDIRQALKERFFCRLTKVLNSLLSGGNKARAFNAWVMPLLTYSFGILRWTQTELDALDTRVRQLLTTHRMRHPRSSVMRMYIPRKCGGRGFLNAKDLHNREVCSLREYFLNNECGIHRDVVAVDKGLTSLSLANENWRRPKVLSTDDRRAVWKSKELHGRFYKALTGPDVDLLASVNWLRFGDLFGETEGFVCAIADEVMMTNNYRRYILKDGTVDICRACRRPGESLRHIISGCSHLANGEYLHRHNQVARIIHQQLALRYGLVGSEVPYYKYAPMPVLENGRATLYWDRSIITDRTIVANKPDIVLVDRSKRQAVLVDITIPHDENLVKAEKDKLSKYLDLAHEVTAMWDVDSTSIVPIVVSANGLIAKSLDKHLKRLSLDGWIKGQIQKAVLLDTARIVRRFLSLQP

SEQ ID NO: 5261 - protein, 1207 aa, Apotomis turbidana
MITRSRRKKAEQTNARPPPPPASSSSSPSSSGDEFATAADTSESSDERGPPPPPPQPPARRGRPQLPARLGPTGQPAPTTAPATGGVVRRMRWTRVMNENCMRAYYGATEGGINLSAYRDRMLPLFQVFDPTIAVSAQRLSDQVRFIQRRKLLDDATLDRLRLEVLAARAASVPARDPPATSPVPAPAPNLVPGVPLTDPEADVEDYASSVSTQANEQLRRALEEAIGRYRSAPEPRLRLPRLPIHKRNLALMGALDALLDPYLRASEDLADTHSIMYCGAIAACRVARVRFPDTDRAPRTARGVPAWQVRIERRISSFRTLIAKLICFRGGNNRPRVMRYVTQAFVGTGTRPCDYMACVTERIDYLKQKVYAWASRIRRYRERVDRFQQNRLFQSDQRKVYRKWEGADQCVSDGQLPDPTAMINFWRSIWSVPVEHTEGEWMNVVRRECEPIEAMGAVTISPDDVRCAARTIQNWKSPGPDGLHNFWIKWFRSSHERLATQFQDALELGSLPSFMTTGVTFLLHKSGSTTEAKNYRPITCLPTLYKLLTSILRTKINTHIVANNVLAFSQNGCRVGSRGTKELLLIDTTICQQVRRNRGSLSTAWIDYKKAYDSVPHSWLERILELYKIDTALRSLLGACMRQWTTVLRQPGGGDGPPGPQDLIRIERGIFQGDSLSPLWFCLALNPLSTLLKDSGLGCRLRRGGEVISHLLYMDDLKLYAPKRQDLVELLEVTEAFSSAIKMEFGVDKCAVMHVQRGKVVNSANLQLSETMSLRSISEVETYKYLGMSQSLGIADGDIRQALKERFFCRLTKVLNSLLSGGNKARAFNAWVMPLLTYSFGILRWTQTELDALDTRVRQLLTTHRMRHPRSSVMRMYIPRKCGGRGFLNAKDLHNREVCSLREYFLNNECGIHRDVVAVDKGLTSLSLANENWRRPKVLSTDDRRAVWKSKELHGRFYKALTGPDVDLLASVNWLRFGDLFGETEGFVCAIADEVMMTNNYRRYILKDGTVDICRACRRPGESLRHIISGCSHLANGEYLHRHNQVARIIHQQLALRYGLVGSEVPYYKYAPMPVLENGRATLYWDRSIITDRTIVANKPDIVLVDRSKRQAVLVDITIPHDENLVKAEKDKLSKYLDLAHEVTAMWDVDSTSIVPIVVSANGLIAKSLDKHLKRLSLDGWIKGQIQKAVLLDTARIVRRFLSLQP

SEQ ID NO: 5262 - protein, 1207 aa, Apotomis turbidana
MITRSRRKKAEQTNARPPPPPASSSSSPSSSGDEFATAADTSESSDERGPPPPPPQPPARRGRPQLPARLGPTGQPAPTTAPATGGVVRRMRWTRVMNENCMRAYYGATEGGINLSAYRDRMLPLFQVFDPTIAVSAQRLSDQVRFIQRRKLLDDATLDRLRLEVLAARAASVPARDPPATSPVPAPAPNLVPGVPLTDPEADVEDYASSVSTQANEQLRRALEEAIGRYRSAPEPRPRLPRLPIHKRNLALMGALDALLDPYLRASEDLADTHSIMYCGAIAACRVARVRFPDTDRAPRTAGGVPAWQVRIERRISSFRTLIAKLICFRGGNNRPRVMRYVTQAFAGTGTRPCDYMACVTERIDYLKQKVYAWASRIRRYRERVDRFQQNRLFQSDQRKVYRKWEGADQCVSDGQLPDPTAMINFWRSIWSVPVEHTEGEWMNVVRRECEPIEAMGAVTISPDDVRCAARTIQNWKSPGPDGLHNFWIKWFRSSHERLATQFQDALELGSLPSFMTTGVTFLLHKSGSTTEAKNYRPITCLPTLYKLLTSILRTKINTHILANNVLAFSQNGCRVGSRGTKELLLIDTTICQQVRRNRGSLSTAWIDYKKAYDSVPHSWLERILELYKIDTALRSLLGACMRQWTTVLRQLGGGDGPPGPQDLIRIERGIFQGDSLSPLWFCLALNPLSTLLKDSGLGCRLRRGGEVISLLLYIDDLKLYAPKRQDLVELLEVTEAFSSAIKMEFGVDKCAVMHVQRGKVVNSANLQLSEIMSLRSISEVETYKYLGMSQSLGIADGDIRQALKERFFCRLTKVLNSLLSGGNKARAFNAWVMPLLTYSFGILRWTQTELDALDTRVRQLLTTHRMRHPRSSVMRMYIPRKCGGPGFLNAKDLHNREVCSLREYFLNNECGIHRDVVAVDKGLTSLSLANENWRRPKVLSTDDRRAVWKSKELHGRFYKALTGPDVGLLASVNWLRFGDLFGETEGFVCAIADEVMMTNNYRRYILKDGTVDICRACRRPGESLRHIISGCSHLANGEYLHRHNQVARIIHQQLALRYGLVGSEVPYYKYAPMPVLENCRATLYWDRSIITDRTIVANKPDIVLVDRSKRQAVLVDITIPHDENLVKAEKDKLSKYLDLAHEVTAMWDVDSTSIVPIVVSANGLIAKSLDKHLKRLSLDGWIKGQIQKAVLLDTARIVRRFLSLQP

SEQ ID NO: 5263 - protein, 1206 aa, Notocelia uddmanniana
MNTRLRSRAEQRARLPSPPAPSSSSPSSSDDEFATAPDSSESSSDERGPSPPPPQTSARRGRRPLPARLGPTGHSAPPTAPAAGGVVRRMRWTQEMNENCMRAYFGATEGETNLSAYRVRMLPLFQALEPTITVSAQRLSDQVRVIQRNKRLDDLTLDRLRLEALSARAAPTSARDLPATSPAPVPAPNTAPRAPRVDPSADGDCADQSVSTQAHEQLRRALDEAITRYRSTPNSRPRLPRLPVNRRNLALMGALNDLLDPYLRASDDLIDTHSIMYCGAIAACRVARVKFPDADRATRTAGGVPAWQVRIERRINTFRTLIAKLICFRGGNNRPRVMRFVNQAFAGTGVRPRDYMACVTERIDFLKQKVYAWASRIRRYRERVDRYQQNRLFQSDQRKVYRKWEGTDHRVCDGQRPDATAMVNFWRSIWSVPVEHTEGAWIGVVERDCESIEPMGSVTISPEDVSCAIRTAPNWKSPGPDGLHNFWLKWFRCSHERLATQFQQALELGSLPPPLTTGVTSLLYKSGSTTEAKNYRPITCLPTLYKLLTSILRAKINTHIVTNNILAPAQNGCWVGSRGTKELLLIDMTICQRVRRNRGTLSASWIDYKKAYDSVPHSWLRRILELYKVDAALRSFLSACMGQWTTVLRQPGGGDGPSGPQDSIRIERGIFQGDSLSPLWFCLALNPLSTLLQDSGLGCQLRRGGEVISHLLYMDDLKLFAPNRQDLLELLKTTEVFSSAIKMEFGVDKCAVMHVQRGKVVNSTNLQLSETMSLRSLSEAETYKYLGMSQALGIEGEGIKQAVKERFFCRLTKVLNSFLSGGNKARAFNAWVMPLLTYSFGILRWTQTELDALDRRVRVLLTAHRMLHPRSSVMRLYIPRKCGGRGFLNAKDLHNREVCSLRDYFLNGECGMHRDVVAVDASFTPLSMANENWRRFKVLSAEDRKAEWKSKELHGRFYRALTGPDVDLLASVNWLRFGDLFGETEGFLCAIADEVIMTNNYRKYILKDGTVDICRACRRPGESLRHIISGCSHLANGEYLHRHNLVARIIHQQLALSYGLVDFEVPYYKYLPAPVLENGRATLYWDRSIITDRTIVANKPDIVLIDRSKRQAVLVDITIPHDENLVKAEKDKVSKYLDLAHEVTAMWDVDSTIIVPIVVSANGLIAKSLDQHLKRLSLDGWVKGQIQKAVLLDTARIVRRFLSLSP

SEQ ID NO: 5264 - protein, 1206 aa, Notocelia uddmanniana
MITRTRSRAAQRARPPSPPAPSSSSPSSSGDEFATAPDTSESSCDERGPPSPPPRPPARRGRPPLPARLGPVGHSALPTAPAAGGVVRRMRWTQEMNENCMRAYFGATEGETNLSAYRVRMLPLFQALEPTITVTAQRLSDQVRVIQRLKRLDDATLDRLRLEALSARTASALARDPPATSPAPVPTPDMAPGVPRVDPSVDEDCANQTVSTQANEQLRRALEEAITRYRSTPNSRPRLPRLPVNRRNLALMGALNDLLDPYLRASEDLIDTHSILYCGAIAACRVARVKFPDADRAPRTAGGVPAWQVRIERRINTFRTLIAKLICFRGGNDRPRVMRFVNQAFAGTGVRPRDYVTCVTERIDFLKQKVYAWASRIRRYRERVDRYQQNRLFQSDQRKVYRKWEGTDHRVCDGQRPDATAMGNFWRSIWSVPVEHTEGAWIGVVERECESIEPMGSVTISPEDISCAIRTAPNWKSPGPDGLHNFWLKWFRCSHERLATQFQQALELGSLPHLLTTGVTSLLYKSGSTTEAKNYRPITCLPTLYKLLTSILRAKINTHIVANNILAPAQNGCRAGSRGTKELLLIDMTICQRVRRSRGALSAAWIDYKKAYDSVPHSWLRRILELYKVDAALRSFLSACMGQWTTVLRQPGGGDGSSGPQDSIRIERGIFQGDSLSPLWFCLALNPLSTLLKDSGLGCQLRRGGEVISHLLYMDDLKLFAPNRQDLLELLKTTEVFSSAIKMEFGVDKCAVMHVQRGKVVNSTNLQLSETMSLRSLSEAETYKYLGMSQSLGIEGEGIKQAMKERFFCRLTKVLNSFLSGGNKVRAFNAWVMPLLTYSFGILRWTQTELDALDRRVRVLLTAHRMLHPRSSVMRLYIPRKCGGRGFLNAKDLHNREVCSLRNYFLNSECGMHRDVVAVDASFTPLSMANENWRRFKVLSTEDRKAEWKSRELHGRFYKALTGPDVDLLASVNWLRFGDLFGETEGFVCAIADEVIMTNNYWRYILKDGTADICRACRRPGESLRHIISGCGHLANGEYLHRHNLVARIIHQQLALSYGLVNFEVPYYKYLPAPVLENGRATLYWDRSIITDRTIVANKPDIVLIDRSKRQAVLVDITIPHDENLVKAEKDKVSKYLDLAYEVTAMWDVDSTIIVPIVVSANGLIAKSLDQHLKRLSLDGWVKGQIQKAVLLDTARIVRRFLSLSP

SEQ ID NO: 5265 - protein, 1206 aa, Notocelia uddmanniana
MITRTRSRAAQRARPPSPPAPSSSSPSSSGDEFATAPDTSESSCDERGPPSPPPRPPARRGRPPLPARLGPVGHSVLPTAPAAGGVVRCMRWTQEMNENCMRAYFGATEGETNLSAYRVRMLPLFQALEPTITVTAQRLSDLVRVIQRLKRLDDATLDRLRLEALSARTASALARDPPATSPAPVPTPDMAPGVPRVDPSVDEDCANQTVSTQTNEQLRRALEEAITRYRSTPNSRPRLPRLPVNRRNLALMGALNDLLDPYLRASEDLIDTHSILYCGAIAACRVARVKFPDADRAPRTAGGVPAWQVRIERRINTFRTLIAKLICFRGGNDRPRVMRFVNQAFAGTGVRPRDYVTCVTERIDFLKQKVYAWASRIRRYRERVDRYQQNRLFQSDQRKVYRKWEGTDHRVCDGQRPDATAMGNFWRSIWSVPVEHTEGAWIGVVERECESIEPMGSVTISPEDISCAIRTAPNWKSPGPDGLHNFWLKWFRCSHERLATQFQQALELGSLPHLLTTGVTSLLYKSGSTTEAKNYRPITCLPTLYKLLTSILRAKINTHIVANNILAPAQNGCRVGSRGTKELLLIDMTICQRVRRSRGALSAAWIDYKKAYDSVPHSWLRRILELYKVDAALRSFLSACMGQWTTVLRQPGGGDGSSGPQDSIRIERGIFQGDSLSPLWFCLALNPLSTLLKDSGLGCQLRRGGEVISHLLYMDDLKLFAPNRQDLLELLKTTEVFSSAIKMEFGVDKCAVMHVQRGKVVNSTNLQLSETMSLRSLSEAEIYKYLGMSQSLGIEGEGIKQAVKERFFCRLTKVLNSFLSGGNKVRAFNAWVMPLLTYSFGILRWTQTELDALDRRVRVLLTTHRKLHPRSSVMRLYIPRKCGGRGFLNAKDLHNREVCSLRDYFLNSECGMHRDVVAVDASFTPLSMTNENWRRFKVLSTEDRKAEWKSRELHGRFYKALTGPDVDLLASVNWLRFGDLFGETEGFVCAIADEVIMTNNYRKYILKDGTVDICRACRRPGESLRHIISGCGHLANGEYLHRHNLVARIIHQQLALSYGLVNFEVPYYKYLPAPVLENGRATLYWDRSIITDRTIVANKPDIVLIDRSKRQAVLVDITIPHDENLVKAEKDKVSKYLDLAHEVTAMWDVDSTIIVPIVVSANGLIAKSLDQHLKRLSLDGWVKGQIQKAVLLDTARIVRRFLSLSP

SEQ ID NO: 5266 - protein, 1095 aa, Notocelia uddmanniana
MNENCMRAYFGATEGETNLSAYRVRMLPLFQALEPTITVSAQRLSDQVRVIQRNKRLDDFTLDRLRLEALSARAAPTSARDLPATSPAPVPAPNTAPRAPRVDPSADGDCADQSVSTQAHEQLRRALDEAITRYRSTPNSRPRLPRLPVNRRNLALMGALNDLLDPYLRASDDLIDTHSIMYCGAIAACRVARVKFPDADRATRTAGGVPAWQVRIERRINTFRTLIAKLICFRGGNNRPRVMRFVNQAFAGTGVRPRDYMACVTERIDFLKQKVYAWASRIRRYRERVDRYQQNRLFQSDQRKVYRKWEGTDHRVCDGQRPDATAMVNFWRSIWSVPVEHTEGAWIGVVERDCESIEPMGSVTISPEDVSCAIRTAPNWKSPGPDGLHNFWLKWFRCSHERLATQFQQALELGSLPPPLTTGVTSLLYKSGSTTEAKNYRPITCLPTLYKLLTSILRAKINTHIVTNNILAPAQNGCRVGSRGTKELPLSASWIDYKKAYDSVPHSWLRRILELYKVDAALRSFLSACMGQWTTVLRQPGGGDGPSGPQDSIRIERGIFQGDSLSPLWFCLALNPLSTLLQDSGLGCQLRREGEVISHLLYMDDLKLFAPNRQDLLELLKTTEVFSSAIKMEFGVDKCAVMHVQRGKVVNSTNLQLSETMSLRSLSEAETYKYLGMSQALGIEGEGIKQAVKERFFCRLTKVLNSFLSGGNKARAFNAWVMPLLTYSFGILRWTQTELDALDRRVRVLLTAHRMLHPRSSVMRLYIPRKCGGRGFLNAKDLHNREVCSLRDYFLNSECGMHRDVVAVDASFTPLSMANENWRRFKVLSTEDRRAEWKSKELHGRFYRALTGPDVDLLASVNWLRFGDLFGETEGFVCAIADEVIMTNNYRKYILKDGTVDICRACRRPGESLRHIISGCSHLANGEYLHRHNLVARIIHQQLALSYGLVDFEVPYYKYLPAPVLENGRATLYWDRSIITDRTIVANKPDIVLIDRSKRQAVLVDITIPHDENLVKAEKDKVSKYLDLAHEVTAMWDVDSTIIVPIVVSANGLIAKSLDQHLKRLSLDGWVKGQIQKAVLLDTARIVRRFLSLSP

SEQ ID NO: 5267 - protein, 1144 aa, Notocelia uddmanniana
MITRSKARLEKKASNPQSARPPPSPASSSSASSSEEFATAPDTSSSSSSDECGPPPPPPRPPARRGRPPLPARLGPAGHPAPPTAPATGGLVRRMQWSQSINENCMRAYYGATDGGTNLSAYRDRMLPLFRALEPAISVSAQRLSDQVRVIQRLKRLDDATLDRLRLEALSARAASASARNPSATLPAPVPALDTAPGADPSADEGCANQSVSSQAYEQLRRALEEAITQYRSTPNSRPRLPRLPVNRRNLALMGALNDLLVPYLGASEDLIDTHSIMYCGAIAACRVARVKFPDADRAPRTAGSVPTWQVRIERRVDTYRTLIAKLICFRGGDQRKVYRKWDGTDHRVSDGQRPDATAMVNFWRSIWSVPVEHNEGAWMGVVERECESIEPMGSVTISPADVSCAIRTAPNWKSPGPDGLHNFWLKWFRCSHARLAAQFQQALELGSLPPPLTTGVTSLLYKSGSTTEAKNYRPITCLPTLYKLLTSILRAKINTHIVANNILAPAQNGCRVGSRGTKELLLIDMTICQRVRRNRGTLSTAWIDYKKAYDSVPHSWLRRILELYKVDAVLRSFLVACMGQWTTVLRQPGGGEGPSGPQDSIRIERGIFQGDSLSPLWFCLALNPLSTLLKDSGLGCQLRREGEVISHLLYMDDLKLFAPNKHDLLELLKTTEAFSSAIKMEFGVDKCAAMHVQRGKVVNSTNLQISETMDLKSLSEAETYKYLGMSQSLGIEGGDIKRAVKERFFCRLTKVLNSFLSGGNRVRAFNAWVMPLLTYSFGILRWTQTELDFLDRRVRVLLTAHRMLHPRSSVMRLYIPRKFGGRGFLNAKDLHNREVCSLRDYFLNSECGMHRDVVAVDASFTPLSMANENWRRLKVLSTEDRRAVWKSKELHGRFYKALTGPDVDLLASVNWLRFGDLFAETEGFVCAIADEVIMTNNYRRYILKDGTVDICRACRRPGESLRHIISGCGHLANGEYLHRHNLVAKIIHQQLALLYGLVDFEVPYYKYTPAPVLENGRATLYWDRSVITDRTIIANKPDIVLTDRLKRQAVLVDITIPHDENLVKAEKDKVSKYLDLAHEVTAMWDVDSTIIVPIVVSANGLIAKSLDQHLKRLSLDGWVKGQMQKAVLLDTARIVRRFLSLSP

SEQ ID NO: 5268 - protein, 1208 aa, Crocallis elinguaria
MITRSRTKKAGTASARKTPPPASSSPSSSSGVEYGTPLDTSASSDEDGPPSPPPPPPPARRGRPPLPARLGPAGHSVPRAAPATGGIVRRMRWTSDMNENCMRAYYGATEGGTNMSAYRDRMLPLFQTLEPSVAVSTQRLSDQVRAIQRLKLLDESVLDRLRLEALPIRATSASARDLSVAPPVPAPLPAPSSVATRIDPVVDEDDCANISVSTQVNEQLRRALEDAILEYQYTPDSRPRLPRLPTNRRNLALMGALNVLLAPYLRASENLFDTHSIMYCGAIAVCRVARVKFPDADRAPRPAGSAPAWQVRIERRINTFRTLIAKLICFSRGNNRPRVMRFVNQAFAGTGIRPQNYMAGVTERIDFLKQKIYAWVNRIRRYRERVDRYHQNRLFESDQRKVYRNWEGTDQRVSDGQLPDTNAMINFWRGIWSVPVEHTEGDWMRTVEQSCESIETMGSVTIDPIDVSCAIRTAQNWKSPGPDGLHNFWIKWIRCSHECLAVQFQEALELGSLPRFLTTGVTSLLHKSGSTTEAKNYRPITCLPTLYKLLTSILRAKINSHVVANNILAPAQNGCRVGSRGTKELLLIDTAICQQVRRNKGALSTAWIDYKKAYDSVPHSWLERILELYKIDTTLRTFLSTCMRQWTTVLRQPGSGNSPSGPENFIKIERGIFQGDSLSPLWFCLALNPLSTLLRDSRLGCKLRREGEIISHLLYMDDLKLLAPKSPDLMKLLKITEIFSSAIKMEFGVDKCAVMHVQRGKVVNSDNLQLSETMTLRSLSEAETYRYLGMSQSLGITVGDIKQSVKERFFCRLTKVLNSLLSGGNKARAFNGWVMPLLIYSFGILKWTQTELDSLDRRVRQLLTYHRMLHPRSSVMRLYIPRKWGGRGFLNAKTLHNREVCSLREYFLNNECGMHRDVVAVDRNLTPLSLANENWHKPVVMTTEDRKEVWKGKELHGRFCRALTGSDVDLLASVNWLRFGDLFGETEGFVCAIMDEVIKTNNYRKYIMKDGTVDICRACRRPGESLRHIISGCSHLANGEYLHRHNLVARIIHQQIALQYGLVESEVPYYKYAPAPVLENGRALLYWDRSIITDRTIVANKPDIVLVDRSQRRAVLVDITVPHDENLVKAEKDKLSKYLDLAHEVTAMWNVDSTIIVPIVVSANGLVAKSLDQHLKRLSLDGWIKGRMQKAVLLDTARIVRRFLTLQP

SEQ ID NO: 5269 - protein, 1208 aa, Crocallis elinguaria
MITRSRTKKAGTASARQTPPPASSSPSSSSGVEYGTPLDTSASSDEDGPPSPPPPPPPARRGRPPLPARLGPAGHSVPRAAPATGGIVRRMRWTSDMNENCMRAYYGATEGGTNMSAYRERMLPLFQTLEPSVAVSTQRLSDQVRAIQRLKLLDESVLDRLRLEALPIRATSASARDLSVAPPVPAPLPAPSSVATRIDPVVDEDDCANISVSTQVNEQLRRALEDAILEYQYTPDSRPRLPRLPTNRRNLALMGALNVLLAPYLRASENLFDTHSIMYCGAIAVCRVARVKFPDADRAPRPAGSAPAWQVRIERRINTFRTLIAKLICFSRGNNRPRVMRFVNQAFAGTGIRPRNYMAGVTERIDFLKQKIYAWVNRIRRYRERVDRYHQNRLFESDQRKVYRNWEGTDQRVSDGQLPDTNAMINFWRGIWSVPVEHTEGDWMRTVEQSCESIETMGSVTIDPIDVSCAIRTAQNWKSPGPDGLHNFWIKWIRCSHECLAVQFQEALELGSLPRFLTTGVTSLLHKSGSTAEAKNYRPITCLPTLYKLLTSILRAKINSHVVANNILAPAQNGCRVGSRGTKELLLIDTAICQQVRRNKGALSTAWIDYKKAYDSVPHSWLERILELYKIDTTLRSFLSTCMRQWTTVLRQPGSGNSPSGPENFIKIERGIFQGDSLSPLWFCLALNPLSTLLRDSRLGCKLRREGEIISHLLYMDDLKLLAPKSPDLMKLLKITEIFSSAIKMEFGVDKCAVMHVQRGKVVNSDNLQLSETMTLRSLSEAETYRYLGMSQSLGIAVGDIKQSVKERFFCRLTKVLNSLLSGGNKARAFNGWVMPLLIYSFGILKWTQTELDSLDRRVRQLLTYHRMLHPRSSVMRLYIPRKWGGRGFLNAKTLHNREVCSLREYFLNNECGMHRDVVAVDRNLTPLSLANENWRKPVVMTTEDRKDVWKGKELHGRFYRALTGSDVDLLASVNWLRFGDLFGETEGFVCAIMDEVIKTNNYRKYIMKDGTVDICRACRRPGESLRHIISGCSHLANGEYLHRHNLVARIIHQQIALQYGLVESEVPYYKYAPAPVLENGRALLYWDRSIITDRTIVANKPDIVLVDRSQRRAVLVDITVPHDENLVKAEKDKLSKYLDLAHEVTAMWNVDSTIIVPIVVSANGLVAKSLDQHLKRLSLDGWIKGRMQKAVLLDTARIVRRFLSLQP

SEQ ID NO: 5270 - protein, 1212 aa, Peribatodes rhomboidaria
MLTRLKKKQLAAEASTRPPPPPASSSGSPPSEEDEYATPLDTTDSSDGEAAPTPAPPPPPARRGRPPLPARLGPAGRSAPPTAPATGGVVCRMRWTQVMNENCMRAYYGATEGGTNLTAYRVRMLSLFQVLEPTVTVSTQRLSDQVRAIHRCKLLDQSVLDRLCLEAIRGRPIPASTRDRPVASSAPTLASVPASAVTLATMANTDVDGDRTSVNVSSQVSEQLRRTLEDAISQYRYAPDSRPRLPRLPTHRRNMALMGALNVLLAPYLRATENLTDTHSILYCGAIAACRVARVKFPDTSRAPRPAGGVPAWQVRIERRISTFRTLIAKLLCFSRGNTRPRVMRFVTQAFAGTDIRPQYYLANVTERIDYLKQKVYAWANRIRRYRERVDRYWQNRLFQSDQRKVYRGWEGTEQCVIDGHRPDASAMIDFWRGIWSVPVEHTESEWMRIVERECESIESMESILIDSVDVSCAIRTAQNWKSPGPDGLHNFWIKWIRCSHDRLAIQFQEALELCSLPSFMTTGVTFLLHKSGSTTDPKNYRPITCLPTIYKLLTSILRNKINTHIVANNVLAPAQNGCRVGSRGTKELLLIDMAISQQVRRNKGALSVAWIDYKKAYDSVPHSWLERILELYKIDITLKSFLSACMRQWTTVLRQPGGGEVSADPQDLIRIERGIFQGDSLSPLWFCLALNPLSTLLKDLGLGHRLRRGGEVISHLFYMDDLKLFAPKRQDLMELLKTTEVFSSAIKMEFGVDKCAVMHVQRGKVVNSPNLQLSETMTLRSLSEVETYKYLGMSESLGISVVDIKKLIKERFFCCLTKVLNSLLSGGNKMRAFNGWVMPLLIYSFGILRWTQTELDALDRRVRQLLTTHRMLHPRSSVMRLYIPRKWGGRGMLNAKNLHNREVYRLRSFFRNNDCGMHCDVVAVDKGLTPLSLANENWRQPSVLSTEDRKNVWKGKELHGRFYRALTGPDVDLLASVNWLRFGDLFGETEGFACAIADEVIKTNNYRKYILKDGTVDICRACHRPGESLRHIISGCSHLANGEYLHRHNQVARIIHQQLALQYGLVESEVPYYKYAPASVLENGRALLYWDRSIITDRTIVANKPDIVLVDRSQRRAVLVDITIPHDENLVKAEKDKLSKYLDLAHEVTAMWDVDSTIIVPIVVTVNGLIAKSLDQHLKRLSLDGWIKGQIQRAVILDTCRIVRRFLTLQP

SEQ ID NO: 5271 - protein, 1213 aa, Peribatodes rhomboidaria
MITRSRTRKQQTAETESTRPPPPPSSSSASSSSEEEFVTPPDTTDSSDEEAAPTPAPPPPPARRGRPPLPARLGPAGRSAPPTAPATGGVVCRMRWTRTINENCMRAYYGATEGGTNLTAYRVRMLSLFQVLEPTVTVSTQRLSDQVRAIHRCKLLDQSVLDRLCLEAIRARPTPASTRDQPVASSAPTWASVPASAATLATLADTDVDGDRTRVSVSSQVSEHLRRTLEDAISQYRYAPDSRPRLPRLPTHRRNMALMGALNVLLAPYLRASENLTDTHSILYCGAIAACRVARVKFPDTNRAPRPAGGVPAWQVRIERRISTFRTLIAKLLCFSRGNTRPRVMRFVTQAFAGTDIRPQYYLANVTERIDYLKQKVYAWANRIRRYRERVDRYWQNRLFQSDQRKVYRGWEGTEQCVIDGHRPDASAMIDFWRGIWSVPVEHTEGEWMRIVERECESIESMESILIDSVDVSCAIRTAQNWKSPGPDGLHNFWIKWIRSSHDRLATQFQEALELCSLPSFMTTGVTFLLHKSGSTTDPKNYRPITCLPTIYKLFTSILRNKINTHIVANNVLAPAQNGCRVGSRGTKELLLIDMAISQQVRRNRGALSVAWIDYKKAYDSVPHSWLERVLELYKIDITLKSFLSACMRQWTTVLRQPGGGEVSADPQDLIRIERGIFQGDSLSPLWFCLALNPLSTLLKDLGLGHRLRRGGEVISHLLYMDDLKLFAPKRQDLMELLKTTEVFSSAIKMEFGVDKCAVMHVQRGKVVNSPNLQLSETMNLRSLSEVETYKYLGMSESLGISVVDIKKSIKERFFCRLTKVLNSLLSGGNKMRAFNGWVMPLLIYSFGILRWTQTELDALDRRVRQLLTTHRMLHPRSSVMRLYIPRKWGGRGMLNAKNLHNREVYRLRSFFRNNDCGMHCDVVAVDKGLTPLSLANENWRQPSVLSTEDRKNVWKGKELHGRFYRALTGPDVDLLASVNWLRFGDLFGETEGFACAIADEVIKTNNYRKYILKDGTVDICRACHRPGESLRHIISGCSHLANGEYLHRHNQVARIIHQQLALQYGLVESEVPYYKYAPASVLENGRALLYWDRSIITDRTIVANKPDIVLVDRSQRRAVLVDITIPHDEYLVKAEKDKLSKYLDLAHEVTAMWDVDSTIIVPIVVTVNGLIAKSLDQHLKRLSLDGWIKGQIQKAVILDTCRIVRRFLTLQP

SEQ ID NO: 5272 - protein, 933 aa, Pammene fasciana
MYCGAIAACRVARIKFPDAERAPRTAGGVPAWQVRIERRINSFRTLIAKLICFRGGNNRPRVMRFVHQAFAGTDIEPRDYMANITERIDFLRQKVYAWASRIRRYRERVDRFRQNRLFQSDQRKVYRRWEEADPRVSDVRLPDATAMTDFWRSIWSAPVEHTEGEWMNVVERECESIEPMGAITISPDDVSCAIRTSQNWKSPGPDGLHNFWLKWFRCSHSRLATQFQHALELGSLPPSLTTGVTFLLYKSGSTTEAKNYRPISCLPTLYKLLTSILRAKINAHMVANNILASAQNGCRVGSRGTKELLLIDMTICQRVRRNRGALSAAWIDYKKAYDSVPHSWLERILELYKVDAALRSFLGACMRQWTTVLRQPGGGDDPPGPQDFIRIERGIFQGDSLSPLWFCLALNPLSILLKDSGLGCRLRREGEVISHLLYMDDLKLFAPNNRDLLELLKTTEVFSSSIKMEFGVDKCAVMHVQRGKVVNSTNLQLSETMTFRSISASETYKYLGMSQSLGIEDVGIKQALKERFFGRLTKVLNSLLSGGNKVRAFNAWVMPLLTYSFGILRWTQTELDALDRRVRLLLTTHRMLHPRSSVMRLYIPRKCGGRGFLNAKNLHNREVYNLRNYFLNNECGMHRDVVTVDKNLTPLSLANENWRKPVVLSTEDRKAVWKSKELHGRFYGALTGPDVDLLASVNWLRFGDLFGETEGFACAIADEVIMTNNYRRYILKDGTVDICRACRRPGESLRHIISGCSHLANGEYLHRHNLVARIIHQQLALLYGLVAHEVPYYKYIPAPVLENDRATLYWDRSIITDRTIVANKPDIVVIDRPQRRAMLVDITVPCDVNLVKAEKDKSSKYLDLAHEVTAMREVDSAIIVPIVVSANGLIAKSLDQHLERLSLRGCGWIKGQIQKAVILDTARIVRRFLTLRP

SEQ ID NO: 5273 - protein, 1212 aa, Pammene fasciana
MITRSKSRLQQASPPNARPPSSPASSVSSPSSSGDEFATAPDTSESSDECGPPPPPPRPPARRGRPPLPARLGLAGQPAPPRAPAAGGIVRRMRWTQTMNENVMRAYYGATEGGTNLCAYRVRLLPLFQALEPTTNVTAQRLSDQVRVIQRDKRLDDSTLDRLRLEALSAHAASTSARDPPATAPDPMPAPDLASGAPRVDPSADEEEIATQSVSSTANEQLRRTLEEAITQYRSTNIPRPRLPRLPMNKRNLALMGALNDLLDPFLRTSKDLDDTHSIMYCGAIAACRVARVKFPDAERAPRTAGGVPAWQVRIERRINSFRTLIAKLICFRGGNNRPRVMRFVHQAFAGMDIEPRDYMANVTERIDFLKQKVYAWASRIRRYRERVDRFRQNRLFQSDQRKVYRRWEEADPRVSDVRLPDATAMTDFWRSIWSAPVEHTEGEWMSVVERECETIEPMGAITISPDDVSCAIRTAQNWKSPGPDGLHNFWLKWFRCSHSRLATQFQQALELGSLPPSLTTGVTFLLYKSGSTTEAKNYRPITCLPTLYKLLTSILRAKINAHMVANNILASAQNGCRVGSRGTKELLLIDMTICQRVRRNRGALSAAWIDYKKAYDSVPHSWLERILELYKIDAALRSFLGACMRQWTTVLRQPGGGDDPPGPQDFIRIERGIFQGDSLSPLWFCLALNPLSTLLKDSGLGCRLRRESEVISHLLYMDDLKLFAPNNRDLLELLKTTEVFSSSIKMEFGVDKCAVMHVQRGKVVNSTNLQLSETMTFRSISESETYKYLGMSQSLGIEDAGIKQALRERFFGRLTKVLNSLLSGGNKVRAFNAWVMPLLTYSFGILRWTQTELDALDRRVRQLLTTHRMLHPRSSVMRLYIPRKCGGRGFLNAKNLHNREVYNLRNYFLNNECGMHRDVVAIDKGLTPLSLANENWRKPVVLSTEDRKAVWKSKELHGRFYGALTGPDVDLLASVNWLRFGDLFGETEGFACAIADEVIMTNNYRRYILKDGTVDICRACRRPGESLRHIISGCSHLANGEYLHRHNLVARIIHQQLALLYGLVDHEVPYYKYTPAPVLENGRATLYWDRSIITDRTIVANKPDIVVIDRPQRRAMLVDITVPCDVNLVKAEKDKSSKYLDLAHEVTAMWEVDSAIIVPIVVSANGLIAKSLDQHLERLSLRGCGWIKGQIQKAVILDTARIVRRFLSLRP

SEQ ID NO: 5274 - protein, 1212 aa, Pammene fasciana
MITRSKSRQQQASPPNARPPSSPASSVSSPSSSGDEFATAPDTSESSDECGPPPPPPRPPARRGRPPLPARLGLAGHPAPPRAPAAGGIVRRMRWTQTMNENVMRAYYGATEGGTNLCAYRVRLLPLFQALEPTTNVTAQRLSDQVRVIQRDKRLDDSTLDRLRLEALSAHAASTSARDPPATAPDPMPAPDLASGAPRVDLSADEEEIATQSVSSTANEQLRRTLEEAITQYRSTNIPRPRLPRLPMNRRNLALMGALNDLLDPFLRTSKDLDDTHSIMYCGAIAACRVARVKFPDAERAPRTAGGVPAWQVRIERRINSFRTLIAKLICFRGGNNRPRVMRFVHQAFAGTDIEPRDYMANVTERIDFLKQKVYAWASRIRRYRERVDRFRQNRLFQSDQRKVYRRWEEADPRVSDVRLPDATAMSDFWRSIWSAPVEHTEGEWMSVVERECETIEPMGAITISPDDVSCAIRTAQNWKSPGPDGLHNFWLKWFRCSHSRLATQFQQALELGSLPPSLTTGVTFLLYKSGSTTEAKNYRPITCLPTLYKLLTSILRAKINAHMVANNILASAQNGCRVGSRGTKELLLIEMTICQRVRRNRGALSAAWIDYKKAYDSVPHSWLERILELYKIDAALRSFLGACMRQWTTVLRQPGGGDDPPGPQDFIRIERGIFQGDSLSPLWFCLALNPLSTLLKDSGLGCRLRREGEVISHLLYMDDLKLFAPNNRDLLELLKTTEVFSSSIKMEFGVDKCAVMHVQRGKVVNSTNLQLSETMTFRSISESETYKYLGMSQSLGIEDAGIKQALRERFFGRLTKVLNSLLSGGNKVRAFNAWVMPLLTYSFGILRWTQTELDALDRRVRQLLTTHRMLHPRSSVMRLYIPRKCGGRGFLNAKNLHNREVYNLRNYFLNNECGMHRDVVAIDKGLTPLSLANENWRKPVVLSTEDRKAVWKSKELHGRFYGALTGPDVDLLASVNWLRFGDLFGETEGFACAIADEVIMTNNYRRYILKDGTVDICRACRRPGESLRHIISGCSHLANGEYLHRHNLVARIIHQQLALLYGLVDHEVPYYKYTPAPVLENGRATLYWDRSIITDRTIVANKPDIVVIDRPQRRAMLVDITVPCDVNLVKAEKDKSSKYLDLAHEVTAMWEVDSAIIVPIVVSANGLIAKSLDQHLERLSLRGCGWIKGQIQKAVILDTARIVRRFLTLRP

SEQ ID NO: 5275 - protein, 1028 aa, Bembecia ichneumoniformis
MIIIIIIKTSIPTSAALVTDPVDQEICASTNVSTETKEQFRRALEEAISRYHTKPNDRPRLPRLPMHKQNIALMGALNTLLAPYIKVSRDLTDTHSILYCGAIAACRVARVKFLNFDRATRDAEDVPAWKVRIERRISKFRTLIAKLISFRRGNTRPRVMRFVAQAFVGTNIKSKDYLTCTTERIDYFKQKVYALANRVRRYKERVHRYRQNRLFQSDQRKVYRDWEKTNQSMNVGHPPDPEVMLKFWRDIWSVSDEHTEGDWISIVEQACETITTMKAINISPTDVSCAIRSTQNWKSPGPDGLHNFWIKMIQCSHECLAMQFQKALELGTLPTFLTTGITFLLHKSGSTTEAKNYRPITCLPTIYKLLTSILRTKINSHILENNILDTAQNGCKIGSRGTKELLLIDMTICQRVRRSSGALSVAWIDYQKAYDSVLHSWLRRILELYKIDTTLRSFLAMCMGQWITGLCQPGYRGGAADLRDTIKIERGIFQGDSLSPLWFSLALNPLSTLLRNLKLGYRLRRGGEVISHLLYMDDLKLFAPKPKDLLELLKITQCFSNAIRMDFGVDKCAVMHVQKGKVVNSPNLQLSNEVSFKSLSEVETYKYLGMSQSLGISDKDIKQTVKTRFFGRLIKVLNSFLSGGNKVRAFNGWVMPLLTYSFGILRWTQTELDGLDRRVRRLLTAHRMLHPRSSVMRLYIPRKLGGRGFLNAKNLHNREVYSLREYFLNHESGVHRDVVAIDKNFTPLSLANGNWRRLVVLSHEDRKNVWKAKELHGRFYKALTGPDVDSLMSVNWLRFGDLFGETEGFVCAIADEVIKTNNYRKYILKDGTVDICRACHRPGETLRHIISGCAHLSNGEYLHRHNQVARIIHQQLALRYGLIESEVPYYKYVPAPVLENGHATLYWDRSIITDRTIVANKPDIVVIDRSQRRTMLVDIAVPHDENLVKAEKEKLTKYIDLAHEVTAMWDVDSTIIVPIVVSANGLIAKSLDQHLKRLSLEGWIKGQIQKAVLLDTARIVRRFLTLQP

SEQ ID NO: 5276 - protein, 1207 aa, Ennomos quercinarius
MITRSRTKQAEQSARLPPPPVPSSSSSSSGDEYGTPPDTTASSDEDGPPSPPPPPPPARRGRPPLPARLGPAGQPAPRPAPATGGIVRRMLWTQAMNENCMRAYYGATEGGSSLTAYRDRMLSLFQNLEPAVAVSAQRLSDQVRAIQRCKMLDQSTLDRLRLEALPTRATSPSPRVLPAALPDPGPFTGPPPVTPRGDPAIGGKESVSDSVNTQANEQLRSALEDAILRYRSTPTSRPQLPRLPTNRRNLVLMGALNTLLAPYLRTSEDLVDTHSILYCGAIAACRVARVKFPDTDRAPRPADGAPAWQVRIEKRITTFRTLIAKLVCFSLGNHRPRVMRFVTQAFTGTGIRPQDYMACVTERIDFLKQKVYAWASRIRRYRERVDRYQQNRLFQSDQRKVYRNWERTGQRVVDGQLPDANAMSEFWRSIWSVPVEHTEGDWMRIVERACEPIESMGSITIDPEDISCAIRTAQNWKSPGPDGLHNFWIKWIRCSYPCLAIQFQEALEAGSLPSFMTTGVTFLLHKSGSTTEAKNYRPITCLPTLYKLLTSILRTKINSHIVANNVLAPAQNGCRVGSRGIKELLLIDTAICQQIQRNRGALSTAWIDYKKAYDSVPHSWLERVLELYKIDAALRSFLSTCMRQWTTVLRQPGRGESVSDPQDLIRIERGIFQGDSLSPLWFCLALNPLSTLLKDSGLGYRLRRGGETISHLLYMDDLKLFTPQRPQLIELLKITENFSNSIKMEFGVDKCAVMHVHGGKVVNSTNLQLSETMTLRSLSESETYRYLGMSESLGISVGDVKRTVKERFFCRLTKVLNSLLSGGNKVRAFNGWVMPLLIYSFGILRWTQTELDALDRKVRQLLTSHRMLHPRSSVMRLYIPWKWGGRGFLNAKTLHNREVCSLREYFLNNECGMHRDVVAVDKGLTPLSLANENWRKPVVLSTEDRRDVWKGKELHGRFYRALTGPDVDLHASVNWLRFGDLFGETEGFVCAIADEVIKTNNYRKYIMKDGTVDICRACHHPGESLRHIISGCSHLANGEYLHRHNLVARIIHQQLALQYGLVESEVPYYKYTPGPVLENGRALLYWDRSIITDRTIVANKPDIVLVDRSQRRAVLVDITIPHDENLVKAEKDKLSKYLDLAHEVTAMWNVDSTSIVPIVVSANGLIAKSLDQHLERLSLDGWIKGQIQKAVLLDTARIVRRFLTLQP

SEQ ID NO: 5277 - protein, 1060 aa, Ennomos quercinarius
MITRSRKKQAEQSARLPPPPAPSSPSSSSGDEYGTPPDTTASSDEDGPPSPPPPPPPARRGRPPLPARLGPAGQPAPRPAPATGGIVRRMRWTQSMNENCMRAYYGAIEGGSNLTAYRDRMLSLFQDLEPAVAVSAQRLSDQVKFPDTDRAPRPADGAPAWQVRIEKRITTFRTLIAKLVCFSRGNHRPRVMRFVAQAFTGTGIRPQDYMACATERIDFLKQKVYAWASRIRRYRERVDRYQQNRLFQSDQRKVYRNWEGTSQRVVDGQLPDANAMNEFWRSIWSVPVEHTEGDWMRVVERVCEPIESMGSITIDPEDISCAIRTAQNWKSPGPDGLHNFWIKWIRCSYPCLAIQFQEALEAGSLPSFMTTGVTFLLHKSGSTTEAKNYRPITCLPTLYKLLTSILRTKINSHIVANNILAPAQNGCRVGSRGTKELLLIDTAICQQVRRNRGALSTAWIDYKKAYDSVPHSWLERVLELYKIDATLRSFLSACMRQWTTVLRQPGGGESVSDPQDFIRIERGIFQGDSLSPLWFCLALNPLSTLLGDSGLGYRLRRGSEIISHLLYMDDIKLFAPQRPQLIELLKITENFSNSINMEFGVDKCAVMHVHRGKVVNSTNLQLSETMTLRSLSESETYRYLGMSESLGISVGDVKRTVKERFFCRLTKVLNSLLSGGNKTRAFNGWVMPLLMYSFGILRWTQTELDALDRKVRQLLTSHRMLHPRSSVMRLYIHRKWGGRGFLNAKTLHNREVCSLRDYFLNNECGMHRDVVAVDKGLTPLSLASENWRKPVVLSTEDRRDVWKGKELHGRFYRALTGPDVDLHASVNWLRFGDLFGETEGFVCAIVDEVIKTNNYRKYIMKDGTVDICRACRRPGESLRHIISGCSHLANGEYLHRHNLVARIIHQQLALQYGLVESEVPYYKYTPGPVLENGRALLYWDRSIITDRTIVANKPDIVLVDRSQRRAVLVDITIPHDENLVKAEKDKLSKYLDLAHEVTAMWNVDSTSIVPIVVSANGLIAKSLDQHLERLSLDGWIKGQIQKAVLLDTARIVRRFLTLQP

SEQ ID NO: 5278 - protein, 1207 aa, Ennomos quercinarius
MITRSRTKQAEQSARLPPPPVPSSSSSSSGDEYGTPPDTTASSDEDGPPSPPPPPSPARRGRPPLPARLGPAGQPAPRPAPATGGIVRRMRWTQAMNENCMRAYYGATEGGSSLTAYRDRMLSLFQNLEPAVAVSAQRLSDQVRAIQRCKMLDQSTLDRLRLEALPTRATSPSPRVLPAALPDPGPITGPPPVTPRGDPAIGGEESVSDSVSTQANEQLRSALEDAILRYRSTPTSRPRLPRLPTNRRNLVLMGALNTLLAPYLRTSEDLVDTHSILYCGATAACRVARVKFPDTDRAPRPADGAPAWQVRIEKRITTFRTLIAKLVCFSRGNRRPRVMRFVTQAFTGTGIRPQDYMACVTERIDFLKQKVYAWASRMRRYRERVDRYQQNRLFQSDQRKVYRNWERTGQRVVDGQLPDANAMSEFWRSIWSVPVEHTEGDWMRVVERACEPIESMGSITIDPEDISCAIRTAQNWKSPGPDGLHNFWIKWIRCSYPCLAIQFQEALEAGSLPSFMTTGVTFLLHKSGSTTEAKNYRPITCLPTLYKLLTSILRTKINSHIVANNVLAPAQNGCRVGSRGTKELLLIDTAICQQIQRNRGALSTAWIDYKKAYDSVPHSWLERILELYKIDATLRSFLSTCMRQWTTVLHQPGRGESVSDPQDLIRIERGIFQGDSLSPLWFCLALNPLSTLLKDSGLGYRLRRGGETISHLLYMDDLKLFTPQRPQLIELLKITENFSNSIKMEFGVDKCAVMHVHGGKVVNSTNLQLSETMTLRSLSESETYRYLGMSESLGISVGDVKRTVKERFFCRLTKVLNSLLSGGNKVRAFNGWVMPLLIYSFGILRWTQTELDALDRKVRQLLTSHRMLHPRSSGMRLYIPRKWGGRGFLNAKTLHNREVCSLREYFLNNECGMHRDMVAVDKGLTPLSLANENWRKPVVLSTEDRRDVWKGKELHGRFYRALTGPDVDLHASVNWLRFGDLFGETEGFVCAIADEVIKTNNYRKYIMKDGTVDICRACRRPGESLRHIISGCSHLANGEYLHRHNLVARIIHQQLALQYGLVESEVPYYKYTPGPVLENGRALLYWDRSIITDRTIVANKPDIVLVDRPQRRAVLVDITIPHDENLVKAEKDKLSKYLDLAHEVTAMWNVDSTSIVPIVVSANGLIAKSLDQHLERLSLDGWIKGQIQKAVLLDTARIVRRFLTLQP

SEQ ID NO: 5279 - protein, 1208 aa, Cydia splendana
MITRSRTKAVTTSARPPPPPASSTSSSTSSSGDEFATAPDTDGSSDESGPPPPPPRPPARRGRPPLPARLGPAGHPAPPTAPATGGIVRRMRWTRDMNENVMRAYYGATEGGTQLSAYRSRILPLFQTLEPTITVSEQRLSDQVRVIQRLKRLDDATLDRLRQEALSARADSTSVRDLPATSPDPVPVPDLAPEAPRVDFCTDEGDFASQNVSTTANEQLRRTLEEAITQYRATTNSRPRLPRLPMNRRNLALMGALNALLEPYLRTSKDLDDTHSIMYCGAIAACRVARVKFPDAERAPRTVGGVPAWQVRIERRISSFRTLIAKLICFRGGNNRPRVMRFVNQAFAGTDIGPRDYMANVTERIDFLKQKVYAWANRIRRYRERVDRFQQNRLFQSDQRKVYRKWEETNLRTPDTQPPDATAMTDFWRSIWSMPVGHTEGGWMSVVERECEFIEPMGAVTISPDDISCAIRTAQNWKSPGPDGLHNFWLKWFRCSHSRLAAQFQQALELGSLPPSLTTGVTYLLYKSGSTTEAKNYRPITCLPTLYKLLTSILRAKINAHIVANNILASAQNGCRVGSRGTKELLLIDMTICQQIRRNKGALSAAWIDYKKAYDSVPHSWLGRVLELYKVDAALRAFLSACMRQWTTVLRQPGGGDDPPDPQDFIRIERGIFQGDSLSPLWFCLALNPLSTLLKDLGLGCRLRREGEIISHLLYMDDLKLFAPNSQDLSELLKTTEGFSSAINMEFGVDKCAVMHVQRGRVVNSTNLQLSETMSFRSISESETYKYLGMSQSLGIEEEGIRRSVKERFFSRLTKVLNSLLSGGNKVRAFNAWVMPLLTYSFGILRWTQTELDALDRRVRSLLTTHRMLHPRSSVMRLYIPRKCGGRGFLNAKDLHNREVYNLRNYFLNNECGMHRDVVAVDRNLTPLSLANENWRKPVVLSTADRKAAWESKVLHGRFYKALTGPDVDLLASVNWLRFGDLFGETEGFACAIADEVMMTNNYRKYILKDGTVDICRACRRPGESLRHIISGCSHLANGEYLHRHNLVARIIHQQLALLYGLVDREVPYYKYLPAPVLENGRATLYWDRSIITDRTIVANKPDIVIIDRSQRRAVLVDITIPHDENLVKAEKDKSSKYLDLAHEITAMWDVDSTIIVPIVVSVNGLIAKSLDQHLERLSLGGWIKGQMQKAVILDTARIVRRFLSLQP

SEQ ID NO: 5280 - protein, 1209 aa, Cydia splendana
MITRSKTRSQASITTNARPPPSPVSSVSSQASSGDEFATAPDTSESSDECGPPPPPPRPPARRGRPPLPARLGPAGHHAPPTVPAAGGVVRRMRWSQTMNENVMRAYYGATEGGTDLCAYRVRMLPLFQALEPTIDVTAQRLSDQVRVIQRLKRLDDSTLDRLRLEALSTRAASTSVRDPPATSPDPVPAPDQAPEAPRVDLCADEEEFAQSVSSTANEQLRRTLDEAITQYRSTPNTRPRLPRLPMNRHNLALMGALNALLEPYLRTSKDLDDTHAIMYCGAIAACRVARVKFPDSERAPRTAGGAPAWQIRIERRISSFRTLIAKLICFRGGNNRPRVMRFVNQAFAGTDIRPRDYMANITERIDFLKQKVYAWANRIRRYRERVDRFQQNRLFQSDQRKMYRKWEETNPRASDSQPPEATVMNDFWRSIWSVPVGHTEGSWMSVVERECESIEPMGAVTISPDDVSCAIRTAQNWKSPGPDGLHNFWLKWFRCSHSCLAAQFQQALELGSPPPSLTTGVTFLLYKSGSTTEAKNYRPITCLPTLYKLLTSILRAKINAHIVANNILASAQNGCRVGSRGTKELLLIDMTICQQIRRNRGALSAAWIDYKKAYDSVPHSWLERVLELYTVDTALRAFLSACMRQWTTVLRQTGGGDGSPGPQDFIRIERGIFQGDSLSPLWFCLALNPLSTLLKDLELGCRLRRGGEVISHLLYMDDLKLFAPNSQDLVELLKTTEVFSNAINMEFGVDKCAVMHVQRGKVVNSTNLQLSETMSFRSISESETYKYLGMSQSLGIEEEGIRRSVKERFFSWLTKVLNSLLSGGNKVRAFNAWVMPLLTYSFGILRWTQTELDALDRRVRQLLTTHHMLHPRSSVMRLYIPRKCGGRGFLNAKNLHNREVYNLRNYFLNNECGMHCDVVAADKGLTPLSLANENWRKPVVLSTEDRKAVWKDKQLHGRFYKALTGPDVDLLASVNWLRFGDLFGETEGFACAIADEVMMTNNYRKYILKDGTVDICRACRRPGESLRHIISGCSHLANGEYLHRHNLVARIIHQQLALLYGLVDREVPYYKYSPAPVLENGRATLYWDRSIITDRTIVANKPDIVLIDRSQRRTVLVDVTIPHDENLVKAEKDKSSKYLDLAHEITAMWDVDSTIIVPIVVSANGLIAKSLDQHLERLSLGGWIKGQMQKAVILDTARIVRRFLTLRP

SEQ ID NO: 5281 - protein, 1209 aa, Cydia splendana
MQTRSKTRAQLASPRNARPPPPSASSVSSQSSSGDEFATAPDTSESSDECGPPPPPSRPPARRGRPPLSARLGPAGHPAPPTAPAAGGVVRRMRWSQTNNENVMRAYYGATEGGTNLCAYRVRMLPLFQALEPTIDVTAQRLSDQVRVIQRQKRLDDSTLDRLRLEALSARAASTSARDPPATSPDPVPAPDQAPGAPRVDLSADEEEFAQSVGSTANEQLRRTLDEAITRYRSTPDTRPRLPRLPMNKHNLALMGALNALLEPYLRTSKDLDDTHAIMYCGAIAACRVARVKFPDSERAPRTAGGAPAWQIRIERRISSFRTLIAKLICFRGGNNRPRVMRFVNQAFVGTDIRPRDYMANVTERIDFLKQKVYAWANRIRRYRERVDRFQQNRLFQSDQRKMYRRWEETNLRASDSRPPDATVMNDFWRSIWSVPVGHTEGSWMSVVERECESIEPMGAVTISPDDVSCAIRTAQNWKSPGPDGLHNFWLKWFRCSHSYLAAQFQQALELGSLPPSLTTGVTFLLYKSGSTTEAKNYRPITCLPTLYKLLTSILRAKINAHIVANNILASAQNGCRVGSRGTKELLLIDMTICQQIRRTKGALSAAWIDYKKAYDSVPHSWLGRVLELYKVDAALRAFLSACMGQWTTVLRQPGGGDDRPGPQDFIRIERGIFQGDSLSPLWFCLALNPLSTLLKDLGLGCRLRREGEVISHLLYMDDLKLFAPNTQGLLELLKTTEVFSSAINMEFGVDKCAVMHVQQGKVVNSTNLQLSETMSFRSISESETYKYLGMSQSLGIEDEGIRRSVKERFFSRLTKVLNSLLSGGNKVRAFNAWVMPLLTYSFGILRWTQTELDALDRRVRSLLTTHRMLHPRSSVMRLYIPRKCGGRGFLNAKDLHNREVYNLRNYFLNNECGMHRDVVAVDRNLTPLSLANENWRKPVVLSTADRKAAWESKALHGRFYKALTGPDVDLLASVNWLRFGDLFGETEGFACAIADEVMMTNNYRKYILKDGTVDICRACRRPGESLRHIISGCSHLANGEYLHRHNLVARIIHQQLALLYGLVDREVPYYKYLPAPVLENGRATLYWDRSIITDRTIVANKPDIVLIDRSQRRAVLADVTIPHDENLVKAEKDKSSKYLDLAHEITAMWDVDSTIIVPIVVSANGLIAKSLDHHLERLSLGGWIKGQMQKAVILDTARIVRRFLTLRP

SEQ ID NO: 5282 - protein, 1210 aa, Cydia splendana
MITRSQRRAAESTNNARPPPPPAPSSSASTTSSGDEFATAPDTDGSSDESGPPPPPPRPPARRGRPPLPARLGPAGHPAPPTAPATGGIVRRMRWTRDMNENVMRAYYGATEGGTQLSAYRSRILPLFQTLEPTITVSEQRLSDQVRVIQRLKRLDDATLDRLRQEALSARADSTSVRDLPATSPDPVPAPDLAPGAPRVDFCTDEGDFASQNVSTTANEQLRRTLEEAITQYHATTNSRPRLPRLPMNRRNLALMGALNALLEPHLRTSKDLDDTHSIMYCGAIAACRVARVKFPDAERAPRTVGGVPAWQARIERRISSFRTLIAKLICFRGGNNRPRVMRFVNQAFAGTDIRPRDYMANVTERIDFLKQKVYAWANRIRRYRERVDRFQQNRLFQSDQRKVYRKWEETNLRTPDTQPPDATAMTDFWRSIWSVPVGHTEGSWMSVVERDCESIEPMGAVTISPDDVSCAIRTAQNWKSPGPDGLHNFWLKWFRCSHSCLAAQFQQALELGSLPPSLTTGVTFLLYKSGSTTEAKNYRPITCLPTLYKLLTSILRAKINAHIVANNILASAQNGCRVGSRGTKELLLIDMTICQQIRRNKGALSAAWIDYKKAYDSVPHSWLGRVLELYKVDTALRVFLSACMGQWTTVLRQPGGGDDRPGPQDFIRIERGIFQGDSLSPLWFCLALNPLSTLLKDLGLGCRLRREGEVISHLLYMDDLKLFAPNSQDLLELLKITEVFSSAINMEFGVDKCAVMYVQRGRVVNSTNLQLSETMSFRSISESETYKYLGMSQSLGMEDEGIRRSVKERFFSRLTKVLNSLLSGGNKVRAFNAWVMPLLTYSFGILRWTQTELDALDRRVRSLLTAHRMLHPRSSVMRLYIPRKCGGRGFLNAKDLHNREVYNLRNYFLNNECGMHRDVVAVDRNLTPLSLANENWRKPVVLSTADRKAAWESKVLHGRFYKALTGPDVDLLASVNWLRFGDLFGETEGFACAIADEVMMTNNYRKYILKDGTVDICRACRRPGESLRHIISGCSHLANGEYLHRHNLVARIIHQQLALLYGLVDREVPYYKYLPAPVLENGRAMLYWDRSIITDRTIVANKPDIVIIDRSQRRAVLVDITIPHDENLVKAEKDKSSKYLDLAHEITAMWDVDLTIIVPIVVSVNGLIAKSLDQHLERLSLGGWIKGQMQKAVILDTARIVRRFLSLRP

SEQ ID NO: 5283 - protein, 1208 aa, Cydia splendana
MITRSRAKAVTTSARPPPPPASSTSSSTSSSGDEFATAPDTDGSSDESGPPPPPPRPPARRGRPPLPARLGPAGHPAPPTAPATGGIVRRMRWTRDMNENVMRAYYGATEGGTQLSAYRSRILPLFQTLEPTITVSEQRLSDQVRVIQRLKRLDDATLDRLRQEALSARADSISVRDLPATSPDPVPAPDLAPGAPRVDFCTDEGDLVSQNVSTTANEQLRRTLEEVFTQYRATTNSRPRLPRLPMNRRNLALMGALNALLEPHLRTSKDLDDTHSILYCGAIAACRVARVKFPDAERAPRTVGGVPAWQARIERRISSFRTLIAKLICFRGGNNRPRVMRFVNQAFAGTDIRPRDYMANVTERIDFLKQKVYAWANRIRRYRERVERFQQNRLFQSDQRKVYRKWEETNLRTPDTQPPDATAMTDFWRSIWSMPVGHTEGSWMSVIERECESIEPMGAVTISPDDVSCAIRTAQNWKSPGPDGLHNFWLKWFRCSHSCLAAQFQQALELGSLPPSLTTGVTFLLYKSGGTTEAKNYRPITSLPTLYKLLTSILRAKINAHIVANNILASAQNGCRVGSRGTKELLLIDMTICQQIRRTKGALSAAWIDYKKAYDSVPHSWLGRVLELYKVDAALRAFLSACMGQWTTVLRQPGGGDDQPGPQDFIRIERGIFQGDSLSPLWFCLALNPLSTLLKDLGLGCRLRREGEVISHLLYMDDLKLFAPNTQGLLELLKTTEVFSSAINMDFGVDKCAVMHVQRGRVVNSTNLQLSETMSFRSISESETYKYLGMSQSLGIEDEGIRRSVKERFFSRLTKVLNSLLSGGNKVRAFNAWVMPLLTYSFGILRWTQTELDALDRRVRSLLTTHRMLHPRSSVMRLYIPRKCGGRGFLNAKDLHNREVYNLRNYFLNNECGMHRDVVAVDRNLTPLSLANENWRKPVVLSTADRKAAWESKVLHGRFYKALTGPDVDLLASANWLRFGDLFGETEGFACAIADEVMMTNNYRKYILKDGTVDICRACRRPGESLRHIISGCSHLANGEYLHRHNLVARIIHQQLALLYGLVDREVPYYKYLPAPVLENGRATLYWDRSIITDRTIVANKPDIVIIDRSQRRAVLVDITIPHDENLVKAEKDKSSKYLDLAHEITAMWDVDSTIIVPIVVSVNGLIAKSLDQHLERLSLGGWIKGQMQKAVILDTARIVRRFLSLRP

SEQ ID NO: 5284 - protein, 1213 aa, Cydia splendana
MKTMITRSQRRAAESTNNARPPPPPAPSSSSSTSSSGDEFATPPDTDGFSDEGGPPPPPPRPPARRGRPPLPARLGPAGHPAPPTAPATGGIVRRMRWTRTMNENVMRAYYGATEGGTQLSAYRSRILPLFQALEPTITVSEQRLSDQVRVIQRLKRLDDATLDRLRQEALSARADSTSVRDLPATSPDPVPAPDLAPAAPRVDFCTDEGDFASQNVSTTANEQARRTLEEAITQYRATTNSRPRLPRLPMNRRNLALMGALNALLEPYLRTSKDLDDTHSIMYCGAIAACRVARVKFPDAERAPRIVGGVPAWQTRIERRISSFRTLIAKLICFRGGNNRPRVMRFVNQAFAGTDIRPRDYMANVTERIDFLKQKVYAWANRIRRYRERVDRFQQNRLFQSDQRKVYRKWEETNLRTPDTRPPDATAMTDFWRSIWSVPVGHTEGSWMSVVERECESIEPMGAVTISPDDVSCAIRTAQNWKSPGPDGLHNFWLKWFRCSHSRLAAQFQQALEVGSLPPSLTTGVTFLLYKSGSTTEAKNYRPITCLPTLYKLLTSILRAKINAHIVANNILASAQNGCRVGSRGTKELLLIDMTICQQIRRNKGALSAAWIDYKKAYDSVPHSWLGRVLELYKVDAALRAFLSTCMGQWTTVLRQPGGGDDRLGPQDFIKIERGIFQGDSLSPLWFCLALNPLSTLLKDLGLGCRLQREGEVISHLLYMDDLKLFAPNSQDLLELLKTTEVFSSAINMEFGVDKCAVMHVQRGRVVNSRNLQLSETMSFRSISESETYKYLGMSQSLGIEDDGIRRSVKERFFSRLTKVLNSLLSGGNKVRAFNAWVMPLLTYSFGILRWTQTELDALDRRVRSLLTTHRMLHPCSSVMRLYIPRKCGGRGFLNAKDLHNREVYNLRNYFLNNECGMHRDVVAVDRNLTPLSLANENWRKPVVLSTADRKAAWESKVLHGRFYKALTGPDVDLLASVNWLRFGDLFGETEGFACAIADEVMMTNNYRKYILKDGTVDICRACRRPGESLRHIISGCSHLANGEYLHRHNLVARIIHQQLALLYGLVDREVPYYKYLPAPVLENGRATLYWDRSIITDRTIVANKPDIVIIDRSQRRDVLVDITIPHDENLVKAEKDKSSKYLDLAHEITAMWDVDSTIIVPIVVSVNGLIAKSLDQHLERLSLGGWIKGQMQKAVILDTARIVRRFLSLQP

SEQ ID NO: 5285 - protein, 869 aa, Cydia splendana
MRFVNQAFAGTDIRPRDYMANVTERIDFLKQKVYAWANRIRRYRERVDRFQQNRLFQSDQRKMYRRWEETNLRASDSRPPDATVMNDFWRSIWSVPVGHTEGSWMSVVERECESIEPMGAVTISPDDVSCAIRTAQNWKSPGPDGLHNFWLKWFRCSHSCLAAQFQQALELGSLPPSLTTGVTFLLYKSGSTTEAKNYRPITCLPTLYKLLTSILRAKINAHIVANNILASAQNGCRVGSRGTKELLLIDMTICQQIRRNKGALSAAWIDYKKAYDSVPHSWLGRVLELYKVDAALRAFLSACMGQWTTVLRQPGGGDDRPGPQDFIRIERGIFQGDSLSPLWFCLALNPLSTLLKDLGLGCRLRREGEVISHLLYMDDLKLFAPNSQDLLELLKTTEVFSSAIHMEFGVDKCAVMHVQRGRVVNSTNLQLSETMSFRSISESETYKYLGMSQSLGIEDEGIRRSVKERFFSRLTKVLNSLLSGGNKVRAFNAWVMPLLTYSFGILRWTQTELDALDRRVRSLLTTHRMLHPRSSVMRLYIPRKCGGRGFLNAKDLHNREVYNLRNYFLNNECGMHRDVVAVDRNLTPLSLANENWRKPVVLSTADRKAAWESKVLHGRFYKALTGPDVDLLASVNWLRFGDLFGETEGFACAIADEVMMTNNYRKYILKDGTVDICRACRRPGESLRHIISGCSHLANGEYLHRHNLVARIIHQQLALLYGLVDREVPYYKYLPAPVLENGRATLYWDRSIITDRTIVANKPDIVLIDRLQRRAVLADVTIPHDENLVKAEKDKSSKYLDLAHEITAMWDVDSTIIVPIVVSVNGLIAKSLDQHLERLSLGGWIKGQMQKAVILDTARIVRRFLTLRP

SEQ ID NO: 5286 - protein, 1115 aa, Agriopis aurantiaria
MKTYIIEILILKQNNNNNKNVLYCARMLPLFQALQPTITVSAQRLSDQVRAIQRCNMLDQSVLDRLRLEEVRTRPTPASTRNPPVASSAPTLASVPASVGTLAALADTAVDEEDLASGVSDQVKEQLRGALEDAISQYRFTSDSRPRLPRLPTHRRNLALMGALNALLAPYLRASEDLVDTHSILYCGAIAACRVARVKFPDTNRAPRTAGGVPAWQVRIERRINTFRTLIAKLICFRRGNNRPRVMRFVTQAFAGTDIRPQHYLANVTERIDYLKQKVYAWANRIRRYRERVDRYWQNRLFQSDQRKVYRGWEETDQRVSDGQRPGANAMINFWRGIWSMPVNHTEGDWMRVVERECESIEPMGSILIDPVDVSCAIRMAQNWKSPGPDGLHNFWIKWIRCSHDRLATQFQEALELGSLPSFMTTGVTFLLHKSGSTTEAKNYRPITCLPTIYKLLTSILRNKINAHIVANNVLAHAQNGCRVGSRGTKELLLIDTAISQQVRRNRGALSAAWIDYKKAYDSVPHSWLERVLELYKIDTTLKSFLCACMRQWTTVLRQPGGGDGTSGPQDLIRIERGIFQGDSFSPLWFCLALNPLSTLLRDSGLGYRLRRDGQVISHLLYMDDLKLFTPKRQDLVELLKITDVFSSAIRMEFGVDKCAVMHVQQGKVVNSPNLQLSEVMTLRSLSEAETYKYLGMSESLGISVENIKKSVKERFFCRLTKVLNSLLSGGNKVRAFNGWVMPLLIYSFGILRWTQTELDALDRRVRQLLTSHRMLHPRSSVMRLYIPRKWGGRGFLNAKNLHNREVCSLRDFFRNSESGMHRDVVAVDRGLTPLSLANENWRKPSVLSIEDRRDVWKGKELHGRFYRALTGPDVDLLSSVNWLRFGDLFGETEGFACAIADEVIKTNNYRKYIIKDGTVDICRACHRPGESLRHIISGCSHLANGEYLHRHNQVARIIHQQLALRYGLVESEVPYYKYAPAPVLENGRALLYWDRSIITDRTIVANKPDIVLVDRSQRRAVLVDITIPHDENLVKAEKDKLSKYLDLAHEVTAMWDVDSTIIVPIVVSVNGLIAKSLDQHLKRLSLDGWVKGQMQKAVILDTARIVRRFLTLQP

SEQ ID NO: 5287 - protein, 1212 aa, Agriopis aurantiaria
MITRSRTKQADTKSARLPSPPASSSSPSTSSGEDEYHTTREASGSSSDTSGPGTPPPPPPARRGRPPLPARLGLVGHSATRPAPATGGVVRRMRWSTIMNEDCMRAYYRATEGGTNLSAYCARMLPLFQALQPTITVSAQRLSDQVRAIHRCKLLDDSVLDRLRQEELRARPIPVSTRDPPVASSAPTLASVPASVVTLAALADPVVDEGDLASGVSDQVREQLRGALEDAISQYRFTPDSRPRLPRLSTHRRNLALMGALNALLAPYLRASEDLVDTHSILYCGAIAACRVARVEFPDTNRAPRTAGGVPAWQVRIERRISTFRTLIAKLVCFRRGNNRPRVMRFVTQAFAGTDIRPQHYLANVTERIDYLKQKVYAWANRIRRYRERVDRYWQNRLFQSDQRKVYRGWEETDQRVSDGQRPDASAMINFWRGIWSVPVEHTEGDWMRVVERECESIEPMGSILIDSIDVSCAIRTAQNWKSPGPDGLHNFWIKRIRCSHDRLATQFQEALELGSLPSFMTTGVTFLLHKSGSTTEAKNYRPITCLPTIYKLLTSILRNKINAHIVANNVLAHAQNGCRVGSRGTKELLLIDTAISQQVRRNKGALSAAWIDYKKAYDSVPHSWLERVLELYKIDTTLKSFLGACMRQWTTVFRQPGGGDGAFGPQDLLRIERGIFQGDSFSPLWFCLALNPLSTLLRDSGLGYRLRRDGQVISHLLYMDDLKLFTPKRQDLVELLKITEVFSSSIRMEFGVDKCAVMHVQRGKVVNSPNLQLSEVMTLRSLSEAETYKYLGMSESLGISVENIKKSVKERFFCRLTKVLNSLLSGGNKVRAFNGWVMPLLIYSFGILRWTQTELDALDRRVRQLLTSHRMLHPRSSVMRLYIPRKWGGRGFLNAKNLHNREVCSLRDFFRNSESGMHRDVVAVDRGLTALSLANENWRKPSVLSIEDRRDVWKGKELHGRFYRALTGPDVDLLASVNWLRFGDLFGETEGFACAIADEVIKTNNYRKYIMKDGTVDICRACHRPGESLRHIISGCSHLANGEYLHRHNLVARIIHQQLALRYSLVESEVPYYKNAPAPVLENGRALLYWDRSIITDRTIVANKPDIVLVDRSQRRAVLVDITIPHDENLVKAEKDKLSKYLDLAHEVTAMWDVDSTIIVPIVVSVNGLIAKSLDQHLKRLSLDGWVKGQMQKAVILDTARIVRRFLTLQP

SEQ ID NO: 5288 - protein, 1208 aa, Ennomos fuscantarius
MILRSKTKTADNKCARLPPLPVSSSPSSSSGDEYATPPDTTASSDDDGLPSPPPPPPPARRGRPPLPARLGPVGQPAPRPAPATGGVVRRMRWTQTMNENCMRAYYGATEGGSSLTAYRDRMLSLFQELEPSISVSAQRLSDQVRAIHRCKLLDQSALDRLRLETLPIPATSPSPRVLSAALPDPGPIVGPPLMTPLGGPVIDGEESVSDSVSTQVNEQLRSALEDAILRYRSTPTSRPRLPRLPTNRRNLMLMGALNTLLGPYLRTSEDLVDTHSILYCGAIAVCRVARVKFPDTDRAPRPADGAPAWQVRIEKRITTFRTLIAKLVCFSRGNHRPRVMRFVTQAFAGTGIRPQDYMACVTERIDFLKQKVYAWASRIRRYRERVDRYHMNRLFQSDQRKVYRDWEGTGQRVVDGQLPDANVMNEFWRSIWSVPVDHSEGDWIRVVKHVCEPIESMGSITIDPEDISCAIRTAQNWKSPGPDGLHNFWIKWIRCSYPCLAIQFQEALEAGSLPKFMTTGITFLLHKSSSTMEAKNYRPITCLPTLYKLLTSILRTKINSHITANNILASAQNGCRVGSRGTKELLLIDTAICQQVRRNRGALSTAWIDYKKAYDSVPHSWLKRVLELYKINATLRSFLSACMGQWTTVLRPPGGGDSVSDPQNFIRIERGIFQGDSLSPLWFCLALNPLSTLLGDSGLGYRLRRGGEIISHLLYMDDLKLFAPQRPQLMKLLKITENFSNSIKMEFGVDKCAVMHVHGGKVVNSTNLQLSETMTLRSLSESETYKYLGMSESLGISVGDVKQSVKERFFCRLTKVLNSLLSGGNKARAFNAWVMPLLMYSFGILRWTQTELDALDRKVRQVLTSHRMLHPRSSVMRLYIPRKWGGRGFLNAKNLHNREMYSLREYFLSNECGMHRDVVAVDKGLTPLSLANENWRKPVVLSTDDRRDVWKGKELHGRFYRALTGPDVDLHASVNWLRFGDLFGETEGFVCAIADEVIKTNNYRKYIMKDGTVDICRACRRPGESLRHIISGCSHLANGEYLHRHNLVARIIHQQLALQYGLVESEVPYYKYTPGPVLENGRALLYWDRSIITDRTIVANKPDIVLIDRSQRRAVLVDIAIPHDENLVKAEKDKLSKYLDLAHEVTAMWSVDSTSIVPIVVSANGLIAKSLDQHLERLSLDGWIKGQIQKAVLLDTARIVRRFLTLEP

SEQ ID NO: 5289 - protein, 1211 aa, Hedya salicella
MLTRQRARAASTPDTNARPPPPPASSSSSASSSGDEFATAPDTNSQSNDDERGPPPPPPRPPTRRGRPPLPARLGPAGHPAPPTAPATGGLVRRMRWTQAMNEHCMRAYYGATEGGTHLSAYRDRMLLLFQTLEPAIAVSAQRLSDQVRAIQRRKLLDDAMLDQLRLEVLAARAASTSSRNPPATSPVSAPALDLVPGAPRVDPGSDEEHCASSVSTQANEQLRRTLEETIERYRFAPDSRPRLPRLPTNRRNLALVGALNALLDPYLRASEDLADTHSIMYCGAIAACRVACVKFPDADRAPRTAGGVPAWQVRIERRISTFRTLIAKLICSRGGNNRPRVMRYVAQAFAGTAVRPRDYMACVTERIDFLKQKVYAWASRIRRYRERVDRFQQNRLFQSDQRKVYRKWEGTDQRVTDGRLPDPTAMNNFWRSIWSVPVEHTEGEWMNVVERECEPIETMGAVTISPDDVSCAARTTQNWKSPGPDGLHNFWVKWFRCSHERLATQFEQALELGSLPSFLTTGVTFLLYKSGSTTEAKNYRPITCLPTLYKLLTSILRAKINTHIVVNNVLAFSQNGCRVGSRGTKELLLIDMTICQQVRRSRGTLSAAWIDYKKAYDSVPHSWLGRILELYKIDIVLKSFIGSCMRQWTTVLRQPGGRDGPPDPQDFIRIKRGIFQGDSLSPLWFCLALNPLSTLLKDSGLGCRLRRGGEIISHLLYMDDLKLFAPKRPELVVLLKGTETFSSAIKMEFGVDKCATMHVQRGKVVNSTNLQLSETMSLKSLSEVETYKYLGMSQSLSIADGDIKQAVKERFFCRLTRVLNSLLSGGNKARAFNAWVMPLLTYSFGILRWTQTELDALDRRVRMLLTTHRMLHPRSSVMRLYIPRKCGGRGFLNAKDLHNREVCSLREYFLNNECGIHRDVVAVDKGHTSLSLANENWRRPTVLSTVDRKDVWRSKELHGRFYKALTGPDVDLLASVNWLRFGDLFGETEGFACAITDEVIMTNNYRKYILKDGTVDICRACRRPGESLRHIISGCSHLANSEYLHRHNQVARIIHQQLAVKYGLVGSEVPYYKYAPMPVLENGRATLYWDRSIITDRTIVANKPDIVLVDRSKRRAILIDITIPHDENLVKAEKDKLSKYLDLAHEVTAMWDVDSTIIVPIVVSANGLIAKSLNEHLKRLSLHGWVKGQIQKAVILDTARIVRRFLFVQP

SEQ ID NO: 5290 - protein, 1216 aa, Erannis defoliaria
MITRSKAIRNAAEQHSARPPSPPAPSSPSASSGEDVFVTPRESSASSSDSDVSGPRTPAPPPPARRGRPPLPARLGPAGLPASRPALAAGGVVRRMRWSQTNNENCMRAYYRATEVGTNLTAYRVRMLSLFQALEPTVTVSAQRLSDQVRAIQRLNLLDQSLLDRLRLEAQSARSTPVLTRDSHVASSAPTLASMPTSVATLATPADPVVDEGDGTGMSVTTQVSEQLRRALEDAISQYRFALNSRPRLPRLPTHRRNLALMGALNALLAPYLRASEDLTDTHSILYCVAVAACRVARVKFPDSNRAPRTAGDVPAWQARIERRISTFRTLIAKLICFSRGNNRPRVIRFVTQAFAGTGIQPQQYMASVTERIDYLKQKVYAWASRIRRYRERVDRYWQNRVFQSDQRKVYRDWEGAEQRVSDGHLPDANAMTNFWRGIWSVPVEHTEGDWMRVVERECESIEPMGSILIDPVDVSCAIRTAQNWKSPGPDGLHNFWIKWFRCSHDRLATQFQEALELGSLPSFMTTGVTFLLHKSGSTTEPKNYRPITCLPTIYKLLTSILSTKINTHIVANNVLAPAQNGCRVGSRGTKELLLIDMAISQQVRRNKGALSAAWIDYKKAYDSVPHSWLERILELYKIDTTLKSFLSACMRQWTTVLRQPGGGNDSSDPQDLIRIERGIFQGDSLSPSWFCLALNPLSTLLKDSGLGYRLRRGGEVISHLLYMDDLKLFAPKHQDLLELLKTTQVFSSAIRMEFGVDKCSVMRVQRGKVVNSPDLQLSEIMTLRSLSEAETYKYLGMSESLGISVVDIKKSVKERLFCRLTKVLNSLLSGGNKARAFNGWVMPLLIYSFGILRWTQTELDALDRRVRQLLTAHRMLHPRSSVMRLYIPRKWGGRGFLNAKNLHNREVCSLRDYFLNNECGMHRDVVTVDKGLTPLSLANENWRRPSVLSTDDRKDVWKSKELHGRFYRALSGPDVDLLASVNWLRFGDLFGETEGFACAIADEVIKTNNYRKYIMKDGTVDICRACHRPGESLRHIISGCSHLANGEYLHRHNQVARIIHQQLALQYGLVESEVPYYKYAPAPVLENGRALLYWDRSIITDRTIVANKPDIVMVDRSQRRAVLVDVTIPHDENLVKAEKDKLSKYLDLTFEITAMWDVDSTIIVPIVVSANGLIAKSLDQYLKRLSLEGWVKGQIQKAVVLDTARIVRRFLTLQP

SEQ ID NO: 5291 - protein, 1215 aa, Erannis defoliaria
MITRSKSTQAGNDNNARPPPPPAPSSPSASSGDDEFHTPRESSASSSGSDVSGPRTPAPRPPARRGRPPLPARLGPAGQPASRPALAAGGVVRRMRWSQINNENCMRAYYGATEGGINLSAYRVRMLPLFQALEPTVTVSAQRLSDQVRAIQRLNLLDQSLLDRLRLEAHSARPTPASTRDSHVASSAPTLASVPTSSATLATPADPVVDEGDCTSMIVSSQVSEQLRRTLEDAIGQYRFALNSRPRLPRLPTHRRNLALMGALNALLAPYLRASEDLTDTHSILYCGAIAACRVARVKFPDTNRAPRPAGDVPAWQLRIERRISTFRTLIAKLICFSRGNNRPRVMRFVTQAFAGTGIRPQQYMANVTERIDYLKQKVYAWANRIRRYRERVDRYWQNRLFQSDQRKVYRNWEGNEQRVSDGQLPDASAMTNFWRGIWSVPVEHTEGDWMRVVERECESIEPMGSILIDPVDVSCAIRTAQNWKSPGPDGLHNFWIKWFRCSHDRLATQFQEALELGSLPSFMTTGVTFLLHKSGSTTEPKNYRPITCLPTIYKLLTSILSTKINAHIVANNVLAPAQNGCRVGSRGTKELLLIDMAISQQVRRNKGALSAAWIDYKKAYDSVPHSWLERILELYQIDTTLKSFLGACMRQWTTVLRQPGGGNGSSDSQDLIRIERGIFQGDSLSPSWFCLALNPLSTLLKDSGLGYRLRRGGEVISHLLYMDDLKLFAPKHQDLLELLKTTQVFSSAISMEFGVDKCAVMRVQRGKVVNSPDLQLSEIMTLRSLSEAETYKYLGMSESLGISVVDIKKSVKERFFCRLTKVLNSLLSGGNKARAFNGWVMPLLIYSFGILRWTQTELDALDRRVRQLLTAHRMLHPRSSVMRLYIPRKWGGRGFLNAKNLHNREVCSLRDYFLNNECGMHRDVVTVDKGLTPLSLANENWRTPSVLSTDDRKEVWKSKELHGRFYRVLSGPDVDLLASVNWLRFGDLFGETEGFACAIADEVIKTNNYRKYIMKDGTVNICRACHRPGESLRHIISGCSHLANGEYLHRHNQVARIIHQQLALQYGLVESEVPYYKYAPAPVLENGRALLYWDRSIITDRTIVANKPDIVMVDRSQRRAVLVDVTIPHDENLVKAEKDKLSKYLDLAFEITAMWDVDSTIIVPIVVSANGLIAKSLDQYLKRLSLDGWVKGQIQKAVVLDTARIVRRFLTLQP

SEQ ID NO: 5292 - protein, 1121 aa, Biston betularia
MRWSQTNNENCMRAYYGATEGGINLSAYRVRMLPLFQALEPTVAVSTQRLSDQVRAIQRLQLLDQSVLDRLRLEALPARPTPVSTRDSPVASSAPTLVSVPTSMATLATPTDPVVDVGECTSMGVCSQVSEHLRRTLEDAICQYRFAPDSRPRLPRLPTHRRNLALMGALNALLAPYLRASEDLTDTHSILYCGAIAACRVARVKFPDTNRAPRPAGGVPAWQLRIERRISTFRTLIAKLICFSRGNNRPRVMRFVTQAFAGTGIRPQHYLASVTERIDYLKQKVYAWANRIRRYRERADRYWQNRVFQSDQRKVYRDWEGTGQRVSDRQLPDTSVMTEFWRGIWSLPVEHTEGDWMRVVERECESIESMGSVLIDPVDVSCAIRTAQNWKSPGPDGLHNFWIKWIRCSHDRLATQFQEALELGSLPCFMTTGVTFLLHKTGSTTEAKNYRPITCLPTIYKLLTSILRTKINAHVVANNVLAPAQNGCRVGSRGTKELLLIDMTISQQVRRNKGALSTAWIDYKKAYDSVPHSWLEKVLELYKIDTTLKSFLGACMRQWTTVLRQPGSGDGSSEPQDLIRIERGIFQGDSLSPLWFCLALNPLSTLLKESGLGHRLRRGGEVISHLLYMDDLKLFAPKRPDLMELLKTTQVFSNAIKMEFGVDKCAVMHVQLGEVVNCPDLQLSETMTFRSLSEAETYKYLGMSESLGIAVVDIKRSVKERFFCRLTKVLNSFLSGGNKVRAFNGWVMPLLIYSFGILRWTQTELDALDRRVRQQLTTHRMLHPRSSVMRLYIPRKLGGRGFLSAKNLHNREVCSLRDYFRDNECGMHRDVVAVDKGLTPLSLANENWRKPSVLSTEDRKEVWKSKQLHGRFYRVLTGPDVDMLASVNWLRFGDLFGETEGFACAIADEVIKTNNYRKYIMKDGTVDICRACHRPGESLRHIISGCSHLANGEYLHRHNQVARIIHQQLALQYGLVESEVPYYKYAPAPVLENGRALLYWDRSIITDRTIVANKPDIVVVDRAQRRAVLVDITIPHDENLVKAEKDKLSKYLDLAHEITAMWDVDSTIIVPIVVTVNGLIAKSLDQHLERLSLDGWVKSQLQKAVILDTARIVRRFLTLQP

SEQ ID NO: 5293 - protein, 1215 aa, Biston betularia
MWTRSRTAAASGLHDAHIPSPPAPSTPSASSGDEEFATPLATSASSSSSDVSGPRTPAPPPPARRGRPPLPARLGPAGQSASRSALAAGGVVRRMRWSQTNNENCMRAYYGATEGGINLSAYRVRMLPLFQALEPTVAVSTQRLSDQVRAIQRLQLLDQSVLDRLRLEALPARPTPVSTRDSPVASSAPTLVSVPTSMATLATPTDPVVDVGECTSMGVCSQVSEHLRRTLEDAICQYRFAPDSRPRLPRLPTHRRNLALMGALNALLAPYLRASEDLTDTHSILYCGAIAACRVARVKFPDTNRAPRPAGGVPAWQLRIERRISTFRTLIAKLICFSRGNNRPRVMRFVTQAFAGTGIRPQHYLASVTERIDYLKQKVYAWANRIRRYRERADRYWQNRVFQSDQRKVYRDWEGTGQRVSDRQLPDTSVMTEFWRGIWSLPVEHTEGDWMRVVERECESIESMGSVLIDPVDVSCAIRTAQNWKSPGPDGLHNFWIKWIRCSHDRLATQFQEALELGSLPCFMTTGVTFLLHKTGSTTEAKNYRPITCLPTIYKLLTSILRTKINAHVVANNVLAPAQNGCRVGSRGTKELLLIDMTISQQVRRNKGALSTAWIDYKKAYDSVPHSWLERVLELYKIDTTLKSFLGACMRRWTTVLRQPGSGDGSSEPQDLIRIERGIFQGDSLSPLWFCLALNPLSTLLKESGLGHRLRRGGEVISHLLYMDDLKLFAPKRPDLMELLKTTQVFSNAIKMEFGVDKCAVMHVQRGEVVNCPDLQLSETMTFRSLSEAETYKYLGMSESLGIAVVDIKRSVKERFFCRLTKVLNSFLSGGNKVRAFNGWVMPLLIYSFGILRWTQTELDALDRRVRQQLTTHRMLHPRSSVMRLYIPRKLGGRGFLSAKNLHNREVCSLRDYFRDNECGMHRDVVAVDKGLTPLSLANENWRKPSVLSTEDRKEVWKSKQLHGRFYRVLTGPDVDMLASVNWLRFGDLFGETEGFACAIADEVIKTNNYRKYIMKDGTVDICRACHRPGESLRHIISGCSHLANGEYLHRHNQVARIIHQRLALQYGLVESEVPYYKYAPAPVLENGRALLYWDRSIITDRTIVANKPDIVVVDRAQRRAVLVDITIPHDENLVKAEKDKLSKYLDLAHEITAMWDVDSTIIVPIVVTVNGLIAKSLDQHLKRLSLDGWVKGQLQKAVILDTARIVRRFLTLQP

SEQ ID NO: 5294 - protein, 955 aa, Biston betularia
MGALNALLAPYLRASEDLTDTHSILYCGAIAACRVARVKFPDTNRAPRPAGGVPAWQLRIERRISTFRTLIAKLICFSRGNNRPRVMRFVTQAFAGTGIRPQHYLASVTERIDYLKQKVYAWANRIRRYRERADRYWQNRVFQSDQRKVYRDWEGTGQRVSDRQLPDTSVMTEFWRGIWSLPVEHTEGDWMRVVERECESIESMGSVLIDPVDVSCAIRTAQNWKSPGPDGLHNFWIKWIRCSHDRLATQFQEALELGSLPCFMTTGVTFLLHKTGSTTEAKNYRPITCLPTIYKLLTSILRTKINAHVVANNVLAPAQNGCRVGSRGTKELLLIDMTISQQVRRNKGALSTAWIDYKKAYDSVPHSWLERVLELYKIDTTLKSFLGACMRQWTTVLRQPGSGDGSSEPQDLIRIERGIFQGDSLSPLWFCLALNPLSTLLKESGLGHRLRRGGEVISHLLYMDDLKLFAPKRPDLMELLKTTQVFSNAIKMEFGVDKCAVMHVQRGEVVNCPDLQLSETMTFRSLSEAETYKYLGMSESLGIAVVDIKRSVKERFFCRLTKVLNSFLSGGNKVRAFNGWVMPLLIYSFGILRWTQTELDALDRRVRQQLTTHRMLHPRSSVMRLYIPRKLGGRGFLSTKNLHNREVCSLRDYFRDNECGMHRDVVAVDKGLTPLSLANENWRKPSVLSTEDRKEVWKSKQLHGRFYRVLTGPDVDMLASVNWLRFGDLFGETEGFACAIADEVIKTNNYRKYIMKDGTVDICRACHRPGESLRHIISGCSHLANGEYLHRHNQVARIIHQQLALQYGLVESEVPYYKYAPAPVLENGRALLYWDRSIITDRTIVANKPDIVVVDRAQRRAVLVDITIPHDENLVKAEKDKLSKYLDLAHEITAMWDVDSTIIVPIVVTVNGLIAKSLDQHLKRLSLDGWVKGQLQKAVILDTARIVRRFLTLQP

SEQ ID NO: 5295 - protein, 1207 aa, Blastobasis lacticolella
MITRSKRKNQTVNAQPPPTPAPVSSSPSSSNDEFTTASDTSESSDERGLSAAPPPPPARRGRPLPARLGPTGRPAPPMAPATGGVVRRMRWTQSINENVMRAYYGATEGGTNLSAYRDRMLPLFQVLEPAIDVTAQRLSDQVRAIQRLKRLDDSVLDRLRLESLPVRAVPISTMSLPATSPPQVSPPSPAPRVPRTDATVGVEDCTNVSSVSTETNEYVRRTLEETIARYRFAPNSRPRLPRLPTNRRNLALMGAINVLLDSYIRASDNLVDTHSIMYCGAITACRVARVKFPDADPAPRVAGGAPAWQKRIERRINTSRTLIAKLICFKEGNNRPRVMRFVDQAFAGTGISSRDYMVCATERIDFLKQKVCAWANRIRRYRERVDRFRLNRLFQSDQRKVYRKWEGTNPSGSDGSLPDASASNNFWRSIWSVPVEHSEGDWMNVVKRECEIIEPMAAVSICPEDVSCAIDTAQNWKCPGPDGLHNFWIKWFRCSHERLATQFQEALEHGSLPTLFTTGITFLLYKSGSTTEAKNYRPITCLPTLYKLLTSILRKKINNHIIENNILAMSQNGCRVGSRGTKELLLIDMTICQQVRRSRGSLSAAWIDYKKAYDSVPHSWLRRVLELYKINATLRSFLDACMRQWITVLSQPVGGIDHSPPQDFIRIERGIFQGDSLSPLWFCLALNPLSTLLKHSELGCRLRREGEVISHLLYMDDLKLFAPKRQDLMELLKITKIFSNAIRMEFGADKCAVMHVQRGKVANTTNLQLSETMSFRSLSEAETYKYLGMSQSLGIVDEGVKQAVKERFFCRLTKVLNSLLSGGNKVRSFNAWVMPLLTYSFGILRWTQTELDALDRRVRLLLTTHRMLHPRSSVMRLYIPRKCGGRGFLSAKTLHNREVCSLRDYFLNNECGMHRAVVAVDRGLTPLSLANENWHKPKVLSTIDRKDVWKSKELHGRFYRALTGPDVDLLASVNWLRFGDLFGETEGFVCAIADEVIMTNNYRRYILKDGTVDICRACRCPGESLRHITSGCGRLANGEYLHRHNLVARIIHQQLALQYGLVESEVPYYKYVPAPVLENGLATLYWDRSVITDRTIVANRPDIVLTDRSKRRAVLVDVTIPHDGNLVKAEKDKQCKYLDLAHEVTAMWDVDSTIIVPIVVSVNGLIAKSLDQHLKSLSLDGWVKGQIQKAVLLETARIVRRFLSLQP

SEQ ID NO: 5296 - protein, 1208 aa, Apotomis turbidana
MITRARRQRAEADNARPPPPPAPSSSSSSSSGDDFATAPDTNGSSEDGRGPPPPPTRPPARRGRPPLPARLGPTGQPAPPTAPATGGIVRRMRWSQGINENVMRAYYGATEGGISLSAYRDRMLPLFLTLEPAITVTAQRLSDQVRFIQRRKLLDDATLDRLRLEILAARAASTPARDPSATSPVSAPAPNLVPGVPRTDRDADEEDCASSVSTQANEQLRGALEEAIRRYRSAPDSRPRLPRLPMHKRNLALMGALDALLDPYLRASEDLADTHSIMYCGAIAACRVARVRFPDTERAPRTAEGVPAWQIRIERRINSFRTLIAKLICFRGGNNRPRVMRYVTQAFAGTGTRPCDYMACVTERIDFLKQKVYAWASRIRRYRERVDRFQQNRLFQSDQRKVYRKWEGTDQCVADGQLPDPTAMINFWRSIWSVPVEHTEGEWMNVVRRECEPIEVMGAVTISPDDVSCAARKAQNWKSPGPDGLHNFWIKWFRSSHECLATQLQDALELGSLPSFMTTGVTFLLHKSGSTTEAKNYRPITCLPTLYKLLTSILRTKINTHIVANNILAFSQNGCRVGSRGTKELLLIDTTICQQVRRNRGSLSAAWVDYKKAYDSVPHSWLERILELYKIDTALRSLLSACMGQWTTVLRQPGGGDGPPGPQDLIRIERGIFQGDSLSPLWFCLALNPLSTLLKDSGLGCRLRRGGEVISHLLYMDDLKLYAPKRQDLVELLEVTETFSSAIKMEFGVDKCAVMHVQRGKVVNSANLQLSETMSLRSISEAETYKYLGMSQSLGIADGDIRQALKERFFCRLTKVLNSLLSGGNKARAFNAWVMPPLTYSFGILRWTQTELDALDTRVRQLLTTHRMRHPRSSVMRMYIPRKCGGRGFLNAKDLHNREVCSLREYFLNNECGIHRDVVAVDKDLTSLSLANENWRRPKVLSTDDRKAVWKSKELHGRFYKALTGPDVDLLASVNWLRFGDLFGETEGFICAIADEVMMTNNYRRYILKDGTVDICRACRRPGESLRHIISGCSHLANGEYLHRHNQVARIIHQQLALRYGLVGSEVPYYKYAPMPVLENGRATLYWDRSIITDRTIVANKPDIVLVDRSKRQAVLVDITIPHDENLVKAEKDKLSKYLDLAHEVTAMWDVDSTIIVPIVVSANGLIAKSLDKHLKRLSLDGWIKGQIQKAVLLDTARIVRRFLSLQP

SEQ ID NO: 5297 - protein, 1206 aa, Notocelia uddmanniana
MNTRLRSRAEQRARLPSPPAPSSSSPSSSDDEFATAPDSSESSSDERGPSPPPPQTSARRGRRPLPARLGPTGHSAPPTAPAAGGVVRRMRWTQEMNENCMRAYFGATEGETNLSAYRVRMLPLFQALEPTITVSAQRLSDQVRVIQRNKRLDDLTLDRLRLEALSARAAPTSARDLPATSPAPVPAPNTAPRAPRVDPSADGDCADQSVSTQAHEQLRRALDEAITRYRSTRNSRPRLPRLPVNRRNLALMGALNDLLDPYLRASDDLIDTHSIMYCGAIAACRVARVKFPDADRATRTAGGVPAWQVRIERRINTFRTLIAKLICFRGGNSRPRVMRFVNQAFAGTGVRPRDYMACVTERIDFLKQKVYAWASRIRRYRERVDRYQQNRLFQSDQRKVYRKWEGTDHRVCDGQRPDATAMVNFWRSIWSVPVEHTEGAWIGVVERDCEFIEPMGSVTISPEDVSCAIRTAPNWKSPGPDGLHNFWLKWFRCSHERLATQFQQALELGSLPPPLTTGVTSLLYKSGSTTEAKNYRPITCLPTLYKLLTSILRAKINTHIVTNNILAPAQNGCRVGSRGTKELLLIDMTICQRVRRNRGTLSASWIDYKKAYDSVPHSWLRRILELYKVDAALRSFLSACMGQWTTVLRQPGGGDGPSGPQDSIRIERGIFQGDSLSPLWFCLALYPLSTLLQDSGLGCQLRRGGEVISHLLYMDDLKLFAPNRQDLLELLKTTEVFSSAIKMEFGVDKCAVMHVQRGKVVNSTNLQLSETMSLRSLSEAETYKYLGMSQALGIEGEGIKQAVKERFFCRLTKVLNSFLSGGNKARAFNAWVMPLLTYSFGILRWTQTELDALDRRVRVLLTAHRMLHPRSSVMRLYIPRKCGGRGFLNAKDLHNREVCSLRDYFLNSECGMHRDVVAVDASFTPLSMANENWRRFKVLSTEDRKAEWKSKELHGRFYRALTGPDVDLLASVNWLRFGDLFGETEGFVCAIADEVIMTNNYRKYILKDGTVDICRACRRPGESLRHIISGCSHLANGEYLHRHNLVARIIHQQLALSYGLVDFEVPYYKYLPAPVLENGRATLYWDRSIITDRTIVANKPDIVLIDRSKRQAVLVDITIPHDENLVKAEKDKVSKYLDLAHEVAAMWDVDSTIIVPIAVSANGLIAKSLDQHLKRLSLDGWVKGQIQKAVLLDTARIVRRFLSLSP

SEQ ID NO: 5298 - protein, 1206 aa, Notocelia uddmanniana
MNTRLRSRAEQRARLPSPPAPSSSSPSSSDDEFATAPDSSESSSDERGPSPPPPQTSARRGRRPLPARLGPTGHSAPPTAPAAGGVVRRMRWTQEMNENCMRAYFGATEGETNLSAYRVRMLPLFQALEPTITVSAQRLSDQVRVIQRNKRLDDLTLDRLRLEALSARAAPTSARDLPATSPAPVPAPNTAPRAPRVDPSADGDCADQSVSTQAHEQLRRALDEAITQYRSTPNSRPRLPRLPVNRRNLALMGALNDLLDPYLRASDDLIDTHSIMYCGAIAACRVARVKFPDADRATRTAGGVPAWQVRIERRINTFRTLIAKLICFRGGNNRPRVMRFVNQAFAGTGVRPRDYMACVTERIDFLKQKVYAWASRIRRYRERVDRYQQNRLFQSDQRKVYRKWEGTDHRVCDGQRPDATAMVNFWRSIWSVPVEHTEGAWIGVVERDCESIEPMGSVTISPEDVSCAIRTAPNWKSPGPDGLHNFWLKWFRCSHERLATQFQQALELGSLPPPLTTGVTSLLYKSGSTTEVKNYRPITCLPTLYKLLTSILRAKINTHIVTNNILAPAQNGCRVGSRGTKELLLIDMTICQRVRRNRGTLSASWIDYKKAYDSVPHSWLRRILELYKVDAALRSFLSACMGQWTTVLRQPGGGDGPSGPQDSIRIERGIFQGDSLSPLWFCLALNPLSTLLQDSGLGCQLRRGGEVISHLLYMDDLKLFAPNRQDLLELLKTTEVFSSAIKMEFGVDKCAVMHVQRGKVVNSTNLQLSETMSLRSLSEAETYKYLGMSQALGIEGEGIKQAVKERFFCRLTKVLNSFLSGGNKARAFNAWVMPLLTYSFGILRWTQTELDALDRRVRVLLTAHRMLHPRSSVMRLYIPRKCGGRGFLNAKDLHNREVCSLRDYFLNSECGMHRDVVAVDASFTPLSMANENWRRFKVLRTEDRKAEWKSKELHGRFYRALTGPDVDLLASVNWLRFGDLFGETEGFVCAIADEVIMTNNYRKYILKDGTVDICRACRRPGESLRHIISGCSHLANGEYLHRHNLVARIIHQQLALSYGLVDFEVPYYKYLPAPVLENGRATLYWDRSIITDRTIVANKPDIVLIDRSKRQAVLVDITIPHDENLVKAEKDKVSKYLDLAHEVTAMWDVDSTIIVPIVVSANGLIAKSLDQHLKRLSLDGWVKGQIQKAVLLDTARMVRRFLSLSP

SEQ ID NO: 5299 - protein, 1210 aa, Notocelia uddmanniana
MITRSKARQEASTQSARPPSLTASSDSSPSSSGDEFATAPDTSESSDESGPPPPPPRPPARRGRPPLPARLEPAGHPAPPTAPTTGGIVRCMQWSQTMNENCMRAYYGATDGGTNLSAYRVRMLPLFQALEPAISVSAQRLSDQVRVIQRLKRLDDATLDRLRMEALSARAASASARNPPATLPAPVPAPDTTPGVPRVDSNADEDCANQSVSIHAHELMRRALEEAITRYRSTTSSRPRLPRLPVKRRNLALMGALNDLLAPYLRASEDLIDTHSIMYCGAIAACRVARVKFPDADRAPRTAGSVPTWQVRIERRIDTYRTLIAKLICFRGGNSRPRVMRFVNQAFARTGVRPRDYMTCVTERIDFLKQKVYAWASRIRRYRERVDRYQLNRLFQSDQRKVYRKWEGTDHRVSDGQRPDATAMVNFWRSIWSVPVEHTEGAWMDVVKRVCESIEPMGSVTRTVSPEDVSCAIRTAPNWKSPGPDGLHNFWLKWFRCSHARLAAQFQQAIELGSLPPPLTTGVTSLLYKSGSTTEAKNYRPITCWPTLYKLLTSILRAKINTHIVANNILAPAQNGCRVGSRGTKELLLIDMTICQRVRRNRGTLSAAWIDYKKAYDSVPHSWLRRILELYKVDAVLRSFLVACMGQWTTVLRQPGGGEGPSGPQDSIRIERGIFQGDSLSPLWFCLALNPLSALLKDSGLGCQLRREGEVISHLLYMDDLKLFAPNKHDLLELLKTTEVFSSAIKMEFGVDKCAVMHVQRGKVVNSTNLQISETMALRSLPEAETYKYLGMSQSLGIEGGDIKRAVRERFFCRLTKVLNSFLSGGNKVRAFNAWVMPLLTHSFGILRWTQTELDFLDRRVRVLLTAHRMLHPRSSVMRLYIPRKLGGRGFLNAKDLHNREVCSLRDYFLNSECGMHRDVVAADASFTPLSMANENWRRFKVLSIEDRRAVWKSKELHGRFYKALTGPEVDLLASVNWLRFGDLFGETEGFVCAIADEVIMTNNYRKYILKDGTVDICRACRRPGESLRHIISGCSHLANGEYLHKHNLVPRIIHQQLALLYGLVDFEVPYYKYTPALVLENGRATLYWDRSVITDRTIVANKPDIVLTDRLKRQAVLVDITIPHDENLVKAEKDKVSKYLDLAHEVTAMWDVDSTIIVPIVVSVNGLIAKSLDQHLKRLSLDGWVKGQIQKAVLLDTARIVRRFLSLSP

SEQ ID NO: 5300 - protein, 1206 aa, Notocelia uddmanniana
MNTRLRSRAEQRARLPSPPAPSSSSPSSSDDEFATAPDSSESSSDERGPSPPPPQTSARRGRRPLPARLGPTGHSAPPTAPAAGGVVRRMRWTQEMNENCMRAYFGATEGETNLSAYRVRMLPLFQALEPTITVSAQRLSDQVRVIQRNKRLDDLTLDRLRLEALSARAAPTSARDLPATSPAPVPAPNTAPRAPRVDPSADGDCADQSVSTQAHEQLRRALDEAITRYRSTPNSRPRLPRLPVNRRNLALMGALNDLLDPYLRASDDLIDTHSIMYCGAIAACRVARVKFPDADRATRTAGGVPAWQVRIERRINTFRTLIAKLICFRGGNNRPRVMRFVNQAFAGTGVRPRDYMACVTERIDFLKQKVYAWASRIRRYRERVDRYQQNRLFQSDQRKVYRKWEGTDHRVCDGQRPDATAMVNFWRSIWSVPVEHTEGAWIGVVERDCESIEPMGSVTISPEDVSCAIRTAPNWKSPGPDGLHNFWLKWFRCSHERLATQFQQALELGSLPPPLTTGVTSLLYKSGSTTEAKNYRPITCLPTLYKLLTSILRAKINTHIVTNNILAPAQNGCRVGSRGTKELLLIDMTICQRVRRNRGTLSASWIDYKKAYDSVPHSWLRRILELYKVDAALRSFLSACMGQWTTVLRQPGGGDGPSGPQDSIRIERGIFQGDSLSPLWFCLALNPLSTLLQDSGLGCQLRRGGEVISHLLYMDDLKLFAPNRQDLLELLKTTEVFSSAIKMEFGVDKCAVMHVQRGKVVNSTNLQLSETMSLRSLSEAETYKYLGMSQALGIEGEGIKQAVKERFFCRLTKVLNSFLSGGNKARAFNAWVMPLLTYSFGILRWTQTELDALDRRVRVLLTAHRMLHPRSSVMRLYIPRKCGGRGFLNAKDLHNHEVCSLRDYFLNSECGMHRDVVAVDASFTPLSMANENWRRFKVLSAEDRKAEWKSKELHGRFYRALTGPDVDLLASVNWLRFGDLFGETEGFVCAIADEVIMTNNYRKYILKDGTVDICRACRRPGESLRHIISGCSHLANGEYLHRHNLVARIIHQQLALSYGLVDFKVPYYKYLPAPVLENGRATLYWDRSIITDRTIVANKPDIVLIDRSKRQAVLVDITIPHDENLVKAEKDKVSKYLDLAHEVTAMWDVDSTIIVPIVVSANGLIAKSLDQHLKRLSLDGWVKGQIQKAVLLDTARIVRRFLSLSP

SEQ ID NO: 5301 - protein, 1207 aa, Crocallis elinguaria
MITRSRNKAGTSSARQSPPLASSSPSSSLGDEYGTPLDTSASSDEDGPPSPPPPPPPARRGRPPLPARLGPAGHSVPRAAPATGGIVRRMRWTSDMNENCMRAYYGATEGGTNMSAYRDRMLPLFQTLEPSVAVSAQRLSDQVRAIQRLKLLDESVLDRLRLEALPIRATSASTRDLSVAPPVLAPLPAPSSVATRIDPVVDEDDCANISVSTQVNEQLRRALEDAILDYQYTPDSRPRLPRLPTNRRNLALMGALNVLLAPYLRASENLFDTHSIMYCGAIAVCRVARVKFPDADRAPRTAGSAPAWQVRIERRINTFRTLIAKLVCFSRGNNRPRVMRFVNQAFAGTGIRPQNYMAGVTERIDFLKQKIYAWVNRIRRYRERVDRYHQNRLFESDQRKVYRNWVGTDQRVSDGQLPDTNAMINFWRGIWSVPVEHTEGDWMRTVEQSCESIETMGSVTIDPIDVSCAIRTAQNWKSPGPDGLHNFWIKWIRCSHECLAVQFQEALELGSLPCFLTTGVTSLLHKSGSTTEAKNYRPITCLPTLYKLLTSILRVKINSHVVANNILAPAQNGCRVGSRGTKELLLIDTAICQRVRRNKGALSAAWIDYKKAYDSVPHSWLERILELYKIDATLRSFLSMCMRQWTTVLRQPGSGNSPSGPENFIKIERGIFQGDSLSPLWFCLALNPLSTLLRDSRLGCQLRREGEIISHLLYMDDLKLFAPKRPDLMELLKITEIFSSAIKMDFGVDKCAVMHVQRGKVVNSDNLQLSETMTLRSLSEAETYKYLGMSQSLGIAVGDIKQSVKERFFCRLTKVLNSLLSGGNKARAFNGWVMPLLIYSFGILKWTQTELDSLDRRVRQLLTYHRMLHPRSSVMRLYIPRKWGGRGFLNAKTLHNREVCSLREYFLNNECGMHRDVVAVDRNLTPLSLANENWRKPVVMTTEDRKDVWKSKELHGRFYRALTGSDVDLLASVNWLRFGDLFGETEGFVCAIMDEVIKTNNYRKYIMKDGTVDICRACRRPGESLRHIISGCSHLANGEYLHRHNLVARIIHQQIALQYGLVESEVPYYKYAPAPVLENGRALLYWDRSIITDRTIVANKPDIVLVDRSQRRAVLVDITVPHDENLVKAEKDKLSKYLDLAHEVTAMWNVDSTIIVPIVVSANGLVAKSLDQHLKRLSLDGWIKGRMQKAVLLDTARIVRRFLTLQP

SEQ ID NO: 5302 - protein, 1208 aa, Crocallis elinguaria
MITRSRTKKAGTASARKTPPPASSSPSSSSGVEYGTPLDTSASSDEDGPPSPPPPPPPARRGRPPLPARLGPAGHSVPRAAPATGGIVRRMRWTSDMNENCMRAYYGATEGGTNMSAYRDRMLPLFQTLEPSVAVSTQRLSDQVRAIQRLKLLDESVLDRLRLEALPIRATSASARDLSVAPPVPAPLPAPSSVATRIDPVVDEDDCANISVSTQVNEQLRRALEDAILEYQYTPDSRPRLPRLPTNRRNLALMGALNVLLAPYLRASENLFDTHSIMYCGAIAVCRVARVKFPDADRAPRPAGSAPAWQVRIERRINTFRTLIAKLICFSRGNNRPRVMRFVNQAFAGTGIRPQNYMAGVTERIDFLKQKIYAWVNRIRRYRERVDRYHQNRLFESDQRKVYRNWEGTDQRVSDGQLPDTNAMINFWRGIWSVPVEHTEGDWMRTVEQSCESIETMGSVTIDPIDVSCAIRTAQNWKSPGPDGLHNFWIKWIRCSHECLAVQFQEALELGSLPRFLTTGVTSLLHKSGSTTEAKNYRPITCLPTLYKLLTSILRAKINSHVVANNILAPAQNGCRVGSRGTKELLLIDTAICQQVRRNKGALSTAWIDYKKAYDSVPHSWLERILELYKIDTTLRTFLSTCMRQWTTVLRQPGSGNSPSGPENFIKIERGIFQGDSLSPLWFCLALNPLSTLLRDSRLGCKLRREGEIISHLLYMDDLKLLAPKSPDLMKLLKITEIFSSAIKMEFGVDKCAVMHVQRGKVVNSDNLQLSETMTLRSLSEAETYRYLGMSQSLGITVGDIKQSVKERFFCRLTKVLNSLLSGGNKARAFNGWVMPLLIYSFGILKWTQTELDSLDRRVRQLLTYHRMLHPRSSVMRLYIPRKWGGRGFLNAKTLHNREVCSLREYFLNNECGMHRDVVAVDRNLTPLSLANENWHKPVVMTTEDRKEVWKGKELHGRFYRALTGSDVDLLASVNWLRFGDLFGETEGFVCAIMDEVIKTNNYRKYIMKDGTVDICRACRRPGESLRHIISGCSHLANGEYLHRHNLVARIIHQQIALQYGLVESEVPYYKYAPAPVLENGRALLYWDRSIITDRTIVANKPDIVLVDRSQRRAVLVDITVPHDENLVKAEKDKLSKYLDLAHEVTAMWNVDSTIIVPIVVSANGLVAKSLDQHLKRLSLDGWIKGRMQKAVLLDTARIVRRFLTLQP

SEQ ID NO: 5303 - protein, 1212 aa, Peribatodes rhomboidaria
MITRLKKKQLAAEASTRPPPPPSSSSGSPSSEEDEYATPLDTTDSSNEEAAPTPAPPPPPARRGRPPLPARLGPAGRSAPPTAPATGGVVCRMRWTQTMNENCMRAYYGATEGGTNLTAYRVRMLSLFQVLEPTVTVSTQRLSDQVRAIHRCKLLDQSVLDRLCLEVIHAHPIPASTRDRPVASSAPTLASVPASAATLATLADTDVDGNCTSVSVSSQVSEHLRRTLEDAFSQYRYAPDSRPRLPRLPTHRRNMALMGALNVLLAPYLRASENLTDTHSILYCGAIAACRVARVKFPDTNRTSRHAGGVPAWQVRIERRIGTFRTLIAKLLCFSRGNTRPRVMRFVTQAFAGTDIRPQYYLASVTERVDYLKQKVYAWANRIRRYRERVDRYWQNRLFQSDQRKVYRDWEGTEQCVIDGHRPDASAMIDFWRGIWSVPIEHTEGEWMRFVERECESIESMESILIDSVDVSCAIRTAQNWKSPGPDGLHNFWIKWIRCSHDRLAIQFQEALELGSLPSFMTTGVTFLLHKSGSTTDPKNYRPITCLPTIYKLLTSILRNKINTHIVANNILAPAQNGCRVGSRGTKELLLIDMTISQQVRRNKGALSVAWIDYKKAYDSVPHSWLERILELYKIDITLKSFLSACMRQWTTVLRQPGGGEVSTDPQDLIRIERGIFQGDSLSPLWFCLALNPLSTLLKDLGLGHRLRRGGEVISHLLYMDDLKLFAPKRQDLMELLKTTEVFSSAIKMEFGVDKCAVMHVQRGKVVNSPNLQLSETMTLRSLSEVETYKYLGMSESLGISVVDIKKSIKERFFCRLTKVLNSLLSGGNKVRAFNGWVMPLLIYSFGILRWTQTELDALDRRVRQLLTTHRMLHPRSSVMRLYIPRKWGGRGMLNVKNLHNREVYRLRSFFRNNDCGMHSDVVAVDKGLTPLSLANENWRQPSVLSTEDRKNVWKGKELHGRFYRALTGPDVDLLASVNWLRFGDLFGETEGFACAIADEVIKTNNYRKYILKDGTVDICRACHRPGESLRHIISGCSHLANGEYLHRHNQVARIIHQQLALQYGLVESEVPYYKYAPAPVLENGRALLYWDRSIITDRTIVANKPDIVLVDRSQRRAVLVDITIPHDENLVKAEKDKLSKYLDLAHEVTAMWDVDSTIIVPIVVTVNGLIAKSLDQHLKRLSLDGWIKGQIQKAVILDTCRIVRRFLTLQP

SEQ ID NO: 5304 - protein, 1025 aa, Pammene fasciana
MPAPDLASGAPRVDPSADEEEIATQRVSSTANEQLRRTLEEAITQYRSTNIPRPRLPRLPMNRRNLALMGALNDLLDPFLRTSKDLDDTHSIMYCGAIAACRVARVKFPDAERAPRTAGGVPAWQVRIERRINSFRTLIAKLICFRGGNNRPRVMRFVHQAFAGTDIEPRDYMANVTERIDFLKQKVYAWASRIRRYRERVDRFRQNRLFQSDQRKVYRRWEEADPRVSDVRLPDATAMSDFWRSIWSAPVEHTEGEWMSVVERECETIEPMGAITISPDDVSCAIRTAQNWKSPGPDGLHNFWLKWFRCSHSRLATQFQQALELGSLPPSLTTGVTFLLYKFGSTTEAKNYRPITCLPTLYKLLTSILRAKINAHMVANNILASAQNGCRVGSRGTKELLLIDMTICQRVRRNRGALSVAWIDYKKAYDSVPHSWLERILELYKIDAALRSFLGACMRQWTTVLRQPGGGDDPPGPQDFIRIERGIFQGDSLSPLWFCLALNPLSTLLKDSGLGCRLRREGEVISHLLYMDDLKLFAPNNRDLLELLKTTEVFSSSIKMEFGVDKCAVMHVQRGKVVNSTNLQLSETMTFRSISESETYKYLGMSQSLGIEDAGIKQALRERFFGRLTKVLNSLLSGGNKVRAFNAWVMPLLTYSFGILRWTQTELDALDRRVRQLLTTHRMLHPRSSVMRLYIPRKCGGRGFLNAKNLHNREVYNLRNYFLNNECGMHRDVVAIDKGLTPLSLANENWRKPVVLSTEDRKAVWKSKELHGRFYGALTGPDVDLLASVNWLRFGDLFGETEGFACAIADEVIMTNNYRRYILKDGTVDICRACRRPGESLRHIISGCSHLANGEYLHRHNLVARIIHQQLALLYGLVDHEVPYYKYTPAPVLENGRATLYWDRSIITDRTIVANKPDIVVIDRPQRRAMLVDITVPCDVNIVKAEKDKSSKYLDLAHEVTAMWEVDSAIIVPIVVSANGLIAKSLDQHLERLSLRGCGWIKGQIQKAVILDTARIVRRFLSLRP

SEQ ID NO: 5305 - protein, 1210 aa, Pammene fasciana
MITRSKARAATTHARPPSPLASSSSPSTSSSSDDFETAPDTDESSDESGPPPPPPQPPARRGRPPLPARLGPTGHPVPPRAPAAGGIVRRMRWTCSMNENVMRAYYGATEGGTNLCAYRARILPLFQALEPTIDTTTQRLSDQVRVIQRLKRLDDATLDRLRLEALSARAASTSARDPPATSPDPMPAPDLASGAPRIDPSADEEYIASQSVSSTANEQLRRTLEEAITQYRSTNIPRPRLPRLPMNRRNLALMGALNDLLDPILRTSKDLDDTHSIMYCGAIAACRVARIKFPDAERAPRTAGGVPAWQVRIERRINSFRTLIAKLICFRGGNNRPRVMRFVYQAFAGTDIEPRDYMANITERIDFLRQKVYAWASRIRRYRERVDRFRQNRLFQSDQRKVYRRWEEADPRVSDVRLPDATAMTDFWRSIWSAPVEHTEGEWMNVVERECESIEPMGAITISPDDVSCAIRTSQNWKSPGPDGLHNFWLKWFRCSHSRLATQFQHALELGSLPPSLTTGVTFLLYKSGSTTEAKNYRPITCLPTLYKLLTSILRAKINAHMVANNILASAQNGCRVGSRGTKELLLIDMTICQRVRRNRGALSAAWIDYKKAYDSVPHSWLERILELYKVDAALRSFLGTCMRQWTTVLRQPGGGDDPPGPQDFIRIERGIFQGDSLSPLWFCLALNPLSTLLKDSGLGCRLRREGEVISHLLYMDDLKLFAPNNRDLLELLKTTEVFSSSIKMEFGVDKCAVMHVQRGKVVNSTNLQLSETMTFRSISESETYKYLGMSQSLGIEDVGIKQALKERFFGRLTKVLNSLLSGGNKVRAFNAWVMPLLTYSFGILRWTQTELDALDRRVRLLLTTHRMLHPRSSVMRLYIPRKCGGRGFLNAKYLHNREVYNLRNYFLNNECGMHRDVVTVDKNLTPLSLANENWRKPVVLSTEDRKAVWKSKELHGRFYGALTGPDVDLLASVNWLRFGDLFGETEGFACAIADEVIMTNNYRRYILKDGTVDICRACRRPGESLRHIISGCSHLANGEYLHRHNLVARIIHQQLALLYGLVAHEVPYYKYTPAPVLENGRATLYWDRSIITDRTIVANKPDIVVIDRPQRRAMLVDITVPCDVNLVKAEKDKSSKYLDLAHEVTAMWEVDSAIIVPIVVSANGLIAKSLDQHLERLSLRGCGWIKGQIQKAVILDTARIVRRFLSLRP

SEQ ID NO: 5306 - protein, 1214 aa, Pammene fasciana
MITRSKTRLQQASRAPPNARPPSSPASSVSSPSSSGDEFATAPDTSESSDERGPPPPPPRPPARRGRPPLPARLGLAGLPVPPRAPAAGGIVRRMRWTPSMNENVMRAYYGATEGGTNLCAYRDRMLPLFQALEPTIDTTAQRLSDQVRVIQRLKRLDDATLDRLRLEALSARAASTSARDPPATSLDPMPAPDLASGAPRIDPSADEEEIANQSVSSTANEQLRRTLEEAITQYRSTNITRPRLPRLPMNRRNLALMGALNDLLDPLLRTSKDLDDTHSIMYCGAIAACRVARVKFPDAERAPRTAGGVPAWQVRIERRINSFRTLIAKLICFRGGNNRPRVMRFVHQAFAGTDIEPRDYMANVTERIDFLKQKVYAWASRIRRYRERVDRFRQNRLFQSDQRKVYRRWEEADPRVSDVRLPDATAMTDFWRSIWSVPVEHTEGEWMSVVERECESIEPMGAITISPDDVSCAIRTAQNWKSPGPDGLHNFWLKWFRCSHSRLATQFQQALELGSLPPSLTTGVTFLLYKSGSTTEAKNYRPITCLPTLYKLLTSILRAKINAHMVANNILASAQNGCRVGSRGTKELLLIDMTICQRVRRNRGALSAAWIDYKKAYDSVPHSWLERILELYKIDAALRSFLGACMRQWTTVLRQPGGGDDPPGPQDFIRIERGIFQGDSLSPLWFCLALNPLSTLLKDSGLGCRLRREGEVISHLLYMDDLKLFAPNNRDLLELLKTTEVFSNSIKMEFGVDKCAVMHVQRGKVVNSTNLQLSETMTFRSISESETYKYLGMSQSLGIEDAGIKQALRERFFGRLTKVLNSLLSGGNKVRAFNAWVMPLLTYSFGILRWTQTELDALDRRVRLLLTTHRMLHPRSSVMRLYIPRKCGGRGFLNAKNLHNREVYNLRNYFLNNECEMHRDVVAIDKGLTPLSLANENWRKPVVLSTEDRKAVWKSKELHGRFYGALTGPDVDLLASVNWLRFGDLFGETEGFACAIADEVIMTNNYRRYILKDGTVDICRACRRPGESLRHIISGCSHLANGEYLHRHNLVARIIHQQLALLYGLVDHEVPYYKYTPAPVLENGRATLYWDRSIITDRTIVANKPDIVVIDRPQRRAMLVDITVPCDVNLVKAEKDKSSKYLDLAHEVTAMWEVDSTIIVPIVVSANGLIAKSLDQHLERLSLRGCGWIKGQIQKAVILDTARIVRRFLTLRP

SEQ ID NO: 5307 - protein, 900 aa, Ennomos quercinarius
MVPPRGRYITTFRTLIAKLVCFSRGNHRPRVMRFVTQAFTGTGIRPQDYMACVTERINFLKQKVYAWASRIRRYRERVDRYQQNRLFQSDQRKVYRNWERTGQRVVDGQLPDANAMSEFWRSIWSVPVEHTEGDWMRVVERACEPIESMGSITIDPEDISCAIRTAQNWKSPGPDGLHNFWIKWIRCSYPCLAIQFQEALEAGSLPSFMTTGVTFLLHKSGSTTEAKNYRPITCLPTLYKLLTSILRTKINSHIVANNVLAPAQNGCRVGSHGTKELLLIDTAICQQIQRNRGALSTAWIDYKKAYDSVPHSWLERILELYKIDATLRSFLSTCMRQWTTVLRQPGRGESVSDPQDLIRIERGIFQGDSLSPLWFCLALNPLSTLLKDSGLGYRLRRGGETISHLLYVDDLKLFTPQRPQLIELLKITENFSNSIKMEFGVDKCAVMHVHGGKVVNSTNLQLSETMTLRSLSESETYRYLGMSESLGISVGDVKRMVKERFFCRLTKVLNSLLSGGNKVRAFNGWVMPLLIYSFGILRWTQTELDALDRKVRQLLTSHRMLHPRSSVMRLYIPRKWGGRGFLNAKTLHNREVCSLREYFLNNECGMHRDMVAVDKGLTPLSLANENWRKPVVLSTEDRRDVWKGKELHGRFYRALTGPDVDLHASVNWLRFGDLFGETEGFVCAIADEVIKTNNYRKYIMKDGTVDICRACRRPGESLRHIISGCSHLANGEYLHRHNLVARIIHQQLALQYGLVESEVPYYKYTPGPVLENGRALLYWDRSIITDRTIVANKPDIVLVDRPQRRAVLVDITIPHDENLVKAEKDKLSKYLDLAHEVTAMWNVDSTSIVPIVVSANGLIAKSLDQHLERLSLDGWIKGQIQKAVLLDTARIVRRFLTLQP

SEQ ID NO: 5308 - protein, 1208 aa, Ennomos quercinarius
MITRSKTKKADTQSARPPPPPAPSSPSSSSGDEYGTPPDTTASSDEDGPPSPPPPPPPARRGRPPLPARLGPAGQPAPRAAPATGGIVRRMRWTQAMNENCMRAYYGATEGGSSLTAYRDRMLSLFQDLEPAVAVSAQRLSDQVRAIQRCKMLDEPTLDRLRLEALPIRATSPSPRVLPAALPDPGPIMGPLPVTPRGDPAIDGEESASDSVSTQANEQLRSTLEDAILQYRSTPTSRPRLPRLPTNRRNLVLMGALNTLLAPYLRTSEDLVDTHSILYCGAIAACRVARVKFPDTDRAPRPADGAPAWQVRIEKRITTFRTLIAKLVCFSRGNHRPRVMRFVTQAFAGTGIRPQDYMACVTERIDFLKQKVYAWASRIRRYRERVDRYQQNRLFQSDQRKVYRNWEGTGQRVVDGQLPDANAMNEFWRSIWSVPVEHTEGDWMRVVERVCEPIESMGSITIDPEDISCAIRTAQNWKSPGPDGLHNFWIKWIRCSYPCLAIQFQEALEAGSLPSFMTTGVTFLLHKSGSTTEAKNYRPITCLPTLYKLLTSILRTKINSHIVANNILAPAQNGCRVGSRGTKELLLIDTAICQQVRRNRGALSTAWIDYKKAYDSVPHSWLERILELYKIDATLRSFLSACMRQWTTVLRQPGGGESVSDPQDFIRIERGIFQGDSLSPLWFCLALNPLSTLLGDSGLGYRLRRGGEIISHLLYMDDLKLFAPQRPQLIELLKITENFSNSINMEFGVDKCAVMHVHGGKVVNSTNLQLSETMTLRSLSESETYRYLGMSESLGISVGDVKRTVKERFFCRLTKVLNSLLSGGNKTRAFNGWVMPLLMYSFGILRWTQTELDALDRKVRQLLTSHRMLHTRSSVMRLYIPRKWGGRGFLNAKTLHNREVCSLRDYFLNNECGMHRDLVAVDKGLTPLSLANENWRKPVVLSTEDRRDVWKGKELHGRFYRALTGPDVDLHASVNWLRFGDLFGETEGFVCAIADEVIKTNNYRKYIMKDGTVDICRACRRPVESLRHIISGCSHLANGEYLHRHNLVARIIHQQLALQYGLVESEVPYYKYTPGPVLENGRALLYWDRSIITDRTIVANKPDIVLVDRSQRRAVLVDITIPHDENLVKAEKDKLSKYLDLAHEVTAMWNVDSTSIVPIVVSANGLIAKSLDQHLERLSLDGWIKGQIQKAVLLDTARIVRRFLTLQP

SEQ ID NO: 5309 - protein, 1208 aa, Cydia splendana
MITRSRAKAVTTSARPPPPPASSTSSSTSSSGDEFATAPDTDGSSDESGPPPPPPRPPARRGRPPLPARLGPAGHPAPPTAPATGGIVRRMRWTRDMNENVMRAYYGATEGGTQLSAYRSRILPLFQTLEPTITVSEQRLSDQVRVIQRLKRLDDATLDRLRQEALSARADSISVRDLPATSPDPVPAPDLAPGAPRVDFCTDEGDFVSQNVSTTANEQLRRTLEEVITQYRATTNSRPRLPRLPMNRRNLALMGALNALLEPHLRTSKDLDDTHSILYCGAIAACRVARVKFPDAERAPRTVGGVPAWQARIERRISSFRTLIAKLICFRGGNNRPRVMRFVNQAFAGTDIRPRDYMANVTERIDFLKQKVYAWANRIRRYRERVDRFQQNRLFQSDQRKVYRRWEETNLRTPDTRPPDATAMTDFWRSIWSMPVGHTEGGWMSVVERECEFIEPMGAVTISPDDISCAIRTAQNWKSPGPDGLHNFWLKWFRCSHSRLAAQFQQALELGSLPPSLTTGVTYLLYKSGSTTEAKNYRPITCLPTLYKLLTSILRAKINAHIVANNILASAQNGCRVGSRGTKELLLIDMTICQQIRRNRGALSAAWIDYKKAYDSVPHSWLGRVLELYKVDAALRAFLSACMRQWTTVLRQPGGGDDPPDPQDFIRIERGIFQGDSLSPLWFCLALNPLSTLLKDLGLGCRLRREGEIISHLLYMDDLKLFAPNSQDLSELLKTTEGFSSAINMEFGVDKCAVMHVQRGRVVNSTNLQLSETMSFRSISESETYKYLGMSQSLGIEDEGIRRSVKERFFSRLTKVLNSLLSGGNKVRAFNAWVMPLLTYSFGILRWTQTELDALDRRVRSLLTTHRMLYPRSSVMRLYIPRKCGGRGFLNAKDLHNREVYNLRNYFLNNECGMHRDVVAVDRNLTPLSLANENWRKPVVLSTADRKAAWESKVLHRRFYKALTGPDVDLLASVNWLRFGDLFGETEGFACAIADEVMMTNNYRKYILKDGTVDICRACRRPGESLRHIISGCSHLANGEYLHRHNLVARIIHQQLALLYGLVDREVPYYKYLPAPVLENGRATLYWDRSIITDRTIVANKPDIVIIDRSQRRAVLVDITIPHDENLVKAEKDKSSKYLDLAHEITTMWDVDSTIIVPIVVSVNGLIAKSLDQHLERLSLGGWIKGQMQKAVILDTARIVRRFLSLQP

SEQ ID NO: 5310 - protein, 1208 aa, Cydia splendana
MITRSRAKAVTTSARPPPPPASSTSSSTLSSGDEFATAPDTDGSSDESGPPPPPPRPPVRRGRPPLPARLGPAGHPAPPTAPATGGIVRRMRWTRDMNENVMRAYYGATEGGTQLSAYRSRILPLFQTLEPTITVSEQRLSDQVRVIQRLKRLDDATLDRLRQEALSARADSISVRDLPATSPDPVPAPDLAPGAPRVDFCTDEGDFVSQNVSTTANEQLRRTLEEVITQYRATTNSRPRLPRLPMNRRNLALMGALNALLEPHLRTSKDLDDTHSILYCGAIAACRVARVKFPDAERAPRTVGGVPAWQARIERRISSFRTLIAKLICFRGGNNRPRVMRFVNQAFAGTDIRPRDYMANVTERIDFLKQKVYAWANRIRRYRERVDRFQQNRLFQSDQRKVYRKWEETNLRTPDTQPPDATAMTDFWRSIWSMPVGHTEGGWMSVVERECEFIEPMGAVTISPDDISCAIRTAQNWKSPGPDGLHNFWLKWFRCSHSRLAAQFQQALELGSLPPSLTTGVTYLLYKSGSTTEAKNYRPITCLPTLYKLLTSILRAKINAHIVANNILASAQNGCRVGSRGTKELLLIDMTICQQIRRNKGALSAAWIDYKKAYDSVPHSWLGRVLELYKVDAALRAFLSACMRQWTTVLRQPGGGDDPPDPQDFIRIERGIFQGDSLSPLWFCLALNPLSTLLKDLGLGCRLRREGEIISHLLYMDDLKLFAPNSQDLSELLKTTEGFSSAINMEFGVDKCAVMHVQRGRVVNSTNLQLSETMSFRSISESETYKYLGMSQSLGIEDEGIRRSVKERFFSRLTKVLNSLLSGGNKVRAFNAWVMPLLTYSFGILRWTQTELDALDRRVRSLLTTHRMLHPRSSVMRLYIPRKCGGRGFLNAKDLHNREMYNLRNYFLNNECGMHRDVVAVDRNLTPLSLANENWRKPVVLSTADRKAAWESKVLHGRFYKALTGPDVDLLASVNWLRFGDLFGETEGFACAIADEVMMTNNYRKYILKDGTVDICRACRRPGESLRHIISGCSHLANGEYLHRHNLVARIIHQQLALLYGLVDREVPYYKYLPAPVLENGRATLYWDRSIITDRTIVANKPDIVIIDRSQRRAVLVDITIPHDENLVKAEKDKSSKYLDLAHEITAMWDVDSTIIVPIVVSVNGLIAKSLDQHLERLSLGGWIKGQMQKAVILDTARIVRRFLSLQP

SEQ ID NO: 5311 - protein, 1117 aa, Cydia splendana
MRWSQTMNENVMRAYYGATEGGTDLCAYRVRMLPLFQALEPTIDVTAQRLSDQVRVIQRLKRLDDSTLDRLRLEALSTRAASTSVRDPPATSPDPVPAPDQAPEAPRVDLCADEEEFAQSVSSTANEQLRRTLDEAITQYRSTPNIRPRLPRLPMNRHNLALMGALNALLEPYLRTSKDLDDTHAIMYCGAIAACRVARVKFPDSERAPRTAGGAPAWQIRIERRISSFRTLIAKLICFRGGNNRPRVMRFVNQAFAGTDIRPRDYMANITERIDFLKQKVYAWANRIRRYRERVDRFQQNRLFQSDQRKMYRKWEETNPRASDSQPPEATVMNDFWRSIWSVPVGHTEGSWMSVVERECESIEPMGAVTISPDDVSCAIRTAQNWKSPGPDGLHNFWLKWFRCSHSCLAAQFQQALELGSPPPSLTTGVTFLLYKSGSTTEAKNYRPITCLPTLYKLLTSILRAKINAHIVANNILASAQNGCRVGSRGTKELLLIDMTICQQIRRNRGALSAAWIDYKKAYDSVPHSWLERVLELYKVDTALRAFLSACMRQWTTVLRQPGGGDGSPGPQDFIRIERGIFQGDSLSPLWFCLALNPLSTLLKDLELGCRLRRGGEVISHLLYMDDLKLFAPNSQDLVELLKTTEVFSNAINMEFGVDKCAVMHVQRGKVVNSTNLQLSETMSFRSISESETYKYLGMSQSLGIEEEGIRRSVKERFFSRLTKVLNSLLSGGNKVRAFNAWVMPLLTYSFGILRWTQTELDALDRRVRQLLTTHRMLHPRSSVMRLYIPRKCGGRGFLNAKNLHNREVYNLRNYFLNNECGMHCDVVAADKGLTPLSLANENWRKPVVLSTEDRKAVWKDKQLHGRFYKALTGPDVDLLASVNWLRFGDLFGETEGFACAIADEVMMTNNYRKYILKDGTVDICRACRRPGESLRHIISGCSHLANGEYLHRHNLVARIIHQQLALLYGLVDREVPYYKYSPAPVLENGRATLYWDRSIITDRTIVANKPDIVLIDRSQRRTVLVDVTIPHDENLVKAEKDKSSKYLDLAHEITAMWDVDSTIIVPIVVSANGLIAKSLDQHLERLSLGGWIKGQMQKAVILDTARIVRRFLTLRP

SEQ ID NO: 5312 - protein, 1118 aa, Cydia splendana
MRWTRDMNENVMRAYYGATEGGTQLSAYRSRILPLFQTLEPTITVSEQRLSDQVRVIQRLKRLDDATLDRLRQEALSARADSTSVRDLPATSPDPVPVPDLAPEAPRVDFCSDEGDFASQNVSTTANEQLRRTLEEAITQYRATTNSRPRLPRLPMNRRNLALMGALNALLEPYLRTSKDLDDTHSIMYCGAIAACRVARVKFPDAERAPRTVGGVPAWQVRIERRISSFRTLIAKLICFRGGNNRPRVMRFVNQAFAGTDIGPRDYMANVTERIDFLKQKVYAWANRIRRYRERVDRFQQNRPFQSDQRKVYRKWEETNLRTPDTQPPDATAMTDFWRSIWSMPVGHTEGGWMSVVERECEFIEPMGAVTISPDDISCAIRTAQNWKSPGPDGLHNFWLKWFRCSHSRLAAQFQQALELGSLPPSLTTGVTYLLYKSGSTTEAKNYRPITCLPTLYKLLTSILRAKINAHIVANNILASAQNGCRVGSRGTKELLLIDMTICQQIRRNKGALAAAWIDYKKAYDSVPHSWLGRVLELYKVDAALRAFLSACMRQWTTVLRQPGGGDDPPDPQDFIRIERGIFQGDSLSPLWFCLALNPLSTLLKDLGLGCRLRREGEIISHLLYMDDLKLFAPNSQDLSELLKTTEGFSSAINMEFGVDKCAVMHVQRGRVVNSTNLQLSETMSFRSISESETYKYLGMSQSLGIEEEGIRRSVKERFFSRLTKVLNSLLSGGNKVRAFNAWVMPLLTYSFGILRWTQTELDALDRRVRSLLTTHRMLHPRSSVMRLYIPRKCGGRGFLNAKDLHNREVYNLRNYFLNNECGMHRDVVAVDRNLTPLSLANENWRKPVVLSTADRKAAWESKVLHGRFYKALTGPDVDLLASVNWLRFGDLFGETEGFACAIADEVMMTNNYRKYILKDGTVDICRACRRPGESLRHIISGCSHLANGEYLHRHNLVARIIHQQLALLYGLVDREVPYYKYLPAPVLENGRATLYWDRSIITDRTIVANKPDIVIIDRSQRRAVLVDITIPHDENLVKAEKDKSSKYLDLAHEITAMWDVDSTIIVPIVVSVNGLIAKSLDQHLERLSLGGWIKGQMQKAVILDTARIVRRFLSLQP

SEQ ID NO: 5313 - protein, 1211 aa, Agriopis aurantiaria
MITRAKTRAAESNARLPPPPASSSSPSTSSGEDEYHTTREASGSSSDTSGPGTPPPPPPARRGRPPLPARLGPVGHSATRPAPATGGVVRRMRWSRIMNEDCMRAYYRATEGGTNLSAYCARMLPLFQALQPTITVSAQRLSDQVRAIQRCNMLDQSVLDRLRLEEVRTRPTPASTRNPPVASSAPTLASVPASVGTLAALADTAVDEEDLASGVSDQVKEQLRGALEDAISQYRFTSDSRPRLPRLPTHRRNLALMGALNALLAPYLRASEDLVDTHSILYCGAIAACRVARVKFPDTNRAPRTAGGVPAWQVRIERRINTFRTLIAKLICFRRGNNRPRVMRFVTQAFAGTDIRPQHYLANVTERIDYLKQKVYAWANRIRRYRERVDRYWQNRLFQSDQRKVYRGWEETDQRVSDGQRPDANAMINFWRGIWSVPVNHTEGDWMRVVERECESIEPMGSILIDPVDVSCAIRMAQNWKSPGPDGLHNFWIKWIRCSHDRLATQFQEALELGSLPSFMTTGVTFLLHKSGSTTEAKNYRPITCLPTIYKLLTSILRNKINAHIVANNVLAHAQNGCRVGSRGTKELLLIDTAISQQVRRNRGALSAAWIDYKKAYDSVPHSWLERVLELYKIDTTLKSFLCACMRQWTTVLRQPGGGDGTSGPQDLIRIERGIFQGDSFSPLWFCLALNPLSSLLRDSGLGYRLRRDGQVISHLLYMDDLKLFTPKRQDLVELLKITDVFSSAIRMEFGVDKCAVMHVQQGKVVNSPNLQLSEVMTLRSLFEAETYKYLGMSESLGISVENIKKSVKERFFCRLTKVLNSLLSGGNKVRAFNGWVMPLLIYSFGILRWTQTELDALDRRVRQLLTSHRMLHPRSSVMRLYIPRKWGGRGFLNAKNLHNREVCSLRDFFRNSESGMHRDVVAVDRGLTPLSLANENWRKPSVLSIEDRRDVWKGKELHGRFYRALTGPDVDLLSSVNWLRFGDLFGETEGFACAIADEVIKTNNYRKYIMKDGTVDICRACHRPGESLRHIISGCSHLANGEYLHRHNQVARIIHQQLALRYGLVESEVPYYKYAPAPVLENGRALLYWDRSIITDRTIVANKPDIVLVDRSQRRAVLVDITIPHDENLVKAEKDKLSKYLDLAHEVTAMWDVDSTIIVPIVVSVNGLIAKSLDQHLRRLSLDGWVKGQMQKAVILDTARIVRRFLTLQP

SEQ ID NO: 5314 - protein, 1212 aa, Agriopis aurantiaria
MITRSRTKQADTKSARLPSPPASSSSPSTSSGEDEYHTTREASGSSSDTSGPGTPPPPPPARRGRPPLPARLGLVGHSATRPAPATGGVVRRMRWSTIMNEDCMRAYYRATEGGTNLSAYCARMLPLFQALQPTITVSAQRLSDQVRATHRCKLLDDSVLDRLRQEELRARPIPVSTRDLPVASSAPTLASVPASVVTLAASADPVVDEGDLASGVSDQVREQLRGALEDAISQYRFTPDSRPRLPRLSTHRRNLALMGALNALLAPYLRASEDLVDTHSILYCGAIAACRVARVKFPDTNRAPRTAGGVPAWQVRIERRISTFRTLIAKLVCFRRGNNRPRVMRFVTQAFAGTDIRPQQYLANVTERIDYLKQKVYAWANRIRRYRERVDRYWQNRLFQSDQRKVYRGWEETDQRVSDGQLPDASAMINFWRGIWSVPVNHTEGDWMRVVERECESIEPMGSILIDPVDVSCAIRMAQNWKSPGPDGLHNFWIKWIRCSHDRLATQFQEALELGSLPSFMTTGVTFLLHKSGSTTEAKNYRPITCLPTIYKLLTSILRNKINAHIVANNVLAHAQNGCRVGSRGTKELLLIDTAISQQVRRNKGALSAAWIDYKKAYDSVPHSWLERVLELYKIDTTLKSFLGACMRQWTTVLRQPGGGDGAFDPQDLLRIERGIFQGDSFSPLWFCLALNPLSTLLRDSGLGYRLRRDGQVISHLLYMDDLKLFTPKRQDLVELLKITEVFSSAIRMEFGVDKCAVMHVQRGKVVNSPNLQLSEVMTLRSLSEAETYKYLGMSESLGISVENIKKSVKERFFCRLTKVLNSLLSGGNKVRAFNGWVMPLLIYSFGILRWTQTELDALDRRVRQLLTSHRMLHPRSSVMRLYIPRKWGGRGFLNAKNLHNREVCSLRDFFRNSESGMHRDVVAVDRGLTALSLANENWRKPSVLSIEDRRDVWKGKELHGRFYRALTGPDVDLLASVNWLRFGDLFGETEGFACAIADEVIKTNNYRKYIMKDGTVDICRACHRPGESLRHIISGCSHLANGEYLHRHNLVARIIHQQLALRYSLVESEVPYYKYAPAPVLENGRALLYWDRSIITDRTIVANKPDIVLVDRSQRRAVLVDITIPHDENLVKAEKDKLSKYLDLAHEVTAMWDVDSTIIVPIVVSVNGLIAKSLDQHLKRLSLDGWVKGQMQKAVILDTARIVRRFLTLQP

SEQ ID NO: 5315 - protein, 1211 aa, Agriopis aurantiaria
MITRSKTKTAALRSAHPRPLATPSTSASSSSEDGDYLTSRDTSASSDGSGPSTPPPPLRPARRGRPALPARLGHVELPAPLSAPATGGVRRMRWTPVINENCMRAYYRATEGGTNLSAYRVRMLPLFQALEPTVTVSAQRLSDQVRAIQRCNLLDQSVLDRLRLEEVRTRPTPPSTRNPPVASSAPTLASRPASVVTLATLADPVVDEGDLASGVSDQVREQLRGALEDAISQYRFTPVSRPRLPRLPTHRRNLALMGALNALLAPYLRASKDLVDTHSILYCGAIAACRVARVKFPDTNRAPRTVGRVPAWQVRIERRISTFRTLIAKLICFRRGNNRPRVMRFVTQAFAGTDIRPQHYLANVTERIDYLKQKVYAWANRIRRYRERVDRYWQNRLFQSDQRKVYRGWEETEQRVSDGQLPDASAMINFWRGIWSVPVEHTEGDWMRVVERECESIEPMGSILIDSVDVSCAIRTAQNWKSPGPDGLHNFWIKWIRCSHDRLATQFQEALELGSLPSFMTTGVTFLLHKSGSTTEAKNYRPITCLPTIYKLLTSILRNKINAHIVANNVLAHAQNGCRVGSRGTKELLLIDTAISQQVRRNRGALSAAWIDYKKAYDSVPHSWLERVLELYKIDTTLKSFLGACMRQWTTVLRQPGSGDGASGPQDLLRIERGIFQGDSFSPLWFCLALNPLSTLLRDSGLGYRLRRDGQVISHLLYMDDLKLFTPKRQDLMELLKITEVFSSAIKMEFGVDKCAVMHVQRGKVVNSPNLQLSETMTLRSLSEVETYKYLGMSESLGISVEDIKKSVKERFFCRLTKVLNSFLSGGNKVRAFNGWVMPLLIYSFGILRWTQTELDALDRRVRQLLTSHRMLHPRSSVMRLYIPRKWGGRGFLNAKNLHNREVCSLRDFFRNSESGMHRDVVAVDRGLTPLSLANENWRKPSVLSIEDRRDVWKGKELHGRFYRALTGPDVDLLSSVNWLRFGDLFGETEGFACAIADEVIKTNNYRKYIMKDGTVDICRACHRPGESLRHIISGCSHLANGEYLHRHNQVARIIHQQLALRYGLVESEVPYYKYAPAPVLENGRALLYWDRSIITDRTIVANKPDIVLVDRSQRRAVLVDITIPHDENLVKAEKDKLSKYLDLAHEVTAMWDVDSTIIVPIVVSVNGLIAKSLDQHLKRLSLDGWIKGQMQKAVILDTARIVRRFLTLQP

SEQ ID NO: 5316 - protein, 1211 aa, Agriopis aurantiaria
MITRSKTKTAALRSAHPRPLATPSTSTSSSSEDGDYLTSRDTSASSDGSGPSTPPPPLRPARRGRPALPARLGHVELPAPLSAPATGGVRRMRWTPVINENCMRAYYRATEGGTNLSAYRVRMLPLFQALEPTVTVSAQRLSDQVRAIQRCNLLDQSVLDRLRLEEVRTRPTPPSTRNPPVASSAPTLASRPASVVTLATLADPVVDEGDLASGVSDQVREQLRGALEDAISQYRFTPVSRPRLPRLPTHRRNLALMGALNALLAPYLRASKDLVDTHSILYCGAIAACRVARVKFPDTNRAPRTVGRVPAWQVRIERRISTFRTLIAKLICFRRGNNRPRVMRFVTQAFAGTDIRPQHYLANVTERIDYLKQKVYAWANRIRRYRERVDRYWQNRLFQSDQRKVYRGWEETEQRVSDGQLPDASAMINFWRGIWSVPVEHTEGDWMRVVERECESIEPMGSILIDSVDVSCAIRTAQNWKSPGPDGLHNFWIKWIRCSHDRLATQFQEALELGSLPSFMTTGVTFLLHKSGSTTEAKNYRPITCLPTIYKLLTSILRNKINAHIVANNVLAHAQNGCRVGSRGTKELLLIDTAISQQVRRNRGALSAAWIDYKKAYDSVPHSWLERVLELYKIDTTLKSFLGACMRQWTTVLRQPGSGDGASGPQDLLRIERGIFQGDSFSPLWFCLALNPLSTLLRDSGLGYRLRRDGQVISHLLYMDDLKLFTPKRQDLMELLKITEVFSSAIKMEFGVDKCAVMHVQRGKVVNSPNLQLSETMTLRSLSEVETYKYLGMSESLGISVEDIKKSVKERFFCRLTKVLNSFLSGGNKVRAFNGWVMPLLIYSFGILRWTQTELDALDRRVRQLLTSHRMLHPRSSVMRLYIPRKWGGRGFLNAKNLHNREVCSLRDFFRNSESGMHRDVVAVDRGLTPLSLANENWRKPSVLSIEDRRDVWKGKELHGRFYRALTGPDVDLLSSVNWLRFGDLFGETEGFACAIADEVIKTNNYRKYIMKDGTVDICRACHRPGESLRHIISGCSHLANGEYLHRHNQVARIIHQQLALRYGLVESEVPYYKYAPAPVLENGRALLYWDRSIITDRTIVANKPDIVLVDRSQRRAVLVDITIPHDENLVKAEKDKLSKYLDLAHEVTAMWDVDSTIIVPIVVSVNGLIAKSLDQHLKRLSLDGWVKGQMQKAVILDTARIVRRFLTLQP

SEQ ID NO: 5317 - protein, 942 aa, Erannis defoliaria
MRWSQINTHSILYCGAIAACRVARVRFPDTNRAPRTVGDVPAWQVRIERRISTFRTLIAKLICFSRGNNRPRVMRFVTQAFSGTGLRPQQYMASVTERIDYLKQKVYAWANRIRRYRERVDRYWQNRLFQSDQRKVYRNWEGAAQRVNDGHLPDANAMTNFWRSIWSVPVEHTEGDWMRVVERECEAIEPMGPILIDPVDVSCAIRTAQNWKSPGPDGLHNFWIKWFRCSHDRLATQFQEALELGSLPSFMTTGITFLLHKSGSTTEPKNYRPITCLPTIYKLLTSILSTKINAHIIANNVLAPAQNECRVGSRGTKELLLIDMAISQQVRRSKGALSAAWIDYKKAYDSVPHSWLERILELYQIDTTLKSFLGACMRQWTTVLRQPGGGNDSSDPQDLIRIERGIFQGDSLSPSWFCLALNPLSTLLKDSGLGYRLRRGSEVISHLLYMDDLKLFAPKHQDLLELLKTTQVFSSAIRMEFGVDKCAVMRVQRGKVVNSPDLQLSEIMTLRSLSEAETYKYLGMSESLGISVVDIKKSVKERFFCRLTKVLNSLLSGGNKARAFNGWVMPLLIYSFGILRWTQTELDALDRRVRQLLTAHRMLHPRSSVMRLYIPRKWGGRGFLNAKNLHNREVCSLRDYFLNNECGMHCDVVTVDKGLTPLSLANENWRRPSVLSTDDRKEVWKSKELHGRFYRALTGSDVDLLASVNWLRFGDLFGETEGFACAIADEVIKTNNYRKYIMKDGTVDICRACHRPGESLRHIISGCSHLANGEYLHRHNQVARIIHQQLALQYGLVESEVPYYKYAPAPVLENGRVLLYWDRSIITDRTIVANKPDIVMVDRSQRQAVLVDVTIPHDENLVKAEKDKLSKYLDLAFEITAMWDVDSTIIVPIVVSANGLIAKSLDQYLKRLSLGGWVKGQIQKAVVLDTARIVRRFLTLQP

SEQ ID NO: 5318 - protein, 1210 aa, Erannis defoliaria
MITRSKKRNAAVQHARPTPPPVPSSSPCSSSPSEEEFHTCGTSSSSEDVSGPRTLTPPIPVRRGRPPLPARLGPAEQPASRPALAAGGVVRRMRWSQTNNENCMRAYYGATEGGTNLTAYRVRMLSLFQTLEPTVTVSAQRISDQVRAIQRLNLLDQPLLDRLRLEVQSARPTPASTRDLDVVSSAPTLASVPTSAATLATSADPVLDEGDCTGMSVSTQVSEQLRRALEDAIGQYRFALNSRPRLPRLPTHRRNLALMGALNALLLRASEDLTDTYSILYCGAIAACRVARVKFPDTNRAPRPAGDVPAWQLRIERRISTFRTLIAKLICFSRGNNRPRVMRFVTQAFAGTGIRPQQYMASVTERIDYLKQKVYAWANRIRRYRERVDRYWQNRLFQSDQRKVYRNWEGTEQRVSDGQLPDASAMTNFWRGIWSVPVEHTEGDWMRVVERECESIEPMGSILIDPVDVSCAIRTAQNWKSPGPDGLHNFWIKWFRCSHDRLATQFQEALELGSLPSFMTTGVTFLLHKSGSTTEPKNYRPITCLPTIYKLLTSILSTKINAHIVANNVLAPAQNGCRVGSRGTKELLLIDMAISQQVRRNKGALSAAWIDYKKAYDSVPHSWLERILELYQIDTTLKSFLGACMRQWTTVLRQPGGGNGSSDSQDLIRIERGIFQGDSLSPSWFCLALNPLSTLLKDSGLGYRLRRGGEVISHLLYMDDLKLFAPKHQDLLELLKTTQVFSSAIRMEFGVDKCAVMRVQRGKVVNSPDLQLSEIMTLRSLSEAETYKYLGMSESLGISVVDIKKSVKERFFCRLTKVLNSLLSGGNKARAFNGWVMPLLIYSFGILRWTQTELDALDRRVRQLLTAHRMLHPRSSVMRLYIPRKWAGRGFLNAKNLHNREVCSLRDYFLNNECGMHRDVVTVDKGLTPLSLANENWRRPSVISTDDRKEVWKSKELHGRFYRALTGPDVDLLASANWLRFGDLFGETEGFACAIADEVIKTNNYRKYIMKDGTVDICRACHRPGESLRHIISGCSHLANGEYLHRHNQVARIIHQQLALQYGLVESEVPYYKYAPAPVLENGRALLYWDRSIITDRTIVANKPDIVMVDRSQRRAVLVDVTIPHDENLVKAEKDKLSKYLDLAFEITAMWDVDSTIIVPIVVSANGLIAKSLDQYLKRLSLDGWVKGQIQRAVVLDTARIVRRFLTLQP

SEQ ID NO: 5319 - protein, 1216 aa, Erannis defoliaria
MITRSKAIRNAAEQHSARPPSPPAPSSPSASSGEDVFVTPRESSASSSDSDVSGPRTPAPPPPARRGRPPLPARLGPAGLPASRPALAAGGVVRRMRWSQTNNENCMRAYYRATEVGTNLTAYRVRMLSLFQALEPTVTVSAQRLSDQVRAIQRLNLLDQSLLDRLRLEAQSARSTPVLTRDSHVASSAPTLASMPTSVATLATSADPVVDEGDGTGMSVTTQVSEQLRRALEDAISQYRFALNSRPRLPRLPTHRRNLALMGALNALLAPYLRASEDLTDTHSILYCGAVAACRVARVKFPDSNRAPRTAGDVPAWQARIERRISTFRTLIAKLICFSRGNNRPRVMRFVTQAFAGTGIRPQQYMASVTERIDYLKQKVYAWASRIRRYRERVDRYWQNRVFQSDQRKVYRDWEGAEQRVSDGHLPDANAMTNFWRGIWSVPVEHTEGDWMRVVERECESIEPMGSILIDPVDVSCAIRTAQNWKSPGPDGLHNFWIKWFRCSHDRLATQFQEALELGSLPSFMTTGVTFLLHKSGSTTEPKNYRPITCLPTIYKLLTSILSTKINTHIVANNVLAPAQNGCRVGSRGTKELLLIDMAISQQVRRNKGALSAAWIDYKKAYDSVPHSWLERILELYKIDTTLKSFLSACMRQWTTVLRQPGGGNDSSDPQDLIRIERGIFQGDSLSPSWFCLALNPLSTLLKDSGLGYRLRRGGEVISHLLYMDDLKLFAPKHQDLLELLKTTQVFSSAIRMGFGVDKCAVMRVQRGKVVNSPDLQLSEIMTLRSLSEAETYKYLGMSESLGISVVDIKKSVKERFFCRLTKVLNSLLSGGNKARAFNGWVMPLLIYSFGILRWTQTELDALDRRVRQLLTAHRMLHPRSSVMRLYIPRKWGGRGFLNAKNLHNREVCSLRDYFLNNECGMHRDVVTVDKGLTPLSLANENWRRPSVLSTDDRKDVWKSKELHGRFYRALSGPDVDLLASVNWLRFGDLFGETEGFACAIADEVIKTNNYRKYIMKDGTVDICRACHRPGESLRHIISGCSHLANGEYLHRHNQVARIIHQQLALQYGLVESEVPYYKYAPAPVLENGRALLYWDRSIITDRTIVANKPDIVMVDRSQRRAVLVDVTIPHDENLVKAEKDKLSKYLDLAFEITAMWDVDSTIIVPIVVSANGLIAKSLDQYLKRLSLDGWVKGQIQKAVVLDTARIVRRFLTLQP

SEQ ID NO: 5320 - protein, 955 aa, Erannis defoliaria
MGALNALLAPYLRASKDLTDTHSILYCGAIAACRVARVRFPDTNRAPRTVGDVPAWQVRIERRISTFRTLIAKLICFSRGNNRPRVMRFVTQAFSGTGLRPQQYMASVTERIDYLKQKVYAWANRIRRYRERVDRYWQNRLFQSDQRKVYRNWEGAAQRVNDGHLPDANAMTNFWRSIWSVPVEHTEGDWMRVVERECEAIEPMGPILIDPVDVSCAIRTAQNWKSPGPDGLHNFWIKWFRCSHNRLATQFQEALELGSLPSFMTTGITFLLHKSGSTTEPKNYRPITCLPTIYKLLTSILSTKINAHIIANNVLAPAQNGCRVGSRGTKELLLIDMAISQQVRRSKGALSAAWIDYKKAYDSVPHSWLERILELYQIDTTLKSFLSACMRQWTTVLRQPGGGNDSSDPQDLIRIERGIFQGDSLSPSWFCLALNPLSTLLKDSGLGYRLRRGSEVISHLLYMDDLKLFAPKHQDLLELLKTTQVFSSAIRMEFGVDKCAVMRVQRGKVVNSPDLQLSEIMTLRSLSEAETYKYLGMSESLGISVVDIKKSVKERFFCRLTKVLNSLLSGGNKARAFNGWVMPLLIYSFGILRWTQTELDALDRRVRQLLTAHRMLHPRSSVMRLYIPRKWGGRGFLNAKNLHNREVCSLRDYFLNNECGMHRDVVTVDKGLTPLSLANENWRRPSVLSTDDRKEVWKSKELHGRFYRALTGSDVDLLASVNWLRFGDLFGETEGFACAIADEVIKTNNYRKYIMKDGTVDICRACHRPGESLRHIISGCSHLANGEYLHRHNQVARIIHQQLALQYGLVESEVPYYKYAPAPVLENGRVLLYWDRSIITDRTIVANKPDIVMVDRSQRQAVLVDVTIPHDENLVKAEKDKLSKYLDLAFEITAMWDVDSTIIVPIVVSANGLIAKSLDQYLKRLSLDGWVKGQIQKAVVLDTARIVRRFLTLQP

SEQ ID NO: 5321 - protein, 1215 aa, Biston betularia
MWTRSRTAAASGLHDAHIPSPPAPSTPSASSGDEEFATPLATSASSSSSDVSGPRTPAPPPPARRGRPPLPARLGPAGQSASRSALAAGGVVRRMRWSQTNNENCMRAYYGATEGGINLSAYRVRMLPLFQALEPTVAVSTQRLSDQVRAIQRLQLLDQSVLDRLRLEALPARPTPVSTRDSPVASSAPTLVSVPTSMATLATPTDPVVDVGECTSMGVCSQVSEHLRRTLEDAICQYRFAPDSRPRLPRLPTHRRNLALMGALNALLAPYLRASEDLTDTHSILYCGAIAACRVARVKFPDTNRAPRPAGGVPAWQLRIERRISTFRTLIAKLICFSRGNNRPRVMRFVTQAFAGTGIKPQHYLASVTERIDYLKQKVYAWANRIRRYRERADRYWKNRVFQSDQRKVYRDWEGTGQRVSDRQLPDTSVMTEFWRGIWSLPVEHTEGDWMRVVERECESIESMGSVLIDPVDVSCAIRTAQNWKSPGPDGLHNFWIKWIRCSHDRLATQFQEALELGSLPCFMTTGVTFLLHKTGSTTEAKNYRPITCLPTIYKLLTSILRTKINAHVVANNVLAPAQNGCRVGSRGTKELLLIDMTISQQVRRNKGALSTAWIDYKKAYDSVPHSWLERVLELYKIDTTLKSFLGACMRQWTTVLRQPGSGDGSSEPQDLIRIERGIFQGDSLSPLWFCLALNPLSTLLKESGLGHRLRRGGEVISHLLYMDDLKLFAPKRPDLMELLKTTQVFSNAIKMEFGVDKCAVMHVQRGEVVNCPDLQLSETMTFRSLSEAETYKYLGMSESLGIAVVDIKRSVKERFFCRLTKVLNSFLSGGNKVRAFNGWVMPLLIYSFGILRWTQTELDALDRRVRQQLTTHRMLHPRSSVMRLYIPRKLGGRGFLSTKNLHNREVCSLRDYFRDNECGMHRDVVAVDKGLTPLSLANENWRKPSVLSTEDRKEVWKSKQLHGRFYRVLTGPDVDMLASVNWLRFGDLFGETEGFACAIADEVIKTNNYRKYIMKDGTVDICRACHRPGESLRHIISGCSHLANGEYLHRHNQVARIIHQQLALQYGLVESEVPYYKYAPAPVLENGRALLYWDRSIITDRTIVANKPDIVVVDRAQRRAVLVDITIPHDENLVKAEKDKLSKYLDLAHEITAMWDVDSTIIVPIVVTVNGLIAKSLDQHLKRLSLDGWVKGQLQKAVILDTARIVRRFLTLQP

SEQ ID NO: 5322 - protein, 1215 aa, Biston betularia
MWTRSRTAAASGLHDAHIPSPPAPSTPSASSGDEEFATPLATSASSSSSDVSGPRTPAPPPPARRGRPPLPARLGPAGQSASRSALAAGGVVRRMRWSQTNNENCMRAYYGATEGGINLSAYRVRMLPLFQALEPTVAVSTQRLSDQVRAIQRLQLLDQSVLDRLRLEALPARPTPVSTRDSPVASSAPTLVSVPTSMATLATPTDPVVDVGECTSMGVCSQVSEHLRRTLEDAICQYRFAPDSRPRLPRLPTHRRNLALMGALNALLAPYLRASEDLTDTHSILYCGAIAACRVARVKFPDTNRAPRPAGGVPAWQLRIERRISTFRTLIAKLICFSRGNNRPRVMRFVTQAFAGTGIRPQHYLASVTERIDYLKQKVYAWANRIRRYRERADRYWQNRVFQSDQRKVYRDWEGTGQRVSDRQLPDTSVMTEFWRGIWSLPVEHTEGDWMRVVERECESIESMGSVLIDPVDVSCAIRTAQNWKSPGPDGLHNFWIKWIRCSHDRLATQFQEALELGSLPCFMTTGVTFLLHKTGSTTEAKNYRPITCLPTIYKLLTSILRTKINAHVVANNVLAPAQNGCRVGSRGTKELLLIDMTISQQVRRNKGALSTAWIDYKKAYDSVPHSWLERVLELYKIDTTLKSFLGACMRQWTTVLRQPGSGDGSSEPQDLIRIERGIFQGDSLSPLWFCLALNPLSTLLKESGLGHRLRRGGEVISHLLYMDDLKLFAPKRPDLMELLKTTQVFSNAIKMEFGVDKCAVMHVQRGEVVNCPDLQLSETMTFRSLSEAETYKYLGMSESLGIAVVDIKRSVKERFFCRLTKVLNSFLSGGNKVRAFNGWVMPLLIYSFGILRWTQTELDALDRRVRQQLTTHRMLHPRSSVMRLYIPRKLGGRGFLSAKNLHNREVCSLRDYFRDNECGMHRDVVAVDKGLTPLSLANENWRKPSVLSTEDRKEVWKSKQLHGRFYRVLTGPDVDMLASVNWLRFGDLFGETEGFACAIADEVIKTNNYRKYIMKDGTVDICRACHRPGESLRHIISGCSHLANGEYLHRHNQVARIIHQQLALQYGLVESEVPYYKYAPAPVLENGRALLYWDRSIITDRTIVANKPDIVVVDRAQRRAVLVDITIPHDENLVKAEKDKLSKYLDLAHEITAMWDVDSTIIVPIVVTVNGLIAKSLDQHLKRLSLDGWVKGQLQKAVILDTARIVRRFLTLQP

SEQ ID NO: 5323 - protein, 1215 aa, Biston betularia
MWTRSRTAAASGLHDAHIPSPPAPSTPSASSGDEEFATPLATSASSSSSDVSGPRTPAPPPPARRGRPPLPARLGPAGQSASRSALAAGGVVRRMRWSQTNNENCMRAYYGATEGGINLSAYRVRMLPLFQALEPTVAVSTQRLSDQVRAIQRLQLLDQSVLDRLRLEALPARPTPVSTRDSPVASSAPTLVSVPTSMATLATPTDPVVDVGECTSMAVCSQVSEHLRRTLEDAICQYRFAPDSRPRLPRLPTHRRNLALMGALNALLAPYLRASEDLTDTHSILYCGAIAACRVARVKFPDTNRAPRPAGGVPAWQLRIERRISTFRTLIAKLICFSRGNNRPRVMRFVTQAFAGTDIRPQHYLASVTERIDYLKQKVYAWANRIRRYRERADRYWQNRVFQSDQRKVYRDWEGTGQRVSDRQLPDTSVMTEFWRGIWSLPVEHTEGDWMRVVERECESIESMGSVLIDPVDVSCAIRTAQNWKSPGPDGLHNFWIKWIRCSHDRLATQFQEALELGSLPCFMTTGVTFLLHKTGSTTEAKNYRPITCLPTIYKLLTSILRTKINAHVVANNVLAPAQNGCRVGSRGTKELLLIDMTISQQVRRNKGALSTAWIDYKKAYDSVPHSWLERVLELYKIDTTLKSFLGACMRQWTTVLRQPGSGDGSSEPQDLIRIERGIFQGDSLSPLWFCLALNPLSTLLKESGLGHRLRRGGEVISHLLYMDDLKLFAPKRPDLMELLKTTQVFSNAIKMEFGVDKCAVMHVQRGEVVNCPDLQLSETMTFRSLSEAETYKYLGMSESLGIAVVDIKRSVKERFFCRLTKVLNSFLSGGNKVRAFNGWVMPLLIYSFGILRWTQTELDALDRRVRQQLTTHRMLHPRSSVMRLYIPRKLGGRGFLSAKNLHNREVCSLRDYFRDNECGMHRDVVAVDRGLTPLSLANENWRKPSVLSTEDRTEVWKSKQLHGRFYRVLTGPDVDMLASVNWLRFGDLFGETEGFACAIADEVIKTNNYRKYIMKDGTVDICRACHRPGESLRHIISGCSHLANGEYLHRHNQVARIIHQQLALQYGLVESEVPYYKYAPAPVLENGRALLYWDRSIITDRTIVANKPDIVVVDRAQRRAVLVDITIPHDENLVKAEKDKLSKYLDLAHEITAMWDVDSTIIVPIVVTVNGLIAKSLDQHLKRLSLDGWVKGQLQKAVILDTARIVRRFLTLQP

SEQ ID NO: 5324 - protein, 1038 aa, Apotomis turbidana
MFFILKELRRPVIIIIIIAPNLVPGVPLTDPEADEEDCASGVSTQANEQLRRALEEAIGRYRSTPESRPRIPRLPMQKRNLALMGALDALLDPYLRASEDLADTHSIMYCGAIAACRVARVRFPDTDRAPRTAGGVPAWQVRIERRISSFRTLIAKLICFRGGNNRPRVMRYVTQAFAGTGTRPCDYMACVTERIDYLKQKVYAWASRIRRYRERVDRFQQNRLFQSDQRKVYRKWEGIDQCVSDGQLPDPTAMINFWRSIWSVPVEHTEGEWMNVVRRECEPIEAMGAVTISPDDVRCAARTTQNWKSPGPDGLHNFWIKWFRSSHERLATQFQDALELGSLPSFMTTGVTFLLHKSGSTTEAKNYRPITCLPTLYKLLTSILRTKINTHIVANNVFAFSQNGCRVGSRGTKELLFIDTTICQQVRRNKGSLSAAWIDYKKAYDSVPHSWLERVSELYKIDTALRSLLGACMGQWTTVLRQPGGGDGPLGPQDLIRIERGIFQGDSLSPLWFCLALNPLSTLLKDSGLGCRLRRGGEVISHLLYMDDLKLYAPKRQDLVELLEVTETFSSAIKMEFGVDKCAVMHVQRGKVVNSANLQLSETMSLRSISEVETYKYLGMSQSLGIADGDIRQALKERFFCCLTKVHNSLLSGGNKVRAFNAWVMPLLTYSFGILRWTQTELDALDTRVRQLLTTHRMRHPRSSVMRMYIPRKRGGRGFLNAKELNNREVCSLREYFLNNECGIHRDVVAVDKGLTSLSLANENWRRPKVLSTDDRRAVWKSKELHGRFYKALTGPDVDLLASVNWLRFGDLFGKTEGFVCAIADEVMMTNNYRRYILKDGTVDICRACRRPGESLRHIISGCSHLANGEYLHRHNQVARIIHQQLALRYGLVGSEVPYYKYAPMPVLDNGRATLYWDRSIITDRTIVANKPDIVLVDRSKRQAVLVDITIPHDENLVKAEKDKLSKYLDLAHEVTAMWDVDSTIIVPIVVSANGLIAKSLDKHLKRLSLDGWIRGQIQKAVLLDTARIVRRFLSLQP

SEQ ID NO: 5325 - protein, 1207 aa, Apotomis turbidana
MITRSRQKKAEQTNARPPPPPASSSSSPSSSGDEFATAADTSESSDERGPPPPPPQPPARRGRPQLPARLGPTGQPAPTTAPATGGVVRRMRWTRVMNENCMRAYYGATEGGINLSAYRDRMLPLFQVFDPTIAVSAQRLSDQVRFIQRRKLLDDATLDRLRLEVLAARAASVPARDPPATSPVPAPAPNLVPGVPLTDPEADVEDYASSVSTQANEQLRRALEEAIGRYRSAPEPRPRLPRLPIHKRNLALMGALDALLDPYLRASEDLADTHSIMYCGAIAACRVARVRFPDTDRAPRTARGVPAWQVRIERRISSFRTLIAKLICFRGGNNRPRVMRYVTQAFAGTGTRPCDYMACVTERIDYLKQKVYAWASRIRRYRERVDRFQQNRLFQSDQRKVYRKWEGADQCVSDGQLPDPTAMINFWRSIWSVPVEHTEGEWMNVVRRECEPIEAMGAATISPDDVRCAARTIQNWKSPGPDGLHNFWIKWFRSSHERLATQFQDALELGSLPSFMTTGVTFLLHKSGSTTEAKNYRPITCLPTLYKLLTSILRTKINTHIVANNVLAFSQNGCRVGSRGTKELLLIDTTICQQVRRNRGSLSAAWIDYKKAYDSVPHSWLERILELYKIDTTLRSLLGACMRQWTTVLRQPGGGDGPPGPQDLIRIERGIFQGDSLSPLWFCLALNPLSTLLKDSGLGCRLRRGGEVISHLLYMDDLKLYAPKRQDLVELLEVTEAFSSAIKMEFGVDKCAVMHVQRGKVVNSANLQLSETMSLRSISEVETYKYLGMSQSLGIADGDIRQALKERFFCRLTKVLNSLLSGGNKVRAFNAWVMPLLTYSFGILRWTQTELDALDTRVRQLLTTHRMRHPRSSVMRMYIPRKCGGRGFLNAKDLHNREVCSLREYFLNNECGIHRDVVAVDKGLTPLSLANENWRRPKVLSTDDRRAVWKSKELHGRFYKALTGPDVDLLASVNWLRFGDLFGETEGFVCAIADEVMMTNNYRRYILKDGTVDICRACRRPGESLRHIISGCSHLANGEYLHRHNQVARIIHQQLALRYGLVGSEVPYYKYAPMPVLENGRATLYWDRSIITDRTIVANKPDIVLVDRSKRQAVLVDITIPHDENLVKAEKDKLSKYLDLAHEVTAMWDVDSTSIVPIVVSANGLIAKSLDKHLKRLSLDGWIKGQIQKAVLLDTARIVRRFLSLQP

SEQ ID NO: 5326 - protein, 1086 aa, Notocelia uddmanniana
MLPLFQALEPTITVSAQRLSDQVRVIQRNKRLDDLTLDRLRLEALSARAAPTSARDLPATSPAPVPAPNMAPRAPRVDPSADGDCADQSVSTQAHEQLRRALDEAITRYRSTPNSRPRLPRLPVNRRNLALMGALNDLLDPYLRASDDLIDTHSIMYCGAIAACRVARVKFPDADRATRTAGGVPAWQVRIERRINTFRTLIAKLICFRGGNNRPRVMRFVNQAFAGTGVRPRDYMACVTERIDFLKQKVYAWASRIRRYRERVDRYQQNRLFQSDQRKVYRKWEGTDHRVCDGQRPDATAMVNFWRSIWSVPVEHTEGAWIGVVERDCESIEPMGSVTISPEDVSCAIRTAPNWKSPGPDGLHNFWLKWFRCSHERLATQFQQALELGSLPPPLTTGVTSLLYKSGSTAEAKNYRPITCLPTLYKLLTSILWAKINTHIVTNNILAPAQNGCRVGSRGTKELLLIDMTICQRVRRNRGTLSASWIDYKKAYDSVPHSWLRRILELYKVDAALRSFLSACMRQWTTVLRQPGGGDGPSGPQDSIRIERGIFQGDSLSPLWFCLALNPLSTLLQDSGLGCQLRRGGEVISHLLYMDDLKLFAPNRQDLLELLKTTEVFSSAIKMEFGVDKCAVMHVQRGKVVNSTNLQLSETMSLRSLSEAETYKYLGMSQALGIEGEGIKQAVKERFFCRLTKVLNSFLSGGNKARALNAWVVPLLTYSFGILRWTQTELDALDRRVRVLLTAHRMLHPRSSVMRLYIPRKCGGRGFLNAKDLHNREVCSLRDYFLNSECGMHRDVVAVDASFTPLSMANENWRRFKVLSAEDRKAEWKSKELHGRFYRALTGPDVDLLASVNWLRFGDLFGETEGFVCAIADEVIMTNNYRKYILKDGTVDICRACRRPGESLRHIISGCSHLANGEYLHRHNLVARIIHQQLALSYGLVDFEVPYYKYLPAPVLENGRATLYWDRSIITDRTIVANKPDIVLIDRSKRQAVLVDITIPHDENLVKAEKDKVSKYLDLAHEVTAMWDVDSTIIVPIVVSANGLIAKSLDQHLKRLSLDGWVKGQIQKAVLLDTARIVRRFLSLSP

SEQ ID NO: 5327 - protein, 869 aa, Notocelia uddmanniana
MRFVNQAFAGTGVRPRDYMACVTERIDFLKQKVYAWASRIRRYRERLDRYQQNRLFQSDQRKVYRKWDGTDHRVPDGQRPDATAMVNFWRSIWSVPVEHTEGSWIGAVERECESIEPMGSVTIGPEDVSCAIRTAQNWKSPGPDGLHNFWLKWFRCSHARLAAQFQQALELGSLPPPLTTGVTSLLYKSGSTTEAKNYRPITCLPTLYKLLTSILRAKINAHIVANNILAPAQNGCRVGSRGTKELLLIDMTICQQVRRIKGTLSAAWIDYRKAYDSVPHSWLRRVLELYKVDAVLRSFLSACMRQWTTVLRQPGGGDGPSGPQDSIRIERGIFQGDSLSLLWFCLALNPLSTLLKDSGLGCQLRREGEVISHLLYMDDLKLFAPNKHDLLELLKTTEVFSSAIKMEFGVDKCAVMHVQRGKVVNSTNLQLSETTSLRSLSEVDTYKYLGMSQSLGIEGEGIKQAMKERFFCRLTKVLNSLLSGGNKVRAFNAWVMPLLTYSFGILRWTQTELDFLDRRVRVLLTTHRMLHPRSSVMRLYIPRKLGGRGFLNAKDLHNREVCSLRDYFLNSECGIHRDVVAVDTLLTPLSMAKENWRRLKVLSAGDRRAVWKSKELHGRFYKALTSPDVDLLASVNWLRFGDLFGETEGFVCAIADEVIMTNNYRKYILKDGTVDICRACRRPGESLRHIISGCSHLANGEYLHRHNLVARIIHQQLALLYGLVDFEVPYYKYTPAPVLENGRATLYWDRSVITDRTIIANKPDIVLTDRLKRQAVLVDITIPHDENLVKAEKDKSSKYLDLAHEVTAMWDVDSTIIVPIVVSANGLIAKSLDQHLKRLSLDGWVKGQIQKAVLLDTARIVRRFLSLSP

SEQ ID NO: 5328 - protein, 1210 aa, Boloria selene
MITRSQARKTAVHTSNARPTPPPVSSFSSPSSSGDEFATAPDTSESSDAERGTPPPPPRTPARRGRPPLPARLGPTGQPAPTMAPATGGVVRRMRWTQVMNENCMRAYYGATEGGINLSAYRDRMLPLFLVFDPTIAVSAQRLSDQVRFIQRRKLLDDATLDRLRLEVLAARAASTPALGPPATSPAPVLTPKLVPRVPLADHGAGEEECASGENTQANEQMRRALGEAIGRYRSTPESRPRIPRLPMHKRNLALMGAMDALLDPYLRASEDLTDTHSIMYCGAIAVCRAARVRFPDTDRAPRTTGGVPAWQIRIERRISSFRTLIAKLICFREGNSRPRVMRYVTQAFAGTGTRPCDYMACVTERIDYLKQKVCAWASRIRRYRVRVDRFQQNRLFQSDQRKVYRRWEGTNQCVGDGQLPDPSAMTNFWRSIWSVPVEHTEGEWMNVVGRECESIETMGAVTISPDDVGCAARATQNWKSPGPDGLHNFWIKWFRSSHERLAAQFQHALELGSLPSFMTTGVTFLLHKSGSTTEAKNYRPITCLPTLYKLLMSILRTKINTHNVANNVLAFSQNGCRVGSRGTKELLLIDTTICQQVRRNRGSLSAAWIDYKKAYDSVPHSWLERVLVLYKIDTTLRSLLGACMRRWTTVLYQPGGGDGLPGPQDLIRIKRGIFQGDSLSPLWFCLALNPLSTLLKDSGLGCRLRRGGEVISHLLYMDDLKLYASKRQDLVELLEVTETFSSAIKMEFGVDKCAIMHVQRGKVVNSANLQLSDIISLRSISEVETYKYLGMSQSLGIADGDIRQALRQRFFCRLTKVLSSLLSGGNKARAFNAWVMPLLTYSFGILRWTQTELDALDTRVRQLLTAYRMRHPRSSVMRLYIPRKCGGRGFLNAKDLHNREVCSLREYFLNNECGIHRDVVAVDKGLTSLSLANENWRRPKVLSTDDRRTVWKCKELHGRFYKALTGPDVDLLASVNWLRFGDLFGETEGFVCAIADEVMMTNNYRRYILRDGTVDICRACRRPGESLRHIISGCSHLANGEYLHRHNQVARIIHQQLALRYGLVGSEVPYYKYAPLPVLENGRATLYWDRSIITDRTIVANKPDIVLVHRSKRQAMLVDIAIPHDENLVKAEKDKLSKYLDLAHEVTAMWDVDSTIIVPLVVSANGLIAKSLDKHLKRLSLDGWIKGQMQKAVLLDTARIVRRFLSLQP

SEQ ID NO: 5329 - protein, 1207 aa, Crocallis elinguaria
MITRSRNKAGTASARQPPPPASSSPSSSSGDEYGTPLDTSASSDEDGPPSPPPPPPPARRGRPPLPARLGPAGHSVPRAAPATGGIVRRMRWTSVMNENCMRAYYGATEGGINMSAYRDRMLPLFQTLEPSVAVSTQRLSDQVRAIQRLKLLDESVLDRLRLEALPIRATSASTRDLSVAPPVPAPLPAPSSVATRIDPVVDEDDCANISVSTQVNEQLRRALEDAILEYQYTPDSRPRLPRLPTNRRNLALMGALNVLLAPYLRGSENLFDTHSIMYCGAIAVCRVARVKFPDADRAPRTAGNAPAWQVRIERRINTFRTLIAKLICFSRGNNRPRVMRFVNQAFAGTGIRPQNYMAGVTERIDFLKQKIYAWVNRIRRYRERVDRYHQNRLFESDQRKVYRNWEGTDQRVSDGQMPDTNAMINFWRGIWSVPVEHTEGDWMRTVEQSCESIETMGSVTIDPIDVSCAIRTAQNWKSPGPDGLHNFWIKWIRCSHECLAVQFQEALELGSLPCFLTTGVTSLLHKSGSTTEAKNYRPITCLPTLYKLLTSILRAKINSHVVANNILAPAQNGCRVGSRGTKELLLIDTAICQQVRRNRGALSTAWIDYKKAYDSVPHSWLERILELYKIDTTLRSFLSTCMRQWTTVLRQPGSGNSPSGPENFIKIERGIFQGDSLSPLWFCLALNPLSTLLRDSRLGCKLRREGEIISHLLYMDDLKLLAPKSPDLMKLLKITEIFSSAIKMEFGVDKCAVMHVQRGKVVNSDNLQLSETMTLRSLSEAETYRYLGMSQSLGIAVGDIKQSVKERFFCRLTKVLNSLLSGGNKARAFNGWVMPLLIYSFGILKWTQTELDSLDRRVRQLLTYHRMLHPRSSVMRLYIPRKWGGRGFLNAKTLHNREVCSLREYFLNNECGMHRDVVAVDRNLTPLSLANENWRKPVVMTTEDRKDVWKGKELHGRFYRALTGSDVDLLASVNWLRFGDLFGETEGFVCAIMDEVIKTNNYRKYIMKDGTVDICRACRRPGESLRHIISGCSHLANGEYLHRHNLVARIIHQQIALQYGLVESEVPYYKYAPAPVLENGRALLYWDRSIITDRTIVANKPDIVLVDRSQRRAVLVDITVPHDENLVKAEKDKLSKYLDLAHEVTAMWNVDSTIIVPIVVSANGLVAKSLDQHLKRLSLDGWIKGRMQKAVLLDTARIVRRFLTLQP

SEQ ID NO: 5330 - protein, 1207 aa, Crocallis elinguaria
MITRSRNKAGTASARQPPPPASSSPSSSSGVEYGTPLDTSASSDEDGPPSPPPPPPPARRGRPPLPARLGPVGHSVPRAAPATGGIVRRMRWTSDMNENCMRAYYGATEGGTNMSAYRDRMLPLFQTLEPSVAVSTQRLSDQVRAIQRLKLLDESVLDRLRLETLPIRATSASTRDLSVAPPVPAPLPAPSSVATRIDPVVDEDDCANISVSTQVNEQLRRALEDAILEYQYTPDSRPRLPRLPTNRRNLALMGALNVLLAPYLRASENLFDTHSIMYCGAIAVCRVARVKFPDADRAPRTAGNAPAWQVRIERRINTFRTLIAKLVCFSRGNNRPRVMRFVNQAFAGTGIRPQNYMAGVTERIDFLKQKIYAWVNRIRRYRERVDRYHQNRLFESDQRKVYRNWEGTDQRVSDGQMPDTNAMINFWRGIWSVPVEHTEGDWMRTVEQSCESIETMGSVTIDPIDVSCAIRTAQNWKSPGPDGLHNFWIKWIRCSHECLAVQFQEALELGSLPCFLTTGVTSLLHKSGSTTEAKNYRPITCLPTLYKLLTSILRAKINSHVVANNILAPAQNGCRVGPRGTKELLLIDTAICQQVRRNRGALSTAWIDYKKAYDSVPHSWLERILELYTIDTTLRSFLSTCMRQWTTVLRQPGSGNSPSGPENFIKIERGIFQGDSLSPLWFCLALNPLSTLLRDSRLGCKLRREGEIISHLLYMDDLKLLAPKSPDLMKLLKITEIFSSAIKMEFGVDKCAVMHVQRGKVVNSDNLQLSETMTLRSLSEAETYRYLGMSQSLGIAVGDIKQSVKERFFCRLTKVLNSLLSGGNKARAFNGWVMPLLIYSFGILKWTQTELDSLDRRVRQLLTYHRMLHPRSSVMRLYIPRKWGGRGFLNAKTLHNREVCSLREYFLNNECGMHRDVVAVDRNLTPLSLANENWRKPVVMTTEDRKDVWKGKELHGRFYRALTGSDVDLLASVNWLRFGDLFGETEGFVCAIMDEVIKTNNYRKYIMKDGTVDICLACRRPGESLRHIISGCSHLANGEYLHRHNLVARIIHQQIALQYGLVESEVPYYKYAPAPVLENGRALLYWDRSIITDRTIVANKPDIVLVDRSQRRAVLVDITVPHDENLVKAEKDKLSKYLDLAHEVTAMWNVDSTIIVPIVVSANGLVAKSLDQHLKRLSLDGWIKGRMQKAVLLDTARIVRRFLTLQP

SEQ ID NO: 5331 - protein, 1212 aa, Pammene fasciana
MITRSKTRLQQASPPNARPPSSPASSVSSPSSSGDEFATAPDTSESSDERGPPPPPPRPPARRGRPPLPARLGLAGHPVPPRAPAAGGIVRRMRWTQSMNENVMRAYYGATEGGTNLCAYRDRMLPLFQALEPTIDTTAQRLSDQVRVIQRLKRLDDATLDRLRLEALSARAASTSARDPPATSLDPMPASDLASGAPRIDPSADEEEIANQSVSSTANEQLRRTLEEAITQYRSTNITRPRLPRLPMNRRNLALMGALNDLLDPLLRTSKDLDDTHSIMYCGAIAACRVARVKFPDAERAPRTAGGVPAWQVRIERRINSFRTLIAKLICFRGGNNRPRVMRFVHQAFAGMDIEPRDYMANVTERIDFLKQKVYAWASRIRRYRERVDRFRQNRLFQSDQRKVYRRWEEADPRVSDVRLPDATAMTDFWRSIWSAPVEHTEGEWMSVVERECESIEPMGAITISPDDVSCAIRTAQNWKSPGPDGLHNFWLKWFRCSHSRLATQFQQALELGSLPPSLTTGVTFLLYKSGSTTEAKNYRPITCLPTLYKLLTSILRAKINAHMVANNILASAQNGCRVGSRGTKELLLIDMTICQRVRRNRGALSAAWIDYKKAYDSVPHSWLERILELYKIDAALRSFLGACMRQWTTVLRQPGGGDDPPGPQDFIRIERGIFQGDSLSPLWFCLALNPLSTLLKDSGLGCRLRREGEVISHLLYMDDLKLFAPNNRDLLELLKTTEVFSNSIKMEFGVDKCAVMHVQRGKVVNSTNLQLSETMTFRSISESETYKYLGMSQSLGIEDAGIKQALRERFFGRLTKVLNSLLSGGNKVRAFNAWVMPLLTYSFGILRWTQTELDALDRRVRLLLTTHRMLHPRSSVMRLYIPRKCGGRGFLNAKNLHNREVYNLRNYFLNNECEMHRDVVAIDKGLTPLSLANENWRKPVVLSTEDRKAVWKSKELHGRFYGALTGPDVDLLASVNWLRFGDLFGETEGFACAIADEVIMTNNYRRYILKDGTVDICRACRRPGESLRHIISGCSHLANGEYLHRHNLVARIIHQQLALLYGLVDHEVPYYKYTPAPVLENGRATLYWDRSIITDRTIVANKPDIVIIDRSQRRAMLVDITVPCDVNLVKAEKDKSSKYLDLAHEVTAMWEVDSTIIVPIVVSANGLIAKSLDQHLERLSLRGCGWIKGQIQKAVILDTARIVRRFLSLRP

SEQ ID NO: 5332 - protein, 1210 aa, Pammene fasciana
MITRSKARAATTHARPPSPLASSSSPSTSSSSDDFETAPDTDESSDESGPPPPPPQPPARRGRPPLPARLGPTGHPVPPRAPAAGGIVRRMRWTCSMNENVMRAYYGATEGGTNLCAYRARILPLFQALEPTIDTTTQRLSDQVRVIQRLKRLDDATLDRLRLEALSARAASTSARDPPATSPDPMPAPDLASGAPRIDPSADEEYIASQSVSSTANEQLRRTLEEAITQYRSTNIPRPRLPRLPMNRRNLALMGALNDLLDPILRTSKDLDDTHSIMYCGAIAACRVARIKFPDAERAPRTAGGVPAWQVRIERRINSFRTLIAKLICFRGGNNRPRVMRFVYQAFAGTDIEPRDYMANITERIDFLRQKVYAWASRIRRYRERVDRFRQNRLFQSDQRKVYRRWEEADPHVSDVRLPDATAMTDFWRSIWSAPVEHTEGEWMNVVERECESIEPMGAITISPDDVSCAIRTSQNWKSPGPDGLHNFWLKWFRCSHSRLATQFQHALELGSLPPSLTTGVTFLLYKSGSTTEAKNYRPITCLPTLYKLLTSILRAKINAHMVANNILASAQNGCRVGSRGTKELLLIDMTICQRVRRNRGALSAAWIDYKKAYDSVPHSWLERILELYKVDAALRSFLGACMRQWSTVLRQPGGGDDPPGPQDFIRIERGIFQGDSLSPLWFCLALNPLSTLLKDSGLGCRLRREGEVISHLLYMDDLKLFAPNNRDLLELLKTTEVFSSSIKMEFGVDKCAVMHVQRGKVVNSTNLQLSETMTFRSISESETYKYPGMSQSLGIEDVGIKQALKERFFGRLTKVLNSLLSGGNKVRAFNAWVMPLLTYSFGILRWTQTELDALDRRVRLLLTTHRMLHPRSSVMRLYIPRKCGGRGFLNAKNLHNREVYNLRNYFLNNECGMHRDVVTVDKNLTPLSLANENWRKPVVLSTEDRKAVWKSKELHGRFYGALTGPDVDLLASVNWLRFGDLFGETEGFACAIADEVIMTNNYRRYILKDGTVDICRACRRPGESLRHIISGCSHLANGEYLHRHNLVARIIHHQLALLYGLVAHEVPYYKYTPAPVLENGRATLYWDRSIITDRTIVANKPDIVVIDRPQRRAMLVDITVPCDVNLVKAEKDKSSKYLDLAHEVTAMWEVDSAIIVPIVVSANGLIAKSLDQHLERLSLRGCGWIKGQIQKAVILDTARIVRRFLSLRP

SEQ ID NO: 5333 - protein, 932 aa, Pammene fasciana
MIRTRSLAACRVARVKFPDAERAPRTAGGVPAWQVRIERRINSFRTLIAKLICFRGGNNRPRVMRFVHQAFAGTDIEPCDYMANITERIDFLKQKVYAWASRIRRYRERVDRFRQNRLFQSDQRKVYRKWEEADPRVSDVRLPDATAMTDFWRSIWSAPVEHTEGEWMSVVERECESIEPMGAITISPDDVSCAIRTAQNWKSPGPDGLHNFWLKWFRCSHSRLATQFQQALGSLPPSLTTGVTFLLYKSGSTTEAKNYRPITCLPTLYKLLTSILRAKINAHMVANNILASAQNGCRVGSRGTKELLLIDMTICQRVRRNRGALSAAWIDYKKAYDSVPHSWLERILELYKVDAALRSFLGACMRQWTTVLRQPGGGDDPPGPQDFIRIERGIFQGDSLSPLWFCLALNPLSTLLRDSGLGCRLRREGEVISHLLYMDDLKLFAPNNRDLLELLKTTEVFSSSIKMEFGVDKCAVMHVQRGKVVNSTNLQLSETMTFRSISESETYKYLGMSQSLGIEDAGIKQALRERFFGRLTKVLNSLLSGGNKVRAFNAWVMPLLTYSFGILRWTQTELDALDRRVRQLLTTHRMLHPRSSVMRLYIPRKCGGRGFLNAKNLHNREVYNLRNYFLNNECGMHRDVVAIDKGLTPLSLANENWRKPVVLSTEDRKAVWKSKELHGRFYGALTGPDVDLLASVNWLRFGDLFGETEGFACAIADEVIMTNNYRRYILKDGTVDICRACRRPGESLRHIISGCSHLANGEYLHRHNLVARIIHQQLALLYGLVDHEVPYYKYTPAPVLENGRATLYWDRSIITDRTIVANKPDIVVIDRPQRRAMLVDITVPCDVNLVKAEKDKSSKYLDLAHEVTAMWEVDSAIIVPIVVSANGLIAKSLDQHLERLSLRGCGWIKGQIQKAVILDTARIVRRFLTLRP

SEQ ID NO: 5334 - protein, 1087 aa, Ennomos quercinarius
MLSLFQDLEPTVAVSAQRLSDQVRAIQRCKMLDEPTLDRLRLEALPIRATSPSPRVLPAALPDPGPIMGPLPVTPRGDPAIDGEESASDSVSTQANEQLRSALEDAILRYRSTPTSRPQLPRLPTNRRNLVLMGALNTLLAPYLRTSEDLVDTHSILYCGAIAACRVARVKFPDTDRAPRPADGAPAWQVRIEKRITTFRTLIAKLVCFSRGNHRPRVMRFVTQAFAGTGIRPQDYMACVTERIDFLKQKVYAWASRIRRYRERVDRYQQNRLFQSDQRNVYRNWEGTGQRVVDGQLPDANAMNEFWRSIWSVPVEHTEGDWMRVVERVCEPIESMGSITIDPEDISCAIRTAQNWKSPGPDGLHNFWIKWIRCSYPCLAIQFQEALEAGSLPSFMTTGVTFLLHKSGSTTEAKNYRPITCLPTLYKLLTSILRTKINSHIVANNILAPAQNGCRVGSRGTKELLLIDTAICQQVRRNRGALSTAWIDYKKAYDSVPHSWLERILELYKIDATLRSFLSACMRQWTTVLRQPGGGESISDPQDFIRIERGIFQGDSLSPLWFCLALNPLSTLLGDSGLGYRLRREGEIISHLLYMDDLKLFAPQRPQLIELLKITENFSNSINMEFGVDKCAVMHVHRGKVVNSTNLQLSETMTLRSLSESETYRYLGMSESLGISVGDVKRTVKERFFCRLTKVLNSLLSGGNKTRAFNGWMMPLLMYSFGILRWTQTELDALDRKVRQLLTSHRMLHPRSSVMRLYIPRKWGGRGFLNAKTLHNREVCSLRDYFLNNECGMHRDVVAVDKSLTPLSLANENWRKPVVLSTEDRRDVWKGKELHGRFYRALTGPDVDLHASVNWLRFGDLFGETEGFVCAIADEVIKTNNYRKYIMKDGTVDICRACRRPGESLRHIISGCSHLANGEYLHRHNLVARIIHQQLALQYGLVESEVPYYKYTPGPVLENGRALLYWDRSIITDRTIVANKPDIVLVDRSQRRAVLVDITIPHDENLVKAEKDKLSKYLDLAHEVTAMWNVDSTSIVPIVVSANGLIAKSLDQHLERLSLDGWIKGQIQKAVLLDTARIVRRFLTLQP

SEQ ID NO: 5335 - protein, 851 aa, Ennomos quercinarius
MACVTERIDFLKQKVYAWASRIRRYRERVDRYQQNRLFQSDQRKVYRNWEGTGRRVVDGQLPDANAMNEFWRNIWSVPVEHTEGDWMRVVERVCEPIESMGSITIDPEDISCAIRTAQNWKSPGPDGLHNFWIKWIRCSYPCLAIQFQEALEAGSLPSFMTTGVTFLLHKSGSTTEAKNYRPITCLPTLYKLLTSILRTKINSHIVANNILAPAQNGCRVGSRGTTELLLIDTAICQQVRRNRGALSTAWIDYKKAYDSVPHSWLERILELYKIDATLRSFLSACMRQWTTVLRQPGGGESVSDPQDFIRIERGIFQGDSLSPLWFCLALNPLSTLLGDSGLGYRLRRGGEIISHLLYMDDLKLFAPQRPQLIELLKITENFNNSINMEFGVDKCAVMHVHRGKVVNSTNLQLSETMTLRSLSESETYRYLGMSESLGISVGDVKRTVKERFFCRLTKVLNSLLSGGNKTRAFNGWVMPLLMYSFGILRWTQTELDALDRKVRQLLTSHRMLHPRSSVMRLYIPRKWGGRGFLNAKTLHNREVCSLRDYFLNNECGMHRDVVAVDKGLTPLSLANENWRKPVVLSTEDRRDVWKGKELHGRFYRALTGPDVDLHASVNWLRFGDLFGETEGFVCAIADEVIKTNNYRKYIMKDGTVDICRACRRPGESLRHIISGCSHLANGEYLHRHNLVARIIHQQLALQYGLVESEVPYYKYTPGPVLENGRALLYWDRSIITDRTIVANKPDIVLVDRSQRRAVLVDITIPHDENLVKAEKDKLSKYLDLAHEVTAMWNVDSTSIVPIVVSANGLIAKSLDQHLERLSLDGWIKGQIQKAVLLDTARIVRRFLTLQP

SEQ ID NO: 5336 - protein, 1209 aa, Cydia splendana
MITRSKTRSQASITTNARPPPSPVSSVSSQASSGDEFATAPDTSESSDEYGPPPPPPRPPARRGRPPLPARLGPAGHHAPPTVPAAGGVVRRMRWSQTMNENVMRAYYGATEGGTDLCAYRVRMLPLFQALEPTIDVTAQRLSDQVRVIQRLKRLDDSTLDRLRLEALSTRAASTSVRDPPATSPDPVPAPDQAPEAPRVDLCADEEEFAQRVSSTANEQLRRTLDEAITQYRSTPNTRPRLPRLPMNRHNLALMGALNALLEPYLRTSKDLDDTHAIMYCGAIAACRVARVKFPDSERAPRTAGGAPAWQIRIERRISSFRTLIAKLICFRGGNNRPRVMRFVNQAFAGTDIRPRDYMANITERIDFLKQKVYAWANRIRRYRERVDRFQQNRLFQSDQRKMYRKWEETNPRASDSQPPEATVMNDFWRSIWSVPVGHTEGSWMSVVERECESIEPMGAVTISPDDVSCAIRTAQNWKSPGPDGLHNFWLKWFRCSHSCLAAQFQQALELGSPPPSLTTGVTFLLYKSGSTTEAKNYRPITCLPTLYKLLTSILRAKINAHIVANNILASAQNGCRVGSRGTKELLLIDMTICQQIRRNRGALSAVWIDYKKAYDSVPHSWLERVLELYKVDTALRAFLSACMRQWTTVLRQPGGGDGSPGPQDFIRIERGIFQGDSLSPLWFCLALNPLSTLLKDLELGCRLRRGGEVISHLLYMDDLKLFAPNSQDLVELLKTTEVFSNAINMEFGVDKCAVMHVQRGKVVNSTNLQLSETMSFRSISESETYKYLGMSQSLGIEEEGIRRSVKERFFSRLTKVLNSLLSGGNKVRAFNAWVMPLLTYSFGILRWTQTELDALDRRVRQLLTTHRMLHPRSSVMRLYIPRKCGGRGFLNAKNLHNRELYNLRNYFLNNECGMHRDVVAADKGLTPLSLANENWRKPVVLSTEDRKAVWKDKQLHGRFYKALTGPDVDLLASVNWLRFGDLFGETEGFACAIADEVMMTNNYRKYILKDGTVDICRACRRPGESLRHIISGCSHLANGEYLHRHNLVARIIHQQLALLYGLVDREVPYYKYSPAPVLENGRATLYWDRSIITDRTIVANKPDIVLIDRSQRRTVLVDVTIPHDENLVKAEKDKSSKYLDLAHEITAMWDVDSTIIVPIVVSANGLIAKSLDQHLERLSLGGWIKGQMQKAVILDTARIVRRFLTLRP

SEQ ID NO: 5337 - protein, 1175 aa, Cydia splendana
MITRSKTRSQASITTNARPPPSPVSSVSSQASSGDEFATAPDTSESSDECGPPPPPPRPPARRGRPPLPARLGPAGHHAPPTVPAAGGVVRRMRWSQTMNENVMRAYYGATEGGTDLCAYRVRMLPLFQALEPTIDVTAQRLSDQVRVIQRLKRLDDSTLDRLRLEALSTRAASTSVRDPPATSPDPVPAPDQAPEAPRVDLCADEEEFAQSVSSTANEQLRRTLDEAITQYRSTPNTRPRLPRLPMNRHNLALMGALNALLEPYLRTSKDLDDTHAIMYCGAIAACRVARVKFPDSERAPRTAGGAPAWQIRIERRISSFRTLIAKLICFRGGNNRPRVMRFVNQAFAGTDIRPRDYMANITERIDFLKQKVYAWANRIRRYRERVDRFQQNRLFQSDQRKMYRKWQETNPRASDSQPPEATVMNDFWRSIWSVPVGHTEGSWMSVVERECESIEPMGAVTISPDDVSCAIRTAQNWKSPGPDGLHNFWLKWFRCSHSCLAAQFQQALELGSPPPSLTTGVTFLLYKSGSTTEAKNFRPITCLPTLYKLLTSILRAKINAHIVANNILASVQNGCRVGSRGTKELLLIDMTICQQIRRNRGALSAAWIDYKKAYDSVPHSWLERVLELYKVDTALRAFLSACMRQWTTVLRQPGGGDGSPGPQDFIRIERGIFQGDSLSPLWFCLALNPLSTLLKDLELGCRLRRGGEVISHLLYMDDLKLFAPNSQDLVELLKTTEVFSNAINMEFGVDKCAVMHVQRGKVVNSTNLQLSETMSFRSISESETYKYLGMSQSLGIEEEGIRRSVKERFFSRLTKVLNSLLSGGNKVRAFNAWVMPLLTYSFGILRWTQTELDALDRRVRSLLTTHRMLHPRSSVMRLYIPRKCGGRGFLNAKDLHNREVYNLRNYFLNNECGMHRDVVAVDRNLTPLSLANENWRKPVVLSTEDRKAVWKDKQLHGRFYKALTGPDVDLLASVNWLRFGDLFGETEGFACAIADEVMMTNNYRKYILKDGTVDICRACRRPGESLRHIISGCSHLANGEYLHRHNLVARIIHQQLALLYGLVDREVPYYKYSPAPVLENGRATLYWDRSIITDRTIVANKPDIVLIDRSQRRTVLVDVTIPHDENLVKAEKDKSSKYLDLAHEITAMWDVDSTIIVHRNTSYTTIESCQRTVS

SEQ ID NO: 5338 - protein, 955 aa, Cydia splendana
MGALNALLEPYLRTSKDLDDTHAIMYCGATAACRVARVKFPDSERAPRTAGGAPAWQVRIERRISSFRTLIAKLICFRGGNNRPRVMRFVSQAFAGTDTRPRDYMANVTERIDFLKQKVYAWANRIRRYRERVDRFQQNRLFQSDQRKMYRKWEETNLRASDSQPPDATVMNDFWRSIWSVPVGHTEGSWMSVVERECESIEPMGAVTISPDDVSCAIRTAQNWKSPGPDGLHNFWLKWFRCSHSCLAAQFQQALELGSLPPSLTTGVTFLLYKSGSTTEAKNYRPITCLPTLYKLLTSILRAKINAHIVANNILASAQNGCRVGSRGTKELLLIDMTICQQIRRTKGALSAAWIDYKKAYDSVPHSWLGRVLELYKVDAALRAFLSACMGQWTTVLRQPGGGDDRPGPQDFIRIERGIFQGDSLSPLWFCLALNPLSTLLKDLGLGCRLRREGEVISHLLYMDDLKLFAPNTQGLLELLKTTEDFSSAINMEFGVDKCAVMHVQRGRVVNSTNLQLSETMSFRSISESETYKYLGMSQSLGIEDEGIRRSVKERFFSRLTKVLNSLLSGGNKVRAFNAWVMPLLTYSFGILRWTQTELDALDRRVRSLLTTHRMLHPRSSVMRLYIPRKCGGRGFLNAKDLHNREVYNLRNYFLNNECGMHRDVVAVDRNLTPLSLANENWRKPVVLSTADRRAAWESKVLHGRFYKALTGPDVDLLASVNWLRFGDLFGETEGFACAIADEVMMTNNYRKYILKDGTVDICRACRRPGESLRHIISGCSHLANGEYLHRHNLVARIIHQQLALLYGLVDREVPYYKYLPAPVLENGRATLYWDRSIITDRTIVANKPDIVLIDRSQRRAVLADVTIPHDENLVKAEKDKSSKYLDLAHEITAMWDVDSTIIVPIVVSANGLIAKSLDQHLERLSLGGWIKGQMQKAVILDTARIVRRFLTLRP

SEQ ID NO: 5339 - protein, 1118 aa, Cydia splendana
MRWTRDMNENVMRAYYRVTEGGTQLSAYRSRILPLFQTLEPTITVSEQRLSDQVRVIQRLKRLDDATLDRLRQEALSARADSISVRDLPATSPDPVPAPDLAPGAPRVDFCTDEGDLVSQNVSTTANEQLRRTLEGVITQYRATTNSRSRLPRLPMNRRNLALMGALNALLEPHLRTSKDLDDTHSILYCGAIAACRVARVKFPDAERAPRTVGGVPAWQARIERRISSFRTLIAKLICFRGGNNRPRVMRFVNQAFVGTDIRPRDYMANVTERIDFLKQKVYAWANRIRRYRERVERFQQNRLFQSDQRKVYRKWEETNLRTPDTRPPDATAMTDFWRSIWSMPVGHTEGSWMSVIERECESIEPMRAVTISPDDVSCAIRTAQNWKSPGPDGLHNFWLKWFRCSHSCLAAQFQQALELGSLPPSLTTGVTFLLYKSGSTTEAKNYRPITCLPTLYKLLTSILRTKIDAHIVANNILASAQNGCRVGSRGTKELLLIDMTICQQIRRTKGALSAAWIDYKKAYDSVPHSWLGRVLELYKVDAALRAFLSACMGQWTTVLRQPEGGDDQPGPQDFIRIERGIFQGDSLSPLWFCLALNPLSTLLKDLGLGCRLRREGEVISHLLYMDDLKLFAPNTQGLLELLKTTEVFSSAINMEFGVDKCAVMHVQWGRVVNSTNLQLSETMSFRSISESETYKYLGMSQSLGIEDEGIRRSVKERFFSRLTKVLNSLLSVGNKVRAFNAWVMPLLTYSFGILRWTQTELDALDRRVRSLLTTHRMLHPRSSVMRLYIPRKCGGRGFLNAKDLHNREVYNLRNYFLNNECGMHRDMVAVDRNLTPLSLANENWRKPVVLSTADRKAAWENKVLHGRFYKALTGPDVDLLASVNWLRFGDLFGETEGFACAIADEVMMTNNYRKYILKDGTVDICRACRRPGESLRHIISGCSHLANGEYLHRHNLVARIIHQQLALLYGLVDREVPYYKYLPAPVLENGRATLYWDRSIITDRTIVANKPDIVLIDRSQRRAVLADVTIPHDENLVKAEKDKSSKYLDLAHEITAMWDVDSTIIVPIVVSANGLIAKSLDQHLERLSLGGWIKGQMQKAVILDTARIVRRYLSLQP

SEQ ID NO: 5340 - protein, 869 aa, Agriopis aurantiaria
MRFVTQAFAGTDIRPQQYLANVTERIDYLKQKVYAWANRIRRYRERVDRYWQNRLFQSDQRKVYRGWEETDQRVSDGQLPDASAMINFWRGIWSVPVEHTEGDWMRVVERECESIEPMESILIDSIDVSCAIRTAQNWKSPGPDGLHNFWIKWIRCSHDRLATQFQEALELGSLPSFMTTGVTFLLHKSGSTTEAKNYRPITCLPTIYKLLTSILRNKINAHIVANNVLAHAQNGCRVGSRGTKELLLIDTAISQQVRRNKGALSAAWIDYKKAYDSVPHSWLERVLELYKIDTTLKSFLGACMRQWTTVLRQPGGGDGAFGPQNLLRIERGIFQGDSFSPLWFCLALNPLSTLLRDSGLGYRLRRDGQVISHLLYMDDLKLFTPKRQDLVELLKITEVFSSAIRMEFGVDKCAVMHVQRGKVVNSPNLQLSEVMTLRSLSEAETYKYLGMSESLGISVENIKKSVKERFFCRLTKVLNSLLSGGNKVRAFNGWVMPLLIYSFGILRWTQTELDALDRRVRQLLTSHRMLHPRSSVMRLYIPRKWGGRGFLNAKNLHNREVCSLRDFFRNSESGMHRDVVAVDRGLTALSLANENWRKPSVLSIEDRRDVWKGKELHGRFYRALTGPDVDLLAPVNWLRFGDLFGETEGFACAIADEVIKTNNYRKYIMKDGTVDICRACHRPGESLRHIISGCSHLANGEYLHRHNLVARIIHQQLALRYSLVESEVPYYKYAPAPVLENGRALLYWDRSIITDRTIVANKPDIVLVDRSQRRAVLVDITIPHDENLVKAEKDKLSKYLDLAHEVTAMWDVDSTIIVPIVVSVNGLIAKSLDQHLKRLSLDGWVKGQMQKAVILDTARIVRRFLTLQP

SEQ ID NO: 5341 - protein, 1214 aa, Agriopis aurantiaria
MITRSKTSAAARLTNAQPPPPPASSSSPSSSSGEDEYHTTREASGSSSDTSGPGTPPPPPPARRGRPPLPARLGLVGHSATRPAPATGGVVRRMRWSPTMNENCMRAYYRATEGGTNLSAYCARMLPLFQDLEPTVTVSAQRLSDQVRAIHRCKLLDDSVLDRLRLEELRARPTPALMRDPPVASSAPTLASLPASVATLAAPADPVVDEGDLTSNSVSDQVREQLRGALEDAISQYRFAPDSRPRLPRLPTHRRNLALMGALNALLAPYLRASEDLVDTHSILYCGAIAACRVARVKFPDTNRAPRTAGGVPAWQVRIERRISTFRTLIAKLICFSRGNNRPRVMRFVTQAFAGTEIRPQHYLANVMERIDYLKQKVYAWVSRIRRYRERVNRYWQNRLFQSDQRKVYRGWEETDQRVSDGQLPDANAMINFWRGIWSVPVEHTEGDWMRVVERECESIEPMGSILIDSVDVSCAIRTAQNWKSPGPDGLHNFWIKWIRCSHDRLATQFQEALELGSLPSFMTTGVTFLLHKSGSTTEAKNYRPITCLPTIYKLLTSILRNKINAHIVANNVLAHAQNGCRVGSRGTKELLLIDTAISQQVRRNKGALSAAWIDYKKAYDSVPHSWLERVLELYKIDTTLKSFLGACMRQWTTVLRQPGGGDGTSGPQDLIRIERGIFQGDSFSPLWFCLALNPLSTLLRDSGLGYRLRRDGQVISHLLYMDDLKLFTPKRQDLVELLKITEVFSSAIRMEFGVDKCAVMHVQRGKVVNSPNLQLSEVMTLRSLSEAETYKYLGMSESLGISVENIKKSVKERFFCRLTKVLNSFLSGGNKVRAFNGWVMPLLIYSFGILRWTQTELDALDRRVRQLLTSHRMLHPRSSVMRLYIPRKWGGRGFLNAKNLHNREVCSLRDFFRNSESGMHRDVVAVDRGLTPLSLVNENWRKPSVLSIEDRRDVWKGKELHGRFYRALTGPDVDLLSSVNWLRFGDLFGETEGFACAIADEVIKTNNYRKYIMKDGTVDICRACHRPGESLRHIISGCSHLANGEYLHRHNQVARIIHQQLALRYGLAESEVPYYKYAPAPVLENGRALLYWDRSIITDRTIVANKPDIVLVDRSQRRAVLVDITIPHDENLVKAEKDKLSKYLDLAHEVTAMWDVDSTIIVPIVVSVNGLIAKSLDQHLKRLSLDGWIKGQMQKAVILDTARIVRRFLTLQP

SEQ ID NO: 5342 - protein, 1212 aa, Agriopis aurantiaria
MITRSRTKQADTKSARLPSPPASSSSPSTSSGEDEYHTTREASGSSSDTSGPGTPPPPPPARRGRPPLPARLGLVGHSATRPAPATGGVVRRMRWSTIMNEDCMRAYYRATEGGTNLSAYCARMLPLFQALQPTITVSAQRLSDQVRAIHRCKLLDDSVLDRLRQEELRARPIPVSTRDLPVASSAPTLASVPASVVTLAASADPVVDEGDLASGVSDQVREQLRGALEDAISQYRFTPDSRPRLPRLSTHRRNLALMGALNALLAPYLRASEDLVDTHSILYCGAIAACRVARVKFPDTNRAPRTAGGVPAWQVRIERRISTFRTLIAKLVCFRRGNNRPRVMRFVTQAFAGTDIRPQQYLANVTERIDYLKQKVYAWANRIRRYRERVDRYWQNRLFQSDQRKVYRGWEETDQRVSDGQLPDASAMINFWRGIWSVPVEHTEGDWMRVVERECESIEPMESILIDSIDVSCAIRTAQNWKSPGPDGLHNFWIKWIRCSHDRLATQFQEALELGSLPSFMTTGVTFLLHKSGSTTEAKNYRPITCLPTIYKLLTSILRNKINAHIVANNVLAHAQNGCRVGSRGTKELLLIDTAMSQQVRRNKGALSAAWIDYKKAYDSVPHSWLERVLELYKIDTTLKSFLGACMRQWTTVLRQPGGGDGAFDPQDLLRIERGIFQGDSFSPLWFCLALNPLSTLLRDSGLGYRLRRDGQVISHLLYMDDLKLFTPKRQDLVELLKITEVFSSAIRMEFGVDKCAVMHVQRGKVVNSPSLQLSEVMTLRSLSEAETYKYLGMSESLGISVENIKKSVKERFFCRLTKVLNSLLSGGNKVRAFNGWVMPLLIYSFGILRWTQTELDALDRRVRQLLTSHRMLHPRSSVMRLYIPRKWGGRGFLNAKNLHNREVCSLRDFFRNSESGMHRDVVAVDRGLTALSLANENWRKPSVLSIEDRRDVWKGKELHGRFYRALTGPDVDLLASVNWLRFGDLFGETEGFACAIADEVIKTNNYRKYIMKDGTVDICRACHRPGESLRHIISGCSHLANGEYLHRHNLVARIIHQQLALRYSLVESEVPYYKYAPAPVLENGRALLYWDRSIITDRTIVANKPDIVLVDRSQRRAVLVDITIPHDENLVKAEKDKLSKYLDLAHEVTAMWDVDSTIIVPIVVSVNGLIAKSLDQHLKRLSLDGWVKGQMQKAVILDTARIVRRFLTLQP

SEQ ID NO: 5343 - protein, 1211 aa, Agriopis aurantiaria
MITRAKTRAAESNARLPPPPASSSSPSTSSGEDEYHTTREASGSSSDTSGPGTPPPPPPARRGRPPLPARLGPVGHSATRPAPATGGVVRRMRWSRIMNEDCMRAYYRATEGGTNLSAYCARMLPLFQALQPTITVSAQRLSDQVRAIQRCNMLDQSVLDRLRLEEVRTRPTPASTRNPPVASSAPTLASVPASVGTLAALADTAVDEEDLASGVSDQVKEQLRGALEDAISQYRFTSDSRPRLPRFPTHRRNLALMGALNALLAPYLRASEDLVDTHSILYCGAIAACRVARVKFPDTNRAPRTAGGVPAWQVRIERRINTFRTLIAKLICFRRGNNRPRVMRFVTQAFAGTDIRPQHYLANVTERIDYLKQKVYAWANRIRRYRERVDRYWQNRLFQSDQRKVYRGWEETDQRVSDGQRPDANAMINFWRGIWSVPVNHTEGDWMRVVERECESIEPMGSILIDPVDVSCAIRMAQNWKSPGPDGLHNFWIKWIRCSHDRLATQFQEALELGSLPSFMTTGVTFLLHKSGSTTEAKNYRPITCLPTIYKLLTSILRNKINAHIVANNVLAHAQNGCRVGSRGTKELLLIDTAISQQVRRNRGALSAAWIDYKKAYDSVPHSWLERVLELYKIDTTLKSFLCACMRQWTTVLRQPGGGDGTSGPQDLIRIERGIFQGDSFSPLWFCLALNPLSSLLRDSGLGYRLRRDGQVISHLLYMDDLKLFTPKRQDLVELLKITDVFSSAIRMEFGVDKCAVMHVQQGKVVNSPNLQLSEVMTLRSLSEAETYKYLGMSESLGISVENIKKSVKERFFCRLTKVLNSLLSGGNKVRAFNGWVMPLLIYSFGILRWTQTELDALDRRVRQLLTSHRMLHPRSSVMRLYIPRKWGGRGFLNAKNLHNREVCSLRDFFRNSESGMHRDVVAVDRGLTPLSLANENWRKPSVLSIEDRRDVWKGKELHGRFYRALTGPDVDLLSSVNWLRFGDLFGETEGFACAIADEVIKTNNYRKYIMKDGTVDICRACHRPGESLRHIISGCSHLANGEYLHRHNQVARIIHQQLALRYGLVESEVPYYKYAPAPVLENGRALLYWDRSIITDRTIVANKPDIVLVDRSQRRAVLVDITIPHDENLVKAEKDKLSKYLDLAHEVTAMWDVDSTIIVPIVVSVNGLIAKSLDQHLKRLSLDGWVKGQMQKAVILDTARIVRRFLTLQP

SEQ ID NO: 5344 - protein, 1215 aa, Hedya salicella
MQRYFTRSQNTRKISTAATPTHARPTPPPASSCSPSASSDDFATAPDMSESSDDECGPPPPPPRPPARRGRPPLPARLGPAGHSAPPTAPATGGIVRRMRWSQANNENVMRAYYGATEGGTHLSAYRDRMLLLFQTFEPAIAASAQRLSDQVRAIQRRKLLDDATLDRLRLEVLAARAASTSSRNPPATSPVPAPALDLMPGAPRVDPDSDEGHCVSIVSTQANEQLRRTLEETIERYRFAPDSRPRLPRLPANKRNLALVGALNALLDPYLRASEDLADTHSIMYCGAIAACRVARVKFPDADRAPRTAGGVPAWQVRIERRISTFRTLIAKLICFRGGNNRPRVMRYVAQAFAGTDVSSCDYMACVTERIDFLKQKVYAWASRIRRYRERVDRFQQNRLFQSDQRKVYRKWEGTDQRVTDGRLPDPTAMSNFWRSIWSVPVEHTEGEWMNVVERECEPIEAMGAVTISPDDVSCAARTTQNWKSPGPDGLHNFWVKWFRCSHERLATQFQQALELGSLPSFLTTGVTFLLYKSGSTTEAKNYRPITCLPTLYKLLTSILRAKINTHIVANNVLAFSQNGCRVGSRGTKELLLIDTTICQQVRRSRGSLSAAWIDYKKAYDSVPHSWLERILELYKVDTALRSFLGACMRQWTTVLCQPGGRDARPAPQDFIRIKRGIFQGDSLSPLWFCLALNPLSTLLKDSGLGCRLRRGGEIISHLMYMDDLKLFAPKRPELVELLKVTDTFSSAIKMEFGVDKCAVMHVQRGKVVNSTNLELSETMSLRSLSETETYKYLGMSQALSIADGDIRQAVKERFFCRLTKVLNSLLSGGNKARAFNAWVMPLLTYSFGILRWTQTELDALDRRVRMLLTTHRMLHPRSSVMRLYIPRKCGGRGFLNAKDLHNREVCSLREYFLNNECGIHRDVVAVDKGLTPLSLANENWRRPTVLSTVDRKDVWKSKELHGRFYKALTGPDVDLLASVNWLRFGDLFGETEGFSCAIADEVIMTNNYRRYILKDGTVDICRACRRPGESLRHIMSGCSYLANGEYLHRHNQVARIIHQQLAVKYDLVGSEVPYYKYVPMPVLENGRATLYWDRSILTDRTIVANKPDIVLVDRSKRRAMLVDITIPHDENLVKAEKDKLSKYLDLAHEVTAMWDVDSTIIVPIVVSVNGLIAKSLDEHLKRLSLDGWIKGQIQKAVILDTARIVRRFLSVQP

SEQ ID NO: 5345 - protein, 1218 aa, Erannis defoliaria
MITRSKNKAKTSTAETTNARPPPLPAPSSPSASSGDDVFLTPRESSVSSSDSDVSGPRTPAPPPPARRGRPPLPARLGPAGQPASRPALAAGGVVRRMRWSQTNNENCMRAYYGATEGGTNLTAYRVRMLSLFQALEPTVTVSAQRLSDQVRAIQRLNLLDQSLLDRLHLEAQSARPTPASTRDLDVASSAPTLTSVPTSAATLATSTDPVLDEGDCTGMSVSTQVSEQLRRALEDAIGQYRFTLNSRPRLPRLPTHRRNLALMGALNALLAPYLRASEDLTDTHSILYCGAIAACRVARVRFPDTNRAPRTAGDVPAWQVRIERRISTFRTLIAKLICFSRGNNRPRVMRFVTQAFAETGIRPQQYMACVTERIDYLKQKVYAWASRIRRYRERVDRYRQNRLFQSDQRKVYRDWEGNEQRVSDGHLPDASAMTNFWRSIWSVPVEHTEGDWMRVVERECEFIEPMGSILIDPVDVSCAIRTAQNWKSPGPDGLHNFWIKWFRCSHDRLATQFQEALELGSLPSFMTTGVTFLLHKSGSTTEPKNYRPITCLPTIYKLLTSILSTKINTHIVANNVLAPAQNGCRVGSRGTKELLLVDMAISQQVRRNKGALSAAWIDYKKAYDSVPHSWLERILELYKIDTTLKSFLSACMRQWTTVLRQPGGGNDSSDPQDLIRIERGIFQGDSLSPSWFCLALNPLSTLLKDSGLGYRLRRGGEVISHLLYMDDLKLFAPKHQDLLELLKTIQVFSSAIRMEFGVDKCAVMRVQRGKVVNSPDLQLSEIMTLRSLSEAETYKYLGMSESLGISVVDIKKSVKERFFCRLTKVLNSLLSGGNKARAFNGWVMPLLIYSFGILRWTQTELDALDRRVRQLLTAHRMLHPRSSVMRLYIPRKWGGRGFLNAKNLHNREVCSLRDYFLNNECGMHRDVVTVDKGLTPLSLANENWRRPSVLSTDDRKDVWKSKELHGRFYRALSGPDVDLLASVNWLRFGDLFGETEGFACAIADEVIKTNNYRKYIMKDGTVDICRACHRPGESLRHIISGCSHLANGEYLHRHNQVARIIHQQLALQYGLVESEVPYYKYAPAPVLENGRALLYWDRSIITDRTIVANKPDIVMVDRSQRRAVLVDVTIPHDENLLKAEKDKLSKYLDLAFEITAMWDVDSTIIVPIVVSANGLIAKSLDQYLKRLSLDGWVKGQIQKAVVLDTARIVRRFLTLQP

SEQ ID NO: 5346 - protein, 1215 aa, Erannis defoliaria
MITRSQSRRNTAERNARPPSPPAPSSPSASSGDDVFLTPRESSVSSSNSDVSGPRTPAPPPPARRGRPPLPARLGPAGLPASRPALAAGGVVRRMRWSQTNNENCMRAYYGATEGGTNLSAYRVRMLPLFQALEPTVTVSAQRLSDQVRAIQRLNLLDQSLLDRLRLEAQSARPTPASTRDLDVASSAPTLALVPTSAATLVTSADPVVDEGDCTGMSVSTQVSEQLRRALEDAIGQYRFTPNSRPRLPRLPTHRRNLALMGALNALLAPYLRASEDLTDTHSILYCGAIAACRVARVKFPDTNRAPRPAGDVPAWQLRIERRISTFRTLIAKLICFSRGNNRPRVMRFVTQAFAGTGIRPQQYMANVTERIDYLKQKVYAWANRIRRYRERVDRYWQNRLFQSDQSKVYRNWEGNEQRVSDGQLPDASAMTNFWRGIWSVPVEHTEGDWMRVVERECESIEPMGSILIDPVDVSCAIRTAQNWKSPGPDGLHNFWIKWFRCSHDRLATQFQEALELGSLPSFMTTGVTFLLHKSGSTTEPKNYRPITCLPTIYKLLTSILSTKINAHIVANNVLAPAQNGCRVGSRGTKELLLIDMAISQQVRRNKGALSAAWIDYKKAYDSVPHSWLERILELYQIDATLKSFLGACMRQWTTVLRQPGGGNGSSDSQDLIRIERGIFQGDSLSPSWFCLALNPLSTLLKDSGLGYRLRRGGEVISHLLYMDDLKLFAPKHQDLLELLKTTQVFSSAISMEFGVDKCAVMRVQRGKVVNSPDLQLSEIMTLRSLSEAETYKYLGMSESLGISVVDIKKSVKERFFCRLTKVLNSLLSGGNKARAFNGWVMPLLIYSFGMLRWTQTELDALDRRVRQLLTAHRMLHPRSSVMRLYIPRKWGGRGFLNAKNLHNREVCSLRDYFLNNECGMHRDVVTVDKGLTPLSLANENWRTPSVLSTDDRKEVWKSKELHGRFYRVLSGPDVDLLASVNWLRFGDHFGETEGFACAIADEVIKTNNYRKYIMKDGTVDICRACHRPGESLRHIISGCSHLANGEYLHRHNQVARIIHQQLALQYGLVESEVPYYKYAPAPVLENGRALLYWDRSIITDRTIVANKPDIVMVDRSQRRAVLVDVTIPHDENLVKAEKDKLSKYLDLAFEITAMWDVDSTIIVPIVVSANGLIAKSLDQYLKRLSLDGWVKGQIQKAVVLDTARIVRRFLTLQP

SEQ ID NO: 5347 - protein, 1215 aa, Biston betularia
MWTRSRTAAASGLHDAHIPSPPAPSTPSASSGDEEFATPLATSASSSSSDVSGPRTPAPPPPARRGRPPLPARLGPAGQSASRSALAAGGVVRRMRWSQTNNENCMRAYYGATEGGINLSAYRVRMLPLFQALEPTVAVSTQRLSDQVRAIQRLQLLDQSVLDRLRLEALPARPTPVSTRDSPVASSAPTLVSVPTSMATLATPTDPVVDVGECTSMGVCSQVSEHLRRTLEDAICQYRFAPDSRPRLPRLPTHRRNLALMGALNALLAPYLRASEDLTDTHSILYCGAIAACRVARVKFPDTNRAPRPAGGVPAWQLRIERRISTFRTLIAKLICFSRGNNRPRVMRFVTQAFAGTGIRPQHYLASVTERIDYLKQKVYAWANRIRRYRERADRYWQNRVFQSDQRKVYRDWEGTGQRVSDRQLPDTSVMTEFWRGIWSLPVEHTEGDWMRVVERECESIESMGSVLIDPVDVSCAIRTAQNWKSPGPDGLHNFWIKWIRCSHDRLATQFQEALELGSLPCFMTTGVTFLLHKTGSTTEAKNYRPITCLPTIYKLLTSILRTKINAHVVANNVLAPAQNGCRVGSRGTKELLLIDMTISQQVRRNKGALSTAWIDYKKAYDSVPHSWLERVLELYKIDTTLKSFLGACMRQWTTVLRQPGSGDGSSEPQDLIRIERGIFQGDSLSPLWFCLALNPLSTLLKESGLGHRLRRGGEVISHLLYMDDLKLFAPKRPDLMELLKTTQVFSNAIKMEFGVDKCAVMHVQLGEVVNCPDLQLSETMTFRSLSEAETYKYLGMSESLGIAVVDIKRSVKERFFCRLTKVLNSFLSGGNKVRAFNGWVMPLLIYSFGILRWTQTELDALDRRVRQQLTTHRMLHPRSSVMRLYIPRKLGGRGFLSAKNLHNREVCSLRDYFRDNECGMHRDVVAVDKGLTPLSLANENWRKPSVLSTEDRKEVWKSKQLHGRFYRVLTGPDVDMLASVNWLRFGDLFGETEGFACAIADEVIKTNNYRKYIMKDGTVDICRACHRPGESLRHIISGCSHLANGEYLHRHNQVARIIHQQLALQYGLVESEVPYYKYAPAPVLENGRALLYWDRSIITDRTIVANKPDIVVVDRAQRRAVLVDITIPHDENLVKAEKDKLSKYLDLAHEITAMWDVDSTIIVPIVVTVNGLIAKSLDQHLERLSLDGWVKGQLQKAVILDTARIVRRFLTLQP

SEQ ID NO: 5348 - protein, 1215 aa, Biston betularia
MWTRSRTAAASGLHDAHIPSPPAPSTPSASSGDEEFATPLATSASSSSSDVSGPRTPAPPPPARRGRPPLPARLGPAGQSASRSALAAGGVVRRMRWSQTNNENCMRAYYGATEGGINLSAYRVRMLPLFQALEPTVAVSTQRLSDQVRAIQRLQLLDQSVLDRLRLEALPARPTPVSTRDSPVASSAPTLVSVPTSMATLATPTDPVVDVGECTSMAVCSQVSEHLRRTLEDAICQYRFAPDSRPRLPRLPTHRRNLALMGALNALLAPYLRASEDLTDTHSILYCGAIAACRVARVKFPDTNRAPRPAGGVPAWQLRIERRISTFRTLIAKLICFSRGNNRPRVMRFVTQAFAGTDIRPQHYLASVTERIDYLKQKVYAWANRIRRYRERADRYWQNRVFQSDQRKVYRDWEGTGQRVSDRQLPDTSVMTEFWRGIWSLPVEHTEGDWMRVVERECESIESMGSVLIDPVDVSCAIRTAQNWKSPGPDGLHNFWIKWIRCSHDRLATQFQEALELGSLPCFMTTGVTFLLHKTGSTTEAKNYRPITCLPTIYKLLTSILRTKINAHVVANNVLAPAQNGCRVGSRGTKELLLIDMTISQQVRRNKGALSTAWIDYKKAYDSVPHSWLERVLELYKIDTTLKSFLGACMRQWTTVLRQPGSGDGSSEPQDLIRIERGIFQGDSLSPLWFCLALNPLSTLLKESGLGHRLRRGGEVISHLLYMDDLKLFAPKRPDLMELLKTTQVFSNAIKMEFGVDKCAVMHVQLGEVVNCPDLQLSETMTFRSLSEAETYKYLGMSESLGIAVVDIKRSVKERFFCRLTKVLNSFLSGGNKVRAFNGWVMPLLIYSFGILRWTQTELDALDRRVRQQLTTHRMLHPRSSVMRLYIPRKLGGRGFLSAKNLHNREVCSLRDYFRDNECGMHRDVVAVDKGLTPLSLANENWRKPSVLSTEDRKEVWKSKQLHGRFYRVLTGPDVDMLASVNWLRFGDLFGETEGFACAIADEVIKTNNYRKYIMKDGTVDICRACHRPGESLRHIISGCSHLANGEYLHRHNQVARIIHQQLALQYGLVESEVPYYKYAPAPVLENGRALLYWDRSIITDRTIVANKPDIVVVDRAQRRAVLVDITIPHDENLVKAEKDKLSKYLDLAHEITAMWDVDSTIIVPIVVTVNGLIAKSLDQHLERLSLDGWVKGQLQKAVILDTARIVRRFLTLQP

SEQ ID NO: 5349 - protein, 869 aa, Biston betularia
MRFVTQAFAGTGIRPQHYLASVTERIDYLKQKVYAWANRIRRYRERADRYWQNRVFQSDQRKVYRDWEGTGQRVSDRQLPDTSVMTEFWRGIWSLPVEHTEGDWMRVVERECESIESMGSVLIDPVDVSCAIRTAQNWKSPGPDGLHNFWIKWIRCSHDRLATQFQEALELGSLPCFMTTGVTFLLHKTGSTTEAKNYRPITCLPTIYKLLTSILRTKINAHVVANNVLAPAQNGCRVGSRGTKELLLIDMTISQQVRRNKGALSTAWIDYKKAYDSVPHSWLERVLELYKIDTTLKSFLGACMRQWTTVLRQPGSGDGSSEPQDLIRIERGIFQGDSLSPLWFCLALNPLSTLLKESGLGHRLRRGGEVISHLLYMDDLKLFAPKRPDLMELLKTTQVFSNAIKMEFGVDKCAVMHVQRGEVVNCPDLQLSETMTFRSLSEAETYKYLGMSESLGIAVVDIKRSVKERFFCRLTKVLNSFLSGGNKVRAFNGWVMPLLIYSFGILRWTQTELDALDRRVRQQLTTHRMLHPRSSVMRLYIPRKLGGRGFLSAKNLHNREVCSLRDYFRDNECGMHRDVVAVDKGLTPLSLANENWRKPSVLSTEDRKEVWKSKQLHGRFYRVLTGPDVDMLASVNWLRFGDLFGETEGFACAIADEVIKTNNYRKYIMKDGTVDICRACHRPGESLRHIISGCSHLANGEYLHRHNQVARIIHQQLALQYGLVESEVPYYKYAPAPVLENGRALLYWDRSIITDRTIVANKPDIVVVDRAQRRAVLVDITIPHDENLVKAEKDKLSKYLDLAHEITAMWDVDSTIIVPIVVTVNGLIAKSLDQHLKRLSLDGWVKGQLQKAVILDTARIVRRFLTLQP

SEQ ID NO: 5350 - protein, 1207 aa, Blastobasis lacticolella
MITRSKRKNQTVNAQPPPTPAPVSSSPSSSNDEFTTASDTSESSDERGLSAAPPPSPARRGRPLPARLGPTGRPAPPMAPATGGVVRRMRWTQSINENVMRAYYGATEGGTNLSAYRDRMLPLFQVLEPAIDVTAQRLSDQVRAIQRLKRLDDSVLDRLRLESLPVRAVPISTMSLPATSPPQVSPPSPAPRVPRTDATVCVEDCTNVSSVSTETNEYVRRTLEETIARYRFAPNSRPRLPRLPTNRRNLALMGAINVLLDSYIRASDNLVDTHSIMYCGAITACRVARVKFSDADRAPRVAGGAPAWQKRIERRINTFRTLIAKLICFKEGNNRPRVMRFVDQAFAGTGISSRDYMACATERIDFLKQKVCARANRIRRYRERVDRFRLNRLFQSDQRKVYRKWEGINQSGSDGSLPDASASNNFWRSIWSVPVEHSEGDWMNVVKRECEIIEPMAAVSICPEDVSCAIDTAQNWKCPGPDGLHNFWIKWFRCSHERLATQFQEALEHGSLPTLFTTGITFLLYKSGSTTEAKNYRPITCLPTLYKLLTSILRKKINNHIIENNILAMSQNGCRVGSRGTKELLLIEMTICQKVRRSRGSLSAAWIDYKKAYDSVPHSWLRRVLELYKINATLRSFLDACMRQWITVLSQPVGGIDHSPPQDFIRIERGIFQGDSLSPLWFCLALNPLSTLLKHSELGCRLRREGEVISHLLYMDDLKLFAPKRTDLMELLKITEIFSNAIRMEFGADKCAVMHVQRGKVANTTNLQLSETMSFRSLSEAETYKYLGMSQSLGIVDEGVKQAVMERFFCRLTKVLNSLLSGGNKVRSFNAWVMTLLTYSFGILRWTQTELDALDRRVRLLLTTHRMLHPRSSVMRLYIPRKCGGRGFLSAKTLHNREVCSLRDYFLNNECGMHRAVVAVDRGLTPLSLANENWRKPKVLSTIDRKDVWKSKELHGRFYRALTGPDVDLLASVNWLRFGDLFGETEGFVCAIADEVIMTNNYRRYILKDGTVDICRACRCPGESLRHITSGCGRLANGEYLHRHNLVARIIHQQLALQYGLVESEVPYYKYVPAPVLENGLATLYWDRSVITDRTIVANRPDIVLTDRSKRRAVLVDVTIPHDGNLVKAEKDKQCKYLDLAHEVTAMWDVDSTIIVPIVVSVNGLIAKSLDQHLKSLSLDGWVKGQIQKAVLLETARIVRRFLSLQP

SEQ ID NO: 5351 - protein, 1207 aa, Apotomis turbidana
MITRSRQKKAEQTNARPPPPPASSSSSPSSSGDEFATAADTSESSDERGPPPPPPQPPARRGRPQLPARLGPTGQPAPTTAPATGGVVRRMRWTRVMNENCMRAYYGATEGGINLSAYRDRMLPLFQVFDPTIAVSAQRLSDQVRFIQRRKLLDDATLDRLRLEVLAARAASVPARDPPATSPVPAPAPNLVPGVPLTDPEADVEDYASSVSTQANEQLRRALEEAIGRYRSAPEPRPRLPRLPIHKRNLALMGALDALLDPYLRASEDLADTHSIMYCGAIAACRVARVRFPDTDRAPRTARGVPAWQVRIERRISSFRTLIAKLICFRGGNNRPHVMRYVTQAFAGTGTRPCDYMACVTERIDYLKQKVYAWASRIRRYRERVDRFHQNRLFQSDQRKVYRKWEGADQCVSDGQLPDPTAMINFWRSIWSVPVEHTEGEWMNVVRRECEPIEAMGAVTISPDDVRCAARTIQNWKSPGPDGLHNFWIKWFRSSHERLATQFQDALELGSLPSFMTTGVTFLLHKSGSTTEAKNYRPITCLPTLYKLLTSILRTKINTHIVANNVLAFSQNGCRVGSRGTKELLLIDTTICQQVRRNRGSLSAAWIDYKKAYDSVPHSWLERILELYKIDTTLRSLLGACMRQWTTVLRQPGGGDGPPGPQDLIRIERGIFQGDSLSPLWFCLALNPLSTLLKDSGLGCRLRRGGEVISHLLYMDDLKLYAPKRQDLVELLEVTEAFSSAIKMEFGVDKCAVMHVQRGKVVNSANLQLSETMSLRSISEVETYKYLGMSQSLGIADGDIRQALKERFFCRLTKVLNSLLSGGNKARAFNAWVMPLLTYSFGILRWTQTELDALDTRVRQLLTTHRMRHPRSSVMRMYIPRKCGGRGFLNAKDLHNREVCSLREYFLNNECGIHRDVVAVDKGLTPLSLANENWRRPKVLSTDDRRAVWKSKELHGRFCKALTGPDVDLLASVNWLRFGDLFGETEGFVCAIADEVMMTNNYRRYILKDGTVDICRACRRPGESLRHIISGCSHLANGEYLHRHNQVARIIHQQLALRYGLVGSEVPYYKYAPMPVLENGRATLYWDRSIITDRTIVANKPDIVLVDRSKRQAVLVDITIPHDENLVKAEKDKLSKYLDLAHEVTAMWDVDSTIIVPIVVSANGLIAKSLDKHLKRLSLDGWIKGQIQKAVLLDTARIVRRFLSLQP

SEQ ID NO: 5352 - protein, 1211 aa, Apotomis turbidana
MITRSQARRNTAAHTQNARPTPPPVSSSSSPSSSGDEFATAPDTSESSDVVRGPPPPPPRPPARRGRPPLPACLGPTGQSAPTTAPATGGVVRRMRWTQVMNENCMRAYYGATEGGINLSAYRDRMLPLFLAFDPTITVSAQRLSDQVRFIQRRKLLDDATLDRLRLEVLAARAASTPARDTPATSPVPVPAPNLVPGVRQTDPEADGEDDASSVSTQANEQLRRALEEAIERYRSTPESRPRLPRLPMHKRNLALMGALDALLDPYLRASEDLADTHSIMYCGAIAACRVARVRFPDTDRAPRTAGGVPAWQVRIERRISSFRTFIAKLICFRGGNNRPRVMRYVTQAFAGTGTRPCDYMACVTERIDYLKQKVYAWASRIRRYRERVDRFQQNRLFQSDQRKVYRKWEGTNQCVSDGQLPDPTAMINFWRSIWSVPVEHTEGEWMNVVRRECEPIEAMGAVTISPDDVSCAARKAQNWKSPGPDGLHNFWIKWFRSSHERLATQFQDALELGSLPSFMTTGVTFLLHKSGSTTEAKNYRPITCLPTLYKLLTSILKTKINSHIVANNVLAFSQNGCRVGSRGTKELLLIDTTICQQVRRNRGSLSTAWIDYKKAYDSVPHSWLERILELYKIDTALRSLLGACMRQWTTVLRQPGGGDGPPDPRDLIRIERGIFQGDSLSPLWFCLALNPLSTLLKDSGLGCRLRRGGEVISHLLYMDDLKLYAPKRQDLVELLEVTENFSSAIKMEFGVDKCAVMHVQRGKVVNSANLQLSETMTLRSISEVETYKYLGMSQSLGIADGDIRQALKERFFCRLTKVLNSLLSGGNKARAFNTWVMPLLTYSFGILRWTQTELDALDTRVRQLLTTHRMRHPRSSIMRMYIPRKCGGRGFLNAKDLHNREVCSLREYFLNNECGIHRDVVAVDKGLTSLSLANENWRRPKVLSTDDRRAVWKSKELHGRFYKALTEPDVDLLASVNWLRFGDLFGETEGFVCAIADEVMMTNNYRRYILKDGTVDICRACRRPGESLRHIISGCSHLANGEYLHRHNQVARIIHQQLALQYGLVGSEVPYYKYAPMPVLENGRATLYWDRSIITDRTIVANKPDIVLVDRSKRQAVLVDITIPHDENLVKAEKDKLSKYLDLAHEVTAMWDVDSTIIVPIVVSANGLIAKSLDKHLKRLSLDGWIKGQIQKAVLLDTARIVRRFLSLQP

SEQ ID NO: 5353 - protein, 963 aa, Apotomis turbidana
MHKRNLALMGALDALLDPYLRASEDLADTHSIMYCGAIAACRVARVRFPDTDRAPRTAGGVPAWQVRIERRISSCRTLIAKLICFRGGNNRPRVMRYVTQAFAGTGTRPRDYMACVTERIDYLKQKVYAWASRIRRYRERVDRFQQNRLFQSDQRKVYRKWEGTDQCVTDGQLPDPTAMINFWRSIWSVPVEHTEGEWMNVVRREFEPIEAMGAVTISPDDVGCAVRTTQNWKSPGPDGLHNFWIKWFRSSHGRLATQFQDALELGSLPSFMTTGATFLLYKSGSTTEAKNYRPITCLPTLYKLLTSILRTKINTHIVANNVLAFSQNGCRVGSRGTKELLLIDTTICQQVRRNRGSLSAAWIDYKKAYDSVPHSWLERILELYKIDTALRSLLGACMRQWTTVLHQPGGGDGPPGPQDLIRIERGIFQGDSLSPLWFCLALNPLSILLKDSGLGCRLRRGGEVISHLLYMDDLKLYAPKRQDLVELLEVTETFSSAIKMEFGVDKCAVMHVQRGEVVNSANLQLSETMSLRSISEVETYKYLGMSQSLGIADGDIRQALRERFFCRLTKVLNSLLSGGNKARAFNAWVMPLLTYSFGILRWTQTELDALDTRVRQLLTTNRMRHPRSSVMRMYIPRKCGGRGFLNAKDLHNREVCSLREYFLNNECGIHRDVVAVDKGLTSLSLANENWRRPKVLSTDDRRAVWKSKELHGRFYKALTGPDVDLLASVNWLRFGDLFGETEGFVCAIADEVMMTNNYRRYILKDGTVDICRACRRPGESLRHIISGCSHLANGEYLHRHNQVARIIHQELALQYGLVGSEVPYYKYAPMPVLENGRATLYWDRSIITDRTIVANKPDIVLVDRSKRQAVLVDITIPHDENLVKAEKDKLSKYLDLAHEVTAMWDVDSTIIVPIVVSANGLIAKSLDKHLKRLSLDGWIKGQIQKAVLLDTARIVRRFLSLQP

SEQ ID NO: 5354 - protein, 1206 aa, Notocelia uddmanniana
MNTRLRSRAEQRARLPSPPAPSSSSPSSSDDEFATAPDSSESSSDERGPSPPPPQTSARRGRRPLPARLGPTGHSAPPTAPAAGGVVRRMRWTQEMNENCMRAYFGATEGETNLSAYRVRMLPLFQALEPTITVSAQRLSDQVRVIQRNKRLDDLTLDRLRLEALSARAAPTSARDLPATSPAPVPAPNTAPRAPRVDPSADGVCADQSVSTQAHEQLRRALDEAITRYRSTPNSRPRLPRLPVNRRNLALMGALNDLLDPYLRASDDLIDTHSIMYCGAIAACRVARVKFPDADRATRTAGGVTAWQVRIERRINTFRTLIAKLICFRGGNNRPRVMRFVNQAFAGTGVRPRDYMACVTERIDFLKQKVYAWASRIRRYRERVDRYQQNRLFQSDQRKVYRKWEGTDHRVCDGQRPDATAMVNFWRSIWSVPVEHTEGAWIGVVERDCESIEPMGSVTISPEDVSCAIRTAPNWKSPGPDGLHNFWLKWFRCSHERLATQFQQALVLGSLPPPLTTGVTSLLYKSGSTTEAKNYRPITCLPTLYKLLTSILRAKINTHIVTNNILAPAQNGCRVGSRGTKELLLIDMTICQRVRRNRGTLSASWIDYKKAYDSVPHSWLRRILELYKVDAALRSFLSACMGQWTTVLRQPGGGDGPSGPQDSIRIERGIFQGDSLSPLWFCLALNPLSILLQDSGLGCQLRRGGEVISHLLYMDDLKLFAPNRQDLLELLKTTEVFSSAIKMEFGVDKCAVMHVQRGKVVNSTNLQLSETMSLRSLSEAETYKYLGMSQALGIEGEGIKQAVKERFFCRLTKVLNSFLSGGNKARAFNAWVMPLLTYSFGILRWTQTELDALDRRVRVLLTAHRMLHPRSSVMRLYIPRKCGGRGFLNAKDLHNREVCSLRDYFLNSECGMHRDVVAVDASFTPLSMANENWRRFKVLSTEDRKAEWKSKELHGRFYRALTGPDVDLLASVNWLRFGDLFGETEGFVCAIADEVIMTNNYRKYILKDGTVDICRACRRPGESLRHIISGCSHLANGEYLHRHNLVARIIHQQLALSYGLVDFEVPYYKYLPAPVLENGRATLYWDRSIITDRTIVANKPDIVLIDRSKRQAVLVDITIPHDENLVKAEKDKVSKYLDLAHEVTAMWDVDSTIIVPIVVSANGLIAKSLDQHLKRLSLDGWVKGQIQKAVLLDTARIVRRFLSLSP

SEQ ID NO: 5355 - protein, 1211 aa, Notocelia uddmanniana
MITRSKARLKKQTSNPKSARPPPSPVSSSSASSSEEFATAPDTSSSSSSDECGPPPPPPRPPARRGRPPLPARLGPAGHPAPPTAPATGGIVRRMQWSQSINENCMRAYYGATDGGTNLSAYRVRMLTLFRALEPAIPVSAQRLSDQVRVIQRLKRLDDATLDRLRLEALSARAASVSARDPLATLPAPMPAPDTATGAPRVDLSTDGDCANQSVSTQADGQLRRALEEAITRYRSTTSSRPRLPRLPVNRRNLALMGALNDLLVPYLRASEDLIDTHSIMYCGAIAACRVARVKFPDADRAPRTAGSVPTWQVRIERRIDTYRTLIAKLICFRGGNSRPRVMRFVNQAFAGTGVRPRDYMTCVTERIDFLKQKVYAWASRIRRYRERVDRYQLNRLFQSDQRKVYRKWEGTDHRVSDGQRPDATAMVNFWRSIWSVPVEHNEGAWIDVVKRECESIEPMGSVTVSPEDVSCAIRTAPNWKSPGPDGLHNFWLKWFRCSHARLAAQFQQALELGSLPSPLTTGVTSLLYKSGSTTEAKNYRPITCLPTLYKLLTSILRAKINTHIVANNILAPAQNGCRVGSRGTKELLLIDMTICQRVRRNRGTLSAAWIDYKKAYDSVPHSWLRRILELYKVDAVLRSFLVACMGQWTTVLRQPEGGEGPSGPQDSIRIERGIFQGDSLSPLWFCLALNPLSTLLKDSGLGCQLRREGEVISHLLYMDDLKLFAPNKHDLLELLKTTEVFSSAIKMEFGVDKCAVMHVQRGKVVNSTNLHISETIALRSLSEAETYKYLGMSQSLGVEGEDIKRAVRERFFCRLTKVLNSFLSGGNKVRAFNAWVMPLLTYSFGILRWTQTELDFLDRRVRVLLTAHRMLHPRSSVMRLYIPRKLGGRGFLNAKDLHNREVCSLRDYFLNSECGMHRDVVAADASFTPLSMANENWRRFKVLSTDDRRAVWKSKELHGRFYKALTGPDVDLLALVNWLRFGDLFGETEGFVCAIADEVIMTNNYRKYILKDGTVDICRACRRPGESLRHIISGCSHLANGEYLHRHNLVARIIHQQLALLYGLVDFEVPYYKYTPAPVLENGRATLYWDRSVITDRTIVANKPDIVLTDRLKRQAVLVDITIPHDENLVKAEKDKVSKYLDLAHEVTAMWDVDSTIIVPIVVSVNGLIAKSLDQHLKRLSLDGWVKGQIQKAVLLDTARIVRRFLSLSP

SEQ ID NO: 5356 - protein, 1211 aa, Notocelia uddmanniana
MITRSKARLKKQTSNPKSARPPPSPVSSSSASSSEEFATAPDTSSSSSSDECGPPPPPPRPPARRGRPPLPARLGPAGHPAPPTAPATGGIVRRMQWSQSINENCMRAYYGATDGGTNLSAYRVRMLTLFRALEPAISVSAQRLSDQVRVIQRLKRLDDATLDRLRLEALSARAASVSARDPLATLPAPMPAPDTATGAPRVDLSTDGDCANQSVSTQADGQLRRALEEAITRYRSTTSSRPRLPRLPVNRRNLALMGALNDLLVPYLRASEDLIDTHSIMYCGAIAACRVARVKFPDADRAPRTAGSVPTWQVRIERRIDTYRTLIAKLICFRGGNSRPRVMRFVNQAFAGTGVRPRDYMTCVTERIDFLKQKVYAWASRIRRYRERVDRYQLNRLFQSDQRKVYRKWEGTDHRVSDGQRPDATAMVNFWRSIWSVPVEHNEGAWIDVVKRECESIEPMGSVTVSPEDVSCAIRTAPNWKSPGPDGLHNFWLKWFRCSHARLAAQFQQALELGSLPSPLTTGVTSLLYKSGSTTEAKNYRPITCLPTLYKLLTSILRAKINTHIVANNILAPAQNGCRVGSRGTKELLLIDMTICQRVRRNRGTLSAAWIDYKKAYDSVPHSWLRRILELYKVDAVLRSFLVACMGQWTTVLRQPEGGEGPSGPQDSIRIERGIFQGDSLSPLWFCLALNPLSTLLKDSGLGCQLRREGEVISHLLYMDDLKLFAPNKHDLLELLKTTEVFSSAIKMEFGVDKCAVMHVQRGKVVNSTNLHISETIALRSLSEAETYKYLGMSQSLGIEGEDIKRAVRERFFCRLTKVLNSFLSGGNKVRAFNAWVMPLLTYSFGILRWTQTELDFLDRRVRVLLTAHRMLHPRSSVMRLYIPRKLGGRGFLNAKDLHNREVCSLRDYFLNSECGMHRDVVAADASFTPLSMANENWRRFKVLSTDDRRAVWKSKELHGRFYKALTGPDVDLLASVNWLRFGDLFGETEGFVCAIADEVIMTNNYRKYILKDGTVDICRACRRPGESLRHIISGCSHLANGEYLHRHNLVARIIPQQLALLYGLVDFEVPYYKYTPAPVLENGRATLYWDRSVITDRTIVANKPDIVLTDRLKRQAVLVDITIPHDENLVKAEKDKVSKYLDLAHEVTAMWDVDSTIIVPIVVSVNGLIAKSLDQHLKRLSLDGWVKGQIQKAVLLDTARIVRRFLSLSP

SEQ ID NO: 5357 - protein, 1213 aa, Peribatodes rhomboidaria
MITRSRTRKQQTAETESTRPPPPPSSSSASSSSEEEFVTPPDTTDSSDEEAAPTPAPPPPPARRGRPPLPALLGPAGRSAPPTAPATGGVVCRMRWTRTINENCMRAYYGATEGGTNLTAYRVRMLSLFQVLEPTVTVSTQRLSDQVRAIHRCKLLDQSVLDRLCLEAIRARPTPASTRDQPVASSAPTWASVPASAATLATLADTDVDGDRTSVSVKSQVSEHLRRTLEDAISQYRYAPDSRPRLPRLPTHRRNMALMGALNVLLAPYLRASENLTDTHSILYCGAIAACRVARVKFPDTNRAPRPAGGVPAWQVRIERRISTFRTLIAKLLCFSRGNTRPRVMRFVTQAFAGTDIRPQYYLANVTERIDYLKQKVYAWANRIRRYRERVDRYWQNRLFQSDQRKVYRGWEGTEQCVIDGHRPDASAMIDFWRGIWSVPVEHTEGEWMRIVERECESIESMESILIDSVDVSCAIRTAQNWKSPGPDGLHNFWIKWIRSSHDRLATQFQEALELCSLPSFMTTGVTFLLHKSGSTTDPKNYRPITCLPTIYKLLTSILRNKINTHIVANNVLAPAQNGCRVGSRGTKELLLIDMAISQQVRRNRGALSVAWIDYKKAYDSVPHSWLERVLELYKIDITLKSFLSACMRQWTTVLRQPGGGEVSADPQDLIRIERGIFQGDSLSPLWFCLALNPLSTLLKDLGLGHRLRRGGEVISHLLYMDDLKLFAPKRQDLMELLKTTEVFSSAIKMEFGVDKCAVMHVQRGKVVNSPNLQLSETMNLRSFSEVETYKYLGMSESLGISVVDIKKSIKERFFCRLTKVLNSLLSGGNKMRAFNGWVMPLLIYSFGILRWTQTELDALDRRVRQLLTTHRMLHPRSSVMRLYIPRKWGGRGMLNAKNLHNREVYRLRSFFRNNDCGMHCDVVAVDKGLTPLSLANENWRQPSVLSTEDRKNVWKGKELHGRFYRALTGPDVDLLASVNWLRFGDLFGETEGFACAIADEVIKTNNYRKYILKDGTVDICRACHRPGESLRHIISGCSHLANGEYLHRHNQVARIIHQQLALQYGLVESEVPYYKYAPASVLENGRALLYWDRSIITDRTIVANKPDIVLVDRSQRRAVLVDITIPHDENLVKAEKDKLSKYLDLAHEVTAMWDVDSTIIVPIVVTVNGLIAKSLDQHLKRLSLDGWIKGQIQKAVILDTCRIVRRFLTLQP

SEQ ID NO: 5358 - protein, 1212 aa, Peribatodes rhomboidaria
MLTRLKKKQLAAEASTRPPPPPASSSGSPSSEEDEYATPLDTTDSSDEEAAPTPAPPPPPARRGRPPLPARLGPAGRSAPPTAPATGGVVCRMRWTQVMNENCMRAYYGATEGGTNLTAYRVRMLSLFQVLEPTVTVSTQRLSDQVRAIHRCKLLDQSVLDRLCLEAIRARPIPASTRDRPVASSAPTLASVPASAVTLATMANTDVDGDRTSVNVSSQVSEHLRRALEDAISQYRYAPDSRPRLPRLPTHRRNMALMGALNVLLAPYLRASENLTDTHSILYCGAIAACRVARVKFPDTSRAPRPAGGVPAWQVRIERRISAFRTLIAKLLCFSRGNTRPRVMRFVTQAFAGTDIRPQYYLANVTERIDYLKQKVYAWANRIRRYRERVDRYWQNRLFQSDQRKVYRGWEGTEQCVIDGHRPDASAMIDFWRGIWSVPVEHTEGEWMRIVERECESIESMESILIDSVDVSCAIRTAQNWKSPGPDGLHNFWIKWIRCSHDRLAIQFQEALELGSLPSFMTTGVTFLLHKSGSTTDPKNYRPITCLPTIYKLLTSILRNKINTHIVANNVLAPAQNGCRVGSRGTKELLLIDMAISQQVRRNRGALSVAWIDYKKAYDSVPHSWLERILELYKIDITLKSFLSACMRQWTTVLCQPGGGEVSADPRDLIRIDRGIFQGDSLSPLWFCLALNPLSTLLKDLGLGHRLRRGGEVISHLLYMDDLKLFAPKRQDLMELLKTTEVFSSAIKMEFGVDKCAVMHVQRGKVVNSPNLQLSETMTLRSLSEVETYKYLGMSESLGISVADIKKSIKERFFCRLTKVLNSLLSGGNKVRAFNGWVMPLLIYSFGILRWTQTELDALDRRVRQLLTTHRMLHPRSSVMRLYIPRKWGGRGMLNAKNLHNREVYRLRSFFRNNDCGMHCDVVAVDKGLTPLSLANENWRQPPVLSTEDRKIVWKGKELHGRFYRALTGPDVDFLASVNWLRFGDLFGETEGFACAIADEVIKTNNYRKYILKDGTVDICRACHRPGESLRHIISGCSHLANGEYLHRHNQVARIIHQQLALQYGLVESEVPYYKYAPASVLENGRALLYWDRSIITDRTIVANKPDIVLVDRSQRRAVLVDITIPHDENLVKAEKDKLSKYLDLAHEVTAMWDVDSTIIVPIVVTVNGLIAKSLDQHLKRLSLDGWIKGQIQKAVILDTCRIVRRFLTLQP

SEQ ID NO: 5359 - protein, 1213 aa, Peribatodes rhomboidaria
MITRSRTRKQQTAETESTRPPPPPSSSSVSSSSEEEFVTPPDTTDSSDEEAAPTPAPPPPPARRGRPPLPARLGPAGRSAPPTAPATGGVVCRMRWTRTINENCMRAYYGATEGGTNLTAYRVRMLSLFQVLEPTVTVSTQRLSDQVRAIHRCKLLDQSVLDRLCLEAIRARPTPASTRDQPVASSAPTWASVPTSAATLATLADTDVDGDRTSVSVSSQVSEHLRRTLEDAISQYRYAPDSRPRLPRLPTHRRNMALMGALNVLLAPYLRASENLTDTHSILYCGAIAACRVARVKFPDTNRAPRPAGGVPAWQVRIERRIRTFRTLIAKLLCFSRGNTRPRVMRFVTQAFAGTDIRPQYYLANVTERIDYLKQKVYAWANRIRRYRERVDRYWQNRLFQSDQRKVYRGWEGTEQCVIDGHRPGASAMIDFWRGIWSVPVEHTEGEWMRVVERECESIESMESILIDSVDVSCAIRTAQNWKSPGPDGLHNFWIKWIRSSHDRLATQFQEALELCSLPSFMTTGVTFLLHKSGSTTDPKNYRPITCLPTIYKLLTSILRNKINTHIVANNVLAPAQNGCRVGSRGTKELLLIDMAISQQVRRNKGALSVAWIDYKKAYDSVPHSWLERVLELYKIDIILKSFLSACMRQWTTVLRQPGGGEVSADPQDLIRIERGIFQGDSLSPLWFCLALNPLSTLLKDLGLGHRLRRGGEVISHLLYMDDLKLFAPKRQDLMELLKTTEVFSSAIKMEFGVDKCAVMHVQRGKVVNSPNLQLSETMTLRSLSEVETYKYLGMSESLGISVVDIKKSIKERFFCRLTKVLNSLLSGGNKMRAFNGWVMPLLIYSFGILRWTQTELDALDRRVRQLLTTHRMLHPRSSVMRLYIPRKWGGRGMLNAKNLHNREVYRLRSFFRNNDCGMHCDVVAVDKGLTPLSLANENWRQPSVLSTEDRKNVWKGKELHGRFYRALTGPDVDLLASVNWLRFGDLFGETEGFACAIADEVIKTNNYRKYILKDGTVDICRACHRPGESLRHIISGCSHLANGEYLHRHNQVARIIHQQLALQYGLVESEVPYYKYAPASVLENGHALLYWDRSIITDRTIVANKPDIVLVDRSQRRAVLVDITIPHDENLVKAEKDKLSKYLDLAHEVTAMWDVDSTIIVPIVVTVNGLIAKSLDQHLKRLSLDGWIKGQIQKAVILDTCRIVRRFLTLQP

SEQ ID NO: 5360 - protein, 1212 aa, Pammene fasciana
MITRSKTRLQQASPPNARPPSSPASSVSSPSSSGDEFATAPDTSESSDECGPPPPPPRPPARRGRPPLPARLGLAGHPVPPRAPAAGGIVRRMRWTPSMNENVMRAYYGATEGGTNLCAYRDRMLPLFQALEPTINTTAQRLSDQVRVIQRLKRLDDATLDRLRLEALSARAASTSARDPPAMSLDPMPASDLASGAPRIDPSADEEEIANQSVSSTANEQLRRTLEEAITQYRSTNITRPRLPRLPMNRRNLALMGALNDLLDPLLRTSKDLDDTHSIMYCGAIAACRVARVKFPDAERAPRTAGGVPAWQVRIERRINSFRTLIAKLICFRGGNNRPRVMRFVHQAFAGTDIEPRDYMANVTERIDFLKQKVYAWASRIRRYRERVDRFRQNRLFQSDQRKVYRRWEEADPRVSDVRLPDATAMTDFWRSIWSAPVEHTEGEWMSVVERECETIEPMGAITISPDDVSCAIRTAQNWKSPGPDGLHNFWLKWFRCSHSRLATQFQQALELGSLPPSLTTGVTFLLYKSGSTTEAKNYRPITCLPTLYKLLTSILRAKINAHMVANNILASAQNGCRVGSRGTKELLLIDMTICQRVRRNRGALSAAWIDYKKAYDSVPHSWLERILELYKIDAALRSFLGACMRQWTTVLRQPGGGDDPPGPQDFIRIERGIFQGDSLSPLWFCLALNPLSTLLKDSGLGCRLRREGEVISHLLYMDDLKLFAPNNRDLLELLKTTEVFSNSIKMEFGVDKCAVMHVQRGKVVNSTNLQLSETMMFRSISESETYKYLGMSQSLGIEDAGIKQALRERFFGRLTKVLNSLLSGGNKVRAFNAWVMPLLTYSFGILRWTQTELDALDRRVRLLLTTHRMLHPRSSVMRLYIPRKCGGRGFLNAKNLHNREVYNLRNYFLNNECEMHRDVVAIDKGLTPLSLANENWRKPVVLSTEDRKAVWKSKELHGRFYGALTGPDVDLLASVNWLRFGDLFGETEGFACAIADEVIMTNNYRRYILKDGTVDICRACRRPGESLRHIISGCSHLANGEYLHRHNLVARIIHQQLALLYGLVDHEVPYYKYTPVPVLENGRATLYWDRSIITDRTIVANKPDIVVIDRPQRRAMLVDITVPCDVNLVKAEKDKSSKYLDLAHEVTAMWEVDSAIIVPIVVSANGLIAKSLDQHLERLSLRGCGWIKGQIQKAVILDTARIVRRFLSLRP

SEQ ID NO: 5361 - protein, 1209 aa, Pammene fasciana
MITRSRTKAASTNARPPSSPASSVSSPSSSGDEFATAPDTSESSDECGPPPPPPRPPARRGRPPLPARLGLAGHPVPPRAPAAGGIVRRMRWTPAMNENVMRAYYGATEGGTNLSAYRDRILPLFQALEPTIDTTAQRLSDQVRAIQRLKRLDDATLDRLRLEALSAHAGSTSVRDPPATSPDPMPVPDLASGAPRIDPSADEEYIASQSMSSTANEQLRRTLEEAITQYRSTNIPRPRLPRLPMNRRNLALMGALNDLLDPILRTSKDLDDTHSIMYCGAIAACRVARVKFPDAERAPRTAGGVPVWQVRIERRINSFRTLIAKLICFRGGNNRPRVMRFVHQAFAGTGIEPRDYMANVTERIDFLKQKVYAWASRIRRYRERVDRFRQNRLFQSDQRKVYRRWEEADPRVSDVRLPDATAMTDFWRSIWSAPVEHTEGEWMSVVERECESIEPMGAITISPDDVSCAIRTAQNWKSPGPDGLHNFWLKWFRCSHSRLATQFQQALELGSLPPSLTTGVTFLLYKSGSTTEAKNYRPITCLPTLYKLLTSILRAKINAHIVANNILASSQNGCRVGSRGTKELLLIDMTICQRVRRNRGALSAAWIDYKKAYDSVPHSWLERILELYKVDAALRSFLGACMRQWTTVLRQPGGGDDPPDPHDFIRIERGIFQGDSLSPLWFCLALNPLSTLLKDSGLGCRLRREGEVISHLLYMDDLKLFAPNNRDLMELLKTTEVFSSSIKMEFGVDKCAVMHVQRGKVVNSTNLQLSETMTFRSISESETYKYLGMSQSLGIEDAGIKQALKERFFGRLTKVLNSLLSGGNKVRAFNAWVMPLLTYSFGILRWTQTELDALDRRVRLLLTTHRMLHPRPSVMRLYIPRKCGGRGFLNAKNLHNREVYNLRNYFLNNECGMHRDVVAVDKSLTPLSLANENWRKPVVLSTEDRKAVWKSKELHGRFYGALTGPDVDLLASVNWLRFGDLFGETEGFACAIADEVIMTNNYRRYILKDGTVDICRACRRPGESLRHIISGCSHLANGEYLHRHNLVARIIHQQLALLYGLVDHEVPYYKYTPAPVLENGRATLYWDRSIITDRTIVANKPDIVIIDRSQRRAMLVDITVPCDVNLVKAEKDKSSKYLDLAHEVTAMWEVDSAIIVPIVVSANGLIAKSLDQHLERLSLRGCGWIKGQIQKAVILDTARIVRRFLSLRP

SEQ ID NO: 5362 - protein, 1210 aa, Pammene fasciana
MITRSQTKAAQEQRARPPPSPTPSSSSPSSSGDEYATAPDANISESSSDERGSSPSPPPPPARRGKRPLPARLGPAGQPAPPTAPAAGGPVRRMRWTPSINENVMRAYFGATVGGTQLSAYRSKMLPLFQALEPTITVSEQRLSDQVRVIQRLKRLDDATLDRLRLEALSAHAASPSTRDPPATSPDPMPAPGRASGAPRVDPSVDEEFTCQSVSTSANEQLRRALEEAITQYRSTNNSRPRLPRLPMNRRNLAIIGALNDLLDPLVRTSKDLDDTHSIMYCGAIAACRVARVKFPDAERAPRTAGGVPAWQVRIERRINSFRTLIAKLICFRGGNDRPRVMRFVNQAFAGTGIEPRDYMANITERIDFLKQKVYAWANRIRRYRKRVERFQQNRLFQSDQRKVYRRWEETDPRVSDAQLPDATAMTDFWRSIWSVPVEHTEGEWMSVVERECESIEPMGATTISPDDVSCAIRTSQNWKSPGPDGLHNFWLKWFRCSHSRLATQFQQALELGSLPPSLTTGVTFLLYKSGSTTEAKNYRPITCLPTLYKLLTSILRAKINAHIVANNILASAQNGCRVGSRGTKELLLIDMTICQRVRRNRGALSAAWIDYKKAYDSVPHSWLERILELYKVDATLRSFLGACMRQWTTVLRQPGGGDDPLGPQDSIRIKRGIFQGDSLSPLWFCLALNPLSTLLKDSGLGCQLRREGEAISHLLYMDDLKLFAPNNRDLMELLKTTEVFSSSIKMEFGVDKCAVMHVQRGKVVNSTNLQLSETMTFRSISESETYKYLGMSQSLGIEDAGIKQALRERFFGRLTKVLNSLLSGGNKVRAFNAWVMPLLTYSFGILRWTQTELDALDRRVRLLLTTHRMLHPRSSVMRLYIPRKCGGRGFLNAKNLHNREVYNLRNYFLNNEYGMHRDVVAVDKGLTPLSLANENWRKPVVLSTEDRKMVWKSKELHGRFYKALTGPDVDLLASVNWLRFGDLFGETEGFACAIADEVIMTNNYRRYILKDGTVDICRACRRPGESLRHIISGCSHLANGEYLHRHNLVSRIIHQQLALQYGLVNHEVPYYMYLPAPVLENGRVTLYWDRSIITDRTIVANRPDIVLIDRSQRRAVLVDVAIPHDENLVKAEKDKSSKYLDLAHEITAMWDVDSTIIVPIIVSANGLIAKSLDQHLERLSLGGWIKGQMQKAVVMDTARIVRRFLSLRP

SEQ ID NO: 5363 - protein, 1210 aa, Pammene fasciana
MITRAQTKAAQQQRARPPPSPTPSSSSPSSSGDEYATAPDANISESSSDERGSSPSPPPPPARRGKRPLPARLGPAGQPAPPTAPAAGGPVRRMRWTPSINENVMRAYFGATVGGTQLSAYRSKMLPLFQALEPTITVSEQRLSDQVRVIQRLKRLDDATLDRLRLEALSAHAASASTRDPPATSPDPMPAPGRASGAPRVDPSVDEEFTCQSVSTSANEQLRRALEEAITQYRSTNNSRPRLPRLPMNRRNLAIIGALNDLLDPLVRTSKDLDDTHSIMYCGAIAACRVARVKFPDAERAPRTAGGVPAWQVRIERRINSFRTLIAKLICFRGGNDRPRVMRFVNQAFAGTGIEPRDYMANITERIDFLKQKVYAWANRIRRYRKRVERFQQNRLFQSDQRKVYRRWEETDPRVSDAQLPDATAMTDFWRSIWSVPVEHTEGEWMSVVERECESIEPMGATTISPDDVSCAIRTAQNWKSPGSDGLHNFWLKWFRCSHSRLATQFQQALELGSLPPSLTTGVTFLLYKSGSTTEAKNYRPITCLPTLYKLLTSILRAKINAHIVANNILASAQNGCRVGSRGTKELLLIDMTICQRVRRNRGALSAAWIDYKKAYDSVPHSWLERILELYKVDATLRSFLGACMRQWTTVLRQPGGGDDPLGPQDSIRIKRGIFQGDSLSPLWFCLALNPLSTLLKDSGLGCQLRREGEAISHLLYMDDLKLFAPNNRDLMELLKTTEVFSSSIKMEFGVDKCAVMHVQRGKVVNSTNLQLSETMTFRSISESETYKYLGMSQSLGIEDAGIKQALRERFFGRLTKVLNSLLSGGNKVRAFNAWVMPLLTYSFGILRWTQTELDALDRRVRLLLTTHRMLHPRSSVVRLYIPRKCGGRGFLNAKNLHNREVYNLRNYFLNNECGMHRDVVAVDKGLTPLSLANENWRKPVVLSTEDRKMVWKSKELHGRFYKALTGPDVDLLASVNWLRFGDLFGETEGFACAIADEVIMTNNYRRYILKDGTVDICRACRRPGESLRHIISGCSHLANGEYLHRHNLVARIIHQQLALQYGLVNREVPYYMYLPAPVLENGRATLYWDRSIITDRTIVANKPDVVLIDRSQRRAVLVDVAIPHDENLVKAEKDKSSKYLDLAHEITAMWDVDSTIIVPVIVSANGLIAKSLDQHLERLSLGGWIKGQMQKAVVMDTARIVRRFLSLRP

SEQ ID NO: 5364 - protein, 1202 aa, Campaea margaritaria
MFTRSKAATNAHLSSQSAPSSPKSTSSESEYGTPPDTSDVSGPPSPPSPPRPVRRGRQPLPARLGPVGQLAPRPAPATSSKAQRMKWTTTINTSCMRAYYGATEGGTNLTAYRNRMLSLFQTLEPTVAVSAQRLSDQVRAIHRCKLMEQSTLDRLRLEALPVSTTSTSGRDLPETPSIPGPVITSTPVASRVDTEVVDGECGNMSVSSQVTEQLRRTLEDAIRQYRITSDSRPRLPRVPTHRRNLALMGALDALLAPYLQTSKDLIDTHSILYCGAIAVCRVARVKFPDTEQVPRTLGHAPAWQVRIQRRIDTYRTLIAKLVCFSRGNNRPRVMRFVNQAFAGTDIRPRNYMTCVTERTDFLKQKVYVWANRIRRYRERVNRYCQNRLFQSDQRKVYRNWEVTGQRMDDGQLPDVTAMINFWRGIWSVPVEHTEGDWMNIVERACDPIESMEAVSISPIDVRYAIQTAQNWKSPGPDGLQNFWIKWIRSSHSCLAMQFQEAIELGSLPSFMTTGSTTLLFKSGSTTEAKNYRPITCLPTMYKLLTSILRTKINSHIIANNILAPAQNGCRVGSRGTKELLLIDMTICQQVRRKKGALSTAWVDYKKAYDSVPHSWLVRILELYKIDTTLRSFLRTCMGQWSTVLRQPGGGDSVFGPQDFIRIERGIFQGDSLSPLWFCLALNPLSTLLQNSGLGYRLRREGEIISHLLYMDDLKLFAPKRFDLMKLLNITEEFSKSINMEFGVDKCAVMHVQRGKVVNSSNLQLSESLSLRSLSEAETYKYLGMSESLGIVDRDIKQSVKERFFCRLTKVLNSHLSGGNRARAFNGWVMPLLTYSFGILRWTQTELDALDRRVRQQLTLHRMLHPRSSVMRLYIPRKWGGRGFLNAKNLHNREVCSLREYFLNTECGMHRDVVVVDKTLTPLSLANGNWRKPSVLSTDDRKDVWKGKELHGRFYRALTGPDVDLLASVNWLRFGDLFGETEGFVCAIADEVIKTNNYRKYIMKDGTVDICRACRRPGESLRHIISGCSHLANGEYLHRHNQVARIVHQQLALQYGLVELEVPYYKYAPAPVLENGRALLYWDRSVITDRTIVANKPDIVLVDRSQRRAVLVDITVPHDENLVKAEKDKLSKYLDLAHEVTAMWDVDSTIIVPIVVSANGLVAKSLDQHLKRLSLDGWIKGRMQKAVLLDTARIVRRFLSLQP

SEQ ID NO: 5365 - protein, 1207 aa, Bembecia ichneumoniformis
MKLRERTRKNTAEQSARPPQQPVSSSPCSSADEFLTADDKSSSSDDDGLTPPSPPRRPTRRGRPPLPARLGPARQSTSRPALATGGVVRRMRWTQSINENCMRAYYGATEGGINLTAYRARMLSMFQALEPAVTVTAQRLSDQVRAIQRCQLLDQSALDRLRLGSLPARATSAATQDLRAALPIPESASIPTSAAPLTDPVDQEFCASTNVSTKTKEQLRRALEEAISRYHTKPNDRPRLPRLPTHKQNIALMGALNTLLAPYIKASRDLTDTHSILYCGAIAACRVALVKFLNFDRATRDAEGVPAWQMRIERRISKFRTLIAKLISFSRGNTRPRVMRFVAQAFVGTNIKSKDYLTWATERIDYFKQKVYALANRVRRYKERVQRYRQNRLFQSDQRKVYRDWERTNQSVNVGHPPDPEVMLNFWHDIWSVSDEHTEGDWISIVEQACEPITAMEAITISPTDLSCAIRSTQNWKSPGPDGLHNFWIKMFQCSHECLAVQFQKALELGTLPTFLTTGTTFLLHKSGSTAEAKNYRPITCLPTIYKLLTSTLRTKINSHILKNNILDTAQNGCKIGSRGTKELLLIDMTICQRIRRSSGALSVAWIDYKKAYDSVPHSWLRRILELYKIDTTLRSFLAMCMGQWITVLRQPGYRGGDAGLRDTIKIERGIFQGDSLSPLWFSLALNPLSTLLRNLKLGYRLRRGGEVISHLLYMDDLKLFAPKPKDLLELLKITQCFSNAIRMDFGVDKCAVMHVQKGKVVNSPNLQLSDEVSFKSLSEVETYKYLGMSQSLGISDKDIKQTVKTRFFGRLTKVLNSFLSGGNKVRAFNGWVMPLLTYSFGILRWTQTELDGLDRRVRRLLTAHRMLHPRSSVMRLYIPRKLGGRGFLNAKNLHNREVYSLREYFLNHGSGVHRDVVAIDKNFTPLSLANGNWRRLVVLSTEDRKSVWKGKELHGRFYKALTGPDVDSLMSVNWLRFGDLFGETEGFVCAIADEVIKTNNYRKYILKDGTVDICRACHRPGETLRHVISGCAHLSNGEYLHRHNQVARIIHQRLAIRYGLIESEVPYYKYVPAPVLENGHATLYWDRSIITDRTIVANKPDIVVIDRSQRRTMLVDIAVPHDENLVKAEKEKLTKYIDLAHEVTAMWDVDSTIIVPIVVSANGLIAKSLDQHLKRLSLDGWIKGQIQKAVLLDTARIVRRFLTLQP

SEQ ID NO: 5366 - protein, 869 aa, Ennomos quercinarius
MRFVTQAFAGTGIRPQDYMACVTERIDFLKQKVYAWASRIRRYRERVDRYQQNRLFQSDQRKVYRNWEGTGQRVVDGQLPDANAMNEFWRSIWSVPVEHTEGDWIRVVKRVCEPIESMGSITIDPEDISCAIRTAQNWKSPGPDGLHNFWIKWIRCSYPCLAIQFQEALEAGSLPSFMTTGVTFLLHKSGSTTEAKNYRPITCLPTLYKLLTSILRTKINSHIVANNILAPAQNGCRVGSRGTKELLLIDTTICQQVRRNRGALSTAWIDYKKAYDSVPHSWLERVLELYKIDTTLRSFLRSCMGQWTTVLRQPGGGDSVSGPQDLIRIERGIFQGDSLSPLWFCLALNPLSTLLEDSKLGYRLRRGGETICHLLYMDDLKLFAPQRPQLIELLKITENFSNSIRMEFGVDKCAVMHVRGGKVVNSTNLQLSETMTLRSLSEAETYKYLGMSESLGISVGDVKRTVKERFFCRLTKVLNSLLSGGNKVRAFNGWVMPLLIYSFGILRWTQTELDALDRKVRQLLTSHRMLHPRSSVMRLYIPRKWGGRGFLNAKNLHNREVCSLREYFLNNECGMHRDVVAVDKGLTPLSLANENWRKPVVLSTEDRRDVWKGKELHGRFYRALTGPDVDLHASVNWLRFGDLFGETEGFVCAIADEVIKTNNYRKYIMKDGTVDICRACRRPGESLRHIISGCSHLANGEYLHRHNLVARIIHQQLALQYGLVESEVPYYKYTPGPVLENGRALLYWDRSIITDRTIVANKPDIVLIDRSQRRAVLVDITIPHDENLVKAEKDKLSKYLDLAHEVTAMWNVDSTSIVPIVVSANGLIAKSLDQHLERLSLDGWIKGQIQKAVLLDTARIVRRFLTLQP

SEQ ID NO: 5367 - protein, 1207 aa, Ennomos quercinarius
MITRSRTKQAEQSARLPPPPAPSSSSSSSGDEYGTPPDTTASSDEDGPPSPPPPPPPARRGRPPLPARLGPAGQPAPRPAPATGGIVRRMRWTQAMNENCMRAYYGATEGGSSLTAYRDRMLSLFQNLEPTVAVSAQRLSDQVRAIQRCKMLDQSTLDRLRLEALPTRATSPSPRVLPAALPDPGPTTGPPPVTPRGDPAIGGEESVSDSVSTQANEQLRSALENAILRYRSTSTSRPRLPRLPTNRRNLVLMGALNTLLAPYLRTSEDLVDTHSILYCGAIAACRVARVKFPDTDRAPRPADGAPARQVRIEKRITTFRTLIAKLVCFSRGNHRPRVMRFVTQAFAGTGIRPQDYMACVTERIDFLKQKVYAWASRIRRYRERVDRYQQNRLFQSDQRKVYRNWEGTGQRVVDGQLPDANAMNEFWRSIWSVPVEHTEGDWIRVVKRVCEPIESMGSITIDPEDISCAIRTAQNWKSPGPDGLHNFWIKWIRCSYPCLAIQFQEALEAGSLPSFMTTGVTFLLHKSGSTTEAKNYRPITCLPTLYKLLTSILRTKINSHIVANNILAPAQNGCRVGSRGTKELLLIDTTICQQVRRNRGALSTAWIDYKKAYDSVPHSWLERVLELYKIDTTLRSFLRSCMGQWTTVLRQPGGGDSVSGPQDLIRIERGIFQGDSLSPLWFCLALNPLSTLLEDSKLGYRLRRGGETICHLLYMDDLKLFAPQRPQLIELLKITENFSNSIRMEFGVDKCAVMHVRGGKVVNSTNLQLSETMTLRSLSEAETYKYLGMSESLGISVGDVKRTVKERFFCRLTKVLNSLLSGGNKVRAFNGWVMPLLIYSFGILRWTQTELDALDRKVRQLLTSHRMLHPRSSVMRLYIPRKWGGRGFLNAKNLHNREVCSLREYFLNNECGMHRDVVAVDKGLTPLSLANENWRKPVVLSTEDRRDVWKGKELHGRFYRALTGPDVDLHASVNWLRFGDLFGETEGFVCAIADEVIKTNNYRKYIMKDGTVDICRACRRPGESLRHIISGCSHLANGEYLHRHNLVARIIHQQLALQYGLVESEVPYYKYTPGPVLENGRALLYWDRSIITDRTIVANKPDIVLIDRSQRRAVLVDITIPHDENLVKAEKDKLSKYLDLAHEVTAMWNVDSTSIVPIVVSANGLIAKSLDQHLERLSLDGWIKGQIQKAVLLDTARIVRRFLTLQP

SEQ ID NO: 5368 - protein, 1208 aa, Ennomos quercinarius
MITRSRKKQAETICAHLPPPPTPSSPSSSSGDEYATPPDTTASSDEDGPPSPPSPPPPARRGRPPLPARLGPAGQPAPRPAPATGGIVRRMRWTQSMNENCMRAYYGAVEGGSSLTAYRDRMLSLFQNLEPSVSVSAQRLSDQVRAIHRCKLLDQSALDRLRLETLPIRATSPSPRVLPAALPDPGPIMGPPPVTPRGDPVIDGEESVNGSVSTQANEQLRSALEDVILRYRSTSTSRPRLPRLPTNRRNLVLMGALNTLLAPYLRTSKDLVDTHSILYCGAIVACRVARVKFPDTDRAPRPADGAPAWQVRIEKRITTFRTLIAKLVCFSRGNHRPRVMRFVTQAFAGTDIRPQDYMACVTERIDFLKQKVYAWASRIRRYRERVDRYQQNRLFQSDQRKVYRNWEGTGQRVTDGQLPDANATSEFWRSIWSVPVEHTEGDWMRVVERVCEPIESMGSITIDPEDISCAIRTAQNWKSPGPDGLHNFWIKWIRCSYPRLAIQFQEALEAGSLPSFMTTGVTFLLHKSGSTTEAKNYRPITCLPTLYKLLTSILRTKINSHIVANNILAPAQNGCRVGSRGTKELLLIDTAICQQVRRNRGALSTAWIDYKKAYDSVPHSWLERILELYKIDATLRSFLSACMGQWTTVLRQPGGGESVSDPQDFISIERGIFQGDSLSPLWFCLALNPLSTLLGDSGLGYRLRRGGEIISHLLYMDDLKLFAPQRPQLIELLKITENFSNSIKMEFGVDKCAVMHVHRGKVVNSTNLQLSETMTLRSLSESETYRYLGMSESLGVSVGEVKQSVKERFFCRLTKVLNSLLSGGNKTRAFNGWVMPLLMYSFGILRWTQTELDALDRKVRQLLTSHRMLHPRSSVMRLYIPRKWGGRGFLNAKTLHNREVCSLRDYFLNNECGMHRDVVAVDKGLTPLSLANENWRKPVVLSTEDRRDVWKGKELHGWFYRALTGPDVDLHASVNWLRFGDLFGETEGFVCAIADEVIKTNNYRKYIMKDGTVDICRACRRPGESLRHIISGCSHLANGEYLHRHNLVARIIHQQLALQYGLVESEVPYYKYTPGPVLENGRALLYWDRSIITDRTIVANKLDIVLVDRSQRRAVLVDITIPHDENLVKAEKDKLSKYLDLAHEVTAMWNVDSTSIVPIVVSANGLIAKSLDQHLERLSLDGWIKGQIQKAVLLDTARIVRKFLTLQP

SEQ ID NO: 5369 - protein, 1118 aa, Cydia splendana
MRWTRNMNENVMRAYYGATEGGTQLSAYRSRILPLFQALEPTITVSEQRLSDQVRVIQRLKRLDDATLDRLRQEALSARADSTSVRDLPATSPDPVPAHDLAPGAPRVDFCTDEGDFASQNVSTTANEQLRRTLEEAITQYRATTNSRPRLPRLPMNRRNLALMGALNALLEPHLRTSKDLDDTHSIMYCGAIAACRVARVKFPDAERAPRTVGGVPAWQARIERRISSFRTLIAKLICFRGGNNRPRVMRFVNQAFAGTDIRPRDYMANVTERIDFLKQKVYAWANRIRRYRERVDRFQQNRLFQGDQRKVYRKWEETNLRTPDTQPPDVTAMTDFWRSIWSVPVGHTEGGWMSVVERECESIEPMGAVTISSDDVSCAIRTAQNWKSPGPDGLHNFWLKWFRCSHSCLAAQFQQALELGSLPSSLTTGVTFLLYKSGSTTEAKNYRPITCLPTLYKLLTSILRAKINAHIVANNILASAQNGCRVGSRGTKELLLIDMTICQQIRRNKGALSAAWIDYKKAYDSVPHSWLGRVLELYKVDAALRAFLSACMRQWTTVLRQPGGRDDRPGPQDFIRIERGIFQGDSLSPLWFCLALNPLSTLLKDLGLGCRLRREGEVISHLLYMDDLKLFAPNSQDLLELLKTTEVFSSAIHMEFGVDKCAVMHVQRGRVVNSTNLQLSETMSFRSISESETYKYLGMSQSLGIEDEGIRRSVKERFFSRLTKVLNSLLSGGNKVRAFNAWVMPLLTYSFGILRWTQTELDALDRRVRSLLTAHRMLHPRSSVMRLYIPRKCGGRGFLNAKDLHNHEVYNLRNYFLNNECGMHRDVVPVDRNLTPLSLANENWRKPVVLSTADRKAAWESKVLHGRFYKALTGPDVDLLASVNWLRFGDLFGETEGFACAIADEVMMTNNYRKYILKDGTVDICRACRRPGESLRHIISGCSHLANGEYLHRHNLVARIIHQQLALLYDLVDREVPYYKYLPAPVLDNGRATLYWDRSIITDRTIVANKPDIVIIDRSQRRAVLVDITIPHDENLVKAEKDKSSKYLDLAHEITAMWDVDSTIIVPIVVSVNGLIAKSLDQHLERLSLGGWIKGQMQKAVILDTARIVRRFLSLQP

SEQ ID NO: 5370 - protein, 963 aa, Cydia splendana
MNRHNLALMGALNALLEPYLRTSKDLDDTHAIMYCGAIAACRVARVKFPDSERAPRTAGGAPAWQIRIERRISSFRTLIAKLICFRGGNNRPRVMRFVNQAFAGTDIRPRDYMANITERIDFLKQKVYAWANRIRRYRERVDRFQQNRLFQSDQRKMYRKWEETNPRASDSQPPEATVMNDFWRSIWSVPVGHTEGSWMSVVERECESIEPMGAVTISPDDVSCAIRTAQNWKSPGPDGLHNFWLKWFRCSHSCLAAQFQQALELGSPPPSLTTGVTFLLYKSGSTTEAKNYRPITCLPTLYKLLTSILRAKINAHIVANNILASAQNGCRVGSRGTKELLLIDMTICQQIRRNRGALSAAWIDYKKAYDSVPHSWLERVLELYKVDTALRAFLSACMRQWTTVLRQPGGGDGSPGPQDFIRIERGIFQGDSLSPLWFCLALNPLSTLLKDLELGCRLRRGGEVISHLLYMDDLKLFAPNSQDLVELLKTTEVFSNAINMEFGVDKCAVMHVQRGKVVNSTNLQLSETMSFRSISESETYKYLGMSQSLGIEEEGIRRSVKERFFSRLTKVLNSLLSGGNKVRAFNAWVMPLLTYSFGILRWTQTELDALDRRVRQLLTTHRMLHPRSSVMRLYIPRKCGGRGFLNAKNLHNRELYNLRNYFLNNECGMHRDVVAADKGLTPLSLANENWRKPVVLSTEDRKAVWKDKQLHGRFYKALTGPDVDLLASVNWLRFGDLFGETEGFACAIADEVMMTNNYRKYILKDGTVDICRACRRPGESLRHIISGCSHLANGEYLHRHNLVARIIHQQLALLYGLVDREVPYYKYSPAPVLENGRATLYWDRSIITDRTIVANKPDIVLIDRSQRRTVLVDVTIPHDENLVKAEKDKSSKYLDLAHEITAMWDVDSTIIVPIVVSANGLIAKSLDQHLERLSLGGWIKGQMQKAVILDTARIVRRFLTLRP

SEQ ID NO: 5371 - protein, 1208 aa, Cydia splendana
MITRSRTKAVTTSARPPPPPASSTSSSTSSSGDEFATAPDTDGSSDESGPPPPPPRPPARRGRPPLPARLGPAGHPAPPTAPATGGIVRRMRWTRDMNENVMRAYYGATEGGTQLSAYRSRILPLFQTLEPTITVSEQRLSDQVRVIQRLKRLDDATLDRLRQEALSARADSTSVRDLPATSPDPVPVPDLAPEAPRVDFCTDEGDFASQNVSTTANEQLRRTLEEAITQYRVTTNSRPRLPRLPMNRRNLALMGALNALLEPYLRTSKDLDDTHSIMYCGAIAACRVARVKFPDAERAPRTVGGVPAWQVRIERRISSFRTLIAKLICFRGGNNRPRVMRFVNQAFAGTDIGPRDYMANVTERIDFLKQKVYAWANRIRRYRERVDRFQQNRLFQSDQRKVYRRWEEANLRTPDTQPPDATATTDFWRSIWSVPAGHTEGSWMSVVEHECESIEPMGAVIISPDDVSCAIRTAQNWKSPGPDGLHNFWLKWFRCSHSRLAAQFQQALELGSLPPSLTTGVTFLLYKSGSTTEAKNYRPITCLPTLYKLLTSILRAKINAHIVANNILASAQNGCRVGSRGTKELLLIDMTICQQIRRNRGALSAAWIDYKKAYDSVPHSWLGRVLELYKVDAALRAFLSTCMRQWTTVLRQPGGGDDRPGPQDFIRIERGIFQGDSLSPLWFCLALNPLSTLLKDLGLGCRLQREGEVISHLLYMDDLKLFAPNSQDLLELLKTTEVFSNAINMEFGIDKCAVMHVQRGRVVNSTNLQLSETMSFRSISESETYKYLGMSQSLGIEDEGIRRSVKERFFSRLTKVLNSLLSGGNKVRAFNAWVMPLLTYSFGILRWTQTELDALDRRVRSLFTTHRMLHPRSSVMRLYIPRKCGGRGFLNAKDLHNREVYNLRNYFLNNECGMHRDVVAVDRNLTPLSLANENWRKPVVLSTADRKAAWESKVLHGRFYKALTGPDVDLLASVNWLRFGDLFGETEGFACAIADEVMMTNNYRKYILKDGTVDICRACRRPGESLRHIISGCSHLANGEYLHRHNLVARIIHQQLALLYGLVDREVPYYKYLPAPVLENGRATLYWDRSIITDRTIVANKPDIVIIDRSQRRAVLVDITIPHDENLVKAEKDKSSKYLDLAHEITAMWDVDSTIIVPIVVSVNGLIAKSLDQHLERLSLGGWIKGQMQKAVILDTARIVRRFLSLQP

SEQ ID NO: 5372 - protein, 1089 aa, Agriopis aurantiaria
MLPLFQALQPTITVSAQRLSDQVRAIQRCNMLDQSVLDRLRLEEVRTRPTPASTRNPPVASSAPTLASVPASVGTLAALADTAVDEEDLASGVSDQVKEQLRGALEDAISQYRFTSDSRPRLPRLPTHRRNLALMGALNALLAPYLRASEDLVDTHSILYCGAIAACRVARVKFPDTNRAPRTAGGVPAWQVRIERRINTFRTLIAKLICFRRGNNRPRVMRFVTQAFAGTDIRPQHYLANVTERIDYLKQKVYAWANRIRRYRERVDRYWQNRLFQSDQRKVYRGWEETDQRVSDGQRPDATAMINFWRGIWSVPVNHTEGDWMRVVERECESIEPMGSILIDPVDVSCAIRMAQNWKSPGPDGLHNFWIKWIRCSHDRLATQFQEALELGSLPSFMTTGVTFLLHKSGSTTEAKNYRPITCLPTIYKLLTSILRNKINAHIVANNVLAHAQNGCRVGSRGTKELLLIDTAISQQVRRNRGALSAAWIDYKKAYDSVPHSWLERVLELYKIDTTLKSFLCACMRQWTTVLRQPGGGDGTSGPQDLIRIERGIFQGDSFSPLWFCLALNPLSSLLRDSGLGYRLRRDGQVISHLLYMDDLKLFTPKRQDLVELLKITDVFSSAIRMEFGVDKCAVMHVQQGKVVNSPNLQLSEVMTLRSLSEAETYKYLGMSESLGISVENIKKSVKERFFCRLTKVLNSLLSGGNKVRAFNGWVMPLLIYSFGILRWTQTELDALDRRVRQLLTSHRMLHPRSSVMRLYIPRKWGGRGFLNAKNLHNREVCSLRDFFRNSESGMHRDVVAVDRGLTPLSLANENWRKPSVLSIEDRRDVWKGKELHGRFYRALTGPDVDLLSSVNWLRFGDLFGETEGFACAIADEVIKTNNYRKYIMKDGTVDICRACHRPGESLRHIISGCLHLANGEYLHRHNQVARIIHQQLALRYGLVESEVPYYKYAPAPVLENGRALLYWDRSIITDRTIVANKPDIVLVDRSQRRAVLVDITIPHDENLVKAEKDKLSKYLDLAHEVTAMWDVDSTIIVPIVVSVNGLIAKSLDQHLKRLSLDGWVKGQMQKAVILDTARIVRRFLTLQP

SEQ ID NO: 5373 - protein, 1211 aa, Agriopis aurantiaria
MITRSKTKTAALPNAHPRPLATPSSSASSSSGDGDYLTSRDTSASSDGSGPSTPPPPLRPARRGRPALPARLGHVELPAPLSAPATGGVRRMRWTPVINENCMRAYYRATEGGTNLSAYRVRMLPLFQALEPTVTVSAQRLSDQVRAIQRCNLLDQSVLDRLRLEEVRTRPTPASMRNPPVASSAPTLASVPASVVTLATLADPVVDEGDLVSGVSDQVREQLRGALEDAISQYRFTPDSRPRLPRLPTHRRNLALMGVLNALLAPYLRASKDLVDTHSILYCGAIAACRVARVKFPDTNHAPRTAGRMPAWQVRIERRISTFRTLIAKLICFRRGNNRPRVMRFVTQAFAGTDIRPQHYLANVTERIDYLKQKVYAWANRIRRYRERVDRYWQNRLFQSDQRKVYRGWEETEQRVSDGQLPDASAMINFWRGIWSVPVEHTEGDWMRVVERECESIEPMGSILIDPVDVSCAIRTAQNWKSPGPDGLHNFWIKWIRCSHDRLATQFQEALELSSLPSFMTTGVTFLLHKSGSTTEAKNYRPITCLPTIYKLLTSILRNKINAHIVANNVLAHAQNGCRVGSRGTKELLLIDTAISQQVRRSRGALSAAWIDYKKAYDSVPHSWLERVLELYKIDTTLKSFLGACMRQWTTVLRQPGGGDGASGPQDLLRIERGIFQGDSFSPLWFCLALNPLSTLLRDSGLGYRLRRDGQVISHLLYMDDLKLFTPKRQDLMELLKITEVFSSAIRMEFGVDKCAVMHVQRGKVVNSPNLQLSEEMTLRSLSEVETYKYLGMSESLGISVEDIKKSVKERFFCRLTKVLNSFLSGGNKVRAFNGWVMPLLIYSFGILRWTQTELDALDRRVRQLLTSHRMLHPRSSVMRLYNPRKWGGRGFLNAKNLHNREVCSLRDFFRNSESGMHRDVVAVDRGLTPLSLANENWRKPSVLSIEDRRDVWKGKELHGRFYRALTGPDVDLLSSVNWLRFGDLFGETEGFACAIADEVIKTNNYRKYIMKDGTVDICRACHRPGESLRHIISGCSHLANGEYLHRHNQVARIIHQQLALRYGLVESEVPYYKYAPAPVLENGRALLYWDRSIITDRTIVANKPDIVLVDRSQRRAVLVDITIPHDENLVKAEKDKLSKYLDLAHEVTAMWDVDSTIIVPIVVSVNGLIAKSLDQHLKRLSLDGWVKGQMQKAVILDTARIVRRFLTLQP

SEQ ID NO: 5374 - protein, 1212 aa, Agriopis aurantiaria
MITRSRTKQADTKSARLPPPPASSSSPSTSSGEDEYHTTREASGSSSDTSGPGTPPPPPPARRGRPPLPACLGLVGHSATRPAPATGGVVRRMRWSTIMNEDCMRAYYRATEGGTNLSAYCARMLPLFQALQPTITVSAQRLSDQVRAIHRCKLLDDSVLDRLRQEELRARPIPVSTRDPPVASSAPTLASLPASVVTLAALADRVVDEGDLASGVSDQVREQLRGALEDAISQYRFTPDSRPRLPRLPTHRRNLALMGALNALLAPYLRASEDLVDTHSILYCGAIAACRVARVKFPDTNRAPRTAGGVPAWQVRIERRINTFRTLIAKLVCFRRGNNRPRVMRFVTQAFAGTDIRPQHYLANVTERIDYLKQKVYAWANRIRRYRERVDRYWQNRLFQSDQRKVYRGWEETDQRVSDGRLPDASAMINFWRGIWSVPVEHTEGDWMHVVERECESIEPMGSILIDSVDVSCAIRTAQNWKSPGPDGLHNFWIKWVRCSHDRLATQFQKALELGSLPSFMTTGVTFLLHKSGSTTEAKNYRPITCLPTIYKLLTSILRNKINAHIVANNVLAHAQNGCRVGSRGTKELLLIDTAISQQVRRNRGALSAAWIDYKKAYDSVPHSWLERVLELYKIDTTLKSFLGACMRQWTTVLRQPGGGDGTSGPQDLLRIERGIFQGDSFSPLWFCLALNPLSTLLRDSGLGYRLRRDGQVISHLLYMDDLKLFTPKRQDLVELLKITDVFSSAIRMEFGVDKCAVMHVQRGKVVNSPNLQLSEVMTLRSLSEAETYKYLGMSESLGISVENIKKSVKERFFCRLTKVLNSLLSGGNKVRAFNGWVMPLLIYSFGILRWTQTELDALDRRVRQLLTSHRMLHPRSSVMRLYIPRKWGGRGFLNAKNLHNREVCSLRDFFRNSESGMHRDVVAVDRGLTPLSLANENWRKPSVLSIEDRRDVWKGKELHGRFYRALTGPDVDLLSSVNWLRFGDLFGETEGFACAIADEVIKTNNYRKYIMKDGTVDICRACHRPGESLRHIISGCSHLANGEYLHRHNQVARIIHQQLALRYGLVESEVPYYKYSPAPVLENGRALLYWDRSIITDRTIVANKPDIVLVDRSQRRAVLVDITIPHDENLVKAEKDKLSKYLDLAHEVTAMWDVDSTIIVPIVVSVNGLIAKSLDQHLKRLSLDGWVKGQMQKAVILDTARIVRRFLTLQP

SEQ ID NO: 5375 - protein, 1211 aa, Agriopis aurantiaria
MITRAKTRAAESNARLPPPPASSSSPSTSSGEDEYHTTREASGSSSDTSGPGTPPPPPPARRGRPPLPARLGPVGHSATRPAPATGGVVRRMRWSRIMNEDCMRAYYRATEGGTNLSAYCARMLPLFQALQPTITVSAQRLSDQVRAIQRCNMLDQSVLDRLRLEEVRTRPTPASTRNPPVASSAPTLASVPASVGTLAALADTAVDEEDLASGVSDQVKEQLRGALEDAISQYRFTSDSRPRLPRLPTHRRNLALMGALNALLAPYLRASEDLVDTHSILYCGAIAACRVAHVKFPDTNRAPRTAGGVPAWQVRIERRINTFRTLIAKLICFRRGNNRPRVMRFVTQAFAGTDIRPQHYLANVTERIDYLKQKVYAWANRIRRYRERVDRYWQNRLFQSDQRKVYRGWEETDQRVSDGQRPDANAMINFWRGIWSVPVNHTEGDWMRVVERECESIEHMGSILIDPVDVSCAIRMAQNWKSPGPDGMHNFWIKWIRCSHDRLATQFQEALELGSLPSFMTTGVTFLLHKSGSTTEAKNYRPITCLPTIYKLLTSILRNKINAHIVANNVLAHAQNGCRVGSRGTKELLLIDTAISQQVRRNRGALSAAWIDYKKAYDSVPHSWLERVLELYKIDTTLKSFLCACMRQWTTVLRQPGGGDGTSGPQDLIRIERGIFQGDSFSPLWFCLALNPLSTLLRDSGLGYRLRRDGQVISHLLYMDDLKLFTPKRQDLVELLKITDVFSSAIRMEFGVDKCAVMHVQQGKVVNSPNLQLSEVMTLRSLSEAETYKYLGMSESLGISVENIKKSVKERFFCRLTKVLNSLLSGGNKVRAFNGWVMPLLIYSFGILRWTQTELDALDRRVRQLLTSHRMLHPRSSVMRLYIPRKWGGRGFLNAKNLHNREVCSLRDFFRNSESGMHRDVVAVDRGLTPLSLANENWRKPSVLSIEDRRDVWKGKELHGRFYRALTGPDVDLLSSVNWLRFGDLFGETEGFACAIADEVIKTNNYRKYIMKDGTVDICRACHRPGESLRHIISGCSHLANGEYLHRHNQVARIIHQQLALRYGLVESEVPYYKYAPAPVLENGRALLYWDRSIITDRTIVANKPDIVLVDRSQRRAVLVDITIPHDENLVKAEKDKLSKYLDLAHEVTAMWDVDSTFIVPIVVSVNGLIAKSLDQHLKRLSLDGWVKGQMQKAVILDTARIVRRFLTLQP

SEQ ID NO: 5376 - protein, 1208 aa, Ennomos fuscantarius
MILRSKTKTADNKCARLPPLPVSSSPSSSSGDEYATPPDTTASSDDDGLPSPPPPPPPARRGRPPLPARLGPAGQPAPRPAPATGGVVRRMRWTQTMNENCMRAYYGATEGGSSLTAYRDRMLSLFQELEPSISVSAQRLSDQVRAIHRCKLLDQSALDRLRLETLPIPATSPSRRVLSAALPDPGPIVGPPLVTPLGGPVIDGEESVSDSVSTQVNEQLRSALEDAILRYRSTPTSRPRLPRLPTNRRNLVLMGALNTLLGPYLRTSEDLVDTHSILYCGAIAVCRVARVKFPDTDRAPRPADGAPAWQVRIEKRITTFRTLIAKLVCFSRGNHRPRVMRFVTQAFAGTGIRPQDYMACVTERIDFLKQKVYAWASRIRRYRERVDRYQMNRLFQSDQRKVYRDWEGTGQRVVDGQLPDANVMNEFWRSIWSVPVDHSEGDWIRVVKHVCEPIESMGSITIDPEDISCAIRTAQNWKSPGPDGLHNFWIKWIRCSYPCLATQFQEALEAGSLPKFMTTGITFLLHKSGSTMEAKNYRPITCLPTLYKLLTSILRTKINSHITANNILAPAQNGCRVGSRGTKELLLIDTAICQQVRRNRGALSTAWIDYKKAYDSVPHSWLKRVLELYKINATLRSFLSACMGQWTTVLRQPGGGDSVSDPQNFIRIERGIFQGDSLSPLWFCLALNPLSTLLGDSGLGYRLRRGGEIISHLLYMDDLKLFAPQRPQLMKLLKITENFSNSIKMEFGVDKCAVMHVHGGKVVNSTNLQLSETMTLRSLSESETYKYLGMSESLGISVGDIKQSVKERFFCRLTKVLNSLLSGGNKARAFNAWVMPLLMYSFGMLRWTQTELDALDRKVRQVLTSHRMLHPRSSVMRLYIPRKWGGRGFLNAKNLHNREMYSLREYFLSNECGMHRDVVAVDKGLTPLSLANENWRKPVVLSTDDRRDVWKGKELHGRFYRALTGPDVDLHASVNWLRFGDLFGETEGFVCAIADEVIKTNNYRKYIMKDGTVDICRACRRPGESLRHIISGCSHLANGEYLHRHNLVARIIHQQLALQYGLVESEVPYYKYTPGPVLENGRALLYWDRSIITDRTIVANKPDIVLIDRSQRRAVLVDIAIPHDENLVKAEKDKLSKYLDLAHEVTAMWSVDSTSIVPIVVSANGLIAKSLDQHLERLSLDGWIKGQIQKAVLLDTARIVRRFLSLQP

SEQ ID NO: 5377 - protein, 1215 aa, Hedya salicella
MQRYFTRSQNTRKISTAATPTHARPTPPPASSCSPSASSDDFATAPDTSESSDDECGPPPPPPRPPARRGRPPLPARLGPAGHSAPPTAPATGGIVRRMRWSQANNENVMRAYYGATEGGTHLSAYRDRMLLLFQTFEPAIAASAQRLSDQVRAIQRRKLLDDATLDRLRLEVLAARAASTSSRNPPATSPVPAPALDLMPGAPRVDPDSDEGHCVSIVSTQANEQLRRTLEETIERYRFAPDSRPRLPRLPANKRNLALVGALNALLDPYLRASEDLADTHSIMYCGAIAECRVARVKFPDADRAPRTAGGVPAWQVRIERRISTFRTLIAKLICFRGGNNRPSVMRYVAQAFAGTDVSSCDYMACVTERIDFLKQKVYAWASRIRRYRERVDRFQQNRLFQSDQRKVYRKWEGTDQRVTDGRLPDPTAMSNFWRSIWSVPVEHTEGEWMNVVERECEPIEAMGAVTISPDDVSCAARTTQNWKSPGPDGLHNFWVKWFRCSHERLATQFQQALEFGSLPSFLTTGVTFLLYKSGSTTEAKNYRPITCLPTLYKLLTSILRAKINTLIVANNVLAFSQNGCRVGSRGTKELLLIDTTICQQVRRSRGSLSAAWIDYKKAYDSVPHSWLERILELYKVDTALRSFLGACMRQWTTVLCQPGGRDARPAPQDFIRIKRGIFQGDSLSPLWFCLALNPLSTLLKDSGLGCRLRRGGEIISHLMYMDDLKLFAPKRPELVELLKVTDTFSSAIKMEFGVDKCAVMHVQRGKVVNSTNLELSETMSLRSLSETETYKYLGMSQALSIADGDIRQAVKERFFCRLTKVLNSLLSGGNKARAFNAWVMPLLTYSFGILRWTQTELDALDRRVRMLLTTHRMLHPRSSVMRLYIPRKCGGRGFLNAKDLHNREVCSLREYFLNNECGIHRDVVAVDKGLTPLSLANENWRRPTVLSTVDRKDVWKSKELHGRFYKALTGPDVDLLASVNWLRFGDLFGETEGFSCAIADEVIMTNNYRRYILKDGTVDICRACRRPGESLRHIMSGCSYLANGEYLHRHNQVARIIHQQLAVKYDLVGSEVLYYKYVPMPVLENGRATLYWDRSILTDRTIVANKPDIVLVDRSKRRAMLVDITIPHDENLVKAEKDKLSKYLDLAHEVTAMWDVDSTIIVPIVVSVNGLIAKSLDEHLKRLSLDGWIKGQIQKAVILDTARIVRRFLSVQP

SEQ ID NO: 5378 - protein, 1215 aa, Erannis defoliaria
MITRSQSRRNTAERNARPPSPPAPSSPSASSGDDVFLTPRESSVSPSNSDVSGPRTPAPPPPARRGRPPLPARLGPAGLPASRPALAAGGVVRRMRWSQTNNENCMRAYYGATEGGTNLSAYRVRMLPLFQVLEPTVTVSAQRLSDQVRAIQRLNLLDQSLLDRLRLEAQSARPTPASTRDLDVASSAPTLALVPTSAATLVTSADPVVDEGDCTGMSVSTQVSEQLRRALEDAIGQYRFTPNSRPRLPRLPTHRRNLALMGALNALLAPYLRASEDLTDTHSILYCGAIAACRVARVKFPDTNRAPRPAGDVPAWQLRIERRISTFRTLIAKLICFSRGNNRPRVMRFVTQAFAETGIRPQQYMANVTERIDYLKQKVYAWANRIRRYRDRVDRYWQNRLFQSDQRKVYRNWEGNEQRVSDGQLPDASAMTNFWRGIWSVPVEHTEGDRMRVVERECESIEPMGSILIDPVDVSCAIRTAQNWKSPGPDGLHNFWIKWFRCSHDRLATQFQEALELGSLPSFMTTGVTFLLHKSGSTTEPKNYRPITCLPTIYKLLTSILSTKINAHIVANNVLAPAQNGCRVGSRGTKELLLIDMAISQQVRRNKGALSAAWIDYKKAYDSVPHSWLERILELYQIDATLKSFLGACMRQWTTVLRQPGGGNDSSDSQDLIRIERGIFQGDSLSPSWFCLALNPLSTLLKDSGLGYRLRRGGEVISHLLYMDDLQLFAPKHQDLLELLKTTQVFSSAISMEFGVDKCAVMRVQRGKVVNSPDLQLSEIMTLRSLSEAETYKYLGMSESLGISVVDIKKSVKERFFCRLTKVLNSLLSGGNKARAFNGWVMPLLIYSFGILRWTQTELDALDRRVRQLLTAHRMLHPRSSVMRLYIPRKWGGRGFLNAKNLHNREVCSLRDYFLNNECGMHRDVVTVDKGLTPLSLANENWRTPSVLSTDDRKEVWKSKELHGRFYRVLSGPDVDLLASVNWLRFGDLFGETEGFACAIADEVIKTNNYRKYIMKDGTVDICRACHRPGESLRHIISGCSHLANGEYLHRHNQVARIIHQQLALQYGLVESEVPYYKYAPAPVLENGRALLYWDRSIITDRTIVANKPDIVMVDRSQRRAVLVDITISHDENLVKAEKDKLSKYLDLAFEITAMWDVDSRIIVPIVVSANGLIAKSLDQYLKRLSLDGWVKGQIQKAVVLDTARIVRRFLTLQP

SEQ ID NO: 5379 - protein, 1121 aa, Biston betularia
MRWSQTNNENCMRAYYGATEGGINLSAYRVRMLPLFQALEPTVAVSTQRLSDQVRAIQRLQLLDQSVLDRLRLEALPARPTPVSTRDSPVASSAPTLVSVPTSMATLATPTDPVVDVGECTSMGVCSQVSEHLRRTLEDAICQYRFAPDSRPRLPRLPTHRRNLALMGALNALLAPYLRASEDLTDTHSILYCGAIAACRVARVKFPDTNRAPRPAGGVPAWQLRIERRISTFRTLIAKLICFSRGNNRPRVMRFVTQAFAGTGIRPQHYLASVTERIDYLKQKVYAWANRIRRYRERADRYWQNRVFQSDQRKVYRDWEGTGQRVSDRQLPDTSVMTEFWRGIWSLPVEHTEGDWMRVVERECESIESMGSVLIDPVDVSCAIRTAQNWKSPGPDGLHNFWIKWIRCSHDRLATQFQEALELGSLPCFMTTGVTFLLHKTGSTTEAKNYRPITCLPTIYKLLTSILRTKINAHVVANNVLAPAQNGCRVGSRGTKELLLIDMTISQQVRRNKGALSTAWIDYKKAYDSVPHSWLERVLELYKIDTTLKSFLGACMRQWTTVLRQPGSGDGSSEPQDLIRIERGIFQGDSLSPLWFCLALNPLSTLLKESGLGHRLRRGGEVISHLLYMDDLKLFAPKRPDLMELLKTTQVFSNAIKMEFGVDKCAVMHVQRGEVVNCPDLQLSETMTFRSLSEAETYKYLGMSESLGIAVVDIKRSVKERFFCRLTKVLNSFLSGGNKVRAFNGWVMPLLIYSFGILRWTQTELDALDRRVRQQLTTHRMLHPRSSVMRLYIPRKLGGRGFLSTKNLHNREVCSLRDYFRDNECGMHRDVVAVDKGLTPLSLANENWRKPSVLSTEDRKEVWKSKQLHGRFYRVLTGPDVDMLASVNWLRFGDLFGETEGFACAIADEVIKTNNYRKYIMKDGTVDICRACHRPGESLRHIISGCSHLANGEYLHRHNQVARIIHQQLALQYGLVESEVPYYKYAPAPVLENGRALLYWDRSIITDRTIVANKPDIVVVDRAQRRAVLVDITIPHDENLVKAEKDKLSKYLDLAHEITAMWDVDSTIIVPIVVTVNGLIAKSLDQHLKRLSLDGWVKGQLQKAVILDTARIVRRFLTLQP

SEQ ID NO: 5380 - protein, 1215 aa, Biston betularia
MWTRSRTAAASGLHDAHIPSPPAPSTPSASSGDEEFATPLATSASSSSSDVSGPRTPAPPPPARRGRPPLPARLGPAGQSASRSALAAGGVVRRMRWSQTNNENCMRAYYGATEGGINLSAYRVRMLPLFQALEPTVAVSTQRLSDQVRAIQRLQLLDQSVLDRLRLEALPARPTPVSTRDSPVASSAPTLVSVPTSMATLATPTDPVVDVGECTSMGVCSQVSEHLRRTLEDAICQYRFAPDSRPRLPRLPTHRRNLALMGALNALLAPYLRASEDLTDTHSILYCGAIAACRVARVKFPDTNRAPRPAGGVPAWQLRIERRISTFRTLIAKLICFSRGNNRPRVMRFVTQAFAGTGIRPQHYLASVTERIDYLKQKVYAWANRIRRYRERADRYWQNRVFQSDQRKVYRDWEGTGQRVSDRQLPDTSVMTEFWRGIWSLPVEHTEGDWMRVVERECESIESMGSVLIDPVDVSCAIRTAQNWKSPGPDGLHNFWIKWIRCSHDRLATQFQEALELGSLPCFMTTGVTFLLHKTGSTTEAKNYRPITCLPTIYKLLTSILRTKINAHVVANNVLAPAQNGCRVGSRGTKELLLIDMTISQQVRRNKGALSTAWIDYKKAYDSVPHSWLERVLELYKIDTTLKSFLGACMRQWTTVLRQPGSGDGSSEPQDLIRIERGIFQGDSLSPLWFCLALNPLSTLLKESGLGHRLRRGGEVISHLLYMDDLKLFAPKRPDLMELLKTTQVFSNAIKMEFGVDKCAVMHVQRGEVVNCPDLQLSETMTFRSLSEAETYKYLGMSESLGIAVVDIKRSVKERFFCRLTKVLNSLLSGGNKVRAFNGWVMPLLIYSFGILRWTQTELDALDRRVRQQLTTHRMLHPRSSVMRLYIPRKLGGRGILSAKNLHNREVCSLRDYFRDNECGMHRDVVAVDKGLTPLSLANENWRKPSVLSTEDRKEVWKSKQLHGRFYRVLTGPDVDMLASVNWLRFGDLFGETEGFACAIADEVIKTNNYRKYIMKDGTVDICRACHRPGESLRHIISGCSHLANGEYLHRHNQVARIIHQQLALQYGLVESEVPYYKYAPAPVLENGRALLYWDRSIITDRTIVANKPDIVVVDRAQRRAVLVDITIPHDENLVKAEKDKLSKYLDLAHEITAMWDVDSTIIVPIVVSVNGLIAKSLDQHLKRLSLDGWVKGQLQKAVILDTARIVRRFLTLQP

SEQ ID NO: 5381 - protein, 1215 aa, Biston betularia
MWTRSRTAAASGLHDAHIPSPPAPSTPSASSGDEEFATPLATSASSSSSDVSGPRTPAPPPPARRGRPPLPARLGPAGQSASRSALAAGGVVRRMRWSQTNNENCMRAYYGATEGGINLSAYRVRMLPLFQALEPTVAVSTQRLSDQVRAIQRLQLLDQSVLDRLRLEALPARPTPVSTRDSPVASSAPTLVSVPTSMATLATPTDPVVDVGECTSMGVCSQVSEHLRRTLEDAICQYRFAPDSRPRLPRLPTHRRNLALMGALNALLAPHLRASEDLTDTHSILYCGAIAACRVARVKFPDTNRAPRPAGGVPAWQLRIERRISTFRTLIAKLICFSRGNNRPRVMRFVTQAFAGTGIRPQHYLASVTERIDYLKQKVYAWANRIRRYRERADRYWQNRVFQSDQRKVYRDWEGTGQRVSDRQLPDTSVMTEFWRGIWSLPVEHTEGDWMRVVERECESIESMGSVLIDPVDVSCAIRTAQNWKSPGPDGLHNFWIKWIRCSHDRLATQFQEALELGSLPCFMTTGVTFLLHKTGSTTEAKNYRPITCLPTIYKLLTSILRTKINAHVVANNVLAPAQNGCRVGSRGTKELLLIDMTISQQVRRNKGALSTAWIDYKKAYDSVPHSWLERVLELYKIDTTLKSFLGACMRQWTTVLRQPGSGDGSSEPQDLIRIERGIFQGDSLSPLWFCLALNPLSTLLKESGLGHRLRRGGEVISHLLYMDDLKLFAPKRPDLMELLKTTQVFSNAIKMEFGVDKCAVMHVQLGEVVNCPDLQLSETMTFRSLSEAETYKYLGMSESLGIAVVDIKRSVKERFFCRLTKVLNSFLSGGNKVRAFNGWVMPLLIYSFGILRWTQTELDALDRRVRQQLTTHRMLHPRSSVMRLYIPRKLGGRGFLSAKNLHNREVCSLRDYFRDNECGMHRDVVAVDKGLTPLSLANENWRKPSVLSTEDRKEVWKSKQLHGRFYRVLTGPDVDMLASVNWLRFGDLFGETEGFACAIADEVIKTNNYRKYIMKDGTVDICRACHRPGESLRHIISGCSHLANGEYLHRHNQVARIIHQQLALQYGLVESEVPYYKYAPAPVLENGRALLYWDRSIITDRTIVANKPDIVVVDRAQRRAVLVNITIPHDENLVKAEKDKLSKYLDLAHEITAMWDVDSTIIVPIVVTVNGLIAKSLDQHLERLSLDGWVKGQLQKAVILDTARIVRRFLTLQP

SEQ ID NO: 5382 - protein, 869 aa, Biston betularia
MRFVTQAFAGTGIRPQHYLASVTERIDYLKQKVYAWANRIRRYRERADRYWQNRVFQSDQRKVYRDWEGTGQRVSDRQLPDTSVMTEFWRGIWSLPVEHTEGDWMRVVERECESIESMGSVLIDPVDVSCAIRTAQNWKSPGPDGLHNFWIKWIRCSHDRLATQFQEALELGSLPCFMTTGVTFLLHKTGSTTEAKNYRPITCLPTIYKLLTSILRTKINAHVVANNVLAPAQNGCRVGSRGTKELLLIDMTISQQVRRNKGALSTAWIDYKKAYDSVPHSWLERVLELYKIDTALKSFLGACMRQWTTVLRQPGSGDGSSEPQDLIRIERGIFQGDSLSPLWFCLALNPLSTLLKESGLGHRLRRGGEVISHLLYMDDLKLFAPKRPDLMELLKTTQVFSNAIKMEFGVDKCAVMHVQRGEVVNCPDLQLSETMTFRSLSEAETYKYLGMSESLGIAVVDIKRSVKERFFCRLTKVLNSFLSGGNKVRAFNGWVMPLLIYSFGILRWTQTELDALDRRVRQQLTTHRMLHPRSSVMRLYIPRKLGGRGFLSAKNLHNREVCSLRDYFRDNECGMHRDVVAVDKGLTPLSLANENWRKPSVLSTEDRKEVWQSKQLHGRFYRVLTGPDVDMLASVNWLRFGDLFGETEGFACAIADEVIKTNNYRKYIMKDGTVDICRACHRPGESLRHIISGCSHLANGEYLHRHNQVARIIHQQLALQYGLVESEVPYYKYAPAPVLENGRALLYWDRSIITDRTIVANKPDIVVVDRAQRRAVLVDITIPHDENLVKAEKDKLSKYLDLAHEITAMWDVDSTIIVPIVVTVNGLIAKSLDQHLKRLSLDGWVKGQLQKAVILDTARIVRRFLTLQP

SEQ ID NO: 5383 - protein, 1202 aa, Anthocharis cardamines
MITRNRARGQLQRSARPTPSSASSSSGSTSSSADYIMPPTSLTSSDEERQRPSPSRPRSSRRGRRPPPACLGSSGQQAPPAAPAAGGLVRRMRWTIQLNESVMRAYYGATEGGINLTGYRSRMLPLFQALEPATNVGAQRLSDQVRVILRNKLLNESVLERLRAEVTISQPPVIMLPVPGDVLPQGDVSVDVVACGGNESDQVTSQDKEHMRIILRDTIEQYRFVPALERPSIPHLPMHRRNMAVVGVLDGFLQPYFANSQNLADTHSILYCGAVAVCRVARLKFQDRERVSRASGVPVWQSRIECRISVARTLIAKLICFRGGNTRPRIMRFVSQAFVGTNIRPENYMEWVTERIDFLKQKVYAWANRIRRYRARAERYNVNRVFQINQRKVYRSWEKSDQGGVGGRFPDANVMSSFWRGIWSSPVNHTEGTWIGTVDRACESIQPMENVVISPHDIDCAIRSAQNWKCPGPDGLHNFWLKWFRSAHTTLAVQLQDAIDCGSLPTFITTGRTFLLHKSGCTTDPKNYRPITCLPTIYKLLTSILTTKIYMHIEANNILAQAQNGCRPGSRGTKELLLIDMTISQQVRRARRNLSVAWIDYKKAYDSVPHSWLVRVLELYKVNTTLKFFLESCMRHWCTVLCWPGNGDVSFDPTNLVRIERGIFQGDSLSPLWFCLALNPLSILLKDSGLGYRLRREGEIISHLLYMDDLKLFTLKKPDLVRLLKVANDFSRSIGMEFGVEKCAIMHVERGRVVNSQDLQLSQEITLKSLSQAETYRYLGMSESLGIANADIKQVVKDRFFGRLTKVLNSLLSGGNKVRAFNAWVLPVLVYSFGILRWTQTELDAVDVRVRRQLTLHRMHHPRSSVMRLYIPRKCGGRGFLNAKNQHNREICNLRQYFMASVGRMQRDVVAVDKGLTPLSLANQNWRMPPVLSTADREDIWKSKELHGRFYRALHGSDVDLLSSVSWLRFGDLFGETEGFVCAITDEVMMTNNYRKYILRDGTIDICRACHRPGESLRHIISGCSHLANGEYLHRHNQVAKILHQQLALSYGLAGTEVPYYKYTPLPVLENGRATLYWDRSIITDRFIAANKPDIVLIDRVARRALLVDVTVPHDENLVKAEKDKLAKYLDLAHEISSMWDVDSTIIVPIVISAHGLIAKSFDQHLKKLSLGCWVKGQMQKAVLLDTARIVRRFLSLPPPHR

SEQ ID NO: 5384 - protein, 1206 aa, Blastobasis lacticolella
MITRSKRKNQTVNAQPPPTPAPVSSSPSSSNDEFTTASDTSESSDERGLSAAPPPPPARRGRPLPARLGPTGRPAPPMAPATGSVVRRMRWTQSINENVMRAYYGATEGGTNLSAYRDRMLPLFQVLEPAIDVTAQRLSDQVRAIQRLKRLDDSVLDRLRLESLPVRAVPISTMSLPATSPPQVSPSPAPRVPRTDATVGVEDCTNVSSVSTETNEYVRRTLEETIARYRFAPNSRPRLPRLPTNRRNLALMGAINVLLDSYIRASDNLVDTHSIMYCGAITACRVARVKFSDADRAPRVAGGAPAWQKRIERRINTFRTLIAKLICFKEGNNRPRVMRFVDQAFAGTGISSRDYMACATERIDFLKQKVCAWANRIRRYRERVDRFRLNRLFQSDQRKVYRKWEETNESGSDGSLPDASASNNFWRSIWSVPVEHSEGDWMNVVKRECEIIEPMAAVSICPEDVSCAIDTAQNWKCPGPDGLHNFWIKWFRCSHERLATQFQEALEHGSLPTLFTTGITFLLYKSGSTTEAKNYRPITCLPTLYKLLTSILRKKINNHIIENNILAMSQNGCRVGSRGTKELLLIDMTICQQVRRSRGSLSAAWIDYKKAYDSVPHSWLRRVLELYKINATLRSFLDACMRQWITVLSQPVGGVDHSPPQDFIRIERGIFQGDSLSPLWFCLALNPLSTLLKHSELGCRLRREGEVISHLLYMDDLKLFAPKRQDLMELLKITEIFSNAIRMEFGADKCAVMHVQRGKVANTTNLQLSETMSFRSLSEAETYKYLGMSQSLGIVDEGVKQAVKERFFCRLTKVLNSLLSGGNKVRSFNAWVMPLLTYSFGILRWTQTELDALDRRVRLLLTTHRMLHPRSSVMRLYIPRKCGGRGFLSAKTLHNREVCSLRDYFLNNECGMHRAVVAVDRGLTPLSLANENWRKPKVLSTIDRKDVWKSKELHGRFYRALTGPDVDLLASVNWLRFGDLFGETEGFVCAIADEVIMTNNYRRYILKDGTVDICRACRCPGESLRHITSGCGRLANGEYLHRHNLVARIIHQQLALQYGLVESEVPYYKYVPAPVLENGLATLYWDRSVITDRTIVANRPDIVLTDRSKRRAVLVDVTIPHDGNLVKAEKDKQCKYLDLAHEVTAMWDVDSTIIVPIVVSVNGLIAKSLDQHLKSLSLDGWVKGQIQKAVLLETARIVRRFLSLQP

SEQ ID NO: 5385 - protein, 1207 aa, Blastobasis lacticolella
MITRSKRKNQTVNAQPPPTPAPVSSSPSSSNDEFTTASDTSESSDERGLSAAPPPPPARRGRPLPARLGPTGRPAPPMAPATGGVVRRMRWTQSINENVMRAYYGATEGGTNLSAYRDRMLPLFQVLEPAIDVTAQRLSDQVRAIQRLKRLDDSVLDRLRLESLPVRAVPISTMSLPATSPPQVSPPSPAPRVPRTDATVGVEDCTNVSSVSTETNEYVRRTLEETIARYRFAPNSRPRLPRLPTNRRNLALMGAINVLLDSYIRASDNLVDTHSIMYCGAITACRVARVKFSDADRAPRVAGGAPAWQKRIERRINTSRTLIAKLICFKEGNNRPRVMRFVDQAFAGTGISSRDYMVCATERIDFLKQKVCAWANRIRRYRERVDRFRLNRLFQSDQRKVYRKWEGTNQSGSDGSLPDASASNNFWRSIWSVPVEHLEGDWMNVVKRECEIIEPMAAVSICQEDVSCAIDTAQNWKCPGPDGLHNFWIKWFRCSHERLATQFQEALEHGSLPTLFTTGITFLLYKSGSTTEAKNYRPITCLPTLYKLLTSILRKKINNHIIENNILAMSQNGCRVGSRGTKELLLIDMTICQQVRRSRGSLSAAWIDYKKAYDSVPHSWLRRVLELYKINATLRSFLDACMRQWITVLSQPVGGIDHSPPQDFIRIERGIFQGDSLSPLWFCLALNPLSTLLKHSELGCRLRREGEVISHLLYMDDLKLFAPKRQDLMELLKITEIFSNAIRMEFGADKCAVMHVQRGKVANTTNLQLSETMSFRSLSEAETYKYLGMSQSLGIVDEGVKQAVKERFFCRLTKVLNSLLSGGNKVRSFNAWVMPLLTYSFGILRWTQTELDALDRRVRLLLTTHRMLHPRSSVMRLYIPRKCGGRGFLSAKTLHNREVCSLRDYFLNNECGMHRAVVAVDRGLTPLSLANENWRKPKVLSTIDRKDVWKSKELHGRFYRALTGPDVDLLASVNWLRFGDLFGETEGFVCAIADEVIMTNNYRRYILKDGTVDICRACRCPGESLMHITSGCGRLANGEYLHRHNLVARIIHQQLALQYGLVESEVPYYKYVPAPVLENGLATLYWDRSVITDRTIVANRPDIVLTDRSKRLAVLVDVTIPHDGNLVKAEKDKQCKYLDLAHEVTAMWDVDSTIIVPIVVSVNGLIAKSLDQHLKSLSLDGWVKGQIQKAVLLETARIVRRFLSLQP

SEQ ID NO: 5386 - protein, 1211 aa, Apotomis turbidana
MITRSQARRNTAAHTQNARPTPPPVSSSSSPSSSGDEFATAPDTSESSDDVRGPPPPPPRPPARRGRPPLPACLGPTGQSAPTTAPATGGVVRRMRWTQVMNENCMRAYYGATEGGINLSAYRDRMLPLFLAFDPTITVSAQRLSDQVRFIQRRKLLDDATLDRLRLEVLAARRASTPARDTPATSPVPVPAPNLVPGERQTDPEADGEDDASSVSTQANEQLRRALEEAIERYRSTPESRPRLPRLPMHKRNLALMGALDALLDPYLRASEDLADTHSIMYCGAIAACRVARVRFPDTDRAPRTAGGVPAWQVRIERRISSFRTFIAKLICFRGGNNRPRVMRYVTQAFAGTGTRPCDYMACVTERIDYLKQKVYAWASRIRRYRERVDRFQQNRLFQSDQRKVYRKWEGTNQCVSDGQLPDPTAMINFWRSIWSVPVEHTEGEWMNVVRRECEPIEAMGAVTISPDDVSCAARKAQNWKSPGPDGLHNFWIKWFRSSHERLATQFQDALELGSLPSFMTTGVTFLLHKSGSTTEAKNYRPITCLPTLYKLLTSILKTKINSHIVANNVLAFSQNGCRVGSRGTKELLLIDTTICQQVRRNRGSLSTAWIDYKKAYDSVPHSWLERILELYKIDTALRSLLGACMRQWTTVLRQPGGGDGPPGPRDLIRIERGIFQGDSLSPLWFCLALNPLSTLLKDSGLGCRLRRGGEVISHLLYMDDLKLYAPKRQDLVELLEVTENFSSAIKMEFGVDKCAVMHVQRGKVVNSANLQLSETMTLRSISEVETYKYLGMSQSLGIADGDIRQALKERFFCRLTKVLNSLLSGGNKARAFNTWVMPLLTYSFGILRWTQTELDALDTRVRQLLTTHRMRHPRSSVMRMYIPRKCGGRGFLNAKDLHNREVCSLREYFLNNECGIHRDVVAVDKGLTSLSLANENWRRPKVLSTDDRRAVWKSKELHGRFYKALTGPDVDLLASVNWLRFGDLFGETEGFVCAIADEVMMTNNYRRYILKDGTVDICRACRRPGESLRHIISGCSHLANGEYLHRHNQVARIIHQQLALQYGLVGSEVPYYKYAPMPVLENGRATLYWDRSIITDRTIVANKPDIVLVDRSKRQAVLVDITIPHDENLVKAEKDKLSKYLDLAHEVTAMWDVDSTIIVPIVVSANGLIAKSLDKHLKRLSLDGWIKGQIQKAVLLDTARIVRRFLSLQP

SEQ ID NO: 5387 - protein, 1210 aa, Notocelia uddmanniana
MITRSQTRRVQASQQSARPSPSPASSSSASASSEEEFATAPDTSSSSSDECGPPPPPPRPPARRGRPPLPARLGPAGHPVPHTAPATGGVVRRMQWSPSMNENCMRAYYGATDGGTNLSAYRVRMLPLFQALEPAISVSAQRLSDQVRVIQRLKRLDDATLDRLRLEALSARAASVSARNPPATLPAPVPAPDTAPGASRLDPSADGDCADQSVSTQAHEQLRRALDEAITRYRSTPNSRPRLPRLPVNRRNLALMGALNDLLDPYLRASDDLIDTHSIMYCGAIAACRVARVKFPDADRATRTAGGVPAWQVRIERRINTFRTLIAKLICFRGGNNRPRVMRFVNQAFAGTGVRPRDYMACVTERIDFLKQKVYAWASRIRRYRERVDRYQQNRLFQSDQRKVYRKWEGTDHRVCDGQRPDATAMVNFWRSIWSVPVEHTEGAWIGVVERDCESIEPMGSVTISPEDVSCAIRTAPNWKSPGPDGLHNFWLKWFRCSHERLATQFQQALELGSLPPPLTTGVTSLLYKSGSTTEAKNYRPITCLPTLYKLLTSILRAKINMHIVTNNILAPAQNGCRVGSRGTKELLLIDMTICQRVRRNRGTLSASWIDYKKAYDSVPHSWLRRILELYKVDAALRSFLSACMGQWTTVLRQPGGGDGPSGPQDSIRIERGIFQGDSLSPLWFCLALNPLSTLLQDSGLGCRLRRGGEVISHLLYMDDLKLFAPNRQDLLELLKTTEVFSSAIKMEFGVDKCAVMHVQRGKVVNSTNLQLSETMSLRSLSEAETYKYLGMSQALGIEGEGIKQAVKERFFCRLTKVLNSFLSGGNKARAFNAWVMPLLTYSFGILRWTQTELDALDRRVRVLLTAHRMLHPRSSVMRLYIPRKCGGRGFLNAKDLHNREVCSLRDYFLNSECGMHRDVVAVDASFTPLSMANENWRRFKVLSAEDRRAEWKSKELHGRFYRALTGPDVDLLASVNWLRFGDLFGETEGFVCAIADEVIMTNNYRKYILKDGTVDICRACRRPGESLRHIISGCGHLANGEYLHRHNLVARIIHQQLALSYGLVDFEVPYYKYLPAPVLENGRATLYWDRSIITDRTIVANKPDIVLIDRSKRQAVLVDITIPHDENLVKAEKDKVSKYLDLAHEVTAMWDVDSTIIVPIVVSANGLIAKSLDQHLKRLSLDGWVKGQIQKAVLLDTARIVRRFLSLSP

SEQ ID NO: 5388 - protein, 1109 aa, Peribatodes rhomboidaria
MRAYYGATEGGTNLTAYRVRMLSLFQVLEPTVTVSAQRLSDQVRAIHRCKLLDQSVLDRLCLEAIRARPTPASTRDRPVASSAPTWASVPASAATLATLADTDVDGDRTSVSVSSQVSEHLRRTLEDAISQYRYAPDSRPRLPRLPTHRRNMALMGALNVLLAPYLRASENFTDTHSILYCGAIAACRVARVKFPDTSRAPRPAGGVPAWQVRIERRISTFRTLIAKLLCFSRGNSRPRVMRFVTQAFAGTDIRPQYYLANVTERIDYLKQKVYAWASRIRRYRERVDRYWQNRLFQSDQRKVYRGWEGTEQCAIDGHRPDASAMIDFWRGIWSVPVEHTEGEWMRIVERECESIESMESILIDSVDVSCAIRTAQNWKSPGPDGLHNFWIKWIRCSHDRLAIQFQEALELCSLPSFMTTGVTFLLHKSGSTTDPKNYRPITCLPTIYKLLTSILRNKINTHIVANNVLAPAQNGCRVGSRGTKELLLIDMAISQQVRRSKGALSVAWIDYKKAYDSVPHSWLERILELYKIDITLKSFLSACMRQWTTVLRQPGGGEVSADPQDLIRIERGIFQGDSLSPLWFCLALNPLSTLLKDLGLGHRLRRGGEVISHLLYMDDLKLFAPKRQDLMELLKTTEVFSSAIKMEFGVDKCAVMHVQRGKVVNSPNLQLSETMTLRSLSEVETYKYLGMSESLGISVVDIKKSIKERFFCRLTKVLNSLLSGGNRMRAFNGWVMPLLIYSFGILRWTQTELDALDRRVRQLLTTHRMLHPRSSVMRLYIPRKWGGRGMLNAKNLHNREVYRLRSFFRNNDCGMHCDVVAVDKGLTPLSLANENWRQPSVLSTEDRKNVWKGKELHGRFYRALTGPDVDLLASVNWLRFGDLFGETEGFACAIADEVIKTNNYRKYILKDGTVDICRACHRPGESLRHIISGCSHLANGEYLHRHNQVARIIHQQLALQYGLVESEVPYYKYAPASVLENGRALLYWDRSIITDRTIVANKPDIVLVDRSQRRAVLVDITIPHDENLVKAEKDKLSKYLDLAHEVTAMWDVDSTIIVPIVVTVNGLIAKSLDQHLKRLSLDGWIKGQIQKAVILDTCRIVRRFLTLQP

SEQ ID NO: 5389 - protein, 1213 aa, Peribatodes rhomboidaria
MITRSRTRKQQTAETESTRPPPPPSSSSASSSSEEEFVTPPDTTDSSDEEAAPTPAPPPPPARRGRPPLPARLGPAGRSAPPTAPATGGVVCRMRWTRTINENCMRAYYGATEGGINLTAYRVRMLSLFQVLEPTVTVSTQRLSDQVRAIHRCKLLDQSVLDRLCLEAIRARPTPASTRDQLVASSAPTWASVPASAATLATLADTDVDGDRTSVSVSSQVSEHLRRTLEDAISQYRYAPDSRPRLPRLPTHRRNMALMGALNVLLAPYLRASENLTDTHSILYCGAIAACRVARVKFPDTNRAPRPAGGVPAWQVRIERRISTFRTLIAKLLCFSRGNTRPRVMRFVTQAFAGTDIRPQYYLTNVTERIDYLKQKVYAWANRIRRYRERVDRYWQNRLFQSDQRKVYRGWEGTEQCVIDGHRPNASAMIDFWRGIWSVPVEHTEGEWMRVVERECESIESMESILIDSVDVSCAIRTAQNWKSPGPDGLHNFWIKWIRSSHDRLATQFQEALELCSLPSFMTTGVTFLLHKSGSTTDPKNYRPITCLPTIYKLLTSILRNKINTHIVANNVLAPAQNGCRVGSRGTKELLLIDMAISQQVRRNRGALSVAWIDYKKAYDSVPHSWLERVLELYKIDITLKSFLSACMRQWTTVLRQPGGGEVSADPQDLIRIERGIFQGDSLSPLWFCLALNPLSTLLKDLGLGHRLRRGGEVISHLLYMDDLKLFAPKRQDLMELLKTTEVFSSAIKMEFGVDKCAVMHVQRGKVVNSPNLQLSETMNLRSLSEVETYKYLGMSESLGISVVDIKKSIKERFFCRLTKVLNSLLSGGNKMRAFNGWVMPLLIYSFGILRWTQTELDALDRRVRQLLTTHRMLHPRSSVMRLYIPRKWGGRGMLNAKNLHNREVYRLRSFFRNNDYGMHCDVVAVDKGLTPLSLANENWRQPSVLSTEDRKNVWKGKELHGRFYRALTGPDVDLLASVNWLRFGDLFGETEGFACAIADEVIKTNNYRKYILKDGTVDICRACHRPGESLRHIISGCSHLANGEYLHRHNQVARIIHQQLALQYGLVESEVPYYKYAPASVLENGRALLYWDRSIITDRTIVANKPDIVLVDRSQRRAVLVDITIPHDENLVKAEKDKLSKYLDLAHEVTAMWDVDSTIIVPIVVTVNGLIAKSLDQHLKRLSLDGWIKGQIQKAVILDTCRIVRRFLTLQP

SEQ ID NO: 5390 - protein, 1208 aa, Pammene fasciana
MQTRSRTRAATAYARPTSSPASSVSSPSSSGDEFATAPDTSESSDECGPPPPPRPPARRGRPPLPARLGLAGQPAPPRAPAAGGIVRRMRWTCSMNENVMRAYYGATEGGTNLCAYRDRMLPLFQALEPTIDTTAQRLSDQVRVIQRLKRLDDATLDRLRLEALSARAASTSARDPPATSLDPMPAPDLASGAPRIDPSADEEYIASQSVSSSANEQLRRTLEEAITQYRSTNIPRPRLPRLPMNRRNLALMGALNDLLDPILRTSKDLDDTHSIMYCGAIAACRVARVKFPDAERAPRTAGGVPAWQVRIERRINSFRTLIAKLICFRGGNNRPRVMRFVHQAFAGTDIESRDYMANITERIDFLKQKVYAWASRIRRYRERVDRFRQNRLFQSDQRKVYRRWEEADPRVTDVRLPDATAMTEFWRSIWSAPVEHTEGEWMSVVERECESIEPMGAITISPDDVSCSIRTAQNWKSPGPDGLHNFWLKWFRCSHSRLATQFQQALELGSLPPSLTTGVTFLLYKSGSTTEAKNYRPITCLPTLYKLLTSILRAKINAHMVANNILASAQNGCRVGSRGTKELLLIDMTICQRVRRNRGALSAAWIDYKKAYDSVPHSWLERILELYKVDAALRSFLGACMRQWTTVLRQPGGGDDPPGPQDSIRIERGIFQGDSLSPLWFCLALNPLSTLLKDSGLGCRLRREGEVISHLLYMDDLKLFAPNNRDLLELLKTTEVFSSSIKMEFGVDKCAVMHVQRGKIVNSTNLQLSETMTFRSISESETYKYLGMSQSLGIEDVGIKRALKERFFGRLTKVLNSLLSGGNKVRAFNAWVMPLLTYSFGILRWTQTELDALDRRVRLLLTTHRMLHPRSSVMRLYIPRKCGGRGFLNAKNLHNREVYNLRNYFLNNECGMHRDVVAIDKGLTPLSLANENWRKPVVLSTEDRKAVWKSKELHGRFYGALTGPDVDLLASVNWLRFGDLFGETEGFACAIADEVIMTNNYRKYILKDGTVDICRACRRPGESLRHIISGCSHLANGEYLHRHNLVARIIHQQLALLYGLVDHEVPYYKYTPAPVLENGRATLYWDRSIITDRTIVANKPDIVVIDRPQRRAMLVDITVPCDVNLVKAEKDKSSKYLDLAHEVTAMWEVDSAIIVPIVVSANGLIAKSLDQHLERLSLRGCGWIRGQIQKAVILDTARIVRRFLSLRP

SEQ ID NO: 5391 - protein, 1211 aa, Pammene fasciana
MITRSQARAATTHARPPSSPASSCSSSTSSSGDKFETAPDTGGSSDDYGPPPPPPRRPPARRGRPPLPARLGLAGHPAPPRAPAAGGIVRRMRWTPSMNENVMRAYYGATEGGTNLSAYRDRMLPLFQALEPTIDTTAQRLSDQVRVIQRLKRLDDVILDRLRLEALSVRAATTSARDPPATSPDPMPAPDLASGVPRVDPSADEVDIANQSVSSTANEQLRRTLEEAITQYRSTNITRPRIPRLPMNRRNLALMGALNDLLAPFLRTSKDLDDTHSIMYCGAIAACRVARVKFPDAERAPRTAGGVPAWQVRIERRINSFRTLIAKLICFRGGNNRPRVMRFVHQAFAGTGIEPRDYMANVIKRIDFLKQKFYAWASRIRRYRERVDRFRQNRLFQSDQRKVYRRWEKADPRVSDERLPDATAMADFWRSIWSAPVEHTEGEWMSVVERECESIEPMGAITISPDDVSCAIRTAPNWKSPGPDGLHNFWLKWFRCSHSRLATQFQQALELGSLPPSLTTGVTFLLYKSGSTTEAKNYRPITCLPTLYKLLTSILRAKINAHMVANNILASAQNGCRVGSRGTKELLLIDMTICQRARRNRGALSAAWIDYKKAYDSVPHSWLERILELYKVDAALRSFLGACMRQWTTVLRQPGGGDEPPGPQDFIRIERGIFQGDSLSPLWFCLALNPLSTLLKDSGLGCRLRRESEVISHLLYMDDLKLFAPNNRDLLELLKTTEVFSTSIKMEFGVDKCAVMHVQRGKVVNSTNLQLSETMTFRSISESETYKYLGMSQSLGIEDTGIKRALRERFFGRLTKVLNSLLSGGNKVRAFNAWVMPLLTYSFGILRWTQTELDALDRRVRLMLTTHRMLHPRSSVMRLYIPRKCGGRGFLNAKNLHNREVYNLRNYFLNNECGMHRDVVAIDKGLTPLSLANENWRKPVVLSTEDRKAVWKSKELHGRFYGALTGPDVDLLASVNWLRFGDLFGETEGFACAIADEVIMTNNYRRYILKDGTVDICRACRRPGESLRHIISGCSHLANVEYLHRHNLVVRIIHQQLALLYGLVAHEVPYYKYIPAPVLENDRATLYWDRSIITDRTIVANKPDIVVIDRPQRRAMLVDITVPCDVNLVKAEKDKSSKYLDLAHEVTAMWEVDSAIIVPIVVSANGLIAKSLDQHLERLSLRGCGWIKGQIQKAVILDTARIVRRFLTLRP

SEQ ID NO: 5392 - protein, 1212 aa, Pammene fasciana
MITRSKSRLQQASPPNARPPSSPASSVSSPSSSGDEFATAPDTSESSDECGPPPPPPRPPARRGRPPLPARLGLAGQPAPPRAPAAGGIVRRMRWTQTMNENVMRAYYGATEGGTNLCAYRVRLLPLYQALEPTTNVTAQRLSDQVRVIQRDKRLDDSTLDRLRLEALSAHAASTSARDPPATAPDPMPAPDLASGAPRVDPSADEEEIATQSVSSTANEQLRRTLEEAITQYRSTNIPRPRLPRLPMNKRNLALMGALNYLLDPFLRTSKDLDDTHSIMYCGAIAACRVARVKFPDAERAPRTAGGVPAWQVRIERRINSFRTLIAKLICFRGGNNRPRVMRFVHQAFAGMDIEPRDYMANVTERIDFLKQKVYAWASRIRRYRERVDRFRQNRLFQSDQRKVYRRWEEADPRVSDVRLPDATAMTDFWRSIWSAPVEHTEGEWMSVVERECETIEPMGAITISPDDVSCAIRTAQNWKSPGPDGLHNFWLKWFRCSHSRLATQFQQALELGSLPPSLTTGVTFLLYKSGSTTEAKNYRPITCLPTLYKLLTSILRAKINAHMVANNILASAQNGCRVGSRGTKELLLIDMTICQRVRRNRGALSAAWIDYKKAYDSVPHSWLERILELYKIDAALRSFLGACMRQWTTVLRQPGGGDYPPGPQDFIRIERGIFQGDSLSPLWFCLALNPLSTLLKDSGLGCRLRRESEVISHLLYMDDLKLFAPNNRDLLELLKTTEVFSSSIKMEFGVDKCAVMHVQRGKVVNSTNLQLSETMTFRSISESETYKYLGMSQSLGIEDAGIKQALRERFFGRLTKVLNSLLSGGNKVRAFNAWVMPLLTYSFGILRWTQTELDALDRRVRQLLTTHRMLHPRSSVMRLYIPRKCGGRGFLNAKNLHNREVYNLRNYFLNNECGMHRDVVAIDKGLTPLSLANENWRKPVVLSTEDRKAVWKSKELHGRFYGALTGPDVDLLASVNWLRFGDLFGETEGFACAIADEVIMTNNYRRYILKDGTVDICRACRRPGESLRHIISGCSHLANGEYLHRHNLVARIIHQQLALLYGLVDHEVPYYKYTPAPVLENGRATLYWDRSIITDRTIVANKPDIVVIDRPQRRAMLVDITVPCDVNLVKAEKDKSSKYLDLAHEVTAMWEVDSAIIVPIVVSANGLIAKSLDQHLERLSLRGCGWIKGQIQKAVILDTARIVRRFLSLRP

SEQ ID NO: 5393 - protein, 1025 aa, Pammene fasciana
MPAPDLASGVPRVDPSADEVDIANQSVSSTANEQLRRTLEEAITQYRSTNITRPRIPRLPMNRRNLALMGALNDLLAPFLRTSKDLDDTHSIMYCGAIAACRVARVKFPDAERAPRTAGGVPAWQVRIERRINSFRTLIAKLICFRGGNNRPRVMRFVHQAFAGTGIEPRDYMANVIERIDFLKQKVYAWASRIRRYRERVDRFRQNRLFQSDQRKVYRRWEKADPRVSDERLPDATAMADFWRSIWSAPVEHTEGEWMSVVERECESIEPMGAITISPDDVSCAIRMAQNWKSPGPDGLHNFWLKWFRCSHSRLATQFQQALELGSLPPSLTTGVTFLLYKSGSTTEAKNYRPITCLPTLYKLLTSILRAKINAHMVANNILASAQNGCRVGSRGTKELLLIDMTICQRARRNRGALSAAWIDYKKAYDSVPHSWLERILELYKVDAALRSFLGACMRQWTTVLRQPGGGDDPPGPQDFIRIERGIFQGDSLSPLWFCLALNPLSTLLKDSGLGCRLRRESEVISHLLYMDDLKLFAPNNRDLLELLKTTEVFSTSIKMEFGVDKCAVMHVQRGKVVNSTNLQLSETMAFRSISESETYKYLGMSQSLGIEDTGIKRALRERFFGRLTKVLNSLLSGGNKVRAFNAWVMPLLTYSFGILRWTQTELDALDRRVRLMLTTHCMLHPRSSVMRLYIPRKCGGRGFLNAKNLHNREVYNLRNYFLNNECGMHRDVVAIDKGLTPLSLANENWRKPVVLSTEDRKAVWKSKELHGRFYGALWGPDVDLLASVNWLRFGDLFGETEGFACAIADEVIMTNNYRRYILKDGTVDICRACRRPGESLRHIISGCSHLANGEYLHRHNLVARIIHQQLALLYGLVAHEVPYYKYIPAPVLENDRATLYWDRSIITDRTIVANKPDIVVIDRPQRRAMLVDITVPCDVNLVKAEKDKSSKYLDLAHEVTAMWEVDSAIIVPIVVSANGLIAKSLDQHLERLSLRGCGWIKGQIQKAVILDTARIVRRFLTLRP

SEQ ID NO: 5394 - protein, 1107 aa, Campaea margaritaria
MRAYYGATEGGTNLTAYRNRMLSLFQTLEPTVAVSAQRLSDQVRAIHRCKLMEQSTLDRLRLEALPVSTTSTSGRDLPETPSIPGPVITSTPVASRVDTEVVDGECGNMSVSSQVTEQLRRTLEDAIRQYRFTSDSRPRLPRVPTHRRNLALMGALDALLAPYLQTSKDLIDTHSILYCGAIAVCRVARVKFPDTEQAPRTLGHAPAWQVRIQRRIDTYRTLIAKLVCFSRGNNRPRVMRFVNQAFAGTDIRPRNYMTCVTERIDFLKQKVYAWANRIRRYRERVDRYCQNRLFQSDQRKVYRNWEVTGQRMDDGQLPDVTAMINFWRGIWSVPVEHTEGDWMNIVERACDPIESMEAVSISPIDVRYAIQTAQNWKSPGPDGLQNFWIKWIRSSHSCLAMQFQEAIELGSLPSFMTTGSTTLLFKSGSTTEAKNYRPITCLPTMYKLLTSILRTKINSHIIANNILAPAQNGCRVGSRGTKELLLIDMTICQQVRRKKGALSTAWVDYKKAYDSVPHSWLVRILELYKIDTTLRSFLRTCMGQWSTVLRQPGGGDSVFGPQDFIRIERGIFQGDSLSPLWFCLALNPLSTLLQNSGLGYRLRREGEIISHLLYMDDLKLFAPKRFDLMKLLNITEEFSKSINMEFGVDKCAVMHVQRGKVVNSSNLQLSETLSLRSLSEAETYKYLGMSESLGIVDRDIKQSVKERFFCRLTKVLNSHLSGGNRARAFNGWVMPLLTYSFGILRWTQTELDALDRRVRQQLTLHRMLHPRSSVMRLYIPRKWGGRGFLNAKNLHNREVCSLREYFLNTECGMHRDVVVVDKTLTPLSLANGNWRKPSVLSTDDRKDVWKGKELHGRFYRALTGPDVDLLASVNWLRFGDLFGETEGFVCAIADEVIKTNNYRKYIMKDGTVDICRACRRPGESLRHIISGCSHLANGEYLHRHNQVARIVHQQLALQYGLVELEVPYYKYAPAPVLENGRALLYWDRSVITDRTIVANKPDIVLVDRSQRRAVLVDITVPHDENLAKAEKDKLSKYLDLAHEVTAMWDVDSTIIVPIVVSANGLVAKSLDQHLKRLSLDGWIKGRMQKAVLLDTARIVRRFLSLQP

SEQ ID NO: 5395 - protein, 1207 aa, Ennomos quercinarius
MITRSRTKQAEQSARLPPPPVPSSSSSSSGDEYGTPPDTTASSDEDGPPSPPPPPPPARRGRPPLPARLGPAGQPAPRPAPATGGIVRRMRWTQAMNENCMRAYYGATEGGSSLTAYRDRMLSLFQNLEPAVAVSAQRLSDQVRAIQRCKMLDQSTLDRLRLEALPTRATSPSPRVLPAALPDPGPITGPPPVTPRGDPAIGGEESVSDSVSTQANEQLRSALEDAILRYRSTPTSRPRLPRLPTNRRNLVLMGALNTLLAPYLRTSEDLVDTHSILYCGAIAACRVARVKFPDTDRAPRPADGAPAWQVRIEKRITTFRTLIAKLVCFSRGNRRPRVMRFVTQAFTGTGIRPQDYMACVTERIDFLKQKVYAWASRIRRYRERVDRYQQNRLFQSDQRKVYRNWERTGQRVVDGQLPDANAMSEFWRSIWSVPVEHTEGDWMRVVERACEPIESMGSITIDPEDISCAIRTAQNWKSPGPDGLHNFWIKWIRCSYPCLAIQFQEALEAGSLPSFMTTGVTFLLHKSGSTTEAKNYRPITCLPTLYKLLTSILRTKINSHIVANNVLAPAQNGCRVGSRGTKELLLIDTAICQQIQRNRGALSTAWIDYKKAYDSVPHSWLERILELYKIDATLRSFLSTCMRQWTTVLHQPGRGESVSDPQDLIRIERGIFQGDSLSPLWFCLALNPLSTLLKDSGLGYRLRRGGETISHLLYMDDLKLFTPQRPQLIELLKITENFSNSIKMEFGVDKCAVMHVHGGKVVNSTNLQLSETMTLRSLSESETYRYLGMSESLGISVGDVKRTVKERFFCRLTKVLNSLLSGGNKVRAFNGWVMPLLIYSFGILRWTQTELDALDRKVRQLLTSHRMLHPRSSGMRLYIPRKWGGRGFLNAKTLHNREVCSLREYFLNNECGMHRDMVAVDKGLTPLSLANENWRKPVVLSTEDRRDVWKGKELHGRFYRALTGPDVDLHASVNWLRFGDLFGETEGFVCAIADEVIKTNNYRKYIMKDGTVDICRACRRPGESLRHIISGCSHLANGEYLHRHNLVARIIHQQLALQYGLVESEVPYYKYTPGPVLENGRALLYWDRSIITDRTIVANKPDIVLVDRPQRRAVLVDITIPHDENLVKAEKDKLSKYLDLAHEVTAMWNVDSTSIVPIVVSANGLIAKSLDQHLERLSLDGWIKGQIQKAVLLDTARIVRRFLTLQP

SEQ ID NO: 5396 - protein, 1117 aa, Ennomos quercinarius
MRWTQAMNENCMRAYYGATEGGSSLTAYRDRMLSLFQDLEPAVAVSARLSDQVRAIQRCKMLDEPTLDRLRLEALPIRATSPSPRVLPAALPDPGPIMGPLPVTPRGDPAIDGEESASDSVSTQANEQLRSALEDAILRYRSTPTSRPRLPRLPTNRRNLVLMGALNTLLAPYLRTSEDLVDTHSILYCGAIAACRVARVKFPDTDRAPRPADGAPAWQVRIEKRITTFRTLIAKLVCFSRGNHRPRVMRFVTQAFAGTGIRPQDYMACVTERIDFLKQKVYAWASRIRRYRERVDRYQQNRLFQSDQRKVYRNWEGTGQRVVDGQLPDANAMNEFWRSIWSVPVEHTEGDWMRVVERVCEPIESMGSITIDPEDISCAIRTAQNWKSPGPDGLHNIWIKWIRCSYPCLAIQFQEALEAGSLPSFMTTGVTFLLHKSGSTTEAKNYRPITCLPTLYKLLTSILRTKINSHIVANNILAPAQNGCRVGSRGTKELLLIDTAICQQVRRNRGALSTAWIDYKKAYDSVPHSWLERILELYKIDATLRSFLSACMRQWTTVLRQPGGGQSISDPQDFIRIERGIFQGDSLSPLWFCLALNPLSTLLGDSGLGYRLRRGGEIISHLLYMDDLKLFAPQRPQLIELLKITENFSNSINMEFGVDKCAVMHVHGGKVVNSTNLQLSETMTLRSLSESETYRYLGMSESLGISVGDVKRTVKERFFCRLTKVLNSLLSGGNKTRAFNGWVMPLLMYSFGILRWTQTELDALDRKVRQLLTSHRMLHPRSSVMRLYIPRKWGGRGFLNAKTLHNREVCSLREYFLNNECGMHRDVVAVDKGLTPLSLANENWRKPVVLSTEDRRDVWKGKELHGRFYRALTGPDVDLHASVNWLRFGDLFGETEGFVCAIADEVIKTNNYRKYIMKDGTVDICRACRRPGESLRHIISGCSHLANGEYLHRHNLVARIIHQQLALQYGLVESEVPYYKYTPGPVLENGRALLYWDRSIITDRTIVANKPDIVLIDRSQRRAVLVDITIPHDENLVKAEKDKLSKYLDLAHEVTAMWNVDSTSIVPIVVSANGLIAKSLDQHLERLSLDGWIKGQIQKAVLLDTARIVRRFLTLQP

SEQ ID NO: 5397 - protein, 1207 aa, Ennomos quercinarius
MITRSRTKQAEQSARLPPPPVPSSSSSSSGDEYGTPPDTTASSDEDGPPSPPPPPPPARRGRPPLPARLGPAGQPAPRPAPATGGIVRRMRWTQAMNENCMRAYYGATEGGSSLTAYRDRMLSLFQNLEPAVAVSAQRLSDQVRAIQRCKMLDQSTLDRLRLEALPTRATSPSPRVLPAALPDPGPITGPPPVTPRGDPAIGGEESVSDSVSTQANEQLRSALEDAILRYRSTPTSRPRLPRLPTNRRNLVLMGALNTLLAPYLRTSEDLVDTHSILYCGAIAACRVARVKFPDTDRAPRPADGAPAWQVRIEKRITTFRTLIAKLVCFSRGNRRPRVMRFVTQAFTGTGIRPQDYMACVTERIDFLKQKVYAWASRIRRYRERVDRYQQNRLFQSDQRKVYRNWERTGQRVVDGQLPDANAMSEFWRSIWSVPVEHTEGDWMRVVERACEPIESMGSITIDPEDISCAIRTAQNWKSPGPDGLHNFWIKWIRCSYPCLAIQFQEALEAGSLPSFMTTGVTFLLHKSGSTTEAKNYRPITCLPTLYKLLTSILRTKINSHIVANNVLAPAQNGCRVGSRGTKELLLIDTAICQQIQRNRGALSTAWIDYKKAYDSVPHSWLERILELYKIDATLRSFLSTCMRQWTTVLHQPGRGESVSDPQDLIRIERGIFQGDSLSPLWFCLALNPLSTLLKDSGLGYRLRRGGETISHLLYMDDLKLFTPQRPQLIELLKITENFSNSIKMEVGVDKCAVMHVHGGKVVNSTNLQLSETMTLRSLSESETYRYLGMSESLGISVGDVKRTVKERFFCRLTKVLNSLLSGGNKTRAFNGWVMPLLMYSFGILRWTQTELDALDRKVRQLLTSHRMLHPRSSVMRLYIPRKWGGRGFLNAKTLHNREVCSLREYFLNNECGMHRDMVAVDKGLTPLSLANENWRKPVVLSTEDRRDVWKGKELHGRFYRALTGPDVDLHASVNWLRFGDLFGETEGFVCAIADEVIKTNNYRKYIMKDGTVDICRACRRPGESLRHIISGCSHLANGEYLHRHNLVARIIHQQLALQYGLVESEVPYYKYTPGPVLENGRALLYWDRSIITDRTIVANKPDIVLVDRPQRRAVLVDITIPHDENLVKAEKDKLSKYLDLAHEVTAMWNVDSTSIVPIVVSANGLIAKSLDQHLERLSLDGWIKGQIQKAVLLDTARIVRRFLTLQP

SEQ ID NO: 5398 - protein, 1208 aa, Cydia splendana
MITRSRAKAVTTSARPPPPPASSTSSSTSSSGDEFATAPDTDGSSDESGPPPPPPRPPARRGRPPLPARLGPAGHPAPPTAPATGGIVRRMRWTRDMNENVMRAYYGATEGGTQLSAYRSRILPLFQTLEPTITVSEQRLSDQVRVIQRLKRLDDATLDRLRQEALSARADSISVRDLPATSPDPVPAPDLAPGAPRVDFCTDEGDLVSQNVSTTANEQLRRTLEEVITQYRATTNSRPRLPRLPMNRRNLALMGALNALLEPHLRTSKDLDDTHSILYCGAIAACRVARVKFPDAERAPRTVGGVPAWQARIERRISSFRTLIAKLICFRGGNNRPRVMRFVNQAFAGTDIRPRDYMANVTERIDFLKQKVYAWANRIRRYRERVERFQQNRLFQSDQRKVYRKWEETNLRRPDTQPPDATAMTDFWRSIWSMPVGHTEGSWMSVIERECESIEPMGAVTISPDDVSCAIRTAQNWKSPGPDGLHNFWLKWFRCSHSCLAAQFQQALELGSLPPSLTTGVTFLLYKSGSTTEAKNYRPITCLPTLYKLLTSILRAKINAHIVANNILASAQNGCRVGSRGTKELLLIDMTICQQIRRTKGALLAAWIDYKKAYDSVPHSWLGRVLELYKVDAALRAFLSACMGQWTTVLRQPGGGDDQPGPQDFIRIERGIFQGDSLSPLWFCLALNPLSTLLKDLGLGCRLRREGEVISHLLYMDDLKLFAPNTQGLLELLKTTEVFSSAINMEFGVDKCAVMHVQRGRVVNSTNLQLSETMSFRSISESETYKYLGMSQSLGIEDEGIRRSVKERFFSRLTKVLNSLLSGGNKVRAFNAWVMPLLTYSFGILRWTQTELDALDRRVRSLLTTHRMLHPRSSVMRLYIPRKCGGRGFLNAKDLHNREVYNLRNYFLNNECGMHRDVVAVDRNLTPLSLANENWRKPVVLSTADRKAAWENKVLHGRFYKVLTGPDVDLLASVNWLRFGDLFGETEGFACAIADEVMMTNNYRKYILKDGTVDICRACRRPGESLRHIISGCSHLANGEYLHRHNLVARIIHQQLALLYGLVDREVPYYKYLPAPVLENGRATLYWDRSIITDRTIVANKPDIVLIDRSQRRAVLADVTIPHDENLVKAEKDKSSKYLDLAHEITAMWDVDSTIIVPIVVSANGLIAKSLDQHLERLSLGGWIKGQMQKAVILDTARIVRRFLSLQP

SEQ ID NO: 5399 - protein, 1177 aa, Cydia splendana
MIKTSTHIIIIIIISDECGPPPPPSRPPARRGRPPLSARLGPAGHPAPPTAPAAGGVVRRMRWSQTINENVMRAYYGATEGGTNLCAYRVRMLPLFQALEPTIDVTAQRLSDQVRVIQRQKRLDDSTLDRLRLEALSARAASTSARDPPATSPDPVPAPDQAPGAPRVDLSADEEEFAQSVGSTANEQLRRTLDEAITRYRSTPDTRPRLPRLPMNRHNLALMGALNALLEPYLRTSKDLDDTHAIMYCGAIAACRVARVKFPDSERAPRTAGGAPAWQIRIERRISSFRTLIAKLICFRGGNNRPRVMRFVNQAFVGTDIRPRDYMANVTERIDFLKQKVYAWANRIRRYRERVDRFQQNRLFQSDQRKMYRKWEETNLRASDSRPPDATVMNDFWRSIWSVPVGHTEGSWMSVVERECESIEPMGAVTISPDDVSCAIRTAQNWKSPGPDGLHNFWLKWFRCSHSYLAAQFQQALELGSLPPSLTTGVTFLLYKSGSTTEAKNYRPITCLPTLYKLLTSILRAKINAHIVANNILASAQNGCRVGSRGTKELLLIDMTICQQIRRTKGALSAAWIDYKKAYDSVPHSWLGRVLELYKVDAALRAFLSACMGQWTTVLRQPGGGDDRPGPQDFIRIKRGIFQGDSLSPLWFCLALNPLSTLLKDLGLGCRLRREGVVISHLLYMDDLKLFAPNSQDLLELLKTTDVFSSAIHMEFGVDKCAVMHIQRGKVVNSTNLQLSETMSFRSISESETYKYLGMSQSLGIEDEGIRRSVKERFFSRLTKVLNSLLSGGNKVRAFNAWVMPLLTYSFGILRWTQTELDALDRRVRSLLTTHRMLHPRSSVMRLYIPRKCGGRGFLNAKDLHNREVYNLRNYFLNNECGMHRDVVAVDRNLTPLSLANENWRKPVVLSTADRKAAWESKALHGRFYKALTGPDVDLLASVNWLRFGDLFGETEGFACAIADEVMMTNNYRKYILKDGTVDICRACRRPGESLRHIISGCSHLANGEYLHRHNLVARIIHQQLALLYGLVDREVPYYKYLPAPVLENGRATLYWDRSIITDRTIVANKPDIVLIDRSQRRAVLADVTIPHDENLVKAEKDKSSKYLDLAHEITAMWDVDSTIIVPIVVSANGLIAKSLDQHLERLSLGGWIKGQMQKAVILDTARIVRRFLTLRP

SEQ ID NO: 5400 - protein, 964 aa, Cydia splendana
MNRRNLALMGALNALLEPHLRTSKDLDDTHSIMYCGAIAACRVARVKFPDAERAPRTVGGVPAWQARIERRISSFRTLIAKLICFRGGNNRPRVMRFVNQAFAGTDIRPRDYMANVTERIDFLKQKVYAWANRIRRYRERVDRFQQNRLFQGDQRKVYRKWEETNLRTPDTQPPDVTAMTDFWRSIWSVPVGHTEGGWMSVVERECESIEPMGAVTISPDDVSCAIRTAQNWKSPGPDGLHNFWLKWFRCSHSCLAAQFQQAIELGSLPPSLTTGVTFLLYKSGSTTEAKKNYRPITCLPTLYKLLTSILRAKINAHIVANNILASAQNGCRVGSRGTKELLLIDMTICQQIRRNKVALSAAWIDYKKAYDSVPHSWLGRVLELYKVDTALRAFLSACMRQWTTVLRQPGGRDDRPGPQDFIRIERGIFQGDSLSPLWFCLALNPLSTLLKDLGLGCRLRREGEVISHLLYMDDLKLFAANSQDLLELLKTTEVFSSAIHMEFGVDKCAVMHVQRGRVVNSTNLQLSETMSFRSISESETYKYLGMSQSLGIEDEGIRRSVKERFFSRLTKVLNSLLSGGNKVRAFNAWVMPLLTYSFGILRWTQTELDALDRRVRSLLTAHRMLHPRSSVMRLYIPRKCGGQGFLNAKDLHNHEVYNLRNYFLNNECGMHRDVVAVDRNLTPLSLANENWRKPVVLSTADRKAAWESKVLHGRFYKALTGPDVDLLASVNWLRFGDLFGETEGFACAIADEVMMTNNYRKYILKDGTVDICRACRRPGESLRHIISGCSHLANGEYLHRHNLVARIIHQQLALLYDLVDREVPYYKYLPAPVLENGRATLYWDRSIITDRTIVANKPDIVIIDRSQRRAVLIDITIPHDENLVKAEKDKSSKYLDLAHEITAMWDVDSTIIVPIVVSVNGLIAKSLDQHLERLSLGGWIKGQMQKAVILDTARIVRRFLSLQP

SEQ ID NO: 5401 - protein, 1208 aa, Cydia splendana
MITRSRAKAVTTSARPPPPPASSTSSSTSSSGDEFATAPDTDGSSDESGPPPPPPRPPARRGRPPLPARLGPAGHPAPPTAPATGGIVRRMRWTRDMNENVMRAYYGATEGGTQLSAYRSRILPLFQTLEPTITVSEQRLSDQVRVIQRLKRLDDATLDRLRQEALSARADSISVRDLPATPPDPVPAPDLAPGAPRVGFCTDEGDFVSQNVSTTANEQLRRTLEEVITQYRATTNSRPRLPRLPMNRRNLALMGALNALLEPHLRTSKDLDDTHSILYCGAIAACRVARVKFPDAERAPRTVGGVPAWQARIERRISSFRTLIAKLICFRGGNNRPRVMRFVNQAFAGTDIRPRDYMANVTERIDFLKQKVYAWANRIRRYRERVDRFQQNRLFQSDQRKVYRKWEETNLRTPDTQPPDATAMTDFWRSIWSMPVGHTEGGWMSVVERECEFIEPMGAVTISPDDVSCAIRTAQNWKSPGPDGLHNFWLKWFRCSHSRLAAQFQQALELGSLPPSLTTGVTYLLYKSGCTTEAKNYRPITCLPTLYKLLTSILRAKINAHIIANNILASAQNGCRVGSRGTKELLLIDMTICQQIRRNRGALSAAWIDYKKAYDSVPHSWLGRVLELYKVDAALRTFLSACMRQWTTVLRQPGGGDDPPDPQDFIRIERGIFQGDSLSPLWFCLALNPLSTLLKDLGLGCRLRREGEIISHLLYMDDLKLFAPNSQDLSELLKTTEGFSSAINMEFGVDKCAVMHVQRGRVVNSTNLQLSETMSFRSISESETYKYLGMSQSLGIEDEGIRRSVKERFFSRLTKVLNSLLSGGNKVRAFNAWVMPLLTYSFGILRWTQTELDALDRRVRSLLTTHRMLHPRSSVMRLYIPRKCGGRGFLNAKDLHNREVYNLRNYFLNNECGMHRDVVAVDRNLTPLSLANENWRKPVVLSTADRKAAWESKVLHGRFYKALTGPDVDLLASVNWLRFGDLFGETEGFACAIADEVMMTNNYRKYILKDGTVDICRACRRPGESLRHIISGCSHLANGEYLHRHNLVARIIHQQLALLYGLVDREVPYYKYLPAPVLENGHATLYWDRSIITDRTMVANKPDIVIIDRSQRRAVLVDITIPHDENLVKAEKDKSSKYLDLAHEITAMWDVDSTIIVPIVVSVNGLIAKSLDQHLERLSLGGWIKGQMQKAVILDTARIVRRFLSLQP

SEQ ID NO: 5402 - protein, 1210 aa, Cydia splendana
MITRSQRRAAESTNNARPPPPPAPSSSASTTSSGDEFATAPDTDGSSDESGPPPPPPRPPARRGRPPLPARLGPAGHPAPPTAPATGGIVRRMRWTRDMNENVMRAYYGATEGGTQLSAYRSRILPLFQTLEPTITVSEQRLSDQVRVIQRLKRLDDATLDRLRQEALSARADSTSVRDLPATSPDPVPAPDLAPGAPRVDFCTDEGDFASQNVSTTANEQLRRTLEEAITQYRATTNSRPRLPRLPMNRRNLALMGALNALLEPHLRTSKDLDDTHSIMYCGAIAACRVARVKFPDAERAPRTVGGVPAWQARIERRISSFRTLIAKLICFRGGNNRPRVMRFVNQAFAGTDIRPRDYMANVTERIDFLKQKVYAWANRIRRYRERVDRFQQNRLFQSDQRKVYRKWEETNLRTPDTQPPDATAMTDFWRSIWSVPVGHTEGSWMSVVERDCESIEPMGAVTISPDDVSCAIRTAQNWKSPGPDGLHNFWLKWFRCSHSCLAAQFQQALELGSLPPSLTTGVTFLLYKSGSTTEAKNYRPITCLPTLYKLLTSILRAKINAHIVANNILASAQNGCRVGSRGTKELLLIDMTICQQIRRNKGALSAAWIDYKKAYDSVPHSWLGRVLELYKVDTALRVFLSACMGQWTTVLRQPGGGDDRPGPQDFIRIERGIFQGDSLSPLWFCLALNPLSTLLKDLGLGCRLRREGEVISHLLYMDDLKLFAPNSQDLLELLKITEVFSSAINMEFGVDKCAVMYVQRGRVVNSTNLQLSETMSFRSISESETYKYLGMSQSLGMEDEGIRRSVKERFFSRLTKVLNSLLSGGNKVRAFNAWVMPLLTYSFGILRWTQTELDALDRRVRSLLTAHRMLHPRSSVMRLYIPRKCGGRGFLNAKDLHNREVYNLRNYFLNNECGMHRDVVAVDRNLTPLSLANENWRKPVVLSTADRKAAWESKVLHGRFYKALTGPDVDLLASVNWLRFGDLFGETEGFACAIADEVMMTNNYRKYILKDGTVDICRACRRPGESLRHIISGCSHLANGEYLHRHNLVARIIHQQLALLYGLVDREVPYYKYLPAPVLENGRAMLYWDRSIITDRTIVANKPDIVIIDRSQRRAVLVDITIPHDENLVKAEKDKSSKYLDLAHEITAMWDVDLTIIVPIVVSVNGLIAKSLDQHLERLSLGGWIKGQMQKAVILDTARIVRRFLSLRP

SEQ ID NO: 5403 - protein, 1118 aa, Cydia splendana
MRWTRDMNENVMRAYYRVTEGGTQLSAYRSRILPLFQTLEPTITVSEQRLSDQVRVIQRLKRLDDATLDRLRQEALSARADSISVRDLPATSPDPVPAPDLAPGAPRVDFCTDEGDLVSQNVSTTANEQLRRTLEGVITQYRATTNSRSRLPRLPMNRRNLALMGALNALLEPHLRTSKDLDDTHSILYCGAIAACRVARVKFPDAERAPRTVGGVPAWQARIERRISSFRTLIAKLICFRGGNNRPRVMRFVNQAFVGTDIRPRDYMANVTERIDFLKQKVYAWANRIRRYRERVERFQQNRLFQSDQRKVYRKWEETNLRTPDTRPPDATAMTDFWRSIWSMPVGHTEGSWMSVIERECESIEPMRAVTISPDDVSCAIRTAQNWKSPGPDGLHNFWLKWFRCSHSCLAAQFQQALELGSLPPSLTTGVTFLLYKSGSTTEAKNYRPITCLPTLYKLLTSILGTKIDAHIVANNILASAQNGCRVGSRGTKELLLIDMTICQQIRRTKGALSAAWIDYKKAYDSVPHSWLGRVLELYKVDAALRAFLSACMGQWTTVLRQPEGGDDQPGPQDFIRIERGIFQGDSLSPLWFCLALNPLSTLLKDLGLGCRLRREGEVISHLLYMDDLKLFAPNTQGLLELLKTTEVFSSAINMEFGVDKCAVMHVQWGRVVNSTNLQLSETMSFRSISESETYKYLGMSQSLGIEDEGIRRSVKERFFSRLTKVLNSLLSVGNKVRAFNAWVMPLLTYSFGILRWTQTELDALDRRVRSLLTTHRMLHPRSSVMRLYIPRKCGGRGFLNAKDLHNREVYNLRNYFLNNECGMHRDMVAVDRNLTPLSLANENWRKPVVLSTADRKAAWENKVLHGRFYKALTGPDVDLLASVNWLRFGDLFGETEGFACAIADEVMMTNNYRKYILKDGTVDICRACRRPGESLRHIISGCSHLANGEYLHRHNLVARIIHQQLALLYGLVDREVPYYKYLPAPVLENGRATLYWDRSIITDRTIVANKPDIVLIDRSQRRAVLADVTIPHDENLVKAEKDKSSKYLDLAHEITAMWDVDSTIIVPIVVSANGLIAKSLDQHLERLSLGGWIKGQMQKAVILDTARIVRRYLSLQP

SEQ ID NO: 5404 - protein, 1211 aa, Agriopis aurantiaria
MITRAKTRAAESNARLPPPPASSSSPSTSSGEDEYHTTREASGSSSDTSGPGTPPPPPPARRGRPPLPARLGPVGHSATRPAPATGGVVRHMRWSRIMNEDCMRAYYRATEGGTNLSAYCARMLPLFQALQPTITVSAQRLSDQVRAIQRCNMLDQSVLDRLRLEEVRTRPTPASTRNPPVASSAPTLASVPASVGTLAALADTAVDEEDLASGVSDQVKEQLRGALEDAISQYRFTSDSRPRLPRLPTHRRNLALMGALNALLAPYLRASEDLVDTHSILYCGAIAACRVARVKFPDTNRAPRTAGGVPAWQVRIERRINTFRTLIAKLICFRRGNNRPRVMRFVTQAFAGTDIRPQHYLANVTERIDYLKQKVYAWANRIRRYRERVDRYWQNRLFQSDQRKVYRGWEETDQRVSDGQRPDANAMINFWRGIWSVPVNHTEGDWMRVVERECESIEPMGSILIDPVDVSCAIRMAQNWKSPGPDGLHNFWIKWIRCSHDRLATQFQEALELGSLPSFMTTGVTFLLHKSGSTTEAKNYRPITCLPTIYKLLTSILRNKINAHIVANNVLAHAQNGCRVGSRGTKELLLIDTAISQQVRRNRGALSAAWIDYKKAYDSVPHSWLERVLELYKIDTTLKSFLCACMRQWTTVLRQPGGGDGTSGPQDLIRIERGIFQGDSFSPLWFCLALNPLSSLLRDSGLGYRLRRDGQVISHLLYMDDLKLFTPKRQDLVELLKITDVFSSAIRMEFGVDKCAVMHVQQGKVVNSPNLQLSEVMTLRSLSEAETYKYLGMSESLGISVENIKKSVKERFFCRLTKVLNSLLSGGNKVRAFNGWVMPLLIYSFGILRWTQTELDALDRRVRQLLTSHRMLHPRSSVMRLYIPRKWGGRGFLNAKNLHNREVCSLRDFFRNSESGMHRDVVAVDRGLTPLSLANENWRKPSVLSIEDRRDVWKGKELHGRFYRALTGPDVDLLSSVNWLRFGDLFGETEGFACAIADEVIKTNNYRKYIMKDGTVDICRACHRPGESLRHIISGCSHLANGEYLHRHNQVARIIHQQLALRYGLVESEVPYYKYAPAPVLENGRALLYWDRSIITDRTIVANKPDIVLVDRSQRRAVLVDITIPHDENLVKAEKDKLSKYLDLAHEVTAMWDVDSTIIVPIVVSVNGLIAKSLDQHLKRLSLDGWVKGQMQKAVILDTARIVRRFLTLQP

SEQ ID NO: 5405 - protein, 1211 aa, Agriopis aurantiaria
MITRSKTKTAALRSAHPRPLATPSTSASSSSEDGDYLTSRDTSASSDGSGPSTPPPPLRPARRGRPALPARLGHVELPAPLSAPATGGVRRMRWTPVINENCMRAYYRATEGGTNLSAYRVRMLPLFQALEPTVTVSAQRLSDQVRAIQRCNLLDQSVLDRLRLEEVRTRPTPPSTRNPPVASSAPTLASRPASVVTLATLADPVVDEGDLASGVSDQVREQLRGALEDAISQYRFTPVSRPRLPRLPTHRRNLALMGALNALLAPYLRASKDLVDTHSILYCGAIAACRVARVKFPDTNRAPRTVGRVPAWQVRIERRISTFRTLIAKLICFRRGNNRPRVMRFVTQAFAGTDIRPQHYLANVTERIDYLKQKVYAWANRIRRYRERVDRYWQNRLFQSDQRKVYRGWEETEQRVSDGQLPDASAMINFWRGIWSVPVEHTEGDWMRVVERECESIEPMGSILIDSVDVSCAIRTAQNWKSPGPDGLHNFWIKWIRCSHDRLATQFQEALELGSLPSFMTTGVTFLLHKSGSTTEAKNYRPITCLPTIYKLLTSILRNKINAHIVANNVLAHAQNGCRVGSRGTKELLLIDTAISQQVRRNRGALSAAWIDYKKAYDSVPHSWLERVLELYKIDTTLKSFLGACMRQWTTVLRQPGSGDGASGPQDLLRIERGIFQGDSFSPLWFCLALNPLSTLLRDSGLGYRLRRDGQVISHLLYMDDLKLFTPKRQDLMELLKITEVFSSAIKMEFGVDKCAVMHVQRGKVVNSPNLQLSETMTLRSLSEVETYKYLGMSESLGISVEDIKKSVKERFFCRLTKVLNSFLSGGNKVRAFNGWVMPLLIYSFGILRWTQTELDALDRRVRQLLTSHRMLHPRSSVMRLYIPRKWGGRGFLNAKNLHNREVCSLRDFFRNSESGMHRDVVAVDRGLTPLSLANENWRKPSVLSIEDRRDVWKGKELHGRFYRALTGPDVDLLSSVNWLRFGDLFGETEGFACAIADEVIKTNNYRKYIMKDGTVDICRACHRPGESLRHIISGCSHLANGEYLHRHNQVARIIHQQLALRYGLVESEVPYYKYAPAPVLENGRALLYWDRSIITDRTIVANKPDIVLVDRSQRRAVLVDITIPHDENLVKAEKDKLSKYLDLAHEVTAMWDVDSTIIVPIVVSVNGLIAKSLDQHLKRLSLDGWVKGQMQKAVILDTARIVRRFLTLQP

SEQ ID NO: 5406 - protein, 1214 aa, Agriopis aurantiaria
MITRSKTSAAARLTNAQPPPPPASSSSPSSSSGEDEYHTTREASGSSSDTSGPGTPPPPPPARRGRPPLPARLGLVGHSATRPAPATGGVVRRMRWSPTMNENCMRAYYRATEGGTNLSAYCARMLPLFQDLEPTVTVSAQRLSDQVRAIHRCKLLDDSVLDRLRLEELRARPTPALMRDPPVASSAPTLASLPASVVTLAAPADPVVDEGDLTSNSVSDQVREQLRGALEDAISQYRFAPDSRPRLPRLPTHRRNLALMGALNALLASYLRASEDLVDTHSILYCGAIAACRVARVKFPDTNRAPRTAGGVPAWQVRIERRISTFRTLIAKLICFSRGNNRPRVMRFVTQAFAGTEIRPQHYLANVMERIDYLKQKVYAWVSRIRRYRERVNRYWQNRLFQSDQRKVYRGWEEIDQRVSDGQLPDANAMINFWRGIWSVPVEHTEGDWMRVVERECESIEPMGSILIDSVDVSCAIRTAQNWKSPGPDGLHNFWIKWIRCSHDRLATQFQEALELGSLPSFMTTGVTFLLHKSGSTTEAKNYRPITCLPTIYKLLTSILRNKINAHIVANNVLAHAQNGCRVGSRGTKELLLIDTAISQQVRRNKGALSAAWIDYKKAYDSVPHSWLERVLELYKIDTTLKSFLGACMRQWTTVLRQPGGGDGTSGPQDLIRIERGIFQGDSFSPLWFCLALNPLSTLLRDSGLGYRLRRDGQVISHLLYMDDLKLFTPKRQDLVELLKITEVFSSAIRMEFGVDKCAVMHVQRGKVVNSPNLQLSEVMTLRSLSEAETYKYLGMSESLGISVENIKKSVKERFFCRLTKVLNSLLSGGNKVRAFNGWVMPLLIYSFGILRWTQTELDALDRRVRQLLTSHRMLHPRSSVMRLYIPRKWGGRGFLNAKNLHNREVCSLRDFFRNSESGMHRDVVAVDRGLTPLSLANENWRKPSVLSIEDRRDVWKGKELHGRFYRALTGPNVDLLSSVNWLRFGDLFGETEGFACAIADEVIKTNNYRKYIMKDGTVDICRACHRPGESLRHIISGCSHLANGEYLHRHNQVARIIHQQLALRYGLAESEVPYYKYAPAPVLENGRALLYWDRSIITDRTIVANKPDIVLVDRSQRRAVLVDITIPHDENLVKAEKDKLSKYLDLAHEVTAMWDVDSTIIVPIVVSVNGLIAKSLDQHLKRLSLDGWIKGQMQKAVILDTARIVRRFLTLQP

SEQ ID NO: 5407 - protein, 1208 aa, Ennomos fuscantarius
MILRSKTKTADNKCARLPPLPVSSSPSSSSGDEYATPPDTTASSDDDGLPSPPPPPPPARRGRPPLPARLGPAGQPAPRPAPATGGVVRRMRWTQTMNENCMRAYYGSTEGGSSLTAYRDRMLSLFQELEPSISVSAQRLSDQVRAIHRCKLLDQSALDRLRLETLPIPATSPSPRVLSAALPDPGPIVGPPLVTPLGGPVIDGEESVSDSVSTQVNEQLRSALEDAILRYRSTPTSRPRLPRLPTNRRNLVLMGALNTLLGPYLRTSEDLVDTHSILYCGAIAVCRVARVKFPDTDRAPRPADGAPAWQVRIEKRITTFGTLIAKLVCFSRGNHRPRVMRFVTQAFAGTGIRPQDYMACVTERIDFLKQKVYAWASRIRRYRERVDRYQMNRLFQSDQRKVYRDWEGTGQRVVDGQLPDANVMNEFWRSIWSVPVDHSEGDWIRVVKHVCEPIESMGSITIDPEDISCAIRTAQNWKSPGPNGLHNFWIKWIRCSYPCLATQFQEALEAGSLPKFMTTGITFLLHKSGSTTEAKNYRPITCLPTLYKLLTSILRTKINSHITANNILAPAQNGCRVGSRGTKELLLIDTAICQQVRRNREALSTAWIDYKKAYDSVPHSWLKRVLELYKINATLRSFLSACMGQWTTVLRQPGGGDSVSDPQNFIRIERGIFQGDSLSPLWFCLALNPLSTLLGDSGLGYRLRRGGEIISHLLYMDDLKLFAPQRPQLMKFLKITENFSNSIKMEFGVDKCAVMHVHGGKVVNSTNLQLSETMTLRSLSESETYKYLGMSESLGISVGDVKQSVKERFFCRLTKVLNSLLSGGNKARAFNAWVMPLLMYSFGILRWTQTELDALDRKVRQVLTSHRMLHPRSSVMRLYIPRKWGGRGFLNAKYLHNREMYSLWEYFLSNECGMHRDVVAVDKGLTPLSLANENWRKPVVLSTNDRRDVWKGKELHGRFYRALTGPDVDLHASVNWLRFGDLFGETEGFVCAIADEVIKTNNYRKYIMKDGTVDICRACRRPGESLRHIISGCSHLANGEYLHRHNLVARIIHQQLALQYGLVESEVPYYKYTPGPVLENGRALLYWDRSIITDRTIVANKPDIVLIDRSQRRAVLVDIAIPHDENLVKAEKDKLSKYLDLAHEVTAMWSVDSTSIVPIVVSANGLIAKSLDQHLERLSLDGWIKGQIQKAVLLDTARIVRRFLSLQP

SEQ ID NO: 5408 - protein, 889 aa, Hedya salicella
MEYCHSQQYKHLSFNNRPRVMRYVAQAFAGTAVRPRDYMACITERIDFLKQKVYAWASRIRRYRERVDRFQQNRLFQSDQRKVYRKWEGTDQCVTDGRLPDPTAMNNFWRSIWSVPVEHTEGEWMNVVERECEPIETMGAVTISPDDVSCAARTTQNWKSPGPDGLHNFWVKWFRCSHERLATQFQQALELDSLPSFLTTGVTFLLYKSGSTTEAKNYRPITCLPTPYKLLTSILRAKINTHIVANNVLAFSQNGCRVGSLGTKELLLIDTTICQQVRRSRGTLSAAWIDYKKAYDSVPHSWLGRILELYKIDTVLKSFIGSCMRQWTTVLRQPGGRDGPPDPQDFIRIKRGIFQGDSLSPLWFFLALNPLSTLLKDSGLGCRLRRGGEIISHLLYMDDLKLFAPKRPELVELLKVTETFSSAIKMEFGVDKCATMHLQRGKVVNSTNLQLSDSMSLKSLSEVETYKYLGMSQSLSIADGDIKQAVKERFFCRLTKVLNSLLSGGNKARAFNAWVMPLLTYSFGILRWTQTELDALDRRVRMLLTTHRMLHPRSSVMRLYIPRKCGGRGFLNAKDLHNREVCSLREYFLNNECGIHRDVVAVDKGLTSLSLANENWRRPTVLSTVDRKDVWRSKELHGRFYKALTGPDVDLLASVNWLRFGDLFGETEGFACAITDEVIMTNNYRKYILKDGTVDICRACRRPGESLRHIISGCSHLANSEYLHRHNQVARIIHQQLAVKYGLVGSEVPYYKYAPMPVLENGRATVYWDRSIITDRTIVANKPDIVLVDRSKRRAILIDITIPHDENLVKAEKDKLSKYLDLAHEVTAMWDVDSTIIVPIVVSANGLIAKSLNEHLKRLSLDGWVKGQIQKAVILDSARIVRRFLSVQP

SEQ ID NO: 5409 - protein, 1213 aa, Erannis defoliaria
MITRSKKRNAAVQHARPTPPPVPSSSPSSSSPSEEEFHTCGTSSSSEDVSGPRTLTPPIPVRRGRPPLPARLGPAGQPASRPALAAGGVVRRMRWSQTNNENCMRAYYGATEGGTNLTAYRVRMLSLFQTLEPTVTVSAQRISDQVRAIQRLNLLNQPLLDRLRLEVQSARPTPASTRDLDVASSAPTLASVPTSAATLATSADPVLDEGDCTGMSVSTQVSEQLRRALEDAIGQYRFALNSRPRLPRLPTHRRNLALMGALNALLAPYLRASEDLTDTHSILYCGAIAACRVARVKFPDTNRAPRPAGDVPAWQLRIERRISTFRTLIAKLICFSRGNNRPRVMRFVTQAFAGTGIRPQQYMASVTERIDYLKQKVYAWANRIRRYRERVDRYWQNRLFQSDQRKVYRNWEGTEQRVSDGQLPDASAMTNFWRGIWSVPVEHTEGDWMRVVERECESIEPMGSILIDPVDVSCAIRTAQNWKSPGPDGLHNFWIKWFRCSHDRLATQFQEALELGSLPSFMTTGVTFLLHKSGSTTEPKNYRPITCLPTIYKLLTSILSTKINAHIVANNVLAPAQNGCRVGSRGTKELLLIDMAISQQVRRNKGALSAAWIDYKKAYDSVPHSWLERILELYQIDTTLKSFLGACMRQWTTVLRQPGGGNGSSDSQDLIRIERGIFQGDSLSPSWFCLALNPLSTLLKDSGLGYRLRRGGEVISHLLYMDDLKLFAPKHQDLLELLKTTQVFSSAIRMEFGVDKCALMRVPRGKVVNSPDLQLSEIMTLRSLSEAETYKYLGMSESLGISVVDIKKSVKERFFCRLTKVLNSLLSGGNKARAFNGWVMPLLIYSFGILRWTQTELDALDRRVRQLLTAHRMLHPRSSVMRLYIPRKWAGRGFLNAKNLHNREVCSLRDYFLNNECGMHRDVVTVDKGLTPLSLANENWRRPSVISTDDRKEVWKSKELHGRFYRALTGPDVDLLASANWLRFGDLFGETEGFACAIADEVIKTNNYRKYIMKDGTVDICRACHRPWESLRHIISGCSHLANGEYLHRHNQVARIIHQQLALQYGLVESEVPYYKYAPAPVLENGRALLYWDRSIITDRTIVANKPDIVMVDRSQRRAVLVDVTIPHDENLVKAEKDKLSKYLDLAFEITAMWDVDSTIIVPIVVSANGLIAKSLDQYLKRLSLDGWVKGQIQRAVVLDTARIVRRFLTLQP

SEQ ID NO: 5410 - protein, 1216 aa, Erannis defoliaria
MITRSKAIRNAAEQHSARPPSPPAPSSPSASSGEDVFVTPRESSASSTDSDVSGPRTPAPPPPARRGRPPLPARLGPAGLPASRPALAAGGVVRRMRWSQTNNENCMRAYYRATEVGTNLTAYRVRMLSLFQALEPTVTVSAQRLSDQVRAIQRLNLLDQSLLDRLRLEAQSARSTPVSTRDSHVASSAPTLASMPTSVATLATPADPVVDEGDDTGMSVTTQVSEQLRRALEDAISQYRFALNSRPRLPRLPTHRRNLALMGALNALLAPYLRASEDLTDTHSILYCGAVAACRVARVKFPDSNRAPRTAGDVPAWQARIERRISTFRTLIAKLICFSRGNNRPRVMRFVTQAFAGTGIRPQQYMASVTERIDYLKQKVYAWASRIRRYRERVDRYWQNRVFQSDQRKVYRNWEGAEQRVSDGHLPDANAMTNFWRGIWSVPVEHTEGDWMRVVERECESIEPMGSILIDPVDVSCAIRTAQNWKSPGPDGLHNFWIKWFRCSHDRLATQFQEALELGSLPSFMTTGVTFLLHKSGSTTEPKNYRPITCLPTIYKLLTSILSTKINTHIVANNVLAPTQNGCRVGSRGTKELLLIDMAISQQVRRNKGALSAAWIDYKKAYDSVPHSWLERILELYKIDTTLKSFLSACMRQWTTVLRQPGGGNDSFDPQDLIWIERGIFQGDSLSPSWFCLALNPLSTLLKDSGLGYRLRRGGEVISHLLYMDDLKLFAPKHQDLLELLKTTQVFSSAIRMEFGVDKCAVMRVQRGKVVNSPDLQLSEIMTLRSLSEAETYKYLGMSESLGISVVDIKKSVKERFFCRLAKVLNSLLSGGNKARAFNGWVMPLLIYSFGILRWTQTELDALDRRVRQLLTAHRMLHPRSSVMRLYIPRKWGGRGFLNAKNLHNREVCSLRDYFLNNECGMHRDVVTVDKGLTPLSLANENWRRPSVLSTDDRKDVWKSKELHGRFYRALSGPDVDLLASVNWLRFGDLFGETEGFACAIADEVIKTNNYRKYIMKDGTVDICRACHRPGESLRHIISGCSHLANGEYLHRHNQVARIIHQQLALQYGLVESEVPYYKYAPAPVLENGRALLYWDRSIITDRTIVANKPDIVMVDRSQRRAVLVDVTIPHDENLVKAEKDKLSKYLDLAFEITAMWDVDSTIIVPIVVSANGLIAKSLDQYLKRLSLDGWVKGQIQKAVVLDTARIVRRFLTLQP

SEQ ID NO: 5411 - protein, 1215 aa, Erannis defoliaria
MITRSKSTQAGNDNNARPPPPPAPSSPSASSGDDEFHTPRESSASSSGSDVSGPRTPAPRPPARRGRPPLPARLGPAGQPASRPALAAGGVVRRMRWSQINNENCMRAYYGATEGGINLSAYRVRMLPLFQALEPTVTVSAQRLSDQVRAIQRLNLLDQSLLDRLRLEAHSARPTPASTRDSHVASSAPTLASVPTSAATLATPADPVVDEGDCTSMIVSSQVSEQLRRTLEDAIGQYRFALNSRPRLPRLPTHRRNLALMGALNALLAPYLRASEDLTDTHSILYCGAIAACRVARVKFPDTNRAPRPAGDVPAWQLRIERRISTFRTLIAKLICFSRGNNRPRVMRFVTQAFAGTGIRPQQYMANVTERIDYLKQKVYAWANRIRRYRERVDRYWQNRLFQSDQRKVYRNWEGNEQRVSDGQLPDASAMTNFWRGIWSVPVEHTEGDWMRVVERECESIEPMGSILIDPVDVSCAIRTAQNWKSPGPDGLHNFWIKWFRCSHDRLATQFQEALELGSLPSFMTTGVTFLLHKSGSTTEPKNYRPITCLPTIYKLLTSILSTKINAHIVANNVLAPAQNGCRVGSRGTKELLLIDMAISQQVRRNKGALSAAWIDYKKAYDSVPHSWLERILELYQIDTTLKSFLGACMRQWTTVLRQPGGGNGSSDSQDLIRIERGIFQGDSLSPSWFCLALNPLSTLLKDSGLGYRLRRGGEVISHLLYMDDLKLFAPKHQDLLELLKTTQVFSSAISMEFGVDKCAVMRVQRGKVVNSPDLQLSEIMTLRSLSEAETYKYLGMSESLGISVVDIKKSVKERFFCRLTKVLNSLLSGGNKARAFNGWVIPLLIYSFGILRWTQTELDALDRRVRQLLTAHRMLHPRSSVMRLYIPRKWGGRGFLNAKNLHNREVCSLRDYFLNNECGMHRDVVTVDKGLTPLSLANENWRTPSVLSTDDRKEVWKSKELHGRFYRVLSGPDVDLLASVNWLRFGDLFGETEGFACAIADEVIKTNNYRKYIMKDGTVDICRACHRPGESLRHIISGCSHLANGEYLHRHNQVARIIHQQLALQYGLVESEVPYYKYAPAPVLENGRALLYWDRSIITDRTIVANKPDIVMVDRSQRRAVLVDVTIPHDENLVKAEKDKLSKYLDLAFEITAMWDVDSTIIVPIVVSANGLIAKSLDQYLKRLSLDGWVKGQIQKAVVLDTARIVRRFLTLQP

SEQ ID NO: 5412 - protein, 1215 aa, Biston betularia
MWTRSRTAAASGLHDAHIPSPPAPSTPSASSGDEEFATLLATSASSSSSDVSGPRTPAPPPPARRGRPPLPARLGPAGQSASRSALAAGGVVRRMRWSQTNNENCMRAYYGATEGGINLSAYRVRMLPLFQALEPTVAVSTQRLSDQVRAIQRLQLLDQSVLDRLRLEALPARPTPVSTRDSPVASSAPTLVSVPTSMATLDTPTDPVVDVGECTSMGVCSQVSEHLRRTLEDAICQYRFAPDSRPRLPRLPTHRRNLALMGALNALLAPYLRASEDLTDTHSILYCGAIAACRVARVKFPDTNRAPRPAGGVPAWQLRIERRISTFRTLIAKLICFSRGNNRPRVMRFVTQAFAGTGIRPQHYLASVTERIDYLKQKVYAWANRIRRYRERADRYWQNRVFQSDQRKVYRDWEGTGQRVSDRQLPDTSVMTEFWRGIWSLPVEHTEGDWMRVVERECESIESMGSVLIDPVDVSCAIRTAQNWKSPGPDGLHNFWIKWIRCSHDRLATQFQEALELGSLPCFMTTGVTFLLHKTGSTTEAKNYRPITCLPTIYKLLTSILRTKINAHVVANNVLAPAQNGCRVGSRGTKELLLIDMTISQQVRRNKGALSTAWIDYKKAYDSVPHSWLERVLELYKIDTTLKSFLGACMRQWTTVLRQPGSGDGSSEPQDLIRIERGIFQGDSLSPLWFCLALNPLSTLLKESGLGHRLRRGGEVISHLLYMDDLKLFAPKRPDLMELLKTTQVFSNAIKMEFGVDKCAVMHVQRGEVVNCPDLQLSETMTFRSLSEAETYKYLGMSESLGIAVVDIKRSVKERFFCRLTKVLNSFLSGGNKVRAFNGWVMPLLIYSFGILRWTQTELDALDRRVRQQLTTHRMLHPRSSVMRLYIPRKLGGRGFLSTKNLHNREVCSLRDYFRDNECGMHRDVVAVDKGLTPLSLANENWRKPSVLSTEDRKEVWKSKQLHGRFYRVLTGPDVDMLASVNWLRFGDLFGETEGFACAIADEVIKTNNYRKYIMKDGTVDICRACHRPGESLRHIISGCSHLANGEYLHRHNQVARIIHQQLALQYGLVESEVPYYKYAPAPVLENGRALLYWDRSIITDRTIVANKPDIVVVDRAQRRAVLVDITIPHDENLVKAEKDKLSKYLDLAHEITAMWDVDSTIIVPIVVTVNGLIAKSLDQHLKRLSLDGWVKGQLQKAVILDTARIVRRFLTLQP

SEQ ID NO: 5413 - protein, 1215 aa, Biston betularia
MWTRSRTAAASGLHDAHIPSPPAPSTPSASSGDEEFATPLATSASSSSSDVSGPRTPAPPPPARRGRPPLPARLGPAGQSASRSALAAGGVVRRMRWSQTNNENCMRAYYGATEGGINLSAYRVRMLPLFQALEPTVAVSTQRLSDQVRAIQRLQLLDQSVLDRLRLEALPARPTPVSTRDSPVASSAPTLVSVPMSMATLATPTDPVVDVGECTSMAVCSQVSEHLRRTLEDAICQYRFAPDSRPRLPRLPTHRRNLALMGALNALLAPYLRASEDLTDTHSILYCGAIAACRVARVKFPDTNRAPRPAGGVPAWQLRIERRISTFRTLIAKLICFSRGNNRPRVMRFVTQAFAGTDIRPQHYLASVTERIDYLKQKVYAWANRIRRYRERADRYWQNRVFQSDQRKVYRDWEGTGQRVSDRQLPDTSVMTEFWRGIWSLPVEHIEGDWMRVVERECESIESMGSVLIDPVDVSCAIRTAQNWKSPGPDGLHNFWIKWIRCSHDRLATQFQEALELGSLPCFMTTGVTFLLHKTGSTTEAKNYRPITCLPTIYKLLTSILRTKINAHVVANNVLAPAQNGCRVGSRGTKELLLIDMTISQQVRRNKGALSTAWIDYKKAYDSVPHSWLERVLELYKIDTTLKSFLGACMRQWTTVLRQPGSGDGSSEPQDLIRIERGIFQGDSLSPLWFCLALNPLSTLLKESGLGHRLRRGGEVISHLLYMDDLKLFAPKRPDLMELLKTTQVFSNAIKMEFGVDKCAVMHVQRGEVVNCPDLQLSETMTFRSLSEAETYKYLGMSESLGIAVVDIKRSVKERFFCRLTKVLNSFLSGGNKVRAFNGWVMPLLIYSFGILRWTQTELDALDRRVRQQLTTHRMLHPRSSVMRLYIPRKLGGRGFLSAKNLHNREVCSLRDYFRDNECGMHRDVVAVDRGLTPLSLANENWRKPSVLSTEDRTEVWKSKQLHGRFYRVLTGPDVDMLASVNWLRFGDLFGETEGFACAIADEVIKTNNYRKYIMKDGTVDICRACHRPGESLRHIISGCSHLANGEYLHRHNQVARIIHQQLALQYGLVESEVPYYKYAPAPVLENGRALLYWDRSIITDRTIVANKPDIVVVDRAQRRAVLVDITIPHDENLVKAEKDKLSKYLDLAHEITAMWDVDSTIIVPIVVTVNGLIAKSLDQHLKRLSLDGWVKGQLQKAVILDTARIVRRFLTLQP

SEQ ID NO: 5414 - protein, 1240 aa, Apotomis turbidana
MCSFQYKSSAIHVDNYVSRKINNFHEKILMITRSQARRNTAAHTQNARPTPPPVSSSSSPSSSGDEFATAPDTSESSDDVRGPPPPPPRPPARRGRPPLPACLGPTGQSAPTTAPATGGVVRRMRWTQVMNENCMRAYYGATEGGINLSAYRDRMLPLFLAFDPTITVSAQRLSDQVRFIQRRKLLDDATLDRLRLEVLAARAASTPARDTPATSPVPVPASNLVPGVRQTDPEADGEDDASSVSTQANEQLRRALEEAIERYRSTPESRPRLPRLPMHKRNLALMGALDALLDPYLRASEDLADTHSIMYCGAIAACRVARVRFPDTDRAPRTAGGVPAWQVRIERRISSFRTFIAKLICFRGGNNRPRVMRYVTQAFAGTGTRPCDYMACVTERIDYLKQKVYAWASRIRRYRERVDRFQQNRLFQSDQRKVYRKWEGTNQCVSDGQLPDPTAMINFWRNIWSVPVEHTEGEWMNVVRRECEPIEAMGAVTISPDDVSCAARKAQNWKSPGPDGLHNFWIKWFRSSHERLATQFQDALELGSLPSFMTTGVTFLLHKSGSTTEAKNYRPITCLPTLYKLLTSILKTKINTHIVANNVLAFSQNGCRVGSRGTKELLLIDTTICQQVRRNRGSLSTAWIDYKKAYDSVPHSWLERILELYKIDTALRSLLGACMRQWTTVLRQPGGGDGPPGPRDLIRIERGIFQGDSLSPLWLCLALNPLSTLLKDSGLGCRLRRGGEVISHLLYMDDLKLYAPKRQDLVELLEVTENFSSAIKMEFGVDKCAVMHVQRGKVVNSANLQLSETMTLRSISEVETYKYLGMSQSLGIADGDIRQALKERFFCRLTKVLNSLLSGGNKARAFNTWVMPLLTYSFGILRWTQTELDALDTRVRQLLTTHRMRHPRSSVMRMYIPRKCGGRGFLNAKDLHNREVCSLREYFLNNECGIHRDVVAVDKGLTSLSLANENWRRPKVLSTDDRRAVWKSKELHGRFYKALTGPDVDLLASVNWLRFGDLFGETEGFVCAIADEVMMTNNYRRYILKDGTVDICRACRRPGESLRHIISGCSHLANGEYLHRHNQVARIIHQQLALQYGLVGSEVPYYKYAPMPVLENGRATLYWDRSIITDRTIVANKPDIVLVDRSKRQAVLVDITIPHDENLVKAEKDKLSKYLDLAHEVTAMWDVDSTIIVPIVVSANGLIAKSLDKHLKRLSLDGWIKGQIQKAVLLDTARIVRRFLSLQP

SEQ ID NO: 5415 - protein, 1117 aa, Apotomis turbidana
MRWTQVMNENCMRAYYGATEGGINLSAYRDRMLPLFLAFDPTITVSAQRLSDQVRFIQRRKLLDDATLDRLRLEVLAARAASTPARDTPATSPVPVPAPNLVPGVRQTDPEADGEDDASSVSTQANEQLRRALEEAIERYRFTPESRPRLPRLPMHKRNLALMGALDALLDPYLRASEDLADTHSIMYCGAIAACRVARVRFPDTDRAPRTAGGVPAWQVRIERRISSFRTFIAKLICFRGGNNRPRVMRYVTQAFAGTGTRPCDYMACVTERIDYLKQKVYAWASRIRRYRERVDRFQQNRLFQSDQRKVYRKWEGTNQCVSDGQLPDPTAMINFWRSIWSVPAEHTEGEWMNVVRRECEPIEAMGAVTISPDDVSCAARKAQNWKSPGPDGLHNFWIKWFRSSHERLATQFQDALELGSLPSFMTTGVTFLLHKSGSTTEAKNYRPITCLPTLYKLLTSILKTKINSHIVANNVLAFSQNGCRVGSRGTKELLLIDTTICQQVRRNRGSLSTAWIDYKKAYDSVPHSWLERILELYKIDTALRSLLGACMRQWTTVLRQPGGGDGPPGPRDLIRIERGIFQGDSLSPLWFCLALNPLSTLLKDSGLGCRLRTGGEVISHLLYMDDLKLYAPKRQDLVELLEVTENFSSAIKMEFGVDKCAVMHVQRGKVVNSANLQLSETMTLRSISEVETYKYLGMSQSLGIADGDIRQALKERFFCRLTKVLNSLLSGGNKARAFNTWVMPLLTYSFGILRWTQTELDALDTRVRQLLTTHRMRHPRSSVMRMYIPRKCGGRGFLNAKDLHNREVCSLREYFLNNECGIHRDVVAVDKGLTSLSLANENWRRPKVLSTDDRRAVWKSKELHGRFYKALTGPDVDLLASVNWLRFGDLFGETEGFVCAIADEVMMTNNYRRYILKDGTVDICRACRRPGESLRHIISGCSHLANGEYLHRHNQVARIIHQQLALQYGLVGSEVPYYKYAPMPVLENGRATLYWDRSIITDRTIVANKPDIVLVDRSKRQAVLVDITIPHDENLVKAEKDKLSKYLDLAHEVTAMWDVDSTIIVPIVVSANGLIAKSLDKHLKRLSLDGWIKGQIQKAVLLDTARIVRRFLSLQP

SEQ ID NO: 5416 - protein, 1133 aa, Apotomis turbidana
MRWTRVMNENCMRAYYGATEGGINLSAYRDRMLPLFQVFDPTIAVSAQRLSDQVRFIQRRKLLDDATLDRLRLEVLAARAASVPARDPPATSPVPAPAPNLVPGVPLTDPEADVEDCASSVSTQANEQLRRALEEAIGRYRSAPEPRPRLPRLPIHKRNLALMGALDALLDPYLRASEDLADTHSIMYCGAIAACRVARVRFPDTDRAPRTAGGVPAWQVRIERRISSFRTLIAKLICFRGGNNRPRVMRYVTQAFAGTGTRPCDYMAMACVTERIDYLKQKVYAWASRIRRYRERVDRFQQNRLFQSDQRKVYRKWEGADQCVSDGQLPDPTAMINFWRSIWSVPVEHTEGEWMNVVRRECEPIEAMGAVTISPDDVRCAARTIQNWKSPGPDGLHNFWIKWFRSSHERLATQFQDALELGSLPSFMTTGVTFLLHKSGSTTEAKNYRPITCLPTLYKLLTSILRTQINTHIVANNVLAFSQNGCRVGSRGTKELLLIDTTICQQVRRNRGSLSTAWIDYKKAYDSVPHSWLERILELYKIDTALRSLLGACMRQWTTVLRQPGGGDGPPGPQDLIRIERGIFQGDSLSPLWFCLALNPLSTLLKDSGLGCRLRRGGEVISHLLYMDDLKLYAPKRQDLVELLEVIEAFSSAIKMEFGVNKCAVMHVQRGKVVNSANLQLSETMSLRSISEVETYKYLGMSQSLGIADGDIRQALKERFFCRLTKVLNSLLSGGNKTRAFNAWVMPLLTYSFGILRWTQTELDALDTRVRQLLTTHRMRHPRSSVMRMYIPRKCGGRGFLNAKDLHNREVCSLREYFLNNECGIHRDVVAVDKGLTSLSLANENWRRPKVLSCDDRRAVWKSKELHGRFYKALTGPDVDLLASVNWLRFGDLFGETEGFVCAIADEVMMTNNYRRYILKDGTVNICRACHRPGESLRHIISGCSHLANGEYLHRHNQVARIIHQQLALRYGLVGSEVPYYKYAPMPVLENGRATLYWDRSIITDRTIVANKPDIVLVDRSKRQAVLVDITIPHDENLVKAEKDKLSKYLDLAHEVTAMWDVDSTSIVPIVVSANGLIAKSLDKHLKRLARWLDQGSDTEGGTPGHGAHCQEVPLSAALTTGSLSPAPLPAAP

SEQ ID NO: 5417 - protein, 1208 aa, Notocelia uddmanniana
MITRSKARLEKKASNPQSACPPPSPASSSSASSSEEFATAPDTSSSSSSDECGPPPPPPRPPAQRGRPPLPARLGPAGHPAPPTAPATGGIVRRMQWSQSINENCMRAYYGATDGGTNLSAYRDRILPLFRALEPAISVSAQRLSDQVRVIQGLKRLDDATLDRLRLEALSARAASASARNPSATLPAPVPALDTAPGADPSADEGCANQSVSSQAYEQLRRALEEAITQYRSTPNSRPRLPRLPVNRRNLALMGALNDLLVPYLGASEDLIDTHSIMYCGAIAACRVARVKFPDADRAPRTAGSVPTWQVRIERRVDTYRTLIAKLICFRGGNSRPRVMRFVNQAFAGTGIRPRDYMTCVTERIDFLKQKVYAWASRIRRYRERLDRYQQNRLFQSDQRKVYRKWDGTDHRVSDGQRPDATAMVNFWRSIWSVPVEHNEGAWMGVVERECESIEPMGSVTISPADVSCAIRTAPNWKSPGPDGLHNFWLKWFRCSHARLAAQFQQAIELGSLPPPLTTGVTSLLYKSGSTTEAKNYRPITCLPTLYKLLTSILRAKINTHIVANNILAPAQNGCRVGSRGTKELLLIDMTICQRVRRNRGTLSAAWIDYKKAYDSVPHSWLRRILELYKVDAVLRSFLVACMGQWTTVLRQPGGGEGPSGPQDSIRIERGIFQGDSLSPLWFCLALNPLSTLLKDSGLGCQLRREGEVISHLLYMDDLKLFAPNKHDLLELLKTTEAFSSAIKMEFGVDKCAAMHVQRGKVVNSTNLQISETMDLRSLSEAETYKYLGMSQSLGIEGGDIKRAVKERFFCRLTKVLNSFLSGGNRMRAFNAWVMPLLTYSFGILRWTQTELDFLDRRVRVLLTAHRMLHPRSSVMRLYIPRKFGGRGFLNAKDLHNREVCSLRDYFLNSECGMHRDVVAVDASFTPLSMANEKWRRLKVLSTEDRRAVWKSKELHGRFYKALTGPNVDLLASVNWLRFGDLFAETEGFVCAIADEVIMTNNYRRYILKDGTVDICRACRRPGESLRHIISGCGHLANGEYLHRHNLVAKIIHQQLALLYGLVDFEVPYYKYTPAPVLENGRATLYWDRSVITDRTIIANKPDIVLTDRLKRQAVLVDITIPHDENLVKAEKDKVSKYLDLAHEVTAMWDVDSTIIVPIVVSANGLIAKSLDQHLKRLSLDGWVKGQMQKAVLLDTARIVRRFLSLSP

SEQ ID NO: 5418 - protein, 1209 aa, Notocelia uddmanniana
MITRSQSRRQPADTTSARPPPLPVSSDSSPSSSGDEFATAHETSESSDESGPPPPPPRPPARRGRPPLPARLGPLGHPAPSTAPAAGGIVRRMQWSQSINENCMRAYYGATDGGTNLSAYRVRMLPLFRALEPAISVSAQRLSDQVRVIQRLKRLDDATLDRLRLEALSARAAPVSARDPPATLPAPMPVPDTATGAPRVDLSTDGDCANQSVSTQADGQLRRALEEAITRYRSTTSSRPRLPRLPVNRRNLALMGALNDLLVPYLRASEDLIDTHSIMYCGAIAACRVARVKFPDADRAPRTAGSVPTWQVRIERRIDTYRTLIAKLICFRGGNSRPRVMRFVNQAFAGTGVRLRDYMTCVTERIDFLKQKVYAWASRIRRYRERVDRYQLNRLFQSDQRKVYRKWEGTDHRVSDGRRPDATAMVNFWRSIWSVPVEHTEGAWMDVVKRECESIEPMGSVTVSPEDVSCAIRTAPNWKSPGPDGLHNFWLKWFRCSHARLAAQFQQALELGSLPPPLTTGVTSLLYKSGSTTEAKNYRPITCLPTLYKLLTSILRAKINTHIVANNILAPAQNGCRVGSRGTKELLLIDMTICQRVRRNRGTLSTAWIDYKKAYDSVPHSWLRRILELYKVDAVLRSFLVACMGQWTTVLRQPGGGEGPSGPQDSIRIERGIFQGDSLSPLWFCLALNPLSTLLKDSGLGCQLRREGEVFSHLLYMDDLKLFAPNKHDLLELLNTTEAFSSAIKMEFGVDKCAAMHVQRGKVVNSTNLQISETMDLRSLSEAETYKYLGMSQSLGIEGGDIKRAVRERFFCRLTKVLNSFLSGGNKVRAFNAWVMPLLTYSFGILRWTQTELDFLDRRVRVLLTAHRMLHPRSSVMRLYIPRKLGGRGFLNAKDLHNREVCSLRDYFLNSECGMHRDVVAADASFTPLSMANENWRRFKVLSTEDRRAVWKSKELHGRFYKALTGPDVDLLASVNWLRFGDLFGETEGFVCAIADEVIMTNNYRKHILKDGTVDICRACRRPGESLRHIISGCSHLANGEYLHRHNLVARIIHQQLALLYGLVDFEVPYYKYTPAPVLENGRATLYWDRSVITDRTIVANKPDIVLTDRLKRQAVLVDITIPHDENLVKAEKDKVSKYLDLAHEVTAMWDVDSTIIVPIVVSVNGVIAKSLDQHLKRLSLDGWVKGQIQKAVLLDTARIVRRFLSLSP

SEQ ID NO: 5419 - protein, 1210 aa, Notocelia uddmanniana
MITRSQTRRVQASQQSARPSPSPASSSSASASSEEEFATAPDTSSSSSDECGPPPPPPRPPARRGRPPLPARLGPAGHPVPHTAPATGGVVRRMQWSPSMNENCMRAYYGATDGGTNLSAYRVRMLPLFQALEPAISVSAQRLSDQVRVIQRLKRLDDATLDRLRLEALSARAASVSARNPPATLPAPVPAPDTAPGASRVDPSADGDCADQSVSTQAHEQLRRALDEAITRYRSTPNSRPRLPRLPVNRRNLALMGALNDLLDPYLRASDDLIDTHSIMYCGAIAACRVARVKFPDADRATRTAGGVPAWQVRIERRINTFRTLIAKLICFRGGNNRPRVMRFVNQAFAGTGVRPRDYMACVTERIDFLKQKVYAWASRIRRYRERVDRYQQNRLFQSDQRKVYRKWEGTDHRVCDGQRPDATAMVNFWRSIWSVPIEHTEGAWIGVVERDCESIEPMGSVTISPEDVSCAIRTAPNWKSPGPDGLHNFWLKWFRCSHERLATQFQQALELGSLPPPLTTGVTSLLYKSGSTTEAKNYRPITCLPTLYKLLTSILRAKINMHIVTNNILAPAQNGCRVGSRGTKELLLIDMTICQRVRRNRGTLSASWIDYKKAYDSVPHSWLRRILELYKVDAALRSFLSACMGQWTTVLRQPGGGDGPSGPQDSIRIERGIFQGDSLSPLWFCLALNPLSTLLQDSGLGCQLRRGGEVISHLLYMDDLKLFAPNRQDLLELLKTTEVFSSAIKMEFGVDKCAVMHVQRGKVVNSTNLQLSETMSLRSLSEAETYKYLGMSQALGIEGEGIKQAVKERFFCRLTKVLNSFLSGGNKARAFNAWVMPLLTYSFGILRWTQTELDALDRRVRVLLTAHRMLHPRSSVMRLYIPRKCGGRGFLNAKDLHNREVCSLRDYFLNSECGMHRDVVAVDASFTPLSMANENWRRFKVLSTEDRKAEWKSKELHGRFYRALTGPDVDLLASVNWLRFGDLFGETEGFVCAIADEVIMTNNYRKYILKDGTVDICRACRRPGESLRHIISGCGHLANGEYLHRHNLVARIIHQQLALSYGLVDFEVPYYKYLPAPVLENGRATLYWDRSIITDRTIVANKPDIVLIDRSKRQAVLVDITIPHDENLVKAEKDKVSKYLDLAHEVTAMWDVDSTIIVPIVVSANGLIAKSLDQHLKRLSLDGWVKGQIQKAVLLDTARIVRRFLSLSP

SEQ ID NO: 5420 - protein, 1206 aa, Notocelia uddmanniana
MITRTRSRAAQRARPPSPPAPSSSSPSSSGDEFATAPDTSESSCDERGPPSPPPRPPARRGRPPLPARLGPVGHSALPTAPAAGGVVRRMRWTQEMNENCMRAYFGATEGETNLSAYRVRMLPLFQALEPTITVTAQRLSDQVRVIQRLKRLDDATLDRLRLEALSARTGSALARDPPTTSPAPVPTPDMAPGVPRVDPSVDEDCANQTVSTQANEQLRRALEEAITRYRSTPNSRPRLPRLPVNRRNLALMGALNDLLDPYLRASEDLIDTHSILYCGAIAACRVARVKFPDAACAPRTAGGVPAWQVRIERRINTFRTLIAKLICFRGGNDRPRVMRFVNQAFAGTGVRPCDYVTCVTERIDFLKQKVYAWASRIRRYRERVDRYQQNRLFQSDQRKVYRKWEGTDHRVCDGQRPDATAMGNFWRSIWSVPVEHTEGAWIGVVERECESIEPMGSVTISPEDISCAIRTAPNWKSPGPDGLHNFWLKWFRCSHERLATQFQQALELGSLPHLLTTGVTSLLYKSGSTTEAKNYRPITCLPTLYKLLTSILRAKINTHIVANNILAPAQNGCRVGSRGTKELLLIDMTICQRVRRSRGALSAAWIDYKKAYDSVPHSWLRRVLELYKVDAALRSFLSACMGQWTTVLRQPGGGDGSSGPQDSIRIERGIFQGDRLSPLWFCLALNPLSTLLKDSGLGCQLRRGGEVISHLLYMDDLKLFAPNRQDLLELLNTTEVFSSAIKMEFGVDKCAVMHVQRGKVVNSTNLQLSETMSLRSLSEAETYKYLGMSQSLGIEGEGIKQAVKERFFCRLTKVLNSFLSGGNRVRAFNAWVMPLLTYSFGILRWTQTELDALDRRVRVLLTAHRMLHPRSSVMRLYIPRKCGGRGFLNAKDLHNREVCSLRDYFLNSECGMHRDAVAVDASFTPLSMANENWRRFKALSTEDRKAEWKSKELHGRFYKALTGPDVDLPASVNWLRFGDLFGETEGFVCAIADKVIMTNNYRKYILKDGTVDICRACRRPGESLRHIISGCGHLANGEYLHRHNLVARIIHQQLALSYGLVNFEVPYYKYLPAPVLENGRATLYWDRSIITDRTIVANKPDIVLIDRSKRQAVLVDITIPHDENLVKAEKDKVSKYLDLAHEVTAMWDVDSTIIVPIVVSANGLIAKSLDQHLKRLSLDGWVKGQIQKAVLLDTARIVRRFLSLSP

SEQ ID NO: 5421 - protein, 934 aa, Notocelia uddmanniana
MGALNDLLDPYLRASDDLIDTHSIMYCGAIAACRVARVKFPDADRATRTAGGVPAWQVRIERRINTFRTLIAKLICFRGGNDNMACVTERIDFLKQKVYAWASRIRRYRERVDRYQQNRLFQSDQRKVYRKWEGTDHRVCDGQRSDATAMVNFWRSIWSVPVEHTEGAWIGVVERDCESIEPMGSVTISPEDVSCAIRTAPNWKSPGPDGLHNFWLKWFRCSHERLATQFQQALELGSLPPPLTTGVTSLLYKSGSTTEAKNYRPITCLPTLYKLLTSILRAKINTHIVTNNILAPAQNGCRVGSRGTKELLLIDMTICQRVRRNRGTLSASWIDYKKAYDSVPHSWLRRILELYKVDAALRSFLSACMGQWTTVLRQPGGGDGPSGPQDSIRIERGIFQGDSLSPLWFCLALNPLSTLLQDSGLGCQLRRGGEVISHLLYMDDLKLFAPNRQDLLELLKTTEVFSSAIKIEFGVDKCAVMHVQRGKVVNSTNLQLSETMSLRSLSEAETYKYLGMSQALGIEGEGIKQAVKERFFCRLTKVLNSFLSGGNKARAFNAWVMPLLTYSFGILRWTQTELDALDRRVRVLLTAHRMLHPRSSVMRLYIPRKCGGRGFLNAKDLHNREVCSLRDYFLNSECGMHRDVVAVDASFTPLSMANENWRRLKVLSTEDRKAEWKSKELHGRFYRALTGPDVDLLASMNWLRFGDLFGETEGFVCAIADEVIMTNNYRKYILKDGTVDICRACRRPGESLRHIISGCSHLANGEYLHRHNLVARIIHQQLALSYGLVDFEVLYYKYLPAPVLENGRATLYWDRSIITDRTIVANKPDIVLIDRSKRQAVLVDITIPHDENLVKAEKDKVSKYLDLAHEVTAMWDVDSTIIVPIVVSANGLIAKSLDQHLKRLSLDGWVKGQIQKAVLLDTARIVRRFLSLSP

SEQ ID NO: 5422 - protein, 1210 aa, Boloria selene
MITRSQARKTAVHTSNARPTPPPVSSFSSPSSSGDEFATAPDTSESSDDERGTPPPPPRTPARRGRPPLPARLGPTGQPAPTMAPATGGVVRRMRWTQVMNENCMRAYYGATEGGINLSAYRDRMLPLFLAFDPTIAVSAQRLSDQVRFIQRRKLLDDATLDRLRLEVLAARAAFTPALGPPATSPAPVPTPNLVPGVPLADHGAGEKECASGVNTQANEQLRRALEEAIGRYRSTPESRPRIPRLPMHKRNLALMGAMDALLDPYLRASEDLTDTHSIMYCGAIAVCRAARVRFPDTDRAPRTTAGVPAWQIRIERRVGSFRTLIAKLICFREGNSRPRVMRYVTQAFAGTGTRPCDYMACVTERIDYLKQKVCAWAGRIRRYRVRVDRFQQNRLFQSDQRKVYRRWEGTNQCVGDGQLPDPSAMTNFWRSIWSVPVEHTEGEWMNVVGRECESIETMGAVTISPDDVGCAARATQNWKSPGPDGLHNFWIKWFRSSHERLAAQFQHALELGSLPSFMTTGVTFLLHKSGSTTEAKNYRPITCLPTLYKLLMSILRTKINTHIIANNVLAFSQNGCRVGSRGTKELLLIDTTICQQVRRNRGSLSAAWIDYKKAYDSVPHSWLERVLVLYKIDTTLRSLLGACVRRWTTVLYQPGGGDGLSGPQDLIRIKRGIFQGDSLSPLWFCLALNPLSTLLKDSGLGCRLRRGGEVISHLLYMDDLKLYASKRQDLVELLEVTETFSSAIKMEFGVDKCAIMHVQRGKVVNSANLQLSDIISLRSISEVETYKYLGMSQSLGIADGDIRQALRQRFFCRLTKVLNSLLSGGNKARAFSAWVMPLLTYSFGILRWTQTELDALDTRVRQLLTAYRMRHPRSSVMRLYIPRKCGGRGFLNAKDLHNREVCSLREYFLNNECGIHRDVVAVDKGLTSLSLANENWRRPKVLSTDDRRTVWKCKELHGRFYKALTGPDVDLLASVNWLRFGDLFGETEGFVCAIADEVMMTNNYRRYILRDGTVDICRACRRPGESLRHIISGCSHLANGEYLHRHNQVARIIHQQLALRYGLVGSEVPYYKYAPLPVLENGRATLYWDRSIITDRTIVANKPDIVLVDRSKRQAMLVDIAIPHDENLVKAEKDKLSKYLDLAHEVTAMWDVDSTIIVPLVVSANGLIAKSLDKHLKRLSLDGWIKGQMQKAVLLDTARIVRRFLSLQP

SEQ ID NO: 5423 - protein, 1207 aa, Crocallis elinguaria
MITRSRNKAGTASARQSPPPASSSPSSSSGDEYGTPLDTSASSDEDGPPSPPPPPPPARRGRPPLPARLGPAGHSVPRAAPATGGIVRRMRWTSDMNENCMRAYYGATEGGTNMSAYCDRMLPLFQTLEPSVAVSAQRLSDQVRAIQRLKLLDESVLDRLRLEALPIRATSASTRDLSVAPPVLAPLPAPSSVATRIDPVVDEDDCANISVSTQVNEQLRRALEDAILDYQYTPDSRPRLPRLPTNRRNLALMGALNVLLAPYLRASENLFDTHSIMYCGAIAVCRVARVKFPDADRAPRTAGSAPAWQVRIERRINTFRTLIAKLVCFSRGNNRPRVMRFVNQAFAGTGIRPQNYMAGVTERIDFLKQKIYAWVNRIRRYRERVDRYHQNRLFESDQRKVYRNWEGTDQHVSDGQLPDTNAMINFWRGIWSVPVEHTEGDWMRTVEQSCESIETMGSVTIDPIDVSCAIRTAQNWKSPGPDGLHNFWIKWIRCSHECLAVQFQEALELGSLPCFLTTGVTSLLHKSGSTTEAKNYRPITCLPTLYRLLTSILRVKINSHVVANNILAPAQNGCRVGSRGTKELLLIDTAICQRVRRNKGALSAAWIDYKKAYDSVPHSWLERILELYKIDATLRSFLSMCMRQWTTVLRQPGSGNSPSGPENFIKIERGIFQGDSLSPLWFCLALNPLSTLLRDSSLGCQLRREGEIISHLLYMDDLKLFAPKRPDLMELLKITEIFSNAIKMEFGVDKCAVMHVQRGKVVNSDNLQLSETMTLRSLSEAETYKYLGMSQSLGIAVGDIKQSVKERFFCRLTKVLNSLLSGGNKARAFNGWVMPLLIYSFGILKWTQTELDSLDRRVRQLLTYHRMLHPRSSVMRLYIPRKWGGRGFLNAKTLHNREVCSLREYFLNNECGMHRDVVAVDRNLTPLSLANENWRKPVVMTTEDRKDVWKGKELHGRFYRALTGSDVDLLASVNWLRFGDLFGETEGFVCAIMDEVIKTNNYRKYIMKDGTVDICRACRRPGESLRHIISGCSHLANGEYLHRHNLVARIIHQQIALQYGLVESEVPYYKYAPAPVLENGRALLYWDRSIITDRTIVANKPDIVLVDRSQRRAVLVDITVPHDENLVKAEKDKLSKYLDLAHEVTAMWNVDSTIIVPIVVSANGLVAKSLDQHLKRLSLDGWIKGRMQKAVLLDTARIVRRFLTLQP

SEQ ID NO: 5424 - protein, 1212 aa, Pammene fasciana
MITRSKTRLQQASPPNARPPSSPASSVSSPSSSGDEFATAPDTSESSDERGPPPPPPRPPARRGRPPLPARLGLAGHPVPPRAPAAGGIVRRMRWTPAMNENVMRAYYGATEGGTNLCAYRDRILPLFQALEPTIDTTAQRLSDQVRVIQRLKRLDDATLDRLRLEALSARATSTSARDPPATSPDPLPAPDLASGAPRIDPSADEEEIANQSLSSTANEQLRRTLEEAITQYRSTNITRPRLPRLPMNRRNLALMGALNDLLDPLLRTSKDLDDTHSIMYCGAIAACRVARVKFPDAERAPRTAGGVPAWQVRIERRINSFRTLIAKLICFRGGNNRPRVMRFVHQAFAGTDIEPRDYMANVTERIDFLKQKVYAWASRIRRYRERVDRFRQNRLFQSDQRKVYRRWEEADPRVSDVRLPDATAMTDFWRSIWSVPVEHTEGEWMSVVERECESIEPMGAITISPDDVSCAIRTAQNWKSPGPDGLHNFWLKWFRCSHSRLATQFQQALELGSLPPSLTTGVTFLLYKSGSTTEAKNYRPITCLPTLYKLLTSILRAKINAHMVANNILASTQNGCRVGSRGTKELLLIDMTICQRVRRNRGALSAAWIDYKKAYDSVPHSWLERILELYKIDAALRSFLGACMRQWTTVLRQPGGGNDPPDPQDFIRIERGIFQGDSLSPLWFCLALNPLSTLLKDSGLGCRLRREGEVISHLLYMDDLKLFAPNNRDLLELLKTTEVFSNSIKMEFGVDKCAVMHVQRGKVVNSTNLQLSETMTFRSISESETYKYLGMSQSLGIEDAGIKQALRERFFGRLTKVLNSLLSGGNKVRAFNAWVMPLLTYSFGILRWTQTELDALDRRVRLLLTTHRMLHPRSSVMRLYIPRKCGGRGFLNAKNLHNREVYNLRNYFLNNECGMHRDVVAIDKGLTPLSLANENWRKPVVLSTEDRKAVWKSKELHGRFYGALTGPDVDLLASVNWLRFGDLFGETEGFACAIADEVIMTNNYRRYILKDGTVDICRACRRPGESLRHIISGCSHLANGEYLHRHNLVARIIHQQLALLYGLVAHEVPYYKYTPAPVLENGRATLYWDRSIITDRTIVANKPDIVVIDRPQRRAMLVDITVPCDVNLVKAEKDKSSKYLDLAHEVTAMWEVDSAIIVPIVVSANGLIAKSLDQHLERLSLRGCGWIKGQIQRAVILDTARIVRRFLSLRP

SEQ ID NO: 5425 - protein, 965 aa, Pammene fasciana
MNRRNLALMGALNDLLDPFLRTGKDLDDTHSIMYCGAIAACRVARVKFPDAERAPRTAGGVPAWQVRIERRINSFRTLIAKLICFRGGNNRPRVMRFVHQAFAGTDIEPRDYMANVTERIDFLKQKVYAWASRIRRYRERVDRFRQNSLFQSDQRKVYRRWEEADPRVSDVRLPDATAMSDFWRSIWSAPVEHTEGEWMSVVERECETIEPMGAITISPDDVSCAIRTAQNWKSPGPDGLHNFWLKWFRCSHSRLATQFQQALELGSLPPSLTTGVTFLLYKSGSTTEAKNYRPITCLPTLYKLLTSILRAKINAHMVANNILASAQNGCRVGSRGTKELLLIDMTICQRVRRNRGALSAAWIDYKKAYDSVPHSWLERILQLYKIDAALRSFLGACMRQWTTVLRQPGGGDDPPGPQDFIRIERGIFQGDSLSPLWFCLALNPLSTLLKDSGLGCRLRREGEVISHLLYMDDLKLFAPNNRDLLELLKTTEVFSSSIKMEFGVDKCAVMHVQRGKVVNSTNLQLSETMTFRSISESETYKYLGMSQSLGIEDVGIKQALRERFFGRLTKVLNSLLSGGNKVRAFNAWVMPLLTYSFGILRWTQTELDALDRRVRQLLTTHRMLHPRSSVMRLYIPRKCGGRGFLNAKNLHNREVYNLRNYFLNNECGMHRDVVAIDKGLTPLSLANENWRKPVVLSTEDRKAVWKSKELHGRFYGALTGPDVDLLASVNWLRFGDLFGETEGFACAIADEVIMTNNYRRYILKDGTVDICRACRRPGESLRHIISGCSHLANGEYLHRHNLVARIIHQQLALLYGLVDHEVPYYKYTPAPVLENGRATLYWDRSIITDRTIVANKPDIVVIDRPQRRAMLVDITVPCDVNLVKAEKDKSSKYLDLAHEVTAMWEVDSAIIVPIVVSANGLIAKSLDQHLERLSLRGCGWIKGQIQKAVILDTARIVRRFLTLRP

SEQ ID NO: 5426 - protein, 965 aa, Pammene fasciana
MNKRNLALMGALNDLLDPFLRTSKDLDDTHSIMYCGAIAACRVARVKFPDAERAPRTAGGVPAWQVRIERRINSFRTLIAKLICFRGGNNRPRVMRFVHQAFAGMDIEPRDYMANVTERIDFLKQKVYAWASRIRRYRERVDRFRQNRLFQSDQRKVYRRWEEADPRVSDVRLPDATAMTDFWRSIWSAPVEHTEGEWMSVVERECETIEPMGAITISPDDVSCAIRTAQNWKSPGPDGLHNFWLKWFRCSHSRLATQFQQALELGSLPPSLTTGVTFLLYKSGSTTEAKNYRPITCLPTLYKLLTSILRAKINAHMVANNILASAQNGCRVGSRGTKELLLIDMTICQRVRRNRGALSAAWIDYKKAYDSVPHSWLERILELYKIDAALRSFLGACMRQWTTVLRQPGGGDDPPGPQDFIRIERGIFQGDSLSPLWFCLALNPLSTLLKDSGLGCRLRRESEVISHLLYMDDLKLFAPNNRDLLELLKTTEVFSSSIKMEFGVDKCAVMHVQRGKVVNSTNLQLSETMTFRSISESETYKYLGMSQSLGIEDAGIKQALRERFFGRLTKVLNSLLSGGNKVRAFNAWVMPLLTYSFGILRWTQTELDALDRRVRQLLTTHRMLHPRSSVMRLYIPRKCGGRGFLNAKNLHNREVYNLRNYFLNNECGMHRDVVAIDKGLTPLSLANENWRKPVVLSTEDRKAVWKSKELHGRFYGALTGPDVDLLASVNWLRFGDLFGETEGFACAIADEVIMTNNYRRYILKDGTVDICRACRRPGESLRHIISGCSHLANGEYLHRHNLVARIIHQQLALLYGLVDHEVPYYKYTPAPVLENGRATLYWDRSIITDRTIVANKPDIVVIDRPQRRAMLVDITVPCDVNLVKAEKDKSSKYLDLAHEVTAMWEVDSAIIVPIVVSANGLIAKSLDQHLERLSLRGCGWIKGQIQKAVILDTARIVRRFLSLRP

SEQ ID NO: 5427 - protein, 1209 aa, Pammene fasciana
MITRSRTKAASTNARPPSSPASSVSSPSSSGDEFATAPDNSESSDECGPPPPPPRPPARRGRPPLPARLGLAGHPVPPRAPAAGGIVRRMRWTPAMNENVMRAYYGATEGGTNLSAYRDRILPLFQALEPTIDTTAQRLSDQVRAIQRLKRLDDATLDRLRLEALSARADSTSVRDPPATSPDPMPVPDLASGAPRIDPSTDEEYIASQSMSSTANEQLRRTLEEAITQYRSTNIPRPRLPRLPMNRRNLALMGALNDLLDPILRTSKDLDDTHSIMYCGAIAACRVARVKFPDAERAPRTAGGVPVWQVRIERRINSFRTLIAKLICFRGGNNRPRVMRFVHQAFAGTGIEPRDYMANVTERIDFLKQKVYAWASRIRRYRERVDRFRQNCLFQSDQRKVYRRWEEADPRVSDVRLPDATAMTDFWRSIWSAPVGHTEGEWMSVVERECESIEPMGAITISPDDVSCAIRTAQNWKSPGPDGLHNFWLKWFRCSHSRLATQFQQALELGSLPPSLTTGVTFLLYKSGSTTEAKNYRPITCLPTLYKLLTSILRAKINAHIVANNILASSQNGCRVGSRGTKELLLIDMTICQRVRRNRGALSAAWIDYKKAYDSVPHSWLERILELYKVDAALRSFLGACMRQWTTVLRQPGGGDDPPDPHDFIRIERGIFQGDSLSPLWFCLALNPLSTLLKDSGLGCRLRREGEVISHLLYMDDLKLFTPNNRDLMELLKTTEVFSSSIKMEFGVDKCAVMHVQRGKVVNSTNLQISETMTFRSISESETYKYLGMSQSLGIEDAGIKQALKERFFGRLTKVLNSLLSGGNKVRAFNAWVMPLLTYSFGILRWTQTELDALDRRVRLLLTTHRMLHPRSSVMRLYIPRKCGGRGFLNAKNLHNREVYNLRNYFLNNECGMHRDVVAVDKSLTPLSLANENWRKPVVLSTEDRKAVWKSKELHGRFYGALTGPDVDLLASVNWLRFGDLFGETEGFACAIADEVIMTNNYRRYILKDGTVDICRACRRPGESLRHIISACSHLANGEYLHRHNLVARIIHQQLALLYGLVDHEVPYYKYTPAPVLENDRATLYWDRSIITDRTIVANKPDIVVIDRPQRRAMLVDITVPCDVNLVKAEKDKSSKYLDLAHEVTAMWEVDSAIIVPIVVSANGLIAKSLDQHLERLSLRGCGWIKGQIQKAVILDTARIVRRVLSLRP

SEQ ID NO: 5428 - protein, 1202 aa, Campaea margaritaria
MFTRSKAATNAHLSSQSAPSSPKSTSSESEYGTPPDTSDVSGPPSPPSPPRPVRRGRPPLPARLGPVGQLAPRPAPATSSKAQRMKWTTTINTSCMRAYYGATEGGTNLTAYRNRMLSLFQTLEPTVAVSAQRLSDQVRAIHRCKLMEQSTLDRLRLEALPVSTTSTSGRDLPETPSIPGPVITSTPVASRVDTEVVDGECGNMSVSSQVTEQLRRTLEDAIRQYRFTSDSRPRLPRVPTHRRNLALMGALDALLAPYLQTSKDLIDTHSILYCGAIAVCRVARVKFPDTEQVPRTLGHAPAWQVRIQRRIDTYRTLIAKLVCFSRGNNRPRVMRFVNQAFAGTDIRPRNYMTCVTERIDFLKQKVYAWANRIRRYRERVNRYCQNRLFQSDQRKVYRNWEVTGQRMDDGQLPDVTAMINFWRGIWSVPVEHTEGDWMNIVERACDPIESMEAVSISPIDVRYAIQTAQNWKSPGPDGLQNFWIKWIRSSHSCLAMQFQEAIELGSLPSFMTTGSTTLLFKSGSTTEAKNYRPITCLPTMYKLLTSILRTKINSHIIANNILAPAQNGCRVGSRGTKELLLIDMTICQQVRRKKGALSTAWVDYKKAYDSVPHSWLVRILELYKIDTTLRSFLRTCMGQWSTVLRQPGGGDSVFGPQDFIRIERGIFQGDSLSPLWFCLALNPLSTLLQNSGLGYRLRREGEIISHLLYMDDLKLFAPKRFDLMKLLNITEEFSKSINMEFGVDKCAVMHVQRGKVVNSSNLQLSESLSLRSLSEAETYKYLGMSESLGIVDRDIKQSVKERFFCRLTKVLNSHLSGGNRARAFNGWVMPLLTYSFGILRWTQTELDALDRRVRQQLTLHRMLHPRSSVMRLYIPRKWGGRGFLNAKNLHNREVCSLREYFLNTECGMHRDVVVVDKTLTPLSLANGNWRKPSVLSTDDRKDVWKGKELHGRFYRALTGPDVDLLASVNWLRFGDLFGETEGFVCAIADEVIKTNNYRKYIMKDGTVDICRACRRPGESLRHIISGCSHLANGEYLHRHNQVARIVHQQLALQYGLVELEVPYYKYAPAPVLENGRALLYWDRSVITDRTIVANKPDIVLVDRSQRRAVLVDITVPHDENLVKAEKDKLSKYLDLAHEVTAMWDVDSTIIVPIVVSANGLVAKSLDQHLKRLSLDGWIKGRMQKAVLLDTARIVRRFLSLQP

SEQ ID NO: 5429 - protein, 1202 aa, Ennomos quercinarius
MITRSRKKQAEQSARLPPPPAPSSPSSSSGDEYGTPPDTTASSDEGGPPSPPPPPPPARRGRPPLPARLGPARPAPATGGIVRRMRWTQTMNENCMRAYYGAIEGGSNLTAYRDRMLSLFQDLEPAVAVSAQRLSDQVRAIQRCKMLDQSTLDRLRLEALPIPATSPSLRVLPAALPDQGPIMGPPPVTPRGDPAIDGEVSVSDSVSTQANEQLRSALEDAILRYRSTSTSRPRLRRLPTNRRNLVLMGALNALLAPYLRTSEDLVDTHSILYCGAIAACRVARVKFPDTDRAPRPADGAPAWQVRIEKRITTFRTLIAKLVCFSRGNHRPRVMRFVAQAFTGTGIRPQDYMACATERIDFLKQKVYAWASRIRRYRERVDRYQQNRLFQSDQRKVYRNWEGTSQRVVDGQLPDANAMNEFWRSIWSVPVEHTEGDWMRVVERVCEPIESMGSITIDPEDISCAIRTAQNWKSPGPDGLHNFWIKWIRCSYPCLAIQFQEALEAGSLPSFMTTGVTFLLHKSGSSTEAKNYRPITCLPTLYKLLTSILRTKINSHIVANNILAPAQNGCRVGSRGTKELLLIDTAICQQVRRNRGALSTAWIDYKKAYDSVPHSWLERVLELYKIDATLRSFLSACMRQWTTVLRQPGGGESVSDPQDFIRIERGIFQGDSLSPLWFCLALNPLSTLLGDSGLGYRLRRGSEIISHLLYMDDLKLFAPQRPQLIELLKITENFSNSINMEFGVDKCAVMHVHGRKVVNSTNLQLSETMTLRSLSESETYKYLGMSESLGISVGDVKRTVKERFFCRLTKVLNSLLSGGNKTRAFNGWVMPLLMYSFGILRWTQTELDALDRKVRQLLTSHRMLHPRSSVMRLYIPRKWGGRGFLNAKTLHNREVCSLRDYFLNNECGMHRDVVAVDKGLTPLSLANENWRKPVVLSTEDRRDVWKGKELHGRFYRALTGPDVDLHASVNWLRFGDLFGETEGFVCAIADEVIKTNNYRKYIMKDGTVDICRACRRPGESLRHIISGCSHLANGEYLHRHNLVARIIHQQLALQYGLVESEVPYYKYTPGPVLENGRALLYWDRSIITDRTIVANKPDIVLVDRSQRRAVLVDITIPHDENLVKAEKDKLSKYLDLAHEVTAMWNVDSTSIVPIVVSANGLIAKSLDQHLERLSLDGWIKGQIQKAVLLDTARIVRRFLTLQP

SEQ ID NO: 5430 - protein, 933 aa, Ennomos quercinarius
MFVLRLGVILYSMYVFTNKKVSKYSISYLIPIIIIIIIKKRITTFRTLIAKLVCFSRGNHRPRVMRFVTQAFTGTGIRPQDYMACVTERIDFLKQKVYAWASRIRRYRERVDRYQQNRLFQSDQRKVYRNWERTGQRVVDGQLPDANAMSEFWRSIWSVPVEHTEGDWMRVVERACEPIESMGSITIDPEDISCAIRMAQNWKSPGPDGLHNFWIKWIRCSYPCLAIQFQEALEAGSLPSFMTTGVTFLLHKSGSTTEAKNYRPITCLPTLYKLLTSILRTKINSHIVANNVLAPAQNGCRVGSRGTKELLLIDSAICQQIQRNRGALSTAWIDYKKAYDSVPHSWLERILELYKIDATLRSFLSTCMRQWTTVLHQPGRGESVSDPQDLIRIERGIFQGDSLSPLWFCLALNPLSTLLKDSGLGYRLRRGGETISHLLYMDDLKLFTPQRPQLIELLKITENFSNSIKMEFGVDKCAVMHVHGGKVVNSTNLQLSETMTLRSLSESETYRYLGMSESLGISVGDVKRTVKERFFCRLTKVLNSLLSGGNKVRAFNGWVMPLLIYSFGILRWTQTELDALDRKVRQLLTSHRMLHPRSSGMRLYIPRKWGGRGFLNAKTLHNREVCSLREYFLNNECGMHRDMVAVDKGLTPLSLANENWRKPVVLSTEDRRDVWKGKELHGRFYRALTGPDVDLHASVNWLRFGDLFGETEGFVCAIADEVIKTNNYRKYIMKDGTVDICRACRRPGESLRHIISGCSHLANGEYLHRHNLVARIIHQQLALQYGLVESEVPYYKYTPGPVLENGRALLYWDRSIITDRTIVANKPDIVLVDRPQRRAVLVDITIPHDENLVKAEKDKLSKYLDLAHEVTAMWNVDSTSIVPIVVSANGLIAKSLDQHLERLSLDGWIKGQIQKAVLLDTARIVRRFLTLQP

SEQ ID NO: 5431 - protein, 1117 aa, Cydia splendana
MRWSQTINENVMRAYYGATEGGTNLCAYRVRMLPLFQALEPTIDVTAQRLSDQVRVIQRQKRLDDSTLDRLRLEALSARAASTSARDPPATSPDPVPAPDQAPGAPRVDLSADEEEFAQSVGSTANEQLRRTLDEAVTRYRSTPDTRPRLPRLPMNRHNLALMGALNALLEPYLRTSKDLDDTHAIMYCGAIAACRVARVKFPDSERAPRTAGGAPAWQIRIERRISSFRTLIAKLICFRGGNNRPRVMRFVNQAFVGTDIRPRDYMANVTERIDFLKQKVYAWANRIRRYRERVDRFQQNRLFQSDQRKMYRKWEETNLRASDSRPPDATVMNDFWRSIWSVPVGHTEGSWMSVVERECESIEPMGAVTISPDDVSCAIRTAQNWKSPGPDGLHNFWLKWFRCSHSYLAAQFQQALELGSLPPSLTTGVTFLLYKSGSTTEAKNYRPITCLPTLYKLLTSILRAKINAHIVANNILASAQNGCRVGSRGTKELFLIDMTICQQIRRTKGALSAAWIDYKKAYDSVPHSWLGRVLELYKVDAALRAFLSACMGQWTTVLRQPGGGDDRPGPQDFIRIERGIFQGDSLSPLWFCLALNPLSTLLKDLGLGCRLRREGEVISHLLYMDDLKLFAPNTQGLLELLKTTEVFSSAINMEFGVDKCAVMHVQRGKVVNSTNLQLSETMSFRSISESETYKYLGMSQSLGIEDEGIRRSVKERFFSRLTKVLNSLLSGGNKVRAFNAWVMPLLTYSFGILRWTQTELDALDRRVRSLLTTHRMLHPRSSVMRLYIPRKCGGRGFLNAKDLHNREVYNLRNYFLNNECGMHRDVVAVDRNLTPLSLANENWRKPVVLSTADRKAAWESKALHGRFYKALTGPDVDLLASVNWLRFGDLFGETEGFACAIADEVMMTNNYRKYILKDGTVDICRACRRPGESLRHIISGCSHLANGEYLHRHNLVARIIHQQLALLYGLVDREVPYYKYLPAPVLENGRATLYWDRSIITDRTIVANKPDIVLIDRSQRRAVLADVTIPHDENLVKAEKDKSSKYLDLAHEITAMWDVDSTIIVPIVVSANGLIAKSLDQHLERLSLGGWIKGQMQKAVILDTARIVRRFLTLRP

SEQ ID NO: 5432 - protein, 869 aa, Cydia splendana
MRFVNQAFVGTDIRPRDYMANVTERIDFLKQKVYAWANRIRRYRERVDRFQQNRLFQSDQRKMYRRWEETNLRASDSRPPDATVMNDFWRSIWSVPVGHTEGSWMSVVERECESIEPMGAVTISPDDVSCAIRTAQNWKSPGPDGLHNFWLKWFRCSHSYLAAQFQQALELGSLPPSLTTGVTFLLYKSGSTTEAKNYRPITCLPTLYKLLTSISRAKINAHIVANNILASAQNGCRVGSRGTKELLLIDMTICQQIRRTKGALSAAWIDYKKAYDSVPHSWLGRVLELYKVDAALRAFLSACMGQWTTVLRQPGGGDDRPGPQDFIRIERGIFQGDSLSPLWFCLALNPLSTLLKDLGLGCRLRREGEVISHLLYMDDLKLFAPNTQGLLELLKTTEVFSSAINMEFGVDKCAVMHVQQGKVVNSTNLQLSETMSFRSISESETYKYLGMSQSLGIEDEGIRRSVKERFFSRLTKVLNSLLSGGNKVRAFNAWVMPLLTYSFGILRWTQTELDALDRRVRSLLTTHRMLHPRSSVMRLYIPRKCGGRGFLNAKDLHNREVYNLRNYFLNNECGMHRDVVAVDRNLTPLSLANENWRKPVVLSTADRKAAWESKALHGRFYKALTGPDVDLLASVNWLRFGDLFGETEGFACAIADEVMMTNNYRKYILKDGTVDICRACRRPGESLRHIISGCSHLANGEYLHRHNLVARIIHQQLALLYGLVDREVPYYKYLPAPVLENGRATLYWDRSIITDRTIVANKPDIVLIDRSQRRAVLADVTIPHDENLVKAEKDKSSKYLDLAHEITAMWDVDSTIIVPIVVSANGLIAKSLDHHLERLSLGGWIKGQMQKAVILDTARIVRRFLTLRP

SEQ ID NO: 5433 - protein, 1209 aa, Cydia splendana
MQTRSKTRAQLASPRNARPPPPSASSVSSQSSSGDEFATAPDTSESSDECGPPPPPSRPPARRGRPPLSARLGPAGHPAPPTAPAAGGVVRRMRWSQTINENVMRAYYGATEGGTNLCAYRVRMLPLFQALEPTIDVTAQRLSDQVRVIQRQKRLDDSTLDRLRLEALSARAASTSARDPPATSPDPVPAPDQAPGAPRVDLSADEEEFAQSVGSTANEQLRRTLDEAITRYRSTPDTRPRLPCLPMNRHNLALMGALNALLEPYLRTSKDLDDTHAIMYCGAIAACRVARVKFPDSERAPRTAGGAPAWQIRIERRISSFRTLIAKLICFRGGNNRPRVMRFVNQAFVGTDIRPRDYMANVTERIDFLKQKVYAWANRIRRYRERVDRFQQNRLFQSDQRKMYRKWEETNLRASDSRPPDATVMNDFWRSIWSVPVGHTEGSWMSVVERECESIEPMGAVTISPDDVSCAIRTAQNWKSPGPDGLHNFWLKWFRCSHSYLAAQFQQALELGSLPPSLTTGVTFLLYKSGSTTEAKNYRPITCLPTLYKLLTSILRAKINAHIVANNILASAQNGCRVGSRGTKELLLIDMTICQQIRRTRGALSAAWIDYKKAYDSVPHSWLGRVLELYKVDAALRAFLSACMGQWTTVLRQPGGGDDRPGPQDFIRIERGIFQGDSLSPLWFCLALNPLSTLLKDLGLGCRLRREGEVISHLLYMDDLKLFAPNTQGLLELLKTTEVFSSAINMEFGVDKCAVMHVQRGKVVNSTNLQLSETMSFRSISESETYKYLGMSQSLGIEDEGIRRSVKERFFSRLTKVLNSLLSGGNKVRAFNAWVMPLLTYSFGILRWTQTELDALDRRVRSLLTTHRMLHPRSSVMRLYIPRKSGGRGFLNAKDLHNREVYNLRNYFLNNECGMHRDVVAVDRNLTPLSLANENWRKPVVLSTADRKAAWESKALHGRFYKALTGPDVDLLASVNWLRFGDLFGETEGFACAIADEVMMTNNYRKYILKDGTVDICRACRRPGESLRHIISGCSHLANGEYLHRHNLVARIIHQQLALLYGLVDREVPYYKYLPAPVLENGRATLYWDRSIITDRTIVANKPDIVLIDRSQRRAVLADVTIPHDENLVKAEKDKSSKYLDLAHEITAMWDVDSTIIVPIVVSANGLIAKSLDQHLERLSLGGWIKGQMQKAVILDTARIVRRFLTLRP

SEQ ID NO: 5434 - protein, 1204 aa, Cydia splendana
MITRSRAKAVTTSARPPPPPASSTSSSGDEFATAPDTDGSSDESGPPPPPPRPPARRGRPPLPARLGPAGHPAPPTAPATGGIVRRMRWTRDMNENVMRAYYGATEGGTQLSAYRSRILPLFQTLEPTITVSEQRLSDQVRVIQRLKRLDDATLDRLRQEALSARADSISVRDLPATSPDPVPAPDLAPGAPRVDFCTDEGDLVSQNVSTTANEQLRRTLEEVITQYRATTNSRPRLPRLPMNRRNLALMGALNALLEPHLRTSKDLDDTHSILYCGAIAACRVARVKFPDAERAPRTVGGVPAWQARIERRISSFRTLIAKLICFRGGNNRPRVMRFVNQAFAGTDIRPRDYMANVTERIDFLKQKVYAWANRIRRYRERVERFQQNRLFQSDQRKVYRKWEETNLRTPDTQPPDATAMTDFWRSIWSMPVGHTEGSWMSVIERECESIEPMGAVTISPDDVSCAIRTAQNWKSPGPDGLHNFWLKWFRCSHSCLAAQFQQALELGSLPPSLTTGVTFLLYKSGSTTEAKNYRPITCLPTLYKLLTSILRAKINAHIVANNILASAQNGCRVGSRGTKELLLIDMTICQQIRRTKGALSAAWIDYKKAYDSVPHSWLGRVLELYKVDAALRAFLSACMGQWTTVLRQPGGGDDQPGPQDFIRIERGIFQGDSLSPLWFCLALNPLSTLLKDLGLGCRLRREGEVISHLLYMDDLKLFAPNTQGLLELLKTTEVFSSAINMEFGVDKCAVMHVQRGRVVNSTNLQLSETMSFRSISESETYKYLGMSQSLGIEDEGIRRSVKERFFSRLTKVLNSLLSGGNKVRAFNAWVMPLLTYSFGILRWTQTELDALDRRVRSLLTTHRMLHPRSSVMRLYIPRKCGGRGFLNAKDLHNREVYNLRNYFLNNECGMHRDVVAVDRNLTPLSLANENWRKPVVLSTADRKAAWENKVLHGRFYKALTGPDVDLLASVNWLRFGDLFGETEGFACAIADEVMMTNNYRKYILKDGTVDICRACRRPGESLRHIISGCSHLANGEYLHRHNLVARIIHQQLALLYDLVDREVPYYKYLPAPVLENGRATLYWDRSIITDRTIVANKPDIVLIDRSQRRAVLADVTIPHDENLVKAEKDKSSKYLDLAHEITAMWDVDSTIIVPIVVSANGLIAKSLDQHLERLSLGGWIKGQMQKAVILDTARIVRRFLSLQP

SEQ ID NO: 5435 - protein, 1117 aa, Cydia splendana
MRWSQTMNENVMRAYYGATEGGTDLCAYRVRMLPLFQALEPTIDVTAQRLSDQVRVIQRLKRLDDSTLDRLRLEALSTRAASTSVRDPPATSPDPVPAPDQAPEAPRVDLCADEEEFAQSVSSTANEQLRRTLDEAITQYRSTPNTRPRLPRLPMNRHNLALMGALNALLEPYLRTSKDLDDTHAIMYCGAIAACRVARVKFPDSERAPRTAGGAPAWQIRIERRISSFRTLIAKLICFRGGNNRPRVMRFVNQAFAGTDIRPRDYMANITERIDFLKQKVYAWANRIRRYRERVDRFQQNRLFQSDQRKMYRKWEETNPRASDSQPPEATVMNDFWRSIWSVPVGHTEGSWMSVVERECESIEPMGAVTISPDDVSCAIRTAQNWKSPGPDGLHNFWLKWFRCSHSCLAAQFQQALELGSPPPSLTTGVTFLLYKSGSTTEAKNYRPITCLPTLYKLLTSILRAKINAHIVANNILASAQNGCRVGSRGTKELLLIDMTICQQIRRNRGALSAAWIDYKKAYDSVPHSWLERVLELYKVDTALRAFLSACMRQWTTVLRQPGGGDGSPGPQDFIRIERGIFQGDSLSPLWFCLALNPLSTLLKDLELGCRLRRGGEVISHLLYMDDLKLFAPNSQDLVELLKTTEVFSNAINMEFGVDKCAVMHVQRGKVVNSTNLQLSETMSFRSISESETYKYLGMSQSLGIEEEGIRRSVKERFFSRLTKVLNSLLSGGNKVRAFNAWVMPLLTYSFGILRWTQTELDALDRRVRQLLTTHRMLHPRSSVMRLYIPRKCGGRGFLNAKNLHNREVYNLRNYFLNNECGMHCDVVAADKGLTPLSLANENWRKPVVLSTEDRKAVWKDKQLHGRFYKALTGPDVDLLASVNWLRFGDLFGETEGFACAIADEVMMTNNYRKYILKDGTVDICRACRRPGESLRHIISGCSHLANGEYLHRHNLVARIIHQQLALLYGLVDREVPYYKYSPAPVLENGRATLYWDRSIITDRTIVANKPDIVLIDRSQRRTVLVDVTIPHDENLVKAEKDKSSKYLDLAHEITAMWDVDSTIIVPIVVSANGLIAKSLDQHLERLSLGGWIKGQMQKAVILDTARIVRRFLTLRP

SEQ ID NO: 5436 - protein, 1208 aa, Cydia splendana
MITRSKARSQASTTANARPPPSPVSSVSSQSSGDEFATAPDTSESSDECGPPPPPPRPPARRGRPPLPARLGPAGHLAPPTAPAAGGVVRRMRWSQTMNENVMRAYYGATEGGTDLCAYRVRMLPLFQALEPTIDVTAQRLSDQVRVIQRLKRLDDSTLDRLRLEALSARAASTSVRDPPATSPDPVPAPDQAPEAPRVDLCADEEEFAQSVSSTANEQLRRTLDEAITQYRSTPNTRPRLPRLPMNRHNLALMGALNALLEPYLRTSKDLDDTHAIMYCGAIAACRVARVKFPDSERAPRTAGGAPAWQIRIERRISSFRTLIAKLICFRGGNNRPRVMRFVNQAFAGTDIRPRDYMANITERIDFLKQKVYAWANRIRRYRERVDRFQQNRLFQSDQRKMYRKWEETNPRASDSQPPDATVMNDFWRSIWSVPVGHTEGSWMSVVERECESIEPMGAVTISPDDVSCAIRTAQNWKSPGPDGLHNFWLKWFRCSHSCLAAQFQQALELGSLPPSLTTGVTFLLYKSGSTTEAKNYRPITCLPTLYKLLTSILRAKINAHIVANNILASAQNGCRVGSRGTKELLLIDMTICQQIRRNRGALSAAWIDYKKAYDSVPHSWLERILELYKVDTALRAFLSACMRQWTTVLRQPGGGDESPGPQDFIRIERGIFQGDSLSPLWFCLALNPLSTLLKDLELGCRLRRGGEVISHLLYMDDLKLFAPNSQDLVELLKTTEVFSNAINMEFGVDKCAVMHVQRGKVVNSTNLQLSETMSFRSISESETYKYLGMSQSLGIEEEGIRRSVKERFFSRLTKVLNSLLSGGNKVRAFNAWVMPLLTYSFGILRWTQTELDALDRRVRSLLTTHRMLHPRSSVMRLYIPRKCGGRGFLNAKDLHNREVYNLRNYFLNNECGMHRDVVAVDRNLTPLSLANENWRKPVVLSTADRKAAWESKVLHGRFYKALTGPDVDLLASVNWLRFGDLFGETEGFACAIADEVMMTNNYRKYILKDGTVDICRACRRPGESLRHIISGCSHLANGEYLHRHNLVARIIHQQLALLYGLVDREVPYYKYSPAPVLENGRATLYWDRSIITDRTIVANKPDIVLIDRSQRRTVLVDVTIPHDENLVKAEKDKSSKYLDLAHEITAMWDVDSTIIVPIVVSANGLIAKSLDQHLERLSLGGWIKGQMQKAVILDTARIVRRFLTLRP

SEQ ID NO: 5437 - protein, 1202 aa, Cydia splendana
MKTMITRSQRRAAESTNNARPPPPPAPSSSSSTSSSGDEFATPPDTDGFSDEGGPPPPPPRPPARRGRPPLPARLGPAGHPAPPTAPATGGIVRRMRWTRTMNENVMRAYYGATEGGTQLSAYRSRILPLFQALEPTITVSEQRLSDQVRVIQRLKRLDDATLDRLRQEALSARADSTSVRDLPATSPDPVPAPDLAPAAPRVDFCTDEGDFASQNVSTTANEQLRRTLEEAITQYRATTNRRNLALMGALNALLEPYLRTSKDLDDTHSIMYCGAIAACRVARVKFPDAERAPRIVGGVPAWQARIERRISSFRTLIAKLICFRGGNNRPRVMRFVNQAFAGTDIRPRDYMANVTERIDFLKQKVYAWANRIRRYRERVDRFQQNRLFQSDQRKVYRKWEETNLRTPDTRPPDATAMTDFWRSIWSVPVGHTEGSWMSVVERECESIEPMGAVTISPDDVSCAIRTAQNWKSPGPDGLHNFWLKWFRCSHSRLAAQFQQALELGSLPPSLTTGVTFLLYKSGSTTEAKNYRPITCLPTLYKLLTSILRAKINAHIVANNILASAQNGCRVGSRGTKELLLIDMTICQQIRRNKGALSAAWIDYKKAYDSVPHSWLGRVLELYKVDAALRAFLSTCMGQWTTVLRQPGGGDDRLGPQDFIRIERGIFQGDSLSPLWFCLALNPLSTLLKDLGLGCRLQREGEVISHLLYMDDLKLFAPNSQDLLELLKTTEVFSSAINMEFGVDKCAVMHVQRGRVVNSRNLQLSETMSFRSISESETYKYLGMSQSLGIEDEGIRRSVKERFFSRLTKVLNSLLSGGNKVRAFNAWVMPLLTYSFGILRWTQTELDALDRRVRSLLTTHRMLHPRSSVMRLYIPRKCGGRGFLNAKDLHNREVYNLRNYFLNNECGMHRDVVAVDRNLTPLSLANENWRKPVVLSTADRKAAWESKVLHGRFYKALTGPDVDLLASVNWLRFGDLFGETEGFACAIADEVMMTNNYRKYILKDVTVDICRACRRPGESLRHIISGCSHLANGEYLHRHNLVARIIHQQLALLCGLVDREVPYYKYLPAPVLENGRATLYWDRSIITDRTIVANKPDIVIIDRSQRRAVLVDITIPHDENLVKAEKDKSSKYLDLAHEITAMWDVDSTIIVPIVVSVNGLIAKSLDQHLERLSLGGWIKGQMQKAVILDTARIVRRFLSLRP

SEQ ID NO: 5438 - protein, 869 aa, Cydia splendana
MRFVNQAFVGTDIRPRDYMANVTERIDFLKQKVYAWANRIRRYRERVDRFQQNRLFQSDQRKMYRKWEETNLRASDSRPPDATVMNDFWRSIWSVPVGHTEGSWMSVVERECESIEPMGAVTISPDDVSCAIRTAQNWKSPGPDGLHNFWLKWFRCSHSYLAAQFQQALELGSLPPSLTTGVTFLLYKSGSTTEAKNYRPITCLPTLYKLLTSILRAKINAHIVANNILASAQNGCRVGSRGTKELLLIDMTICQQIRRTKGALSAAWIDYKKAYDSVPHSWLGRVLELYKVDAALRAFLSACMGQWTTVLRQPGGGDDRPGPQDFIRIERGIFQGDSLSPLWFCLALNPLSTLLKDLGLGCRLRREGEVISHLLYMDDLKLFAPNTQGLLELLKTTEVFSSAINMEFGVDKCAVMHVQRGKVVNSTNLQLSETMSFRTIYESETYKYLGMSQSLGIEDEGIRRSVKERFFSRLTKVLNSLLSGGNKVRAFNAWVMPLLTYSFGILRWTQTELDALDRRVRSLLTTHRMLHPRSSVMRLYIPRKCGGRGFLNAKDLHNREVYNLRNYFLNNECGMHRDVVAVDRNLTPLSLANENWRKPVVLSTADRKAAWESKALHGRFYKALTGPDVDLLASVNWLRFGDLFGETEGFACAIADEVMMTNNYRKYILKDGTVDICRACRRPGESLRHIISGCSHLANGEYLHRHNLVARIIHQQLALLYGLVDREVPYYKYLPAPVLENGRATLYWDRSIITDRTIVANKPDIVLIDRSQRRAVLADVTIPHDENLVKAEKDKSSKYLDLAHEITAMWDVDSTIIVPIVVSANGLIAKSLDQHLERLSLGGWIKGQMQKAVILDTARIVRRFLTLRP

SEQ ID NO: 5439 - protein, 1212 aa, Agriopis aurantiaria
MITRSRTKQADTKSARLPSPPASSSSPSTSSGEDEYHTTREASGSSSDTSGPGTPPPPPPARRGRPPLPARLGLVGHSATRPAPATGGVVRRMRWSTIMNEDCMRAYYRATEGGTNLSAYCARMLPLFQALQPTITVSAQRLSDQVRAIHRCKLLDDSVLDRLRQEELRARPIPVSTRDPPVASSAPTLASVPASVVTLAALADPVVDEGDLASGVSDQVREQLRGALEDAISQYRFTPDSRPRLPRLSTHRRNLALMGALNALLAPYLRASEDLVDTHSILYCGAIAACRVARVKFPDTNRAPQTAGGVPAWQVRIERRISTFRTLIAKLVCFRRGNNRPRVMRFVTQAFAGTDIRPQHYLANVTERIDYLKQKVYAWANRIRRYRERVDRCWQNRLFQSDQRKVYRGWEETDQRVSDGQLPDASAMINFWRGIWSMPVEHTEGDWMRVVERECESIEPMGSILIDSLDVSCAIRTAQNWKSPGPDGLHNFWIKWIRCSHDRLATQFQEALELGSLPSFMTTGVTFLLHKSGSTTEAKNYRPITCLPTIYKLLTSILRNKINAHIVANNVLAHAQNGCRVGSRGTKELLLIDTAISQQVRRNKGALSAAWIDYMKAYDSVPHSWLERVLELYKIDTTLKSFLGACMRQWTTVLRQPGGGDGAFGPQDLLRIERGIFQGDSFSPLWFCLALNPLSTLLRDSGLGYRLRRDGQVISHLLYMDDLKLFTPKRQDLVELLKITEVFSSAIRMEFGVDKCAVMHVQRGKVVNSPNLQLSEVMTLRSLSEAETYKYLGMSESLGISVENIKKSVKERFFCRLTKVLNSLLSGGNKVRAFNGWVMPLLIYSFGILRWTQTELDALDRRVRQLLTSHRMLHPRSSVMRLYIPRKWGGRGFLNAKNLHNREVCSLRDFFRNSESGMHRDVVAVDRGLTVLSLANENWRKPSVLSIEDRRDVWKGKELHGRFYRALTGPDVDLLASVNWLRFGDLFGETEGFACAIADEVIKTNNYRKYIMKDGTVDICRACHRPGESLRHIISGCSHLANGEYLHRHNLVARIIHQQLALRYSLVESEVPYYKYAPAPVLENGRALLYWDRSIITDRTIVANKPDIVLVNRSQRRAVLVDITIPHDENLVKAEKDKLSKYLDLAHEVTAMWDVDSTIIVPIVVSVNGLIAKSLDQHLKRLSLDGWVKGQMQKAVILDTARIVRRFLTLQP

SEQ ID NO: 5440 - protein, 1214 aa, Agriopis aurantiaria
MITRSKTSAAARLINAQPPPPPASPSSPSSSSGEDEYHTTREASGSSSDTSGPGTPPPPPPARRGRPPLPARLGLVGHSATRPAPATGGVVRRMRWSPTMNENCMRAYYRATEGGTNLSAYCARMLPLFQDLEPTVTVSAQRLSDQVRAIHRCKLLDDSVLDRLRLEELRARPTPALMRDPPVASSAPTLASLPASVVTLAAPADPVVDEGDLTSNSVSDQVREQLRGALEDAISQYRFAPDSRPRLPRLPTHRRNLALMGALNALLAPYLRASEDLVDTHSILYCGAIAACRVARVKFPDTNRAPRTAGGVPAWQVRIERRISTFRTLIAKLICFSRGNNRPRVMRFVTQAFAGTEIRPQHYLANVMERIDYLKQKVYAWVSRIRRYRERVNRYWQNRLFQSDQRKVYRGWEEIDQRVSDGQLPDANAMINFWRGIWSVPVEHTEGDWMRVVERECESIEPMGSILIDSVDVSCAIRTAQNWKSPGPDGLHNFWIKWIRCSHDRLATQFQEALELGSLPSFMTTGVTFLLHKSGSTTEAKNYRPITCLPTIYKLLTSILRNKINAHIVANNVLAHAQNGCRVGSRGTKELLLIDTAISQQVRRNKGALSAAWIDYKKAYDSVPHSWLERVLELYKIDTTLKSFLGACMRQWTTVLRQPGGGDGTSGPQDLIRIERGIFQGDSFSPLWFCLALNPLSTLLRDSGLGYRLRRDGQVISHLLYMDDLKLFTPKRQDLVELLKITEVFSSAIRMEFGVDKCAVMHVQRGKVVNSPNLQLSEVMTLRSLSEAETYKYLGMSESLGISVENIKKSVKERFFCRLTKVLNSLLSGGNKVRAFNGWVMPLLIYSIGILRWTQTELDALDRRVRQLLTSHRMLHPRSSVMRLYIPRKWGGRGFLNAKNLHNREVCSLRDFFRNSESGMHRDVVAVDRGLTPLSLANENWRKPSVLSIEDRMDVWKGKELHGRFYRALTGPDVDLLSSVNWLRFGDLFGETEGFACAIADEVIKTNNYRKYIMKDGTVDICRACHRPGESLRHIISGCSHLANGEYLHRHNQVARIIHQQLALRYGLAESEVPYYKYAPAPVLENGRALLYWDRSIITDRTIVANKPDIVLVDRSQRRAVLVDITIPHDENLVKAEKDKLSKYLDLAHEVTAMWDVDSTIIVPIVVSVNGLIAKSLDQHLKRLSLDGWIKGQMQKAVILDTARIVRRFLTLQP

SEQ ID NO: 5441 - protein, 1212 aa, Agriopis aurantiaria
MITRSRTKQADTKSARLPSPPASSSSPSTSSGEDEYHTTREASGSSSDTSGPGTPPPPPPARRGRPPLPARLGLVGHSATRPAPATGGVVRRMRWSTIMNEDCMRAYYRATEGGTNLSAYCARMLPLFQALQPTITVSAQRLSDQVRAIHRCKLLDDSVLDRLRQEELRARPIPVSTRDPPVASSAPTLASVPASVVTLAALADPVVDEGDLASGVSDQVREQLRGALEDAISQYRLTPDSRPRLPRLSTHRRNLALMGALNALLAPYLRASEDLVDTHSILYCGAIAACRVARVKFPDTNRAPRTAGGVPAWQVRIERRISTFRTLIAKLVCFRRGNNRPRVMRFVTQAFAGTDIRPQHYLANVTERIDYLKQKVYAWANRIRRYRERVDRYWQNRLFQSDQRKVYRGWEETDQRVSDGQLPDASAMINFWRGIWSMPVEHTEGDWMRVVERECESIEPMGSILIDSLDVSCAIRTAQNWKSPGPDGLHNFWIKWIRCSHDRLATQFQEALELGSLPSFMTTGVTFLLHKSGSTTEAKNYRPITCLPTIYKLLTSILRNKINAHIVANNVLAHAQNGCRVGSRGTKELLLIDTAISQQVRRNKGALSAAWIDYKKAYDSVPHSWLERVLELYKIDTTLKSFLGACMRQWTTVLRQPGGGDGAFGPQDLLRIERGIFQGDSFSPLWFCLALNPLSTLLRDSGLGYRLRRDGQVISHLLYMDDLKLFTPKRQDLVELLKITEVFSSAIRMEFGVDKCAVMHVQRGKVVNSPNLQLSEVMTLRSLSEAETYKYLGMSESLGISVENIKKSVKERFFCRLTKVLNSLLSGGNKVRAFNGWVMPLLIYSFGILRWTQTELDALDRRVRQLLTSHRMLHPRSSVMRLYIPRKWGGRGFLNAKNLHNREVCSLRDFFRNSESGMHRDVVAVDRGLTVLSLANENWRKPSVLSIEDRRDVWKGKELHGRFYRALTGPDVDLLASVNWLRFGDLFGETEGFACAIADEVIKTNNYRKYIMKDGTVDICRACHRPGESLRHIISGCSHLANGEYLHRHNLVARIIHQQLALRYSLVESEVPYYKYAPAPVLENGRALLYWDRSIITDRTIVANKPDIVLVDRSQRRAVLVDITIPHDENLVKAEKDKLSKYLDLAHEVTAMWDVDSTIIVPIVVSVNGLIAKSLDQHLKRLSLDGWVKGQMQKAVILDTARIVRRFLTLQP

SEQ ID NO: 5442 - protein, 1118 aa, Ennomos fuscantarius
MRWTQTMNENCMRAYYGATEGGSSLTAYRDRMLSLFQELEPSISVSAQRLSDQVRAIHRCKLLDQSALDRLRLETLPIPATSPSPRVLSAALPDPGPIVGPPLVTPLGGPVIDGEESVSDSVSTQVNEQLRSALEDAILRYRSTPTSRPRLPRLPTNRRNLVLMGALNTLLGPYLRTSEDLVDTHSILYCGAIAVCRVARVKFPDTDRAPRPADGAPAWQVRIEKRIATFRTLIAKLVCFSRGNHRPRVMRFVTQAFAGTGIRPQDYMACVTERIDFLKQKVYAWASRIRRYRERVDRYQMNRLFQSDQRKVYRDWEGTGQRVVDGQLPDANVMNEFWRSIWSVPVDHSEGDWIRVVKHVCEPIESMGSITIDPEDISCAIRTAHNWKSPGPDGLHNFWIKWIRCSYPCLAIQFQEALEAGSLPKFMTTGITFLLHKSGSTMEAKNYRPITCLPTLYKLLTSILRTKINSHITANNILASAQNGCRVGSRGTKELLLIDTAICQQVRRNRGALSTAWIDYKKAYDSVPHSWLKRVLELYKINATLRSFLSACMGQWTTVLRPPGGGDSVSDPQNFIRIERGIFQGDSLSPLWFCLALNPLSILLGDSGLGYRLRRGGEIISHLLYMDDLKLFAPQRPQLMKLLKITENFSNSIKMEFGVDKCAVMHVHGGKVVNSTNLQLSETMTLRSLSESETYKYLGMSESLGISVGDVKQSVKERFFCRLTKVLNSLLSGGNRARAFNAWVMPLLMYSFGILGWTQTELDALDRKVRQVLTSHRMLHPRSSVMRLYIPRKWGGRGFLNAKNLHNREMYSLREYFLSNECGMHRDVVAVDKGLTPLSLANENWRKPVVLSTDDRRDVWKGKELHGRFYRALTGPDVDLHASVNWLRFGDLFGETEGFVCAIADEVIKTNNYRKYIMKDGTVDICRACRRPGESLRHIISGCSHLANGEYLHRHNLVARIIHQRLALQYGLVESEVPYYKYTPGPVLENGRALLYWDRSIITDRTIVANKPDIVLIDRSQRRAVLVDIAIPHDENLVKAEKDKLSKYLDLAHEVTAMWSVDSTSIVPIVVSANGLIAKSFDQHLERLSLDGWIKGQIQKAVLLDTARIVRRFLTLEP

SEQ ID NO: 5443 - protein, 1014 aa, Ennomos fuscantarius
MSRVVPEIEGEECANSSVSTQVNEQLRSALEDAILRYRSAPTSRPRLPRFPTNRRNLVLMGALNTLLGPYLRTSEDLVDTHSILYCGAIAACRVARVKFPDTDRAPRPADGAPAWQVRIERRITTFRTLIAKLVCFSRGNHRSRVMRFVAQAFAGTGIRPQDYMACVTERIDFLKQKVYAWASRIRRYRERVDRYQINRLFQSDQRKVYRDWEGTGQRVVDGQLPDANAMNEFWRSIWSVPVNHLEGDWMRVVERVCEPIESMGSITIDPEDISCAIRTTQNWKSPGPDGLHNFWIKWIRCSYPRLAIQFQEAIEAGSLPSFMTTGVTFLLHKSGSTIEAKNYRPITCLPTLYKLLTSILRTKINSHIIANNILAPAQNGCRVGSRGTKELLLIDMAICQQVRRNRGALSTAWIDYKKAYDSVPHSWLKRVLDLYKINATLRSFLSACMGQWTTVLRQPGGGDSVSDPQDYIRIERGIFQGDSLSPLWFCLALNPLSTLLGDSELGYRLRRGGEIISHLLYMDDLKLFAPQRPQLIELLKITENFSNSIKMEFGVDKCAVMHVHGGKVVNSTNLQLSETMTLRSLSESETYKYLGMSESLGVSVGDVRQSVKERFFCRLTKVLNSLLSGGNKVRAFNGWVMPLLMYSFGILRWTQTELDTLDKKVRQILTSHRMLHPRSSVMRLYIPRKLGGRGFLNAKNLHNREMYGLREYFLNNECGMHRDVVAVDKGLTPLSLANKNWRKPVVLSTDDRRDVWKGKELHGRFYRALTGPDVDLPASVNWLRIGDLFGETEGFVCAIADEVIKTNNYRKYIMKDGTVDICRACRRPGESLRHIISGCSHLANGEYLHRHNLVARIIHQQLALQYGLVESEVPYYKYTPGPVLENGRALLYWDRSIITDRTIVANKRDIVLIDRSQRRAVLVDIAIPHDENLVKAEKDKLSKYLDLAHEVTAMWNVDSTSIVPIVVSANGLIAKSLDQHLERLSLDGWIKGQIQKAVLLDTARIVRRFLSLQP

SEQ ID NO: 5444 - protein, 1117 aa, Hedya salicella
MRWTQAMNEHCMRAYYGATEGGTQLSAYRDRMLLLFQTLEPAIAVSAQRLSDQVRAIQRRKLLDDAMLDQLRLEVLAARAASTSSRNPPATSPVSAPALDLVPGAPRVDPGSDEEHCASSISTQANEQLRRTLEETIERYRFAPDSRPRLPRLPTNRRNLALVGALNALLDPYLRASEDLADTHSIMYCGAIAACRVARVKFPDADRAPRTAGGVPAWQVRIERRISTSRTLIAKLICFRGGNNRPRVMRYVAQAFAGTAVRPRDYMACVTERIVFLKQKVYAWASRIRRYRERVDRFQQNRLFQSDQRKVYRKWEGTDQRVTDGRLPDPTAMNNFWRSIWSVPVEHTEGEWMNVVERECEPIETMGAVTISPDDVSCAARTTQNWKSPGPDGLHNFWVKWFRCSHERLATQFQQALELGSLPSFLTTGVTFLLYKSGSTTEAKNYRPITCLPTLYKLLTSILRAKINTYIVANNVLAFSQNGCRVGSRGTKELLLIDTTICQQVRRNRGTLSAAWIDYKKAYDSVPHSWLGRILELYKIDTVLKSFIGSCMRQWTTVLRQPGGRDGPPDPQDFIRIKRGIFQGDSLSPLWFCLALNPLSTLLKDSGLGCRLRRGGEIISHLLYMDDLKLFAPKRPELVELLKVTETFSSAIKMEFGVDKCATMHVQRGKVVNSTNLQLSETMSLKSLSEVETYKYLGMSQTLSIADGDIKQAVKERFFCRLTKVLNSLLSAGNKARAFNAWVMPLLAYSFGILRWTQTELDALDRRVRMLLTTHRMLHPRSSVMRLYIPRKCGGRGFLNAKDLHNSEVCSLREYFLNNECGIHRDVVAVDKGLTSLSLANENWRRPTVLSTVDRKDVWRSKELHGRFYKALTGPDVDLLASVNWLRFGDLFGETEGFACAITDEVIMTNNYRKYILKDGTVDICRACRRPGESLRHIISGCSHLANSEYLHRHNQVARIIHQQLAVKYGLVGSEVPYYKYAPMPVLENGRATLYWDRSIITDRTIVANKPDIVLVDRSKRRAILIDITIPHDENLVKAEKDKLSKYLDLAHEVTAMWDVDSTIIVPIVVSANGLIAKSLNEHLKRLSLDGWVKGQIQKAVILDTARIVRRFLSVQP

SEQ ID NO: 5445 - protein, 869 aa, Hedya salicella
MRYVAQAFAGTDVSSCDYMACVTERIDFLKQKVYAWASRIRRYRERVDRFQQNRLFQSDQRKVYRKWEGTDQRVTDGRLPDPTAMSNFWRSIWSVPVEHTEGEWMNVVERECEPIEAMGAVTISPDDVSCAARTTQNWKSPGPDGLHNFWVKWFRCSHERLATQFQQALELGSLPSFLTTGVTFLLYKSGSTTEAKNYRPITCLPTLYKLLTSILRAKINTHIVANNVLAFSQNGCRVGSRGTKELLLIDTTICQQVRRSRGSLSAAWIDYKKAYDSVPHSWLERILELYKVDTALRSFLGACMRQWTTVLCQPGGRDARPAPQDFIRIKRGIFQGDSLSPLWFCLALNPLSTLLKDSGLGCRLRRGGEIISHLMYMDDLKLFAPKRPELVELLKVTDTFSSAIKMEFGVDKCAVMHVQRGKVVNSTNLELSETMSLRSLSETETYKYLGMSQALSIADGDIRQAVKERFFCRLTKVLNSLLSGGNKARAFNAWVMPLLTYSFGILRWTQTELDALDRRVRMLLTTHRMLHPRSSVMRLYIPRKCGGRGFLNAKDLHNREVCSLREYFLNNECGIHRDVVAVDKGLTPLSLANENWRRPTVLSTVDRKDVWKSKELHGRFYKALTGPDVDLLASVNWLRFGDLFGETEGFSCAIADEVIMTNNYRRYILKDGTVDICRACRRPGESLRHIMSGCSYLANGEYLHRHNQVARIIHQQLAVKYDLVRSEVPYYKYVPMPVLENGRATLYWDRSILTDRTIVANKPDIVLVDRSKRRAMLVDITIPHDENLVKAEKDKLSKYLDLAHEVTAMWDVDSTIIVPIVVSVNGLIAKSLDEHLKRLSLDGWIKGQIQKAVILDTARIVRRFLSVQP

SEQ ID NO: 5446 - protein, 1215 aa, Erannis defoliaria
MITRSKSTQAVNDNNARPPPPPAPSSPSASSGDDEFHTPRESSASSSGSDVSGPRTPAPRPPARRGRPPLPARLGPAGQPASRPALAAGGVVRRMRWSQINNENCMRAYYGATEGGINLSAYRVRMLPLFQALEPTVTVSAQRLSDQVRAIQRLNLLDQSLLDRLRLEAHSAHPTPASTRDSHVASSAPTLASVPTSAATLATPADPVVDEGDCMSMIVSSQVSEQLRRTLEDAIGQYRFALNSRPRLPRLPTHRRNLALMGALNALLAPYLRASEDLTDTHSILYCGAIAACRVARVKFPDTNRAPRPAGDVPAWQLRIERRISTFRTLIAKLICFSRGNNRPRVMRFVTQAFAGTGIRPQQYMASVTERIDYLKQKVYAWANRIRRYRERVDRYWQNRLFQSDQRKVYRNWEGNEQRVSDGQLPDASAMTNFWRGIWSVPVEHTEGDWMRVVERECESIEPMGSVLIDPVDVSCAIRTAQNWKSPGPDGLHNFWIKWFRCSHDRLATQFQEALELGSLPSFMTTGVTFLLHKSGSTTEPKNYRPITCLPTIYKLLTSILSTKINAHIVANNVLAPAQNGCRVGSRGTKELLLIDMAISQQVRRNKGALSAAWIDYKKAYDSVPHSWLERILELYQIDTTLKSFLGACMRQWTTVLRQPGGGNGSSDSQDLIRIERGIFQGDSLSPSWFCLALNPLSTLLKDSGLGYRLRRGGEVISHLLYMDDLKLFAPKHQDLLELLKTTQVFSSAISMEFGVDKCAVMRVQRGKVVNSPDLQLSEIMTLRSLSEAETYKYLGMSESLGISVVDIKKSVKERFFCRLTKVLNSLLSGGNKARAFNGWVMPLLIYSFGILRWTQTELDALDRRVRQLLTAHRMLHPRSSVMRLYIPRKWGGRGFLNAKNLHNREVCSLRDYFLNNECGMHRDVVTVDKGLTPLSLANENWRTPSVLSTDDRKEVWKSKELHGRFYRVLSGPDVDLLASVNWLRFGDLFGETEGFACAIADEVIKTNNYRKYIMKDGTVDICRACHRPGESLRHIISGCSHLANGEYLHRHNQVARIIHQQLALQYGLVESEVPYYKYAPAPVLENGRALLYWDRSIITDRTIVANKPDIVMVDRSQRRAVLVDVTIPHDENLVKAEKDKLSKYLDLAFEITAMWDVDSTIIVPIVVSANGLIAKSLDQYLKRLSLDGWVKGQIQKAVVLDTARIVRRFLTLQP

SEQ ID NO: 5447 - protein, 1216 aa, Erannis defoliaria
MITRSKAIRNAAEQHSARPPSPPAPSSPSASSGEDVFVTPRESSASSSDSDVSGPRTPAPPPPARRGRPPLPARLGPAGLPASRPALAAGGVVRRMRWSQTNNENCMRAYYGATEVGTNLTAYRVRMLSLFQALEPTVTVSAQRLSDQVRAIQRLNLLDQSLLDRLRLEAQSARSTPVSTRDSHVASSAPTLASMPTSVATLATPADPVVDEGDGTGMSVTTQVSEQLRRALEDAISQYRFALNSRPRLPRLPTHRRNLALMGALNALLAPYLRASEDLTDTHSILYCGAVAACRVARVKFPDSNRAPRTAGDVPAWQARIERRISTFRTLIAKLICFSRGNNRPRVMRFVTQAFAGTGIRPQQYMASVTERIDYLKQKVYAWASRIRRYRERVDRYWQNRVFQSDQRKVYRNWEGAEQRVSDGHLPDANAMTNFWRGIWSVPVEHTEGDWMRVVERECESIEPMGSILIDPVDVSCAIRTAQNWKSPGPDGLHNFWIKWFRCSHDRLATQFQEALELGSLPSFMTTGVTFLLHKSGSTTEPKNYRPITCLPTIYKLLTSILSTKINTHIVANNVLAPAQNGCRVGSRGTKELLLIDMAISQQVRRNKGALSAAWIDYKKAYDSVPHSWLERVLELYKIDTTLKSFLSACMRQWTTVLRQPGGGNDSFDPQDLIRIERGIFQGDSLSPSWFCLALNPLSTLLKDSGLGYRLRRGGEVISHLLYMDDLKLFAPKHQDLLELLKTTQVFSSAIRMEFGVDKCAVMRVQRGKVVNSPDLQLSEIMTLRSLSEAETYKYLGMSESLGISVVDIKKSVKERYFCRLTKVLNSLLSGGNKARAFNGWVMPLLIYSFGILRWTQTELDALDRRVRQLLTAHRMLHPRSSVMRLYIPRKWGGRGFLNAKNLHNREVCSLRDYFLNNECGMHRDVVTVDKGLTPLSLANENWRRPSVLSTDDRKDVWKSKELHGRFYRALSGPDVDLLASVNWLRFGDLFGETEGFACAIADEVIKTNNYRKYIMKDGTVDICRACHRPGESLRHIISGCSHLANGEYLHRHNQVARIIHQQLALQYGLVESEVPYYKYAPAPVLENGRALLYWDRSIITDRTIVANKPDIVMVDRSQRRAVLVDVTIPHDENLVKAEKDKLSKYLDLAFEITAMWDVDSTIIVPIVVSANGLIAKSLDQYLKRLSLDGWVKGQIQKAVVLDTARIVRRFLTLQP

SEQ ID NO: 5448 - protein, 1216 aa, Erannis defoliaria
MITRSKAIRNAAEQHSARPPSPPAPSSPSASSGEDVFVTPRESSASSTDSDVSGPRTPAPPPPARRGRPPLPARLGPAGLPASRPALAAGGVVRRMRWSQTNNENCMRAYYRATEVGTNLTAYRVRMLSLFQALEPTVTVSAQRLSDQVRAIQRLNLLDQSLLDRLRLEAQSARSTPVSTRDSHVASSAPTLASMPTSVATLATPADPVVDEGDGTGMSVTAQVSEQLRRALEDAISQYRFALNSRPRLPRLPTHRRNLALMEALNALLAPYLRASEDLTDTHSILYCGAVAACRVAREKFPDSNRAPRTAGDVPAWQARIERRISTFRTLIAKLICFSRGNNRPRVMRFVTQAFAGTGIRPQQYMASVTERIDYLKQKVYAWASRIRRYRERVDRYWQNRVFQSDQRKVYRNWEGAEQRVSDGHLPDASAMTNFWRGIWSVPVEHTEGDWMRVVERECESIEPMGSILIDPVDVSCAIRTAQNWKSPGPDGLHNFWIKWFRCSHDRLATQFQEALELGSLPSFMTTGVTFLLHKSGSTTEPKNYRPITCLPTIYKLLTSILSTKINAHIVANNVLAPAQNGCRVGSRGTKELLLIDMAISQQVRRNKGALSAAWIDYKKAYDSVPHSWLERILELYQIDATLKSFLGACMRQWTTVLRQPGSGNGSSDSQDLIRIERGIFQGDSLSPSWFCLALNPLSTLLKDSGLGYRLRRGGEVISHLLYMDDLKLFAPKQQDLLELLKTTQVFSSAISMEFGVDKCAVMRVQRGKVVNSPDLQLSEIMTLRSLSEAETYKYLGMSESLGISVVDIKKSVKERFFCRLTKVLNSLLSGGNKARAFNGWVMPLLIYSFGILRWTQTELDALDRRVRQLLTAHRMLHPRSSVMRLYIPRKWGGRGFLNAKNLHNREVCSLRDYFLNNECGMHRDVVTVDKGLTPLSLANENWRTPSVLSTDDRKEVWKSKELHGRFYRVLSGPDVDLLASVNWLRFGDLFGETEGFACAIADEVIKTNNYRKYIMKDGTVDICRACHRPGESLRHIISGCSHLANGEYLHRHNQVARIIHQQLALQYGLVESEVPYYKYAPAPVLENGRALLYWDRSIITDRTIVANKPDIVMVDRSQRRAVLVDVTIPHDENLVKAEKDKLSKYLDLAFEITAMWDVDSTIIVPIVVTANGLIAKSLDQYLKRLSLDGWVKGQIQKAVVLDTARIVRRFLTLQP

SEQ ID NO: 5449 - protein, 1218 aa, Erannis defoliaria
MITRSKNKAKTSTAETTNARPPPLPAPSSPSASSGDDVFLTPRESSVSSSDSDVSGPRTPAPPPPARRGRPPLPARLGPAGQPASRPALAAGGVVRRMRWSQTNNENCMRAYYGATEGGTNLTAYRVRMLSLFQALEPTVTVSAQRLSDQVRAIQRLNLLDQSLFDRLHLEAQSARPTPASTRDLDVASSAPTLTSVPTSAATLATSTDPVLDEGDCTGMSVSTQVSEQLRRALEDTIGQYRFTLNSRPRLPRLPTHRRNLALMGALNALLAPYLRASEDLTDTHSILYCGAIAACRVARVRFPDTNRAPRTAGDVPAWQVRIERRISTFRTLIAKLICFSRGNNRPRVMRFVTQAFAETGIRPQQYMASVTERIDYLKQKVYAWASRIRRYRERVDRYRQNRLFQSDQRKVYRNWEGNEQRVSDGHLPDASAMTNFWRSIWSVPVEHTEGDWMRVVERECEFIEPMGSILIDPVDVSCAIRTAQNWKSPGPDGLHNFWIKWFRCSHDRLATQFQEALELGSLPSFMTTGVTFLLHKSGSTTEPKNYRPITCLPTIYKLLTSILSTKINTHIVANNVLAPAQNGCRVGSRGTKELLLIDMAISQQVRRNKGALSAAWIDYKKAYDSVPHSWLERILELYKIDTTLKSFLSACMRQWTTVLRQPGGGNDSSDPQDLIRIERGIFQGDSLSPSWFCLALNPLSTLLKDSGLGYRLRRGGEVISHLLYMDDLKLFAPKHQDLLELLKTTQVFSSAIRMEFGVDKCAVMRVQRGKVVNSPDLQLSEIMTLRSLSEAETYKYLGMSESLGISVVDIKKSVKERFFCRLTKVLNSLLSGGNKARAFNGWVMPLPIYSFGILRWTQTELDALDRRVRQLLTAHRMLHPRSSVMRLYIPRKWGGRGFLNAKNLHNREVCSLRDYFLNNECGMHRDVVTVDKGLTPLSLANENWRRPSVLSTDDRKDVWKSKELHGRFYRALSGPDVDLLASVNWLRFGDLFGETEGFACAIADEVIKTNNYRKYIMKDGTVDICRACHRPGESLRHIISGCSHLANGEYLHRHNQVARIIHQQLALQYGLVESEVPYYKYAPAPVLENGRALLYWDRSIITDRTIVANKPDIVMVDRSQRRAVLVDVTIPHDENLLKAEKDKLSKYLDLAFEITAMWDVDSTIIVPIVVSANGLIAKSLDQYLKRLSLDGWVKGQIQKAVVLDTARIVRRFLTLQP

SEQ ID NO: 5450 - protein, 1215 aa, Biston betularia
MQTRSKTRKPAEYLDAQEPPPPAPSTPSASSGDEEFATPLATSASSSSSDVSGPRTPTPPPPARRGRPPLPTRLGPAGQSAPRSALAAGGVVRRMRWSHTNNENCMRAYYGATEGGINLSAYRVRMLPLFQALEPTVTVSAQRLSDQVRAIQRLQLLDQSVLDRLRLEVLPTRLTPISTRDPPVASSAPTLMSVPTSEVTLATPTDLEVDIGDYMSMSVCSQVSEHLRRTLEDAICQYRFAPDSRPRLPRLPTHRRNLVLMGALNALLAPYLQASEDLTDTHSILYCGAIAACRVARVKFPDTNRAPRPAGSVPAWQLRIERRIGTFRTLIAKLICFSRGNNRPRVMRFVTQAFAGTGIRPQHYLASVTERIDYLKQKVYAWANRIRRYRERADRYWQNRVFQSDQRKVYRNWEGTGQRVSDGQLPGTSAMTEFWRGIWSLPVEHTEGDWMRVVERECESIESMGSVLIDPVDVSCAIRTAQNWKSPGPDGLHNFWIKWIRCSHDRLATQFQEALELGSLPRFMTTGVTFLLHKTGSTTEAKNYRPITCLPTIYKLLTSILRTKINTHVVANNILAPAQNGCKVGSRGTKELLLIDMTISQQVRRNKGALSTAWIDYKKAYDSVPHSWLERVLDLYKIDTTLKSFLGACMRQWTTALRQPGSGDGFSEPQDLIRIERGIFQGDSLSPLWFCLALNPLSTLLKDSGLGHRLRRGSEVISHLLYMDDLKLFAPKRPDLMELLKTTQVFSSAIKMEFGVDKCAVMHVQRGKIVNCPDLQLSETMTLRSLSEAETYKYLGMSESLGIAVADIKRSVKERFFCRLTKVLNSLLSGGNKVRAFNGWVMPLLIYSFGILKWTQTELDALDRKVRQQLTTHRMLHPRSSVMRLYIPRKLGGRGFLSAKNLHNREVCSLRDYFRDNECGMHRDVVAVDRGLTPLSLANENWRKPSVLSTEDRTEVWKSKQLHGRFYRVLTGPDVDMLASVNWLRFGDLFGETEGFACAIADEVIKTNNYRKYIMKDGTVDICRACHRPGESLRHIISGCSHLANGEYLHRHNQVARIIHQQLALQYGLVESEVPYYKYAPAPVLENGRALLYWDRSIITDRTIVANKPDIVVVDRAQRRAVLVDITIPHDENLVKAEKDKLSKYLDLAHEITAMWDVDSTIIVPIVVTVNGLIAKSLDQHLKRLSLDGWVKGQLQKAVILDTARIVRRFLTLQP

SEQ ID NO: 5451 - protein, 1215 aa, Biston betularia
MWTRSRTAAASGLHDAHIPSPPAPSTPSASSGDEEFATPLATSASSSSSDVSGPRTPAPPPPARRGRPPLPARLGPAGQSASRSALAAGGVVRRMRWSQTNNENCMRAYYGATEGGINLSAYRARMLPLFQALEPTVAVSTQRLSDQVRAIQRLQLLDQSVLDRLRLEALPARPTPVSTRDSPVASSAPTLVSVPTSMVTLATPTDPVVDAGECTSMGVCSQVSEHLRRTLEDAICQYRFAPDSRPRLPRLPTHRRNLALMGALNALLAPYLRASEDLTDTHSILYCGAIAACRVARVKFPDTNRAPRPAGNVPAWQLRIERRISTFRTLIAKLICFSRGNNRPRVMRFVTQAFAGTGIRPQHYLASVTERIDYLKQKVYAWANRIRRYRERADRYWQNRVFQSDQRKVYRDWEGTGQRVSDRQLPDTSVMTEFWRGIWSLPVEHTEGDWMRVVERECESIESMGSVLIDPVDVSCAIRTAQNWKSPGPDGLHNFWIKWIRCSHDRLATQFQEALELGSLPCFMTTGVTFLLHKTGSTTEAKNYRPITCLPTIYKLLTSILRTKINAHVVANNVLAPAQNGCRVGSRGTKELLLIDMTISQQVRRNKGALSTAWIDYKKAYDSVPHSWLERVLELYKIDTTLKSFLGACMRQWTTVLRQLGSGDGSSEPQDLIRIERGIFQGDSLSPLWFCLALNPLSTLLKESGLGHRLRRGGEVISHLLYMDDLKLFAPKRPDLMELLKTTQVFSNAIRMEFGVDKCAVMHVQRGEVVNCPDLQLSETMTFRSLSEAETYKYLGMSESLGIAVVDIKRSVKERFFCRLTKVLNSLLSGGNKVRAFNGWVMPLLIYSFGILRWTQTELDALDRRVRQQLTTHRMLHPRSSVMRLYIPRKLGGRGFLSAKNLHNREVCSLRDYFRDNECGMHRDVVAVDKGLTPLSLANENWRKPSVLSTEDRKEVWKSKQLHGRFYRVLTGPDVDMLASVNWLRFGDLFGETEGFACAIADEVIKTNNYRKYIMKDGTVDICRACHRPGESLRHIISGCSHLANGEYLHRHNQVARIIHQQLALQYGLVESEVPYYKYAPAPVLENGRALLYWDRSIITDRTIVANKPDIVVVDRAQRRAVLVDITIPHDENLVKAEKDKLSKYLDLAHEITAMWDVDSTIIVPIVVSVNGLIAKSLDQHLKRLSLDGWVKGQLQKAVILDTARIVRRFLTLQP

SEQ ID NO: 5452 - protein, 963 aa, Apotomis turbidana
MHKRNLALMGALDALLDPYLRASEDLADTHSIMYCGAIAACRVARVRFPDTERAPRTAEGVPAWQIRIERRINSFRTLIAKLICFRGGNNRPRVMRYVTQAFAGTGTRPCDYMACVTERIDFLKQKVYAWASRIRRYRERVDRFQQNRLFQSDQRKVYRKWEGTDQCVADGQLPDPTAMINFWRSIWSVPVEHTEGEWMNVVRRECEPIEVMGAVTISPDDVSCAARKAQNWKSPGPDGLHNFWIKWFRSSHECLATQLQDALELGSLPSFMTTGVTFLLHKSGSTTEAKNYRPITCLPTLYKLLTSILRTKINTHIVANNILAFSQNGCRVGSRGTKELLLIDTTICQQVRRNRGSLSAAWVDYKKAYDSVPHSWLERILELYKIDTALRSLLSACMGQWTTVLRQPGGGDGPPGPQDLIRIERGIFQGDSLSPLWFCLALNPLSTLLKDSGLGCRLRRGGEVISHLLYMDDLKLYAPKRQDLVELLEVTETFSSAIKMEFGVDKCAVMHVQRGKVVNSANLQLSETMSLRSISEAETYKYLGMSQSLGIADGDIRQALKERFFCRLTKVLNSLLSGGNKARAFNAWVMPLLTYSFGILRWTQTELDALDTRVRQLLTTHRMRHPRSSVMRMYIPRKCGGRGFLNAKDLHNREVCSLREYFLNNECGIHRDVVAVDKGLTSLSLANENWRRPKVLSTDDRKAVWKSKELHGRFYKALTGPDVDLLASVNWLRFGDLFGETEGFICAIADEVMMTNNYRRYILKDGTVDICRACRRPGESLRHIISGCSHLANGEYLHRHNQVARIIHQQLALRYGLVGSEVPHYKYAPMPVLENGRATPYWDRSIITDRTIVANKPDIVLVDRSKRQAVLVDITIPHDENLVKAEKDKLSKYLDLAHEVTAMWDVDSTIIVPIVVSANGLIAKSLDKHLKRLSLDGWIKGQIQKAVLLDTARIVRRFLSLQP

SEQ ID NO: 5453 - protein, 1207 aa, Apotomis turbidana
MITRSRRKKAEQTNARPPPPPASSSSSPSSSGDEFATAADTSESSDERGPPPPPPRPAARRGRPPLPARLGPTGQPAPTTAPATGGIVRRMRWTRVMNENCMRAYYGATEGGTNLSAYRDRMLPLFQAFGPTIAVSAQRLSDQVRFIQRRKLLNDATLDRLRLEVLAARAASVPARDPPAMSPVPAPAPNLVPGVPLTDPEADVEDYASSVSTQANEQLRRALEEAIRRYRSAPDSRPRLPRLPMHKRNLALMGALDALLEPYLRASKDLADTHSIMYCGAIAACRVARVRFPDTDRAPRTAGGVPAWQVRIERRISSFRTLIAKLICFRGGNNRPRVMRYVTQAFAGTGTRPCDYMACVTERIDYLKQKVYAWASRIRRYRERVDRFQQNRLFQSDQRKVYRKWEGADQCVSDGQLPDPTAMINFWRSIWSVPVEHTEGEWMNVVRRECEPIEAMGAVIISPDDVSCATRTTQNWKSPGPDGLHNFWIKWFRSSHERLATQFQDALELGSLPSFMTTGVTFLLHKSGSTTEAKNYRPITCLPTLYKLLTSILRTKINTHIVANNVLAFSQNGCRVGSRGTKELLLIDTTICQQVRRNRGSLSTAWIDYKKAYDSVPHSWLERILELYKIDTALRSLLGACMRQWTTVLHQPGGGDGPPGPQDLIRIERGIFQGDSLSPLWFCLALNPLSTLLKDSGLGCRLRRGGEVISHLLYMDDLKLYAPKRQDLVELLEVTEAFSSAIKMEFGVDKCAVMHVQRGKVVNSANLQLSETMSLRSISEVETYKYLGMSQSLGIADGDIRQALKERFFCRLTKVLNSLLSGGNKARAFNAWVMPLLTYSFGILKWTQTELDALDTRVRQLLTTHRMRHPRSSVMRLYIPRKCGGRGYLNAKDLHNREVCSLREYFLNNECGIHRDVVAVDKGLTSLSLANENWRRPKVLSTDDRRAVWKSKELHGRFCKALTGPDVDLLASVNWLRFGDLFGETEGFVCAIADEVMMTNNYRRYILKDGTVDICRACRRPGESLRHIISGCSHLANGEYLHRHNQVARIIHQQLALRYGLVGSEVPYYKYAPMPVLENGRATLYWDRSIITDRTIVANKPDIVLVDRSKRQAVLVDITIPHDENLVKAEKDKLSKYLDLAHEVTAMWDVDSTIIVPIVVSANGLIAKSLDKHLKRLSLDGWIKGQIQKAVLLDTARIVRRFLSLQP

SEQ ID NO: 5454 - protein, 1211 aa, Apotomis turbidana
MITRSQARRNTAAHTQNARPTPPPVSSSSSPSSSGDEFATAPDTSESSDDVRGPPPPPPRPPARRGRPPLPACLGPTGQSAPTTAPATGGVVRRMRWTQVMNENCMRAYYGATEGGINLSAYRDRMLPLFLAFDPTITVSAQRLSDQVRFIQRRKLLDDATLDRLRLEVLAARAASTPARDTPATSPVPVPAPNLVPGVRQTDPEADGEDDASSVSTQANEQLRRALEEAIERYRSTPESRPRLPRLPMHKRNLALMGALDALLDPYLRASEDLADTHSIMYCGAIAACRVARVRFPDTDRAPRTAGGVPAWQVRIERRISSFRTFIAKLICFRGGNNRPRVMRYVTQAFAGTGTRPCDYMACVTERIDYLKQKVYAWASRIRRYRERVDRFQQNRLFQSDQRKVYRKWEGTNQCVSDGQLPDPTAMINFWRSIWSVPVEHTEGEWMNVVRRECEPIEAMGAVTISPDDVSCAARKAQNWKSPGPDGLHNFWIKWFRSSHERLATQFQDALELGSLPSFMTTGVTFLLHKSGSTTEAKNYRPITCLPTLYKLLTSILKTKINSHIVANNVLAFSQNGCRVGSRGTKELLLIDTTICQQVRRNRGSLSTAWIDYKKAYDSVPHSWLERILELYKIDTALRSLLGACMRQWTTVLRQPGGGDGPPGPRDLIRIERGIFQGDSLSPLWFCLALNPLSTLLKDSGLGCRLRRGGEVISHLLYMDDLKLYAPKRQDLVELLEVTENFSSAIKMEFGIDKCAVMHVQRGKVVNSANLQLSETMTLRSISEVETYKYLGMSQSLGIADGDIRQALKERFFCRLTKVLNSLLSGGNKARAFNTWVMPLLTYSFGILRWTQTELDALDTRVRQLLTTHRMRHPRSSVMRMYIPRKCGGRGFLNAKDLHNREVCSLREYFLNNECGIHRDVVAVDKGLTSLSLANENWRRPKVLSTDDRRAVWKSKELHGRFYKALTGPDVDLLASVNWLRFGDLFGETEGFVCAIADEVMMTNNYRRYILKDGTVDICRACRRPGESLRHIISGCSHLANGEYLHRHNQVARIIHQQLALQYGLVGSEVPYYKYAPMPVLENGRATLYWDRSIITDRTIVANKPDIVLVDRSKRQAVLVDITIPHDENLVKAEKDKLSKYLDLAHEVTAMWDVDSTIIVPIVVSANGLIAKSLDKHLKRLSLDGWIKGQIQKAVLLDTARIVRRFLSLQP

SEQ ID NO: 5455 - protein, 1207 aa, Apotomis turbidana
MITRSRQKKAEQTNARPPPPPASSSSSPSSSGDEFATAADTSESSDERGPPPPPPQPPARRGRPQLPARLGPTGQPAPTTAPATGGVVRRMRWTRVMNENCMRAYYGATEGGINLSAYRDRMLPLFQVFDPTIAVSAQRLSDQVRFIQRRKLLDDATLDRLRLEVLAARAASVPVRDPPATSPVPAPAANLVPGVPLTDPEADVEDYASSVSTQANEQLRRALEEAIGRYRSAPEPRPRLPRLPIHKRNLALMGALDALLDPYLRASEDLADTHSIMYCGAIAACRVARVRFPDTDRAPRTARGVPAWQVRIERRISSFRTLIAKLICFRGGNNRPRVMRYVTQAFAGTGTRPCDYMACVTERIDYLKQKVYAWASRIRRYRERVDRFQQNRLFQSDQRKVYRKWEGADQCVSDGQLPDPTAMINFWRSIWSVPVEHTEGEWMNVVRRECEPIEAMGAVTISPDDVRCAARTIQNWKSPGPDGLHNFWIKWFRSSHERLATQFQDALELGSLPSFMTTGVTFLLHKSGSTTEAKNYRPITCLPTLYKLLTSILRTKINTHIVANNVLAFSQNGCRVGSRGTKELLLIDTTICQQVRRNRGSLSAAWIDYKKAYDSVPHSWLERILELYKIDTTLRSLLGACMRQWTTVLRQPGGGDGPPGPQDLIRIERGIFQGDSLSPLWFCLALNPLSTLLKDSGLGCRLRRGGEVISHLLYMDDLKLYAPKRQDLVELLEVTEAFSSAIKMEFGVDKCAVMHVQRGKVVNSANLQLSETMSLRSISEVETYKYLGMSQSLGIADGDIRQALKERFFCRLTKVLNSLLSGGNKARAFNAWVMPLLTYSFGILRWTQTELDALDTRVRQLLTTHRMRHPRSSVMRMYIPRKCGGRGFLNAKDLHNREVCSLREYFLNNECGIHRDVVAVDKGLTPLSLANENWRRPKVLSTDDRRAVWKSKELHGRFYKALTGPDVDLLASVNWLRFGDLFGETEGFVCAIADEVMMTNNYRRYILKDGTVDICRACRRPGESLRHIISGCSHLANGEYLHRHNQVARIIHQQLALRYGLVGSEVPYYKYAPMPVLENGRATLYWDRSIITDRTIVANKPDIVLVDRSKRQAVLVDITIPHDENLVKAEKDKLSKYLDLAHEVTAMWDVDSTSIVPIVVSANGLIAKSLDKHLKRLSLDGWIKGQIQKAVLLDTARIVRRFLSLQP

SEQ ID NO: 5456 - protein, 1207 aa, Apotomis turbidana
MITRSRRKKAEQTNARPPPPPASSSSSPSSSGDEFATAADTSESSDERGPPPPPPQPPARRGRPQLPARLGPTGQPAPTTAPATGGVVRRMRWTRVMNENCMRAYYGATEGGINLSAYRDRMLPLFQVFDPTIAVSAQRLSDQVRFIQRRKLLDDATLDRLRLEVLAARAASVPARDPPATSPVPAPAPNLVPGVPLTDPEADVEDYASSVSTQANEQLRRALEEAIGRYRSAPEPRPRLPRLPIHKRNLALMGALDALLDPYLRASEDLADTHSIMYCGAIAACRVARVRFPDTDRAPRTARGVPAWQVRIERRISSFRTLIAKLICFRGGNNRPRVMRYVTQAFAGTGTRPCDYMACVTERIDYLKQKVYAWASRIRRYRERVDRFQQNRLFQSDQRKVYRKWEGADQCVSDGQLPDPTAMINFWRSIWSVPVEHTEGEWMNVVRRECEPIEAMGAVTISPDDVRCAARTIQNWKSPGPDGLHNFWIKWFRSSHERLATQFQDALELGSLPSFMTTGVTFLLHKSGSTTEAKNYRPITCLPTLYKLLTSILRTKINTHIVANNVLAFSQNGCRVGSRGTKELLLIDTTICQQVRRNRGSLSTAWIDYKKAYDSVPHSWLERILELYKIDTALRSLLGACMRQWTTVLRQPGGGDGPPGPQDLIRIERGIFQGDSLSPLWFCLALNPLSTLLKDSGLGCRLRRGGEVISHLLYMDDLKLYAPKRQDLVELLEVTEAFSSAIKMEFGVDKCAVMHVQRGKVVNSANLQLSETMSLRSISEVETYKYLGMSQSLGIADGDIRQALKERFFCRLTKVLNSLLSGGNKARAFNAWVMPLLTYSFGILRWTQTELDALDTRVRQLLTTHRMRHPRSSVMRMYIPRKCGGRGFLNAKDLHNREVCSLREYFLNNECGIHRDVVAVDKGLTSLSLANENWRRPKVLSTDDRRAVWKSKELHGRFYKALTGPDVDLLASVNWLRFGDLFGETEGFVCAIADEVMMTNNYRRYILKDGTVDICRACRRPGESLRHIISGCSHLANGEYLHRHNQVARIIHQQLALRYGLVGSEVPYYKYAPMPVLENGRATLYWDRSIITDRTIVANKPDIVLVDRSKRQAVLVDITIPHDENLVKAEKDKLSKYLDLAHEVTAMWDVDSTSIVPIVVSANGLIAKSLDKHLKRLSLDGWIKGQIQKAVLLDTARIVRRFLSLQP

SEQ ID NO: 5457 - protein, 869 aa, Notocelia uddmanniana
MRFVNQAFAGTGVRPRDYVTCVTERIDFLKQKVCAWASRIRRYRERVDRYQQNRLFQSDQRKVYRKWEGTDHRVCDGQRPDATAMGNFWRSIWSVPVEHTEGAWIGVVERECESIEPMGSVTISPEDISCAIRTAPNWKSPGPDGLHNFWLKWFRCSHERLATQFQQALELGSLPHLLTTGVTSLLYKSGSTTEAKNYRPITCLPTLYKLLTSILRAKINTHIVANNILAPAQNGCRVGSRGTKELLLIDMTICQRVRRSRGALSAAWIDYKKAYDSVPHSWLRRILELYKVDAALRSFLSACMGQWTTVLRQPGGGDGSSGPQDSIRIERGIFQGDSLSPLWFCLALNPLSTLLKDSGLGCQLRRGGEVISHLLYMDDLKLFAPNRQDLLELLKTTEVFSSAIKMEFGVDKCAVMHVQRGKVVNSTNLQLSETMSLRSLSEAETYKYLGMSQSLGIEGEGIKQAVKERFFCRLTKVLNSFLSGGNKVRAFNAWVMPLLTYSFGILRWTQTELDALDRRVRVLLTTHRMLHPRSSVMRLYIPRKCGGRGFLNAKDLHNREVCSLRDYFLNSECGMHRDVVAVDASFTPLSMANENWRRFKVLSTEDRKAEWKSRELHGRFYKALTGPDVDLLASVNWLRFGDLFGETEGFVCAIADEVIMTNNYRRYILKDGTVDICRACRRPGESLRHIISGCGHLANGEYLHRHNLVARIIHQQLALSYGLVNFEVPYYKYLPAPVLENGRATLYWDRSIITDRTIVANKPDIVLIDRSKRQAVLVDITIPHDENLVKAEKDKVSKYLDLAHEVTAMWDVDSTIIVPIVVSANGLIAKSLDQHLKRLSLDGWVKGQIQKAVLLDTARIVRRFLSLSP

SEQ ID NO: 5458 - protein, 1207 aa, Crocallis elinguaria
MITRSRNKAGTASARQPPPPASSSPSSSSGVEYGTPLDTSASSDEDGPPSPPPPPPPARRGRPPLPARLGPVGHSVPRAAPAAGGIVRRMRWTSDMNENCMRAYYGATEGGTNMSAYRDRMLPLFQTLEPSVAVSTQRLSDQVRAIQRLKLLDESVLDRLRLEALPIRATSASTRDLSVAPPVPAPLPAPSSVATRIDPVVDEDDCANISVSTQVNEQLRRALEDAILEYQYTPDSRPRLPRLPTNRRNLALMGVLNVLLAPYLRASENLFDTHSIMYCGAIAVCRVARVKFPDADRAPRTAGNAPAWQVRIERRINTFRTLIAKLVCFSRGNNRPRVMRFVNQAFAGTGIRPQNYMAGVTERIDFLKQKIYAWVNRIRRYRERVDRYHQNRLFESDQRKVYRNWEGTDQRVSDGQMPDTNAMINFWRGIWSVPVEHTEGDWMRTVEQSCESIETMGSVTIDPIDVSCAIRTAQNWKSPGPDGLHNFWIKWIRCSHECLAVQFQEALELGSLPCFLTTGVTSLLHKSGSTTEAKNYRPITCLPTLYKLLTSILRAKINSHVVANNILAPAQNGCRVGSRGTKELLLIDTAICQQVRRNRGALSTAWIDYKKAYDSVPHSWLERILELYKIDTTLRSFLSTCMRQWTTVLRQPGSGNSPSGPENFIKIERGIFQGDSLSPLWFCLALNPLSTLLRDSRLGCKLRREGEIISHLLYMDDLKLLAPKSPDLMKLLKITEIFSSAIKMEFGVDKCAVMHVQRGKVVNSDNLQLSETMTLRSLSEAETYRYLGMSQSLGIAVGDIKQSVKERFFCRLTKVLNSLLSGGNKARAFNGWVMPLLIYSFGILKWTQTELDSLDRRVRQLLTYHRMLHPRSSVMRLYIPRKWGGRGFLNAKTLHNREVCSLREYFLNNECGMHRDVVAVDRNLTPLSLANENWRKPVVMTTEDRKDVWKGKELHGRFYRALTGSDVDLLASVNWLRFGDLFGETEGFVCAIMDEVIKTNNYRKYIMKDGTVDICRACRRPGESLRHIISGCSHLANGEYLHRHNLVARIIHQQIALPYGLVESEVPYYKYAPAPVLENGRALLYWDRSIIADRTIVANKPDIVLVDRSQCRAVLVDITVPHDENLVKAEKDKLSKYLDLAHEVTAMWNVDSTIIVPIVVSANGLVAKSLDQHLKRLSLDGWIKGRMQKAVLLDTARIVRRFLTLQP

SEQ ID NO: 5459 - protein, 1207 aa, Crocallis elinguaria
MITRSRNKAGTASARQSPPPASSSPSSSSGDEYGTPLDTSASSDEDGPPSPPPPPPPARRGRPPLPARLGPAGHSVPRAAPATGGIVRRMRWTSDMNENCMRAYYGATEGGTNMSAYRDRMLPLFQTLEPSVAVSTQRLSDQVRAIQRLKLLDESVLNRLRLEALPIRATSASARDLSVAPPVPAPLPAPSSVATPIDPVVDEDDCANISVSTQVNEQLRRALEDAILEYQYTPDSRPRLPRLPTNRRNLALMGALNVLLAPYLRASENLFDTHSIMYCGAIAVCRVARVKFPDADRAPRPAGSAPAWQVRIERRINTFRTLIAKLICFSRGNNRPRVMRFVNQAFAGTGIRPQNYMAGVTERIDFLKQKIYAWVNRIRRYRERVDRYHQNRLFESDQRKVYRNWEGTDQRVSDGQLPDTNAMINFWRGIWSVPVEHTEGDWMRTVEQSCESIETMGSVTIDPIDVSCAIRTAQNWKSPGPDGLHNFWIKWIRCSHECLAVQFQEALELGSLPRFLTTGVTSLLHKSGSTTEAKNYRPITCLPTLYKLLTSILRAKINSHVVANNILAPAQNGCRVGSRGTKELLLIDTAICQQVRRNKGALSTAWIDYKKAYDSVPHSWLERILELYKIDTTLRTFLSTCMRQWTTVLRQPGSGNSPSGPENFIKIERGIFQGDSLSPLWFCLALNPLSTLLRDSRLGCKLRREGEIISHLLYMDDLKLLAPKSPDLMKLLKITEIFSSAIKMEFGVDKCAVMHVQRGKVVNSDNLQLSETMTLRSLSEAETYRYLGMSQSLGITVGDIKQSVKERFFCRLTKVLNSLLSGGNKARAFNGWVMPLLIYSFGILKWTQTELDSLDRRVRQLLTYHRMLHPRSSVMRLYIPRKWGGRGFLNAKTLHNREVCSLREYFLNNECGMHRDVVAVDRNLTPLSLANENWHKPVVMTTEDRKEVWKGKELHGRFYRALTGSDVDLLASVNWLRFGDLFGETEGFVCAIMDEVIKTNNYRKYIMKDGTVDICRACRRPGESLRHIISGCSHLANGEYLHRHNLVARIIHQQIAFQYGLVESEVPYYKYAPAPVLENGRALLYWDRSIITDRTIVANKPDIVLVDRSQRRAVLVDITVPHDENLVKAEKDKLSKYLDLAHEVTAMWNVDSTIIVPIVVSANGLVAKSLDQHLKRLSLDGWIKGRMQKAVLLDTARIVRRFLTLQP

SEQ ID NO: 5460 - protein, 1212 aa, Peribatodes rhomboidaria
MITRSKTKKEADTPSTRPPPPPSSSSECPSSEEDEYATPLDTTDTSNEEAAPTPAPPPPPARRGRPPLPARLGPAGRSAPPTAPATGGVVCRMRWTRTINENCMRAYYGATEGGTNLTAYRVRMLSLFQVLEPTVTVSAQRLSDQVRAIHRCKLLDQSVLDRLCLEAIRARPTPASTRDRPVASSAPTWASVPASAATLATLADTDVDGDRTSVSVSSQVSEHLRRTLEDAISQYRYAPDSRPRLPRLPTHRRNMALMGALNVLLAPYLRASENLTDTHSILYCGAIAACRVARVKFPDTSRAPRPAGGVPAWQVRIERRISTFRTLIAKLLCFSRGNSRPRVMRFVTQAFAGTDIRPQYYLANVTERIDYLKQKVYAWANRIRRYRERVDRYWQNRLFQSDHRKVYRGWEGTEQCAIDGHRPDASAMIDFWRGIWSVPVEHTEGEWMRIVERECESIESMESILIDSVDVSYAIHTAQNWKSPGPDGLHNFWIKWIRCSHDRLAIQFQEALELCSLPSFMTTGVTLLLHKSGSTTDPKNYRPITCLPTIYKLLTSILRNKINTHIVANNVLAPAQNGCRVGSRGTKELLLIDMAISQQVRRSKGALSVAWIDYKKAYDSVPHSWLERILELYKIDITLKSFLSACMRQWTTVLRQPGGGEVSADPQDLIRIERGIFQGDSLSPLWFCLALNPLSTLLKDLGLGHRLRRGGEVISHLLYMDDLKLFAPKRQDLMELLKTTEVFSSAIKMEFGVDKCAVMHVQRGKVVNSPNLQLSETMTFRSLSEVETYKYLGMSESLGISVVDIKKSIKERFFCRLTKVLNSLLSGGNKMRAFNGWVMPLLIYSFGILRWTQTELDALDRRVRQLLTTHRMLHPRSSVMRLYIPRKWGGRGMLNAKNLHNREVYRLRSFFRNNDCGMHCDVVAVDKGLTPLSLANENWRQPSVLSTEDRKNVWKGKELHGWFHWALTGPDVDLLASVNWLRFGDLFGETEGFACAIADEVIKTNNYRKYILNDGTVDICRACHRPGESLRHIISGCSHLANGEYLHRHNQVARIIHQQLALQYGLVESEVPYYKYAPASVLENGRALLYWDRSIITDRTIVANKPDIVLVDRSQRRAVLVDITIPHDENHVKAEKDKLSKYLDLAHEVTAMWDVDSTIIVPIVVTVNGLIAKSLDQHLKRLSLDGWIKGQIQKAVILDTCRIVRRFLTLQP

SEQ ID NO: 5461 - protein, 1210 aa, Pammene fasciana
MITRSKARAATTHARPPSPLASSSSPSTSSSSDDFETASDTDESSDESGPPPPPPQPPARRGRPPLPARLGPTGHPVPPRAPAAGGIVRRMRWTCSMNENVMRAYYGATEGGTNLCAYRARILPLFQALEPTIDTTTQRLSDQVRVIQRLKRLDDATLDRLRLEALSARAASTSARDPPATSPDPMPAPDLASGAPRIDPSADEEYIASQSVSSTANEQLRRTLEEAITQYRSTNIPRPRLPRLPMNRRNLALMGALNDLLNPILRTSKDLDDTHSIMYCGAIAACRVARIKFPDAERAPRTAGGVPAWQVRIERRINSFRTLIAKLICFRGGNNRPRVMRFVYQAFAGTDIEPRDYMANITERIDFLRQKVYAWASRIRRYRERVDRFRQNRLFQSDQRKVYRRWEEADPRVSDVRLPDATAMTDFWRSIWSAPVKHTEGEWMNVVERECESIEPMGAITISPDDVSCAIRTSQNWKSPGPDGLHNFWLKWFRCSHSRLATQFQHALELGSLPPSLTTGVTFLLYKSGSTTEAKNYRPITCLPTLYKLLTSILRAKINAHMVANNILASAQNGCRVGSRGTKELLLIDMTICQRVRRNRGALSAAWIDYKKAYDSVPHSWLERILELYKVDAALRSFLGACMRQWTTVLRQPGGGDDPPGPQDFIRIERGIFQGDSLSPLWFCLALNPLSTLLKDSGLGCRLRREGEVISHLLYMDDLKLFAPNNRDLLELLKTTEVFSSSIKMEFGVDKCAVMHVERGKVVNSTNLQLSETMTFRSISESETYKYLGMSQSLGIEDVGIKQALKERFFGRLTKVLNSLLSGGNKVRAFNAWVMPLLTYSFGILRWTQTELDALDRRVRLLLTTHRMLHPRSSVMRLYIPRKCGGRGFLNAKNLHNREVYNLRNYFLNNECGMHRDVVTVDKNLTPLSLANENWRKPVVLSTEDRKAVWKSKELHGRFYGALTGPDVDLLASVNWLRFGDLFGETEGFACAIADEVIMTNNYRRYILKDGTVDICRACRRPGESLRHIISGCSHLANGEYLHRHNLVARIIHQQLALLYGLVAHEVPYYKYTPAPVLENGRATLYWDRSIITDRTIVANKPDIVVIDRPQRRAMLVDITVPCDVNLVKAEKDKSSKYLDLAHEVTAMWEVDSAIIVPIVVSANGLIAKSLDQHLERLSLRGCGWIKGQIQKAVILDTARIVRRFLSLRP

SEQ ID NO: 5462 - protein, 1212 aa, Pammene fasciana
MITRSKSRLQQASPPNARPPSSPASSVSSPSSSGDEFATAPDTSESSDECGPPPPPPRPPARRGRPPLPARLGLAGQPAPPRAPAAGGIVRRMRWTQTMNENVMRAYYGATEGGTNLCAYRVRLLPLFQALEPTTNVTAQRLSDQVRVIQRDKRLDDSTLDRLRLEALSAHAASTSARDPPATAPDPMPAPDLASGAPRVDPSADEEEIATQSVSSTANEQLRRTLEEAITQYRSTNIPRPRLPRLPMNKRNLALMGALNDLLDPFLRTSKDLDDTHSIMYCGAIAACRVARVKFPDAERAPRTAGGVPAWQVRIERRINSFRTLIAKLICFRGGNNRPRVMRFVHQAFAGMDIEPRDYMANVTERIDFLKQKVYAWASRIRRYRERVDRFRQNRLFQSDQRKVYRRWEEADPRVSDVRLPDATAMTDFWRSIWSAPVEHTEGEWMSVVERECETIEPMGAITISPDDVSCAIRTAQNWKSPGPDGLHNFWLKWFRCSHSRLATQFQQALELGSLPPSLTTGVTFLLYKSGSTTEAKNYRPITCLPTLYKLLTSILRAKINAHMVANNILASAQNGCRVGSRGTKELLLIDMTICQRVRRNRGALSAAWIDYKKAYDSVPHSWLERILELYKIDAALRSFLGACMRQWTTVLRQPGGGDDPPGPQDFIRIERGIFQGDSLSPLWFCLALNPLSTLLKDSGLGCRLRRESEVISHLLYMDDLKLFAPNNRDLLELLKTTEVFSSSIKMEFGVDKCAVMHVQRGKVVNSTNLQLSETMTFRSISESETYKYLGMSQSLGIEDAGIKQALRERFFGRLTKVLNSLLSGGNKVRAFNAWVMPLLTYSFGILRWTQTELDALDRRVRQLLTTHRMLHPRSSVMRLYIPRKCGGRGFLNAKNLHNREVYNLRNYFLNNECGMHRDVVAIDKGLTPLSLANENWRKPVVLSTEDRKAVWKSKELHGRFYGALTGPDVDLLASVNWLRFGDLFGETEGFACAIADEVIMTNNYRRYILKDGTVDICRACRRPGESLRHIISGCSHLANGEYLHRHNLVARIIHQQLALLYGLVDHEVPYYKYTPAPVLENGRATLYWDRSIITDRTIVANKPDIVVIDRPQRRAMLVDITVPSDVNLVKAEKDKSSKYLDLAHEVTAMWEVDSAIIVPIVVSANGLIAKSLDQHLERLSLRGCGWIKGQIQKAVILDTARIVRRFLSLRP

SEQ ID NO: 5463 - protein, 869 aa, Campaea margaritaria
MRFVNQAFAGTDIRPRNYMTCVTERIDFLKQKVYAWANRIRRYRERVNRYCQNRLFQSDQRKVYRNWEVTGQRMDDGQLPDVTAMINFWRGIWSVPVEHTEGDWMNIVERACDPIESMEAVSISPIDVRYAIQTAQNWKSPGPDGLQNFWIKWIRSSHSCLAMQFQEAIELGSLPSFMTTGSTTLLFKSGSTTEAKNYRPITCLPTMYKLLTSILRTKINSHIIANNILAPAQNGCRVGSRGTKELLLIDMTICQQVRRKKGALSTAWVDYKKAYDSVPHSWLVRILELYKIDTTLRSFLRTCMGQWSTVLRQPGGGDSVFGPQDFIRIERGIFQGDSLSPLWFCLALNPLSTLLQNSGLGYRLRREGEIISHLLYMDDLKLFAPKRFDLMKLLNITEEFSKSINMEFGVDKCAVMHVQRGKVVNSSNLQLSESLSLRSLSEAETYKYLGVSESLGIVDRDIKQSVKERFFCRLTKVLNSHLSGGNRARAFNGWVMPLLTYSFGILRWTQTELDALDRRVRQQLTLHRMLHPRSSVMRLYIPRKWGGRGFLNAKNLHNREVCSLREYFLNTECGMHRDVVVVDKTLTPLSLANGNWRKPSVLSTDDRKDVWKGKELHGRFYRALTGPDVDLLASVNWLRFGDLFGETEGFVCAIADEVIKTNNYRKYIMKDGTVDICRACRRPGESLRHIISGCSHLANGEYLHRHNQVARIVHQQLALQYGLVELEVPYYKYAPAPVLENGRALLYWDRSVITDRTIVANKPDIVLVDRSQRRAVLVDITVPHDENLVKAEKDKLSKYLDLAHEVTAMWDVDSTIIVPIVVSANGLVAKSLDQHLKRLSLDGWIKGRMQKAVLLDTARIVRRFLSLQP

SEQ ID NO: 5464 - protein, 963 aa, Bembecia ichneumoniformis
MHKQNIALMGALNTLLAPYIKASRDLTDTHSILYCGAIAACRVARVKFLNFDRATRGAEDVPAWQVRIERRISKFRTLIAKLISFCRGNTRPRVMRFVAQAFVGTNIKSKDYLTWATERIDYFKQKVYALANRVRRYKERVHRYRQNRLFQSDQRKVYRDWEKTNQSVNVGHPPAPEVMLKFWRDIWSVSDEHTEGDWISIVEQACEPITTMKAVNISPTDVSCAIRSTQNWKSPGPDGLHNFWIKMIQCSHECLAMQFQEALELGTLPTFLTTGITFLLHKSGSTTEAKNYRPITCLPTIYKLLTSILRTKINSHILENNILDTAQNGCKIGSRGTKELLLIDMTICQRVRRNSGALSVAWIDYQKAYDSVPHSWLRRILELYKIDTTLRSFLAMCMGQWITGLCQPCYRGGAADLRDTIKIKRGIFQGDSLSPLWFSLALNPLSTLLRNLKLGYRLRRGGEVISHLLYMDDLKLFAPKPKDLLELLKITQCFSNAIRMDFGVDKCAVMHVQKGKVVNSPNLQLSNEVSFKSLSEVQTYKYLGMSQSLGISDKDIKETVKTRFFGRLIKVLNSLLSGDNKVRAFNGWVMPLLTYSFGILRWTQTELDGLDRRVRRLLTAYRMLHPRSSVMRLYIPRKLGGRGFLNAKNLHNREVYSLREYFLNHESGVHRDVVAIDKNFTPLSLANGNWRKLVVLSTEDRKSVWKGKELHGRFYKALTGPDVDSLMSVNWLRFGDLFGETESFVCAIADEVIKTNNYRKYILKDGTVDICRACHRPGETLRHIISGCAHLSNGEYLHRHNQVARIIHQQLAIRYGLIESEVPYYKYVPAPVLENGHATLYWDRSIITDRTIVANKPDIVVIDRSQRRTMLVDIAVPHDENLVKAEKEKLTKYIDLAHEVTAMWDVDSTIIVPIVVSANGLIAKSLDQHLKRLSLDGWIRGQIQKAVLLDTARIVRRFLTLQP

SEQ ID NO: 5465 - protein, 963 aa, Cydia splendana
MNRRNLALMGALNALLEPYLRTSKDLDDTHSIMYCGAIAACRVARVKFPDAERAPRTAGGVPAWQARIERRISSFRTLIAKLICFRGGNNRPRVMRFVNQAFAGTDIRPRDYMANVTERIDFLKQKVYAWANRIRRYRERVDRFQQNRLFQSDQRKVYRRWEETNLRTPDTQPPDATAMTNFWRSIWSVPVGHTEGSWMSVVERECESIEPMGAVTISPDDVSCAIRTAQNWKSPGPDGLHNFWLKWFRCSHSRLAAQFQQALELGSLPPSLTTGVTFLLYKSGSTTEAKNYRPITCLPTLYKLLTSILRAKINAHIVANNILASAQNGCRVGSRGTKELLLIDMTICQQIRRNRGALSAAWIDYKKAYDSVPHSWLGRVLELYKVDAALRAFLSACMRQWTTVLRQPGGRDDRPGPQDFIRIERGIFQGDSLSPLWFCLALNPLSTLLKDLGLGCRLRREGEVISHLLYMDDLKLFAPNSQDLLELLKTTEVFSSAIHMEFGVDKCAVMHVQRGRVVNSTNLQLSETMSFRSISESETYKYLGMSQSLGIEDEGIRRSVKERFFSRLTKVLNSLLSGGNKVRAFNAWVMPLLTYSFGILRWTQTELDALDRRVRSLLTTHRMLHPRSSVMRLYIPRKCGGRGFLNAKDLHNREVYNLRNYFLNNECGMHRDVVAVDRNLTPLSLANENWRKPVVLSTADRKAAWESKVLHGRFYKALTGPDVDLLASVNWLRFGDLFGETEGFACAIADEVMMTNNYRKYILKDGTVDICRACRRPGESLRHIISGCSHLANGEYLHRHNLVARIIHQQLALLYGLVDREVPYYKYLPAPVLENGHATLYWDRSIITDRTIVANKPDIVIIDRSQRRAMLVDITIPHDENLVKAEKDKSSKYLDLAHEITAMWDVDSTIIVPIVVSVNGLIAKSLDQHLERLSLGGWIKGQMQKAVILDTARIVRRFLSLQP

SEQ ID NO: 5466 - protein, 1209 aa, Cydia splendana
MQTRSKTRAQLASPRNARPPPPSASSVSSQSSSGDEFATAPDTSESSDECGPPPPPSRPPARRGRPPLSARLGPAGHPAPPTAPAAGGVVRRMRWSQTINENVMRAYYGATEGGTNLCAYRVRMLPLFQALEPTIDVTAQRLSDQVRVIQRQKRLDDSTLDRLRLEALSARAASTSARDPPATSPDPVPAPDQAPGAPRVDLSADEEEFAQSVGSTANEQLRRTLDEAITRYRSTPDTRPRLPRLPMNRHNLALMGALNALLEPYLRTSKDLDDTHAIMYCGAIAACRVARVKFPDSERAPRTAGGAPAWQIRIERRISSFRTLIAKLICFRGGNNRPRVMRFVNQAFVGTDIRPRDYMANVTERIDFLKQKVYAWANRIRRYRERVDRFKQNRLFQSDQRKMYRRWEETNLRASDSRPPDATVMNDFWRSIWSVPVGHTEGSWMSVVERECESIEPMGAVTISPDDVSCAIRTAQNWKSPGPDGLHNFWLKWFRCSHSYLAAQFQQALELGSLPPSLTTGVTFLLYKSGSTTEAKNYRPITCLPTLYKLLTSILRAKINAHIVANNILASAQNGCRVGSRGTKELLLIDMTICQQIRRTKGALSAAWIDYKKAYDSVPHSWLGRVLELYKVDAALRAFLSACMGQWTTVLRQPGGGDDRPGPQDFIRIERGIFQGDSLSPLWFCLALNPLSTLLKDLGLGCRLRREGEVISHLLYMDDLKLFAPNTQGLLELLKTTEVFSSAINMEFGVDKCAVMHVQQGKVVNSTNLQLSETMSFRSISESETYKYLGMSQSLGIEDEGIRRSVKERFFSRLTKVLNSLLSGGNKVRAFNAWVMPLLTYSFGILRWTQTELDALDRRVRSLLTTHRMLHPRSSVMRLYIPRKCGGRGFLNAKDLHNREVYNLRNYFLNNECGMHRDVVAVDRNLTPLSLANENWRKPVVLSTADRKAAWESKALHGRFYKALTGPDVDLLASVNWLRFGDLFGETEGFACAIADEVMMTNNYRKYILKDGTVDICRACRRPGESLRHIISGCSHLANGEYLHRHNLVARIIHQQLALLYGLVDREVPYYKYLPAPVLENGRATLYWDRSIITDRTIVANKPDIVLIDRSQRRAVLADVTIPHDENLVKAEKDKSSKYLDLAHEITAMWDVDSTIIVPIVVSANGLIAKSLDHHLERLSLGGWIKGQMQKAVILDTARIVRRFLTLRP

SEQ ID NO: 5467 - protein, 1209 aa, Cydia splendana
MQTRSKTRAQLASPRNARPPPPSASSVSLQSSSGDEFATAPDTSESSDECGPPPPPPRPPARRGRPPLSARLGPAGHPAPPTAPAAGGVVRRMRWSQTMNENVMRAYYGATEGGTNLCAYRVRMLPLFQALEPTIDVTAQRLSDQVRVIQRQKRLDDSTLDRLRMEALSARAASASARDPPATSPDPVLAPDQAPGAPRVDLSADEEEFAQSVSSTANEQLRRTLDEAITQYRSTPNTRPRLPRLPMNRHNLALMGALNALLEPYLRTSKDLDDTHAIMYCGAIAACRVARVKLPDSERAPRTAGGAPAWQVRIERRISSFRTLIAKLICFRGGNNRPRVMRFVNQAFAGTDTRPRDYMANVTERIDFLKQKVYAWANRIRRYRERVDRFQQNRLFQSDQRKMYRKWEETNLRASDSQPPDATVMNDFWRSIWSVPVGHTEGSWMSVVERECESIEPMGAVTISPDDVSCAIRTAQNWKSPGPDGLHNFWLKWFRCSHSCLAAQFQQALELGSLPPSLTTGVTFLLYKSGSTTEAKNYRPITCLPTLYKLLTSILRAKINAHIVANNILASAQNGCRVGSRGTKELLLIDMTICQQIRRTKGALSAAWIDYKKAYDSVPHSWLGRVLELYKVDAALRAFLSACMGQWTTVLRQPGGGDDRPGPQDFIRIERGIFQGDSLSPLWFCLALNPLSTLLKDLGLGCRLRREGEVISHLLYMDDLKLFAPNTQGLLELLKTTEDFSSAINMEFGIDKCAVMHVQRGRVVNSTNLQLSETMSFRSISESETYKYLGMSQSLGIEDEGIRRSVKERFFSRLTKVLNSLLSGGNKVRAFNAWVMPLLTYSFGILRWTQTELDALDRRVRSLLTTHRMLHPRSSVMRLYIPRKCGGRGFLNAKDFHNREVYNLRNYFLNNECGMHRDVVAVDRNLTPLSLANENWRKPVVLSTADRKAAWESKVLHGRFYKALTGPDVDLLASVNWLRFGDLFGETEGFACAIADEVMMTNNYRKYILKDGTVDICRACRRPGESLRHIISGCSHLANGEYLHRHNLVARIIHQQLALLYDLVDREVPYYKYLPAPVLENGRATLYWDRSIITDRTIVANKPDIVLIDRSQRRAVLADVTIPHDENLVKAEKDKSSKYLDLAHEITAMWDVDSTIIVPIVVSANGLIAKSLDQHLERLSLGGWIKGQMQKAVILDTARIVRRFLTLRP

SEQ ID NO: 5468 - protein, 963 aa, Cydia splendana
MNRRNLALMGALNALLEPHLRTSKDLDDTHSIMYCGAIAACRVARVKFPDAERAPRTVGGVPAWQARIERRISSFRTLIAKLICFRGGNNRPRVMRFVNQAFAGTDIRPRDYMANVTERIDFLKQKVYAWANRIRRYRERVDRFQQNRLFQGDQRKVYRKWEETNLRTPDTQPPDVTAMTDFWRSIWSVPVGHTEGGWMSVVERECESIEPMGAVTISPDDVSCAIRTAQNRKSPGPDGLHNFWLKWFRCSHSCLAAQFQQALELGSLPPSLTTGVTFLLYKSGSTTEAKNYRPITCLPTLYKLLTSILRAKINAHIVANNILASAQNGCRVGSRGTKELLLIDMTICQQIRRNKGAFSAAWIDYKKAYDSVPHSWLGRVLELYKVDAALRAFLSACMRQWTTVLRQPGGRDDRPGPQDFIRIERGIFQGDSLSPLWFCLALNPLSTLLKDLGLGCRLRREGEVISHLLYMDDLKLFAPNSQDLLELLKTTEVFSSAIHMEFGVDKCAVMHVQRGRVVNSANLQLSETMSFRSISESETYKYLGMSQSLGIEDEGIRRSVKERFFSRLTKVLNSLLSGGNKVRAFNAWVMPLLTYSFGILRWTQTELDALDRRVRSLLTAHRMLHPRSSVMRLYIPRKCGGRGFLNAKDLHNHEVYNLRNYFLNNECGMHRDVVAVDRNLTPLSLANENWRKPVVLSTADRKAAWESKVLHGRFYKALTGPDVDLLASVNWLRFGDLFGETEGFACAIADEVMMTNNYRKYILKDGTVDICRACRRPGESLRHIISGCSHLANGEYLHRHNLVARIIHQQLALLYDLVDREVPYYKYLPAPVLENGRATLYWDRSIITDRTIVANKPDIVIIDRSQRRAVLVDITIPHDENLVKAEKDKSSKYLDLAHEITAMWDVDSTIIVPIVVSVNGLIAKSLDQHLERLSLGGWIKGQMQKAVILDTARIVRRFLSLQP

SEQ ID NO: 5469 - protein, 1209 aa, Cydia splendana
MQTRSKTRAQLASPRNARPPPPSASSVSSQSSSGDEFATAPDTSESSYECGPPPPPSRPPARRGRPPLSARLGPAGHPAPPTAPAAGGVVRRMRWSQTINENVMRAYYGATEGGTNLCAYRVRMLPLFQALEPTIDVTAQRLSDQVRVIQRQKRLDDSTLDRLRLEALSARAASTSARDPPATSPDPVPAPDQAPGAPRVDLSADEEEFAQSVGSTANEQLRRTLDEAITRYRSTPDTRPRLPRLPMNRHNLALMGALNALLEPYLRTSKDLDDTHAIMYCGAIAACRVARVKFPDSERAPRTAGGAPAWQIRIERRISSFRTLIAKLICFRGGNNRPRVMRFVNQAFVGTDIRPRDYMANVTERIDFLKQKVYAWANRIRRYRERVDRFQQNRLFQSDQRKMYRKWEETNLRASESRPPDATVMNDFWRSIWSVPVGHTEGSWMSVVERECESIEPMGAVTISPDDVSCAIRTAQNWKSPGPDGLHNFWLKWFRCSHSYLAAQFQQALELGSLPPSLTTGVTFLLYKSGSTTEAKNYRPITCLPTLYKLLTSVLRAKINAHIVANNILASAQNGCRVGSRGTKELLLIDMTICQQIRRTKGALSAAWIDYKKAYDSVPHSWLGRVLELYKVDAALRAFLSACMGQWTTVLRQPGGGDNRPGPQDFIRIERGIFQGDSLSPLWFCLALNPLSTLLKDLGLGCRLRREGEVISHLLYMDDLKLFAPNTQGLLELLKTTEVFSSAINMEFGVDKCAVMHVQRGKVVNSTNLQLSETMSFRSISESETYKYLGMSQSLGIEDEGIRRSVKERFFSRLTKVLNSLLSGGNKVRAFNAWVMPLLTYSFGILRWTQTELDALDRRVRSLLTTHRMLHPRSSVMRLYIPRKCGGRGFLNAKDLHNREVYNLRNYFLNNECGMHRDVVAVDRNLTPLSLANENWRKPVVLSTADRKAAWESKALHGRFYKALTGPDVDLLASVNWLRFGDLFGETEGFACAIADEVMMTNNYRKYILKDGTVDICRACRRPGESLRHIISGCSHLANGEYLHRHNLVARIIHQQLALLYGLVDREVPYYKYLPAPVLENGRATLYWDRSIITDRTIVANKPDIVLIDRSQRRAVLADVTIPHDENLVKAEKDKSSKYLDLAHEITAMWDVDSTIIVPIVVSANGLIAKSLDQHLERLSLGGWIKGQMQKAVILDTARIVRRFLTLRP

SEQ ID NO: 5470 - protein, 963 aa, Cydia splendana
MNRHNLALMGALNALLEPYLRTSKDLDDTHAIMYCGAIAACRVARVKFPDSERAPRTAGGAPAWQIRIERRISSFRTLIAKLICFRGGNNRPRVMRFVNQAFVGTDIRPRDYMANVTERIDFLKQKVYAWANRIRRYRERVDRFQQNRLFQSDQRKMYRKWEETNLRASDSRPPDATVMNDFWRSIWSVPVGHTEGSWMSVVERECESIEPMGAVTISPDDVSCAIRTAQNWKSPGPDGLHNFWLKWFRCSHSYLAAQFQQALELGSLPPSLTTGVTFLLYKSGSTTEAKNYRPITCLPTLYKLLTSILRAKINAHIVANNILASAQNGCRVGSRGTKELLLIDMTICQQIRRTRGALSAAWIDYKKAYDSVPHSWLGRVLELYKVDAALRAFLSACMGQWTTVLRQPGGGDDRPGPQDFIRIERGIFQGDSLSPLWFCLALNPLSTLLKDLGLGCRLRREGEVISHLLYMDDLKLFAPNTQGLLELLKTTEVFSSAINMEFGVDKCAVMHVQRGKVVNSTNLQLSETMSFRSISESETYKYLGMSQSLGIEDEGIRRSVKERFFSRLTKVLNSLLSGGNKVRAFNAWVMPLLTYSFGILRWTQTELDALDRRVRSLLTTHRMLHPRSSVMRLYIPRKCGGRGFLNAKDLHNREVYNLRNYFLNNECGMHRDVVAVDRNLTPLSLANENWRKPVVLSTADRKAAWESKALHGRFYKALTGPDVDLLASVNWLRFGDLFGETEGFACAIADEVMMTNNYRKYILKDGTVDICRACRRPGESLRHIISGCSHLANGEYLHRHNLVARIIHQQLALLYGLVDREVPYYKYLPAPVLENGRATLYWDRSIITDRTIVANKPDIVLIDRSQRRAVLADVTIPHDENLVKAEKDKSSKYLDLAHEITAMWDVDSTIIVPIVVSANGLIAKSLDQHLERLSLGGWIKGQMQKAVILDTARIVRRFLTLRP

SEQ ID NO: 5471 - protein, 963 aa, Cydia splendana
MNRHNLALMGALNALLEPYLRTSKDLDDTHAIMYCGAIAACRVARVKFPDSERAPRTAGGAPAWQIRIERRISSFRTLIAKLICFRGGNNRPRVMRFVNQAFVGTDIRPRDYMANVTERIDFLKQKVYAWANRIRRYRERVDRFQQNRLFQSDQRKMYRKWEETNLRASDSRPPDATVMNDFWRSIWSVPVGHTEGSWMSVVERECESIEPMGAVTISPDDVSCAIRTAQNWKSPGPDGLHNFWLKWFRCSHSYLAAQFQQALELGSLPPSLTTGVTFLLYKSGSTTEAKNYRPITCLPTLYKLLTSILRAKINAHIVANNILASAQNGCRVGSRGTKELLLIDMTICQQIRRTKGALSAAWIDYKKAYDSVPHSWLGRVLELYKVDAALRAFLSACMGQWTTVLRQPGGGDDRPGPQDFIRIERGIFQGDSLSPLWFCLALNPLSTLLKDLGLGCRLRREGEVISHLLYMDDLKLFAPNTQGLLELLKTTEVFSSAINMEFGVDKCAVMHVQRGKVVNSTNLQLSETMSFRSISESETYKYLGMSQSLGIEDEGIRRSVKERFFSRLTKVLNSLLSGGNKVRAFNAWVMPLLTYSFGILRWTQTELDALDRRVRSLLTTHRMLHPRSSVMRLYIPRKCGGRGFLNAKDLHNREVYNLRNYFLNNECGMHRDVVAVDRNLTPLSLANENWRKPVVLSTADRKAAWESKALHGRFYKALTGPDVDLLASVNWLRFGDLFGETEGFACAIADEVMMTNNYRKYILKDGTVDICRACRRPGESLRHIISGCSHLANGEYLHRHNLVARIIHQQLALLYGLVDREVPYYKYLPAPVLENGRATLYWDRSIITDRTIVANKPDIVLIDRSQRRAVLADVTIPHDENLVKAEKDKSSKYLDLAHEITAMWDVDSTIIVPIVVSANGLIAKSLDQHLERLSLGGWIKGQMQKAVILDTARIVRRFLTLRP

SEQ ID NO: 5472 - protein, 1211 aa, Agriopis aurantiaria
MITRAKTRAAESNARLPPPPASSSSPSTSSGEDEYHTTREASGSSSDTSGPGTPPPPPPARRGRPPLPARLGPVGHSATRPAPATGGVVRRMRWSRIMNEDCMRAYYRATEGGTNLSAYCARMLPLFQALQPTITVSAQRLSDQVRAIQRCNMLDQSVLDRLRLEEVRTRPTPASTRNPPVASSAPTLASVPASVGTLAALADTAVDEEDLASGVSDQVKEQLRGALEDAISQYRFTSDSRPRLPRLPTHRRNLALMGALNALLAPYLRASEDLVDTHSILYCGAIAACRVARVKFPDTNRAPRTAGGVPAWQVRIERRINTFRTLIAKLICFRRGNNRPRVMRFVTQAFAGTDIRPQHYLANVTERIDYLKQKVYAWANRIRRYRERVDRYWQNRLFQSDQRKVYRGWEETDQRVSDGQRPDATAMINFWRGIWSVPVNHTEGDWMRVVERECESIEPMGSILIDPVDVSCAIRMAQNWKSPGPDGLHNFWIKWIRCSHDRLATQFQEALELGSLPSFMTTGVTFLLHKSGSTTEAKNYRPITCLPTIYKLLTSILRNKINAHIVANNVLAHAQNGCRVGSRGTKELLLIDTAISQQVRRNRGALSAAWIDYKKAYDSVPHSWLERVLELYKIDTTLKSFLCACMRQWTTVLRQPGGGDGTSGPQDLIRIERGIFQGDSFSPLWFCLALNPLSSLLRDSGLGYRLRRDGQVISHLLYMDDLKLFTPKRQDLVELLKITDVFSSAIRMEFGVDKCAVMHVQQGKVVNSPNLQLSEVMTLRSLSEAETYKYLGMSESLGISVENIKKSVKERFFCRLTKVLNSLLSGGNKVRAFNGWVMPLLIYSFGILRWTQTELDALDRRVRQLLTSHRMLHPRSSVMRLYIPRKWGGRGFLNAKNLHNREVCSLRDFFRNSESGMHRDVVAVDRGLTPLSLANENWRKPSVLSIEDRRDVWKGKELHGRFYRALTGPDVDLLSSVNWLRFGDLFGETEGFACAIADEVIKTNNYRKYIMKDGTVDICRACHRPGESLRHIISGCSHLANGEYLHRHNQVARIIHQQLALRYGLVESEVPYYKYAPAPVLENGRVLLYWDRSIITDRTIVANKPDIVLVDRSQRRAVLVDITIPHDENLVKAEKDKLSKYLDLAHEVTAMWDVDSTIIVPIVVSVNGLIAKSLDQHLKRLSLDGWVKGQMQKAVILDTARIVRRFLTLQP

SEQ ID NO: 5473 - protein, 1212 aa, Agriopis aurantiaria
MITRSRTKQADTKSARLPSPPASSSSPSTSSGEDEYHTTREASGSSSDTSGPGTPPPPPPARRGRPPLPARLGLVGHSATRPAPATGGVVRRMRWSTIMNEDCMRAYYRATEGGTNLSAYCARMLPLFQALQPTITVSAQRLSDQVRAIHRCKLLDDSVLDRLRQEELRARPIPVSTRDPHVASSAPTLASVPASVVTLAALADPVVDEGDLASGVSDQVREQLRGALEDAISQYRFTPDSRPRLPRLSTHRRNLALMGALNALLAPYLRASEDLVDTHSILYCGAIAACRVARVKFPDTNRAPRTAGGVPAWQVRIERRISTFRTLIAKLVCFRRGNNRPRVMRFVTQAFAGTDIRPQHYLANVTERIDYLKQKVYAWANRIRRYRERVDRYWQNRLFQSDQRKVYRGWEETDQRVSDGQLPDASAMINFWRGIWSMPVEHTEGDWMRVVERECESIEPMGSILIDSIDVSCAIRTAQNWKSPGPDGLHNFWIKWIRCSHDRLATQFQEALELGSLPSFMTTGVTFLLHKSGSTTEAKNYRPITCLPTIYKLLTSILRNKINAHIVANNVLAHAQNGCRVGSRGTKELLLIDTAISQQVRRNKGALSAAWIDYKKAYDSVPHSWLERVLELYKIDTTLKSFLGACMRQWTTVLRQPGGGDGAFGPQDLLRIERGIFQGDSFSPLWFCLALNPLSTLLRDSGLGYRLRRDGQVISHLLYMDDLKLFTPKRQDLVELLKITEVFSSAIRMEFGVDKCAVMHVQRGKVVNSPNLQLSEVMTLRSLSEAETYKYLGMSESLGISVENIKKSVKERFFCRLTKVLNSLLSGGNKVRAFNGWVMPLLIYSFGILRWTQTELDALDRRVRQLLTSHRMLHPRSSVMRLYIPRKWGGRGFLNAKNLHNREVCSLRDFFRNSESGMHRDVVAVDRGLTALSLANENWRKPSVLSIEDRRDVWKGKELHGRFYRALTGPDVDLLASVNWLRFGDLFGETEGFACAIADEVIKTNNYRKYIMKDGTVDICRACHRPGESLRHIISGCSHLANGEYLHRHNLVARIIHQQLALRYSLVESEVPYYKYAPAPVLENGRALLYWDRSIITDRTIVANKPDIVLVDRSQRRAVLVDITIPHDENLVKAEKDKLSKYLDLAHEVTAMWDVDSTIIVPIVVSVNGLIAKSLDQHLKRLSLDGWVKGQMQKAVILDTARIVRRFLTLQP

SEQ ID NO: 5474 - protein, 1208 aa, Ennomos fuscantarius
MILRSKTKTADNKCARLPPLPVSSSPSSSSGDEYATPPDTTASSDDDGLPSPPPPPPPARRGRPPLPARLGPAGQPAPRPAPATGGVVRRMRWTQTMNENCMRAYYGATEGGSSLTAYRDRMLSLFQELEPSISVSAQRLSDQVRAIHRCKLLDQSALDRLRLETLPIPATSPSPRVLSAALSDPGPIVGPPLVTPLGGPVIDGEESVSDSVSTQVNELLRSALEDAILRYRSTPTSRPRLPRLPTNRRNLVLMGALNTLLGPYLRTSEDLVDTHSILYCGAIAVCRVARVKFPDTDRAPRPADGAPAWQVRIEKRITTFRTLIAKLVCFSRGNHRPRVMRFVTQAFAGTGIRPQDYMACVTERIDFLKQKVYAWASRIRRYRERVDRYQMNRLFQSDQRKVYRDWEGTGQRVVDGQLPDANVMNEFWRSIWSVPVDHSEGDWIRVVKHVCEPIESMGSITIDPEDISCAIRTAQNWKSPGPDGLHNFWIKWIRCSYPCLAIQFQEALQAGSLPKFMTTGITFLLHKSGSTMEAKNYRPITCLPTLYKLLTSILRTKINSHITANNILASAQNGCRVGSRGTKELLLIDTAICQQVRRNRGALSTAWIDYKKAYDSMPHSWLKRVLELYKINATLRSFLSACMGQWTTVLRQPGGGDSVSDPQNFIRIERGIFQGDSLSPLWFCLALNPLSTLLGDSGLGYRLRRGGEIISHLLYMDDLKLYAPQRPQLMKLLKITENFSNSIKMEFGVDKCAVMHVHGGKVVNSTNLQISETMTLRSLSESETYKYLGMSESLGISVGDVKQSVKERFFCRLTKVLNSLLSGGNKARAFNAWVMPLLMYSFGILRWTQTELDALDRKVRQVLTSHRMLHPRSSVMRLYIPRKWGGRGFLNAKNLHNREMYSLREYFLSNECGMHRDVVAVDKGLTPLSLANENWRKPVVLSTDDRRDVWKGKELHGRFYRALTGPDVDLHASVNWLRFGDLFGETEGFVCAIADEVIKTNNYRKYIMKDGTVDICRACRRPGESLRHIISGCSHLANGEYLHRHNLVARIIHQQLALQYGIVESEVPYYKYTPGPVLENGRALLYWDRSIITDKTIVANKPDIVLIDRSQRRAVLVDIAIPHDENLVKAEKDKLSKYLDLAHEVTAMWSVDSTSIVPIVVSANGLIAKSLDQHLERLSLDGWIKGQIQKAVLLDTAHIVRRFLTLQP

SEQ ID NO: 5475 - protein, 1215 aa, Hedya salicella
MQRYFTRSQNTRKISTAATPTHARPTPPPASSCSPSASSDDFATAPDTSESSDDECGPPPPPPRPPARRGRPPLPARLGPAGHSAPPTAPATGGIVRRMRWSQANNENVMRAYYGATEGGTHLSAYRDRMLLLFQTFEPAIAASAQRLSDQVRAIQWRKLLDDATLDRLRLEVLAARAASTSSRNPPATSPVPAPALDLMPGAPRVDPDSDEGHCVSIVSTQANEQLRRTLEETIERYRFAPDSRPRLPRLPANKRNLALVGALNALLDPYLRASEDLADTHSIMYCGTIAACRVARVKFPDADRAPRTAGGVPAWQVRIERRISTFRTLIAKLICFRGGNNRPRVMRYVAQAFAGTDVSSCDYMACVTERIDFLKQKVYAWASRIRRYRERVDRFQQNRLFQSDQRKVYRKWEGTDQRVTDGRLPDPTAMSNFWRSIWSVPVEHTEGEWMNVVERECEPIEAMGAVTISPDDVSCAARTTQNWKSPGPDGLHNFWVKWFRCSHERLATQFQQALELGSLPSFLTTGVTFLLYKSGSTTEAKNYRPITCLPTLYKLLTSILRAKINTHIVANNVLAFSQNGCRVGSRGTKELLLIDTTICQQVRRSRGSLSAAWIDYKKAYDSVPHSWLERILELYKVDTALRSFLGACMRQWTTVLCQPGGRDARPAPQDFIRIKRGIFQGDSLSPLWFCLALNPLSTLLKDSGLGCRLRRGGEIISHLMYMDDLKLFAPKRPELVELLKVTDTFSSAIKMKFGVDKCAVMHVQRGKVGNSTNLELSETMSLRSLSETETYKYLGMSQALSIADGDIRQAVKERFFCRLTKVLNSLLSGGNKARAFNAWVMPLLTYSFGILRWTQTELDALDRRVRMLLTTHRMLHPRSSVMRLYIPRKCGGRGFLNAKDLHNREVCSLREYFLNNECGIHRDVVAVDKGLTPLSLANENWRRPTVLSTVDRKDVWKSKELHGRFYKALTGPDVDLLASVNWLCFGDLFGETEGFSCAIADEVIMTNNYRRYILKDGTVDICRACRRPGESLRHIMSGCSYLANGEYLHRHNQVARIIHQQLAVKYDLVGSEVPYYKYVPMPVLENGRATLYWDRSILTDRTIVANKPDIVLVDRSKRRAMLVDITIPHDENLVKAEKDKLSKYLDLAHEVTAMWDVDSTIIVPIVVSVNGLIAKSLDEHLKRLSLDGWIKGQIQKAVILDTARIVRRFLSVQP

SEQ ID NO: 5476 - protein, 1215 aa, Erannis defoliaria
MITRSQSRRNTAERNARPPSPPAPSSPSASSGDDVFLTPRESSVSSSNSDVSGPRTPAPPPPARRGRPPLPARLGPAGLPASRPALAAGGVVRRMRWSQTNNENCMRAYYGATEGGTNLSAYRVRMLPLFQALEPTVTVSAQRLSDQVRAIQRLNLLDQSLLDRLRLEAQSARPTPASTRDLDVASSAPTLALVPTSAATLVTSADPVVDEGDCTGMSVSTQVSEQLRRALEDAIGQYRFTPNSRPRLPRLPTHRRNLALMGALNALLAPYLRASEDLTDTHSILYCGAIAACRVARVKFPDTNRAPRPAGDVPAWQLRIERRISTFRTLIAKLICFSRGNNRPRVMRFVTQAFTGTGIRPQQYMANVTERIDYLKQKVYAWANRIRRYRERVDRYWQNRLFQSDQRKVYRNWEGNEQRVSDGQLPDASAMTNFWRGIWSVPVEHTEGDWMRVVERECESIEPMGSILIDPVDVSCAIRTAQNWKSPGPDGLHNFWIKWFRCSHDRLATQFQEALELGSLPSFMTTGVTFLLHKSGSTTEPKNYRPITCLPTIYKLLTSILSTKINTHIVANNVLAPAQNGCRVGSRGTKELLLIDMAISQQVRRNKGALSAAWIDYKKAYDSVPHSWLERILELYQIDATLKSFLGACMRQWTTVLRQPGGGNGSSDSQDLIRIERGIFQGDSLSPSWFCLALNPLSTLLKDSGLGYRLRRGGEVISHLLYMDDLKLFAPKHQDLLELLKTTQVFSSAISMEFGVDKCAVMRVQRGKVVNSPDLQLSEITTLRSLSEAETYKYLGMSESLGISVVDIKKSVKERFFCRLTKVLNSLLSGGNKARAFNGWVMPLLIYSFGILRWTQTELDALDRRVRQLLTAHRMLHPRSSVMRLYIPRKWGGRGFLNAKNLHNREVCSLRDYFLNNECGMHRDVVTVDKGLTPLSLANENWRTPSVLSTDDRKEVWKSKELHGRFYRVLSGPDVDLLASVNWLRFGDLFGETEGFACAIADEVIKTNNYRKYIMKDGTVDICRACHRPGESLRHIISGCSHLANGKYLHRHNQVARIIHQQLALQYGLVESEVPYYKYAPAPVLENGRALLYWDRSIITDRTIVANKPDIVMVDRSQRRAVLVDVTIPHDENLVKAEKDKLSKYLDLAFEITAMWDVDSTIIVPIVVSANGLIAKSLDQYLKRLSLDGWVKGQIQKAVVLDTARIVRRFLTLQP

SEQ ID NO: 5477 - protein, 1216 aa, Erannis defoliaria
MITRSKAIRNAAEQHSARPPSPPAPSSPSASSGEDVFVTPRESSASSSDSDVSGPRTPAPPPPARRGRPPLPARLGPAGLPASRPALAAGGVVRRMRWSQTNNENCMRAYYGATEVGTNLTAYRVRMLSLFQALEPTVTVSAQRLSDQVRAIQRLNLLDQSLLDRLRLEAQSARSTPVSTRDSHVASSAPTLASMPTSVATLATPADPVVDEGDGTGMSVTTQVSEQLRRALEDAISQYRFALNSRPRLPRLPTHRRNLALMGALNALLAPYLRASEDLTDTHSILYCGAVAACRVARVKFPDSNRAPRTAGDVPAWQARIERRISTFRTLIAKLICFSRGNNRPRVMRFVTQAFAGTGIRPQQYMASVTERIDYLKQKVYAWASRIRRYRERVDRYWQNRVFQSDQRKVYRNWEGAEQRVSDGHLPDANAMTNFWRGIWSVPVEHTEGDWMRVVERECESIEPMGSILIDPVDVSCAIRTAQNWKSPGPDGLHNFWIKWFRCSHDRLATQFQEALELGSLPSFMTTGVTFLLHKSGSTTEPKNYRPITCLPTIYKLLTSILSTKINTHIVANNVLAPAQNGCRVGSRGTKELLLIDMAISQQVRRNKGALSAAWIDYKKAYDSVPHSWLERVLELYKIDTTLKSFLSACMRQWTTVLRQPGGGNDSFDPQDLIRIERGIFQGDSLSPSWFCLALNPLSTLLKDSGLGYRLRRGGEVISHLLYMDDLKLFAPKHQDLLELLKTTQVFSSAIRMEFGVDKCAVMRVQRGKVVNSPDLQLSEIMTLRSLSEAETYKYLGMSESLGISVVDIKKSVKERYFCRLTKVLNSLLSGGNKARAFNGWVMPLLIYSFGILRWTQTELDALDRRVRQLLTAHRMLHPRSSVMRLYIPRKWGGRGFLNAKNLHNREVCSLRDYFLNNECGMHRDVVTVDKGLTPLSLANENWRRPSVLSTDDRKDVWKSKELHGRFYRALSGPDVDLLASVNWLRFGDLFGETEGFACAIADEVIKTNNYRKYIMKDGTVDICRACHRPGESLRHVISGCSHLANGEYLHRHNQVARIIHQQLALQYGLVESEVPYYKYAPAPVLENGRALLYWDRSIITDRTIVANKPDIVMVDRSQRRAVLVDVTIPHDENLVKAEKDKLSKYLDLAFEITAMWDVDSTIIVPIVVSANGLIAKSLDQYLKRLSLDGWVKGQIQKAVVLDTARIVRRFLTLQP

SEQ ID NO: 5478 - protein, 1216 aa, Erannis defoliaria
MITRSKAIRNAAEQHSARPPSPPAPSSPSASSGEDVFVTPRESSASSTDSDVSGPRTPAPPPPARRGRPPLPARLGPAGLPASRPALAAGGVVRRMRWSQTNNENCMRAYYRATEVGTNLTAYRVRMLSLFQALEPTVTVSAQRLSDQVRAIQRLNLLDQSLLDRLRLEAQSARSTPVSTRDSHVASSAPTLASMPTSVATLATPADPVVDEGDGTGMSVTTQVSEQLRRALEDAISQYRFALNSRPRLPRLPTHRRNLALMGALNALLAPYLRASEDLTDTHSILYCGAVAACRVARVKFPDSNCAPRTAGDVPAWQARIERRISTFRTLIAKLICFSRGNNRPRVMRFVTQAFAGTGIRPQQYMASVTERIDYLKQKVYAWASRIRRYRERVDRYWQNRVFQSDQRKVYRNWEGAEQRVSDGHLPDANAMTNFWRGIWSVPVEHNEGDWMRVVERECESIEPMGSILIDPVDVSCAIRTAQNWKSPGPDGLHNFWIKWFRCSHDRLATQFQEALELGSLPSFMTTGVTFLLHKSGSTTEPKNYRPITCLPTIYKLLTSILSTKINTHIVANNVLAPAQNGCRVGSRGTKELLLIDMAISQQVRRNKGALSAAWIDYKKAYDSVPHSWLERILELYKIDTTLKSFLSACMRQWTTVLRQPGGGNDSSDPQDLIRIERGIFQGDSLSPSWFCLALNPLSTLLKDSGLGYRLRRGGEVISHLLYMDDLKLFAPKHQDLLELLKTTQVFSSAIRMEFGVDKCAVMRVQRGKVVNSPDLQLSEIMTLRSLSEAETYKYLGMSESLGISVVDIKKSVKERFFCRLTKVLNSLLSGGNKARAFNGWVMPLLIYSFGILRWTQTELDALDRRVRQLLTAHRMLHPRSSVMRLYIPRKWGGRGFLNAKNLHNREVCSLRDYFLNNECGMHRDVVTVDKGLTPLSLANENWRRPSVLSTEDRKDVWKSKELHGRFYRALSGPDVDLLASVNWLRFGDLFGETEGFACAIADEVIKTNNYRKYIMKDGTVDICRACHRPGESLRHIISGCTHLANGEYLHRHNQVARIIHQQLALQYGLVESEVPYYKYAPAPVLENGRALLYWDRSIITDRTIVANKPDIVMVDRSQRRAVLVDVTIPHDENLVKAEKDKLSKYLDLAFEITAMWDVDSTIIVPIVVSANGLIAKSLDQYLKRLSLDGWVKGQIQKAVVLDTARIVRRFLTLQP

SEQ ID NO: 5479 - protein, 1215 aa, Erannis defoliaria
MITRSQSRRNTAERNARPPSPPAPSSPSASSGDDVFLTPRESSVSSSNSDVSGPRTPAPPPPARRGRPPLPARLGPAGLPASRPALAAGGVVRRMRWSQTNNENCMRAYYGATEGGTNLSAYRVRMLPLFQALEPTVTVSAQRLSDQVRAIQRLNLLDQSLLDRLRLEAQSARPTPASTRDLDVASSAPTLALVPTSAATLVTSADPVVDEGDCTGMSVSTQVSEQLRRALEDAIGQYRFTPNSRPRLPRLPTHRRNLALMGALNALLAPYLRASEDLTDTHSILYCGAIAACRVARVKFPDTNRAPRPAGDVPAWQLRIERRISTFRTLIAKLICFSRGNNRPRVVRFVTQAFAGTGIRPQQYMANVTERIDYLKQKVYAWANRIRRYRERVDRYWQNRLFQSDQRKVYRNWEGNEQRVSDGQLPDASAMTNFWRGIWSVPVEHTEGDWMRVVERECESIEPMGSILIDPVDVSCAIRTAQNWKSPGPDGLHNFWIKWFRCSHDRLATQFQEALELGSLPSFMTTGVTFLLHKSGSTTEPKNYRPITCLPTIYKLLTSILSTKINAHIVANNVLAPAQNGCRVGSRGTKELLLIDMAISQQVRRNKGALSAAWIDYKKAYDSVPHSWLERILELYQIDATLKSFLGACMRQWTTVLRQPGGGNGSSDSQDLIRIERGIFQGDSLSPSWFCLALNPLSILLKDSGLGYRLRRGGEVISHLLYMDDLKLFAPKHQDLLELLKTTQVFSSAISMEFGVDKCAVMRVQRGKVVNSPDLQLSEIMTLRSLSEAETYKYLGMSESLGISVVDIKKSVKERFFCRLTKVLNSLLSGGNKARAFNGWVMPLLIYSFGILRWTQTELDALDRRVRQLLTAHRMLHPRSSVMRLYIPRKWGGRGFLNAKNLHNREVCSLRDYFLNNECGMHRDVVTVDKGLTPLSLANENWRTPSVLSTDDRKEVWKSKELHGRFYRVLSGPDVDLLASVNWLRFGDLFGETEGFACAIADEVIKTNNYRKYIMKDGTVDICRACHRPGESLRHIISGCSHLANGEYLHRHNQVARIIHQQLALQYGLVESEVPYYKYAPAPVLENGRALLYWDRSIITDRTIVANKPDIVMVDRSQRRAVLVDVTIPHDENLVKAEKDKLSKYLDLAFEITAMWDVDSTIIVPIVVSANGLIAKSLDQYLKRLSLDGWVKGQIQKAVVLDTARIVRRFLTLQP

SEQ ID NO: 5480 - protein, 1216 aa, Erannis defoliaria
MITRSKAIRNAAEQHSARPPSPPAPSSPSASSGEDVFVTPRESSASSSDSDVSGPRTPAPPPPARRGRPPLPARLGPAGLPASRPALAAGGVVRRMRWSQTNNENCMRAYYRATEVGTNLTAYRVRMLSLFQALEPTVTVSAQRLSDQVRAIQRLNLLDQSLLDRLRLEAQSARSTPVSTRDSHVASSAPTLASMPTSVATLATPADPVVDEGDGTGMSVTTQVSEQLRRALEDAISQYRFALNSRPRLPRLPTHRRNLALMGALNALLAPYLRASEDLTDTHSILYCGAVAACRVARVKFPDSNRAPRTAGDVPAWQARIERRISTFRTLITKLICFSRGNNRPRVMRFVTQAFAGTGIRPQQYMASVTERIDYLKQKVYAWASRIRRYRERVDRYWQNRVFQSDQRKVYRDWEGAEQRVSDGHLPDANAMTNFWRGIWSVPVEHTEDDWMRVVERECESIEPMGSILIDPVDVSCAIRTAQNWKSPGPDGLHNFWIKWFRCSHDRLATQFQEALELGSLPSFMTTGVTFLLHKSGSTTEPKNYRPITCLPTIYKLLTSILSTKINTHIVANNVLTPAQNGCRVGSRGTKELLLIDMAISQQVRRNKGALSAAWIDYKKAYDSVPHSWLERILELYKIDTTLKSFLSACMRQWTTVLRQPGGGNDSSDPQDLIRIERGIFQGDSLSPSWFCLALNPLSTLLKDSGLGYRLRRGGEVISHLLYMDDLKLFAPKHQDLLELQKTTQVFSSAIRMEFGVDKCAVMRVQRGKVVNSPDLQLSEIMTLRSLSEAETYKYLGMSESLGISVVDIKKSVKERFFCRLTKVLNSLLSGGNKARAFNGWVMPLLIYSFGILRWTQTELDALDRRVRQLLTAHRMLHPRSSVMRLYIPRKWGGRGFLNAKNLHNREVCSLRDYFLNNECGMHRDVVTVDKGLTPLSLANENWRRPSVLSTDDRKDVWKSKELHGRFYRALSGPDVDLLASVNWLRFGDLFGETEGFACAIADEVIKTNNYRKYIMKDGTVDICRACHRPGESLRHIISGCSHLANGEYLHRHNQVARIIHQQLALQYGLVESEVPYYKYAPAPVLENGRALLYWDRSIITDRTIVANKPDIVMVDRSQRRAVLVDVTIPHDENLVKAEKDKLSKYLDLAFEITAMWDVDSTIIVPIVVSANGLIAKSLDQYLKRLSLDGWVKGQIQKAVVLDTARIVRRFLTLQP

SEQ ID NO: 5481 - protein, 1215 aa, Biston betularia
MWTRSRTAAASGLHDAHIPSPPAPSTPSASSGDEEFATPLATSASSSSSDVSGPRTPAPPPPARRGRPPLPARLGPAGQSASRSALAAGGVVRRMRWSQTNNENCMRAYYGATEGGINLSAYRVRMLPLFQALEPTVAVSTQRLSDQVRAIQRLQLLDQSVLDRLRLEALPARPTPVSTRDSPVASSAPTLVSVPTSMATLATPTDPVVDVGECTSMGVCSQVSEHLRRTLEDAICQYRFAPDSRPRLPRLPTHRRNLALMGALNALLAPYLRASEDLTDTHSILYCGAIAACRVARVKFPDTNRAPRPAGGVPAWQLRIERRISTFRTLIAKLICFSRGNNRPRVMRFVTQAFAGTGIRPQHYLASVTERIDYLKQKVYAWANRIRRYRERADRYWQNRVFQSDQRKVYRDWEGTGQRVSDRQLPDTSVMTEFWRGIWSLPVEHTEGDWMRVVERECESIESMGSVLIDPVDVSCAIRTAQNWKSPGPDGLHNFWIKWIRCSHDRLATQFQEALELGSLPCFMTTGVTFLLHKTGSTTEAKNYRPITCLPTIYKLLTSILRTKINAHVVANNVLAPAQNGCRVGSRGTKELLLIDMTISQQVRRNKGALSTAWIDYKKAYDSVPHSWLERVLELYKVDTTLKSFLGACMRQWTTVLRRPGSGDGSSEPQDLIRIERGIFQGDSLSPLWFCLALNPLSTLLKESGLGHRLRRGGEVISHLLYMDDLKLFAPKRPDLMELLKTTQVFSNAIKMEFGVDKCAVMHVQRGEVVNCPDLQLSETMTFRSLSEAETYKYLGMSESLGIAVVDIKRSVKERFFCRLTKVLNSFLSGGNKVRAFNGWVMPLLIYSFGILRWTQTELDALDRRVRQQLTTHRMLHPRSSVMRLYIPRKLGGRGFLSTKNLHNREVCSLRDYFRDNECGMHRDVVAVDKGLTPLSLANENWRKPSVLSTEDRKEVWKSKQLHGRFYRVLTGPDVDMLASVNWLRFGDLFGETEGFACAIADEVIKTNNYRKYIMKDGTVDICRACHRPGESLRHIISGCSHLANGEYLHRHNQVARIIHQQLALQYGLVESEVPYYKYAPAPVLENGRALLYWDRSIITDRTIVANKPDIVVVDRAQRRAVLVDITIPHDENLVKAEKDKLSKYLDLAHEITAMWDVDSTIIVPIVVTVNGLIAKSLDQHLKRLSLDGWVKGQLQKAVILDTARIVRRFLTLQP

SEQ ID NO: 5482 - protein, 1215 aa, Biston betularia
MWTRSRTAAASGLHDAHIPSPPAPSTPSASSGDEEFATPLATSASSSSSDVSGPRTPAPPPPARRGRPPLPARLGPAGQSASRSALAAGGVVRRMRWSQTNNENCMRAYYGATEGGINLSAYRARMLPLFQALEPTVAVSTQRLSDQVRAIQRLQLLDQSVLDRLRLEALPARPTPVSTRDSPVASSAPTLVSVPTSMATLATPTDPVVDVGECTSMGVCSQVSEHLRRTLEDAICQYRFAPDSRPRLPRLPTHRRNLALMGALNALLAPYLRASEDLTDTHSILYCGAIAACRVARVKFPDTNRAPRPAGGVPAWQLRIERRISTFRTLIAKLICFSRGNNRPRVMRFVTQAFAGTGIRPQHYLASVTERIDYLKQKVYAWANRIRRYRERADRYWQNRVFQSDQRKVYRDWEGTGQRVSDRQLPDTSVMTEFWRGIWSLPVEHTEGDWMRVVERECESIESMGSVLIDPVDVSCAIRTAQNWKSPGPDGLHNFWIKWIRCSHDRLATQFQEALELGSLPCFMTTGVTFLLHKTGSTTEAKNYRPITCLPTIYKLLTSILRTKINAHVVANNVLAPAQNGCRVGSRGTKELLLIDMTISQQVRRNKGALSTAWIDYKKAYDSVPHSWLERVLELYKIDTTLKSFLGACMRQWTTVLRQPGSGDGSSEPQDLIRIERGIFQGDSLSPLWFCLALNPLSTLLKESGLGHRLRRGGEVISHLLYMDDLKLFAPKRPDLMELLKTTQVFSNAIKMEFGVDKCAVMHVQRGEVVNCPDLQLSETMTFRSLSEAETYKYLGMSESLGIAVVDIKRSVKERFFCRLTKVLNSFLSGGNKVRAFNGWVMPLLIYSFGILRWTQTELDALDRRVRQQLTTHRMLHPRSSVMRLYIPRKLGGRGFLSTKNLHNREVCSLRDYFRDNECGMHRDVVAVDKGLTPLSLANENWRKPSVLSTEDRKEVWKSKQLHGRFYRVLTGPDVDMLASVNWLRFGDLFGETEGFACAIADEVIKTNNYRKYIMKDGTVDICRACHRPGESLRHIISGCSHLANGEYLHRHNQVARIIHQQLALQYGLVESEVPYYKYAPAPVLENGRALLYWDRSIITDRTIVANKPDIVVVDRAQRRAVLVDITIPHDENLVKAEKDKLSKYLDLAHEITAMWDVDSTIIVPIVVTVNGLIAKSLDQHLKRLSLDGWVKGQLQKAVILDTARIVRRFLTLQP

SEQ ID NO: 5483 - protein, 1215 aa, Biston betularia
MWTRSRTAAASGLHDAHIPSPPAPSTPSASSGDEEFATPLATSASSSSSDVSGPRTPAPPPPARRGRPPLPARLGPAGQSASRSALAAGGVVRRMRWSQTNNENCMRAYYGATEGGINLSAYRVRMLPLFQALEPTVAVSTQRLSDQVRAIQRLQLLDQSVLDRLRLEALPARPTPVSTRDSPVASSAPTLVSVPTSMATLATPTDPVVDVGECTSMGVCSQVSEHLRRTLEDAICQYRFAPDSRPRLPRLPTHRRNLALMGALNALLAPYLRASEDLTDTHSILYCGAIAACRVARVKFPDTNRAPRPAGGVPAWQLRIERRISTFRTLIAKLICFSRGNNRPRVMRFVTLAFAGTGIRPQHYLASVTERIDYLKQKVYAWANRIRRYGERADRYWQNRVFQSDQRKVYRDWEGTGQRVSDRQLPDTSVMTEFWRGIWSLPVEHTEGDWMRVVERECESIESMGSVLIDPVDVSCAIRTAQNWKSPGPDGLHNFWIKWIRCSHDRLATQFQEALELGSLPCFMTTGVTFLLHKTGSTTEAKNYRPITCLPTIYKLLTSILRTKINAHVVANNVLAPAQNGCRVGSRGTKELLLIDMTISQQVRRNKGALSTAWIDYKKAYDSVPHSWLERVLELYKIDTTLKSFLGACMRQWTTVLRQPGSGDGSPEPQDLIRIERGIFQGDSLSPLWFCLALNPLSTLLKESGLGHRLRRGGEVISHLLYMDDLKLFAPKRPDLMELLKTTQVFSNAIKMEFGVDKCAVMHVQRGEVVNCPDLQLSETMTFRSLSEAETYKYLGMSESLGIAVVDIKRSVKERFFCRLTKVLNSFLSGGNKVRAFNGWVMPLLIYSFGILRWTQTELDALDRRVRQQLTTHRMLHPRSSVMRLYIPRKLGGRGFLSAKNLHNREVCSLRDYFHDNECGMHRDVVAVDKGLTPLSLANENWRKPSVLSTEDRKEVWKSKQLHGRFYRVLTGPDVDMLASVNWLRFGDLFGETEGFACAIADEVIKTNNYRKYIMKDGTVDICRACHRPGESLRHIISGCSHLANGEYLHRHNQVARIIHQQLALQYGLVESEVPYYKYAPAPVLENGRALLYWDRSIITDRTIVANKPDIVVVDRAQRRAVLVDITIPHDENLVKAEKDKLSKYLDLAHEITAMWDVDSTIIVPIVVTVNGLIAKSLDQHLKRLSLDGWVKGQLQKAVILDTARIVRRFLTLQP

SEQ ID NO: 5484 - protein, 1215 aa, Biston betularia
MWTRSRTAAASGLHDAHIPSPPAPSTPSASSGDEEFATPLATSASSSSSDVSGPRTPAPPPPARRGRPPLPARLGPAGQSASRSALAAGGVVRRMRWSQTNNENCMRAYYGATEGGINLSAYRVRMLSLFQALEPTVAVSTQRLSDQVRAIQRLQLLDQSVLDRLRLEALPARPTPVSTRDSPVASSAPTLVSVPTSMATLATPTDPVVDVGECTSMGVCSQVSEHLRRTLEDAICQYRFAPDSRPRLPRLPTHRRNLALMGALNALLAPYLRASEDLTDTHSILYCGAIAACRVARVKFPDTNRAPRPAGGVPAWQLRIERRISTFRTLIAKLICFSRGNNRPRVMRFVTQAFAGTGIRPQHYLASVTERIDYLKQKVYAWANRIRRYRERADRYWQNRVFQSDQRKVYRDWEGTGQRVSDRQLPDTSVMTEFWRGIWSLPVEHTEGDWMRVVERECESIESMGSVLIDPVDVSCAIRTAQNWKSPGPDGLHNFWIKWIRCSHDRLATQFQEALELGSLPCFMTTGVTFLLHKTGSTTEAKNYRPITCLPTIYKLLTSILRTKINAHVVANNVLAPAQNGCRVGSRGTKELLLIDMTISQQVRRNKGALSTAWIDYKKAYDSVPHSWLERVLELYKIDTTLKSFLGACMRQWTTVLRQPGSGDGSSEPQDLIRIERGIFQGDSLSPLWFCLALNPLSTLLKESGLGHRLRRGGEVISHLLYMDDLKLFAPKRPDLMELLKTTQVFSNAIKMEFGVDKCAVMHVQRGEVVNCPDLQLSETMTFRSLSEAETYKYLGMSESLGIAVVDIKRSVKERFFCRLTKVLNSFLSGGNKVRAFNGWVMPLLIYSFGILRWTQTELDALDRRVRQQLTTHRMLHPRSSVMRLYIPRKLGGRGFLSTKNLHNREVCSLRDYFRDNECGMHRDVVAVDKGLTPLSLANENWRKPSVLSTEDRKEVWKSKQLHGRFYRVLTGPDVDMLASVNWLRFGDLFGETEGFACAIADEVIKTNNYRKYIMKDGTVDICRACHRPGESLRHIISGCSHLANGEYLHRHNQVARIIHQQLALQYGLVESEVPYYKYAPAPVLENGRALLYWDRSIITDRTIVANKPDIVVVDRAQRRAVLVDITIPHDENLVKAEKDKLSKYLDLAHEITAMWDVDSTIIVPIVVTVNGLIAKSLDQHLKRLSLDGWVKGQLQKAVILDTARIVRRFLTLQP

SEQ ID NO: 5485 - protein, 1207 aa, Apotomis turbidana
MITRSRRKKAEQTNARPPPPPASSSSSPSSSGDEFATAADTSESSDERGPPPPPPRPAARRGRPPLPARLGPTGQPAPTTAPATGGIVRRMRWTRVMNENCMRAYYGATEGGTNLSAYRDRMLPLFQAFDPTIAVSAQRLSDQVRFIQRRKLLNDATLDRLRLEVLAARAASVPARDPPAMSPVPAPAPNLVPGVPLTDPEADVEDYASSVSTQANEQLRRALEEAIRRYRSAPDSRPRLPRLPMHKRNLALMGALDALLEPYLRASKDLADTHSIMYCGAIAACRVARVRFPDTDRAPRTAGGVPAWQVRIERRISSFRTLIAKLICFRGGNNRPRVMRYVTQAFAGTGTRPCDYMACVTERIDYLKQKFYAWASRIRRYRERVDRFQQNRLFQSDQRKVYRKWEGADQCVSDGQLPDPTAMINFWRSIWSVPVEHTEGEWMNVVRRECEPIEAMGAVIISPDDVSCATRTTQNWKSPGPDGLHNFWIKWFRSSHERLATQFQDALELGSLPSFMTTGVTFLLHKSGSTTEAKNYRPITCLPTLYKLLTSILRTKINTHIVANNVLAFSQNGCRVGSRGTKELLLIDTTICQQVRRNRGSLSTAWIDYKKAYDSVPHSWLERILELYKIDTALRSLLGACMRQWTTVLRQPGGGYGPPGPQDLIRIERGIFQGDSLSPLWFCLALNPLSTLLKDSGLGCRLRRGGEVISHLLYMDDLKLYAPKRQDLVELLEVTEAFSSAIKMEFGVDKCAVMHVQRGKVVNSANLQLSETMSLRSISEVETYKYLGMSQSLGIADGDIRQALKERFFCRLTKVLNSLLSGGNKARAFNAWVMPLLTYSFGILKWTQTELDALDTRVRQLLTTHRMRHPRSSVMRLYIPRKCGGRGYLNAKDLHNREVCSLREYFLNNECGIHRDVVAVDKGLTSLSLANENWRRPKVLSTDDRRAVWKSKELHGRFCKALTGPDVDLLASVNWLRFGDLFGETEGFVCAIADEVMMTNNYRRYILKDGTVDICRACRRPGESLRHIISGCSHLANGEYLHRHNQVARIIHQQLALRYGLVGSEVPYYKYAPMPVLENGRATLYWDRSIITDRTIVANKPDIVLVDRSKRQAVLVDITIPHDENLVKAEKDKLSKYLDLAHEVTAMWDVDSTVIVPIVVSANGLIAKSLDKHLKRLSLDGWIKGQIQKAVLLDTARIVRRFLSLQP

SEQ ID NO: 5486 - protein, 1207 aa, Apotomis turbidana
MITRSRRKKAEQTNARPPPPPASSSSSPSSSGDEFATAADTSESSDERGPPPPPPRPAARRGRPPLPARLGPTGQPAPTTAPATGGIVRRMRWTRVMNENCMRAYYGATEGGTNLSAYRDRMLPLFQAFDPTIAVSAQRLSDQVRFIQRRKLLNDATLDRLRLEVLAARAASVPARDPPAMSPVPAPAPNLVPGVPLTDPEADVEDYASSVSTQANEQLRRALEEAIGRYRSAPDSRPRLPRLPMHKRNLALMGALDALLEPYLRASKDLADTHSIMCCGAIAACRVARVRFPDTDRAPRTAGGVPAWQVRIERRISSFRTLIAKLICFRGGNNRPRVMRYVTQAFAGTGTRPCDYMACVTERIDYLKQKVYAWASRIRRYRERVDRFQQNRLFQSDQRKVYRKWEGADQCVSDGQLPDPTAMINFWRSIWSVPVEHTEGEWMNVVRRECEPIEAMGAVIISPDDVSCATRTTQNWKSPGPDGLHNFWIKWFRSSHERLATQFQDALELGSLPSFMTTGVTFLLHKSGSTTEAKNYRPITCLPTLYKLLTSILRTKINTHIVANNVLAFSQNGCRVGSRGTKELLLIDTTICQQVRRNRGSLSTAWIDYKKAYDSVPHSWLERILELYKIDTALRSLLGACMRQWTTVLRQPGGGYGPPGPQDLIRIERGIFQGDSLSPLWFCLALNPLSTLLKDSGLGCRLRRGGEVISHLLYMDDLKLYAPKRQDLVELLEVTEAFSSAIKMEFGVDKCAVMHVQRGKVVNSANLQLSETMSLRSISEVETYKYLGMSQSLGIADGDIRQALRERFFCRLTKVLNSLLSGGNKARAFNAWVMPLLTYSFGILKWTQTELDALDTRVRQLLTTHRMRHPRSSVMRLYIPRKCGGRGYLNAKDLHNREVCSLREYFLNNECGIHRDVVAVDKGLTSLSLANENWRRPKVLSTDDRRAVWKSKELHGRFCKALTGPDVDLLASVNWLRFGDLFGETEGFVCAIADEVMMTNNYRRYILKDGTVDICRACRRPGESLRHIISGCSHLANGEYLHRHNQVARIIHQQLALRYGLVGSEVPYYKYAPMPVLENGRATLYWDRSIITDRTIVANKPDIVLVDRSKRQAVLVDITIPHDENLVKAEKDKLSKYLDLAHEVTAMWDVDSTVIVPIVVSANGLIAKSLDKHLKRLSLDGWIKGQIQKAVLLDTARIVRRFLSLQP

SEQ ID NO: 5487 - protein, 1134 aa, Notocelia uddmanniana
MTWGLFIHSSSSFIASMVFPYRCYISISFTWTLIIIIIITNLSAYRVRMLPLFQALEPTITVTAQRLSDQVRVIQRLKRLDDATLDRLRLEALSARTASALARDPPATSPAPVPTPDMAPGVPRVDPSVDEDYANQTVSTQANEQLRRALEEAITRYRSTPNSRPRLPRLPVNRRNLALMGALNDLLDPYLGASEDLIDTHSILYCGAIAACRVARVKFPDADRAPRTAGGVPAWQVRIERRINTFRTLIAKLICFRGGNDRPRVMRFVNQAFAGTGVRPRDYVTCVTERIDFLKQKVYAWASRIRRYRERVDRYQQNRLFQSDQRKVYRKWEGTDHRVCDGQRPDATAMGNFWRSIWSVPVEHTEGAWIGVVERECESIEPMGSVTISPEDISCAIRTAPNWKSPGPDGLHNFWLKWFRCSHERLATQFQQALELGSLPHLLTTGVTSLLYKSGSTTEAKNYRPITCLPTLYKLLTSILRVKINTHIVANNILAPAQNGCRVGSRGTKELLLIDMTICQRVRRSRGALSAAWIDYKKAYDSVPHSWLRRILELYKVDAALRSFLSACMGQWTTVLRQPGGGDGSSGPQDSIRIERGIFQGDSLSPLWFCLALNPLSTLLKDSGLGCQLRRGGEVISHLLYMDDLKLFAPNRQDLLELLKTTEVFSSAIKMEFGVDKCAVMHVQRGKVVNSTNLQLSETMSLRSLSEAETYKYLGMSQSLGIEGEGIKQAVKERFFCRLTKVLNSFLSGGYKVRAFNAWVMPLLTYSFGILRWTQTELDALDRRVRVLLTAHRMLHPRSSVMRLYIPRKCGGRGFLNAKDLHNREVCSLRDYFLNSECGMHRDVVAVDASFTPLSMANENWRRFKVLSTEDRKAEWKSRELHGRFYKALTGPDVDLLASVDWLRFGDLFGETEGFVCAIADEVIMTNNYRKYILKDGTVDICRACRRPGESLRHIISGCGHLANGEYLHRHNVVARIIHQQLALSYGLVNFEVPYYKYLPAPVLENGRATLYWDRSIITDRTIVANKPDIVLIDRSKRQAVLVDITIPHDENLVKAEKDKVSKYLDLAHEVTAMWDVDSTIIVPIVVSANGLIAKSLDQHLKRLSLDGWVKGQIQKAVLLDTARIVRRFLSLSP

SEQ ID NO: 5488 - protein, 1206 aa, Notocelia uddmanniana
MITRTRSRAAQRARPPSPPAPSSSSPSSSGDEFATAPDTSESSCDERGPPSPPPRPPARRGRPPLPARLGPVGHSALPTAPAAGGVVRRMRWTQEMNENCMRAYFGATEGETNLSAYRVRMLPLFQALEPTITVTAQRLSDQVRVIQRLKRLDDATLDRLRLEALSARTASALARDPPATSPAPVPTPDMAPGVPRVDPSVDEDCANQTVSTQTNEQLRRALEEAITRYRPTPNSRPRLPRLPVNRRNLALMGALNDLLDPYLRASEDLIDTHSILYCGAIAACRVARVKFPDADRAPRTAGGVPAWQVRIERRINTFRTLIAKLICFRGGNDRPRVMRFVNQAFAGTGVRPRDYVTCVTERIDFLKQKVYAWASRIRRYRERVDRYQQNRLFQSDQRKVYRKWEGTDHRVCDGQRPDATAMGNFWRSIWSVPVEHTEGAWIGVVERECESIEPMGSVTISPEDISCAIRTAPNWKSPGPDGLHNFWLKWFRCSHERLATQFQQALELGSLPHLLTTGVTSLLYKSGSTTEAKNYRPITCLPTLYKLLTSILRAKINTHIVANNILAPAQNGCRVGSRGTKELLLIDMTICQRVRRSRGALSAAWIDYKKAYDSVPHSWLRRILELYKVDAALRSFLSACMGQWTTVLCQPGGGDGSSGPQDSIRIERGIFQGDSLSPLWFCLALNPLSTLLKDSGLGCQLRRGGEVISHLLYMDDLKLFAPNRQDLLELLKTTEVFSSAIKMEFGVDKCAVMHVQRGKVVNSTNLQLSETMSLRSLSEAETYKYLGMSQSLGIEGEGIKQAVKERFFCRLTKVLNSFLSGGNKVRAFNAWVMPLLTYSFGILRWTQTELDALDRRVRVLLTTHRMLHPRSSVMRLYIPRKCGGRGFLNAKDLHNREVCSLRDYFLNSECGMHRDVVAVDASFTPLSMANENWRRFKVLSTEDRKAEWKSRELHGRFYKALTGPDVDLLASVNWLRFGDLFGETEGFVCAIADEVIMTNNYRKYILKDGTVDICRACRRPGESLRHIISGCGHLANGEYLHRHNLVARIIHQQLALSYGLVNFEVPYYKYLPAPVLENGRATLYWDRSIITDRTIVANKPDIVLIDRSKRQAVLVDITIPHDENLVKAEKDKVSKYLDLAHEVTAMWDVDSTIIVPIVVSANGLIAKSLDQHLKRLSLDGWVKGQIQKAVLLDTARIVRRFLSLSP

SEQ ID NO: 5489 - protein, 1209 aa, Notocelia uddmanniana
MITRSQSRRQPADTTSARPPPLPVSSDSSPSSFGDEFATAHETSESSDESGPPPPPPRPPARRGRPPLPARLGPSGHPAPSTAPAAGGIVRRMQWSQSINENCMRAYYGATDGGTNLSAYRVRMLPLFRALEPAISVSAQRLSDQVRVIQRLKRLDDATLDRLRLEALSARAAPVSARDPPATLPAPMPVPDTATGAPRVDLSTDGDCANQSVSTQADGQLRRALEEAITRYRSTTSSRPRLPRLPVNRRNLALMGALNDLLVPYLRASEDLIDTHSIMYCGAIAACRVARVKFPDADRAPRTAGSVPTWQVRIERRIDTYRTLIAKLICFRGGNSRPRVMRFVNQAFAGTGVRPRDYMTCVTERIDFLKQKVYAWASRIRRYRERVDRYQLNRLFQSDQRKVYRKWEGTDHRVSDGRRPDATTMVNFWRSIWSVPVEHTEGAWMDVVKRECESIEPMGSVTISPEDVSCAIRTAPNWKSPGPDGLHNFWLKWFRCSHARLAAQFQQALELGSLPPPLTTGVTSLLYKSGSTTEAKNYRPITCLPTLYKLLTSILRAKINTHIVANNILAPAQNGCRVGSRGTKELLLIDMTICQRVRRNRGTLSAAWIDYKKAYDSVPHSWLRRILELYKVDAVLRSFLVACMGQWTTVLRQPGGGEGPSGPQDSIRIERGIFQGDSLSPLWFCLALNPLSTLLKDSGLGCQLRREGEVISHLLYMDDLKLFAPNKHDLLELLKTTEVFSSAIKMEFGVDKCAVMHVQRGKVVNSTNLHISETITLRSLSEAETYKYLGMSQSLGIEGEDIKRAVRERFFCRLTKVLNSFLSGGNKVRAFNAWVMPLLTYSFGILRWTQTELDFLDRRVRVLLTAHRMLHPRSSVMRLYIPRKLGGRGFLNAKDLHNREVCSLRDYFLNSECGMHRDVVAADASFTPLSMANENWRRFKVLSTEDRRAVWKSKELHGRFYKAPTGPDVDLLASVNWLRFGDLFGETEGFVCAIADEVIMTNNYRKYILKDGTVDICRACRRPGESLRHIISGCSHLANGEYLHRHNLVARIIHQQLALLYGLVDFEVPYNKYTPAPVLENGRATLYWDRSVITDRTIVANKPDIVLTDRLKRQAVLVDITIPHDENLVKAEKDKVSKYLDLAHEVTAMWDVDSTIIVPIVVSVNGLIAKSLDQHLKRLSLDGWVKGQIQKAVLLDTARIVRRFLSLSP

SEQ ID NO: 5490 - protein, 1208 aa, Crocallis elinguaria
MITRSRTKKAGTASARKTPPPASSSPSSSSGVEYGTPLDTSASSDEDGPPSPPPPPPPARRGRPPLPARLGPAGHSVLRTAPATGGIVRRMRWTSDMNENCMRAYYGATEGGTNMSAYRDRMLPLFQTLEPSVAVSTQRLSDQVRAIQRLKLLDESVLDRLRLEALPIRATSASARDLSVAPPVLAPLPAPSSVATRIDPVVDEDDCANISVSTQVNEQLRRALEDAILEYQYTPDSRPRLPRLPTNRRNLALMGALNVLLAPYLRASENLFDTHSIMYCGAIAVCRVARVKFPDADRAPRPAGSAPAWQVRIERRINTFRTLIAKLICFSRGNNRPRVMRFVNQAFAGTGIRPQNYMAGVTERIDFLKQKIYAWVNRIRRYRERVDRYHQNRLFESDQRKVYRNWEGTDQRVSDGQLPDTNAMINFWRGIWSVPVEHTEGDWMRTVEQSCESIETMGSVTIDPIDVSCAIRTAQNWKSPGPDGLHNFWIKWIRCSHECLAVQFQEALELGSLPRFLTTGVTSLLHKSGSTTEAKNYRPITCLPTLYKLLTSILRAKINSHVVANNILAPAQNGCRVGSRGTKELLLIDTAICQQVRRNKGALSTAWIDYKKAYDSVPHSWLERILELYKIDTTLRTFLSTCMRQWTTVLRQPGSGNSPSGPENFIKIERGIFQGDSLSPLWFCLALNPLSTLLRDSRLGCKLRREGEIISHLLYMDDLKLLAPKSPDLMKLLKITEIFSSAIKMEFGVDKCAVMHVQRGKVVNSDNLQLSETMTLRSLSEAETYRYLGMSQSLGITVGDIKQSVKERFFCRLTKVLNSLLSGGNKARAFNGWVMPLLIYSFGILKWTQTELDSLDRRVRQLLTYHRMLHPRSSVMRLYIPRKWGGRGFLNAKTLHNREVCSLREYFLNNECGMHRDVVAVDRNLTPLSLANENWHKPVVMTTEDRKEVWKGKELHGRFYRALTGSDVDLLASVNWLRFGDLFGETEGFVCAIMDEVIKTNNYRKYIMKDGTVDICRACRRPGESLRHIISGCSHLANGEYLHRHNLVARIIHQQIALQYGLVESEVPYYKYAPVPVLENGCALLYWDRSIITDRTIVANKPDIVLVDRSQRRAVLVDITVPHDENLVKAEKDKLSKYLDLAHEVTAMWNVDSTIIVPIVVSANGLVAKSLDQHLKRLSLDGWIRGRMQKAVLLDTARIVRRFLTLQP

SEQ ID NO: 5491 - protein, 1171 aa, Crocallis elinguaria
MIIIIIIIMNVPLAPSVPPPPARRGRPPLPARLGPVGHSVPRAAPATGGIVRRMRWTSDMNENCMRAYYGATEGGTNMSAYRDRMLPLFQTLEPSVAVSTQRLSDQVRAIQRLKLLDESVLDRLRLEALPIRATSASTRDLSVAPPVPAPLPAPSSVATRIDPVVDEDDCANISVSTQVNEQLRRALEDAILEYQYTPDSRPRLPRLPTNRRNLALMGALNVLLAPYLRASENLFDTHSIMYCGAIAVCRVARVKFPDADRAPRTAGNAPAWQVRIERRINTFRTLIAKLVCFSRGNNRPRVMRFVNQAFAGTGIRPQNYMAGVTERIDFLKQKIYAWVNRIRRYRERVDRYHQNRLFESDQRKVYRNWEGTDQRVSDGQMPDTNAMINFWRGIWSVPVEHTEGDWMRTVEQSCESIETMGSVTIDPIDVSCAIRTAQNWKSPGPDGLHNFWIKWIRCSHECLAVQFQEALELGSLPCFLTTGVTSLLHKSGSTTEAKNYRPITCLPTLYKLLTSILRAKINSHVVANNILAPAQNGCRVGSRGTKELLLIDTAICQQVRRNRGALSTAWIDYKKAYDSVPHSWLERILELYKIDTTLRSFLSTCMRQWTTVLRQPGSGNSPSGPENFIKIERGIFQGDSLSPLWFCLALNPLSTLLRDSRLGCKLRREGEIISHLLYMDDLKLLAPKSPDLMKLLKITEIFSSAIKMEFGVDKCAVMHVQRGKVVNSDNLQLSETMTLRSLSEAETYRYLGMSQSLGIAVGDIKQSVKERFFCRLTKVLNSLLSGGNKARAFNGWVMPLLIYSFGILKWTQTELDSLDRRVRQLLTYHRMLHPRSSVMRLYIPRKWGGRGFLNAKTLHNREVCSLREYFLNNECGMHRDVVAVDRNLTPLSLANENWRKPVVMTTEDRKDVWKGKELHGRFYRALTGSDVDLLASVNWLRFGDLFGETEGFVCAIMDEVIKTNNYRKYIMKDGTVDICRACRRPGESLRHIISGCSHLANGEYLHRHNLVARIIHQQIALQYGLVESEVPYYKYAPAPVLENGRALLYWDRSIITDRTIVANKPDIVLVDRSQRRAVLVDITVPHDENLVKAEKDKLSKYLDLAHEVTAMWNVDSTIIVPIVVSANGLVAKSLDQHLKRLSLDGWIKGRMQKAVLLDTARIVRRFLTLQP

SEQ ID NO: 5492 - protein, 1209 aa, Pammene fasciana
MITRSRTKAASTNARPPSSPASSVSSPSSSGDEFATAPDTSESSDECGPPPPPPRPPARRGRPPLPARLGLAGHPVPPRAPAAGGIVRRMRWTPAMNENVMRAYYGATEGGTNLSAYRDRILPLFQALEPTIDTTAQRLSDQVRAIQRLKRLDDATLDRLRLEALSAHADSTSVRDPPATSPDPMPVPDLASGAPRIDPSADEEYIASQSMSSTANEQLRRTLEEAITQYRSTNIPRPRLPRLPMNRRNLALMGALNDLLDPILRTSKDLDDTHSIMYCGAIAACRVARVKFPDAERAPRTAGGVPVWQVRIERRINSFRTLIAKLICFRGGNNRPRVMRFVHQAFAGTGIEPRDYMANVTERIDFLKQKVYAWASRIRRYRERVDRFRQNRLFQSDQRKVYRRWEEADPRVSDVRLPDATAMTDFWRSIWSAPVEHTEGEWMSVVERECESIEPMGAITISPDDVSCAIRTAQNWKSPGPDGLHNFWLKWFRCSHSRLATQFQQALELGSLPPSLTTGVTFLLYKSGSTTEAKNYRPITCLPTLYKLLTSILRAKINAHIVANNILASSQNGCRVGSRGTKELLLIDMTICQRVRRNRGALSAAWIDYKKAYDSVPHSWLERILELYKVDAALRSFLGACMRQWTTVLRQPGGGDDPPDPHDFIRIERGIFQGDSLSPLWFCLALNPLSTLLKDSGLGCRLRREGEVISHLLYMDDLKLFAPNNRDLMELLKTTEVFSSSIKMEFGVDKCAVMHVQRGKVVNSTNLQLSETMTFRSISESETYKYLGMSQSLGIEDAGIKQALKERFFGRLTKVLNSLLSGGNKVRAFNAWVMPLLTYSFGILRWTQTELDALDRRVRLLLTTHRMLHPRSSVMRLYIPRKCGGRGFLNAKNLHNREVYNLRNYFLNNECGMHRDVVAVNKSLTPLSLANENWRKPVVLSTEDRKAVWKSKELHGRFYGALTGPDVDLLASVNWLRFGDLFGETEGFACAIADEVIMTNNYRRYILKDGTVDICRACRRPGESLRHIISGCSHLANGEYLHRHNLVARIIHQQLALLYGLVDHEVPYYKYTPAPVLENGRATLYWDRSIITDRTIVANKPDIVIIDRSQRRAMLVDITVPCDVNLVKAEKDKSSKYLDLAHEVTAMWEVDSAIIVPIVVSANGLIAKSLDQHLERLSLRGCGWIKGQIQKAVILDTARIVRRFLSLRP

SEQ ID NO: 5493 - protein, 1025 aa, Pammene fasciana
MPVPDLASGAPRIDPSADEEYIASQSMSSTANEQLRRTLEEAITQYRSTNIPRPRLPRLPMNRRNLALMGALNDLLDPILRTSKDLDDTHSIMYCGAIAACRVARVKFPDAERAPRTAGGVPVWQVRIERRINSFRTLIAKLICFRGGNNRPRVMRFVHQAFAGTGIEPRDYMANVTERIDFLKQKVYAWASRIRRYRERVDRFRQNRLFQSDQRKVYRRWEEADPRVSDVRLPDATAMADFWRSIWSAPVEHTEGEWMSVVERECESIEPMGAITISPDDVSCAIRTAQNWKSPGPDGLHNFWLKWFRCSHSRLATQFQQALELGSLPPSLTTGVTFLLYKSGSTTEAKNYRPITCLPTLYKLLTSILRAKINAHIVANNILASSQNGCRVGSRGTKELLLIDMTICQRVRRNRGALSAAWIDYKKAYDSVPHSWLERILELYKVDAALRSFLGACMRQWTTVLRQPGGGDDPPDPHDFIRIERGIFQGDSLSPLWFCLALNPLSTLLKDSGLGCRLRREGEVISHLLYMDDLKLFAPNNRDLMELLKTTEVFSSSIKMEFGVDKCAVMHVQRGKVVNSTNLQLSETMTFRSISESETYKYLGMSQSLSIEDAGIKQALKERFFGRLTKVLNSLLSGGNKVRAFNAWVMPLLTYSFGILRWTQTELDALDRRVRLLLTTHRMLHPRSSVMRLYIPRKCGGRGFLNAKNLHNREVYNLRNYFLNNECGMHRDVVAVDKSLTPLSLANENWRKPVVLSTEDRKAVWKSKELHGRFYGALTGPDVDLLASVNWLRFGDLFGETEGFACAIADEVIMTNNYRRYILKDGTVDICRACRRPGESLRHIISGCSHLANGEYLHRHNLVARIIHQQLALLYCLVDHEVPYYKYTPAPVLENGRATLYWDRSIITDRTIVANKPDIVIIDRSQRRAMLVDITVPCDVNLVKAEKDKSSKYLDLAHEVTAMWEVDSAIIVPIVVSANGLIAKSLDQHLERLSLRGCGWIKGQIQKAVILDTARIVRRFLSLRP

SEQ ID NO: 5494 - protein, 1202 aa, Campaea margaritaria
MFTRSKAATNAHLSSQSAPSSAKSTSSESEYGTPPDTSDVSGPPSPPSPPRPVRRGRPPLPARLGPVGQLAPRPAPATSSKAQRMKWTTTINTSCMRAYYGATEGGTNLTAYRNRMLSLFQTLEPTVAVSAQRLSDQVRAIHRCKLMEQSTLDRLRLEALPVSTTSTSGRDLPETPSIPGPVITSTPVASRVDTEVVDGECGNMSVSSQVTEQLRRTLEDAIRQYRFTSDSRPRLPRVPTHRRNLALMGALDALLAPYLQTSKDLIDTHSILYCGAIAVCRVARVKFPDTEQAPRTLGHAPAWQVRIQRRIDTYRTLIAKLVCFSRGNNRPRVMRFVNQAFAGTDIRPRNYMTCVTERIDFLKQKVYAWANRIRRYRERVDRYCQNRLFQSDQRKVYRNWEVTGQRMDDGQLPDVTAMINFWRGIWSVPVEHTEGDWMNIVERACDPIESMEAVSISPIDVRYAIQTAQNWKSPGPDGLQNFWIKWIRSSHSCLAMQFQEAIELGSLPSFMTTGSTTLLFKSGSTTEAKNYRPITCLPTMYKLLTSILRTKINSHIIANNILAPAQNGCRVGSRGTKELLLIDMTICQQVRRKKGALSTAWVDYKKAYDSVPHSWLVRILELYKIDTTLRSFLRTCMGQWSTVLRQPGGGDSVFGPQDFIRIERGIFQGDSLSPLWFCLALNPLSTLLQNSGLGYRLRREGEIISHLLYMDDLKLFAPKRFDLMKLLNITEEFSKSINMEFGVDKCAVMHVQRGKVVNSSNLQLSETLSLRSLSEAETYKYLGMSESLGIVDRDIKQSVKERFFCRLTKVLNSHLSGGNRARAFNGWVMPLLTYSFGILRWTQTELDALDRRVRQQLTLHRMLHPRSSVMRLYIPRKWGGRGFLNAKNLHNREVCSLREYFLNTECGMHRDVVVVDKTLTPLSLANGNWRKPSVLSTDDRKDVWKGKELHGRFYRALTGPDVDLLASVNWLRFGDLFGETEGFVCAIADEVIKTNNYRKYIMKDGTVDICRACRRPGESLRHIISGCSHLANGEYLHRHNQVARIVHQQLALQYGLVESEVPYYKYAPAPVLENGRALLYWDRSVITDRTIVANKPDIVLVDRSQRRAVLVDITVPHDENLVKAEKDKLSKYLDLAHEVTAMWDVDSTIIVPIVVSANGLVAKSLDQHLKRLSLDGWIKGRMQKAVLLDTARIVRRFLSLQP

SEQ ID NO: 5495 - protein, 1206 aa, Bembecia ichneumoniformis
MILRKRTRNTAEQSARPPPLPVSSSPCSSADEFLTADDKSTSSDEDGSTPPSPPRRPARRGRPPLPASLGPVRPSASRPAPATGGVVRRMRWTHTMNENCMRAYYGATEGATNLTAYRARMLSLFQALEPAVTVTAQRLSDQVRAIQRCQLLEQSALDRLRLDSLPARTTSAATQHLRAALPLSESASIPTSAALLTDPVDQEFCASTNVSTETKEQLRRALEEAISRYHTKPNDRPRLPRLPMHKQNIALMGALNTLLAPYIKASRDLTDTHSILYCGAIAACRVARVKFLNFDRATRDAGDVPAWQVRIERRISKFRTLIAKLIAFSKGNTRPRVMRFVAQAFVGTNIKSKDYLTWATERIDYFKQKVYALANRVRRYKERVERYQQNRVFQSDQRKVYRQWEGTVNRVDAGQLPDADAMTNFWRGIWSVSDGHTEGDWINIVKQTCEPIEPMGAVTISPADVSCAIRTVQNWKSPGPDGLHNFWIKWFRCSHECLAMQFQKALDLGALPSLFTTGITFLLHKSGSTTEAKNYRPITCLPTLYKLLTSILRSKINSHIVANNILAPAQNGCKIGSRGTKELLLIDMTICQRVRRSGGALSVAWIDYQKAYDSVPHSWLRRILELYKIDTTLRSFLAMCMGQWITGLCQPGYRGGAADLRDMIKIERGIFQGDSLSPLWFSLALNPLSTLLRNLKLGYRLRRGGEVISHLLYMDDLKLFAPKPKDLLELLKITQCFSNAIRMDFGVDKCAVMHVQKGKVVNSPNLQLSNEMSFRSLSEVETYKYLGMSQSLGISDKDIKQTVRTRFFGRLIKVLNSFLSGGNKVRAFNGWVMPLLTYSFGILRWTQTELDGLDRRVRRLLTAHRMLHPRSSVMRLYIPRKLGGRGFLNAKNLHNREVYSLREYFLNHESGVHRDVVAIDKNYTPLSLANGNWRRLVVLSAEDRKNVWKGKELHGRFYKALTGPDVDSLMSVNWLRFGDLFGETEGFVCAIADEVIKTNNYRKYILKDGTVDICRACHRPGETLRHIISGCAHLANGEYLHRHNQVARIIHQRLALRYDLIESEVPYYKYVPGPVLENGHATLYWDRSIITDRTIVANKPDIVVIDRSQRRTMLVDIAVPHDENLVKAEKEKLTKYIDLAHEVTAMWDVDSTIIVPIVVSANGLIAKSLDQHLKRLSLDGWVKGQIQKAVLLDTARIVRRFLTLQP

SEQ ID NO: 5496 - protein, 1207 aa, Ennomos quercinarius
MITRSRTKQAEQSARLPPPPVPSSSSSSSGDEYGTPPDTTASSDEDGPPSPPPPPPPARRGRPPLPARLGPAGQPAPRPAPATGGIVRRMRWTQAMNENCMRAYYGATEGGSSLTAYRDRMLSLFQNLEPAVAVSAQRLSDQVRAIQRCKMLDQSTLDRLRLEALPTRATSPSPRVLPAALPDPGPITGPPPVTPRGDPAIGGEESVSDSVSTQANEQLRSALEDAILRYRSTPTSRPRLPRLPTNRRNLVLMGALNTLLAPYLRTSEDLVDTHSILYCGAIAACRVARVKFPDTDRAPRPADGAPAWQVRIEKRITTFRTLIAKLVCFSRGNRRPRVMRFVTQAFTGTGIRPQDYMACVTERIDFLKQKVYAWASRIRRYRERVDRYQQNRLFQSDQRKVYRNWERTGQRVVDGQLPDANAMSEFWRSIWSVPVEHTEGDWMRVVERACEPIESMGSITIDPEDISCAIRTAQNWKSPGPDGLHNFWIKWIRCSYPCLAIQFQEALEAGSLPSFMTTGVTFLLHKSGSTTEAKNYRPITCLPTLYKLLTSILRTKINSHIVANNVLAPAQNGCRVGSRGTKELLLIDTAICQQIQRNRGALSTAWIDYKKAYDSVPHSWLERILELYKIDATLRSFLSTCMRQWTTVLHQPGRGESVSDPQDLIRIERGIFQGDSLSPLWFCLALNPLSTLLKDSGLGYRLRRGGETISHLLYMDDLKLFTPQRPQLIELLKITENFSNSIKMEFGVDKCAVMHVHGGKVVNSTNLQLSETMTLRSLSESETYRYLGMSESLGISVGDVKRTVKERFFCRLTKVLNSLLSGGNKVRAFNGWVMPLLIYSFGILRWTQTELDALDRKVRQLLTSHRMLHPRSSGMRLYIPRKWGGRGFLNAKTLHNREVCSLREYFLNNECGMHRDMVAVDKGLTPLSLANENWRKPVVLSTEDRRDVWKGKELHGRFYRALTGPDVDLHASVNWLRFGDLFGETEGFVCAIADEVIKTNNYRKYIMKDGTVDICRACRRPGESLRHIISGCSHLANGEYLHRHNLVARIIHQQLALQYGLVESEVPYYKYTPGPVLENGRALLYWDRSIITDRTIVANKPDIVLVDRPQRRAVLVDITIPHDENLVKAEKDKLSKYLDLAHEVTAMWNVDSTSIVPIVVSANGLIAKSLDQHLERLSLDGWIKGQIQKAVLLDAARIVRRFLTLQP

SEQ ID NO: 5497 - protein, 1208 aa, Ennomos quercinarius
MITRSKAKTAGNECARLPPLPVPSSPSSSSDDEYATPPDTTASSDEDGPSSPPPPPPPARRGRPPLPARLGPAGQPAPRPAPATGGIVRRMRWTQTMNENCMRAYYGATEGGSSLTAYRDRMLSLFQDLEPAVAVSAQRLSDQVRAIQRCKMLDEPALDRLRLEALSIRATSPSPRVLPAALPDPGPIMDPLPVTPRGDPAIDGEESVSDSVSTQANEQLRSALEDAILRYRSTPTSRPRLPRLPTNRRNLVLMGALNTLLAPYLRTSEDLVDTHSILYCGAIAACRVARVKFPDTDRAPRPADGAPAWQVRIEKRITTFRTLITKLVCFSRGNHRPRVMRFVTQAFAGTGIRPQDYMACVTERIDFLKQKVYAWASRIRRYRERVDRYQQNRLFQSDQRKVYRNWEGTGQRVVDGQLPDANAMNEFWRSIWSVPVDHTEGDWMRVVERVCEPIESMGSITIDPEDISCAIRTAQNWKSPGPDGLHNFWIKWIRCSYPCLAIQFQEALEAGSLPSFMTTGVTFLLHKSGSTTEAKNYRPITCLPTLYKLLTSILRTKINSHIVANNILAPAQNGCRVGSRGTKELLLIDTAICQQVRWNRGALSTAWIDYKKAYDSVPHSWLERILELYKIDATLRSFLSACMRQWTTVLRQPGGGESVSDPQDFIRIERGIFQGDSLSPLWFCLALNPLSTLLGDSGLGYRLRRGGEIISHLLYMDDLKLFAPQRPQLIELLKITENFSNSINMEFGVDKCAVMHVHRGKVVNSTNLQLSETMTLRSLSESETYRYLGMSESLGISVGDVKRTVKERFFCRLTKVLNSLLSGGNKTRAFNGWVMPLLMYSFGILRWTQTELDALDRKVRQLLTSHRMLHPRSSVMRLYIPRKWGGRGFLNAKTLHNREVCSLREYFLNNEYGMHRDVVAVDKGLTPLSLANENWRKPVVLSTEDRRDVWKGKELHGRFYRALTGPDVDLHASVNWLRFGDLFGETEGFVCAIADEVIKTNNYRKYIMKDGTVDICRACRRPGESLRHIISGCSHLANGEYLHRHNLVARIIHQQLALQYGLVESEVPYYKYTPGPVLENGRALLYWDRSIITDRTIVANKPDIVLVDRSQRRAVLVDITIPHDENLVKAEKDKLSKYLDLAHEVTAMWNVDSTSIVPIVVSANGLIAKSLDQHLERLSLDGWIKGQIQKAVLLDTARIVRRFLTLQP

SEQ ID NO: 5498 - protein, 955 aa, Ennomos quercinarius
MGALNALLAPYLRTSEDLVDTHSILYCGAIAACRVARVKFPDTDRAPRPADGAPAWQVRIEKRITTFRTLIAKLVCFSRGNHRPRVMRFVAQAFTGTGIRPQDYMACATERIDFLKQKVYAWAIRIRRYRERVDRYQQNRLFQSDQRKVYRNWEGTSQRVVDGQLPDANAMNEFWRSIWSVPVEHTEGDWMCVVERVCEPIEPMGSITIDPEDISCAIRTAQNWKSPGPDGLHNFWIKWIRCSYPCLAIQFQEALEAGSLPSFMTTGVTFLLHKSGSTTEAKNYRPITCLPTLYKLLTSILRTKINSHIVANNILAPAQNGCRVGSRGTKELLLIDTAICQQVRRNRGALSTAWIDYKKAYDSVPHSWLERVLELYKIDATLRSFLSACMRQWTTVLRQPGGGESVSDPQDFIRIERGIFQGDSLSPLWFCLALNPLNTLLGDSGLGYRLRRGSEIISHLLYMDDLKLFAPQRPQLIELLKITENFSNSINMEFGVDKCAVMHVHRGKVVNSTNLQLSVTMTLRSLSESETYRYLGMSESLGISVGDVKRTVKERFFCRLTKVLNSLLSGGNKTRAFNGWVMPLLMYSFGILRWTQTELDALDRKVRQLLTSHRMLHPRSSVMRLYIPRKWGGRGFLNAKTLHNREVCSLRDYFLNNECGMHRDVVAVDKGLTPLSLANENWRKPVVLSTEDRRDVWKGKELHGRFYRALTGPDVDLHASVNWLRFGDLFGETEGFVCAIADEVIKTNNYRKYIMKDGTVDICRACRRPGESLRHIISGCSHLANGEYLHRHNLVARIIHQQLALQYGLVESEVPYYKYTPGPVLENGRALLYWDRSIITDRTIVANKPDIVLVDRSQRRAVLVDITIPHDENLVKAEKDKLSKYLDLAHEVTAMWNVDSTSIVPIVVSANGLIAKSLDQHLERLSLDGWIKGQIQKAVLLDTARIVRRFLTLQP

SEQ ID NO: 5499 - protein, 1208 aa, Cydia splendana
MITRSRTKAVTTSARPPPPPASSTSSSTSSSGDEFATAPDTDGSSDESGPPPPPPRPPARRGRPPLPARLGPAGHPAPPTAPAAGGIVRRMRWTRDMNENVMRAYYGATEGGTLLSSYRSRILPLFQTLEPTITVSEQRLSDQVRVIQRLKRLDDATFDRLRQEALSARADSTSVRDLPATSPDPVPVPDLAPEAPRVDFCTDEGDFASQNVSTTANEQLRRTLEEAITQYRVTTNSRPRLPRLPMNRRNLALMGALNALLEPYLRTSKDLDDTHSIMYCGAIAACRVARVKFPDTERAPRAVGGVPAWQVRIERRISSFRTLIAKLICFRGGNNRPRVMRFVNQAFAGTDIGPRDYMANVTERIDFLKQKVYAWANRIRRYRERVDRFQQNRLFQSDQRKVYRRWEEANLRTPDTQPPDATATTDFWRSIWSVPAGHTEGSWMSVVEHECESIEPMGAVIISPDDVSCAIRTAQNWKSPGPDGLHNFWLKWFRCSHSRLAAQFQQALELGSLPPSLTTGVTFLLYKSGSTTEAKNYRPITCLPTLYKLLTSILRAKINAHIVANNILASAQNGCRVGSRGTKELLLIDMTICQQIRRNRGALSAAWIDYKKAYDSVPHSWLGRVLELYKVDAALRAFLSTCMRQWTTVLRQPGGGDDRPGPQDFIRIERGIFQGDSLSPLWFCLALNPLSTLLKDLGLGCRLQREGEVISHLLYMDDLKLFAPNSQDLLELLKTTDVFSNAINMEFGIDKCAVMHVQRGRVVNSTNLQLSETMSFRSISESETYKYLGMSQSLGIEDEGIRRSVKERFFSRLTKVLNSLLSGGNKVRAFNAWVMPLLTYSFGILRWTQTELDALDRRVRSLLTTHRMLHPRSSVMRLYIPRKCGGRGFLNAKDLHNREVYNLRNYFLNNECGMHRDVVAVDRNLTPLSLANENWRKPVVLSTADRRAAWESKVLHGRFYKALTGPDVDLLASVNWLRFGDLFGETEGFACAIADEVMMTNNYRKYILKDGTVDICRACRRPGESLRHIISGCSHLANGEYLHRHNLVARIIHQQLALLYGLVDREVPYYKYLPAPVLENGHATLYWDRSIITDRTIVANKPDIVIIDRSQRRAVLVDITIPHDENLVKAEKDKSSKYLDLAHEITAMWDVDSTIIVPIVVSVNGLIAKSLNQHLERLSLGGWIKGQMQKAVILDTARIVRRFLSLQP

SEQ ID NO: 5500 - protein, 1208 aa, Cydia splendana
MITRSKARSQASTTANARPPPSPVSSVSSQSSGDEFATAPDTSESSDECGPPPPPPRPPARRGRPPLPARLGPAGHLAPPTAPAAGGVVRRMRWSQTMNENVMRAYYGATEGGTDLCAYRVRMLPLFQTLEPTIDVTAQRLSDQVRVIQRLKRLDDSTLDRLRLEALSARAASTSVRDPPATSPDPVPAPDQAPEAPRVDLCADEEEFAQSVSSTANEQLRRTLDEAITQYRSTPNTRPRLPRLPMNRHNLALMGALNALLEPYLRTSKDLDDTHAIMYCGAIAACCVARVKFPDSERAPRTAGGAPAWQIRIERRISSFRTLIAKLICFRGGNNRPRVMRFVNQAFAGTDIRPRDYMANITERIDFLKQKVYAWANRIRRYRERVDRFQQNRLFQSDQRKMYRKWEETNPRASDSQPPDATVMNDFWRSIWSVPVGHTEGSWMSVVERECESIEPMGAVTISPDDVSCAIRTAQNWKSPGPDGLHNFWLKWFRCSHSCLAAQFQQALELGSPPPSLTTGVTFLLYKSGSTTEAKNYRPITCLPTLYKLLTSILRAKINAHIVANNILASAQNGCRVGSRGTKELLLIDMTICQQIRRNRGALSAAWIDYKKAYDSVPHSWLERVLELYKVDTALRAFLSACMRQWTTVLRQPGGGDDRPGPQDFIRIERGIFQGDSLSPLWFCLALNPLSTLLKDLELGCRLRRGGEVISHLLYMDDLKLFAPNSQDLVELLKTTEVFSNAINMEFGVDKCAVMHVQRGKVVNSTNLQLSETMSFRSISESETYKYLGMSQSLGIEEEGIRRSVKERFFSRLTKVLNSLLSGGNKVRAFNAWVMPLLTYSFGILRWTQTELDALDRRVRSLLTTHRMLHPRSSVMRLYIPRKCGGRGFLNAKDLHNREVYNLRNYFLSNECGMHRDVVAVDRNLTPLSLANENWRKPVVLSTADRKAAWESKVLHGRFYKALTGPDVDLLASVNWLRFGDLFGETEGFACAIADEVMMTNNYRKYILKDGTVDICRACRRPGESLRHIISGCSHLANGEYLHRHNLVARIIHQQLAVLYGLVDREVPYYKYSPAPVLENGRATLYWDRSIITDRTIVANKPDIVLIDRSQRRTVLVDVTIPHDENLVKAEKDKSSKYLDLAHEITAMWDVDSTIIVPIVVSANGLIAKSLDQHLERLSLGGWIKGQMQKAVILDTARIVRRFLTLRP

SEQ ID NO: 5501 - protein, 1210 aa, Cydia splendana
MITRSQRRAAESTNNARPPPPPAPSSSASTTSSGDEFATAPDTDGSSDESGPPPPPPRPPARRGRPPLPARLGPAGHPAPPTAPATGGIVRRMRWTRNMNENVMRAYYGATEGGTQLSAYRSRILPLFQALEPTITVSEQRLSDQVRVIQRLKRLDDATLDRLRQEALSARADSTSVRDLPATSPDPVPALDLAPGAPRVDFCTDEGDFASQNVSTTANEQLRRTLEEAITQYRATTNSRPRLPRLPMNRRNLALMGALNALLEPHLRTSKDLDDTHSIMYCGAIAACRVARVKFPDAERAPRTVGGVPAWKARIERRISSFRTLIAKLICFRGGNNRPRVMRFVNQAFAGTDIRPRDYMANVTERIDFLKQKVYAWANRIRRYRERVDRFQQNRLFQGDQRKVYRKWEETNLRTPDTQPPDVTAMTDFWRSIWSVPVGHTEGGWMSVVERECESIEPMGAVTISPDDVSCAIRTAQNWKSPGPDGLHNFWLKWFRCSHSCLAAQFQQALELGSLPPSLTTGVTFLLYKSGSTTEAKNYRPITCLPTLYKLLTSILRAKINAHIVANNILASAQNGCRVGSRGTKELLLIDMTICQQIRRNKGALSAAWIDYKKAYDSVPHSWLGRVLELYKVDAALRAFLSACMRQWTTVLRQPGGRDDRPGPQDFIRIERGIFQGDSLSPLWFCLALNPLSTLLKDLGLGCRLRREGEVISHLLYMDDLKLFAPNSQDLLELLKTTEVFSSAIHMEFGVDKCAVMHVQRGRVVNSTNLQLSETMSFRSISESETYKYLGMSQSLGIEDEGIRRSVKERFFSRLTKVLNSLLSGGNKVRAFNAWVMPLLTYSFGILRWTQTELDALDRRVRSLLTAHRMLHPRSSVMRLYIPRKCGGRGFLNAKDLHNHEVYNLRNYFLNNECGMHRDVVAVDRNLTPLSLANENWRKPVVLSTADRKAAWESKVLHGRFYKALTGPDVDLLASVNWLRFGDLFGETEGFACAIADEVMMTNNYRKYILKDGTVDICRACRRPGESLRHIISGCSHLANGEYLHRHNLVARIIHQQLALLYDLVDREVPYYKYLPAPVLENGRATLYWDRSIITDRTIVANKPDIVIIDRSQRRAVLVDITIPHDENLVKAEKDKSSKYLDLAHEITAMWDVDSTIIVPIVVSVNGLIAKSLDQHLERLSLGGWIKGQMQKAVILDTARIVRRFLSLQP

SEQ ID NO: 5502 - protein, 1209 aa, Cydia splendana
MITRSKTRSQASITTNARPPPSPVSSVSSQASSGDEFATAPDTSESSDECGPPPPPPRSPARRGRPPLPARLGPAGHHAPPTVPAAGGVVRRMRWSQTMNENVMRAYYGATEGGTDLCAYRGKMLPLFQALEPTIDVTAQRLSDQVRVIQRLKRLDDSTLDRLRLEALSTRAASTSVRDPPATSPDPVPAPDQAPEAPRVDLCADEEEFAQSVSSTANEQLRRTLDEAITQYRSTPNTRPRLPRLPMNRHNLALMGALNALLEPYLRTSKDLDDTHAIMYCGAIAACRVARVKFPDSERAPRTAGGAPAWQIRIERRISSFRTLIAKLICFRGGNNRPRVMRFVNQAFAGTDIRPRDYMANITERIDFLKQKVYAWANRIRRYRERVDRFQQNRLFQSDQRKMYRKWEETNPRASDSQPPEATVMNDFWRSIWSVPVGHTEGSWMSVVERECESIEPMGAVTISPDDVSCAIRTAQNWKSPGPDGLHNFWLKWFQCSHSCLAAQFQQALELGSPPPSLTTGVTFLLYKSGSTTEAKNYRPITCLPTLYKLLTSILRAKINAHIVANNILASAQNGCRVGSRGTKELLLIDMTICQQIRRNRGALSAAWIDYKKAYDSVPHSWLERVLELYKVDTALRAFLSACMRQWTTVLRQPGGGDGSPGPQDFIRIERGIFQGDSLSPLWFCLALNPLSTLLKDLELGCRLRRGGEVISHLLYMDDLKLFAPNSQDLVELLKTTEVFSNAINMEFGVDKCAVMHVQRGKVVNSTNLQLSETMSFRSISESEIYKYLGMSQSLGIEEEGIRRSVKERFFSRLTKVLNSLLSGGNKVRAFNAWVMPLLTYSFGILRWTQTELDALDRRVRQLLTTHRMLHPRSSVMRLYIPRKCGGRGFLNAKNLHNREVYNLRNYFLNNECGMHRDVVAADKGLTPLSLANENWRKPVVLSTEDRKAVWKDKQLHGRFYKALTGPDVDLLASVNWLRFGDLFGETEGFACAIADEVMMTNNYRKYILKDGTVDICRACRRPGESLRHIISGCSHLANGEYLHRHNLVARIIHQQLALLYGLVDREVPYYKYSPAPVLENGRATLYWDRSIITDRTIVANKPDIVLIDRSQRRTVLVDVTIPHDENLVKAEKDKSSKYLDLAHEITAMWDVDSTIIVPIVVSANGLIAKSLDQHLERLSLGGWIKGQMQKAVILDTARIVRRFLTLRP

SEQ ID NO: 5503 - protein, 1214 aa, Agriopis aurantiaria
MITRSKTSAAARLTNAQPPPPPASSSSPSSSSGEDEYHTTREASGSSSDTSGPGTPPPPPPARRGRPPLPARLGLVGHSATRPAPATGGVVRRMRWSPTMNENCMRAYYRATEGGTNLSAYCARMLPLFQDLEPTVTVSAQRLSDQVRAIHRCKLLDDSVLDRLRLEELRARPTPALMRDPPVASSAPTLASLPASVATLAAPADPVVDEGDLTSNSVSDQVREQLRGALEDAISQYRFAPDSRPRLPRLPTHRRNLALMGALNALLAPYLRASEDLVDTHSILYCGAIAACRVARVKFPDTNRAPQTAGGVPAWQVRIERRISTFRTLIAKLICFSRGNNRPRVMRFVTQAFAGTEIRPQHYLANVMERIDYLKQKVYAWVSRIRRYRERVNRYWQNRLFQSDQRKVYRGWEETDQRVSDGQLPDANAMINFWRGIWSVPVEHTEGDWMRVVERECESIEPMGSILIDSVDVSCAIRTAQNWKSPGPDGLHNFWIKWIRCSHDRLATQFQEALELGSLPSFMTTGVTFLLHKSGSTTEAKNYRPITCLPTIYKLLTSILRNKINAHIVANNVLAHAQNGCRVGSRGTKELLLIDTAISQQVRRNKGALSAAWIDYKKAYDSVPHSWLERVLELYKIDTTLKSFLGACMRQWTTVLRQPGGGDGTSGPQDLIRIERGIFQGDSFSPLWFCLALNPLSTLLRDSGLGYRLRRDGQVISHLLYMDDLKLFTPKRQDLVELLKITEVFSSAIRMEFGVDKCAVMHVQRGKVVNSPNLQLSEVMTLRSLSEAETYKYLGMSESLGISVENIKKSVKERFFCRLTKVLNSFLSGGNKVRAFNGWVMPLLIYSFGILRWTQTELDALDRRVRQLLTSHRMLHPRSSVMRLYIPRKWGGRGFLNAKNLHNREVCSLRDFFRNSESGMHRDVVAVDRGLTPLSLANENWRKPSVLSIEDRRDVWKGKELHGRFYRALTGPDVDLLSSVNWLRFGDLFGETEGFACAIADEVIKTNNYRKYIMKDGTVDICRACHRPGESLRHIISGCSHLANGEYLHRHNQVARIIHQQLALRYGLAESEVPYYKYAPAPVLENGRALLYWDRSIITDRTIVANKPDIVLVDRSQRRAVLVDITIPHDENLVKAEKDKLSKYLDLAHEVTAMWDVDSTIIVPIVVSVNGLIAKSLDQHLKRLSLDGWIKGQMQKAVILDTARIVRRFLTLQP

SEQ ID NO: 5504 - protein, 1211 aa, Agriopis aurantiaria
MITRSKTKTAALRSAHPRPLATPSTSASSSSEDGDYLTSRDTSASSDGSGPSTPPPPLTPARRGRPALPARLGHVELPAPLSAPATGGVRRMRWTPVINENCMRAYYRATEGGTNLSAYRVRMLPLFQALEPTVTVSAQRLSDQVRAIQRCNLLDQSVLDRLRLEEVRTRPTPPSTRNPPVASSAPTLASRPASVVTLATLADPVVDEGDLASGVSDQVREQLRGALEDAISQYRFTPVSRPRLPRLPTHRRNLALMGALNALLAPYLRASKDLVDTHSILYCGAIAACRVARVKFPDTNRAPRTVGRVPAWQVRIERRISTFRTLIAKLICFRRGNNRPRVMRFVTQAFAGTDIRPQHYLANVTERIDYLKQKVYAWANRIRRYRERVDRYWQNRLFQSDQRKVYRGWEETEQRVSDGQLPDASAMINFWRGIWSVPVEHTEGDWMRVVERECESIEPMGSILIDSVDVSCAIRTAQNWKSPGPDGLHSFWIKWIRCSHDRLATQFQEALELGSLPSFMTTGVTFLLHKSGSTTEAKNYRPITCLPTIYKLLTSILRNKINAHIVANNVLAHAQNGCRVGSRGTKELLLIDTAISQQVRRNRGALSAAWIDYKKAYDSVPHSWLERVLELYKIDTTLKSFLGACMRQWTTVLRQPGSGDGASGPQDLLRIERGIFQGDSFSPLWFCLALNPLSTLLRDSGLGYRLRRDGQVISHLLYMDDLKLFTPKRQDLMELLKITEVFSSAIKMEFGVDKCAVMHVQRGKVVNSPNLQLSETMTLRSLSEVETYKYLGMSESLGISVEDIKKSVKERFFCRLTKVLNSFLSGGNKVRAFNGWVMPLLIYSFGILRWTQTELDALDRRVRQLLTSHRMLHPRSSVMRLYIPRKWGGRGFLNAKNLHNREVCSLRDFFRNSESGMHRDVVAVDRGLTPLSLANENWRKPSVLSIEDRRDVWKGKELHGRFYRALTGPDVDLLSSVNWLRFGDLFGETEGFACAIADEVIKTNNYRKYIMKDGTVDICRACHRPGESLRHIISGCSHLANGEYLHRHNQVARIIHQQLALRYGLVESEVPYYKYAPAPVLENGRALLYWDRSIITDRTIVANKPDIVLVDRSQRRAVLVDITIPHDENLVKAEKDKLSKYLDLAHVVTAMWDVDLTIIVPIVVSVNGLIAKSLDQYLKRLSLDGWVKGQIQKAVILDTARIVRRFLTLQP

SEQ ID NO: 5505 - protein, 869 aa, Hedya salicella
MRYVAQAFAGTDFSSCDYMACVTERIDFLKQKVYAWASRIRRYRERVDRFQQNRLFQSDQRKVYRKWEGTDQRVTDGRLPDPTAMSNFWRSIWSVPVEHTEGEWMNVVERECEPIEAMGAVTISPDDVSCAARTTQNWKSPGPDGLHNFWVKWFRCSHERLATQFQQALELGSLPSFLTTGVTFLLYKSGSTTEAKNYRPITCLPTLYKLLTSILRAKINTHIVANNVLAFSQNGCRVGSRGTKELLLIDTTICQQVRRSRGSLSAAWIDYKKAYDSVPDSWLERILELYKVDTALRSFLGACMRQWTTVLCQPGGRDARPAPQDFIRIKRGIFQGDSLSPLWFCLALNPLSTLLKDSGLGCRLRRGGEIISHLMYMDDLKLFAPKRPELVELLKVTDTFSSAIKMEFGVDKCAVMHVQRGKVVNSTNLELSETMSLRSLSETETYKYLGMSQALSIADGDIRQAVKERFFCRLTKVLNSLLSGGNKARAFNAWVMPLLTYSFGILRWTQTELDALDRRVRMLLTTHRMLHPRSSVMRLYIPRKCGGRGFLNAKDLHNREVCSLREYFLNNECGIHRDVVAVDKGLTPLSLANENWRRPTVLSTVDRKDVWKSKELHGRFYKALTGPDVDLLASVNWLRFGDLFGETEGFSWAIADEVIMTNNYRRYILKDGTVDICRACRRPGESLRHIMSGCSHLANGEYLHRHNQVARIIHQQLAVKYDLVGFEVPYYKYVPMPVLENGRATLYWDRSILTDRTIVANKPDIVLVDRSKRRAMLVDITIPHDENLVKAEKDKLSKYLDLAHEVTAMWDVDSTIIVPIVVSVNGLIAKSLDEHLKRLSLDGWIKGQIQKAVILDTARIVRRFLSVQP

SEQ ID NO: 5506 - protein, 931 aa, Hedya salicella
MYCGAIAACRVARVKFPDADRAPRTAGGVPAWQVWIERRISTFRTLIAKLICFRGGNNRPRVMRYVAQAFAGTAVRPRDYMACVTERIDFLKQKVYAWASRIRRYRERVDRFQQNRLFQSDQRKVYRKWEGTDQRVTDGRLPDPTAMNNFWRSIWSVPVEHTEGEWMNVVERECEPIETMGAVTISPDDVSCAARTTQNWKSPGPDGLHNFWVKWFRCSHERLATQFQQALELGSLPSFLTTGVTFLLYKSGSTTEAKNYRPITCLPTLYKLLTSILRAKINTHIVANNVLAFSQNGCRVGSRGTKELLLIDTTICQRVRRSRGTLSAAWIDYKKAYDSVPHSWLGRILELYKIDTVLKSFIGSCMRQWTTVLRQPGGRDGPPDPQDFIRIKRGIFQGDSLSPLWFCLALNPLSTLLKDSGLGCRLRRGGEIIFHLLYMDDLKLFAPKRPELVELLKVTETFSSAIKMEFGVDKCATMHVQRGKVVNSTNLQLSETMSLKSLSEVETYKYLGMSQSLSIADGDIKQAVKERFFCRLTKVLNSLLSGGNKARAFNAWVMPLLTYSFGILRWTQTELDALDRRVRMLLTTHRMLHPRSSVMRLYIPRKCGGRGFLNAKDLHNREVCSLREYFLNNECGIHRDVVAVDKGLTSLSLANENWHRPTVLSTVDRKDVWRSKELHGRFYKALTGPDVDLLVSVNWLRFGDLFGETEGFACAITDEVIMTNNYRKYILKDGTVDICRACRRPGESLRHIISGCSHLANSEYLHRHNQVARINHQQLAVKYGLVGSEVPYYKYAPMPVLENGRATLYWDRSIITDRTIVANKPDIVLVDRSKRRAILIDITIPHDENLVKAEKDKLSKYLDLAHEVTAMWDVDSTIIVPIVVSANGLIAKSLNEHLKRLSLDGWVKGQIQKAVILDTARIVRRFLSVQP

SEQ ID NO: 5507 - protein, 1213 aa, Erannis defoliaria
MITRSKKRNAAVQHARPTPPPVPSSSPSSSSPSEEEFHTCGTSSSSEDVSGPRTPTPPIPVRRGRPPLPACLGPAGQPASRPALAAGGVVRRMRWSQTNNENCMRAYYGATEGGTNLTAYRVRMLSLFQTLEPTVTVSAQRISDQVRAIQRLNLLDQPLLDRLRLEVQSARPTPASTRDLDVASSAPTLASVPTSAATLATSADPVLDEGDCTGMSVSTQVSEQLRRALEDAIGQYRFALNSRPRLPRLPTHRRNLALMGALNALLAPYLRASEDLTDTHSILYCGAIAACRVARVKFPDTNRAPRPAGDVPAWQLRIERRISTFRTLIAKLICFSRGNNRPRVMRFVTQAFAGTGIRPQQYMASVTERIDYLKQKVYAWANRIRRYRERVDRYWQNRLFQSDQRKVYRNWEGTEQRVSDGQLPDASAMTNFWRGIWSVPVEHTEGDWMRVVERECESIEPMGSILIDPVDVSCAIRTAQNWKSPGPDGLHNFWIKWFRCSHDRLATQFQEALELGSLPSFMTTGVTFLLHKSGSTTEPKNYRPITCLPTIYKLLTSILSTKINAHIVANNVLAPAQNGCRVGSRGTKELLLIDMAISQQVRRNKGALSAAWIDYKKAYDSVPHSWLERILELYQIDTTVKSFLGACMRQWTTVLRQPGGGNGSSDSQDLIRIERGIFQGDSLSPSWFCLALNPLSTLLKDSGLGYRLRRGGEIISHLLYMDDLKLFAPKHQDLLELLKTTQVFSSAIRMEFGVDKCAVIRVQRGKVVNSPDLQLSEIMTLRSLSEAETYKYLGMSESLGISVVDIKKSVKERFFCRLTKVLNSLLSGGNKARAFNGWVMPLLIYSFGILRWTQTELDALDRRVRQLLTAHRMLHPRSSVMRLYIPRKWAGRGFLNAKNLHNREVCSLRDYFLNNECGMHRDVVTVDKGLTPLSLANENWRRPSVISTDDRKEVWKSKELHGRFYRALMGPDVDLLASVNWLRFGDLFGETEGFACAIADEVIKTNNYRKYIMKDGTVDICRACHRPGESLRHIISGCSHLANGEYLHRHNQVARIIHQQLALQYGLVESEVPYYKYAPAPVLENGRALLYWDRSIITDRTIVANKPDIVMVDRSQRRAVLVDVTIPHDENLVKAEKDKLSKYLDLAFEITAMWDVDSTIIVPIVVSANGLIAKSLDQYLKRLSLDGWVKGQIQKAVVLDTARIVRRFLTLQP

SEQ ID NO: 5508 - protein, 1216 aa, Erannis defoliaria
MITRSKAIRNAAEQHSARPPSPPAPSSPSASSGEDVFVTPRESSASSTDSDVSGPRTPAPPPPARRGRPPLPARLGPAGLPASRPALAAGGVVRRMRWSQTNNENCMRAYYRATEVGTNLTAYRVRMLSLFQALEPTVTVSAQRLSDQVRAIQRLNLLDQSLLDRLRLEAQSARSTPVSTRDSHVASSAPTLASMPTSVATLATPADPVVDEGDGTGMSVTTQVSEQLRRALEDAISQYRFALNSRPRLPRLPTHRRNLALMGALNALLAPYLRASEDLTDTHSILYCGAVAACRVARVKFPDSNRAPRTAGDVPAWQARIERRISTFRTLIAKLICFSRGNNRPRVMRFVTQAFAGTGIRPQQYMASVTERIDYLKQKVYAWASRIRRYRERVDRYWQNRVFQSDQRKVYRNWEGAEQRVSDGHLPDANAMTNFWRGIWSVPVEHNEGDWMRVVERECESIEPMGSILIDPVDVSCAIRTAQNWKSPGPDGLHNFWIKWFRCSHDRLATQFQEALELGSLPSFMTTGVTFLLHKSGSTTEPKNYRPITCLPTIYKLLTSILSTKINTHIVANNVLAPAQNGCRVGSRGTKELFLIDMAISQQVRRNKGALSAAWIDYKKAYDSVPHSWLERILELYKIDTTLKSFLSACMRQWTTVLRQPGGGNDSFDPQDLIRIERGIFQGDSLSPSWFCLALNPLSTLLKDSGLGYRFRRGGEVISHLLYMDDLKLFAPKHQDLLELLKTTQVFSSAIRMDFGVDKCAVMRVQRGKVVNSPDLQLSEIMTLRSLSEAETYKYLGMSESLGISVVDIKKSVKERFFCGLTKVLNSLLSGGNKARAFNGWVMPLLIYSFGILRWTQTELDALDRRVRQLLTAHRMLHPRSSVMRLYIPRKWGGRGFLNAKNLHNREVCSLRDYFLNNECGMHRDVVTVDKGLTPLSLANENWRRPSVLSTDDRKDVWKSKELHGRFYRALSGPDVDLLASVNWLRFGDLFGETEGFACAIADEVIKTNNYRKYIMKDGTVDICRACHRPGESLRHIISGCSHLANGEYLHRHNQVARIIHQQLALQYGLVESEVPYYKYAPAPVLENGRALLYCDRSIITDRTIVANKPDIVMVDRSQSRAVLVDVTIPHDENLVKAEKDKLSKYLDLAFEITAMWDVDSTIIVPIVVSANGLIAKSLDQYLKRLSLDGWVKGQIQKAVVLDTARIVRRFLTLQP

SEQ ID NO: 5509 - protein, 1216 aa, Erannis defoliaria
MITRSKAIRNAAEQHSARPPSPPAPSSPSASSGEDVFVTPRESSASSSDSDVSGPRTPAPPPPARRGRPPLPARLGPAGLLASRPALAAGGVVRRMRWSQTNNENCMRAYYGATEVGTNLTAYRVRMLSLFQALEPTVTVSAQRLSDQVRAIQRLNLLDQSLLDRLRLEAQSARSTPVSTRDSHVASSAPTLASMPTSVATLATPADPVVDEGDGTGMSVTTQVSEQLRRALEDAISQYRFALNSRPRLPRLPTHRRNLTLMGALNALLAPYLRASEDLTDTHSILYCGAVAACRVARVKFPDSNRAPRTAGDVPAWQARIERRISTFRTLIAKLICFSRGNNRPRVMRFVTQAFAGTGIRPQQYMASVTERIDYLKQKVYAWASRIRRYRERVDRYWQNRVFQSDQRKVYRNWEGAEQRVSDGHLPDANAMTNFWRGIWSVPVEHTEGDWMRVVERECESIEPMGSILIDPVDVSCAIRTAQNWKSPGPDGLHNFWIKWFRCSHDRLATQFQEALELGSLPSFMTTGVTFLLHKSGSTTEPKNYRPITCLPTIYKLLTSILSTKINTHIVANNVLAPAQNGCRVGSRGTKELLLIDMAISQQVRRNKGALSAAWIDYKKAYDSVPHSWLERILELYKIDTTLKSFLSACMRQWTTVLRQPGGGNDSFDPQDLIRIERGIFQGDSLSPSWFCLALNPLSTLLKDSGLGYRLRRGGEVISHLLYMDDLKLFAPKHQDLLELLKTTQVFSSAIRMEFGVDKCAVMRVQRGKVVNSPDLQLSEIMTLRSLSEAETYKYLGMSESLGISVVDIKKSVKERYFCRLTKVLNSLLSGGNKARAFNGWVMPLLIYSFGILRWTQTELDALDRRVRQLLTAHRMLHPRSSVMRLYIPRKWGGRGFLNAKNLHNREVCSLRDYFLNNECGMHRDVVTVDKGLTPLSLANENWRRPSVLSTDDRKDVWKSKELHGRFYRALSGPDVDLLASVNWLRFGDLFGETEGFACAIADEVIKTNNYRKYIMKDGTVDICRACHRPGESLRHIISGCSHLANGEYLHRHNQVARIIHQQLALQYGLVESEVPYYKYAAAPVLENGRALLYWDRSIITDRTIVANKPDIVMVDRSQRRAVLVDVTIPHDENLVKAEKDKLSKYLDLAFEITAMWDVDSTIIVPIVVSANGLIAKSLDQYLKRLSLDGWVKGQIQKAVVLDTARIVRRFLTLQP

SEQ ID NO: 5510 - protein, 1183 aa, Erannis defoliaria
MTSSSPPRESSATSSDSDVSGPRTPAPPPPVRRGRPPLPARLGPAGLPASRPALAAGGVVRRMRWSQINNENCMRAYYGATDGGTNLSAYRVRMLPLFQALEPTVTVSAQRLSDQVRAIQRLNLLDQSLLDRLRLEAQSARATPASTRDSHVASSAPTLASMPTSAATLATPADPVVDEGDCTSMSVSSQVSEQLRRALEDAIGQYRFALNSRPRLPRLPTHRRNLALMGALNALLAPYLRASKDLTDTHSILYCGAIAACRVARVRFPDTNRAPRTVGDVPAWQVRIERRISAFRTLIAKLICFSRGNNRPRVMRFVTQAFSGTGLRPQQYMTSVTERIDYLKQKVYAWANRIRRYRERVDRYWQNRLFQSDQRKVYRNWEGAAQRVNGGHLPDANAMTNFWRSIWSVPVEHTEGDWMRVVERECEAIEPMGPILIDPVDVSCAIRTAQNWKSPGPDGLHNFWIKWFRCSHDRLATQFQEALELGSLPSFMTTGITFLLHKSGSTTEPKNYRPITCLPTIYKLLTYILSTKINAHIIANNVLAPAQNGCRVGSRGTKELLLIDMAISQQVRRSKGALSAAWIDYKKAYDSVPHSWLERILELYQIDTTLKSFLGACMRQWTTVLRQPGGGNDSSDPQDLIRIERGIFQGDSLSPSWFCLALNPLSTLLKDSGLGYRLRRGSEVISHLLYMDDLKLFAPKHQDLLELLKTTQVFSSAIRMEFGVDKCAVMRVQRGKVVNSPDLQLSEIMTLRSLSEAETYKYLGMSESLGISVVDIKKSVKERFFCRLTKVLNSLLSGGNKARAFNGWVMPLLIYSFGILRWTQTELDALDRRVRQLLTAHRMLHPRSSVMRLYIPRKWGGRGFLNAKNPHNREVCSLRDYFLNNECGMHRDVVTVDKGLTPLSLANENWRRPSVLSTDDRKEVWKSKELHGRFYRALTGSDVDLLASVNWLRFGDLFGETEGFACAIADEVIKTNNYRKYIMKDGTVDICRACHRPGESLRHIISGCSHLANGEYLHRHNQVARIIHQQLALPYGLVESEVPYYKYAPAPVLENGRVLLYWDRSIITDRTIVANKPDIVMVDRSQCQAVLVDVTIPHDENLVKAEKDKLSKYLDLAFEITAMWDVDSTIIVPIVVSANGLIAKSLDQYLKRLSLGGWVKGQIQEAVVLDTARIVRRFLTLQP

SEQ ID NO: 5511 - protein, 1213 aa, Erannis defoliaria
MITRSKKRNAAVQHARPTPPPVPLSSPSSSSPSEEEFHTCGTSSSSEDVSGPRTLTPPIPVRRGRPPLPARLGPAGQPASRPALAAGGVVRRMRWSQTNNENCMRAYYGATEGGTNLTAYRVRMLSLFQTLEPTVTVSAQRISDQVRAIQRLNLLDQPLLDRLRLEVQSARPTPASTRDLDVASSAPTLASVPTSAATLVTSADPVLDEGDCTGMSVSTQVSEQLRRALEDAIGQYRFALNSRPRLPRLPTHRRNLALMGALNALLAPYLRASEDLTDTHSILYCGAIAACRVARVKFPDTNRAPRPAGDVPAWQLRIERRISTFRTLIAKLICFSRGNNRPRVMRFVTQAFAGTGIRPQQYMASVTERIDYLKQKVYAWANRIRRYRERVDRYWQNRLFQSDQRKVYRNWEGTEQRVSDGQLPDASAMTNFWRGIWSVPVEHTEGDWMRVVERECESIEPMGSILIDPVDVSYAIRTAQNWKSPGPDGLHNFWIKWFRCSHDRLATQFQEALELGSLPSFMTTGVTFLLHKSGSTTEPKNYRPITCLPTIYKLLTSILSTKINAHIVANNVLAPAQNGCRVGSRGTKELLLIDMAISQQVRRNKGALSAAWIDYKKAYDSVPHSWLERILELYQIDTTLKSFLGACMRQWTTVLRQPGGGNGSSDSQDLIRIERGIFQGDSLSPSWFCLALNPLSTLLKDSGLGYRLRRGGEVISHLLYMDDLKLFAPKHQDLLELLKTTQVFSSAIRMEFGVDKCAVMRVQRGKVVNSPDLQLSEIMTLRSLSEAETYKYLGMSESLGISVVDIKKSVKERFFCRLTKVLNSLLSGGNKARAFNGWVMPLLIYSFGILRWTQTELDALDRRVRQLLTAHRMLHPRSSVMRLYIPRKWAGRGFLNAKNLHNREVCSLRDYFLNNECGMHRDVVTVDKGLTPLSLANENWRRPSVISTDDRKEVWKSKELHGRFYRALTGPDVDLLASANWLRFGDLFGETEGFACAIADEVIKTNNYRKYIMKDGTVDICRACHRPGESLRHIISGCSHLANGEYLHRHNQVARIIHQQLALQYGLVESEVPYYKYAPAPVLENGRALLYWDRSIITDRTIVANKPDIVMVDRSQRRAVLVDVTIPHDENLVKAEKDKLSKYLDLAFEITAMWDVDSTIIVPIVVSANGLIAKSLDQYLKRLSLDGWVKGQIQRAVVLDTARIVRRFLTLQP

SEQ ID NO: 5512 - protein, 1215 aa, Biston betularia
MWTRSRTAAASGLHDAHIPSPPAPSTPSASSGDEEFATPLATSASSSSSDVSGPRTPAPPPPARRGRPPLPARLGPAGQSASRSALAAGGVVRRMRWSQTNNENCMRAYYGATEGGINLSAYRVRMLPLFQALEPTVAVSTQRLSDQVRAIQRLQLLDQSVLDRLRLEALPARPTPVSTRDSPVASSAPTLVSVPTSMATLATPTDPVVDVGECTSMGVCSQVSEHLRRTLEDAICQYRFAPDSRPRLPRLPTHRRNLALMGALNALLAPYLRASEDLTDTHSILYCGAIAACRVARVKFPDTNRAPRPAGGVPAWQLRIERRISTFRTLIAKLICFSRGNNRPRVMRFVTQAFAGTGIRPQHYLASVTERIDYLKQKVYAWANRIRRYRERADRYWQNRVFQSDQRKVYRDWEGTGQRVSDRQLPDTSVMTEFWRGIWSLPVEHTEGDWMRVVERECESIESMGSVLIDPVDVSCAIRTAQNWKSPGPDGLHNFWIKWIRCSHDRLATQFQEALELGSLPCFMTTGVTFLLHKTGSTTEAKNYRPITCLPTIYKLLTSILRTKINAHVVANNVLAPAQNGCRVGSRGTKELLLIDMTISQQVRRNKGALSTAWIDYKKAYDSVPHSWLERVLELYKIDTTLKSFLGACMRQWTTVLRQPGSGDGSSEPQDLIRIERGIFQGDSLSPLWFCLALNPLSTLLKESGLGHRLRRGGEVISHLLYMDDLKLFAPKRPDLMELLKTTQVFSNAIKMEFGVDKCAVMHVQLGEVVNCPDLQLSETMTFRSLSEAETYKYLGMSESLGIAVVDIKRSVKERFFCRLTKVLNSFLSGGNKVRAFNGWVMPLLIYSFGILRWTQTELDALDRRVRQQLTTHRMLHPRSSVMRLYIPRKLGGRGFLSAKNLHNREVCSLRDYFRDNECGMHRDVVAVDKGLTPLSLANENWRKPSVLSTEDRKEVWKSKQLHGRFYRVLTGPDVDMLASVNWLRFGDLFGETEGFACAIADEVIKTNNYRKYIMKDGTVDICRACHRPGESLRHIISGCSHLANGEYLHRHNQVARIIHQQLALQYGLVESEVPYYKYAPAPVLENGRALLYWDRSIITDRTIVANKPDIVVVDRAQRRAVLVDITIPHDENLVKAEKDKLSKYLDLAHEITAMWDVDSTTIVPIVVTVNGLIAKSLDQHLERLSLDGWVKGQLQKAVILDTARIVRRFLTLQP

SEQ ID NO: 5513 - protein, 1197 aa, Biston betularia
MWTRSRTAAASGLHDAHIPSPPAPSTPSASSGDEEFATPLATSASSSSSDVSGPRTPAPPPPARRGRPPLPARLGPAGQSASRSALAAGGVVRRMRWSQTNNENCMRAYYGATEGGINLSAYRARMLPLFQALEPTVAVSTQRLSDQVRAIQRLQLLDQSVLDRLRLEALPARPTPVSTRDSPVASSAPTLVSVPTSMVTLATPTDPVVDAGECTSMGVCSQVSEHLRRTLEDAICQYRFAPDSRPRLPRLPTHRRNLALMGALNALLAPYLRASEDLTDTHSILYCGAIAACRVARVKFPDTNRAPRPAGGVPAWQLRIERRISTFRTLIAKLICFSRGNNRPRVMRFVTQAFAGTGIRPQHYLASVTERIDYLKQKVYAWANRIRRYRERADRYWQNRVFQSDQRKVYRDWEGTGQRVSDRQLPDTSVMTEFWRGIWSLPVEHTEGDWMRVVERECESIESMGSVLIDPVDVSCAIRTAQNWKSPGPDGLHNFWIKWIRCSHDRLATQFQEALELGSLPCFMTTGVTFLLHKTGSTTEAKNYRPITCLPTIYKLLTSILRTKINAHVVANNVLAPAQNGCRVGSRGTKELLLIDMTISQQVRRNKGALSTAWIDYKKAYDSVPHSWLERVLELYKIDTTLKSFLGACMRQWTTVLRQPGSGDGSSEPQDLIRIERGIFQGDSLSPLWFCLALNPLSTLQKESGLGHRLRRGGEVISHLLYMDDLKLFAPKRPDLMELLKTTQVFSNAIKMEFGVDKCAVMHVQRGEVVNCPDLQLSETMTFRSLSEAETYKYLGMSESLGIAVVDIKRSVKERFFCRLTKVLNSLLSGGNKVRAFNGWVMPLLIYSFGILRWTQTELDALDRRVRQQLTTHRMLHPRSSVMRLYIPRKLGGRGFLSAKNLHNREVCSLRDYFRDNECGMHRDVVAVDKGLTPLSLANENWRKPSVLSTEDRKEVWKSKQLHGRFYRVLTGPDVDMLASVNWLRFGDLFGETEGFACAIADEVIKTNNYRKYIMKDGTVDICRACHRPGESLRHIISGCSHLANGEYLHRHNQVARIIHQQLALQYGLVESEVPYYKYAPAPVLENGRALLYWDRSIITDRTIVANKPDIVVVDRAQRRAVLVDITIPHDENLVKAEKDKLSKYLYLAHEITAMWDVDSTIIVPIVVSVNGLIAKSLDQHLKRLSLDGWVKGQLQK

SEQ ID NO: 5514 - protein, 1215 aa, Biston betularia
MWTRSRTAAASGLHDAHIPSPPAPSTPSASSGDEEFATPLATSASSSSSDVSGPRTPAPPPPARRGRPPLPARLGPAGQSASRSALAAGGVVRRMRWSQTNNENCMRAYYGATEGGINLSAYRVRMLPLFQALEPTVAVSTQRLSDQVRAIQRLQLLDQSVLDRLRLEALPARPTPVSTRDSPVASSAPTLVSVPTSMATLATPTDPVVDVGECTSMGVCSQVSEHLRRTLEDAICQYRFAPDSRPRLPRLPTHRRNLALMGALNALLAPYLRASEDLTDTHSILYCGAIAACRVARVKFPDTNRAPRPAGGVPAWQLRIERRISTFRTLIAKLICFSRGNNRPRVMRFVTQAFAGTGIRPQHYLASVTERIDYLKQKVYAWANRIRRYRERADRYWQNRVFQSDQRKVYRDWEGTGQRVSDRQLPDTSVMTEFWRGIWSLPVEHTEGDWMRVVERECESIESMGSVLIDPVDVSCAIRTAQNWKSPGPDGLHNFWIKWIRCSHDRLATQFQEALELGSLPCFMTTGVTFLLHKTGSTTEAKNYRPITCLPTIYKLLTSILRTKINAHVVANNVLAPAQNGCRVGSRGTKELLLIDMTISQQVRRNKGALSTAWIDYKKAYDSVPHSWLERVLELYKIDTTLKSFLGSCMRQWTTVLRQPGSGDGSSEPQDLIRIERGIFQGDSLSPLWFCLALNPLSTLLKESGLGHRLRRGGEVISHLLYMDDLKLFAPKRPDLMELLKTTQVFSNAIKMEFGVDKCAVMHVQRGEVVNCPDLQLSETMTFRSLSEAETYKYLGMSESLGIAVVDIKRSVKERFFCRLTKVLNSFLSGGNKVRAFNGWVMPLLIYSFGILRWTQTELDALDRRVRQQLTTHRMLHPRSSVMRLYIPRKLGGRGFLSTKNLHNREVCSLRDYFRDNECGMHRDVVAVDKGLTPLSLANENWRKPSVLSTEDRKEVWKSKQLHGRFYRVLTGPDVDMLASVNWLRFGDLFGETEGFACAIADEVIKTNNYRKYIMKDGTVDICRACHRPGESLRHIISGCSHLANGEYLHRHNQVARIIHQQLALQYGLVESEVPYYKYAPAPVLENGRALLYWDRSIITDRTIVANKPDIVVVDRAQRRAVLVDITIPHDENLVKAEKDKLSKYLDLAHEITAMWDVDSTIIVPIVVTVNGLIAKSLDQHLKRLSLDGWVKGQLQKAVILDTARIVRRFLTLQP

SEQ ID NO: 5515 - protein, 1215 aa, Biston betularia
MWTRSRTAAASGLHDAHIPSPPAPSTPSASSGDEEFATPLATSASSSSSDVSGPRTPAPPPPARRGRPPLPARLGPAGQSASRSALAAGGVVRRMRWSQTNNENCMRAYYGATEGGINLSAYRVRMLPLFQALEPTVAVSTQRLSDQVRAIQRLQLLDQSVLDRLRLEALPARPTPVSTRDSPVASSAPTLVSVPTSMATLATPTDPVVDVGECTSMGVCSQVSEHLRRTLEDAICQYRFAPDSRPRLPRLPTHRRNLALMGALNALLAPYLRASEDLTDTHSILYCGAIAACRVARVKFPDTNRAPRPAGGVPAWQLRIERRISTFRTLIAKLICFSRGNNRPRVMRFVTQAFAGTGIRPQHYLASVTERIDYLKQKVYAWANRIRRYRERADRYWQNRVFQSDQRKVYRDWEGTGQRVSDRQLPDTSVMTEFWRGIWSLPVEHTEGDWMRVVERECESIESMGSVLIDPVDVSCAIRTAQNWKSPGPDGLHNFWIKWIRCSHDRLATQFQEALELGSLPCFMTTGVTFLLHKTGSTTEAKNYRPITCLPTIYKLLTSILRTKINAHVVANNVLAPAQNGCRVGSRGTKELLLIDMTISQQVRRNKGALSTTWIDYKKAYDSVPHSWLERVLELYKIDTTLKSFLGACMRQWTTVLRQPGSGDGSSEPQDLIRIERGIFQGDSLSPLWFCLALNPLSTLLKESGLGHRLRRGGEVISHLLYMDDLKLFAPKRPDLMELLKTTQVFSNAIKMEFGVDKCAVMHVQRGEVVNCPDLQLSETMTFRSLSEAETYKYLGMSESLGIAVVDIKRSVKERFFCRLTKVLNSFLSGGNKVRAFNGWVMPLLIYSFGILRWTQTELDALDRRVRQQLTTHRMLHPRSSVMRLYIPRKLGGRGFLSTKNLHNREVCSLRDYFRDNECGMHRDVVAVDKGLTPLSLANENWRKPSVLSTEDRKEVWKSKQLHGRFYRVLTGPDVDMLASVNWLRFGDLFGETEGFACAIADEVIKTNNYRKYIMKDGTVDICRACHRPGESLRHIISGCSHLANGEYLHRHNQVARIIHQQLALQYGLVESEVPYYKYAPAPVLENGRALLYWDRSIITDRTIVANKPDIVVVDRAQRRAVLVDITIPHDENLVKAEKDKLSKYLDLAHEITAMWDVDSTIIVPIVVTVNGLIAKSLDQHLKRLSLDGWVKGQLQKAVILDTARIVRRFLTLQP

SEQ ID NO: 5516 - protein, 1207 aa, Blastobasis lacticolella
MITRSKRKNQTVNAQPPPTPAPVSSSPSSSNDEFTTASDTSESSDERGLSAAPPPPPARRGRPLPARLGPTGRPAPPMAPATGGVVRRMRWTQSINENVMRAYYGATEGGTNLSAYRDRMLPLFQVLEPAIDVTAQRLSDQVRAIQRLKRLDDSVLDRLRLESLPVRAVPISTMSLPATSPPQVSPPSPAPRVPRTDATVGVEDCTNVSSVSTETNEYVRRTLEETIARYRFAPNSRPRLPRLPTNRRNLALMGAINVLLDSYIRASDNLVDTHSIMYCGAITACRVARVKFSDADRAPRVAGGAPAWQKRIERRINTSRTLIAKLICFKEGNNRPRVMRFVDQAFAGTGISSRDYMVCATERIDFLKQKVCAWANRIRRYRERVDRFRLNRLFQSDQRKVYRKWEGTNQSGSDGSLPDASASNNFWRSIWSVPVEHSEGDWMNIVKRECEIIEPMAAVSICQEDVSCAIDTAQNWKCPGPDGLHNFWIKWFRCSHERLATQFQEALEHGSLPTLFTTGITFLLYKSGSTTEAKNYRPITCLPTLYKLLTSILRKKINNHIIENNILAMSQNGCRVGSRGTKELLLIDMTICQQVRRSRGSLSAAWIDYKKAYDSVPHSWLRRVLELYKINATLRSFLDACMRQWITVLSQPVGGIDHSPPQDFIRIERGIFQGDSLSPLWFCLALNPLSTLLKHSELGCRLRREGEVISHLLYMDDLKLFAPKRQDLMELLKITEIFSNAIRMEFGADKCAVMHVQRGKVANTTNLQLSETMSFRSLSEAETYKYLGMSQSLGIVDEGVKQAVKERFFCRLTKVLNSLLSGGNKVRSFNAWVMPLLTYSFGILRWTQTELDALDRRVRLLLTTHRMLHPRSSVMRLYIPRKCGGRGFLSAKTLHNREVWSLRDYFLNNECGMHRAVVAVDRGLTPLSLANENWRKPKVLSTIDRKDVWKSKELHGRFYRALTGPDVDLLASVNWLRFGDLFGETEGFVCAIADEVIMTNNYRRYILKDGTVDICRACRCPGESLRHITSGCGRLANGEYLHRHNLVARIIHQQLALQYGLVESEVPYYKYVPAPVLENGLATLYWDRSVITDRTIVANRPDIVLTDRSKRRAVLVDVTIPHDGNLVKAEKDKQCKYLDLAHEVTAMWDVDSTIIVPIVVSVNGLIAKSLDQHLKSLSLDGWVKGQIQKAVLLETARIVRRFLSLQP

SEQ ID NO: 5517 - protein, 1207 aa, Apotomis turbidana
MITRSRRKKAEQTNARPPPPPASSSSSPSSSGDEFATAADTSESSDERGPPPPPPRPAARRGRPPLPARLGPTGQPAPTTAPATGGIVRRMRWTRVMNENCMRAYYGATEGGTNLSAYRDRMLPLFQAFDPTIAVSAQRLSDQVRFIQRRKLLNDATLDRLRLEVLAARAASVPARDPPAMSPVPAPAPNLVPGVPLTDPEADVEDYASSVSTQANEQLRRALEEAIRRYRSAPDSRPRLPRLPMHKRNLALMGALDALLEPYLRASKDLADTHSIMYCGAIAACRVARVRFPDTDRAPRTAGGVPAWQVRIERRISSFRTLIAKLICFRGGNNRPRVMRYVTQAFAGTGTRPCDYMACVTERIDYLKQKVYAWASRIRRYRERVDRFQQNRLFQSDQRKVYRKWEGADQCVSDGQLPDPTAMINFWRSIWSVPVEHTEGEWMNVVRRECEPIEAMGAVIISPDDVSCATRTTQNWKSPGPDGLHNFWIKWFRSSHERLATQFQDALELGSLPSFMTTGVTFLLHKSGSTTEAKNYRPITCLPTLYKLLTSILRTKINTHIVANNVLAFSQNGCRVGSRGTKELLLIDTTICQQVRRNRGSLSTAWIDYKKAYDSVPHSWLERILELYKIDTALRSLLGACMRQWTTVLRQPGGGYGPPGPQDLIRIERGIFQGDSLSPLWFCLALNPLSTLLKDSGLGCRLRRGGEVISHLLYMDDLKLYAPKRQDLVELLEVTEAFSSAIKMEFGVDKCAVMHVQRGKVVNSANLQLSETMSLRSISEVETYKYLGMSQSLGIADGDIRQALKERFFCRLTKVLNSLLSGGNKARAFNAWVMPLLTYSFGILKWTQTELDALDTRVRQLLTTHRMRHPRSSVMRLYIPRKCGGRGYLNAKDLHNREVCSLREYFLNNECGIHRDVVAVDKGLTSLSLANENWRRPKVLSTDDRRAVWKSKELHGRFCKALTGPDVDLLASVNWLRFGDLFGETEGFVCAIADEVMMTNNYRRYILKDGTVDICRACRRPGESLRHIISGCSHLANGEYLHRHNQVARIIHQQLALRYGLVGSEVPYYKYAPMPVLENGRATLYWDRSIITDRTIVANKPDIVLVDRSKRQAVLVDITIPHDENLVKAEKDKLSKYLDLAHEVTAMWDVDSTVIVPIVVSANGLIAKSLDKHLKILSLDGWIKGQIQKAVLLDTARIVRRFLSLQP

SEQ ID NO: 5518 - protein, 963 aa, Apotomis turbidana
MHKRNLALMGALDALLDPYLRASEDLADTHSIMYCGAIAACRVARVRFPDTDRAPRTAGGVPAWQVRIERRISSFRTLIAKLICFRGGNNRPRVMRYVTQAFAGTGIRPCDYMACVTERIDYLKQKVYAWANRIRRYRERVDRFQQNRLFQSDQRKVYRKWEGTDQCVTDGQLPDPTAMINFWRSIWSVPVEHTEGEWMNVVRRECEPIENMGAVTISPDDVSCAVRTTQNWKSPGPDGLHNFWIKWFRSSHERLATQFQDALELGSLPSFMTTGATFLLYKSGSTTEAKNYRPITCLPTLYKLLTSILRTKINTHIVANNVLAFSQNGCRVGSRGTKELLLIDTTICQQVRRNRGSLSATWIDYKKAYDSVPHSWLERILELYKIDTALRSLLSSCMRRWTTVLRQPGVGDGPPGPQDLIRIERGIFQGDSLSPLWFCLALNPLSTLLKDSGLGCRLRRGGEVISHLLYMDDLKLYAPKRQDLVELLEVTETFSSAIKMEFGVDKCAVMHVQRGKVVNSANLQLSETMSLRSISEVETYKYLGMSQSLGIADGDIRQALKERFFCRLTKVLNSLLSGGNKARAFNAWVMPLLTYSFGILRWTQTELDALDTRVRQLLTTHRMRHPRSSVMRMYIPRKCGGRGFLNAKDLHNREVCSLREYFLNNECGIHRDVVAVDKGLTSLSLANENWRRPKVLSTDDRKAVWKSKELHGRFYKALTGPDVDLLASVNWLRFGDLFGETEGFVCAIADEVMMTNNYRRYILKDGTVDICRACRRPGESLRHIISGCSHLANGEYLHRHNQVARIIHQQLALRYGLVGSEVPYYKYAPMPVLENGRATLYWDRSIITDRTIVANKPDIVLVDRSKRQAVLVDITIPHDENLVKAEKDKLSKYLDLAHEVTAIWDVDSTIIVPIVVSANGLIAKSLDKHLKRLSLDGWIKGQIQKAVLLDTARIVRRFLSLQP

SEQ ID NO: 5519 - protein, 963 aa, Apotomis turbidana
MHKRNLALMGALDALLDPYLRASEDLAGTHSIMYCGAIAACRVARVRFPDTDRAPRTAGGVPAWQVRIERRISSFRTLIAKLICFRGGNNRPRVMRYVTQAFAGTGTRPRDYMACVTERIDYLKQKVYAWASRIRRYRERVDRFQQNRLFQSDQRKVYRKWEGTDQCVTDGQLPDPTAMINFWRSIWSVPVEHTEGEWMNVVRRECEPIEAMGAVTISPDDVGCAVRTTQNWKSPGPDGLHNFWIKWFRSSHGRLATQFQDALELGSLPSFMTTGATFLLYKSVSTTEAKNYRPITCLPTLYKLLTSILRTKINTHIVANNVLAFSQNGCRVGSRGTKELLLIDTTICQQVRRNRGSLSVAWIDYKKAYDSVPHSWLNRILELYKIDTALRSLLGACMRQWTTVLRQPGGGDGPPGPQDLIRIERGIFQGDSLSPLWFCLALNPLSILLKDSGLGCRLRRGGEVISHLLYMDDLKLYAPKRQDLVELLEVTETFSSAIKMEFGVDKCAVMHVQRGEVVNSANLQLSETMSLRSISKVETYKYLGMSQSLGIADGDIRQALKERFFCRLTKVLNSLLSGGNKARAFNAWVMPLLTYSFGILRWTQTELDALDTRVRQLLTTNRMRHPRSSVMRMYIPRKCGGRGFLNAKDLHNREVCSLREYFLNNECGIHRDVVAVDKGLTSLSLANENWRRPKVLSIDDRRAVWKSKELHGRFYKPLTGPDVDLLASVNWLRFGDLFGETEGFVCAIADEVMMTNNYRRYILKDGTVDICRACRRPGESLRHIISGCSHLANGEYLHRHNQVARIIHQQLALQYGLVGSEVPYYKYAPMPVLENGRATLYWDRSIITDRTIVANKPDIVLVDRSKRQAVLVDITIPHDENLVKAEKDKLSKYLDLAHEVTAMWDVDSTIIVPIVVSANGLIAKSLDKHLKRLSLDGWIKGQMQKAVLLDTARIVRRFLSLQP

SEQ ID NO: 5520 - protein, 1204 aa, Apotomis turbidana
MKRYNTRSQTSTANRNTRPPPPPASSSSSSSSSDGDFATAADTNESSDDERGPPPPPPRPPARRGRPPLPARLGPTEQPAPTTAPATGGVVRRMRWSQAMNENVMRAYYGATVGGTNLSAYRDRMLPLFLTFDSTITVSAQRLSDQVRFIQRRKLLDDATLDRLRLEVLAARMSSTPARDPPATSPDPAPAPNLVPEVPRTDRDADEEECASSVSTHANEQLRRALEEAIRRYRSAPDSRPRLPRLPMHKRNLALMGALDALLDPYLRASEDLADTHSIMYCGAIAACRVARVRFPDTDRAPRTAGGVPAWQVRIERRISSFWTLIAKLICFRGGNNRPRVMRYVTQAFAGTGTRPRDYMACVTERIDYLKQKVYAWASRIRRYRERVDRFQQNRLFQSDQRKVYRRWEGTDQCVTDGQLPDPTAMINFWRSIWSVPVEHTEGEWMNVVRRECEPIEAMGAVTISPDAVRTTQNWKSPGPDGLHNFWIKWFRSSHERLATQFQDALELGSLPSFMTTGATFLLYKSGSTTEAKNYRPIMCLPTLYKLLTSILRTKINTHIVANNVLAFSQNGCRVGSRGTKELLLIDTTICQQVRRNRGSLSAAWIDYKKAYDSVPHSWLGRILELYKIDTALRSLLGACMRQWTTVLRQPGGGDGPPGSQDLIRIERGIFQGDSLSSLWVCLALNPLSTLLKDSGLGCRLRRGGEVISHLLYMDDLKLYAPKRQDLVELLEVTETFSSAIKMEFGVDKCAVMHVQRGEVVNSANLQLSETMSLRSISEVETYKYLGMSQSLGIADGDIRQALKERFFCRLTKVLNSLLSGGNKARAFNAWVMPLLTYSFGILRWTQTELDALDTRVRQLLTTNRMRHPRSSVMRMYIPRKCGGCGFLNAKDLHNREVCSLREYFLNNECGIHRDVVAVDKGLTSLSLANENWRRPKVLSTDDRRAVWKSKELHGRFYKALTGPDVDLLASVNWLRFGDLFGETEGFVCAIADEVMMTNNYRRYILKDGTVDICRACRRPGESLRHIISGCSHLANGEYLHRHNQVARIIHQQLALQYGLVGSEVPYYKYAPMPVLENGRATLYWDRSIITDRTIVANKPDIVLVDRSKRQAVLVDITIPHDENLVKAEKDKLSKYLDLAHEVTAMWDVDSTIIVPIVVSANGLIAKSLDKHLKRLSLDGWIKGQIQKAVLLDTARIVRRFLSL

SEQ ID NO: 5521 - protein, 785 aa, Notocelia uddmanniana
MGNFWRSIWSVPVEHTEGAWIGVVERECESIEPMGSVTISPEDISCAIRTAPNWKSPGPDGLHNFWLKWFRCSHERLATQFQQALELGSLPHLLTTGVTSLLYKSGSTTEAKNYRPITCLPTLYKLLTSILRAKINTHIVANNILAPAQNGCRVGSRGTKELLLIDMTICQRVRRSRGALSAAWIDYKKAYDSVPHSWLRRILELYKVDAALRSFLSACMGQWTTVLRQPGGGDGSSGPQDSIRIERGIFQGDSLSPLWFCLALNPLSTLLKDSGLGCQLRRGGEVISHLLYMDDLKLFAPNRQDLLELLKTTEVFSSAIKMEFGVDKCAVMHVQRGKVENSINLQLSETMSLRSLSEAETYKYLGMSQSLGIEGEGIKQAVKERFFCRLTKVLNSFLSGGNKVRAFNAWVMPLLTYSFGILRWTQTELDALDRRVRVLLTTHRMLHPRSSVMRLYIPRKCGGRGFLNAKDLHNREVCSLRDYFLNSECGMHRDVVAVDASFTPLSMANENWRRFKVLSTEDRKAEWKSRELHGRFYKALTGPDVDLLASVNWLRFGDLFGETEGFVCAIADEVIMTNNYRKYILKDGTVDICRACRRPGESLRHIISGCGHLANGEYLHRHNLVARIIHQQLALSYGLVNFEVPYYKYLPAPVLQNGRATLYWDRSIITDRTIVANKPDIVLIDRSKRQAVLVDITIPHDENLVKAEKDKVSKYLDLAHEVTAMWDVDSTIIVPIVVSANGLIAKSLDQHLKRLSLDGWVKGQIQKAVLLDTARIVRRFLSLSP

SEQ ID NO: 5522 - protein, 1206 aa, Notocelia uddmanniana
MITRQRSRAVPQCARSPSPAPSSSSPSSSGDEFATAPDTSELSSDERGPSPPPPRPPARRGRRPLPARLGPAGHPAPSTAPATGGAVRRMRWTQEINENCMRAYFGATEGGTNLSAYRVRMLPLFQALEPTISVTAQRLSDQVRVIQRNKRLDDSTLDRLRLESLSARLASTSARDLPAATPALVPTFDTAPGVLRVDPNADEDYATQSVSTQAHEQLRRALEDAIRRYRSTPNSRPRLPRLPVNRRNLALMSALNDLLDPYLRASDDLIDTHSIMYCGAIAACRVARVKFPDADRAPLTVGSIPAWQVRIERRVNTFRTLIAKLICFRGGNSRPRVMRFVNQAFAGSGVRPRDYLACVTERIDFLKQKVHAWASRIRRYRERVDRYQQNRLFQSDQRKVYRKWDGTDHHVCDGQRPDATAMVSFWRSIWSVPVEHTEGAWMGVVKRECESIEPMGSVTISPEDVSCAIRTAPNWKSPGPDGLHNFWLKWFRCSHARLAAQFQQALELGSLPRPLTTGVTSLLYKSGSTTEAKNYRPITCLPTLYKLLTSILRAKINTHIVANNILAPAQNGCRVGSRGTKELLLIDMTICQRVRRNKGTLSAAWIDYKKAYDSVPHSWLRRVLELYKVDAALRSFLAACMEQWTTVLRQSGGGEGLSGAQDFIRIERGIFQGDSLSPLWFCLALNPLSTLLKDSGLGCQLRRGGEVISHLLYMDDLKLFAPNRQDLLELLKTTEVFSSAIKMEFGVDKCAVMHVQRGKVVNSTNLQLSETMSLRSLSEAETYKYLGMSQSLGIEGEGIKRAVKERFFCRLTKVLNSFLSGGNKVRAFNAWVMPLLTYSFGILRWTQTELDALDRRVRVLLTAHRMLHPRSSVMRLYIPRKCGGRGFLNAKDLHNREVCSLRDYFLNSECGMHRDVVAVDASFTPLSMANENWRRFKVLSTEDRKAEWKSRELHGRFYKALTGPDVDLLASVNWLRFGDLFGETEGFVCAIADEVIMTNNYRRYILKDGTVDICRACRRPGESLRHIISGCGHLANGEYLHRHNLVARIIHQQLALSYGLVNFEVPYYKYLPAPVLENGRATLYWDRSIITDRTIVANKPDIVLIDRSKRQAVLVDITIPHDENLVKAEKDKVSKYLDLAHEVTAMWDVDSTIIVPIVVSANGLIAKSLDQHLKRLSLDGWVKGQIQKAVLLDTARIVRRFLSLSP

SEQ ID NO: 5523 - protein, 1117 aa, Notocelia uddmanniana
MQWSQSINENCMRAYYGATDGGTNLSAYRVRMLTLFRALEPAISVSAQRLSDQVRVIQRLKRLDDATLDRLRLEALSARAASVSARDPLATLPAPMPAPDTATGAPRVDLSTDGDCANQSVSTQADGQLRRALEEAITRYRSTTSSRPRLPRLPVNRRNLALMGALNDLLVPYLRASEDLIDTHSIMYCGAIAACRVARVKFPDADRAPRTAGSVPTWQVRIERRIDTYRTLIAKLICFRGGNSRPRVMRFVNQAFAGTGVRPRDYMTCVTERIDFLKQKVYAWASRIRRYRERVDRYQLNRLFQSDQRKVYRKWEGTDHRVSDGQRPDATAMVNFWRSIWSVPVEHNEGAWIDVVKRECESIEPMGSVTVSPEDVSCAIRTAPNWKSPGPDGLHNFWLKWFRCSHARLAAQFQQALELGSLPSPLTTGVTSLLYKSGSTTEAKNYRPITCLPTLYKLLTSILRAKINTHIVANNILAPAQNGCRVGSRGTKELLLIDMTICQRVRRNRGTLSAAWIDYKKAYDSVPHSWLRRILELYKVDAVLRSFLVACMGQWTTVLRQPEGGEGPSGPQDSIRIERGIFQGDSLSPLWFCLALNPLSTLLKDSGLGCQLRREGEVISHLLYMDDLKLFAPNKHDLLELLKTTEVFSSAIKMEFGVDKCAVMHVQRGKVVNSTNLHISETIALRSLSEAETYKYLGMSQSLGIEGEDIKRAVRERFFCRLTKVLNSFLSGGNKVRAFNAWVMPLLTYSFGILRWTQTELDFLDRRVRVLLTAHRMLHPRSSVMRLYIPRKLGGRGFLNAKDLHNREVCSLRDYFLNSECGMHRDVVAADASFTPLSMANENWRRFKVLSTDDRRAVWKSKELHGRFYKALTGPDVDLLASVNWLRFGDLFGETEGFVCAIADEVIMTNNYRKYILKDGTVDICRACRRPGESLRHIISGCSHLANGEYLHRHNLVARIIHQQLALLYGLVDFEVPYYKYTPAPVLENGRATLYWDRSVITDRTIVANKPDIVLTDRLKRQAVLVDITIPHDENLVKAEKDKVSKYLDLAHEVTAMWDVDSTIIVPIVVSVNDLIAKSLDQHLKRLSLDGWVKGQIQKAVLLDTARIVRRFLSLSP

SEQ ID NO: 5524 - protein, 1207 aa, Crocallis elinguaria
MITRSRNKAGTASARQSPPPASSSPSSSSGDEYGTPLDTSASSDEDGPPSPPPPPPPARRGRPPLPARLGPAGHSVPRAAPATGGIVRRMRWTSVMNENCMRAYYGATEGGTNMSAYRDRMLPLFQTLEPSVTVSTQRLSDQVRAIQRLKLLDESVLDRLRLEALPIRATSASTRDLSVAPPVPAPLPAPSSVATRIDPVIDEDDCANISVSTQVNEQLRRALEDAILDYQYTPDSRPRLPRLPTNRRNLALMGALNVLLAPYLRASENLFDTHSIMYCGAIAVCRVARVKFPDADRAPRTAGSAPAWQVRIERHINTFRTLIAKLVCFSRGNNRPRVMRFVNQAFAGTGIRPQNYMAGVTERIDFLKQKIYAWVNRIRRYRERVDRYHQNRLFESDQRKVYRNWEGTDQRVSDGQLPDTNAMINFWRGIWSVPVEHTEGDWMRTVEQSCESIETMGSVTIDPIDVSCAIRTAQNWKSPGPDGLHNFWIKWIRCSHECLAVQFQEALELGSLPRFLTTGVTSLLHKSGSTTEAKNYRPITCLPTLYKLLTSILRVKINSHVVANNILAPAQNGCRVGSRGTKELLLIDTAICQRVRRNKGALSAAWIDYKKAYDSVPHSWLERILELYKIDATLRSFLSMCMRQWTTVLRQPGSGNSPSGPENFIKIERGIFQGDSLSPLWFCLALNPLSTLLRDSRLGCQLRREGEIISHLLYMDDLKLFAPKRPDLMELLKITEIFSSAIKMEFGVDKCAVMHVQRGKVVNSDNLQLSETMTLRSLSEAETYKYLGMSQSLGIAVGDIKQSVKERFFCRLTKVLNSLLSGGNKARAFNGWVMPLLIYSFGILKWTQTELDSLDRRVRQLLTYHRMLHPRSSVMRLYIPRKWGGRGFLNAKTLHNREVCSLREYFLNNECGMHRDVVAVDRNLTPLSLANENWRKPVVMTTEDRKDVWKGKELHGRFYRALTGSDVDLLASVNWLRFGDLFGETEGFVCAIMDEVIKTNNYRKYIMKDGTVDICRACRRPGESLRHIISGCSHLANGEYLHRHNLVARIIHQQIALQYGLVESEVPYYKYAPAPVLENGRALLYWDRSIITDRTIVANKPDIVLVDRSQRRAVLVDITVPHDENLVKAEKDKLSKYLDLAHEVTAMWNVDSTIIVPIVVSANGLVAKSLDQHLKRLSLDGWIKGRMQKAVLLDTARIVRRFLTLQP

SEQ ID NO: 5525 - protein, 1209 aa, Peribatodes rhomboidaria
MLTRLKKKQLAAEASTRPPPPPASSSGSPSSEEDEYATPLDTTDEEAAPTPAPPPPPARRGRPPLPARLGPAGRSAPPTAPASGGVVCRMRWTQVMNENCMRAYYGATEGGTNLTAYRVRMLSLFQVLEPTVTVSTQRLSDQVRAIHRCKLLDQSVLDRLCLEAIRARPIPASTRDRPVASSAPTLASVPASAVTLATMANTDVDGDRTSVNVSSQVSEHLRRALEDAISQYRYAPDSRPRLPRLPTHRRNMALMGALNVLLAPYLRASENLTDTHSILYCGAIAACRVARVKFPDTSRAPRPAGGVPAWQVRIERRISTFRTLIAKLLCFSRGNTRPRVMRFVTQAFAGTDIRPQYYLTNVTERIDYLKQKVYAWANRIRRYRERVDRYWQNRLFQSDQRKVYRGWEGTEQCVIDGHRPDASAMIDFWRGIWSVPVEHTEGEWMRIVERECESIESMESILIDSVDVSCAIRTAQNWKSPGPDGLHNFWIKWIRCSHDRLAIQFQEALELGSLPSFMTTGVTFLLHKSGSTTDPKNYRPITCLPTIYKLLTSILRNKINTHIVANNVLAPAQNGCRVGSRGTKELLLIDMAISQQVRRNKGALSVAWIDYKKAYDSVPHSWLERILELYKIDITLKSFLSACMRQWTTVLCQPGGGEVSADPRDLIRIERGIFQGDSLSPLWFCLALNPLSTLLKDLGLGHRLRRGGEVISHLLYMDDLKLFAPKRQDLMELLKTTEVFSSAIKMEFGVDKCAVMHVQRGKVVNSPNLQLSETMTLRSLSEVETYKYLGMSESLGISVADIKKSIKERFFCRLTKVLNSLLSGGNKVRAFDGWVMPLLIYSFGILRWTQTELDALDRRVRQLLTTHRMLHPRSSVMRLYIPRKWGGRGMLNAKNLHNREVYRLRSFFRNNDCGMHCDVVAVDKGLTPLSLANENWRQPPVLSTEDRKIVWKGKELHGRFYRALTGPDVDLLASVNWLRFGDLFGETEGFACAIADEVIKTNNYRKYILKDGTVDICRACHRPGESLRHIISGCSHLANGEYLHRHNQVARIIHQQLALQYGLVESEVPYYKYAPASVLENGRALLYWDRSIITDRTIVANKPDIVLVDRSQRRAVLVDITIPHDENLVKAEKDKLSKYLDLAHEVTAMWDVDSTIIVPIVVTVNGLIAKSLDQHLKRLSLDGWIKGQIQKAVILDTCRIVRRFLTLQP

SEQ ID NO: 5526 - protein, 965 aa, Pammene fasciana
MNRRNLALMGALNDLLDPILRTSKDLDDTHSIMYCGAIAACRVARVKFPDAERAPRTAGGVPAWQVRIERRINSFRTLIAKLICFRGGNNRPRVMRFVHQAFAGTGIEPRDYMANVTERIDFLKQKVYAWASRIRRYRERVDRFRQNRLFQSDQRKVYRRWEEADPRVSDARLPDATAMTDFWRSIWSAPVEHTEGEWMSVVERECESIEPMGAITISPDDVSCAIRTAQNWKSPGPDGLHNFWLKWFRCSHSRLATQFQQALELGSLPPSLTTGVTFLLYKSGSTTEAKNYRPITCLPTLYKLLTSILRAKINAHIVANNILASSQNGCRVGSRGTKELLLIDMTICQRARRNRGALSAAWIDYKKAYDSVPHSWLERILELYKVDAALRSFLGACMRQWTTVLRQPGGGDDPPDPHDFIRIERGIFQGDSLSPLWFCLALNPLSTLLKDSGLGCRLRREGEVISHLLYMDDLKLFAPNNRDLMELLKTTEVFSSSIKMEFGVDKCAVMHVQRGKVVNSTNLQLSETMTFRSISESETYKYLGMSQSLGIEDAGIKQALKERFFGRLTKVLNSLLSGGNKVRAFNAWVMPLLTYSFGILRWTQTELDALDRRVRLLLTTHRMLHPRSSVMRLYIPRKCGGRGFLNAKNLHNREVYNLRNYFLNNECGMHRDVVAVDKSLTPLSLANENWRKPVVLSTEDRKAVWKSKELHGRFYGALTGPDVDLLAPVNWLRFGDLFGETEGFACAIADEVIMTNNYRRYILKDGTVDICRACRRPGESLRHIISGCSHLANGEYLHRHNLVARIIHQQLALLYGLVDHEVPYYKYTPAPVLENGRATLYWDRSIITDRTIVANKPDIVIIDRSQRRAMLVDITVPCDVNLVKAEKDKSSKYLDLAHEVTAMWEVDSAIIVPIVVSANGLIAKSLDQHLERLSLRGCGWIKGQIQKAVILDTARIVRRFLSLRP

SEQ ID NO: 5527 - protein, 904 aa, Pammene fasciana
MVPRYGKDIQIIIIISFRGGNNRFRGGNNRPRVMRFVHQAFAGTGIEPRDYMANVTERIDFLKQKVYAWASRIRRYRERVDRFRQNRLFQSDQRKVYRGWEEADPRVSDVRLPDATAMTDFWRSIWSAPVEHTEGEWMSVVERECESIEPMGAITISPDDVSCAIRTAQNWKSPGPDGLHNFWLKWFRCSHSRLATQFQQALELGSLPPSLTTGVTFLLYKSGSTTEAKNYRPITCLPTLYKLLTSILRAKINAHIVANNILASSQNGCRVGSRGTKELLLIDMTICQRVRRNRGALSAAWIDYKKAYDSVPHSWLERILELYKVDAALRSFLGACMRQWTTVLRQPGGGDDPPDPHDFIRIERGIFQGDSLSPLWFCLALNPLSTLLKDSGLGCRLRREGEVISHLLYMDDLKLFAPNNRDLMELLKTTEVFSSSIKMEFGVDKCAVMHVQRGKVVNSTNLQLPETMTFRSISESETYKYLGMSQSLGIEDAGIKQALKERFFGRLTKVLNSLLSGGNKVRAFNAWVMPLLTYSFGILRWTQTELDALDRRVRLLLTTHRMLHPRSSVMRLYIPRKCGGRGFLNAKNLHNREVYNLRNYFLNNECGMHRDVVAVDKSLTPLSLANENWHKPVVLSTEDRKAVWKSKELHGRFYGALTGPDVDLLASVNWLRFGDLFGETEGFACAIADEVIMTNNYRRYILKDGTVDICRACRCPGESLRHIISGCSHLANGEYLHRHNLVARIIHQQLALLYGLVDHEVPYYKYTPAPVLENGRATLYWDRSIITDRTIVANKPDIVIIDRSQRRAMLVDITVPCDVNLVKAEKDKSSKYLDLAHEVTAMWEVDSAIIVPIVVSANGLIAKSLDQHLERLSLRGCGWIKGQIQKAVILDTARIVRRFLSLRP

SEQ ID NO: 5528 - protein, 1210 aa, Pammene fasciana
MITRSKARAATTHARPPSPLASSSSPSTSSSSDDFETAPDTDESSDESGPPPPPPQPPARRGRPPLPARLGPTGHPVPPRAPAAGGIVRRMRWTCSMNENVMRAYYGATEGGTNLCAYRARILPLFQALEPTIDTTTQRLSDQVRVIQRLKRLDDATLDRLRLEALSARAASTSARDPPATSPDPMPAPDLASGAPRIDPSADEEYIASQSVSSTANEQLRRTLEEAITQYRSTNIPRPRLPRLPMNRRNLALMGALNDLLDPILRTSKDLDDTHSIMYCGAIAACRVARVKFPDAERAPRTAGGVPAWQVRIERRINSFRTLIAKLICFRGGNNRPRVMRFVYQAFAGTDIEPRDYMANITERIDFLRQKVYAWASRIRRYRERVDRFRQNRLFQSDQRKVYRRWEEADPRVSDVRLPDATAMTDFWRSIWSAPVEHTEGEWMNVVERECESIEPMGAITISPDDVSCAIRTSQNWKSPGPDGLHNFWLKWFRCSHSRLATQFQHALELGSLPPSLTTGVTFLLYKSGSTTEAKNYRPITCLPTLYKLLTSILRAKINAHMVANNILASAQNGCRVGSRGTKELLLIDMTICQRVRRNRGALSAAWIDYKKAYDSVPHSWLERILELYKVDAALRSFLGACMRQWTTVLRQPGGGDDPPGPQDFIRIERGIFQGDSLSPLWFCLALNPLSTLLKDSGLGCRLRREGEVISHLLYMDDLKLFAPNNRDLLELLKTTEVFSSSIKMEFGVDKCAVMHVERGKVVNSTNLQLSETMTFRSISESETYKYLGMSQSLGIEDVGIKQALKERFFGRLTKVLNSLLSGGNKVRAFNAWVMPLLTYSFGILRWTQTELDALDRRVRLLLTTHRMLHPRSSVMRLYIPRKCGGRGFLNAKNLHNREVYNLRNYFLNNECGMHRDVVTVDKNLTPLSLANENWRKPVVLSTEDRKAVWKSKELHGRFYGALTGPDVDLLASVNWLRFGDLFGETEGFACAIADEVIMTNNYRRYILKDGTVDICRACRRPGESLRHIISGCSHLANGEYLHRHNLVARIIHQQLALLYGLVAHEVPYYKYTPAPVLENGRATLYWDRSIITDRTIVANKPDIVVIDRPQRRAMLVDITVPCDVNLVKAEKDKSSKYLDLAHEVTAMWEVDSAIIVPIVVSANGLIAKSLDQHLERLSLRGCGWIKGQIQKAVILDTARIVRRFLSLRP

SEQ ID NO: 5529 - protein, 1120 aa, Pammene fasciana
MRWTCSMNENVMRAYYGATEGGTNLCAYRARILPLFQALEPTIDTTTQRLSDQVRVIQRLKRLDDATLDRLRLEALSARAASTSARDPPATSPDPVPAPDLASGAPRIDPSADEEYIASQSVSSTANEQLRRTLEEAITQYRSTNIPRPRLPRLPMNRRNLALMGALNDLLDPILRTSKDLDDTHSIMYCGAIAACRVARIKFPDAERAPRTAGGVPAWQVRIERRINSFRTLIAKLICFRGGNNRPRVMRFVHQAFAGTDIEPRDYMANITERIDFLRQKVYAWASRIRRYRERVDRFRQNRLFQSDQRKVYRRWEEADPRVSDVRLPDATAMTDFWRSIWSAPVEHTEGEWMNVVERECESIEPMGAITISPDDVSCAIRTSQNWKSPGPDGLHNFWLKWFRCSHSRLATQFQHALELGSLPPSLTTGVTFLLYKSGSTTEAKNYRPITCLPTLYKLLTSILRAKINAHMVANNILASAQNGCRVGSRGTKELLLIDMTICQRVRRNRGALSAAWIDYKKAYDSVPHSWLERILELYKVDAALRSFLGACMRQWTTVLRQPGGGDDPPGPQDFIRIERGIFQGDSLSPLWFCLALNPLSTLLKDSGLGCRLRREGEVISHLLYMDDLKLFAPNNRDLLELLKTTEVFSSSIKMEFGVDKCAVMHVQRGKVVNSTNLQLSETMTFRSISESETYKYLGMSQSLGIEDVGIKQALKERFFGRLTKVLNSLLSGGNKVRAFNAWVMPLLTYSFGILRWTQTELDALDRRVRLLLTTHRMLHPRSSVMRLYIPRKCGGRGFLNAKNLHNREVYNLRNYFLNNECGMHRDVVTVDKNLTPLSLANENWRKPVVLSTEDRKAVWKSKELHGRFYGALTGPDVDLLASVNWLRFGDLFGETEGFACAIADEVIMTNNYRRYILKDGTVDICRACRRPGESLRHIISGCSHLANGEYLHRHNLVARIIHQQLALLYGLVAHEVPYYKYIPAPVLENDRATLYWDRSIITDRTIVANKPDIVVIDRPQRRAMLVDITVPCDVNLVKAEKDKSSKYLDLAHEVTAMWEVDSAIIVPIVVSANGLIAKSLDQHLERLSLRGCGWIKGQIQKAVILDTARIVRRFLTLRP

SEQ ID NO: 5530 - protein, 1207 aa, Bembecia ichneumoniformis
MKLRERTRKNTAEQSARPPPQPVSSSPCSSADEFLTADDKSSSSDDDGLTPPSPPPRPTRRGRPPLPARLGPARQSTSRPALATGGVVRRMRWTQSINENCMRAYYGATEGGINLTAYRVRMLSMFQALEPAVTVTAQRLSDQVRAIQRCQLLDQSALDRLRLGSLPARATSAATQDLRAALPIPESASIPTSAAPLTDPVDQEFCASTNVSTKTKEQLRRALEEAISRYHTKPNDRPRLPRLPTHKQNIALMGALNTLLAPYIKASRDLTDTHSILYCGAIAACRVARVKFLNFDRATRDAEGVPAWQMRIERRISKFRTLIAKLISFSRGNTRPRVMRFVAQAFVGTNIKSKDYLTWATERIDYFKQKVYALANRVRRYKERVQRYRQNRLFQSDQRKVYRDWERTNQSVNVGHPPDPEVMLNFWHDIWSVSDEHTEGDWISIVEQACEPITAMEAITISPTDLSCAIRSTQNWKSPGPDGLHNFWIKMFQCSHECLAVQFQKALELGTLPTFLTTGTTFLLHKSGSTAEAKNYRPITCLPTIYKLLTSILRTKINSHILKNNILDTAQNGCKIGSRGTKELLLIDMTICQRVRRSSGALSVAWIDYKKAYDSVPHSWLRRILELYKIDTTLRSFLAMCMGQWITVLRQPGYRGSDAGLRDTIKIERGIFQGDSLSPLWFSLALNPLSTLLRNLKLGYRLRRGGEVISHLLYMDDLKLFAPKPKDLLELLKITQCFSNAIRMDFGVDKCAVMHVQKGKVANSPNLQLSDEVSFKSLSEVETYKYLGMSQSLGISDKDIKQTVKTRFFGRLTKVLNSFLSGGNKVRAFNGWVMPLLTYSFGILRWTQTELDGLDRRVRRLLTAHRMLHPRSSVMRLYIPRKLGGRGFLNAKNLHNREVYSLREYFLNHGSGVHRDVVAIDKNFTPLSLANGNWRRLVVLSTEDRKSEWKGKELHGRFYKALTGPDVDSLMSVNWLRFGDLFGETEGFVCAIADEVIKTNNYRKYILKDGTVDICRACHRPGETLRHIISGCAHLSNGEYLHRHNQVARIIHQRLAIRYGLIESEVPYYKYVPAPVLENGHATLYWDRSIITDRTIVANKPDIVVIDRSQRRTMLVDIAVPHDENLVKAEKEKFTKYIDLAHEVTAMWDVDSTIIVPIVVSANGLIAKSLDQHLKRLSLDGWIKGQIQKAVLLDTARIVRRFLTLQP

SEQ ID NO: 5531 - protein, 1205 aa, Bembecia ichneumoniformis
MLLRKRKDRAEQSARPPPLPVSSSPCSSADEFLTADDKSTSSDDDGPTPPSPPRRPARRGRPPLPASLGPARPSASRPAPATGGVVRRMRWTHTMNENCMRAYYGATEGATNLTAYRARMLSLFQALEPAVTVTAQRLSDQVRAIQRCQLLEQSVLDRLRLDSLPARTTSAATQDLRAALPLPESASIPTSAALLTDPVDQENCASTNVSTETKEQLRRALEEAISRYHTKPNDRPRLPRLPMHKQNIALMGALNILLAPYIKASRDLTDTHSILYCGAIAACRVARVKFLNFDRATRDAEDVPAWQVRIEGRISKFRTLIAKLISFCRGNTRPRVMRFVAQAFVGTNIKSKDYLTWATERIDYFKQKVYALANRVRRYKERVHRYRQNRLFQSDQRKVYRDWEKTNQSVNVGHPPDPEVMLKFWRDIWSVSDEHTEGDWISIVEQACESITTMKAINISPTDVSCAIRSTQNWKSPGPDGLHNFWIKMIQCSHECLAMQFQKALELGTLPNFLTTGITFLLHKSGSTTEAKNYRPITCLPTIYKLLTSILRTKINSHILENNILDTAQNGCKIGSRGTKELLLIDMTICQRVRRNSGALSVAWIDYQKAYDSVPHSWLRRILELYKIDTTLRSFLAMCMGQWITVLRQPGYRGSDAGLRDTIKIERGIFQGDSLSPLWFSLALNPLSTLLRNLKLGYRLRRGGEVISHLLYMDDLKLFAPKPKDLLELLKITQCFSNAIRMDFGVDKCAVMHVQKGKVVNSPNLQLSDEMSFKSLSEVETYKYLGMSQSLGISDKDIKQTVRTRFFGRLTKVLNSFLSGGNKVRAFNGWVMPLLTYSFGILRWTQTELDGLDRRVRQLLTAHRMLHPRSSVMRLYIPRKLGGRGFLNAKNLHNREVYSLREYFLNHGSGVHRDVVAIDKNFTPLSLANGNWRRLVVLSTEDRKSVWKGKELHGRFYKALTGPEVDSLMSVNWLRFGDLFGETEGFVCAIADEVIKTNNYRKYILKDGTVDICRACHRPGETLRHIISGCAHLSNGEYLHRHNQVARIIHQQLAILYGLIESEVPYYKYVPAPVLENGHATLYWDRSIITDRTIVANKPDIVVIDRSQRRTMLVDIAVPHDENLVKAEKEKLTKYIDLAHEVTAMWDVDSTIIVPIVVSANGLIAKSLDQHLKRLSLDGWIKGQIQKAVLLDTARIVRRFLTLQP

SEQ ID NO: 5532 - protein, 955 aa, Bembecia ichneumoniformis
MGALNTLLAPYIKASRDLTDTHSILYCGAIAACRVARVKFLNFDRATRDAEGVPAWQMRIERRISKFRTLIAKLISFSRGNTRPRVMRFVAQAFVGTNIKSKDYLTWATERIDYFKQKVYALANRVRRYKERVQRYRQNRLFQSDQRKVYRDWERTNQSVNVGHPPDPEVMLNFWHDIWSVSDEHTEGDWISIVEQACEPITAMEAITISPTDLSCAIRSTQNWKSPGPDGLHNFWIKMFQCSHECLAVQFQKALELGTLPTFLTTGTTFLLHKSGSTAEAKNYRPITCLPTIYKLLTSILRTKINSHILKNNILDTAQNGCKIGSRGTKELLLIDMTICQRVRRSSGALSVAWIDYKKAYDSVPHSWLRRILELYKIDTTLRSFLAMCMGQWITVLRQPGYRGSDAGLRDTIKIERGIFQGDSLSPLWFSLALNPLSTLLRNLKLGYRLRRGGEVISHLLYMDDLKLFAPKPKDLLELLKITQCFSNAIRMDFGVDKCAVMHVQKGKVVNSPNLQLSDEVSFKSLSEVETYKYLGMSQSLGISDKDIKQTVKTRFFGRLTKVLNSFLSGGNKVRAFNGWVMPLLTYSFGILRWTQTELDGLDRRVRRLLTAHRMLHPRSSVMRLYIPRKLGGRGFLNAKNLHNREVYSLREYFLNHGSGVHRDVVAIDKNFTPLSLANGNWRRLVVLSTENRKSEWKGKELHGRFYKALTGPDVDSLMSVNWLRFGDLFGETEGFVCAIADEVIKTNNYRKYILKDGTVDICRACHRPGETLRHIISGCAHLSNGEYLHRHNQVARIIHQRLAIRYGLIESEVPYYKYVPAPVLENGHATLYWDRSIITDRTIVANKPDIVVIDRSQRRTMLVDIAVPHDENLVKAEKEKLTKYIDLAHEVTAMWDVDSTIIVPIVVSANGLIAKSFDQHLKRLSLDGWIKGQIQKAVLLDTARIVRRFLTLQP

SEQ ID NO: 5533 - protein, 955 aa, Ennomos quercinarius
MGALNTLLAPYLRTSEDLVDTHSILYCGAIAACRVARVKFPDTDRAPRPADGAPAWQVRIERRITTFRTLIAKLVCFSRGNHRPRVMRFVTQAFAGTGIRPQDYMACVTERIDFLKQKVYAWASRIRRYRERVDRYQQNRLFQSDQRKVYRNWEGTGQRVVDGQLPDANAMSEFWRSIWSVPVEHTEGDWMRVVERVCEPIESMGSITIDPEDISCAIHTAQNWKSPGPDGLHNFWIKWIRCSYPCLAIQFQEALEAGSLPRFMTTGVTFLLHKSGSTTEAKNYRPITCLPTLYKLLTSILRTKINSHIVANNILAPAQNGCRVGSRGTKELLLIDTAICQQVRRNRGALSTAWIDYKKAYDSVPHSWLERVLELYKIDATLRSFLSTCMRQWITVLRQPGGGESVSDPQDFIRIERGIFQGDSLSPLWFCLALNPLSTLLGDSGLGYRLRRGGEIISHLLYMDDLKLFAPQRPQLIELLKITENFSNSIKMEFGVDKCAVMHVHRGKVVNSTNLQLSETMTLRSLSESETYRYLGMSESLGISVGDVKQSVKERFFCRLTKVLNSLLSGGNKTRAFNGWVMPLLMYSFGILRWTQTELDALDRKVRQLLTSHRMLHPRSSVMRLYIPRKWGGRGFLNAKTLHNREVCSLREYFLNNEYGMHRDVVAVDKGLTPLSLANENWRKPVVLSTEDRRDVWKGKELHGRFYRALIGPDVDLHASVNWLRFGDLFGETEGFVCAIADEVIKTNNYRKYIMKDGTVDICRACRRPGESLRHIISGCSHLANGEYLHRHNLVARIIHQQLALQYGLVESEVPYYKYTPGPVLENGRALLYWDRSIITDRTIVANKPDIVLVDRSQRRAVLVDITIPHDENLVKAEKDKLSKYLDLAHEVTAMWNVDSTSIVPIVVSANGLIAKSLDQHLERLSLDGWIKGQIQKAVLLDTARIVRRFLTLQP

SEQ ID NO: 5534 - protein, 1210 aa, Ennomos quercinarius
MITRSKTRKTADIHQSARLPPPPAPSSPSSSSGDEYGTPPDTTASSDEGGPPSPPPPPPPARRGRPPLPARLGPAGQPAPRPAPATGGIVRRMRWTPTMNENCMRAYYGATEGGSNLTAYRDRMLSLFQDLEPAVAVSAQRLSDQVRAIHRCKLMDQSTLDRLRLEALPIRATSSSPRVLPAALPDSGPIMGPPPVTPRGDPAIEGEESVNDSVSTQANEQLRSALEDAILRYRATPTSRPRLPRLPTNRRNLVLMGALNTLLAPYLRTSEDLVDTHSILYCGAIAACRVARVKFPDTDRAPRPADGAPAWQVRIERRITTFRTLIAKLVCFSRGNHRPRVMRFVTQAFAGTGIRPQDYMACVTERIDFLKQKVYAWASRIRRYRERVDRYQQNRLFQSDQRKVYRNWEGTGQRVVDGQLPDANAMNEFWRSIWSVPVEHTEGDWMRVVERVCEPIESMGSITIDPEDISCAIRTAQNWKSPGPDGLHNFWIKWIRCSYPCLAIQFQEALEAGSLPRFMTTGVTFLLHKSGSTTEAKNYRPITCLPTLYKLLTSILRTKINSHIVANNILAPAQNGCRVGSRGTKELLLIDTAICQQVQRNRGALSTAWIDYKKAYDSVPHSWLERVLELYKIDATLRSFLSTCMRQWITVLRQPGGGESVSDPQDFIRIERGIFQGDSLSPLWFCLALNPLSTLLGDSGLGYRLRRGGEIISHLLYMDDLKLFAPQRPQLIELLKITENFSNSIKMEVGVDKCAVMHVHRGKVVNSTNLQLSETMTLRSLSESETYRYLGMSESLGISVGDVKQSVKERFFCRLTKVLNSLLSGGNKTRAFNGWVMPLLMYSFGILRWTQTELDALDRKVRQLLTSHRMLHPRSSVMRLYIPRKWGGRGFLNAKTLHNREVCSLREYFLNNEYGMHRDVVAVDKGLTPLSLANENWRKPVVLSTEDRRDVWKDKELHGRFYRALTGPDVDLHASVNWLRFGDLFGETEGFVCAIADEVIKTNNYRKYIMKDGTIDICRACRRPGESLRHIISGCSHLANGEYLHRHNLVARIIHQQLALQYGLVESEVPYYKYTPGPVLENGRALLYWDRSIITDRTIVANKPDIVLVDRSQRRAVLVDITIPHDENLVKAEKDKLSKYLDLAHEVTAMWNVDSTSIVPIVVSANGLIVKSLDQHLERLSLDGWIKGQIQKAVLLDTARIVRRFLTLQP

SEQ ID NO: 5535 - protein, 1208 aa, Cydia splendana
MITRSRTKAVTTSARPPPPPASSTSSSTSSSGDEFATAPDTDGSSDESGPPPPPPRPPARRGRPPLPARLGPAGHPAPPTAPATGGIVRRMRWTRDMNENVMRAYYGATEGGTQLSAYRSRILPLFQTLEPTITVSEQRLSDQVRVIQRLKRLDDATLDRLRQEALSARADSTSVRDLPATSPDPVPVPDLAPEAPRVDFCTDEGDFASQNVSTTANEQLRRTLEEAITQYRATTNSRPRLPRLPMNRRNLALMGALNALLEPYLRTSKDLDDTHSIMYCGAIAACRVARVKLPDAERAPRTVGGVPAWQVRIERRISSFRTLIAKLICFRGGNNRPRVMRFVNQAFAGTDIGPRDYMANVTERIDFLKQKVYAWANRIRRYRERVDRFQQNRLFQSDQRKVYRKWEETNLRTPDTQPPDATAMTDFWRSIWSMPVGHTEGGWMSVVERECEFIEPMGAVTISPDDISCAIRTAQNWKSPGPDGLHNFWLKWFRCSHSRLAAQFQQALELGSLPPSLTTGVTYLLYKSGSTTEAKNYRPITCLPTLYKLLTSILRAKINAHIVANNILASAQNGCRVGSRGTKELLLIDMTICQQIRRNKGALSAAWIDYKKAYDSVPHSWLGRVLELYKVDAALRAFLSACMRQWTTVLRQPGGGDDPPDPQDFIRIERGIFQGDSLSPLWFCLALNPLSTLLKDLGLGCRLRREGEIISHLLYMDDLKLFAPNSQDLSELLKTTEGFSSAINMEFGVDKCAVVHVQRGRVVNSTNLQLSETMSFRSISESETYKYLGMSQSLGIEEEGIRRSVKERFFSRLTKVLNSLLSGGNKVRAFNAWVMPLLTYSFGILRWTQTELDALDRRVRSLLTTHRMLHPRSSVMRLYIPRKCGGRGFLNAKDLHNREVYNLRNYFLNNECGMHRDVVAVDRNLTPLSLANENWRKPVVLSTADRKAAWESKVLHGRFYKALTGPDVDLLASVNWLRFGDLFGETEGFACAIADEVMMTNNYRKYILKDGTVDICRACRRPGESLRHIISGCSHLANGEYLHRHNLVARIIHQQLALLYGLVDREVPYYKYLPAPVLENGRATLYWDRSIITDRTIVANKPDIVIIDRSQRRAVLVDITIPHDENLVKAEKDKSSKYLDLAHEITAMWDVDSTIIVPIVVSVNGLIAKSLDQHLERLSLGGWIKGQMQKAVILDTARIVRRFLSLQP

SEQ ID NO: 5536 - protein, 1210 aa, Cydia splendana
MITRSQRRAAESTNNARPPPPPAPSSSASTTSSGDEFATAPDTDGSSDESGPPPPPPRPPARRGRPPLPARLGPAGHPAPPTAPATGGIVRRMRWTRNMNENVMRAYYGATEGGTQLSAYRSRILPLFQALEPTITVSEQRLSDQVRVIQRLKRLDDATLDRLRQEALSARADSTSVRDLPATSPDPVPAPDLAPGAPRVDFCTDEGDFASQNVSTTANEQLRRTLEEAITQYRATTNSRPRLPRLPMNRRNLALMGALNALLEPHLRTSKDLDDTHSIMYCGAIAACRVARVKFPDAERAPRTVGGVPAWQARIERRISSFRTLIAKLICFRGGNNRPRVMRFVNQAFAGTDIRPRDYMANVTERIDFLKQKVYAWANRIRRYRERVDRFQQNRLFQGDQRKVYRKWEETNLRTPDTQPPDVTAMTDFWRSIWSVPVGHTEGGWMSVVERECESIEPMGAVTISPDDVSCAIRTAQNWKSPGPDGLHNFWLKWFRCSHSCLAAQFQQALELGSLPPSLTTGVTFLLYKSGSTTEAKNYRPITCLPTLYKLLTSILRAKINAHIVANNILASAQNGCRVGSRGTKELLLIDMTICQQIRRNKGALSAAWIDYKKAYDSVPHSWLGRVLELYKVDAALRAFLSACMRRWTTVLRQPGGRDDHPGPQDFIRIERGIFQGDSLSPLWFCLALNPLSTLLKDLGLGCRLRREGEVISHLLYMDDLKLFAPNSQDLLELLKTTEVFSSAIHMEFGVDKCAVMHVQRGRVVNSTNLQLSETMSFRSIYESETYKYLGMSQSLGIEDEGIRRSVKERFFSRLTKVLNSLLSGGNKVRAFNAWVMPLLTYSFGILRWTQTELDALDRRVRSLLTAHRMLHPRSSVMRLYIPRKCGGRGFLNAKDLHNHEVYNLRNYFLNNECGMHRDVVAVDRNLTPLSLANENWRKPVVLSTADRKAAWESKVLHGRFYKALTGPDVDLLASVNWLRFGDLFGETEGFACAIADEVMMTNNYRKYILKDGTVDICRACRRPGESLRHIISGCSHLANGEYLHRHNLVARIIHQQLALLYDLVDHEVPYYKYLPAPVLENGRATLYWDRSIITDRTIVANKPDIVIIDRSQRRAVLVDITIPHDENLVKAEKDKSSKYLDLAHEITAMWDVDSTIIVPIVVSVNGLIAKSLDQHLERLSLGGWIKGQMQKAVILDTARIVRRFLSLQP

SEQ ID NO: 5537 - protein, 1210 aa, Cydia splendana
MEMITRSKTRSQASITTNARPPPSPVSSVSSQSSGDEFATAPDTSESSDECGPPPPPPRPPARRGRPPLPARLGPAGHLAPPTAPAAGGVVRRMRWSQTMNENVMRAYYGATEGGTDLCAYRVRMLPLFQALEPTIDVTAQRLSDQVRVIQRLKRLDDSTLDRLRLEALSARAASTSVRDPPATSPDPVPAPDQAPEAPRVDLCADEEEFAQSVSSTANEQLRRTLDEAITQYRSTPNTRPRLPRLPMNRHNLALMGALNALLEPYLRTSKDLDDTHAIMFCGAIAACRVARVKFPDSERAPRTAGGAPAWQIRIERRISSFRTLIAKLICFRGGNNRPRVMRFVNQAFAGTDIRPRDYMANITERIDFLKQKVYAWANRIRRYRERVDRFQQNRLFQSDQRKMYRKWEETNPRASDSQPPDATVMNDFWRSIWSVPVGHTEGSWMSVVERECESIEPMGAVTISPDDVSCAIRTAQNWKSPGPDGLHNFWLKWFRCSHSCLAAQFQQALELGSPPPSLTTGVTFLLYKSGSTTEAKNYRPITCLPTLYKLLTSILRAKINAHIVANNILASAQNGCRVGSRGTKELLLIDMTICQQIRRNRGALSAAWIDYKKAYDSVPHSWLERVLELYKVDTALRAFLSACMRQWTTVLRQPGGGDESPGPQDFIRIERGIFQGDSLSPLWFCLALNPLSTLLKDLELGCRLRRGGEVISHLLYMDDIKLFAPNSQDLVELLKTTEVFSNAINMEFGVDKCAVMHVQRGKVVISTNLQLSETMSFRSISESETYKYLGMSQSLGIEEEGIRRSVKERFFSRLTKVLNSLLSGGNKVRAFNAWVMPLLTYSFGILRWTQTELDALDRRVRSLLTTHRMLHPRSSVMRLYIPRKCGGRGFLNAKDLHNREVYNLRNYFLNNECGMHRDVVAVDRNLTPLSLANENWRKPVVLSTAGRKAAWESKVLHGRFYKALTGPDVDLLASVNWLRFGDLFGETEGFACAIADEVMMTNNYRKYILKDGMVDICRACRRPGESLRHIISGCSHLANGEYLHRHNLVARIIHQQLALLYGLVDREVPYYKYSPAPVLENGRATLYWDRSIITDRTIVANKPDIVLIDRSQRRTVLVDVTIPHDENLVKAEKDKSSKYLDLAHEITAMWDVDSTIIVPIVVSANGLIAKSLDQHLERLSLGGWIKGQMQKAVILDTARIVRRFLTLRP

SEQ ID NO: 5538 - protein, 1213 aa, Cydia splendana
MQRMITRSQRRAAESTNNARPPPPPAPSSSSSTSSSGDEFATAPDTDGSSDEGGPPPPPPRPPARRGRPPLPARLGPAGHPAPPTAPAAGGIVRRMRWTRDMNEKVMRAYYGATEGGTQLSAYRSRILPLFQALEPTITVSEQRLSDQVRVIQRLKRLDDATLDRLRQEALSARADSTSVRDLPATSPDPVPAPDLAPAAPRVDFCTDEGDFASQNVSTTANEQLRRTLEEAITQYRATTNSRPRLPRLPMNRRNLALMGALNALLEPHLRTSKDLDDTHSIMYCGAIAACRVARVKFPDAERAPRTAGGVPAWQVRIERRISSFRTLIAKLICFREGNNRPRVMRFVNQAFAGTDIRPRDYMANVTERIDFLKQKVYAWANRIRRYRERVDRFQQNRLFQSDQRKVYRKWEETNLRTPDTQPPDVTAMTDFWRSIWSVPVGHTEGGWMSVVERECESIEPMGAVTISPDDVSCAIRTAQNWKSPGPDGLHNFWLKWFRCSHSRLAAQFQQALELGSLPPSLTTGVTFLLYKSGSTTEAKNYRPITCLPTLYKLLTSILRAKINAHIIANNILASAQNGCRVGSRGTKELLLIDMTICQQIRRHKGALSAAWIDYKKAYDSVPHSWLGRVLELYKVDAALRAFLSACMRQWTTVLRQPGGGDDRPGPQDFIRIKRGIFQGDSLSPLWFCLALNPLSTLLKDLGLGCRLRREGVVISHLLYMDDLKLFAPNSQDLLELLKTTEVFSSAIHMEFGVDKCAVMHVQRGKVVNSTNLQLSETMSFRSISESETYKYLGMSQSLGIEDEGIRRSVKERFFSRLTKVLNSLLSGGNKVRAFNAWVMPLLTYSFGILRWTQTELDALDRRVRSLLTTHRMLHPRSSVMRLYIPRKCGGRGFLNAKDLHNREVYNLRNYFLNNECGMHRDVVAVDRNLTPLSLANENWRKPVVLSTADRKAAWESKVLHGRYYKALTGPDVDLLASVNWLRFGDLFGETEGFACAIADEVMMTNNYRKYILKDGTVDICRACRRPGESLRHIISGCSHLANGEYLHRHNLVARIIHQQLALLYGLVDREVPYYKYLPAPVLENGHATLYWDRSIITDRTIVANKPDIVIIDRSQRRAVLVDITIPHDENLVKAEKDKSSKYLDLAHEITAMWDVDSTIIVPIVVSVNGLIAKSLDQHLERLSLGGWIKGQMQKAVILDTARIVRRFLSLQP

SEQ ID NO: 5539 - protein, 1208 aa, Cydia splendana
MITRSRAKAVTTSARPPPPPASSTSSSTLSSGDEFATAPDTDGSSDESGPPPPPPRPPVRRGRPPLPARLGPAGHPAPPTAPATGGIVRRMRWTRDMNENVMRAYYGATEGGTQLSAYRSRILPLFQTLEPTITVSEQRLSDQVRVIQRLKRLDDATLDRLRQEALSARADSISVRDLPATSPDPVPAPDLAPGAPRVDFCTDEGDFVSQNVSTTANEQLRRTLEEVITQYRATTNSRPRLPRLPMNRRNLALMGALNALLEPHLRTSKDLDDTHSILYCGAIAACRVARVKFPDAERAPRTVGGVPAWQARIERRISSFRTLIAKLICFRGGNNRPRVMRFVNQAFAGTDIRPRDYMANVTERIDFLKQKVYAWANRIRRYRERVDRFQQNRLFQSDQGKVYRKWEETNLRTPDTQPPDATAMTDFWRSIWSMPVGHTEGGWMSVVERECEFIEPMGAVTISPDDISCAIRTAQNWKSPGPDGLHNFWLKWFRCSHSRLAAQFQQALELGSLPPSLTTGVTYLLYKSGSTTEAKNYRPITCLPTLYKLLTSILRAKINAHIVANNILASAQNGCRVGSRGTKELLLIDMTICQQIRRNKGALSAAWIDYKKAYDSVPHSWLGRVLELYKVDAALRAFLSACMRQWTTVLRQPGGGDDPPDPQDFIRIERGIFQGDSLSPLWFCLALNPLSTLLKDLGLGCRLRREGEIISHLLYMDDLKLFAPNSQDLSELLKTTEGFSSAINMEFGVDKCAVMHVQRGRVVNSTNLQLSETMSFRSISESETYKYLGMSQSLGIEDESIRRSVKERFFSRLTKVLNSLLSGGNKVRAFNAWVMPLLTYSFGILRWTQTELDALDRRVRSLLTTHRMLHPRSSVMRLYIPRKCGGRGFLNAKDLHNREVYNLRNYFLNNECGMHRDVVAVDRNLTPLSLANENWRKPVVLSTADRKAAWESKVLHGRFYKALTGPDVDLLASVNWLRFGDLFGETEGFACAIADEVMMTNNYRKYILKDGTVDICRACRRPGESLRHIISGCSHLANGEYLHRHNLVARIIHQQLALLYGLVDREVPYYKYLPAPVLENGRATLYWDRSIITDRTIVANKPDIVIIDRSQRRAVLVDITIPHDENLVKAEKDKSSKYLDLAHEITAMWDVDSTIIVPIVVSVNGLIAKSLDQHLERLSLGGWIKGQMQKAVILDTARIVRRFLSLQP

SEQ ID NO: 5540 - protein, 1213 aa, Cydia splendana
MQRMITRSQRRAAESTNNARPPPPPAPSSSSSTSSSGDEFATAPDTDGSSDEGGPPPPPPRPPARRGRPPLPARLGPAGHPAPPTAPAAGGIVRRMRWTRDMNENVMRAYYGATEGGTQLSAYRSRILPLFQALEPTITVSEQRLSDQVRVIQRLKRLDDATLDRLRQEALSARADSTSVRDLPATSPDPVPAPDLAPAAPRVDFCTDEGDFASQNVSTTANEQLRRTLEEAITQYRATTNSRPRLPRLPMNRRNLALMGALNALLEPHLRTSKDLDDTHSIMYCGAIAACRVARVKFPDAERAPRTAGGVPAWQVRIERRISSFRTLIAKLICFREGNNRPRVMRFVNQAFAGTDIRPRDYMANVTERIDFLKQKVYAWANRIRRYRERVDRFQQNRLFQSDQRKVYRKWEETNLRTPDTQPPDVTAMTDFWRSIWSVPVGHTEGGWMSVVERECESIEPMGAVTISPDDVSCAIRTAQNWKSPGPDGLHNFWLKWFRCSHSRLAAQFQQALELGSLPPSLTTGVTFLLYKSGSTTEAKNYRPITCLPTLYKLLTSILRAKINAHIIANNILASAQNGCRVGSRGTKELLLIDMTICQQIRRHKGALSAAWIDYKKAYDSVPHSWLGRVLELYKVDAALRAFLSACMRQWTTVLRQPGGGDDRPGPQDFIRIKRGIFQGDSLSPLWFCLALNPLSTLLKDLGLGCRLRREGVVISHLLYMDDLKLFAPNSQDLLELLKTTEVFSSAIHMEFGVDKCAVMHVQRGKVVNSTNLQLSETMSFRSISESETYKYLGMSQSLGIEDEGIRRSVKERFFSRLTKVLNSLLSGGNKVRAFNAWVMPLLTYSFGILRWTQTELDALDRRVRSLLTTHRMLHPRSSVMRLYIPRKCGGRGFLNAKDLHNREVYNLRNYFLNNECGMYRDVVAVDRNLTPLSLANENWRKPVVLSTADRKAAWESKVLHGRFYKALTGPDVDLLASVNWLRFGDLFGETEGFACAIADEVMMTNNYRKYILKDGTVDICRACRRPGESLRHIISGCSHLANGEYLHRHNLVARIIHQQLALLYGLVDREVPYYKYLPAPVLENGHATLYWDRSIITDRTIVANKPDIVIIDRSQRRAVLVDITIPHDENLVKAEKDKSSKYLDLAHEITAMWDVDSTIIVPIVVSVNGLIAKSLDQHLERLSLGGWIKGQMQKAVILDTARIVRRFLSLQP

SEQ ID NO: 5541 - protein, 972 aa, Cydia splendana
MKLLTKQIIIIIINLALMGALNALLEPYLRTSKDLDDTHSIMYCGAIAACRVARVKFPDAERAPRIVGGVPAWQARIERRISSFRTLIAKLICFRGGNNRPRVMRFVNQAFAGTDIRPRDYMANVTERIDFLKQKVYAWANRIRRYRERVDRFQQNRLFQSDQRKVYRKWEETNLRTPDTRPPDATAMTDFWRSIWSVPVGHTEGSWMSVVERECESIEPMGAVTISPDDVSCAIRTAQNWKSPGPDGLHNFWLKWFRCSHSRLAAQFQQALEVGSLPPSLTTGVTFLLYKSGSTTEAKNYRPITCLPTLYKLLTSILRAKINAHIVANNILASAQNGCRVGSRGTKELLLIDMTICQQIRRNKGALSAAWIDYKKAYDSVPHSWLGRVLELYKVDAALRAFLSTCMGQWTTVLRQPGGGDDRLGPQDFIRIERGIFQGDSLSPLWFCLALNPLSTLLKDLGLGCRLQREGEVISHLLYMDDLKLFAPNSQDLLELLKTTEVFSSAINMEFGVDKCAVMHVQRGRVVNSRNLQLSETMSFRSISESETYKYLGMSQSLGIEDEGIRRSVKERFFSRLTKVLNSLLSGGNKVRAFNAWVMPLLTYSFGILRWTQTELDALDRRVRSLLTTHRMLHPRSSVMRLYIPRKCGGRGFLNAKDLHNREVYNLRNYFLNNECGMHRDVVGVDRNLTPLSLANENWRKPVVLSTADRKAAWESKVLHGRFYKALTGPDVDLLASVNWLRFGDLFGETEGFACAIADEVMMTNNYRKYILKDGTVDICRACRRPGESLRHIISGCSHLANGEYLPRHNLVARIIHQQLALLYGLVDREVPYYKYLPAPVLENGRATLYWDRSIITDRTIVANKPDIVIIDRSQRRAVLVDITIPHDENLVKAEKDKSSKYLDLAHEITAMWDVDSTIIVPIVVSVNGLIAKSLDQHLERLSLGGWIKGQMQKAVILDTARIVRRFLSLRP

SEQ ID NO: 5542 - protein, 1214 aa, Agriopis aurantiaria
MITRSKTSAAARLTNAQPPPPPASSSSPSSSSGEDEYHTTREASGSSSDTSGPGTPPPPPPARRGRPPLPARLGLVGHSATRPAPATGGVVRRMRWSPTMNENCMRAYYRATEGGTNLSAYCARMLPLFQDLEPTVTVSAQRLSDQVRAIHRCKLLDDSVLDRLRLEELRARPTPALMRDPPVASSAPTLASLPASVATLAAPADPVVDEGDLTSNSVSDQVREQLRGALEDAISQYRFAPDSRPRLPRLPTHRRNLALMGALNALLAPYLRASEDLVDTHSILYCGAIAACRVARVKFPDTNRAPRTAGGVPAWQVRIERRISTFRTLIAKLICFSRGNNRPRVMRFVTQAFAGTEIRPQHYLANVMERIDYLKQKVYAWVSRIRRYRERVNRYWQNRLFQSDQRKVYRGWEETDQRVSDGQLPDANAMINFWRGIWSVPVEHTEGDWMRVVERECESIEPMGSILIDSVDVSCAIRTAQNWKSPGPDGLHNFWIKWIRCSHDRLATQFQEALELGSLPSFMTTGVTFLLHKSGSTTEAKNYRPITCLPTIYKLLTSILKNKINAHIVANNVLAHAQNGCRVGSRGTKELLLIDTAISQQVRRNKGALSAAWIDYKKAYDSVPHSWLERVLELYKIDTTLKSFLGACMRQWTTVLRQPGGGDGTSGPQDLIRIERGIFQGDSFSPLWFCLALNPLSTLLRDSGLGYRLRRDGQVISHLLYMDDLKLFTPKRQDLVELLKITDVFSSAIRMEFGVDKCAVMHVQRGKVVNSPNLQLSEVMTLRSLSEAETYKYLGMSESLGISVENIKKSVKERFFCRLTKVLNSFLSGGNKVRAFNGWVMPLLIYSFGILRWTQTELDALDRRVRQLLTSHRMLHPRSSVMRLYIPRKWGGRGFLNAKNLHNREVCSLRDFFRNSESGMHRDVVAVDRGLTPLSLANENWRKPSVLSIEDRRDVWKGKELHGRFYRALTGPDVDLLSSVNWLRFGDLFGETEGFACAIADEVIKTNNYRKYIMKDGTVDICRACHRPGESLRHIISGCSHLANGEYLHRHNQVARIIHQQLALRYGLAESEVPYYKYAPAPVLENGRALLYWDRSIITDRTIVANKPDIVLVDRSQRRAVLVDITIPHDENLVKAEKDKLSKYLDLAHEVTAMWDVDSTIIVPIVVSVNGLIAKSLDQHLKRLSLDGWIKGQMQKAVILDTARIVRRFLTLQP

SEQ ID NO: 5543 - protein, 1211 aa, Agriopis aurantiaria
MITRAKTRAAESNARLPPPPASSSSPSTSSGEDEYHTTREASGSSSDTSGPGTPPPPPPARRGRPPLPARLGPVGHSATRPAPATGGVVRRMRWSRIMNEDCMRAYYRATEGGTNLSAYCARMLPLFQALQPTITVSAQRLSDQVRAIQRCNMLDQSVLDRLRLEEVRTRPTPASTRNPPVASSAPTLASVPASVGTLAALADTAVDEEDLASGVSDQVKEQLRGALEDAISQYRFTSDSRPRLPRLPTHRRNLALMGALNALLAPYLRASEDLVDTHSILYCGAIAACRVARVKFPDTNRAPRTAGGVPAWQVRIERRINTFRTLIAKLICFRRGNNRPRVMRFVTQAFAGTDIRPQHYLANVTERIDYLKQKVYAWANRIRRYRERVDRYWQNRLFQSDQRKVYRGWEETDQRVSDGQRPDATAMINFWRGIWSVPVNHTEGDWMRVVERECESIEPMGSILIDPVDVSCAIRMAQNWKSPGPDGLHNFWIKWIRCSHDRLATQFQEALELGSLPSFMTTGVTFLLHKSGSTTEAKNYRPITCLPTIYKLLTSILRNKINAHIVANNVLAHAQNGCRVGSRGTKELLLIDTAISQQVRRNRGALSAAWIDYKKAYDSVPHSWLERVLELYKIDTTLKSFLCACMRQWTTVLRQPGGGDGTSGPQDLIRIERGIFQGDSFSPLWFCLALNPLSSLLRDSGLGYRLRRDGQVISHLLYMDDLKLFTPKRQDLVELLKITDVFSSAIRMEFGVDKCAVMHVQQGKVVNSPNLQLSEVMTLRSLSEAETYKYLGMSESLGISVENIKKSVKERFFCRLTKVLNSLLSGGNKVRAFNGWVMPLLIYSFGILRWTQTELDALDRRVRQLLTSHRMLHPRSSVMRLYIPRKWGGRGFLNAKNLHNREVCSLRDFFRNSESGMHRDVVAVDRGLTPLSLANENWRKPSVLSIEDRRDVWKGKELHGRFYRALTGPDVDLLSSVNWLRFGDLFGETEGFACAIADEVIKTNNYRKYIMKDGTVDICRACHRPGESLRHIISGCSHLANGEYLHRHNQVARIIHQQLALRYGLVESEVPYYKYAPAPVLENGRALLYWDRSIITDRTIVANKPDIVLVDRSQRRAVLVDITIPHDENLVKAEKDKLSKYLDLAHEVTAMWDVDSTIIVPIVVSVNGLIAKSLDQHLKRLSLDGWVKGQMQKAVILDTARIVRRFLTLQP

SEQ ID NO: 5544 - protein, 1117 aa, Hedya salicella
MRWTQAMNEHCMRAYYGATEGGTHLSAYRDRMLLLFQTLEPAIAVSAQRLSDQVRAIQRRKLLDDAMLDQLRLEVLAARAASTSSRNPPATSPVSAPALDLVPGAPRVDPGSDEEHCASSVSTQANEQLRRTLEETIERYRFAPDSRPRLPRLPTNRRNLALVGALNALLDPNLRASEDLADTHSIMYCGAIAACRVARVKFPDADRAPRTAGGVPAWQVRIKRRISTFRTLIAKLICFRGGNNRPRVMRYVAQAFAGTAVRPRDYMACVTERIDFLKQKVYAWASRIRRYRERVDRFQQNRLFQSDQRKVYRKWEGTDQRVTDGRLPDPTAMNNFWRSIWSVPVEHTEGEWMNVVERECEPIETMGAVTISPDDVSCAARTTQNWKSPGPDGLHNFWVKWFRCSHERLATQFQQALELGSLPSFLTTGVTFLLYKSGSTTEAKNHRPITCLPTLYKLLTSILRAKINTHIVANNVLAFSQNGCRVGSRGTKEFLLIDTTICQQVRRNRGTLSAAWIDYKKAYDSVPHSWLGRILELYKIDTVLKSFIGSCMRQWTTVLRQPGGRDGPPDPQDFIRIKRGIFQGDSLSPLWFCLALNPLSTLLKDSGLGCRLRRGAEIISHLLYMDDLKLFAPKRPELVELLKVTETFSSAIKMEFGVDKCATMHVQRGKVVNSTNLQLSETMSLKSLSEVETYKYLGMSQSLSIADGDVKQAVKERFFCRLTKVLNSLLSGGNKARAFNAWVMPLLTYSFGILRWTQTELDALDRRVRMLLTTHRMLHPRSSVIRLYIPRKCGGRGFLNAKDLHNREVCSLREYFLNNECGIHRDVVAVDKGLTSLSLANENWRRPTVLSTVDRKDVWRSKELHGRFYKALTGPDGDLLASVNWLRFGDLFGETEGFACAITDEVIMTNNYRKYILKDGTVDICRACRRPGESLRHIISGCSHLANSEYLHRHNQVARIIHQQLAVKYGLVGSEVPYYKYAPMPVLENGRATLYWDRSIITDRTIVANKPDIVLVDRSKRRAILIDITIPHDENLVKAEKDKLSKYLDLAHEVTAMWDVDSTIIAPIVVSANGLIAKSLNEHLKRLSLDGWVKGQIQKAVILDTARIVRRFLSVQP

SEQ ID NO: 5545 - protein, 1211 aa, Hedya salicella
MLTRQRARAASTPDTNARPPPPPASSSSSASSSGDEFATAPDTNSQSSDDERGPPPPPPRPPARQGRPPLPARLGPAGHPAPPTAPATGGVVRRMRWTQAMNEHCMRAYYGATEGGTHLSAYRDRMLLLFQTLEPAIAVSAQRLSDQVRAIQRRKLLDDAMLDQLRLEVLAARAASTSSRNPPATSPVSAPALDLVPGAPRVDPGSDEEHCASSVSTQANEQLRRTLEETIERYRFAPDSRPRLPRLPTNRRNLALVGALNALLDPYLRASEDLADTHSIMYCGAIAACRVARVKFPDADRAPRTAGGVPAWQVRIERRISTFRTLIAKLICFRGGNNRPRVMRYVAQAFAGTAVRPRDYMACVTERIDFLKQKVYAWASRIRRYRERVDRFQQNRLFQSDQRKVYRKWEGTDQRVTDGRLPDPTAMNNFWRSIWSVPVEHTEGEWMNVVERECEPIETMGAVTISPDDVSCAARTTQNWKSPGPDGLHNFWVKWFRCSHERLATQFQQALELGSLPSFLTTGVTFLLYKSGSTTEAKNYRPITCLPTLYKLLTSILRAKINTHIVANNVLAFSQNGCRVGSRGTKELLLIDTTICQQVRRNRGTLSAAWIDYKKAYDSVPHSWLGRILELYKIDTVLKSFIGSCMRQWTTVLRQSGGRDGPPDPQDFIRIKRGIFQGDSLSPLWFCLALNPLSTLLKDSGLGCRLRRGGEIISHLLYMDDLKLFAPKRPELVELLKVTETFSSAIKMEFGVDKCATMHVQRGKVVNSTNLQLSETMSLKSLSEVETYKYLGMSQSLSIADGDIKQAVKERFFCRLTKVLNSLLSGGNKARAFNAWVMPLLTYSFGILRWTQTELDALDRRVRMLLTTHRMLHPRSSVMRLYIPRKCGGRGFLNAKDLHNREVCSLREYFLNNECGIHRDVVAVDKGLTSLSLANENWRRPTVLSTVDRKDVWRSKELYGRFYKALTGPDVDLLASVNWLRFGDLFGETEGFACAITDEVIMTNNYRKYILKDGTVDICRACRRPGESLRHIISGCSHLANSEYLHRHNQVARIIHQQLAVKYGLVGSEVPYYKYAPMPVLENGRATLYWDRSIITDRTIVANKPDIVLVDRSKHRAILIDITIPHDENLVKAEKDKLSKYLDLAHEVTAMWDVDSTIIVPIVVSANGLIAKSLNEHLKRLSLDGWVKGQIQKAVILDTARIVRRFLSVQP

SEQ ID NO: 5546 - protein, 1214 aa, Erannis defoliaria
MITRSKANIAAAEPNARPPSPPAPSSPSASSGDDEFLTPRESSATSSESDVSGPRTPAPPPPVRRGRPPLPARLGPAGLPASRPALAAGGVVRRMRWSQINNENCMRAYYGATEGGTNLSAYRVRMLPLFQALEPTVTVSAQRLSDQVRAIQRLNLLDQSLLDRLRLEAQSARATPASTRDSHVASSAPTLASMPTSAATLATPADPVVDEGDCTSMSVSSQVSEQLRRALEDAICQYRFALNSRPRLPRLPTHRRNLALMGALNALLAPYLRASKDLTDTHSILYCGAIAACRVARVRFPDTNRAPRTVGDVPAWQVRIERRISTFRTLIAKLICFSRGNNRPRVMRFVTQAFSGTGLRPQQYIASVTERIDYLKQKVYAWANRIRRYRERVDRYWQNRLFQSDQRKVYRNWDGAAQRVNDGHLPDANAMTNFWRSIWSVPVEHTEGDWMRVVERECEAIEPMGPILIDPVDVSCAIRTAQNWKSPGPDGLHNFWIKWFRCSHDRLATQFQEALELGSLPSFMTTGITFLLHKSGSTTEPKNYRPITCLPIYKLLTSILSTKINAHIIANNVLAPAQNGCRVGSRGNKELLLIDMAISQQVRRSKGALSAAWIDYKKAYDSVPHSWLERILELYQIDTTLKSFLGACMRQWTTVLRQPGGGNDSSDPQDLIRIERGIFQGDSLSPSWFCLALNPLSTLLKDSGLSYRLRRGSEVISHLLYMDDLKLFAPKHQDLLELLKTTQVFSSAIRMEFGVDKCAVMRVQRGKVVNSPDLQLSELMTLRSLSEAETYKYLGMSESLGISVVDIKKSVKERFFCRLTKVLNSLLSGGNKARAFNGWVMPLLIYSFGILRWTQTELDALDRRVRQLLTAHRMLHPRSSVMRLYIPRKWGGRGFLNAKNLHNREVCSLRDYFLNNECGMHRDVVTVDKGLTPLSLANENWRRPSVLSTDDRKEVWKSKELHGRFYRALTGSDVDLLASVNWLRFGDLFGETEGFACAIADEVIKTNNYRKYIMKDGTVDICRACHRPGESLRHIISGCSHLANGEYLHRHNQVARIIHQQLALQYGLVESEVPYYKYAPAPVLENGRVLLYWDRSIITDRTIVANKPDIVMVDRSQRQAVLVDVTIPHDENLVKAEKDKLSKYLDLTFEITAMWDVDSTIIVPIVVSANGLIAKSLDQYLKRLSLGGWVKGQIQKAVVLDTARIVRRFLTLQP

SEQ ID NO: 5547 - protein, 1215 aa, Erannis defoliaria
MITRSQSRRNTAERNARPPSPPAPSSPSASSGDDVFLTPRESSVSSSNSDVSGPRTPAPPPPARRGRPPLPARLGPAGLPASRPALAAGGVVRRMRWSQTNNENCMRAYYGATEGGTNLSAYRVRMLPLFQALEPTVTVSAQRLSDQVRAIQRLNLLDQSLLDRLRLEAQSARPTPASTRDLDVASSAPTLALVPTSAATLVTSADPVVDEGDCTGMSVSTQVSEQLRRALEDAIGQYRFTPNSRPRLPRLPTHRRNLALMGALNALLAPYLRASEDLTDTHSILYCGAIAACHVARVKFPDTNRAPRPAGDVPAWQLRIERRISTFRTLIAKLICFSRGNNRPRVMRFVTQAFAGTGIRPQQYMANVTERIDYLKQKVYAWANRIRRYRERVDRYWQNRLFQSDQRKVYRNWEGNEQRVSDGQLPDASAMTNFWRGIWSVPVEHTERDWMRVVERECESIEPMGSILIDPVDVSCAIRTAQNWKSPGPDGLHNFWIKWFRCSHDRLATQFQEALELGSLPSFMTTGVTFLLHKSGSTTEPKNYRPITCLPTIYKLLTSILSTKINAHIVANNVLAPAQNGCRVGSRGTKELLLIDMAISQQVRRNKGALSAAWIDYKKAYDSVPHSWLERILELYQIDATLKSFLGACMRQWTTVLRQPGGGNGSSDSQDLIRIERGIFQGDSLSPSWFCLALNPLSTLLKDSGLGYRLRRGGEVISHLLYMDDLKLFAPKHQDLLELLKTTQVFSSAISMEFGVDKCAVMRVQRGKVVNSPDLQLSEIMTLRSLSEAETYKYLGMSESLGISVVDIKKSVKERFFCRLTKVLNSLLSGGNKARAFNGWVMPLLIYSFGILRWTQTELDALDRRVRQLLTAHRMLHPRSSVMRLYIPRKWGGRGFLNAKNLHNREVCSLRDYFLNNECGMHRDVVTVDKGLTPLSLANENWRTPSVLSTDDRKEVWKSKEMHGRFYRVLSGPDVDLLASVNWLRFGDLFGETEGFACAIADEVIKTNNYRKYIMKGGTVDICRVCHRPGESLRHIISGCSHLANGEYLHRHNQVARIIHQQLALQYGLVESEVPYYKYAPAPVLENGRALLYWDRSIITDRTIVANKPDIVMVDRSQRRAVLVDVTIPHDENLVKAEKDKLSKYLDLAFEITAMWDVDSTIIVPIVVSANGLIAKSLDQYLKRLSLDGWVKGQIQKAVVLDTARIVRRFLTLQP

SEQ ID NO: 5548 - protein, 1215 aa, Erannis defoliaria
MITRSQSRRNTAERNARPPSPPAPSSPSASSGDDVFLTPRESSVSSSNSDVSGPRTPAPPPPARRERPPLPARLGPAGLPASRPALAAGGVVRRMRWSQTNNENCMRAYYGATEGGTNLSAYRVRMLPLFQALEPTVTVSAQRLSDQVRAIQRLNLLDQSLLDRLRLEAQSARPTPASTRDLDVASSAPTLALVPTSAATLVTSADPVVDEGDCTGMSVSTQVSEQLRRALEDAIGQYRFTPNSRPRLPRLPTHRRNLALMGALNALLAPYLRASEDLTDTHSIFYCGAIAACRVARVKFPDTNRAPRPAGDVPAWQLRIERRISTFRTLIAKLICFSRGNNRPRVMRFVTQAFAGTGIRPQQYMANVTERIDYLKQKVYAWANRIRRYRERVDRYWQNRLFQSDQRKVYRNWEGNEQRVSDGQLPDASAMTNFWRGIWSVPVEHTEGDWMRVVERECESIEPMGSILIDPVDVSCAIRTAQNWKSPGPDGLHNFWIKWFRCSHDRLATQFQEALELGSLPSFMTTGVTFLLHKSGSTTEPKNYRPITCLPTIYKLLTSILSTKINAHIVANNVLAPAQNGCRVGSRGTKELLLIDMAISQQVRRNKGALSAAWIDYKKAYDSVPHSWLERILELYQIDATLKSFLGACMRQWTTVLRQPGGGNGSSDSQDLIRIERGIFQGDSLSPSWFCLALNPLSTLLKDSGLGYRLRRGGEVISHLLYMDDLKLFAPKHQDLLELLKTTQVFSSAISMEFGVDKCAVMRVQRGKVVNSPDLQLSEIMTLRSLSEAETYKYLGMSESLGISVVDIKKSVKERFFCRLTKVLNSLLSGGNKARAFNGWVMPLLIYSFGILRWTQTELDALDRRVRQLLTAHRMLHPRSSVMRLYIPRKWGGRGFLNAKNLHNREVCSLRDYFLNNECGMHRDVVTVDKGLTPLSLANENWRTPSVLSTDDRKEVWKSKELHGRFYRVLSGPDVDLLASVNWLRFGDLFGETEGFACAIADEVIKTNNYRKYIMKDGTVDICRACHRPGESLRHIISGCSHLANGEYLHRHNQVARIIHQQLALQYDLVESEVPYYKYAPAPVLENGRALLYWDRSIITDRTIVANKPDIVMVDRSQRRAVLVDVTIPHDENLVKAEKDKLSKYLDLAFEITAMWDVDSTIIVPIVVSANGLIAKSLDQYLKRLSLDGWVKGQIQKAVVLDTARIVRRFLTLQP

SEQ ID NO: 5549 - protein, 964 aa, Erannis defoliaria
MLSYVYLALMGALNALLAPYLRASEDLTDTHSILYCGAIAACRVARVKFPDTNRAPRPAGDVPAWQLRIERRISTFRTLIAKLICFSRGNNRPRVMRFVTQAFAGTGIRPQQYMASVTERIDYLKQKVYAWANRIRRYRERVDRYWQNRLFQSDQRKVYRNWEGTEQRVSDGQLPDASAMTNFWRGIWSVPVEHTEGDWMRVVERECESIEPMGSILIDPVDVSCAIRTAQNWKSPGPDGLHNFWIKWFRCSHDRLATQFQEALELGSLPSFMTTGVTFLLHKSGSTTEPKNYRPITCLPTIYKLLTSILSTKINAHIVANNVLAPAQNGCRVGSRGTKELLLIDMAISQQVRRNKGALSAAWIDYKKAYDSVPHSWLERILELYQIDTTVKSFLGACMRQWTTVLRQPGGGNGSSDSQDLIRIERGIFQGDSLSPSWFCLALNPLSTLLKDSGLGYRLRRGGEIISHLLYMDDLKLFAPKHQDLLELLKTTQVFSSAIRMEFGVDKCAVMRVQRGKVVNSPDLQLSEIMTLRSLSEAETYKYLGMSESLGISVVDIKKSVKERFFCRLTKVLNSLLSGGNKARAFNGWVMPLLIYSFGILRWTQTELDALDRRVRQLLTAHRMLHPRSSVMRLYIPRKWAGRGFLNAKNLHNREVCSLRDYFLNNECGMHRDVVTVDKGLTPLSLANENWRRPSVISTDDRKEVWKSKELHGRFYRALTGPDVDLLASVNWLRFGDLFGETEGFACAIADEVIKTNNYRKYIMKDGTVDICRACHRPGESLRHIISGCSHLANGEYLHRHNQVARIIHQQLALQYGLVESEVPYYKYAPAPVLENGRALLYWDRSIITDRTIVANKPDIVMVDRSQRRAVLVDVTIPHDENLVKAEKDKLSKYLDLAFEITAMWDVDSTIIVPIVVSANGLIAKSLDQYLKRLSLDGWVKGQIQKAVVLDTARIVRRFLTLQP

SEQ ID NO: 5550 - protein, 1215 aa, Biston betularia
MWTRSRTAAASGLHDAHIPSPPAPSTPSASSGDEEFATPLATSASSSSSDVSGPRTPAPPPPARRGRPPLPARLGPAGQSASRSALAAGGVVRRMRWSQTNNENCMRAYYGATEGGINLSAYRVRMLPLFQALEPTVAVSTQRLSDQVRAIQRLQLLDQSVLDRLRLEALPARPTPVSTRDSPVASSAPTLVSVPTSMATLATPTDPVVDVGECTSMGVCSQVSEHLRRTLEDAICQYRFAPDSRPRLPRLPTHRRNLALMGALNALLAPYLRASEDLTDTHSILYCGAIAACRVARVKFPDTNRAPRPAGGVPAWQLRIERRISTFRTLIAKLICFSRGNNRPRVMRFVTQAFAGTGIRPQHYLASVTERIDYLKQKVYAWANRIRRYRERADRYWQNRVFQSDQRKVYRDWEGTGQRVSDRQLPDTSVMTEFWRGIWSLPVEHTEGDWMRVIERECESIESMGSVLIDPVDVSCAIRTAQNWKSPGPDGLHNFWIKWIRCSHDRLATQFQEALELGSLPCFMTTGVTFLLHKTGSTTEAKNYRPITCLPTIYKLLTSILRTKINAHVVANNVLAPAQNGCRVGSRGTKELLLIDMTISQQVRRNKGALSTAWIDYKKAYDSVPHSWLERVLELYKIDTTLKSFLGACMRQWTTVLRQPGSGDGSSEPQDLIRIERGIFQGDSLSPLWFCLALNPLSTLLKESGLGHRLRRGGEVISHLLYMDDLKLFAPKRPDLMELLKTTQVFSNAIKMEFGVDKCAVMHVQRGEVVNCPDLQLSETMTFRSLSEAETYKYLGMSESLGIAVVDIKRSVKERFFCRLTKVLNSFLSGGNKVRAFNGWVMPLLIYSFGILRWTQTELDALDRRVRQQLTTHRMLHPRSSVMRLYIPRKLGGRGFLSTKNLHNREVCSLRDYFRDNECGMHRDVVAVDKGLTPLSLANENWRKPSVLSTEDRKEVWKSKQLHGRFYRVLTGPDVDMLASVNWLRFGDLFGETEGFACAIADEVIKTNNYRKYIMKDGTVDICRACHRPGESLRHIISGCSHLANGEYLHRHNQVARIIHQQLALQYGLVESEVPYYKYAPAPVLENGRALLYWDRSIITDRTIVANKPDIVVVDRAQRRAVLVDITIPHDENLVKAEKDKLSKYLDLAHEITAMWDVDSTIIVPIVVTVNGLIAKSLDQHLKRLSLDGWVKGQLQKAVILDTARIVRRFLTLQP

SEQ ID NO: 5551 - protein, 1129 aa, Blastobasis lacticolella
MAPATGGVVRRMRWTQSINENVMRAYYGATEGGTNLSAYCDRMLPLFQVLEPAIDVTAQRLSDQVRAIQRLKRLDDSVLDRLRLESLPVRAVPISTMSLPATSPPQVSPPSPAPRVPRTDATVGVEDCTNVSSVSTETNEYVRRTLEETIARYRFAPNSRPRLPRLPTNRRNLALMGAINVLLDSYIRASDNLVDTHSIMYCGAITACRVARVKFSDADRAPRVAGAPAWQKRIERRINTSRTLIAKLICFKEGNNRPRVMRFVDQAFAGTGISSRDYMVCATERIDFLKQKVCAWANRIRRYRERVDRFRLNRLFQSDQRKVYRKWEGTNQSGSDGSLPDASASNNFWRSIWSVPVEHSEGDWMNVVKRECEIIEPMAVVSICPEDVSCAIDTAQNWKCPGPDGLHNFWIKWFRCSHERLATQFQEALEHGSLPTLFTTGITFLLYKSGSTTEAKNYRPITCLPTLYKLLTSILRKKINNHIIENNILAMSQNGCRVGSRGTKELLLIDMTICQQVRRSRGSLSAAWIDYKKAYDSVPHSWLRRVLELYKINATLRSFLDACMRQWITVLSQPVGGIDHSPPQDFIRIERGIFQGDSLSPLWFCLALNPLSTLLKHSELGCRLRREGEVISHLLYMDDLKLFAPKRQDLMELLKITEIFSNAIRMEFGADKCAVMHVQRGKVANTTNLQLSETMSFRSLSEAETYKYLGMSQSLGIVDEGVKQAVKERFFCRLTKVLNSLLSGGNKVRSFNAWVMPLLTYSFGILRWTQTELDALDRRVRLLLTTHRMLHPRSSVMRLYIPRKCGGRGFLSAKTLHNREVCSLRDYFLNNECGMHRAVVAVDRGLTPLSLANENWRKPKVLSTIDRKDVWKSKELHGRFYRALTGPDVDLLASVNWLRFGDLFGETEGFVCAIADEVIMTNNYRRYILQDGTVDICRACRCPGESLRHITSNCGRLANGEYLHRHNLVARIIHQQLALQYGLVESEVPYYKYVPAPVLENGLATLYWDRSVITDRTIVANRPDIVLTDRSKRRAVLVDVTIPHDGNLVKAEKDKQCKYLDLAHEVTAMWDVDSTIIVPIVVSVNGLIAKSLDQHLKSLSLDGWVKGQIQKAVLLETARIVRRFLSLQP

SEQ ID NO: 5552 - protein, 1117 aa, Apotomis turbidana
MRWSQAMNENVMRAYYGATEGGTNLSAYRDRMLPLFLSFDPTITVSAQRLSDQVRFIQRRKLLDDATLDRLRLEVLAARTSSTPARNPPATSPVSAPAPYLVPEVPRTDRDADEEDCASSVSTQANEQLRRALEEAIRCYRSAPDSRPRLPRLPMHKRNLALMGALDALLDPYLRASEDLADTHSIMYCGAIAACRVARVRFPDTDRAPRTAGGVPAWQVRIERRISSFRTLIAKLICFRGGNNRPRVMRYVTQAFAGTGIRPCDYMACVTERIDYLKQKVYAWANRIRRYRERVDRFQQNRLFQSDQRKVYRKWEGTDQCVTDGQLPDPTAMINFWRSIWSVPVEHTEGEWMNVVRRECEPIENMGAVTISPDDVSCAVRTTQNWKSPGPDGLHNFWIKWFRSSHERLATQFQDALELGSLPSFMTTGATFLLYKSGSTTEAKNYRPITCLPTLYKLLTSILRTKINTHIVANNVLAFSQNGCRVGSRGTKELLLIDTTICQQVRRNRGSLSATWIDYKKAYDSVPHSWLERILELYKIDTALRSLLSSCMRQWTTVLRQPGVGDGPPGPQDLIRIERGIFQGDSLSPLWFCLALNPLSTLLKDSGLGCRLRRGGEVISHLLYMDDLKLYAPKRQDLVELLEVTETFSSAIKMEFGVDKCAVMHVQRGKVVNSAILQLSETMSLRSISEVETYKYLGMSQSLGIADGDIRQALKERFFCRLTKVLNSLLSGGNKARAFNAWVMPLLTYSFGILRWTQTELDALDTRVRQLLTTHRMRHPRSSVMRMYIPRKCGGRGFLNAKDLHNREVCSLREYFLNNECGIHRDVVAVDKGLTSLSLANENWRRPKVLSTDDRKAVWKSKELHGRFYKALTGPDVDLLASVNWLRFGDLFGETEGFVCAIADEVMMTNNYRRYILKDGTVDICRACRRPGESLRHIISGCSHLANGEYLHRHNQVARIIHQQLALRYGLVGSEVPYYKYAPMPVLENGRATLYWDRSIITDRTIVANKPDIVLVDRSKRQAVLVDITIPHDENLVKAEKDKLSKYLDLAHEVTAIWDVDSTIIVPIVVSANGLIAKSLDKHLKRLSLDGWIKGQIQKAVLLDTARIVRRFLSLQP

SEQ ID NO: 5553 - protein, 1207 aa, Apotomis turbidana
MITRSRRKKAEQTNARPPPPPASSSSSPSSSGDEFATAADTSESSDERGPPPPPPRPAARRGRPPLPARLGPTGQPAPTTAPATGGIVRRMRWTRVMNENCMRAYYGATEGGTNLSAYRDRMLPLFQAFDPTIAVSAQRLSDQVRFIQRRKLLNDATLDRLRLEVLAARAASVPARDPPAMSPVPAPAPNLVPGVPLTDPEADVEDYASSVSTQANEQLRRALEEAIRRYRSAPDSRPRLPRLPMHKRNLALMGALDALLEPYLRASKDLADTHSIMYCGAIAACRVARVRFPDTDRAPRTAGGVPAWQVRIERRISSFRTLIAKLICFRGGNNRPRVMRYVTQAFAGTGTRPCDYMACVTERIDYLKQKVYAWASRIRRYRERVDRFQQNRLFQSDQRKVYRKWEGADQCVSDGQLPDPTAMINFWRSIWSVPVEHTEGEWMNVVRRECEPIEAMGAVIISPDDVSCATRTTQNWKSPGPDGLHNFWIKWFRSSHERLATQFQDALELGSLPSFMTTGVTFLLHKSGSTTEAKNYRPITCLPTLYKLLTSILRTKINTHIVANNVLAFSQNGCRVGSRGTKELLLIDTTICQQVRRNRGSLSTAWIDYKKAYDSVPHSWLERILELYKIDTALRSLLGACMRQWTTVLRQPGGGYGPPGPQDLIRIERGIFQGDSLSPLWFCLALNPLSTLLKDSGLGCRLRRGGEVISHLLYMDDLKLYAPKRQDLVELLEVTEAFSSAIKMEFGVDKCAVMHVQRGKVVNSANLQLSETMSLRSISEVETYKYLGMSQSLGIADGDIRQALKERFFCRLTKVLNSLLSGGNKARAFNAWVMPLLTYSFGILKWTQTELDALDTRVRQLLTTHRMRHPRSSVMRLYIPRKCGGRGYLNAKDLHNREVCSLREYFLNNECGIHRDVVAVDKGLTSLSLANENWRRPKVLSTDDRRAVWKSKELHGRFCKALTGPDVDLLASVNWLRFGDLFGETEGFVCAIADEVMMTNNYRRYILKDGTVDICRACRRPGESLRHIISGCSHLANGEYLHRHNQVARIIHQQLALRYGLVGSEVPYYKYAPMPVLENGRATLYWDRSIITDRTIVANKPDIVLVDRSKRQAVLVDITIPHDENLVKAETDKLSKYLDLAHEVTAMWDVDSTVIVPIVVSANGLIAKSLDKHLKRLSLDGWIKGQIQKAVLLDTARIVRRFLSLQP

SEQ ID NO: 5554 - protein, 1207 aa, Apotomis turbidana
MITRSRRKKAEQTNARPPPPPASSSSSPSSSGDEFATAADTSESSDERGPPPPPPQPPARRGRPQLPARLGPTGQPAPTTAPATGGVVRRMRWTRVMNENCMRAYYGATEGGINLSAYRDRMLPLFQVFDPTIAVSAQRLSDQVRFIQRRKLLDDATLDRLRLEVLAARAASVPARDPPATSPVPAPAPNLVPGVPLTDPEADVEDYASSVSTQANEQLRRALEEAIGRYRSAPEPRPRLPRLPIHKRNLALMGALDALLDPYLRASEDLADTHSIMYCGAIAACRVARVRFPDTDRAPRTARGVPAWQVRIERRISSFRTLIAKLICFRGGNNRPRVMRYVTQAFAGTGTRPCDYMACVTERIDYLKQKVYAWASRIRRYTERVDRFQQNRLFQSDQRKVYRKWEGADQCVSDGQLPDPTAMINFWRSIWSVPVEHTEGEWMNVVRRECEPIEAMGAVTISPDDVRCAARTIQNWKSPGPDGLHNFWIKWFRSSHERLATQFQDALELGSLPSFMTTGVTFLLHKSGSTTEAKNYRPITCLPTLYKLLTSILRTKINTHIVANNVLAFSQNGCRVGSRGTKELLLIDTTICQQVRRNRGSLSTAWIDYKKAYDSVPHSWLERILELYKIDTALRSLLGACMRQWTTVLRQPGGGDGPPGPQDLIRIERGIFQGDSLSPLWFCLALNPLSTLLKDSGLGCRLRRGGEVISHLLYMDDLKLYAPKRQDLVELLEVTEAFSSAIKMEFGVDKCAVMHVQRGKVVNSANLQLSETMSLRSISEVETYKYLGMSQSLGIADGDIRQALKERFFCRLTKVLNSLLSGGNKARAFNAWVMPLLTYSFGILRWTQTELDALDTRVRQLLTTHRMRHPRSSVMRMYIPRKCGGRGFLNAKDLHNREVCSLREYFLNNECGIHRDVVAVDKGLTSLSLANENWRRPKVLSTDDRRAVWKSKELHGRFYKALTGPDVDLLASVNWLRFGDLFGETEGFVCAIADEVMMTNNYRRYILKDGTVDICRACRRPGESLRHIISGCSHLANGEYLHRHNQVARIIHQQLALRYGLVGSEVPYYKYAPMPVLENGRATLYWDRSIITDRTIVANKPDIVLVDRSKRQAVLVDITIPHDENLVKAEKDKLSKYLDLAHEVTAMWDVDSTSIVPIVVSANGLIAKSLDKHLKRLSLDGWIKGQIQKAVLLDTARIVRRFLSLQP

SEQ ID NO: 5555 - protein, 1207 aa, Apotomis turbidana
MITRSRRKKAEQTNARPPPPPASSSSSPSSSGDEFATAADTSESSDERGPPPPPPQPPARRGRPQLPARLGPTGQPAPTTAPATGGVVRRMRWTRVMNENCMRAYYGATEGGINLSAYRDRMLPLFQVFDPTIAVSAQRLSDQVRFIQRRKLLDDATLDRLRLEVLAARAASVPARDPPATSPVPAPAPNLVPGVPLTDPEADVEDYASSVSTQANEQLRRALEEAIGRYRSAPEPRLRLPRLPIHKRNLALMGALDALLDPYLRASEDLADTHSIMYCGAIAACRVARVKFPDTDRAPRTARGVPAWQVRIERRISSFRTLIAKLICFRGGNNRPRVMRYVTQAFAGTGTRPCDYMACVTERIDYLKQKVYAWASRIRRYRERVDRFQQNRLFQSDQRKVYRKWEGADQCVSDGQLPDPTAMINFWRSIWSVPVEHTEGEWMNVVRRECEPIEAMGAVTISPDDVRCAARTIQNWKSPGPDGLHNFWIKWFRSSHERLATQFQDALELGSLPSFMTTGVTFLLHKSGSTTEAKNYRPITCLPTLYKLLTSILRTKINTHIVANNVLAFSQNGCRVGSRGTKELLLIDTTICQQVRRNRGSLSTAWIDYKKAYDSVPHSWLERILELYKIDTALRSLLGACMRQWTTVLRQPGGGDGPPGPQDLIRIERGIFQGDSLSPLWFCLALNPLSTLLKDSGLGCRLRRGGEVISHLLYMDDLKLYAPKRQDLVELLEVTEAFSSAIKMEFGVDKCAVMHVQRGKVVNSANLQLSETMSLRSISEVETYKYLGMSQSLGIADGDIRQALKERFFCRLTKVLNSLLSGGNKARAFNAWVMPLLTYSFGILRWTQTELDALDTRVRQLLTTHRMRHPRSSVMRMYIPRKCGGRGFLNAKDLHNREVCSLREYFLNNECGIHRDVVAVDKGLTSLSLANENWRRPKVLSTDDRRAVWKSKELHGRFYKALTGPDVDLLASVNWLRFGDLFGETEGFVCAIADEVMMTNNYRRYILKDGTVDICRACRRPGESLRHIISGCSHLANGEYLHRHNQVARIIHQQLALRYGLVGSEVPYYKYAPMPVLENGRATLYWDRSIITDRTIVANKPDIVLVDRSKRQAVLVDITIPHDENLVKAEKDKLSKYLDLAHEVTAMWDVDSTSIVPIVVSANGLIAKSLDKHLKRLSLDGWIKGQIQKAVLLDTARIVRRFLSLQP

SEQ ID NO: 5556 - protein, 1214 aa, Apotomis turbidana
MKRYITRSQTRQNTAGTTASARPTPLPAPPSSSPSSSGDEFATAPDTSESSDDERGPPPPPPRPPARRGRPPLPACLGPTGHPAPITAPATGGVVRRMRWSRAMNENVMRAYYGATEGGTNLSAYRDRMLPLYLAFDPTIAVSAQRLSDQVRFIQRRKLLDDATLDRLRLEVLATRAASAPTRDPPAMSPVPAPAPNLVPGVPLTDPDADDEGCASSVSTQANEQLRRALEEAIARYRSAPESRPRLPRLPMHKRNLALMGALDALLDPYLRASEDLADTHSIIYCGAIAACRVARVRFSDTDRAPRTAGGVPAWQVRIERRIGSFRTLIAKLICFRGGNNRPRVMRYVTQAFAGTGTRPCDYMACVTERIDYLKQKVYAWAGRIRRYRERVDRYQQNRLFQSDQRKVYRKWEGADQCVTDGQLPDPTAMINFWRSIWSVPVEHTEGEWMNVVRRECEPIEAMGAVTISPDDVGCAVRTTQNWKSPGPDGLHNFWIKWFRSSHERLATQFQDALELGSLPSFMTTGATFLLYKSGSTTEAKNYRPITCLPTLYKLLTSILRTKINTHIVANNVLAFSQNGCRVGSRGTKELLLIDTTICQQVRRNRGSLSTAWIDYKKAYDSVPHSWLERILELYKIDTALRSLLGACMRQWTTALRQPGGGDGPPGPQDLIRIGRGIFQGDSLSPLWFCLALNPLSTLLKDSGLGCRLRRGGEVISHLLYMDDLKLYAPKRQDLVELLEVTDTFSSAIKMEFGVDKCAVMHVQRGKVVNSVNLQLSETMSLRSISEAETYKYLGMSQSLGIADGDIRQALKERFFCRLTKVLNSLLSGGNKARAFNAWVMPLLTYSFGILRWTQTELDALDTRVRQLLTTHRMRHPRSSVMRMYIPRKCGGRGFLNAKDLHNREVCSLREYFLNNECGIHRDVVAVDKGLTSLSLANENWRRPKVLSTDDRKAVWKSKELHGRFYKALTGPDVDLLASVNWLRFGDLFGETEGFICAIADEVMMTNNYRRYILKDGTVDICRACRRPGESLRHIISGCSHLANGEYLHRHNQVARIIHQQLALRYGLVGSEVPYYKYAPMPVLENGRATLYWDRSIITDRTIVANKPDIVLVDRSKRQAVLVDITIPHDENLVKAEKDKLSKYLDLAHEVTAMWDVDSTIIVPIVVSANGLIAKSLDKHLKRLSLDGWIKGQIQKAVLLDTARIVRRFLSLQP

SEQ ID NO: 5557 - protein, 1208 aa, Notocelia uddmanniana
MITRSKARLEKKASNPQSARPPPSPASSSSASSSEEFATAPDTSSSSSSDECGPPPPPPRPPARRGRPPLPARLGPAGHPAPPTAPATGGIVRRMQWSQSINENCMRAYYGATDGGTNLSAYRDRMLPLFRALEPAISVSAQRLSDQVRVIQRLKRLDDATLDRLRLEALSARAASASARNPSATLPAPVPALDTAPGADPSADEGCANQSVSSQAYEQLRRALEEAITQYRSTPNSRPRLPRLPVNRRNLALMGALNDLLVPYLGASEDLIDTHTIMYCGAIAACRVARVKFPDTDRAPRTAGSVPTWQVRIERRVDTYRTLIAKLICFRGGNSRPRVMRFVNQAFAGTGIRPRDYMTCVTERIDFLKQKVYTWASRIRRYRERLDRYQQNRLFQSDQRKVYRKWDGTDHRVSDGQRPDATAMVNFWRSIWSVPVEHNEGAWMGVVERECESIEPMGSVTISPADVSCAIRTAPNWKSPGPDGLHNFWLKWFRCSHARLAAQFQQALELGSLPPALTTGVTSLLYKSGSTTEAKNYRPITCLPTLYKLLTSILRAKINTHIVANNILAPAQNGCRVGSRGTKELLLIDMTICQRVRRNRGTLSTAWIDYKKAYDSVPHSWLRRILELYKVDAVLRSFLVACMGQWTTVLRQPGGGEGPSGPQDSIRIERGIFQGDSLSPLWFCLALNPLSTLLKDSGLGCQLRREGEVISHLLYMDDLKLFAPNKHDLLELLKTTEAFSSAIKMEFGVDKCAAMHVQRGKVVNSTNLQISETMDLRSLSEAETYKYLGMSQSLGIEGGDIKRAVKERFFCRLTEVLNSFLSGGNRVRAFNAWVMPLLTYSFGILRWTQTELDFLDRRVRVLLTAHRMLHPRSSVMRLYIPRKFGGRGFLNAKDLHNREVCSLRDYFLNSECGMHRDVVAVDASFTPLSMANENWRRLKVLSTEDRRAVWKSKELHGRFYKALTGPDVDLLASVNWLRFGDLFAETEGFVHAIADEVIMTNNYRKYILKDGTVDICRACRRLGESLRHIISGCGHLANGEYLHRHNLVAKIIHQQLALLYGLVNFEVPYYKYTPAPVLENGRATLYWDRSVITDRTIIANKPDIVLTDRLKRQAVLVDITIPHDENLVKAEKDKASKYLDLAHEITAMWDVDSTIIVPIVVSANGLIAKSLDQHLKRLSLDGWVKVQIQRAVLLDTARIVRRFLSLSP

SEQ ID NO: 5558 - protein, 1208 aa, Notocelia uddmanniana
MITRSKASLEKKASNPQSARPPPSPASSSSASSSEEFATAPDTSSSSSSDECGPPPPPPRPPARRGRPPLPARLGPAGHPAPPTAPATGGIVRRMQWSQSINENCMRAYYGATDGGTNLSAYRDRMLPLFRALEPAISVSAQRLSDQVRVIQRLKRLDDATLDRLRLEALSARAASASARNPSATLPAPVPALDTAPGADPSADEGCANQSVSSQAYEQLRRALEEAITQYRSTPNSRPRLPRLPVNRRNLALMGALNDLLVPYLGASEDLIDTHSIMYCGAIAACRVARVKFPDADRAPRTAGSVPTWQVRIERRVDTYRTLIAKLICFRGGNSRPRVMRFVNQAFAGTGIRPRDYMTCVTERIDFLKQKVYAWASRIRRYRERLDRYQQNRLFQSDQRKVYRKWDGTDHRVSDGQRPDATAMVNFWRSIWSVPVEHNEGAWMGVVERECESIEPMGSVTISPADVSCAIRTAPNWKSPGPDGLHNFWLKWFRCSHARLAAQFQQALELGSLPPPLTTGVTSLLYKSGSTTEAKNYRPITCLPTLYKLLTSILRAKINTHIVANNILAPAQNGCRVGSRGTKELLLIDMTICQRVRQNRGTLSTAWIDYKKAYDSVPHSWLRRILELYKVDAVLRSFLVACMGQWTTVLRQPGGGEGPSGPQDSIRIERGIFQGDSLSPLWFCLALNPLSTLLKDSGLGCQLRREGEVISHLLYMDDLKLFAPNKHDLLELLKTTEAFSSAIKMEFGVDKCAAMHVQRGKVVNSTNLQISETMFLRSLSEAETYKYLGMSQSLGIEGGDIKRAVKERFFCRLTKVLNSFLSGGNRVRAFNAWVMPLLTYSFGILRWTQTELDFLDRRVRVLLTAHRMLHPRSSVMRLYIPRKFGGRGFLNAKDLHNREVCSLRDYFLNSECGMHRDVVAVDASFTPLSMANENWRRLNVLSTEDRRAVWKSKELHGRFYKALTGPDVDLLASVNWLRFGDLFAETEGFVCAIADEVIMTNNYRRYILKDGTVDICRACRRPGESLRHIISGCGHLANGEYLHRHNLVAKIIHQQLALLYGLVDFEVPYYKYTPAPVLENGRATLYWDRSVITDRTIIANKPDIVLTDRLKRQAVLVDITIPHDENLVKAEKDKVSKYLDLAHEVTAMWDVDSTIIVPIVVSANGLIAKSLDQHVKRLSLDGWVKGQMQKAVLLDTARIVRRFLSLSP

SEQ ID NO: 5559 - protein, 1208 aa, Notocelia uddmanniana
MITRSKARLEKKASNPQSARPPPSPASSSSASSSEEFATAPDTSSSSSSDECGPPPPPPRPPARRGRPPLPARLGPAGHPAPPTAPATGGLVRRMQWSQSINENCMRAYYGATDGGTNLSAYRDRMLPLFRALEPAISVSAQRLSDQVRVIQRLKRLDDATLDRLRLEALSACAASASARNPSATLPAPVPALDTAPGADPSADEGCANQSVSSQAYEQLRRALEEAITQYRSTPNSRPRLPRLPVNRRNLALMGALNDLLVPYLGASEDLIDTHSIMYCGAIAACRVARVKFPDADRAPRTAGSVPTWQVRIERRVDTYRTLIAKLICFRGGNSRPRVMRFVNQAFAGTGIRPRDYMTCVTERIDFLKQKVYAWASRIRRYRERLDRYQQNRLFQSDQRKVYRKWDGTDHRVSDGQRPDATAMVNFWRSIWSVPVEHNEGAWMGVVERECESIEPMGSVTISPADVSCAIRTAPNWKSPGPDGLHNFWLKWFRCSHARLAAQFQQALELGSLPPPLTTGVTSLLYKSGSTTEAKNYRPITCLPTLYKLLTSILRAKINTHIVANNILAPAQNGCRVGSRGTKELLLIDMTICQRVRRNRGTLSTAWIDYKKAYDSVPHSWLRRILELYKVDAVLRSFLVACMGQWTTVLRQPGGGEGPSGPQDSIRIERGIFQGDSLSPLWFCLALNPLSTLLKDSGLGCQLRREGEVISHLLYMDDLKLFAPNKHDLLELLKTTEAFSSAIKMEFGVDKCAAMHVQRGKVVNSTNLQISETMDLKSLSEAETYKYLGMSQSLGIEGGDIKRAVKERFFCRLTKVLNSFLSGGNRVRAFNAWVMPLLTYSFGILRWTQTELDFLDRRVRVLLTAHRMLHPRSSVMRLYIPRKFGGRGFLNAKDLHNREVCSLRDYFLNSECGMHRDVVAVDASFTPLSMANENWRRLKVLSTEDRRAVWKSKELHGRFYKALTGPDVDLLASVNWLRFGDLFAETEGFVCAIADEVIMTNNYRRYILKDGTVDICRACRRPGESLRHIISGCGHLANGEYLHRHNLVAKIIHQQLALLYGLVDFEVPYYKYTPAPVLENGRATLYWDRSVITDRTIIANKPDIVLTDRLKRQAVLVDITIPHDENLVKAEKDKVSKYLDLAHEVTAMWDVDSTIIVPIVVSANGLIAKSLDQHLKRLSLDGWVKGQMQKAVLLDTARIVRRFLSLSP

SEQ ID NO: 5560 - protein, 1005 aa, Adoxophyes honmai
MEDRADISVSTQANEQLRRALEDAIQQYRSTPASRPRLPRLPTNKRNLVLMGALNELLEPYIRASNDLSDTHSILYCGAIAACRVAGLRFPDPEQAPRRPEDVPAWQVRIERRITKFRTLIAKLICFKEGNNRPRVMRYVNQAFSGTDIRPQNYLACVTERIDFLKQKVYAWANRIRRYRARVDRYRVNRLFQSDQRKVYREWEGTDKRMNDGQPPDSTAMVNFWRGIWSAPVDHTEGDWMNVVNRACETIEPMGAITISPDDVSCAIRSAQNWKSPGPDGLHNFWIKWFRCSHERLATQFQEALVSGSLPSFLTTGVTFLLYKSGSTTEAKNYRPITCLPTLYKLLTSILRAKINSHVVENNILAYAQNGCRVGSRGTKELLLIDMTIGQHVRRTKGTMSVAWIDYKKAYDSVPHTWLKRVLELYKIDATLRFFLSTCMGQWNTVLRLPGNRDGLIDPQDFIRIERGIFQGDSLSPLWFCLALNPLSTLLRDSKLGCQLLRGGEIISHLLYMDDLKLFAPKSQDLIKLLKTTEAFSNGIKMEFGVDKCAVMHVQRGKVVNSTNLQLSETITLKSLSEAETYKYLGMSQSLGIVDSDIKQAVSERFFCRVTKVLNSLLSGGNKIRALNAWVIPLLTYSFGVLKWTQTELDALDRRVRHLLTTHRMLHPRSSVMRLYIPRKCGGRGILNAKNLHNREVCSLREYFLHNECRMHRDVVAVDRNFTPLSLATENWRKPKVLSTEDRMDVWKSKELHGRFYRALHGPDVDLLASVNWLRFGNLFGETEGFVCAIADEVVKTNNYRKYILKDGTVDICRACHRPGESIRHIISGCSHLANGEYLHRHNLVARIIHQQLALQYGLVESEVPYYKYTPTPVLENGRATLYWDRSVITDRTIVANKPDIVIIDRSQRRAVLVDITIPHDENLVKAEKDKLSKYLDLAHEVTDMWDVDSTIIVPIVVTANGLIAKSLDYHLRRLSLDGWLKGLIQKAVLLDTARIVRRFLTLQP

SEQ ID NO: 5561 - protein, 955 aa, Crocallis elinguaria
MGALNVLLAPYLRASENLFDTHSIMYCGAIAVCRVARVKFPDADREPWTAGNAPAWQVRIERRINTFRTLIAKLVCFSRGNNRPRVMRFVNQAFAGTGIRPQNYMAGVTERIDFLKQKIYAWVNRIRRYRERVDRYHQNRLFESDQRKVYRNWEGTDQRVSDGQMPDTNAMINFWRGIWSVPVEHTEGDWMRTVEQSCESIETMGSVTIDPIDVSCAIRTAQNWKSPGPDGLHNFWIKWIRCSHECLAVQFQEALELGSLPCFLTTGVTSLLHKSGSTTEAKNYRPITCLPTLYKLLTSILRAKINSHVVANNILAPAQNGCRVGSRGTKELLLIDMAICQQVRRNRGALSTAWIDYKKAYDSVPHSWLERILELYKIDTTLRSFLSTCMRQWTTVLRQPGSGNSPSGPENFIKIERGIFQGDSLSPLWFCLALNPLSTLLRDSRLGCKLRREGEIISHLLYMDDLKLLAPKSPDLMKLLKITEIFSSAIKMEFGVDKCAVMHVQRGKVVNSDNLQLSETMTLRSLSEAETYRYLGMSQSLGIAVGDIKQSVKERFFCRLTKVLNSLLSGGNKARAFNGWVMPLLIYSFGILKWTQTELDSLDRRVRQLLTYHRMLHPRSSVMRLYIPRKWGGRGFLNAKTLHNREVCSLREYFLNNECGMHRDVVAVDRNLTPLSLANENWRKPVAMTTEDRKDVWKGKELHGRFYRALTGSDVDLLASVNWLRFGDLFGETEGFVCAIMDEVIKTNNYRKYIMKDGTVDICRACRRPGESLRHIISGCSHLANGEYLHRHNLVARIIHQQIALQYGLVESEVPYYKYAPAPVLENGRALLYWDRSIITDRTIVANKPDIVLVDRSQRRAVLVDITVPHDENLVKAEKDKLSKYLDLAHEVTAMWNVDSTIIVPIVVSANGLVAKSLDQHLKRLSLDGWIKGRMQKAVLLDTARIVRRFLTLQP

SEQ ID NO: 5562 - protein, 1207 aa, Crocallis elinguaria
MITRSRNKAGTASARQPPPPASSSPSSSSGDEYGTPLDTSASSDEDGPPSPPPPPPPARRERPPLPARLGPAGHSVPRAAPATGGIVRRMRWTSVMNENCMRAYYGATEGGINMSAYRDRMLPLFQTLEPSVAVSTQRLSDQVRAIQRLKLLDESVLDRLRLEALPIRATSASTRDLSVAPPLPAPLPAPSSVATRINPVVDEDDCANISVSTQVNEQLRRALEDAILEYQYTSDSRPRLPRLPTNRRNLALMGALNVLLAPYLRGSENLFDTHSIMYCGAIAVCRVARVKFPDADRAPRTAGNAPAWQVRIERRINTFRTLIAKLICFSRGNNRPRVMRFVNQAFAGTGIRPQNYMAGVTERIDFLKQKIYAWVNRIRRYRERVDRYHQNRLFESDQRKVYRNWEGTDQRVSDGQMPDTNAMINFWRGIWSVPVEHTEGDWMRTVEQSCESIETMGSVTIDPIDVSCAIRTAQNWKSPGPDGLHNFWIKWIRCSHECLAVQFQEALELGSLPCFLTTGVTSLLHKSGSTTEAKNYRPITCLPTLYKLLTSILRAKINSHVVANNILAPAQNGCRVGSRGTKELLLIDTAICQQVRRNRGALSTAWIDYKKAYDSVPHSWLERILELYKIDTTLRSFLSTCMRQWTTVLRQPGSGNSPSGPENFIKIERGIFQGDSLSPLWFCLALNPLSTLLRDSRLGCKLRREGEIISHLLYMDDLKLLAPKSPDLMKLLKITEIFSSAIKMEFGVDKCAVMHVQRGKVVNSDNLQLSETMTLRSLSEAETYRYLGMSQSLGIAVGDIKQSVKERFFCRLTKVLNSLLSGGNKARAFNGWVMPLLIYSFGILKWTQTELDSLDRRVRQLLTYHRMLHPRSSVMRLYIPRKWGGRGFLNAKTLHNREVCSLREYFLNNECGMHRDVVAVDRNLTPLSLANENWRKPVVMTTEDRKDVWKGKELHGRFYRALTGSDVDLLASVNWLRFGDLFGETEGFVCAIMDEVIKTNNYRKYIMKDGTVDICRACRRPGESLRHIISGCSHLANGEYLHRHNLVARIIHQQIALQYGLVESEVPYYKYAPAPVLENGRALLYWDRSIITDRTIVANKPDIVLVDRSQRRAVLVDVTVPHDENLVKAEKDKLSKYLDLAHEVTAMWNVDSTIIVPIVVSANGLVAKSLDQHLKRLSLDGWIKGRMQKAVLLDTARIVRRFLTLQP

SEQ ID NO: 5563 - protein, 1208 aa, Crocallis elinguaria
MITRSRTKKAGTASARKTPPPASSSPSSSSGVEYGTPLDTSASSDEDGPPSPPPPPPPARRGRPPLPARLGPAGHSVPRAAPATGGIVRRMRWTSDMNENCMRAYYGATEGGTNMSAYRDRMLPLFQTLEPSVAVSTQRLSDQVRAIQRLKLLDESVLDRLRLEALPIRATSASARDLSVAPPVPAPLPAPSSVATPIDPVVDEDDCANISVSTQVNEQLRRALEDAILEYQYTPDSRPRLPRLPTNRRNLALMGALNVLLAPYLRASENLFDTHSIMYCGAIAVCRVARVKFPDADRAPRPAGSAPAWQVRIERRINTFRTLIAKLICFSRGNNRPRVMRFVNQAFAGTGIRPQNYMAGVTERIDFLKQKIYVWVNRIRRYRERVDRYHQNRLFESDQRKVYRNWEGTDQRVSDGQLPDTNAMINFWRGIWSVPVEHTEGDWMRTVEQSCESIETMGSVTIDPIDVSCAIRTAQNWKSPGPDGLHNFWIKWIRCSHECLAVQFQEALELGSLPRFLTTGVTSLLHKSGSTTEAKNYRPITCLPTLYKLLTSILRAKINSHVVANNILAPAQNGCRVGSRGTKELLLIDTAICQQVRRNKGALSTAWIDYKKAYDSVPHSWLERILELYKIDTTLRTFLSTCMRQWTTVLRQPGSGNSPSGPENFIKIERGIFQGDSLSPLWFCLALNPLSTLLRDSRLGCKLRREGEIISHLLYMDDLKLLAPKSPDLMKLLKITEIFSSAIKMEFGVDKCAVMHVQRGKVVNSDNLQLSETMTLRSLSEAETYRYLGMSQSLGITVGDIKQSVKERFFCRLTKVLNSLLSGGNKARAFNGWVMPLLIYSFGILKWTQTELDSLDRRVRQLLTYHRMLHPRSSVMRLYIPRKWGGRGFLNAKTLHNREVCSLREYFLNNECGMHRDVVAVDRNLTPLSLANENWHKPVVMTTEDRKEVWKGKELHGRFYRALTGSDVDLLASVNWLRFGDLFGETEGFVCAIMDEVIKTNNYRKYIMKDGTVDICRACRRPGESLRHIISGCSHLANGEYLHRHNLVARIIHQQIAFQYGLVESEVLYYKYAPAPVLENGRALLYWDRSIITDRTIVANKPDIVLVDRSQRRAVLVDITVPHDENLVKAEKDKLSKYLDLAHEVTAMWNVDSTIIVPIVVSANGLVAKSLDQHLKRLSLDGWIKGRMQKAVLLDTARIVRRFLTLQP

SEQ ID NO: 5564 - protein, 1207 aa, Crocallis elinguaria
MITRSRNKAGTASARQPPPPASSSPSSSSGVEYGTPLDTSASSDEDGPPSPPPPPPPARRGRPPLPARLGPAGHSVPRAAPATGGIVRRMRWTSDMNENCMRAYYGATEGGTNMSAYRDRMLPLFQTLEPSVAVSTQRLSDQVRAIQRLKLLDESVLDRLRLEALPIRATSASTRDLSVAPPVPAPLPAPSLVATRIDPVVDEDDCANISVSTQVNEQLRRALEDAILEYQYTPDSRPRLPRLPTNRRNLALMGALNVLLAPYLRASENLFDTHSIMYCGAIAVCRVARVKFPDADRAPRTAGNAPAWQVRIERRINTFRTLIAKLVCFSRGNNRPRVMRFVNQAFAGTGIRPQNYMAGVTERIDFLKQKIYAWVNRIRRYRERVDRYHQNRLFESDQRKVYRNWEGTDQRVSDGQMPDTNAMINFWRGIWSVPVEHTEGDWMRTVEQSCESIETMGSVTIDTIDVSCAIRTAQNWKSPGPDGLHNFWIKWIRCSHECLAVQFQEALELGSLPCFLTTGVTSLLHKSGSTTEAKNYRPITCLPTLYKLLTSILRAKINSHVVANNILAPAQNGCRVGSRGTKELLLIDTAICQQVRRNKGALSTAWIDYKKAYDSVPHSWLERILELYKIDTTLRSFLSTCMRQWTTVLRQPGSGNSPSGPENFIKIERGIFQGDSLSPLWFCLALNPLSTLLRDSRLGCKLRREGEIISHLLYMDDLKLLAPKSPDLMKLLKITEIFSSAIKMEFGVDKCAVMHVQRGKVVNSDNLQLSETMTLRSLSEAETYRYLGMSQSLGIAVGDIKQSVKERFFCRLTKVLNSLLSGGNKARAFNGWVMPLLIYSFGILKWTQTELDSLDRRVRQLLTYHRMLHPRSSVMRLYIPRKWGGRGFLNAKTLHNREVCSLREYFLNNECGMHRDVVAVDRNLTPLSLANENWRKPVVMTTEDRKDVWKGKELHGRFYRALTGSDVDLLASVNWLRFGDLFGETEGFVCAIMDEVIKTNNYRKYIMKDGTVDICRACRRPGESLRHIISGCSHLANGEYLHRHNLVARIIHQQIALQYGLVESEVPYYKYAPAPVLENGRALLYWDRSIITDRTIVANKPDIVLVDRSQRRAVLVDITVPHDENLVKAEKDKLSKYLDLAHEVTAMWNVDSTIIVPIVVSANGLVAKSLDQHLKRLSLDGWIKGRMQKAVLLDTARIVRRFLTLQP

SEQ ID NO: 5565 - protein, 1210 aa, Pammene fasciana
MITRSKARAATTHARPPSPLASSSSPSTSSSSDDFETAPDTDESSDESGPPPPPPQPPARRGRPPLPARLGPTGHPVPPRAPAAGGIVRRMRWTCSMNENVMRAYYGATEGGTNLCAYRARILPLFQALEPTIDTTTQRLSDQVRVIQRLKRLDDATLDRLRLEALSARAASTSARDPPATSPDPVPAPDLASGAPRIDPSADEEYIASQSVSSTANEQLRRTLEEAITQYRSTNIPRPRLPRLPMNRRNLALMGALNDLLDPILRTSKDLDDTHSIMYCGAIAACRVARIKFPDAERAPRTAGGVPAWQVRIERRINSFRTLIAKLICFRGGNNRPRVMRFVHQAFAGTDIEPRDYMANITERIDFLRQKVYAWASRIRRYRERVDRFRQNRLFQSDQRKVYRRWEEADPRVSDVRLPDATAITDFWRSIWSAPVEHTEGEWMNVVERECESIEPMGAITISPDDVSCAIRTSQNWKSPGPDGLHNFWLKWFRCSHSRLATQFQHALELGSLPPSLTTGVTFLLYKSGSTTEAKNYRPITCLPTLYKLLTSILRAKINAHMVANNILASAQNGCRVGSRGTKELLLIDMTICQRVRRNRGALSAAWIDYKKAYDSVPHSWLERILELYKVDAALRSFLGACMRQWTTVLRQPGGGDDPPGPQDFIRIERGIFQGDSLSPLWFCLALNPLSTLLKDSGLGCRLRREGEVISHLLYMDDLKLFAPNNRDLLELLKTTEVFSSSIKMEFGVDKCAVMHVQRGKVVNSTNLQLSETMTFRSISESETYKYLGMSQSLGIEDVGIKQALKERFFGRLTKVLNSLLSGGNKVRAFNAWVMPLLTYSFGILRWTQTELDALDRRVRLLLTTHRMLHPRSSVMRLYIPRKCGGRGFLNAKNLHNREVYNLRNYFLNNECGMHRDVVTVDKNLTPLSLANENWRKPVVLSTEDRKAVWKSKELHGRFYGALTGPDVDLLASVNWLRFGDLFGETEGFACAIADEVIMTNNYRRYILKDGTVDICRACRRPGESLRHIISGCSHLANGEYLHRHNLVARIIHQQLALLYGLVAHEVPYYKYIPAPVLENDRATLYWDRSIITDRTIVANKPDIVVIDRPQRRAMLVDITVPCDVNLVKAEKDKSSKYLDLAHEVTAMWEVDSAIIVPIVVSANGLIAKSLDQHLERLSLRGCGWIKGQIQKAVILDTARIVRRFLTLRP

SEQ ID NO: 5566 - protein, 1209 aa, Pammene fasciana
MITRSRTKAASTNARPPSSPASSVSSPSSSGDEFATAPDTSESSDECGPPPPPPRPPARRGRPPLPARLGLAGHPVPPRAPAAGGIVRRMRWTPAMNENVMRAYYGATEGGTNLSAYRDRILPLFQALEPTIDTTAQRLSDQVRAIQRLKRLDDATLDRLRLEALSARADSTSVRDPPATSPDPMPVPDLASGAPRIDPSADEEYIASQSMSSTANEQLRRTLEEAITQYRSTNIPRPRLPRLPMNRRNLALMGALNDLLDPILRTSKDLDDTHSIMYCGAIAACRVERVKFPDAERAPRTAGGVPVWQVRIERRINSFRTLIAKLICFGGGNNRPRVMRFVHQAFAGTGIEPRDYMANVTERIDFLKQEVYAWASRIRRYRKRVDRFRQNRLFQSDQRKVYRRWEEADPRVSDARLPDATAMTDFWRSIWSAPVEHTEGEWMSVVERECESIEPMGAITISPDDVSCAIRTAQNWKSPGPDGLHNFWLKWFRCSHSRLATQFQQALELGSLPPSLTTGVTFLLYKSGSTTEAKNYRPITCLPTLYKLLTSILRAKINAHIVANNILASSQNGCRVGSRGTKELLLIDMTICQRVRRNRGALSAAWIDYKKAYDSVPHSWLERILELYKVDAALRSFLGACMRQWTTVLRQPGGGDDPPDPHDFIRIERGIFQGDSLSPLWFCLALNPLSTLLKDSGLGCRLRREGEVISHLLYMDDLKLFAPNNRDLMELLKTTEVFSSSIKMEFGVDKCAVMHVQRGKVVNSTNLQLSETMTFRSISESETYKYLGMSQSLGIEDAGIKQALKERFFGRLTKVLNSLLSGGNKVRAFNAWVMPLLTYSFGILRWTHTELDALDRRVRLLLTTHRMLHPRSSVMRLYIPRKCGGRGFLNAKNLHNREVYNLRNYFLNNECGMHRDVVAVDKSLTPLSLANENWRKPVVLSTEDRKAVWKSKELHGRFYGALTGPDVDLLASVNWLRFGDLFGETEGFACAIADEVIMTNNYRRYILKDGTVDICRACRCPGESLRHIISGCSHLANGEYLHRHNLVARIIHQQLALLYGLVDHEVPYYKYTPAPVLENGRATLYWDRSIITDRTIVANKPDIVIIDRSQRRAMLVDITVPCDVNLVKAEKDKSSKYLDLAHEVTAMWEVDSAIIVPIVVSANGLIAKSLDQHLERLSLRGCGWIKGQIQKAVILDTARIVRRFLSLRP

SEQ ID NO: 5567 - protein, 1212 aa, Pammene fasciana
MITRSKTRLQQASPPNARPLSSPASSVSSPSSSGDEFATAPDTSESSDERGPPPPPPRPPARRGRPPLPARLGLAGHPVPPRAPAAGGIVRRMRWTPAMNENVMRAYYGATEGGTNLCAYRDRMLPLFQALEPTIDTTAQRLSDQVRVIQRLKRLDDATLDRLRLEALSARAASTSARDPPATPPDPMPAPDLASGAPRIDPSADEEEIANQSLSSTANEQLRRTLEEAITQYRSTNITRPRLPRLPMNRRNLALMGALNDLLDPLLRTSKDLDDTHSIMYCGAIAACRVARVKFPDAERAPRTTGGVPAWQVRIERRINSFRTLIAKLICFRGGNNRPRVMRFVHQAFAGTDIEPRDYMANVTERIDFLKQKVYAWASRIRRYRERVDRFRQNRLFQSDQRKVYRRWEEADPRVSDVRLPDATAMTDFWRSIWSVPVEHTEGEWMSVVERECESIEPMGAITISPDDVSCAIRTAQNWKSPGPDGLHNFWLKWFRCSHSRLATQFQQALELGSLPPSLTTGVTFLLYKSGSTTEAKNYRPITCLPTLYKLLTSILRAKINAHMVANNILASAQNGCRVGSRGTKELLLIDMTICQRVRRNRGALSAAWIDYKKAYDSVPHSWLERILELYKIDAALRSFLGACMRQWTTVLRQPGGGDDPPDPQDFIRIERGIFQGDSLSPLWFCLALNPLSTLLKDSGLGCRLQREGEVISHLLYMDDLKLFAPNNRDLLELLKTTEVFSSSIKMEFGVDKCAVMHVQRGKVVNSTNLQLSETMTFRSISESETYKYLGMSQSLGIEDAGIKQALRERFFGRLTKVLNSLLSGGNKVRAFNAWVMPLLTYSFGILRWTQTELDALDRRVRQLLTTHRMLHPRSSVMRLYIPRKCGGRGFLNAKNLHNREVYNLRNYFLNNECGMHRDVVAIDKGLTPLSLANENWRKPVVLSTEDRKAVWKSKELHGRFYGALTGPDVDLLASVNWLRFGDLFGETEGFACAIADEVIMTNNYRRYILKDGTVDICRACRRPGESLRHIISGCSHLANGEYLHRHNLVARIIHQQLALLYGLVAHEVPYYKYIPAPVLENGRATLYWDRSIITDRTIVANKPDIVVIDRPQRRAMLVDITVPCDVNLVKAEKDKSSKYLDLAHEVTAMWEVDSAIIVPIVVSANGLIAKSLDQHLERLSLRGCGWIKGQIQKAVILDTARIVRRFLSLRP

SEQ ID NO: 5568 - protein, 1202 aa, Campaea margaritaria
MFTRSKAATNAHLSSQSAPSSPKSTSSESEYGTPPDTSDVSGPPSSPSPPRPVRRGRPPLPARLGPVGQLAPRPAPATSSKAQRMKWTTTINTSCMRAYYGATEGGTNLTAYRNRMLSLFQTLEPTVAVSAQRLSDQVRAIHRCKLMEQSTLDRLRLEALPVSTTSTSGRDLPETPSIPGPVITSTPVASRVDTEVVDGECGNMSVSSQVTEQLRRTLEDAIRQYRFTSDSRPRLPRVPTHRRNLALMGALDALLAPYLQTSKDLIDTHSILYCGAIAVCRVARVKFPDTEQAPRTLGHAPAWQVRIQRRIDTYRTLIAKLVCFSRGNNRPRVMRFVNQAFAGTDIRPRNYMTCVTERIDFLKQKVYAWANRIRRYRERVDRYCQNRLFQSDQRKVYRNWEVTGQRMDDGQLPDVTAMINFWRGIWSVPVEHTEGDWMNIVERACDPIESMEAVSISPIDVRYAIQTAQNWKSPGPDGLQNFWIKWIRSSHSCLAMQFQEAIELGSLPSFMTTGSTTLLFKSGSTTEAKNYRPITCLPTMYKLLTSILRTKINSHIIANNILAPAQNGCRVGSRGTKELLLIDMTICQQVRRKKGALSTAWVDYKKAYDSVPHSWLVRILELYKIDTTLRSFLRTCMGQWSTVLRQPGGGDSVFGPQDFIRIERGIFQGDSLSPLWFCLALNPLSTLLQNSGLGYRLRREGEIISHLLYMDDLKLFAPKRFDLMKLLNITEEFSKSINMEFGVDKCAVMHVQRGKVVNSSNLQLSETLSLRSLSEAETYKYLGMSESLGIVDRDIKQSVKERFFCRLTKVLNSHLSGGNRARAFNGWVMPLLTYSFGILRWTQTELDALDRRVRQQLTLHRMLHPRSSVMRLYIPRKWGGRGFLNAKNLHNREVCSLREYFLNTECGMHRDVVVVDKTLTPLSLANGNWRKPSVLSTDDRKDVWKGKELHGRFYRALTGPDVDLLASVNWLRFGDLFGETEGFVCAIADEVIKTNNYRKYIMKDGTVDICRACRRPGESLRHIISGCSHLANGEYLHRHNQVARIVHQQLALQYGLVELEVPYYKYAPAPVLENGRALLYWDRSVITDRTIVANKPDIVLVDRSQRRAVLVDITVPHDENLVKAEKDKLSKYLDLAHEVTAMWDVDSTIIVPIVVSANGLVAKSLDQHLKRLSLDGWIKGRMQKAVLLDTARIVRRFLSLQP

SEQ ID NO: 5569 - protein, 955 aa, Bembecia ichneumoniformis
MGALNTLLAPYIKASRDLTDTHSILYCGAIAACRVARVKFLNFDRATRDAEGVPAWQMRIERRISKFRTLIAKLISFSRGNTRPRVMRFVAQAFVGTNIKSKDYLTWATERIDYFKQKVYALANRVRRYKERVQRYRQNRLFQSDQRKVYRDWERTNQSVNVGHPPDPEVMLNFWHDIWSVSDEHTEGDWISIVEQACEPITAMEAITISPTDLSCAIRSTQNWKSPGPDGLHNFWIKMFQCSHECLAVQFQKALELGTLPTFLTTGTTFLLHKSGSTAEAKNYRPITCLPTIYKLLTSILRTKINSHILKNNILDTAQNGCKIGSRGTKELLLIDMTICERVRRSSGALSVAWIDYKKAYDSVPHSWLRRILELYKIDTTLRSFLAMCMGQWITVLRQPGYRGSDAGLRDTIKIERGIFQGDSLSPLWFSLALNPLSTLLRNLKLGYRLRRGGEVISHLLYMDDLKLFAPKPKDLLELLKITQCFSNAIRMDFGVDKCAVMHVQKGKVVNSPNLQLSDEVSFKSLSEVETYKYLGMSQSLGISDKDIKQTVRTRFFGRLTKVLNSFLSGGNKVRAFNGWVMPLLTYSFGILRWTQTELDGLDRRVRRLLTAHRMLHPRSSVMRLYIPRKLGGRGFLNAKNLHNREVYSLREYFLNHGSGVHRDVVAIDKNFTPLSLANGNWRRLVVLSTEDRKSVWKGKELHGRFYKALTGPDVDSLMSVNWLRFGDLFGETEGFVCAIADEVIKTNNYRKYILKDGTVDICRACHRPGETLRHIISGCAHLSNGEYLHRHNQVARIIHQRLAIRYGLIESEVPYYKYVPAPVLENGHATLYWDRSIITDRTIVANKPDIVVIDRSQRRTMLVDIAVPHDENLVKAEKEKLTKYIDLAHEVTAMWDVDSTIIVPIVVSANGLIAKSLDQHLKRLSLDGWIKGQIQKAVLLDTARIVRRFLTLQP

SEQ ID NO: 5570 - protein, 1118 aa, Ennomos quercinarius
MRWTQAMNENCMRAYYGATEGGSSLTAYRDRMLSLFQNLEPAVAVSAQRLSDQVRAIQRCKMLDQSTLDRLRLEALPTRATSPSPRVLPAALPDPGPTTGPPPVTPRGDPAIGGEESVSDSVSTQANEQLRSALEDAILRYRSTSTSRPRLPRLPTNRRNLVLMGALNTLLAPYLRTSEDLVDTHSILYCGAIAACRVARVKFPDTDGAPRPADGAPAWQVRIEKRITTFRTLIAKLVCFSRGNHRPRVMRFVTQAFAGTGIRPQDYMACVTERIDFLKQKVYAWASRIRRYRERVDRYQQNRLFQSDQRKVYRNWEGTGQRVVDGQLPDANAMNEFWRSIWSVPVEHTEGDWIRVVKRVCEPIESMGSITIDPEDISCAIRTAQNWKSPGPDGLHNFWIKWIRCSYPCLAIQFQEALEAGSLPSFMTTGVTFLLHKSGSTTEAKNYRPITCLPTLYKLLTSILRTKINSHIVANNILAPAQNGCRVGSRGTKELLLIDTTICQQVRRNRGALSTAWIDYKKAYDSVPHSWLERVLELYKIDTTLRSFLRSCMGQWTTVLRQPGGGDSVSGPQDLIRIERGIFQGDSLSPLWFCLALNPLSTLLEDSKLGYRLRRGGETICHLLYMDDLKLFAPQRPQLIELLKITENFSNSIRMEFGVDKCAVMHVRGGKVVNSTNLQLSETMTLRSLSEAETYKYLGMSESLGISVGDVKRTVKERFFCRLTKVLNSLLSGGNKVRAFNGWVMPLLIYSFGILRWTQTELDALDRKVRQLLTSHRMLHPRSSVMRLYIPRKWGGRGFLNAKNLHNREVCSLREYFLNNECGMHRDVVAVDKGLTPLSLANENWRKPVVLSTEDRRDVWKGKELHGRFYRALTGPDVDLHASVNWLRFGDLFGETEGFVCAIADEVIKTNNYRKYIMKDGTVDICRACRRPGESLRHIISGCSHLANGEYLHRHNLVARIIHQQLALQYGLVESEVPYYKYTPGPVLENGRALLYWDRSIITDRTIVANKPDIVLIDRSQRRAVLIDITIPHDENLVKAEKEKLSKYLDLAHEVTAMWNVDSTSIVPIVVSANGLIAKSLDQHLERLSLDGWIKGQIQKAVLLDTARIVRRFLTLQP

SEQ ID NO: 5571 - protein, 1209 aa, Cydia splendana
MQTRSKTRAQLASPRNARPPPPSASSVSSQSSSGDEFATAPDTSESSDECGPPPPPSRPPARRGRPPLSARLGPAGHPAPPTAPAAGGVVRRMRWSQTINENVMRAYYGATEGGTNLCAYRVRMLPLFQALEPTIDVTAQRLSDQVRVIQRQKRLDDSTLDRLRLEALSARAASTSARDPPATSPDPVPAPDQAPGAPRVDLSADEEEFAQSVGSTANEQLRRTLDEAITRYRSTPDTRPRLPRLPMNRHNLALMGALNALLEPYLRTSKDLDDTHAIMYCGAIAACRVARVKFPDSERAPRTAGGAPAWQIRIERRISSFRTLIAKLICFRGGNNRPRVMRFVNQAFVGTDIRPRDYMANVTERIDFLKQKVYAWANRIRRYRERVDRFQQNRLFQSDQRKMYRKWEETNLRASDSRPPDATVMNDFWRSIWSVPVGHTEGSWMSVVERECESIEPMGAVTISPDDVSCAIRTAQNWKSPGPDGLHNFWLKWFRCSHSYLAAQFQQALELGSLPPSLTTGVTFLLYKSGSTTEAKNYRPITCLPTLYKLLTSILRAKINAHIVANNILASAQNGCRVGSRGTKELLLIDMTICQQIRRTRVALSAAWIDYKKAYDSVPHSWLGRVLELYKVDAALRAFLSACMGQWTTVLRQPGGGDDRPGPQDFIRIERGIFQGDSLSPLWFCLALNPLSTLLKDLGLGCRLRREGEVISHLLYMDDLKLFAPNTQGLLELLKTTEVFSSAINMEFGVDKCAVMHVQRGKVVNSTNLQLSETMSFRSISESETYKYLGMSQSLGIEDEGIRRSVKERFFSRLTKVLNSLLSGGNKVRAFNAWVMPLLTYSFGILRWTQTELDALDRRVRSLLTTHSMLHPRSSVMRLYIPRKCGGRGFLNAKDLHNREVYNLRNYFLNNECGMHRDVVAVDRNLTPLSLANENWRKPVVLSTADRKAAWESKALHGRFYKALTGPDVDLLASVNWLRFGDLFGETEGFACAIADEVMMTNNYRKYILKDGTVDICRACRRPGESLRHIISGCSHLANGEYLHRHNLVARIIHQQLALLYGLVDREVPYYKYLPAPVLENGRATLYWDRSIITDRTIVANKPDIVLIDRSQRRAVLADVTIPHDENLVKAEKDKSSKYLDLAHEITAMWDVDSTIIVPIVVSANGLIAKSLDQHLERLSLGGWIKGQMQKAVILDTARIVRRFLTLRP

SEQ ID NO: 5572 - protein, 1086 aa, Cydia splendana
MLPLFQALEPTIDVTVQRLSDQVRVIQRQKRLDDSTLDRLRLEALSARAASTSARDPPATSPDPVPAPDQAPGAPRVDLSADEEEFAQSVGSTANEQLRRTLDEAITRYRSTPDTRPRLPRLPMNRHNLALMGALNALLEPYLRTSKDLDDTHAIMYCGAIAACRVARVKFPDSERAPRTAGGAPAWQIRIERRISSFRTLIAKLICFRGGNNRPRVMRFVNQAFVGTDIRPRDYMANVTERIDFLKQKVYAWANRIRRYRERVDRFQQNRLFQSDQRKMYRKWEETNLRASDSRPPDATVMNDFWRSIWSVPVGHTEGSWMSVVERECDSIEPMGAVTISPDDVSCAIRTAQNWKSPGPDGLHNFWLKWFRCSHSYLAAQFQQALELGSLPPSLTTGVTFLLYKSGSTTEAKNYRPITCLPTLYKLLTSILRAKINAHIVANNILASAQNGCRVGSRGTKELLLIDMTICQQIRRTKGALSAAWIDYKKAYDSVPHSWLGRVLELYKVDAALRAFLSACMGQWTTVLRQPGGGDDRPGPQDFIRIERGIFQGDSLSPLWFCLALNPLSTLLKDLGLGCRLRREGEVISHLLYMDDLKLFAPNTQGLLELLKTTEVFSSAINMDFGVDKCAVMHVQRGKVVNSTNLQLSETMSFRSISESETYKYLGMSQSLGIEDEGIRRSVKERFFSRLTKVLNSLLSGGNKVRAFNAWVMPLLTYSFGILRWTQTELDALDRRVRSLLTTHRMLHPRSSVMRLYIPRKCGGRGFLNAKDLHNREVYNLRNYFLNNECGMHRDVVAVDRNLTPLSLANENWRKPVVLSTADRKAAWESKALHGRFYKALTGPDVDLLASVNWLRFGDLFGETEGFACAIADEVMMTNNYRKYILKDGTVDICRACRRPGESLRHIISGCSHLANGEYLHRHNLVARIIHQQLALLYGLVDCEVPYYKYLPAPVLENGRATLYWDRSIITDRTIVANKPDIVLIDRSQRRAVLADVTIPHDENLVKAEKDKSSKYLDLAHEITAMWDVDSTIIVPIVVSANGLIAKSLDQHLERLSLGGWIKGQMQKAVILDTARIVRRFLTLRP

SEQ ID NO: 5573 - protein, 1210 aa, Cydia splendana
MITRSQRRAAELTNNARPPPPPAPPSSSSTTSSGDEFATAPDTDGSSDESGPPPPPPRPPARRGRPPLPARLGPAGHPAPPTAPAAGGIVRRMRWTRNMNENVMRAYYGAAEGGTQLSAYRSRILPLFQALEPTINVSEQRLSDQVRVIQRLKRLDDATLDRLRQEALSARADSTSVRDLPATSPTPVPAPDLAPGAPRVDFYTDEGDFASQNVNTTANEQLRRTLEEAITQYRVTTNSRPRLPRLPMNRRNLALMGALNALLEPHLRTSKDLDDTHSIMYCGAIAACRVARVKFPDTERAPRTVGGVPAWQARIERRIGSFRTLIAKLICFRGGNNRPRVMRFVNQAFAGTDIRPRDYMANVTERIDFLKQKVYAWANRIRRYRERVDRFQQNRLFQSDQRKVYRKWEEANLRAPDTQPPDATAMTDFWRSIWSVPVGHTEGGWMSVVERECESIEPMGAVTISPDDVSCAIRTAQNWKSPGPDGLHNFWLKWFRCSHSRLAVQFQQALELGSLPPSLTTGVTFLLYKSGSTTEAKNYRPITCLPTLYKLLTSILRAKINAHIVANNILASAQNGCRVGSRGTKELLLIDMTICQQIRRNKRALSAAWIDYKKAYDSVPHSWLGRVLELYKVDAALRAFLSACMRQWTTVLRQPGGGGDRSGPQDFIRIERGIFQGDSLSPLWFCLALNPLSTLLKDLGLGCRLRREGEVISHLLYMDDLKLFAPNSQDLLELLKTTEVFSSAIHMEFGVDKCAVMHVQRGRVVNSTNLQLSETMSFRSISESETYKYLGMSQSLGIEDEGIRRSVKERFFSRLTKVLNSLLSGGNKVRAFNAWVMPLLTYSFGILRWTQTELDALDRRVRSLLTAHRMLHPRSSVMRLYIPRKCGGRGFLNAKDLHNHEVYNLRNYFLNNECGMHRDVVAVDRNLTPLSLANENWRKPVVLSTADRKAAWESKVLHGRFYKALTGPDVDLLASVNWLRFGDLFGETEGFACAIADEVMMTNNYRKYILKDGTVDICRACRRPGESLRHIISGCSHLANGEYLHRHNLVARIIHQQLALLYDLVDREVPYYKYLPAPVLENGRATLYWDRSIITDRTIVANKPDIVIIDRSQRRAVLVDITIPHDENLVKAEKDKSSKYLDLAHEITAMWDVDSTIIVPIVVSVNGLIAKSLDQHLERLSLGGWIKGQMQKAVILDTARIVRRFLSLQP

SEQ ID NO: 5574 - protein, 963 aa, Cydia splendana
MNRRNLALMGALNALLEPHLRTSKDLDDTHSIMYCGAIAACRVARVKFPDAERAPRTAGGVPAWQVRIERRISSFRTLIAKLICFREGNNRPRVMRFVNQAFAGTDIRPRDYMANVTERIDFLKQKVYAWANRIRRYRERVDRFQQNRLFQSDQRKVYRKWEETNLRTPDTQPPDVTAMTDFWRSIWSVPVGHTEGGWMSVVERECESIEPMGAVTISPDDVSCAIRTAQNWKSPGPDGLHNFWLKWFRCSHSRLAAQFQQALELGSLPPSLTTGVTFLLYKSGSTTEAKNYRPITCLPTLYKLLTSILRAKINAHIIANNILASAQNGCRVGSRGTKELLLIDMTICQQIRRHKGALSAAWIDYKKAYDSVPHSWLGRVLELYKVDAALRAFLSACMRQWTTVLRQPGGGDDRPGPQDFIRIKRGIFQGDSLSPLWFCLALNPLSTLLKDLGLGCRLRREGVVISHLLYMDDLKLFAPNSQDLLELLKTTEVFSSAIHMEFGVDKCAVMHVQRGKVVNSTNLQLSETMSFRSISESETYKYLGMSQSLGIEDEGIRRSVKERFFSRLTKVLNSLLSGGNKVRAFNAWVMPLLTYSFGILRWTQTELDALDRRVRSLLTTHRMLHPRSSVMRLYIPRKCGGRGFLNAKDLHNREVYNLRNYFLNNECGMHRDVVAVDRNLTPLSLANENWRKPVVLSTADRKAAWESKVLHGRFYKALTGHDVDLLASVNWLRFGDLFGETEGFACAIADEVMMTNNYRKYILKDGTVDICRACRRPGESLRHIISGCSHLANGEYLHRHNLVARIIHQQLALLYGLVDREVPYYKYLPAPVLENGHATLYWDRSIITDRTIVANKPDIVIIDRSQRRAVLVDITIPHDENLVKAEKDKSSKYLDLAHEITAMWDVDSTIIVPIVVSVNGLIAKSLDQHLERLSLGGWIKGQMQKAVILDTARIVRRFLSLQP

SEQ ID NO: 5575 - protein, 1118 aa, Cydia splendana
MRWTRDMNENVMRAYYGATEGGTQLSAYRSRILPLFQALEPTITVSEQRLSDQVRVIQRLKRLDDATLDRLRQEALSARADPTSVRDLPATSPDPVPAPDLAPGAPRVDFSTDEGNFASQNVSTTANEQLRRTLEEAITQYRATTTSRPRLPRLPMNRRNLALMGALNALLEPYLRTSKDLYDTHSIMYCGAIAACRVARIKFPDAERAPRTAGGVPAWQARIERRISSFRTLIAKLICFRGGNNRPRVMRFVNQAFAGTDIRPRDYMANVTERIDFLKQKVYAWANRIRRYRERVDRFQQNRLFQSDQRKVYRRWEETNLRTPDTQPPDATAMTNFWRSIWSVPVGHTEGGWMSVVERECESIEPMGAVTISPDDVSCAIRTAQNWKSPGPDGLHNFWLKWFRCSHSRLAAQFQQALELGSLPPSLTTGVTFLLYKSGSTTEAKNYRPITCLPTLYKLLTSILRAKINAHIVANNILASAQNGCRVGSRGTKELLLIDMTICQQIRRTKGALSAAWIDYKKAYDSVPHSWLGRVLELYKVDAALRAFLSACMGQWTTVLRQPGGGDDQPGPQDFIRIERGIFQGDSLSPLWFCLALNPLSTLLKDLGLGCRLRREGEVISHLLYMDDLKLFAPNTQGLLELLKTTEVFSSAINMEFGVDKCAVMHVQRGRVVNSTNLQLSETMSFRSISESETYKYLGMSQSLGIEDEGIRRSVKERFFSRLTKVLNSLLSGGNKVRAFNAWVMPLLTYSFGILRWTQTELDALDRRVRSLLTTHRMLHPRSSVMRLYIPRKCGGRGFLNAKDLHNREVYNLRNYFLNNECGMHRDVVAVDRNLTPLSLANENWRKPVVLSTADRKAAWENKVLHGRFYKALTGPDVDLLASVNWLRFGDLFGETEGFACAIADEVMMTNNYRKYILKDGTVDICRACRRPGESLRHIISGCSHLANGEYLHRHNLVARIIHQQLALLYGLVDREVPYYKYLPAPVLENGRATLYWDRSIITDRTIVANKPDIVLIDRSQRRAVLADVTIPHDENLVKAEKDKSSKYLDLAHEITDMWDVDSTIIVPIVVSANGLIAKSLDQHLERLSLGGWIKGQMQKAVILDTARIVRRFLSLQP

SEQ ID NO: 5576 - protein, 1210 aa, Agriopis aurantiaria
MITRSKVKKNAAGTSTRPPPLPSSSDNSSGEEFLTPPETCSYSTSDEETTLPPPPPPVRRGRPPLPARLGPVGHPASRPAPATGGVVCRMRWTPSVNENCMRAYYEATEGGINLTAYRPRMLSLFQDLEPTVVVSAQRLSDQVRAIHRCKLLDDSVLDRLRLEELRARPTPALMRDPPVASSAPTLASLPASVATLAAPADPVVDEGDLTSNSVSDQVREQLRGALEDAISQYRFDPDSRPRLPRLPTHRRNLALMGALNALLAPYLRASEDLVDTHSILYCGAIAACRVARVKFPDTNRAPRTDGGVPAWQVRIERRISTFRTLIAKLICFRRGNNRPRVMRFVTQAFAGTDIRPQHYLANVMERIDYLKQKVYAWVNRIRRYRERVDRYWQNRLFQSDQRKVYRGWEETDQRVSDGQLPDASAMINFWRGIWSVPVEHTEGDWMRVVERECESIEPMRSILIDSIDVSCAIRTAQNWKSPGPDGLHNFWIKWIRCSHDRLATQFQEALELGSLPSFMTTGVTFLLHKSGSTTEAKNYRPITCLPTIYKLLTSILRNKINAHIVANNVLAHAQNGCRVGSRGTKELLLIDTAISQQVRRNKGALSAAWIDYKKAYDSVPHSWLERVLELYKIDTTLKSFLGACMRQWTTVLRQPGGGDGAFGPQDLLRIERGIFQGDSFSPLWFCLALNPLSTLLRDSGLGYRLRRDGQVISHLLYMDDLKLFTPKRQDLVELLKITEVFSSAIRMEFGVDKCAVMHVQRGKVVNSPNLQLSEVMTLRSLSEAETYKYLGMSESLGISVENIKKSVKERFFCRLTKVLNSLLSGGNKVRAFNGWVMPLLIYSFGILRWTQTELDALDRRVRQLLTLHRMLHPRSSVMRLYIPRKWGGRGFLNAKNLHNREVCSLRDFFRNSESGMHRDVVAVDRGLTALSLANENWRKPSVLSIEDRRDVWKGKELHGRFYRALTGPDVDLLASVNWLRFGDLFGETEGFACAIADEVIKTNNYRKYIMKDGTVDICRACHRPGESLRHIISGCSHLANGEYLHRHNLVARIIHQQLALRYSLVESEVPYYKYAPAPVLENGRALLYWDRSIITDRTIVANKPDIVLVDRSQRRAVLVDITIPHDENLVKAEKDKLSKYLDLAHEVTAMWDVDSTIIVPIVVSVNGLIAKSLDQHLKRLSLDGWVKGQMQKAVILDTARIVRRFLTLQP

SEQ ID NO: 5577 - protein, 1211 aa, Agriopis aurantiaria
MITRSKTKTAALRSAHPRPLATPSTSASSSSEDGDYLTSRDTSASSDGSGPSTPPPPLRPARRGRPALPARLGHVELPAPLSAPATGGVRRMRWTPVINENCMRAYYRATEGGTNLSAYRVRMLPLFQALEPTVTVSAQRLSDQVRAIQRCNLLDQSVLDRLRLEEVRTRPTPPSTRNPPVASSAPTLASRPASVVTLATLADPVVDEGDLVSGVSDQVREQLRGALEDAISQYRFTPVSRPRLPRLPTHRRNLALMGALNALLAPYLRASKDLVDTHSILYCGAIAACRVARVKFPDTNRAPRTVGRVPAWQVRIERRISTFRTLIAKLICFRRGNNRPRVMRFVTQAFAGTDIRPQHYLANVTERIDYLKQKVYAWANRIRRYRERVDRYWQNRLFQSDQRKVYRGWEETEQRVSDGQLPDASAMINFWRGIWSVPVEHTEGDWMRVVERECESIEPMGSILIDSVDVSCAIRTAQNWKSPGPDGLHNFWIKWIRCSHDRLATQFQEALELGSLPSFMTTGVTFLLHKSGSTTEAKNYRPITCLPTIYKLLTSILRNKINAHIVANNVLAHAQNGCRVGSRGTKELLLIDTAISQQVRRNRGALSAAWIDYKKAYDSVPHSWLERVLELYKIDTTLKSFLGACMRQWTTVLRQPGSGDGASGPQDLLRIERGIFQGDSFSPLWFCLALNPLSTLLRDSGLGYRLRRDGQVISHLLYMDDLKLFTPKRQDLMELLKITEVFSSAIKMEFGVDKCAVMHVQRGKVVNSPNLQLSETMTLRSLSEVETYKYLGMSESLGISVEDIKKSVKERFFCRLTKVLNSFLSGGNKVRAFNGWVMPLLIYSFGILRWTQTELDALDRRVRQLLTSHRMLHPRSSVMRLYIPRKWGGRGFLNAKNLHNREVCSLRDFFRNSESGMHRDVVAVDRGLTPLSLANENWRKPSVLSIEDRRDVWKGKELHGRFYRALTGPDVDLLSSVNWLRFGDLFGETEGFACAIADEVIKTNNYRKYIMKDGTVDICRACHRPGESLRHIISGCSHLANGEYLHRHNQVARIIHQQLALRYGLVESEVPYYKYAPAPVLENGRALLYWDRSIITDRTIVANKPDIVLVDRSQRRAVLVDITIPHDENLVKAEKDKLSKYLDLAHEVTAMWNVDSTIIVPIVVSVNGLIAKSLDQHLKRLSLDGWVKGQMQKAVILDTARIVRRFLTLQP

SEQ ID NO: 5578 - protein, 1208 aa, Ennomos fuscantarius
MILRSKTKTADNKCARLPPLPVSSSPSSSSGDEYATPPDTTASSDDDGLPSPPPPPPPARRGRPPLPARLGPVGQPAPRPAPATGGVVRRMRWTQTMNENCMRAYYGATEGGSSLTAYRDRMLSLFQELEPSISVSAQRLSDQVRAIHRCKLLDQSALDRLRLETLPIPATSPSPRVLSAALPDPGPIVGPPLVTPLGGPVIDGEESVSDSVSTQVNEQLRSALEDAILRYRSTPTSRPRLPRLPTNRRNLVLMGALNTLLGPYLRTSEDLVDTHSILYCGAIAVCRVARVKFPDTDRAPRPADGAPAWQVRIEKRITTFRTLIAKLVCFSRGNHRPRVMRFVTQAFAGTGIRPQDYMACVTERIDFLKQKVYAWASRIRRYRERVDRYQMNRLFQSDQRKVYRDWEGTGQRVVDGQLPDANVMNEFWRSIWSVPVDHSEGDWIRVVKHVCEPIESMGSITIDPEDISCAIRTAQNWKSPGPDGLHNFWIKWIRCSYPCLAIQFQEALEAGSLPKFMTTGITFLLHKSGSTMEAKNYRPITCLPTLYKLLTSILRTKINSHITANNILASAQNGCRVGSRGTKELLLIDTAICQQVRRNGGALSTAWIDYKKAYDLVPHSWLKRVLELYKINATLRSFLSACMGQWTTVLRPPGGGDSVSDPQNFIRIERGIFQGDSLSPLWFCLALNPLSTLLGDSGLGYRLRRGGEIISHLLYMDDLKLFAPQRPQLMKLLKITENFSNSIKMEFGVDKCAVMHVHGGKVVNSTNLQLSETMTLRSLSESETYKYLGMSESLGISVGDVKQSVKERFFCRLTKVLNSLLSGGNRARAFNAWVMPLLMYSFGILRWTQTELDALDRKVRQVLTSHRMLHPRSSVMRLYIPRKWGGRGFLNAKNLHNREMYSLREYFLSNECGMHRDVVAVDKGLTPLSLANENWRKPVVLSTDDRRDVWKGRELHGRFYRALTGPDVDLHASVNWLRFGDLFGETEGFVCAIADEVIKTNNYRKYIMKDGTVDICRACRRPGESLRHIISGCSHLANGEYLHRHNLVARIIHQQLALQYGLVESEVPYYKYTPGPVLENGRALLYWDRSIITDRTIVANKPDIVLIDRSQRRAVLVDIAIPHDENLVKAEKDKLSKYLDLAHEVTAMWSVDSTSIVPIVVSANGLIAKSLDQHLERLSLDGWIKGQIQKAVLLDTARIVRRFLTLEP

SEQ ID NO: 5579 - protein, 869 aa, Hedya salicella
MRYVAQAFAGTDVSSCDYMACVTERIDFLKQKVYAWASRIRRYRERVDRFQQNRLFQSDQRKVYRKWEGTDQRVTDGRLPDPTAMSNFWRSIWSVPVEHTEGEWMNVVERECEPIEAMGAVTISPDDVSCAARTTQNWKSPGPDGLHNFWVKWFRCSHERLATQFQQALELGSLPSFLTTGVTFLLYKSGSTTEAKNYRPITCLPTLYKLLTSILRAKINTHIVANNVLAFSQNGCRVGSRGTKELLLIDTTICQQVRRSRGSLSAAWIDYKKAYDSVPHSWLERILELYKVDTALRSFLGACMRQWTTVLCQPGGRDARPAPQDFIRIKRGIFQGDSLSPLWFCLALNPLSTLLKDSGLGCRLRRGGEIISHLMYMDDLKLFAPKRPELVELLKVTDTFSSAIKMEFGVDKCAVMHVQRGKVVNSTNLELSETMSLRSLSETETYKYLGMSQALSIADGDIRQAVKERFFCRLTKVLNSLLSGGNKARAFNAWVMPLLTYSFGILRWTQTELDALDRRVRMLLTTHRMLHPRSSVMRLYIPRKCGGRGFLNAKDLHNREVCSLREYFLNNECGIHRDVVAVDKGLTPLSLANENWRRPTVLSTVDRKDVWKSKELHGRFYKALTGPDVDLLASVNWLRFGDLFGETEGFSCAIADEVIMTNNYRRYILKDGTVDICRACRRPGESLRHIMSGCSHLANGEYLHRHNQVAKIIHQQLAVKYDLVGSEVPYYKYVPMPVLENGRATLYWDRSILTDRTIVANKPDIVLVDRSKRRAMLVDITIPHDENLVKAEKDKLSKYLDLAHEATAMWDVDSTIIVPIVVSVNGLIAKSLDEHLKRLSLDGWIKGQIQKAVILDTARIVRRFLSVQP

SEQ ID NO: 5580 - protein, 1170 aa, Erannis defoliaria
MSSEDVSGPRTLTPPIPVRRGRPPLPARLGPAGQPASRPALAAGGVVRRMRWSQTNNENCMRAYYGATEGGTNLTAYRVRMLSLFQTLEPTVTVSAQRISDQVRAIQRLNLLDQPLLDRLRLEVQSARPTPASTRDLDVASSAPTLASVPTSAATLATSADPVLDEGDCTGMSVSTQVSEQLRRALEDAIGQYRFALNSRPRLPRLPTHRRNLALMGALNALLAPYLRASEDLTDTHSILYCGAIAAYRVARVKFPDTNRAPRPAGDVPAWQLRIERRISTFRTLIAKLICFSRGNNRPRVMRFVTQAFAGTGIRPQQYMASVTERIYYLKQKVYAWANRIRRYRERVDRYWQNRLFQSDQRKVYRNWEGTEQRVSDGQLPDASAMTNFWRGIWSVPVEHTEGDWMRVVERECESIEPMGSILIDPVDVSCAIRTAQNWKSPGPDGLHNFWIKWFRCSHDRLATQFQEALELGSLPSFMTTGVTFLLHKSGSTTEPKNYRPITCLPTIYKLLTSILSTKINAHIVANNVLAPAQNGYRVGSRGTKELLLIDMAISQQVRRNKGALSAAWINYKKAYDSVPHSWLERILELYQIDTTLKSFLGACMRQWTTVLRQPGGGNGSSDSQDLIRIERGIFQGDSLSPSWFCLALNPLSTLLKDSGLGYRLRRGGEVISHLLYMDDLKLFAPKHQDLLELLKTTQVFSSAIRMEFGVDKCAVMRVQRGKVVNSPDLQLSEIMTLRSLSEAETYKYLGMSESLGISVVDIKKSVKERFFCRLTKVLNSLLSGGNKARAFNGWVMPLLIYSFGILRWTQTELDALDRRVRQLLTAHRMLHPRSSVMRLYIPRKWAGRGFLNAKNLHNREVCSLRDYFLNNECGMHRDVVTVDKGLTPLSLANENWRRPSVISTDDRKEVWKSKELHGRFYRALTGPDVDLLASANWLRFGDLFGETEGFACAIADEVIKTNNYRKYIMKDGTVDICRACHRPGESLRHIISGCSHLANGEYLHRHNQVARIIHQQLALQYGLVESEVPYYKYAPAPVLENGRALLYWDRSIITDRTIVANKPDIVMVDRSQRRAVLVDVTIPHDENLVKAEKDKLSKYLDLAFEITAMWDVESTIIVPIVVSANGLIAKSLDQYLKRLSLDGWVKGQIQRAVVLDTARIVRRFLTLQP

SEQ ID NO: 5581 - protein, 1215 aa, Erannis defoliaria
MITRSKSTQAVNDNNARPPPPPAPSSPSASSGDDEFHTPRESSASSSGSDVSGPRTPAPRPPARRGRPPLPARLGPAGQPASRPALAAGGVVRRMRWSQINNENCMRAYYGATEGGINLSAYRVRMLPLFQALEPTVTVSAQRLSDQVRAIQRLNLLDQSLLDRLRLEAHSARPTPASTRDSHVASSAPTLASVPTSAATLATPADPVVDEGDCMSMIVSSQVSEQLRRTLEDAIGQYRFALNCRPRLPRLPTHRRNLALMGALNTLLAPYLRASEDLTDTHSILYCGAIAACRVARVKFPDTNRAPRPAGDVPAWQLRIERRISTFRTLIAKLICFSRGNNRPRVMRFVTQAFAGTGIRPQQYMASVTERIDYLKQKVYAWANRIRRYRERVDRYWQNRLFQSDQRKVYRNWEGNEQRVSDGQLPDASAMTNFWRGIWSVPVEHTEGDWMRVVERECESIEPMGSVLIDPVDVSCAIRTAQNWKSPGPDGLHNFWIKWFRCSHDRLATQFQEALELGSLPSFMTTGVTFLLHKSGSTTEPKNYRPITCLPTIYKLLTSILSTKINAHIVANNVLAPAQNGCRVGSRGTKELLLIDMAISQQVRRNKGALSAAWIDYKKAYDSVPHSWLERILELYQIDTTLKSFLGACMRQWTTVLRQPGGGNGSSDSQDLIRIERGIFQGDSLSPSWFCLALNPLSTLLKDSGLGYRLRRGGEVISHLLYMDDLKLFAPKHQDLLELLKTTQVFSSAICMEFGVDKCAVMRVQRGKVVNSPDLQLSEIMTLRSLSEAETYKYLGMSESLGISVVDIKKSVKERFFCRLTKVLNSLLSGGNKARAFNGWVMPLLIYSFGILRWTQTELDALDRRVRQLLTAHRMLHPRSSVMRLYIPRKWGGRGFLNAKNLHNREVCSLRDYFLNNECGMHRDVVTVDKGLTPLSLANENWRTPSVLSTDDRKEVWKSKELHGRFYRVLSGPDVDLLASVNWLRFGDLFGETEGFACAIADEVIKTNNYRKYIMKDGTVDICRACHRPGESLRHIISGCSHLANGEYLHRHNQVARIIHQQLALQYGLVESEVPYYKYAPAPVLENGRALLYWDRSIITDRTIVANKPDIVMVDRSQRRAVLVDVTIPHDENLVKAEKDKLSKYLDLAFEITAMWDVDSTIIVPIVVSANGLIAKSLDQYLKRLSLDGWVKGQIQKAVVLDTARIVRRFLTLQP

SEQ ID NO: 5582 - protein, 1215 aa, Erannis defoliaria
MITRSKANIAAAETNARPPSPPAPSSPSASSGDDEFLTPRESSATSSDSDVSGPRTPAPPPPVRRGRPPLPARLGPAGLPASRPALAAGGVVRRMRWSQINNENCMRAYYGATEGGTNLSAYRVRMLPLFQALEPTVTVSAQRLSDQVRAIQRLNLLDQSLLDRLRLEAQSARATPASTRDSHVASSAPTLASMPTSAATLATPADPVVDEGDCTSMSVSSQVSEQLRRALEDAICQYRFALNSRPRLPRLPTHRRNLALMGALNALLAPYLRASKDLTDTHSILYCGAIAACRVARVRFPDTNRAPRTVGDVPAWQVRIERRISTFRTLIAKLICFSRGNNRPRVMRFVTQAFSGTGLRPQQYMASVTERIDYLKQKVYAWANRIRRYRERVDRYWQNRLFQSDQRKVYRYWEGAAQRVNDGHLPDANAMTNFWRSIWSVPVEHTEGDWMRVVERECEAIEPMGPILIDPVDVSCAIRTAQNWKSPGPDGLHNFWIKWFRCSHNRLATQFQEALELGSLPSFMTTGITFLLHKSGSTTEPKNYRPITCLPTIYKLLTSILSTKINAHIIANNVLAPAQNGCRVGSRGTKELLLIDMAISQQVRRSKGALSAAWIDYKKAYDSVPHSWLERILELYQIDTTLKSFLSACMRQWTTVLRQPGGGNDSSDPQDLIRIERGIFQGDSLSPSWFCLALNPLSTLLKDSGLGYRLRRGSEVISHLLYMDDLKLFAPKHQDLLELLKTTQVFSSAIRMEFGVDKCAVMRVQRGKVVNSPDLQLSEIMTLRSLSEAETYKYLGMSESLGISVVDIKKSVKERFFCRLTKVLNSLLSGGNKARAFNGWVMPLLIYSFGILRWTQTELDALDRRVRQLLTAHRMLHPRSSVMRLYIPRKWGGRGFLNAKNLHNCEVCSLRDYFLNNECGMHRDVVTVDKGLTPLSLANENWRRPSVLSTDDRKEVWKSKELHGRFYRALTGSDVDLLASVNWLRFGDLFGETEGFACAIADEVIKTNNYRKYIMKDGTVDICRACHRPGESLRHIISGCSHLANGEYLHRHNQVARIIHQQLALQYGLVESEVPYYKYAPAPVLENGRVLLYWDRSIITDRTIVANKPDIVMVDRSQRQAVLVDVTIPHDENLVKAEKDKLSKYLDLAFEITAMWDVDSTIIVPIVVSANGLIAKSLDQYLKRLSLDGWVKGQIQKAVVLDTARIVRRFLTLQP

SEQ ID NO: 5583 - protein, 1215 aa, Biston betularia
MWTRSRTAAASGLHDAHIPSPPAPSTPSASSGDEEFATPLATSASSSSSDVSGPRTPAPPPPARRGRPPLPARLGPAGQSASRSALAAGGVVRRMRWSQTNNENCMRAYYGATEGGINLSAYRVRMLPLFQALEPTVAVSTQRLSDQVRAIQRLQLLDQSVLDRLRLEALPARPTPVSTRDSPVASSAPTLVSVPTSMATLATPTDPVVDVGECTSMGVCSQVSEHLRRTLEDAICQYRFAPDSRPRLPRLPTHRRNLALMGALNALLAPYLRASEDLTDTHSILYCGAIAACRVARVKFPDTNRAPRPAGGVPAWQLRIERRISTFRTLIAKLICFSRGNNRPRVMRFVTQAFAGTGIRPQHYLASVTERIDYLKQKVYAWANRIRRYRERADRYWQNRVFQSDQRKVYRDWEGTGQRVSDRQLPDTSVMTEFWRGIWSLPVEHTEGDWMRVVERECESIESMGSVLIDPVDVSCAIRTAQNWKSPGPDGLHNFWIKWIRCSHDRLATQFQEALELGSLPCFMTTGVTFLLHKTGSTTEAKNYRPITCLPTIYKLLTSILRTKINAHVVANNVLAPAQNGCRVGSRGTKELLLIDMTISQQVRRNKGALSTAWIDYKKAYDSVPHSWLERVLELYKIDTTLKSFLGACMRQWTTVLRQPGSGDGSSEPQDLIRIERGIFQGDSLSPLWFCLALNPLSTLLKESGLGHRLRRGGEVISHLLYMDDLKLFAPKRPDLMELLKTTQVFSNAIKMEFGVDKCAVMHVQLGEVVNCPDLQLSETMTFRSLSEAETYKYLGMSESLGIAVVDIKRSVKERFFCRLTKVLNSFLSGGNKVRAFNGWVMPLLIYSFGILRWTQTELDALDRRVRQQLTTHRMLHPRSSVMRLYIPRKLGGRGFLSAKNLHNREVCSLRDYFRDNECGMHRDVVAVDKGLTPLSLANENWRKPSVLSTEDRKEVWKSKQLHGQFYRVLTGPDVDMLASVNWLRFGDLFGETEGFACAIADEVIKTNNYRKYIMKDGTVDICRACHRPGESLRHIISGCSHLANGEYLHRHNQVARIIHQQLALQYGLVESEVPYYKYAPAPVLENGRALLYWDRSIITDRTIVANKPDIVVVDRAQRRAVLVDITIPHDENLVKAEKDKLSKYLDLAHEITAMWDVDSTIIVPIVVTVNGLIAKSLDQHLERLSLDGWVKGQLQKAVILDTARIVRRFLTLQP

SEQ ID NO: 5584 - protein, 1202 aa, Anthocharis cardamines
MLTRNRARGQLQRSARPTPSSALSSSGSTSSSADYIMPPTSLTSSDEERQRPSPSRPRSSRRGRRPPPACLGSSGQQAPSAAPAAGGLVRRMRWTIQLNESVMRAYYGATEGGINLTGYRSRMLPLFQALEPATNVGAQRLSDQVRVILRNKLLNESVLERLRAEVTTSQPPVIMLPVPADVLPQGDVSVDVVACGGDESDQVTSQDKEHMRIILRDTIEQYRFVPALDRPSIPHLPMHRRNMAVVGVLDGFLQPYFANSQNLADTHSILYCGAVAVCRVARLKFPDRERVSRASGVPVWQSRIECRISVARTLIAKLICFRGGNTRPRIMRFVSQAFVGTNIRPENYMEWVTERIDFLKQKVYAWANRIRRYRARAERYNVNRVFQINQRKVYRSWEKSDQGGVGRRFPDANVMSSFWRGIWSSPVNHTEGTWIGTVDRACESIQLMENVIISPHDIDCAIRSAQNWKCPGPDGLHNFWLKWFRSAHTTLAVQLQDAIDCGSLPTFITTGRTFLLHKSGCTTDPKNYRPITCLPTIYKLLTSILTTKIYMHIEANNILAQAQNGCRPGSRGTKELLLIDMTISQQVRRARRNLSVAWIDYKKAYDSVPHSWLVRVLELYKVNTTLKIFLESCMRHWCTVLCWPGNGDVSFDPTNLVRIERGIFQGDSLSPLWFCLALNPLSILLKDSGLGYRLRREGEIISHLLYMDDLKLFTLKKPDLVRLLKVANDFSRSIGMEFGVEKCAIMHVERGRVVNSQDLQLSQEITLKSLSQAETYRYLGMSESLGIANADIKQVVKDRFFGRLTKVLNSLLSGGNKVRAFNAWVLPVLVYSFGILRWTQTELDAVDVRVRRQLTLHRMHHPRSSVMRLYIPRKCGGRGFLNAKNQHNREICNLRQYFMASVGRMQRDVVAVDKGLTPLSLANQNWRMPPVLSTADREEIWKSKELHGRFYRALHGSDVDLLSSVSWLRFGDLFGETEGFVCAITDEVMMTNNYRKYILRDGTIDICRACHRPGESLRHIISGCSHLANGEYLHRHNQVAKILHQQLALSYGLAGTEVPYYKYTPLPVLENGRATLYWDRSIITDRFIAANKPDIVLIDRVARRALLVDVTVPHDENLVKAEKDKLSKYLDLAHEISSMWDVDSTIIVPIVISAHGLIAKSFDQHLKKLSLGCWVKGQMQKAVLLDTARIVRRFLSLPPPHQ

SEQ ID NO: 5585 - protein, 1244 aa, Blastobasis lacticolella
MKPAHFCNNFYLRVECIIIIIIIIIITNNATKHIKTRKMITRSKRKNQTVNAQPPPTPAPVSSSPSSSNDEFTTASDTSESSDERGLSAAPPPPPARRGRPLPARLGPTGRPAPPMAPATGGVVRRMRWTQSINENVMRAYYGATEGGTNLSAYRDRMLPLFQVLEPAIDVTAQRLSDQVRAIQRLKRLDDSVLDRLRLESLPVRAVPISTMSLPATSPPQVSPPSPAPRVPRTDATVGVEDCTNVSSVSTETNEYVRRTLEETIARYRFAPNSRPRLPRLPTNRRNLALMGAINVLLDSYIRASDNLVDTHSIMYCGAITACRVARVKFSDADRAPRVAGAPAWQKRIERRINTSRTLIAKLICFKEGNNRPRVMRFVDQAFAGTGISSRDYMVCATERIDFLKQKVCAWANRIRRYRERVDRFRLNRLFQSDQRKVYRKWEGTNQSGSDGSLPDASASNNFWRSIWSVPVEHSEGDWMNVVKRECEIIEPMAAVSICPEDVSCAIDTAQNWKCPGPDGLHNFWIKWFRCSHERLATQFQEALEHGSLPTLFTTGITFLLYKSGSTTEAKNYRPITCLPTLYKLLTSILRKKINNHIIENNILAMSQNGCRVGSRGTKELLLIDMTICQQVRRSRGSLSAAWIDYKKAYDSVPHSWLRRVLELYKINATLRSFLDACMRQWITVLSQPVGGIDHSPPQDFIRIERGIFQGDSLSPLWFCLALNPLSTLLKHSELGCRLRREGEVISHLLYMDDLKLFAPKRQDLMELLKITEIFSNAIRMEFGADKCAVMHVQRGKVANTTNLQLSETMSFRSLSEAETYKYLGMSQSLGIVDEGVKQAVKERFFCRLTKVLNSLLSGGNKVRSFNAWVMPLLTYSFGILRWTQTELDALDRRVRLLLTTHRMLHPRSSVMRLYIPRKCGGRGFLSAKTLHNREVCSLRDYFLNNECGMHRAVVAVDRGLTPLSLANENWRKPKVLSTIDRKDVWKSKELHGRFYRALTGPDVDLLASVNWLRFGDLFGETEGFVCAIADEVIMTNNYRRYILKDGTVDICRACRCPGESLRHITSGCGRLANGEYLHRHNLVARIIHQQLALQYGLVESEVPYYKYVPAPVLENGLATLYWDRSVITDRTIVANRPDIVLTDRSKRRAVLVDVTIPHDGNLVKAEKDKQCKYLDLAHEVTAMWDVDSTIIVPIVVSVNGLIAKSLDQHLKSLSLDGWVKGQIQKAVLLETARIVRRFLSLQP

SEQ ID NO: 5586 - protein, 1207 aa, Blastobasis lacticolella
MITRSKRKNQTVNAQPPPTPAPVSSSPSSSNDEFTTASDTSESSDERGLSAAPPPPPARRGRPLPARLGPTGRPAPPMAPATGSVVRRMRWTQSINENVMRAYYGATEGGTNLSAYRDRMLPLFQVLEPAIDVTAQRLSDQVRAIQRLKRLDDSVLDRLRLESLPVRAVPISTMSLPATSPPQVSPPSPAPRVPRTDATVGVEDCTNVSSVSTETNEYVRRTLEETIARYRFAPNSRPRLPRLPTNRRNLALMGAINVLLDSYIRASDNLVDTHSIMYCGAITACRVARAKFSDADRAPRVAGGAPAWQKRIERRINTFRTLIAKLICFKEGNNRPRVMRFVDQAFAGTGISSRDYMACATERIDFLKQKVCAWANRIRRYRERVDRFRLNRLFQSDQRKVYRKWEGTNQSGSDGSLPDASASNNFWRSIWSVPVEHSEGDWMNVVKRECEIIEPMAAVSICPEDVSCAIDTAQNWKCPGPDGLHNFWIKWFRCSHERLATQFQEALEHGSLPTLFTTGITFLLYKSGSTTEAKNYRPITCLPTLYKLLTSILRKKINNHIIENNILAMSQNGCRVGSRGTKELLLIDMTICQQVRRSRGSLSAAWIDYKKAYDSVPHSWLRRVLELYKINATLRSFLDACMRQWITVLSQPVGGIDHSPPQDFIRIERGIFQGDSLSPLWFCLALNPLSTLLKHSELGCRLRREGEVISHLLYMDDLKLFAPKRQDLMELLKITEIFSNAIRMEFGADKCAVMHVQRGKVANTTNLQLSETMSFRSLSEAETYKYLGMSQSLGIVDEGVKQAVKERFFCRLTKVLNSLLSGGNKVRSFNAWVMPLLTYSFGILRWTQTELDALDRRVRLLLTTHRMLHPRSSVMRLYIPRKCGGRGFLSAKTLHNREVCSLRDYFLNNECGMHRAVVAVDRGLTPLSLANENWRKPKVLSTIDRKDVWKSKELHGRFYRALTGPDVDLLASVNWLRFGDLFGETEGFVCAIADEVIMTNNYRRYILKDGTVDICRACRCPGESLRHITSGCGRLANGEYLHRHNLVARIIHQQLALQYGLVEFEVPYYKYVPAPVLENGLATLYWDRSVITDRTIVANRPDIVLTDRSKRRAVLVDVTIPHDGNLVKAEKDKQCKYLDLAHEVTAMWDVDSTIIVPIVVSVNGLIAKSLDQHLKSLSLDGWVKGQIQKAVLLETARIVRRFLSLQP

SEQ ID NO: 5587 - protein, 1181 aa, Apotomis turbidana
MSATFRIRAWTNNETLAPSFSSFTISELSNNNNNSGRPPLPACLGPTGQSAPTTAPATGGVVRRMRWTQVMNENCMRAYYGATEGGINLSAYRDRMLPLFLAFDPTITVSAQRLSDQVRFIQRRKLLDDATLDRLRLEVLAARAASTPARDTPATSPVPVPAPNLVPGVRQTDPEADGEDDASSVSTQANEQLRRALEEAIERYRSTPESRPRLPRLPMHKRNLALMGALDALLDPYLRASEDLADTHSIMYCGAIAACRVARVRFPDTDRAPRTAGGVPAWQVRIERRISSFRTFIAKLICFRGGNNRPRVMRYVTQAFAGTGTRPCDYMACFTERIDYLKQKVYAWASRIRRYRERVDRFQQNRLFQSDQRKVYRKWEGTNQCVSDGQLPDPTAMINFWRSIWSVPVEHTEGEWMNVVRRECEPIEAMGAVTISPDDVSCAARKAQNWKSPGPDGLHNFWIKWFRSSHERLATQFQDALELGSLPSFMTTGVTFLLHKSGSTTEAKNYRPITCLPTLYKLLTSILKTKINSHIVANNVLAFSQNGCRVGSRGTKELLLIDTTICQQVRRNRGSLSTAWIDYKKAYDSVPHSWLERILELYKIDTALRSLLGACMRQWTTVLRQPGGGDGPPGPRDLIRIERGIFQGDSLSPLWFCLALNPLSTLLKDSGLGCRLRRGGEVISHLLYMDDLKLYAPKRQDLVELLEVTENFSSAIKMEFGVDKCAVMHVQRGKVVNSANLQLSETMTLRSISEVETYKYLGMSQSLGIADGDIRQALKERFFCRLTKVLNSLLSGGNKARAFNTWVMPLLTYSFGILRWTQTELDALDTRVRQLLTTHRMRHPRSSVMRMYIPRKCGGRGFLNAKDLHNREVCSLREYFLNNECGIHRDVVAVDKGLTSLSLANENWRRPKVLSTDDRRAVWKSKELHGRFYKALTGPDVDLLASVNWLRFGDLFGETEGFVCAIADEVMMTNNYRRYILKDGTVDICRACRRPGESLRHIISGCSHLANGEYLHRHNQVARIIHQQLALQYGLVGSEVPYYKYAPMPVLENGRATLYWDRSIITDRTIVANKPDIVLVDRSKRQAVLVDITIPHDENLVKAEKDKLSKYLDLAHEVTAMWDVDSTIIVPIVVSANGLIAKSLYKHLKRLSLDGWIKGQIQKAVLLDTARIVRRFLSLQP

SEQ ID NO: 5588 - protein, 1015 aa, Apotomis turbidana
MLIMTYEDILNGVTDIKKKHREIAFLITDDTKNIIIIIIIITDSRPRLPRLPMHKRNLALMGALDALLDPYLRASEDLADTHSIMYCGAIAACRVARVRFPDTDRAPRTAGGVPAWQVRIERRISSFRTLIAKLICFRGGNNRPRVMRYVTQAFAGTGIRPCDYMACVTERIDYLKQKVYAWANRIRRYRERVDRFQQNRLFQSDQRKVYRKWEGTDQCVTDGQLPDPTAMINFWRSIWSVPVEHTEGEWMNVVRRECEPIENMGAVTISPDDVSCAVRTTQNWKSPGPDGLHNFWIKWFRSSHERLATQFQDALELGSLPSFMTTGATFLLYKSGSTTEAKNYRPITCLPTLYKLLTSILRTKINTHIVANNVLAFSQNGCRVGSRGTKELLLIDTTICQQVRRNRGSLSATWIDYKKAYDSVPHSWLERILELYKIDTALRSLLSSCMRQWTTVLRQPGVRDGPPGPQDLIRIERGIFQGDSLSPLWFCLALNPLSTLLKDSGLGCRLRRGGEVISHLLYMDDLKLYAPKRQDLVELLEVTETFSSAIKMEFGVDKCAVMHVQRGKVVNSANLQLSETMSLRSISEVETYKYLGMSQSLGIADGDIRQALKERFFCRLTKVLNSLLSGGNKARAFNAWVMPLLTYSFGILRWTQTELDALDTRVRQLLTTHRMRHPRSSVMRMYIPRKCGGRGFLNAKDLHNREVCSLREYFLNNECGIHRDVVAVDKGLTSLSLANENWRRPKVLSTDDRKAVWKSKELHGRFYKALTGPDVDLLASVNWLRFGDLFGETEGFVCAIADEVMMTNNYRRYILKDGTVDICRACRRPGESLRHIISGCSHLANGEYLHRHNQVARIIHQQLALRYGLVGSEVPYYKYAPMPVLENGRATLYWDRSIITDRTIVANKPDIVLVDRSKRQAVLVDITIPHDENLVKAEKDKLSKYLDLAHEVTAIWDVDSTIIVPIVVSANGLIAKSLDKHLKRLSLDGWIKGQIQKAVLLDTARIVRRFLSLQP

SEQ ID NO: 5589 - protein, 1207 aa, Apotomis turbidana
MITRSRQKKAEQTNARPPPPPASSSSSPSSSGDEFATAADTSESSDERGPPPPPPQPPARRGRPQLPARLGPTGQPAPTTAPATGGVVRRMRWTRVMNENCMRAYYGATEGGINLSAYRDRMLPLFQVFDPTIAVSAQRLSDQVRFIQRRKLLDDATLDRLRLEVLAARAASVPARDPPATSPVPAPAPNLVPGVPLTDPEADVEDYASSVSTQANEQLRRALEEAIGRYRSAPEPRPRLPRLPIHKRNLALMGALDALLDPYLRASEDLADTHSIMYCGAIAACRVARVRFPDTDRAPRTARGVPAWQVRIERRISSFRTLIAKLICFRGGNNRPRVMRYVTQAFAGTGTRPCDYMACVTERIDYLKQKVYAWASRIRRYRERVDRFQQNRLFQSDQRKVYRKWEGADQCVSDGQLPDPTAMINFWRSIWSVPVEHTEGEWMNVVRRECEPIEAMGAATISPDDVRCAARTIQNWKSPGPDGLHNFWIKWFRSSHERLATQFQDALELGSLPSFMTTGVTFLLHKSGSTTEAKNYRPITCLPTLYKLLTSILRTKINTHIVANNVLAFSQNGCRVGSRGTKELLLIDTTICQQVRRNRGSLSAAWIDYKKAYDSVPHSWLERILELYKIDTTLRSLLGACMRQWTTVLRQPGGGDGPPGPQDLIRIERGIFQGDSLSPLWFCLALNPLSTLLKDSGLGCRLRRGGEVISHLLYMDDLKLYAPKRQDLVELLEVTEAFSSAIKMEFGVDKCAVMHVQRGKVVNSANLQLSETMSLRSISEVETYKYLGMSQSLGIADGDIRQALKERFFCRLTKVLNSLLSGGNKVRAFNAWVMPLLTYSFGILRWTQTELDALDTRVRQLLTTHRMRHPRSSVMRMYIPRKCGGRGFLNAKDLHNREVCSLREYFLNNECGIHRDVVAVDKGLTPLSLANENWRRPKVLSTDDRRAVWKSKELHGRFYKALTGPDVDLLASVNWLRFGDLFGETEGFVCAIADEVMMTNNYRRYILKDGTVDICRACRRPGESLRHIISGCSHLANGEYLHRHNQVARIIHQQLALRYGLVGSEVPYYKYAPMPVLENGRATLYWDRSIITDRTIVANKPDIVLVDRSKRQAVLVDITIPHDENLVKAEKDKLSKYLDLAHEVTAMWDVDSTSIVPILVSANGLIAKSLDKHLKRLSLDGWIKGQIQKAVLLDTARIVRRFLSLQP

SEQ ID NO: 5590 - protein, 1206 aa, Notocelia uddmanniana
MNTRLRSRAEQRARLPSPPAPSSSSPSSSDDEFATAPDSSESSSDERGPSPPPPQTSARRGRRPLPARLGPTGHSAPPTAPAAGGVVRRMRWTQEMNENCMRAYFGATEGETNLSAYRVRMLPLFQALEPTITVSAQRLSDQVRVIQRNKRLDDLTLDRLRLEALSARAAPTSARDLPATSPAPVPAPNTAPRAPRVDPSADGDCADQSVSTQAHEQLRRALDEAITRYRSTPNSRPRLPRLPVNRRNLALMGALNDLLDPYLRASDDLIDTHSIMYCGAIAACRVARVKFPDADRATRTAGGVPAWQVRIERRINTFRTLIAKLICFRGGNNRPRVMRFVNQAFAGTGVRPRDYMACVTERIDFLKQKVYAWASRIRRYRERVDRYQQNRLFQSDQRKVYRKWEGTDHRVCDGQRPDATAMVNFWRSIWSVPVEHTEGAWIGVVERDCESIEPMGSVTISPEDVSCAIRTAPNWKSPGPDGLHNFWLKWFRCSHERLATQFQQALELGSLPPPLTTGVTSLLYKSGSTTEAKNYRPITCLPTLYKLLTSILRAKINTHIVTNNILAPAQNGCRVGSRGTKELLLIDMTICQRVRRNRGTLSASWIDYKKAYDSVPHSWLRRILELYKVDAALRSFLSACMGQWTTVLRQPGGGDGPSGPQDSIRIERGIFQGDSLSPLWFCLALNPLSTLLQDSGLGCQLRRGGEVISHLLYMDDLKLFAPNRQDLLELLKTTEVFSSAIKMEFGVDKCAVMHVQRGKVVNSTNLQLSETMSLRSLSESETYKYLGMSQALGIEGEGIKRAVKERFFCRLTKVLNSFLSGGNKARAFNAWVMPLLTYSFGILRWTQTELDALDRRVRVLLTAHRMLHPRSSVMRLYIPRKCGGRGFLNAKGLHNREVCSLRDYFLNGECGMHRDVVAVDASFTPLSMANENWRRFKVLSTEDRKAEWKSKELHGRFYRALTGPDVDLLASVNWLRFGDLFGETEGFVCAIADEVIMTNNYRKYILKDGTVDICRACRRPGESLRHIISGCSHLANGEYLHRHNLVARIIHQQLALSYGLVDFEVPYYKYLPAPVLENGRATLYWDRSIITDRTIVANKPDIVLIDRSKRQAVLVDITIPHDENLVKAEKDKVSKYLDLAHEVTAMWDVDSTIIVPLVVSANGLIAKSLDQHLKRLSLDGWVKGQIQKAVLLDTARIVRRFLSLSP

SEQ ID NO: 5591 - protein, 957 aa, Notocelia uddmanniana
MGALNNLLDPYLRASDDLIDTHSIMYCGAIAACRVARVKFPDADRATRTAGGVPAWQVRIERRINTFRTLIAKLICFRGGNNRPRVMRFVNQAFAGTGVRPRDYMACVTERIDFLKQKVYAWASRIRRYRERVDRYQQNRLFQSDQRKVYRKWEGTDHRVCDGQRPDATAMVNFWRSIWSVPVEHTEGAWIGVVERDCESIEPMGSVTISPEDVSCAIRTAPNWKSPGPDGLHNFWLKWFRCSHERLATQFQQALELGSLPPPLTTGVTSLLYKSGSTTEAKNYRPITCLPTLYKLLTSILRAKINTHIVTNNILAPAQNGCRVGSRGTKELLLIDMTICQRVRRNRGTLSASWIDYKKAYDSVPHSWLRRILELYKVDAALRSFLSACMGQWTTVLRQPGGGDGPSGPQDSIRIERGIFQGDSLSPLWFCLALNPLSTLLQDSGLGCQLRRGGEVISHLLYMDDLKLFAPNRQDLLELLKTTKVFSSAIKMEFGVDKCAVMHVQRGKVVNSTNLQLSETMSLRSLSEAETYKYLGMSQALGIEGEGIKQAVKERFFCRLTKVLNSFLSGGNKARAFNAWVIPLLTYSFGILRWTQTELDALDRRVRVLLTAHRMLHPRSSVMRLYIPRKCGGRGFLNAKDLHNREVCSLRDYFLNSKCGMHRDVVAVDASFTPLSMANENWRRFKVLSAEDRKAEWKSKELHGRFCRALTGPDVDLLASVNWLRFGDLFGETEGFVCAIADEVIMTNNYRKYILKDGTVDICRACRPPGESLRHIISGCSILANGEYLHRHNLVARIIHQQLALSYGLVDFEVPYYKYLPAPVLENGRATLYWDRSIITDRTIVANKPDIVLIDRSKRQAVLVDITIPHDEDLVKAEKDKVSKYLDLAHEVTAMWDVDSTIIVPIVVSANGLIAKSLDQHLKRLSLDGHGADSPEVPLSVALTTGGLGPASLPAAP

SEQ ID NO: 5592 - protein, 1208 aa, Crocallis elinguaria
MITRSRTKKAGTASARKTPPPASSSPSSSSGVEYGTPLDTSASSDEDGPPSPPPPPPPARRGRPPLPARLGPAGHSVPRAAPATGGIVRRMRWTSDMNENCMRAYYGATEGGTNMSAYRDRMLPLFQTLEPSVAVSTQRLSDQVRAIQRLKLLDESVLDRLRLEALPIRATSASARDLSVAPPVPAPLPAPSSVATLIDPVVDEDDCANISVSTQVNEQLRRALEDAILEYQYTPDSRPRLPRLPTNRRNLALMGALNVLLAPYLRASENLFDTHSIMYCGAIAVCRVARVKFPDADRAPRPAGSAPAWQVRIERRINTFRTLIAKLICFSRGNNRPRVMRFVNQAFAGTGIRPQNYMAGVTERIDFLKQKIYAWVNRIRRYRERVDRYHQNRLFESDQRKVYRNWEGTDQRVSDGQLPDTNAMINFWRGIWSVPVEHTEGDWMRTVEQSCESIETMGSVTIDPIDVSCAIRTAQNWKSPGPDGLHNFWIKWIRCSHECLAVQFQEALELGSLPRFLTTGVTSLLHKSGSTTEAKNYRPITCLPTLYKLLTSILRAKINSHVVANNILAPAQNGCRVGSRGTKELLLIDTAICQQVRRNKGALSTAWIDYKKAYDSVPHSWLERILELYKIDTTLRTFLSTCMRQWTTVLRQPGSGNSPSGPENFIKIERGIFQGDSLSPLWFCLALNPLSTLLRDSRLGCKLRREGEIISHLLYMDDLKLLAPKSPDLMKLLKITEIFSSAIKMEFGVDKCAVMHVQRGKVVNSDNLQLSETMTLRSLSEAETYRYLGMSQSLGITVGDIKQSVKERFFCRLTKVLNSLLSGGNKARAFNGWVMPLLIYSFGILKWTQTELDSLDRRVRQLLTYHRMLHPRSSVMRLYIPRKWGGRGFLNAKTLHNREVCSLREYFLNNECGMHRDVVAVDRNLTPLSLANENWHKPVVMTTEDRKEVWKGKELHGRFYRALTGSDVDLLASVNWLRFGDLFGETEGFVCAIMDEVIKTNNYRKYIMKDGTVDICRACRRPGESLRHIISGCSHLANGEYLHRHNLVARIIHQQIAFQYGLVESEVPYYKYAPAPVLENGRALLYWDRSIITDRTIVANKPDIVLVDRSQRRAVLVDITVPHDENLVKAEKDKLSKYLDLAHEVTAMWNVDSTIIVPIVVSANGLVAKSLDQHLKRLSLDGWIKGRMQKAVLLDTARIVRRFLTLQP

SEQ ID NO: 5593 - protein, 1213 aa, Peribatodes rhomboidaria
MITRSRTRKQQTAETESTRPPPPPSSSSASSSSEEEFVTPPDTTDSSDEEAAPTPAPPPPPARRGRPPLPARLGPAGRSAPPTAPATGGVVCRMRWTRTINENCMRAYYGATEGGTNLTAYRVRMLSLFQVLEPTVTVSTQRLSDQVRAIHRCKLLDQSVLDRLCLEAIRARPTPASTRDQPVASSAPTLASVPASAATLATLADTDVDGDRTSVSVSSQVSEHLRRTLEDAISQYRYAPDSRPRLPRLPTHRRNMALMGALNVLLAPYLRASENLTDTHSILYCGAIAACRVARVKFPDTNRAPRPAGGVPAWQVRIERRISTFRTLIAKLLCFSRGNTRPRVMRFVTQAFAGTDIRPQYYLANVTERIDYLKQKVYAWANRIRRYRERVDRYWQNRLFQSDQRKVYRGWEGTEQCVIDGHRPDASAMIDFWRGIWSVPVEHTEGEWMRIVERECESIESMESILIDSVDVSCAIRTAQNWKSSGPDGLHNFWIKWIRSSHDRLATQFQEALELCSLPSFMTTGVTFLLHKSGSTTDPKNYRPITCLPTIYKLLTSILRNKINTHIVANNVLAPAQNGCRVGSRGTKELLLIDMAISQQVRRNRGALSVAWIDYKKAYDSVPHSWLERVLELYKIDITLKSFLSACMRQWTTVLRQPGGGEVSADPQDLIRIERGIFQGDSLSPLWFCLALNPLSTLLKDLGLGHRLRRGGEVISHLLYMDDLKLFAPKRQDLMELLKTTEVFSSAIKMEFGVDKCAVMHVQRGKVVNSPNLQLSETMNLRSLSEVETYKYLGMSESLGISVVDIKKSIKERFFCRLTKVLNSLLSGGNKMRAFNGWVMPLLIYSFGILRWTQTELDALDRRVRQLLTTHRMLHPRSSVMRLYIPRKWGGRGMLNAKNLHNREVYRLRSFFRNNDCGMHCDVVAVDKGLTPLSLANENWRQPSVLSTEDRKNVWKGKELHGRFYRALTGPDVDLLASVNWLRFGDLFGETEGFACAIADEVIKTNNYRKYILKDGTVDICRACHRPGESLRHIISGCSHLANGEYLHRHNQVARIIHQQLALQYGLVESEVPYYKYAPASVLENGRALLYWDRSIITDRTIVANKPDIVLVDRSQRRAVLVDITIPHDENLVKAEKDKLSKYLDLAHEVTAMWDVDSTIIVPIVVTVNGLIAKSLDQHLKRLSLDGWIKGQIQKAVILDTCRIVRRFLTLQP

SEQ ID NO: 5594 - protein, 1209 aa, Pammene fasciana
MITRSRTKAASTNARPPSSPASSVSSPSSSGDEFATAPDTSESSDECGPPPPPPRPPARRGRPPLPARLGLAGHPVPPRAPAAGGIVRRMRWTPAMNENVMRAYYGATEGGTNLSAYRDRILPLFQALEPTIDTTAQRLSDQVRAIQRLKRLDDATLDRLRLEALSAHADSTSVRDPPATSPDPMPVPDLASGAPRIDPSADEEYIASQSMSSTANEQLRRTLEEAITQYRSTNIPRPRLPRLPMNRRNLALMGALNDLLDPILRTSKDLDDTHSIMYCGAIAACRVARVKFPDAERAPRTAGGVPVWQVRIERRINSFRTLIAKLICFRGGNNRPRVMRFVHQAFAGTGIEPRDYMANVTERIDFLKQKVYAWASRIRRYRERVDRFRQNRLFQSDQRKVYRRWEEADPRVSDVRLPDATAMTDFWRSIWSAPVEHTEGEWMSVVERECESIEPMGAITISPDDVSCAIRTAQNWKSPGPDGLHNFWLKWFRCSHSRLATQFQQALELGSLPPSLTTGVTFLLYKSGSTTEAKNYRPITCLPTLYKLLTSILRAKINAHIVANNILASSQNGCRVGSRGTKELLLIDMTICQRVRRNRGALSAAWIDYKKAYDSVPHSWLERILELYKVDAALRSFLGACMRQWTTVLRQPGGGDDPPGPHDFIRIERGIFQGDSLSPLWFCLALNPLSTLLKDSGLGCRLRREGEVISHLLYMDDLKLFAPNNRDLMELLKTTEVFSSSIKMEFGVDKCAVMHVQRGKVVNSTNLQLSETMTFRSISESETYKYLGMSQSLGIEDAGIKQALKERFFGRLTKVLNSLLSGGNKVRAFNAWVMPLLTYSFGILRWTQTELDALDRRVRLLLTTHRMLHPRSSVMRLYIPRKCGGRGFLNAKNLHNREVYNLRNYFLNNECGMHRDVVAVDKSLTPLSLANENWRKPVVLSTEDRKAVWKSKELHGRFYGALTGPDVDLLASVNWLRFGDLFGETEGFACAIADEVIMTNNYRRYILKDGTVDICRACRRPGESLRHIISGCSHLANGEYLHRHNLVARIIHQQLALLYGLVDHEVPYYKYTPAPVLENGRATLYWDRSIITDRTIVANKPDIVIIDRSQRRAMLVDITVPCDVNLVKAEKDKSSKYLDLAHEVTAMWEVDSAIIVPIVVSANGLIAKSLDQHLERLSLRGCGWIKGQIQKAVILDTARIVRRFLSLRP

SEQ ID NO: 5595 - protein, 1184 aa, Pammene fasciana
MITRSKARAATTHARPPSPLASSSSPSTSSSSDDFETAPDTDESSDESGPPPPPPQPPARRGRPPLPARLGPTGHPVPPRAPAAGGIVRRMRWTCSMNENVMRAYYGATEGGTNLCAYRARILPLFQALEPTIDTTTQRLSDQVRVIQRLKRLDDATLDRLRLEALSARAASTSARDPPATSPDPMPAPDLASGAPRIDPSADEEYIASQSVSSTANEQLRRTLEEAITQYRSTNIPRPRLPRLPMNRRNLALMGALNDLLDPILRTSKDLDDTHSIMYCGAIAACRVARIKFPDAERAPRTAGGVPAWQVRIERRINSFRTLIAKLICFRGGNNRPRVMRFVHQAFAGTDIEPRDYMANITERIDFLRQKVYAWASRIRRYRERVDRFRQNRLFQSDQRKVYRRWEEADPRVSDVRLPDATAMTDFWRSIWSAPVEHTEGEWMNVVERECESIEPMGAITISPDDVSCAIRTSQNWKSPGPDGLHNFWLKWFRCSHSRLATQFQHALELGSLPPSLTTGVTFLLYNSGSTTEAKNYRPITCLPTLYKLLTSILRAKINAHMVANNILASAQNGCRVGSRGTKELLLIDMTICQRVRRNRGALSAAWIDYKKAYDSVPHSWLERILELHKVDAALRSFLGACMRQWTTVLRQPGGGDDPPGPQDFIRIERGIFQGDSLSPLWFCLALNPLSTLLKDSGLGCRLRREGEVISHLLYMDDLKLFAPNNRDLLELLKTTEVFSSSIKMEFGVDKCAVMHVQRGKVVNSTNLQLSETMTFRSISESETYKYLGMSQSLGIEDVGIKQALKERFFGRLTKVLNSLLSGSNKVRAFNAWVMPLLTYSFGILRWTQTELDALDRRVRLLLTTHRMLHPRSSVMRLYIPRKCGGRGFLNAKNLHNREVYNLRNYFLNNECGMHRDVVTVDKNLTPLSLANENWRKPVVLSTEDRKAVWKSKELHGRFYGALTGPDVDLLASVNWLRFGDLFGETEGFACAIADEVIMTNNYRRYILKDGTVDICRACRRPGESLRHIISGCSHLANGEYLHRHNLVARIIHQQLALLYSLVAHEVPYYKYIPAPVLENDRATLYWDRSIITDRTIVANKPDIVVIDRPQRRAMLVDITVPCDVNLVKAEKDKSSKYLDLAHEVTAMWEVDSAIIVPIVVSANGLIAKSLDQHLERLSLRGCG

SEQ ID NO: 5596 - protein, 1212 aa, Pammene fasciana
MITRSKSRQQQASPPNARPPSSPASSVSSPSSSGDEFATAPDTSESSDECGPPPPPPRPPARRGRPPLPARLGLAGHPAPPRAPAAGGIVRRMRWTQTMNENVMRAYYGATEGGTNLCAYRVRLLPLYQALEPTTNVTAQRLSDQVRVIQRDKRLDDSTLDRLRLEALSAHAASTSVRDPPATAPDPMPAPDLASGAPRVDLSADEEEIATQSVSSTANEQLRRTLEEAITQYRSTNIPRPRLPRLPMNRRNLALMGALNDLLDPFLRTSKDLDDTHSIMYCGAIAACRVARVKFPDAERAPRTAGGVPAWQVRIERRINSFRTLIAKLICFRGGNNRPRVMRFVHQAFAGTDIEPRDYMANVTERIDFLKQKVYAWASRIRRYRERVDRFRQNRLFQSDQRKVYRRWEEADPRVSDVRRPDATAMSDFWRSIWSAPVEHTEGEWMSVVERECETIEPMGAITISPDDVSCAIRTAQNWKSPGPDGLHNFWLKWFRCSHSRLATQFQQALELGSLPPSLTTGVTFLLYKSGSTTEAKNYRPITCLPTLYKLLTSILRAKINAHMVANNILASAQNGCRVGSRGTKELLLIDMTICQRVRRNRGALSAAWIDYKKAYDSVPHSWLERILELYKIDAALRSFLGACMRQWTTVLRQPGGGDDPPGPQDFIRIERGIFQGDSLSPLWFCLALNPLSTLLKDSGLGCRLRREGEVISHLLYMDDLKLFAPNNRDLLELLKTTEVFSSSIKMEFGVDKCAVMHVQRGKVVNSTNLQLSETMTFRSISESETYKYLGMSQLLGIEDAGIKQALRERFFGRLTKVLNSLLSGGNKVRAFNAWVMPLLTYSFGILRWTQTELDALDRRVRQLLTTHRMLHPRSSVMRLYIPRKCGGRGFLNAKNLHNREVYNLRNYFLNNECGMHRDVVAIDKGLTPLSLANENWRKPVVLSTEDRKAVWKSKELHGRFYGALTGPDVDLLASVNWLRFGDLFGETEGFACAIADEVIMTNNYRRYILKDGTVDICRACRRPGESLRHIISGCSHLANGEYLHRHNLVARIIHQQLALLYGLVDHEVPYYKYTPAPVLENGRATLYWDRSIITDRTIVANKPDIVVIDRPQRRAMLVDITVPCDVNLVKAEKDKSSKYLDLAHEVTAMWEVDSAIIVPIVVSANGLIAKSLDQHLERLSLRGCGWIKGQIQKAVILDTARIVRRFLTLRP

SEQ ID NO: 5597 - protein, 1025 aa, Pammene fasciana
MPVPDLASRAPRIDPSADEEYIASQSMSSTANEQLRRTLEEAITQYRSTNIPRPRLPRLPMNRRNLALMGALNDLLDPILRTSKDLDDTHSIMYCGAIAACRVARVKFPDAERAPRTAGGVPVWQVRIERRINSFRTLIAKLICFRGGNNRPRVMRFVHQAFAGTGIEPRDYMANVTERIDFLKQKVYAWASRIRRYRERVDRFRQNRLFQSDQRKVYRRWEEADPRVSDVRLPDATAMADFWRSIWSAPVEHTEGEWMSVVERECESIEPMGAITISPDDVSCAIRTAQNWKSPGPDGLHNFWLKWFRCSHSRLATQFQQALELGSLPPSLTTGVTFLLYKSGSTTEAKNYRPITCLPTLYKLLTSILRAKINAHIVANNILASSQNGCRVGSRGTKELLLIDMTICQRVRRNRGALSAAWIDYKKAYDSVPHSWLERILELYKVDAALRSFLGACMRQWTTVLRQPGGGDDPPDPHDFIRIERGIFQGDSLSPLWFCLALNPLSTLLKDSGLGCRLRREGEVISHLLYMDDLKLFAPNNRDLMELLKTTEVFSSSIKMEFGVDKCAVMHVQRGKVVNSTNLQLSETMTFRSISESETYKYLGMSQSLGIEDAGIKQALKERFFGRLTKVLNSLLSGGNKVRAFNAWVMPLLTYSFGILRWTQTELDALDRRVRLLLTTHRMLHPRSSVMRLYIPRKCGGRGFLNAKNLHNREVYNLRNYFLNNECGMHRDVVAVDKSLTPLSLANENWRKPVVLSTEDRKAVWKSKELHGRFYGALTGPDVELLASVNWLRFGDLFGETEGFACAIADEVIMTNNYRRYILKDGTVDICRACRRPGESLRHIISGCSHLANGEYLHRHNLVARIIHQQLALLYGLVDHEVPYYKYTPAPVLENGRATLYWDRSIITDRTIVANKPDIVIIDRSQRRAMLVDITVPCDVNLVKAEKDKSSKYLDLAHEVTAMWEVDSAIIVPIVVSANGLIAKSLDQHLERLSLRGCGWIKGQIQKAVILDTARIVRRFLSLRP

SEQ ID NO: 5598 - protein, 1199 aa, Campaea margaritaria
MFTRSKAATNAHLSSQSAPSSPKSTSSESEYGTPPDTSDVSGPPSPPSPPRPVRRGRPPLPARLGPVGQLAPRPAPATSSKAQRMKWTTTINTSCMRAYYGATEGGTNLTAYRNRMLSLFQTLEPTVAVSAQRLSDQVRAIHRCKLMEQSTLDRLRLEALPVSTTSTSGRDLPETPSIPGPVITSTPVASRVDTEVVDGECGNMSQVTEQLRRTLEDAIRQYRFTSDSRPRLPRVPTHRRNLALMGALDALLAPYLQTSKDLIDTHSILYCGAIAVCRVARVKFPDTEQVPRTLGHAPAWQVRIQRRIDTYRTLIAKLVCFSRGNNRPRVMRFVNQAFAGTDIRPRNYMTCVTERIDFLKQKVYAWANRIRRYRERVNRYCQNRLFQSDQRKVYRNWEVTGQRMDDGQLPDVTAMINFWRGIWSVPVEHTEGDWMNIVERACDPIESMEAVSISPIDVRYAIQTAQNWKSPGPDGLQNFWIKWIRSSHSCLAMQFQEAIELGSLPSFMTTGSTTLLFKSGSTTEAKNYRPITCLPTMYKLLTSILRTKINSHIIANNILAPAQNGCRVGSRGTKELLLIDMTICQQVRRKKGALSTAWVDYKKAYDSVPHSWLVRILELYKIDTTLRSFLRTCMGQWSTVLRQPGGGDSVFGPQDFIRIERGIFQGDSLSPLWFCLALNPLSTLLQNSGLGYRLRREGEIISHLLYMDDLKLFAPKRFDLMKLLNITEEFSKSINMEFGVDKCAVMHVQRGKVVNSSNLQLSESLSLRSLSEAETYKYLGMSESLGIVDRDIKQSVKERFFCRLTKVLNSHLSGGNRARAFNGWVMPLLTYSFGILRWTQTELDALDRRVRQQLTLHRMLHPRSSVMRLYIPRKWGGRGFLNAKNLHNREVCSLREYFLNTECGMHRDVVVVDKTLTPLSLANGNWRKPSVLSTDDRKDVWKGKELHGRFYRALTGPDVDLLASVNWLRFGDLFGETEGFVCAIADEVIKTNNYRKYIMKDGTVDICRACRRPGESLRHIISGCSHLANGEYLHRHNQVARIVHQQLALQYGLVELEVPYYKYAPAPVLENGRALLYWDRSVITDRTIVANKPDIVLVDRSQRRAVLVDITVPHDENLVKAEKDKLSKYLDLAHEVTAMWDVDSTIIVPIVVSANGLVAKSLDQHLKRLSLDGWIKGRMQKAVLLDTARIVRRFLSLQP

SEQ ID NO: 5599 - protein, 1207 aa, Ennomos quercinarius
MLTRSRKKQADQNARLPPPPSPSSPSSSSGDEYGTSPDTTASSDEDGPPSPPPQPPPARRGRPPLPARLGPAGQPAPRPAPATGGIVRRMRWTQTMNENCMRAYYGAVEGGSNLTAYRDRMLSLFQDLEPSVSVSAQRLSDQVRAIHRCKLLDQSTLDRLRLETLPIRATSPSPRVLPAALPDPGPIMGPPPVTPRGDPAINGEVSVSDSVSTQANEQLRSALEDAILRYRSTSTSRPRLPRLPTNRRNLVLMGALNALLAPYLRTSEDLVDTHSILYCGAIAACRVARVKFPDTDRAPRPADGVPAWQVRIEKRITTFRTLIAKLVCFSRGNHRPRVMRFVTQAFTGTGIRPQDYMACATERIDFLKQKVYAWASRIRRYRERVDRYQQNRLFQSDQRKVYRNWEGTSQRVVDGQLPDANAMNEFWRSIWSVPVEHTEGDWMRVVERVCEPIESMGSITIDPEDISCAIRTAQNWKSPGPDGLHNFWIKWIRCSYPCLAIQFQEALEAGSLPSFMTTGVTFLLHKSGSTTEAKNYRPITCLPTLYKLLTSILRTKINSHIVANNILAPAQNGCRVGSRGTKELLLIDTAICQQVRRNRGALSTAWIDYKKAYDSVPHSWLERVLELYKIDATLRSFLSACMRQWTTVLRQPGGGESVSDPQDFIRIERGIFQGDSLSPLWFCLALNPLSTLLGDSGLGYRLRRGGEIISHLLYMDDLKLFAPQRPQLIELLKITENFSNSINMEFGVDKCAVMHVHRGKVVNSTNLQLSETMTLRSLSESETYRYLGMSESLGISVGDVKRTVKERFFCRLTKVLNSLLSGGNRTRAFNGWVMPLLMYSFGILRWTQTELDALDRKVRQLLTLHRMLHPRSSVMRLYIPRKWGGRGFLNAKTLHNREVCSLRDYFLSNECGMHRDVVAVDKGLTPLSLANENWRKPVVLSTEDRRDVWKGKELHGRFYRALTGPDVDLHASVNWLRFGDLFGETEGFVCAIADEVIKTNNYRKYIMKDGTVDICRACRRPGESLRHIISGCSHLANGEYLHRHNLVARIIHQQLALQYGLVEFEVPYYKYTPGPVLENGRALLYWDRSIITDRTIVANKPDIVLVDRSQRRAVLVDITIPHDENLVKAEKDKLSKYLDLAHEVTAMWNVDSTSIVPIVVSANGLIAKSLDQHLERLSLDGWIKGQIQKAVLLDTARIVRRFLTLQP

SEQ ID NO: 5600 - protein, 1208 aa, Ennomos quercinarius
MITRSRTRKAETQSARLPPPPAPSSPSSSSGDEYGTPPDTTASSDEDGPPSPPPPPPPARRGRPPLPARLGPAGQPAPRAAPATGGIVRRMRWTQAMNENCMRAYYGATEGGSSLTAYRDRMLSLFQDLEPAVAVSAQRLSDQVRAIQRCKMLDEPTLDRLRLEALPIRATSPSPRVLPAALPDPGPIMGPLPVTPRGDPAIDGEESASDSVSTQANEQLRSALEDAILRYRSTPTSRPRLPRLPTNRRNLVLMGALNTLLAPYLRTSEDLVDTHSILYCGAIAACRVARVKFPDTDRAPRPADGAPAWQVRIEKRITTFRTLIAKLVCFSRGNHRPRVMRFVTQAFAGTGIRPQDYMACVTERIDFLKQKVYAWASRIRRYRERVDRYQQNRLFQSDQRKVYRNWEGTGQRVVDGQLPDANATNEFWRSIWSVPVEHTEGDWMRVVERVCEPIESMGSITIDPEDISCAIRTAQNWKSPGPDGLHNFWIKWIRCSYPCLAIQFQEALEAGSLPSFMTTGVTFLLHKSGSTTEAKNYRPITCLPTLYKLLTSILRTKINSHIVANNILAPAQNGCRVGSRGTKELLLIDTAICQQVRRNRGALSTAWIDYKKAYDSVPHSWLERVLELYKIDATLRFFLSACMRQWTTVLRQPGGGESVSDPQDFIRIERGIFQGDSLSPLWFCLALNPLSTLLGDSGLGYRLRRGSEIISHLLYMDDLKLFAPQRPQLIELLKITENFSNSINMEFGVDKCAVMHVHRGKVVNSTNLQLSETMTLRSLSESETYRYLGMSESLGISVGDVKRTVKERFFCRLTKVLNSLLSGGNKTRAFNGWVMPLLMYSFGILRWTQTELDALDRKVRQLLTSHRMLHPRSSVVRLYIPRKWGGRGFLNAKTLHNREVCSLRDYFLNNECGMHRDVVAVDKGLTPLSLANENWRKPVVLSTEDRRDVWKGKELHGRFYRALTGPDVDLHASVNWLRFGDLFGETEGFVCAIADEVIKTNNYRKYIMKDGTVDICRACRRPGESLRHIISGCSHLANGEYLHRHNLVARIIHQQLALQYGLVESEVPYYKYTPGPVLENGRALLYWDRSIITDRTIVANKPDIVLVDRSQRRAVLVDITIPHDENLVKAEKDKLSKYLDLAHEVTAMWNVDSTSIVPIVVSANGLIAKSLDQHLERLSLDGWIKGQIQKAVLLDTARIVRRFLTLQP

SEQ ID NO: 5601 - protein, 1213 aa, Cydia splendana
MQRMITRSQRRAAESTNNARPPPPPAPSSSSSTSSSGDEFATAPDTDGSSDEGGPPPPPPRPPARRGRPPLPARLGPAGHPAPPTAPAAGGIVRRMRWTRDMNENVMRAYYGATEGGTQLSAYRSRILPLFQALEPTITVSEQRLSDQVRVIQRLKRLDDATLDRLRQEALSARADSTSVRDLPATSPDPVPAPDLAPAAPRVDFCTDEGDFASQNVSTTANEQLRRTLEEAITQYRATTNSRPRLPRLPMNRRNLALMGALNALLDPHLRTSKDLDDTHSIMYCGAIAACRVARVKFPDAERAPRTAGGVPAWQVRIERRISSFRTLIAKLICFREGNNRPRVMRFVNQAFAGTDIRPRDYMANVTERIDFLKQKVYAWANRIRRYRERVDRFQQNRLFQSDQRKVYRKWEETNLRTPDTQPPDVTAMTDFWRSIWSVPVGHTEGGWMSVVERECESIEPMGAVTISPDDVSCAIRTAQNWKSPGPDGLHNFWLKWFRCSHSRLAAQFQQALELGSLPLSLTTGVTFLLYKSGSTTEAKNYRPITCLPTLYKLLTSILRAKINAHIIANNILASAQNGCRVGSRGTKELLLIDMTICQQIRRNKGALSAAWIDYKKAYDSVPHSWLGRVLELYKVDAALRAFLSACMRQWTTVLRQPGGGDDRPGPQDFIRIKRGIFQGDSLSPLWFCLALNPLSTLLKDLGLGCRLRREGVVISHLLYMDDLKLFAPNSQDLLELLKTTDVFSSAIHMEFGVDKCAVMHVQRGKVVNSTNLQLSETMSFRSISESETYKYLGMSQSLGIEDEGIRRSVKERFFSRLTKVLNSLLSGGNKVRAFNAWVMPLLTYSFGILRWTQTELDARDRRVRSLLTTHRMLHPRSSVMRLYIPRKCGGRGFLNAKDLHNREVYNLRNYFLNNECGMHRDVVAVDRNLTPLSLANENWRKPVVLSTADRKAAWESKVLHGRFYKALTGPDVDLLASVNWLRFGDLFGETEGFACAIADEVMMTNNYRKYILKDGTVDICRACRRPGESLRHIISGCSHLANGEYLHRHNLVARIIHQQLALLYGLVDREVPYYKYLPARVLENGHATLYWDRSIITDRTIVANKPDIVIIDRSQRRAVLVDITIPHDENLVKAEKDKSSKYLDLAHEITAMWDVDSTIIVPIVVSVNGLIAKSLDQHLERLSLGGWIKGQMQKAVILDTARIVRRFLSLQP

SEQ ID NO: 5602 - protein, 1128 aa, Cydia splendana
MKYLINIVRRMRWTRDMNENVMRAYYGATEGGTQLSAYRSRILPLFQTLEPTITVSEQRLSDQVRVIQRLKRLDDATLDRLRQEALSARADSTSVRDLPATSPDPVPVPDLAPEAPRVDFCTDEGDFASQNVSTTANEQLRRTLEEAITQYRATTNSRPRLPRLPMNRRNLALMGALNALLEPYLRTSKDLDDTHSIMYCGAIAACRVARVKFPDAERAPRTVGGVPAWQVRIERRISSFRTLIAKLICFRGGNNRPRVMRFVNQAFAGTDIGPRDYMANVTERIDFLKQKVYAWANRIRRYRERVDRFQQNRLFQSDQRKVYRKWEETNLRTPDTQPPDATAMTDFWRSIWSMPVGHTEGGWMSVVERECEFIEPMGAVTISPDDISCAIRTAQNWKSPGPDGLHNFWLKWFRCSHSRLAAQFQQALELGSLPPSLTTGVTYLLYKSGSTTEAKNYRPITCLPTLYKLLTSILRAKINAHIVANNILASAQNGCRVGSRGTKELLLIDMTICQQIRRNKGALSAAWIDYKKAYDSVPHSWLGRVLELYKVDAALRAFLSACMRQWTTVLCQPGGGDDPPDPQDFIRIERGIFQGDSLSPLWFCLALNPLSTLLKDLGLGCRLRREGEIISHLLYMDDLKLFAPNSQDLSELLKTTEGFSSAINMEFGVDKCAVMHVQRGRVVNSTNLQLSETMSFRSISESETYKYLGMSQSLGIEEEGIRRSVKERFFSRLTKVLNSLLSGGNKVRAFNAWVMPLLTYSFGILRWTQTELDALDRRVRSLLTTHRMLHPRSSVMRLYIPRKCGGRGFLNAKDLHNREVYNLRNYFLNNECGMHRDVVAVDRNLTPLSLANENWRKPVVLSTADRKAAWESKVLHGRFYKALTGPDVDLLASVNWLRFGDLFGETEGFACAIADEVMMTNNYRKYILKDGTVDICRACRRPGESLRHIISGCSHLANGEYLHRHNLVARIIHQQLALLYGLVDREVPYYKYLPAPVLENGRATLYWDRSIITDRTIVANKPDIVIIDRSQRRAVLVDITIPHDENLVKAEKDKSSKYLDLAHEITAMWDVDSTIIVPIVVSVNGLIAKSLDQHLERLSLGGWIKGQMQKAVILDTARIVRRFLSLQP

SEQ ID NO: 5603 - protein, 1118 aa, Cydia splendana
MRWTRDMNENVMRAYYGATEGGTQLSAYRSRILPLFQTLEPTITVSEQRLSDQVRVIQRLKRLDDATLDRLRQEALSARADSTSVRDLPATSPDPVPVPDLAPEAPRVDFCTDEGDFASQNVSTTANEQLRRTLEEAITQYRATTNSRPRLPRLPMNRRNLALMGALNALLEPYLRTSKDLDDTHSIMYCGAIAACRVARVKFPDAERAPRTVGGVPAWQVRIERRISSFRTLIAKLICFRGGNNRPRVMRFVNQAFAGTDIGPRDYMANVTERIDFLKQKVYAWANRIRRYRERVDRFQQNRLFQSDQRKVYRKWEETNLRTPDTQPPDATAMTDFWRSIWSMPVGHTEGGWMSVVERECEFIEPMGAVTISPDDISCAIRTAQNWKSPGPDGLHNFWLKWFRCSHSRLAAQFQQALELGSLPPSLTTGVTYLLYKSGSTTEAKNYRPITCLPTLYKLLTSILRAKINAHIVANNILASAQNGCRVGSRGTKELLLIDMTICQQIRRNRGALSAAWIDYKKAYDSVPHSWLGRVLELYKVDAALRAFLSACMRQWTTVLRQPGGGDDPPDPQDFIRIERGIFQGDSLSPLWFCLALNPLSTLLKDLGLGCRLRREGEIISHLLYMDDLKLFAPNSQDLSELLKTTEGFSSAINMEFGVDKCAVMHVQRGRVVNSTNLQLSETMSFRSISESETYKYLGMSQSLGIEEEGIRRSVKERFFSRLTKVLNSLLSGGNKVRAFNAWVMPLLTYSFGILRWTQTELDALDRRVRSLLTTHRMLHPRSSVMRLYIPRKCGGRGFLNAKDLHNREVYNLRNYFLNNECGMHRDVVAVDRNLTPLSLANENWRKPVVLSTADRKAAWESKVLHGRFYKALTGPDVDLLASVNWLRFGDLFGETEGFACAIADEVMMTNNYRKYILKDGTVDICRACRRPGESLRHIISGCSHLANGEYLHRHNLVARIIHQQLALLYGLVDREVPYYKYLPAPVLENGRATLYWDRSIITDRTIVANKPDIVIIDRSQRRAVLVDITIPHDENLVKAEKDKSSKYLDLAHEITAMWDVDSTIIVPIVVSVNGLIAKSLDQHLERLSLGGWIKGQMQKAVILDTARIVRRFLSLQP

SEQ ID NO: 5604 - protein, 1208 aa, Cydia splendana
MITRSRAKAVTTSARPPPPPASSTSSSTSSSGDEFATAPDTDGSSDESGPPPPPPRPPARRGRPPLPARLGPAGHPAPPTAPATGGIVRRMRWTRDMNENVMRAYYGATEGGTQLSAYRSRILPLFQALEPTITVSEQRLSDQVRVIQRLKRLDDATLDRLRQEALSARADSTSVRDLPATSPDPVPAPDLAPGAPRVDFCTDEGDFASQNVSTTANEQLRRTLEEAITQYRATTNSRPRLPRLPMNRRNLALMGALNALLEPHLRTSKDLDDTHSIMYCGAIAACRVARVKFPDAERAPRTVGGVPAWQARIERRISSFRTLIAKLICFRGGNNRPRVMRFVNQAFAGTDIRPRDYMANVTERIDFLKQKVYAWANRIRRYRERVDRFQQNRLFQSDQRKVYRKWEETNLRTPDTQPPDATAMTDFWRSIWSVPVGHTEGSWMSVVERECESIEPMGAVTISPDDVSCAIRTAQNWKSPGPDGLHNFWLKWFRCSHSCLAAQFQQALELGSLPPSLTTGVTFLLYKSGSTTEAKNYRPITCLPTLYKLLTSILRAKINAHIVANNILASAQNGCRVGSRGTKELLLIDMTICQQIRRNKGALSAAWIDYKKAYDSVPHSWLGRVLELYKVDAALRVFLSACMRQWTTVLRQPGGGDDRPGPQDFIRIERGIFQGDSLSPLWFCLALNPLSTLLKDLGLGCRLRRKGEVISHLLYMDDLKLFAPNSQDLLELLKITEVFSSAINMEFGVDKCAVMYVQRGRVVNSTNLQLSETMSFRSISESETYKYLGMSQSLGIEDEGIRRSVKERFFSRLTKVLNSLLSGGNKVRAFNAWVMPLLTYSFGILRWTQTELDALDRRVRSLLTAHRMLHPRSSVMRLYIPRKCGGRGFLNAKDLHNREVYNLRNYFLNNECGMHRDVVAVDRNLTPLSLANENWRKPVVLSTADRKAAWESKVLHGRFYKALTGPDVDLLASVNWLRFGDLFGETEGFACAIADEVMMTNNYRKYILKDGTVDICRACRRPGESLRHIISGCSHLANGEYLHRHNLVARIIHQQLALLYGLVDREVPYYKYLPAPVLENGRATLYWDRSIITDRTIVANKPDIVIIDRSQRRAVLVDITIPHDENLVKAEKDKSSKYLDLAHEITAMWDVDLTIIVPIVVSVNGLIAKSLDQHLERLSLGGWIKGQMQKAVILDTARIVRRFLSLRP

SEQ ID NO: 5605 - protein, 1208 aa, Cydia splendana
MITRSRAKAVTTSARPPPPPASSTSSSTSSSGDEFATAPDTDGSSDESGPPPPPPRPPARRGRPPLPARLGPAGHPAPPTAPAAGGIVRRMRWTRDMNENVMRAYYGATEGGTQLSAYRSRILPLFQALEPTITVSEQRLSDQVRVIQRLKRLDDATLDRLRQEALSARADLTSVRDLPATSPDPVPAPDLAPGAPRVDFCTDEGDFASQNVSTTANEQLRRTLEEAITQYRATTNSRPRLPRLPMNRRNLALMGALNALLEPYLRTSKDLDDTHSIMYCGAIAACRVARIKFPDAERAPRTVGGVPAWQARIERRISSFRTLIAKLICFRGGNNRPRVMRFVNQAFAGTDIRPCDYMANVTERIDFLKQKVYAWANRIRRYRERVDRFQQNRLFQSDQRKVYRRWEEANLRAPDTQPPDATAMTDFWRSIWSVPVGHTEGGWMSVVERECESIEPMGAVTISPDDVSCAIRTAQNWKSPGPDGLHNFWLKWFRCSHSCLAAQFQQALELGSLPPSLTTGVTFLLYKSGSTTEAKNYRPITCLPTLYKLLTSILRAKINAHIVANNILASAQNGCRVGSRDTKELLLIDMTICQQIRRNKGALSAAWIDYKKAYDSVPHSWLGRVLELYKVDAALRAFLSACMRQWTTVLRQPGGRDDRPGPQDFIRIERGIFQGDSLSPLWFCLALNPLSTLLKDLGLGCRLRREGEVISHLLYMDDLKLFAPNSQDLLGLLKTTEVFSSAIHMEFGVDKCAVMHVQRGRVVNSTNLQLSETMSFRSISESETYKYLGMSQSLGIEDEGIRRSVKERFFSRLTKVLNSLLSGGNKVRAFNAWVMPLLTYSFGILRWTQTELDALDRRVRSLLTAHRMLHPRSSVMRLYIPRKCGGRGFLNAKDLHNHEVYNLRNYFLNNECGMHRDVVAVDRNLTPLSLANENWRKPVVLSTADRKAAWESKVLHGRFYKALTGPDVDLLASVNWLRFGDLFGETEGFACAIADEVMMTNNYRKYILKDGTVDICRACRRPGESLRHIISGCSHLANGEYLHRHNLVARIIHQQLALLYDLVDREVPYYKYLPAPVLENGRATLYWDRSIITDRTIVANKPDIVIIDRSQRRAVLVDITIPHDENLVKAEKDKSSKYLDLAHEITAMWDVDSTIIVPIVVSVNGLIAKSLDQHLERLSLGGWIKGQMQKAVILDTARIVRRFLSLQP

SEQ ID NO: 5606 - protein, 1179 aa, Cydia splendana
MWERGEISPWGREGSKSNNNNNSTPPRPPARRGRPPLSARLGPAGHPAPPTAPATGGIVRRMRWTRTMNENVMRAYYGATEGGTQLSAYRSRILPLFQALEPTITVSEQRLSDQVRVIQRLKRLDDATLDRLRQEALSARADSTSVRDLPATSPDPVPAPDLAPAAPRVDFCTDEGDFASQNVSTTANEQLRRTLEEAITQYRATTNSRPRLPRLPMNRRNLALMGALNALLEPYLRTSKDLDDTHSIMYCGAIAACRVARVKFPDAERAPRIVGGVPAWQARIERRISSFRTLIAKLICFRGGNNRPRVMRFVNQAFAGTDIRPRDYMANVTERIDFLKQKVYAWANRIRRYRERVDRFQQNRLFQSDQRKMYRKWEETNLRTPDTRPPDATAMTDFWRSIWSVPVGHTEGSWMSVVERECESIEPMGAVTISPDDVSCAIRTAQNWKSPGPDELHNFWLKWFRCSHSRLAAQFQQALEVGSLPPSLTTGVTFLLYKSGSTTEAKNYRPITCLPTLYKLLTSILRAKINAHIVANNILASAQNGCRVGSRGTKELLLIDMTICQQIRRNKGALSAAWIDYKKAYDSVPHSWLGRVLELYKVDAALRAFLSTCMGQWTTVLRQPGGGDDRLGPQDFIRIERGIFQGDSLSPLWFCLALNPLSTLLKDLGLGCRLQREGEVISHLLYMDDLKLFAPNSQDLLELLKTTEVFSSAINMEFGVDKCAVMHVQRGRVVNSRNLQLSETMSFRSISESETYKYLGMSQSLGIEDEGIRRSVKERFFSRLTKVLNSLLSGGNKVRAFNAWVMPLLTYSFGILKWTQTELDALDRRVRSLLTTHRMLHPRSSVMRLYIPRKCGGRGFLNAKDLHNREVYNLRNYFLNNECGMHRDVVGVDRNLTPLSLANENWRKPVVLSTADRKAAWESKVLHGRFYKALTGPDVDLLASVNWLRFGDLFGETEGFACAIADEVMMTNNYRKYILKDGTVDICRACRRPGESLRHIISGCSHLANGEYLHRHNLVARIIHQQLALLYGLVDREVPYYKYLPAPVLENGRATLYWDRSIITDRTIVANKPDIVIIDRSQRRAVLVDITIPHDENLVKAEKDKSSKYLDLAHEITAMWDVDSTIIVPIVVSVNGLIAKSLDQHLERLSLGGWIKGQMQKAVILDTARIVRRFLSLRP

SEQ ID NO: 5607 - protein, 1211 aa, Cydia splendana
MQRMITRSQRRAAESTNNARPPPPPAPSSSSSTSSSGDEFATAPDTDGSSDEGGPPPPPPRPPARRGRPPLPARLGPAGHPAPPTAPAAGGIVRRMRWTRDMNENVMRAYYGATEGGTQLSAYRSRILPLFQALEPTITVSEQRLSDQVRVIQRLKRLDDATLDRLRQEALSARADSTSVRDLPATSPDPVPAPDLAPAAPRVDFCTDEGDFASQNVSTTANEQLRRTLEEAITQYRATTNSRPRLPRLPMNRRNLALMGALNALLEPHLRTSKDLDDTHSIMYCGAIAACCVARVKFPDAERAPRTAGGVPAWQVRIERRISSFRTLIAKLICFREGNNRPRVMRFVNQAFAGTDIRPRDYMANVTERIDFLKQKVYAWANRIRRYRERVDRFQQNRLFQSDQRKVYRKWEETNLRTPDTQPPDVTAMTDFWRSIWSVPVGHTEGSWMSVVERECESIEPMGAVTISPDDVSCAIRTAQNWKSPGPDGLHNFWLKWFRCSHSRLAAQFQQALELGSLPPSLTTGVTFLLYKSGSTTEAKNYRPITCLLYKLLTSILRANINAHIIANNILASAQNGCRVGSRGTKELLLIDMTICQQIRRNKGALSAAWIDYKKAYDSVPHSWLGRVLELYKVDAALRAFLSACMRQWTTVLRQPGGGDDRPGPQDFIRIKRGIFQGDSLSPLWFCLALNPLSTLLKDLGLGCRLRREGVVISHLLYMDDLKLFAPNSQDLLELLKTTEVFSSAIHMEFGVDKCAVMHVQRGKVVNSTNLQLSETMSFRSISESETYKYLGMSQSLGIEDEGIRRSVKERFFSRLIKVLNSLLSGGNKVRAFNAWVMPLLTYSFGILRWTQTELDALDRRVRSLLTTHRMLHPRSSVMRLYIPRKCGGRGFLNAKDLHNREVYNLRNYFLNNECGMHRDVVAVDRNLTPLSLANENWRKPVVLSTADRKAAWESKVLHGRFYKALTGPDVDLLASVNWLRFGDLFGETEGFACAIADEVMMTNNYRKYILKDGTVDICRACRRPGESLRHIISGCSHLANGEYLHRHNLVARIIHQQLALLYGLVDREVPYYKYLPAPVLENGHATLYWDRSIITDRTIVANKPDIVIIDRSQRRAVLVDITIPHDENLVKAEKDKSSKYLDLAHEITAMWDVDSTIIVPIVVSVNGLIAKSLDQHLERLSLGGWIKGQMQKAVILDTARIVRRFLSLQP

SEQ ID NO: 5608 - protein, 1215 aa, Hedya salicella
MQRYFTRSQNTRKISTAATPTHARPTPPPASSCSPSASSDDFATAPDTSESSDDECGPPPPPPRPPARRGRPPLPARLGPAGHSAPPTAPATGGIVRRMRWSQANNENVMRAYYGATEGGTHLSAYRDRMLLLFQTFEPAIAASAQRLSDQVRAIQRRKLLNDATLDRLRLEVLAARAASTSSRNPPATSPVPAPALDLMPGAPRVDPDSDEGHCVSIVSTQANEQLRRTLEETIERYRFAPDSRPRLPHLPANKRNLALVGALNALLDPYLRASEDLADTHSIMYCGAIAACRVARVKFPDADRAPRTAGGVPAWQVRIERRISTFRTLIAKLICFRGGNNHPRVMRYVAQAFAGTDVSSCDYMACVTERIDFLKQKVYAWASRIRRYRERVDRFQQNRLFQSDQRKVYRKWEGTDQRVTDGRLPDPTVMSNFWRSIWSVPVEHTEGEWMNVVERECEPIEAMGAVTISPDDVSCAARTTQNWKSPGPDGLHNFWVKWFRCSHERLATQFQQALEVGSLPSFLTTGVTFLLYKSGSTTEAKNYRPITCLPTLYKLLTSILRAKINTHIVANNVLAFSQNGCRVGSRGTKELLLIDTTICQQVRRSRGSLSAAWIDYKKAYDSVPHSWLERILELYKVDTALRSFLGACVRQWTTVLCQPGGRDARPAPQDFIRIKRGIFQGDSLSPLWFCLALNPLSTLLKDSGLGCRLRRGGEIISHLMYMDDLKLFAPKRPELVELLKVTDTFSSAIKMEFGVDKCAVMHVQRGKVVNSTNLELSETMSLRSLSETETYKYLGMSQALSIADGDIRQAVKERFFCRLTKVLNSLLSGGNKARAFNAWVMPLLTYSFGILRWTQTELDALDRRVRMLLTTHRMLHPRSSVMRLYIPRKCGGRGFLNAKDLHNREVCSLREYFLNNECGIHRDVVAVDKGLTPLSLANENWRRPTVLSTVDRKDVWKSKELHGRFYKALTGPDVDLLASVNWLRFGDLFGETEGFSCATADEVIMTNNYRRYILKDGTVDICRACRRPGESLRHIMSGCSYLANGEYLHRHNQVARIIHQQLAVKYDLVGSEVPYYKYVPMPVLENGRATLYWDRSILTDRTIVANKPDIVLVDRSKRRAMLVDITIPHDENLVKAEKDKLSKYLDLAHEVTAMWDVDSTIIVPIVVSINGLIAKSLDEHLKRLSLDGWIKGQIQKAVILDTARIVRRFLSVQP

SEQ ID NO: 5609 - protein, 1211 aa, Hedya salicella
MLTRQRARAASTPDTNARPPPPPASSSSSASSSGDEFATAPDTNSQSSDDERGPPPPPPRPPARRGRPPLPAGLGPAGHPAPPTAPATGGVVRRMRWTQAMNEHCMRAYYGATEGGTHLSAYRDRMLLLFQTLEPAIAVSAQRLSDQVRAIQRRKLLDDAMLDQLRLEVLAARAASTSSRNPPATSPVSAPALDLVPGAPRVDPGSDEEHYASSVSTQANEQLRRTLEETIERYRFAPVSRPRLPRLPTNRRNLALVGALNALLDPYLRASENLADTHSIMYCGAIAACRVARVKFPDADRAPRTAGGVPAWQVRIERRISTFRTLIAKLICFRGGNNRPRVMRYVAQAFAGTAVRPRDYMACVTERIDFLKQKVYAWASRIRRYRERVDRFQQNRLFQSDQRKVYRKWEGTDQRVTDGRLPDPTAMNNFWRSIWSVPVEHTEGEWMNVVERECEPIETMGAVTISPDDVSCAARTTQNWKSPGPDGLHNFWVKWFRCSHERLATQFQQALELGSLPSFLTTGVTFLLYKSGSTTEAKNYRPITCLPTLYKLLTSILRAKINTHIVANNVLAFSQNGCRVGSRGTKELLLIDTTICQQVRRNRGTLSAAWIDYKKAYDSVPHSWLGRILELYKIDTVLKSFIGSCMRQWTTVLRQPGGRDGPPDPQDFIRIKRGIFQGDSLSPLWFCLALNPLSTLLKDSGLGCRLRRGGEIISHLLYMDDLKLFAPKRPELVELLKVTETFSSAIKMEFGVDKCATMHVQRGKVVNSTNLQLSETMSLKSLSEVETYKYLGMSQSLSIADGDIKQAVKERFFCRLTKVLNSLLSGGNKARAFNAWVMPLLTYSFGILRWTQTELDALDRRVRMLLTTHRMLHPRSSVMRLYIPRKCGGRGFLNAKDLHNREVCSLREYFLNNECGIHRDVVAVDKGLTSLSLANENWRRPTVLSTVDRKDVWRSKELHGRFCKALTGPDVDLLASVNWLRFGDLFGETEGFACAITDEVIMTNNYRKYILKDGTVDICRACRRPGESLRHIISGCSHLANSEYLHRHNQVARIIHQQLAVKYGLVGSEVPYYKYAPMPVLENGRATLYWDRSIITDRTIVANKPDIVLVDRSKRRAILIDITIPHDENLVKAEKDKLSKYLDLAHEVTAMWDVDSTIIVPIVVSANGLIAKSLNEHLKRLSLDGWVKGQIRKAVILDTARIVRRFLSVRP

SEQ ID NO: 5610 - protein, 1216 aa, Erannis defoliaria
MITRSKAIRNAAEQHSARPPSPPAPSSPSASSGEDVFVTPRESSASSTDSDVSGPRTPAPPPPARRGRPPLPARLGPAGLPASRPALAAGGVVRRMRWSQTNNENCMRAYYRATEVGTNLTAYRVRMLSLFQALEPTVTVSAQRLSDQVRAIQRLNLLDQSLLDRLRLEAQSARSTPVSTRDSHVASSAPTLASMPTSVATLATPADPVVDEGDDTGMSVTTQVSEQLRRALEDAISQYRFALNSRPRLPRLPTHRRNLALMGALNALLAPYLRASEDLTDTHSILYCGAVAACRVARVKFSDSNRAPRTAGDVPAWQARIERRISTFRTLIAKLICFSRGNNRPRVMRFVTQAFAGTGIRPQQYMASVTERIDYLKQKVYAWASRIRRYRERVDRYWQNRVFQSDQRKVYRNWEGAEQRVSDGHLPDANAMTNFWRGIWSVPVEHTEGDWMRVVERECESIEPMGSILIDPVDVSCAIRTAQNWKSPGPDGLHNFWIKWFRCSHDRLATQFQEALELGSLPSFMTTGVTFLLHKSGSTTEPKNYRPITCLPTIYKLLTSILSTKINTHIVANNVLAPAQNGCRVGSRGTKELLLIDMAISQQVRRNKGALSAAWIDYKKAYDSVPHSWLERILELYKIDTTLKSFLSACMRQWTTVLRQPGGGNDSFDPQDLIRIERGIFQGDSLSPSWFCLALNPLSTLLKDSGLGYRLRRGGEVISHLLYMDDLKLFAPKHQDLLELLKTTQVFSSAIRMEFGVDKCAVMRVQRGKVVNSPDLQLSEIMTLRSLSEAETYKYLGMSESLGISVVDIKKSVKERFFCRLAKVLNSLLSGGNKARAFNGWVMPLLIYSFGILRWTQTELDALDRRVRQLLTAHRMLHPRSSVMRLYIPRKWGGRGFLNAKNLHNREVCSLRDYFLNNECGMHRDVVTVDKGLTPLSLANENWRRPSVLSTDDRKDVWKSKELHGRFYRALSGPDVDLLASVNWLRFGDLFGETEGFACAIADEVIKTNNYRKYIMKDGTVDICRACHRPGESLRHIISGCSHLANGEYLHRHNQVARIIHQQLALQYGLVESEVPYYKYAPAPVLENGRALLYWDRSIITDRTIVANKPDIVMVDRSQRRAVLVDVTIPHDENLVKAEKDKLSKYLDLAFEITAMWDVDSTIIVPIVVSANGLIAKSLDQYLKRLSLDGWVKGQIQKAVVLDTARIVRRFLTLQP

SEQ ID NO: 5611 - protein, 1213 aa, Erannis defoliaria
MITRSKKRNAAVQHARPTPPPVPSSSPSSSSPSEEEFHTCGTSSSSEDVSGPRTPTPPIPVRRGRPPLPARLGPAGQPASRPALAAGGVVRRMRWSQTNNENCMRAYYGATEGGTNLTAYRVRMLSLFQTLEPTVTVSAQRISDQVRAIQRLNLLDQPLLDRLRLEVQSARPTPASTRDLDVASSAPTLASVPTSAATLATSADPVLDEGDCTGMSVSTQVSEQLRRALEDAIGQYRFALNSRPRLPRLPTHRRNLALMGALNALLAPYLRASEDLTDTHSILYCGAIAACRVARVKFPDTNRAPRPAGDVPAWQLRIERRISTFRTLIAKLICFSRGNNRPRVMRFVTQAFAGTGIRPQQYMASVTERIDYLKQKVYAWANRIRRYRERVDRYWQNRLFQSDQRKVYRNWEGTEQRVSDGQLPDASAMTNFWRGIWSVPVEHTEGDWMRVVERECESIEPMGSILIDPVDVSCAIRTAQNWKSPGPDGLHNFWIKWFRCSHDRLATQFQEALELGSLPSFMTTGVTFLLHKSGSTTEPKNYRPITCLPTIYKLLTSILSTKINAHIVANNVLAPAQNGCRVGSRGTKELLLIDMAISQQVRRNKGALSAAWIDYKKAYDSVPHSWLERILELYQIDTTVKSFLGACMRQWTTVLRQPGGGNGSSDSQDLIRIERGIFQGDSLSPSWFCLALNPLSTLLKDSGLGYRLRRGGEIISHLLYMDDLKLFAPKHQDLLELLKTTQVFSSAIRMEFGVDKCAVMRVQRGKVVNSPDLQLSEIMTLRSLSEAETYKYLGMSESLGISVVDIKKSVKERFFCRLTKVLNSLLSGGNKARAFNGWVMPLLIYSFGILRWTQTELDALDRRVRQLLTAHRMLHPRSSVMRLYIPRKWAGRGFLNAKNLHNREVCSLRDYFLNNECGMHRDVVTVDKGLTPLSLANENWRRPSVISTDDRKEVWKSKELHGRFYRALTGPDVDLLASVNWLRFGDLFGETEGFACAIADEVIKTNNYRKYIMKDGTVDICRACHRPGESLRHIISGCSHLANGEYLHRHNQVARIIHQQLALQYGLVESEVPYYKYAPAPVLENGRALLYWDRSIITDRTIVANKPDIVMVDRSQRRAVLVDVTIPHDENLVKAEKDKLSKYLDLAFEITAMWDVDSTIIVPIVVSANGLIAKSLDQYLKRLSLDGWVKGQIQKAVVLDTARIVRRFLTLQP

SEQ ID NO: 5612 - protein, 1215 aa, Biston betularia
MWTRSRTAAASGSHDAQIPPPPAPSTPSASSGDEEFATPLATSASSSSSDMSGPRTPAPPPPARRGRPPLPARLEPAGQSASRSALAVGGVVRRMRWSQTNNENCMRAYYGATEGGINLSAYRVRMLPLFQALEPTVTVSAQRLSDQVRAIQRLQLLDQSVLDRLRLEALPARPTPVSTRDSPVASSAPTLVSVPTSMATLATPIDPVVDVGECASMGVCSQVSEHLRRTLEDAICQYRFAPDSRPRLPRLPTHRRNLALMGALNALLAPYLRASEDLTDTHSILYCGAIAACRVARVKFPDTNRAPRPAGGVPAWQLRIERRIGTFRTLIAKLICFSRGNNRPRVMRFVTQAFAGTGIRPQHYLASVTERIDYLKQKVYAWANRIRRYRERADRYWQNRVFQSDQRKVYRDWGGTGQRVSDRQLPDTSVMTEFWRGIWSLPVEHTEGDWMRVVERECESIESMGSVLIDPVDVSCAIRTAQNWKSPGPDGLHNFWIKWIRCSHDRLATQFQEALELGSLPCLMTTGVTFLLHKTGSTTEAKNYRPITCLPTIYKLLTSILRTKINAHVVANNVLAPAQNGCRVGSRGTKELLLIDMTISQQVRRNKGALSTAWIDYKKAYDSVPHSWLERVLELYKIDTTLKSFLGACMRQWTTVLRQPGSGDGSSEPQDLIRIERGIFQGDSLSPLWFCLALNPLSTLLKESGLGHRLRRGGEVISHLLYMDDLKLFAPKRPDLMELLKTTQVFSNAIKMEFGVDKCAVMHVQRGEVVNCPDLQLSETMTFRSLSEAETYKYLGMSESLGIAVVDIKRSVKERFFCRLTKVLNSLLSGGNKVRAFNGWVMPLLIYSFGILRWTQTELDALDRRVRQQLTTHRMLHPRSSVMRLYIPRKLGGRGFLSAKNLHNREVCSLRDYFRDNECGMHRDVVAVDKGLTPLSLANENWRKPSVLSTEDRKEVWKSKQLHGRFYRVLTGPDVDMLASVNWLRFGDLFGETEGFACAIADEVIKTNNYRKYIMKDGTVDICRACHRPGESLRHIISGCSHLANGEYLHRHNQVARIIHQQLALQYGLVESEVPYYKYAPAPVLENGRALLYWDRSIITDRTIVANKPDIVVVDRAQRRAVLVDITIPHDENLVKAEKDKLSKYLDLAHEITAMWDVDSTIIVPIVVTVNGLIAKSLDQHLKRLSLDGWVKGQLQKAVILDTARIVRRFLTLQP

SEQ ID NO: 5613 - protein, 1215 aa, Biston betularia
MWTRSRTAAASGLHDAHIPSPPAPSTPSASSGDEEFATPLATSASSSSSDVSGPRTPAPPPPARRGRPPLPARLGPAGQSASRSALAAGGVVRRMRWSQTNNENCMRAYYGATEGGINLSAYRVRMLHLFQALEPTVAVSTQRLSDQVRAIQRLQLLDQSVLDRLRLEALPARPTPVSTRDSPVASSAPTLVSVPTSMATLATPTDPVVDVGECTSMGVCSQVSEHLRRTLEDAICQYRFAPDSRPRLPRLPTHRRNLALMGALNALLAPYLRASEDLTDTHSILYCGAIAACRVARVKFPDTNRAPRPAGGVPAWQLRIERRISTFRTLIAKLICFSRGNNRPRVMRFVTQAFAGTGIRPQHYLASVTERIDYLKQKVYAWANRIRRYRERADRYWQNRVFQSDQRKVYRDWEGTGQRVSDRQLPDTSVMTEFWRGIWSLPVEHTEGDWMRVVERECESIESMGSVLIDPVDVSCAIRTAQNWKSPGPDGLHNFWIKWIRCSHDRLATQFQEALELGSLPCFMTTGVTFLLHKTGSTTEAKNYRPITCLPTIYKLLTSILRTKINAHVVANNVLAPAQNGCRVGSRGTKELLLIDMTISQQVRRNKGALSTAWIDYKKAYDSVPHSWLERVLELYKIDTTLKSFLGACMRQWTTVLRQPGSGDGSSEPQDLIRIERGIFQGDSLSPLWFCLALNPLSTLLKESGLGHRLRRGGEVISHLLYMDDLKLFAPKRPDLMELLKTTQVFSNAIKMEFGVDKCAVMHVQRGEVVNCPDLQLSETMTFRSLSEAETYKYLGMSESLGIAVVDIKRSVKERFFCRLTKVLNSFLSGGNKVRAFNGWVMPLLIYSFGILRWTQTELDALDRRVRQQLTTHRMLHPRSSVMRLYIPRKLGGRGFLSTKNLHNREVCSLRDYFRDNECGMHRDVVAVDKGLTPLSLANENWRKPSVLSTEDRKEVWKSKQLHGRFYRVLTGPDVDMLASVNWLRFGDLFGETEGFACAIADEVIKTNNYRKYIMKDGTVDICRACHRPGESLRHIISGCSHLANGEYLHRHNQVARIIHQQLALQYGLVESEVPYYKYAPAPVLENGRALLYWDRSIITDRTIVANKPDIVVVDRAQRRAVLVDITIPHDENLVKAEKDKLSKYLDLAHEITAMWDVDSTIIVPIVVTVNGLIAKSLDQHLKRLSLDGWVKGQLQKAVILDTARIVRRFLTLQP

SEQ ID NO: 5614 - protein, 1215 aa, Biston betularia
MWTRSRTAAASGLHDAHIPSPPAPSTPSASSGDEEFATPLATSASSSSSDVSGPRTPAPPPPARRGRPPLPARLGPAGQPASRSALAAGGVVRRMRWSQTNNENCMRAYYGATEGGINLSAYRVRMLPLFQALEPTVAVSTQRLSDQVRAIQRLQLLDQSVLDRLRLEALPARPTPVSTRDSPVASSAPTLVSVPTSMATLATPTDPVVDVGECTSMGVCSQVSEHLRRTLEDAICQYRFAPDSRPRLPRLPTHRRNLALMGALNALLAPYLRASEDLTDTHSILYCGAIAACRVARVKFPDTNRAPRPAGGVPAWQLRIERRISTFRTLIAKLICFSRGNNRPRVMRFVTQAFAGTGIRPQHYLASVTERIDYLKQKVYAWANRIRRYRERADRYWQNRVFQSDQRKVYRDWEGTGQRVSDTQLPDTSVMTEFWRGIWSLPVEHTEGDWMRVVERECESIESMGSVLIDPVDVSCAIRTAQNWKSPGPDGLHNFWIKWIRCSHDRLATQFQEALELGSLPCFMTTGVTFLLHKTGSTTEAKNYRPITCLPTIYKLLTSILRTKINAHVVANNVLAPAQNGCRVGSRGTKELLLIDMTISQQVRRNKGALSTAWIDYKKAYDSVPHSWLERVLELYKIDTTLKSFLGACMRQWTTVLRQPGSGDGSSEPQDLIRIERGIFQGDSLSPLWFCLALNPLSTLLKESGLGHRLRRGGEVISHLLYMDDLKLFAPKRPDLMELLKTTQVFSNAIKMEFGVDKCAVMHVQRGEVVNCPDLQLSETMTFRSLSEAETYKYLGMSESLGIAVVDIKRSVKERFFCRLTKVLNSFLSGGNKVRAFNGWVMPLLIYSFGILRWTQTELDALDRRVRQQLTTHRMLHPRSSVMRLYIPRKLGGRGFLSTKNLHNREVCSLRDYFRDNECGMHRDVVAVDKGLTPLSLANENWRKPSVLSTEDRKEVWKSKQLHGRFYRVLTGPDVDMLASVNWLRFGDLFGETEGFACAIADEVIKTNNYRKYIMKDGTVDICRACHRPGESLRHIISGCSHLANGEYLHRHNQVARIIHQQLALQYGLVESEVPYYKYAPAPVLENGRALLYWDRSIITDRTIVANKPDIVVFDRAQRRAVLVDITIPHDENLVKAEKDKLSKYLDLAHEITAMWDVDSTIIVPIVVTVNGLIAKSLDQHLKRLSLDGWVKGQLQKAVILDTARIVRRFLTLQP

SEQ ID NO: 5615 - protein, 1125 aa, Apotomis turbidana
MWGRGNNNNNNNNNMNENCMRAYYGATEGGINLSAYRDRMLPLFQVFDPTIAVSAQRLSDQVRFIQRRKLLDDATLDRLRLEVLAARAASVPARDPPATSPVPAPAPNLVPGVPLTDPEADVEDYASSVSTQANEQLRRALEEAIGRYRSAPEPRLRLPRLPIHKRNLALMGALDALLDPYLRASEDLADTHSIMYCGAIAACRVARVKFPDTDRAPRTARGVPAWQVRIERRISSFRTLIAKLICFRGGNNRPRVMRYVTQAFAGTGTRPCDYMACVTERIDYLKQKVYAWASRIRRYRERVDRFQQNRLFQSDQRKVYRKWEGADQCVSDGQLPDPTAMINFWRSIWSVPVEHTEGEWMNVVRRECEPIEAMGAVTISPDDVRCAARTIQNWKSPGPDGLHNFWIKWFRSSHERLATQFQDALELGSLPSFMTTGVTFLLHKSGSTTEAKNYRPITCLPTLYKLLTSILRTKINTHIVANNVLAFSQNGCRVGSRGTKELLLIDTTICQQVRRNRGSLSTAWIDYKKAYDSVPHSWLERILELYKIDTALRSLLGACMRQWTTVLRQPGGGDGPPGPQDLIRIERGIFQGDSLSPLWFCLALNPLSTLLKDSGLGCRLRRGGEVISHLLYMDDLKLYAPKRQDLVELLEVTEAFSSAIKMEFGVDKCAVMHVQRGKVVNSANLQLSETMSLRSISEVETYKYLGMSQSLGIADGDIRQALKERFFCRLTKVLNSLLSGGNKARAFNAWVMPLLTYSFGILRWTQTELDALDTRVRQLLTTHRMRHPRSSVMRMYIPRKCGGRGFLNAKDLHNREVCSLREYFLNNECGIHRDVVAVDKGLTSLSLANENWRRPKVLSTDDRRAVWKSKELHGRFYKALTGPDVDLLASVNWLRFGDLFGETEGFVCAIADEVMMTNNYRRYILKDGTVDICRACRRPGESLRHIISGCSHLANGEYLHRHNQVARIIHQQLALRYGLVGSEVPYYKYAPMPVLENGRATLYWDRSIITDRTIVANKPDIVLVDRSKRQAVLVDITIPHDENLVKAEKDKLSKYLDLAHEVTAMWDVDSTSIVPIVVSANGLIAKSLDKHLKRLSLDGWIKGQIQKAVLLDTARIVRRFLSLQP

SEQ ID NO: 5616 - protein, 1211 aa, Apotomis turbidana
MITRSQARRNTAAHTQNARPTPPPVSSSSSPSSSGDEFATAPDTSESSDVVRGPPPPPPRPPARRGRPPLPACLGPTGQSAPTTAPATGGVVRRMRWTQVMNENCMRAYYGATEGGINLSAYRDRMLPLFLAFDPTITVSAQRLSDQVRFIQRRKLLDDATLDRLRLEVLAARAASTPARDTPATSPVPVPAPNLVPGVRQTDPEADGEDDASSVSTQANEQLRRALEEAIERYRSTPESRPRLPRLPMHKRNLALMGALDALLDPYLRASEDLADTHSIMYCGAIAACRVARVRFPDTDRAPRTAGGVPAWQVRIERRISSFRTFIAKLICFRGGNNRPRVMRYVTQAFAGTGTRPCDYMACVTERIDYLKQKVYAWASRIRRYRERVDRFQQNRLFQSDQRKVYRKWEGTNQCVSDGQLPDPTAMINFWRSIWSVPVEHTEGEWMNVVRRECEPIEAMGAVTISPDDVSCAARKAQNWKSPGPDGLHNFWIKWFRSSHERLATQFQDALELGSLPSFMTTGVTFLLHKSGSTTEAKNYRPITCLPTLYKLLTSILKTKINSHIVANNVLAFSQNGCRVGSRGTKELLLIDTTICQQVRRNRGSLSTAWIDYKKAYDSVPHSWLERILELYKIDTALRSLLGACMRQWTTVLRQPGGGDGPPGPRDLIRIERGIFQGDSLSPLWFCLALNPLSTLLKDSGLGCRLRRGGEVISHLLYMDDLKLYAPKRQDLVELLEVTENFSSAIKMEFGVDKCAVMHVQRGKVVNSANLQLSETMTLRSISEVETYKYLGMSQSLGIADGDIRQALKERFFCRLTKALNSLLSGGNKARAFNTWVMPLLTYSFGILRWTQTELDALDTRVRQLLTTHRMRHPRSSVMRMYIPRKCGGRGFLNAKDLHNREVCSLREYFLNNECGIHRDVVAVDKGLTSLSLANENWRRPKVLSTDDRRAVWKSKELHGRFCKALTGPDVDLLASVNWLRFGDLFGETEGFVCAIADEVMMTNNYRRYILKDGTVDICRACRRPGESLRHIISGCSHLANGEYLHRHNQVARIIHQQLALQYGLVGSEVPYYKYAPMPVLENGRATLYWDRSIITDRTIVANKPDIVLVDRSKRQAVLVDITIPHDENLVKAEKDKLSKYLDLAHEVTAMWDVDSTIIVPIVVSANGLIAKSLDKHLKRLSLDGWIKGQIQKAVLLDTARIVRRFLSLQP

SEQ ID NO: 5617 - protein, 1211 aa, Apotomis turbidana
MITRSQARRNTAAHTQNARPTPPPVSSSSSPSSSGDEFATAPDSSESSDDVRGPPPPPPRPPARRGRPPLPACLGPTGQSAPTTAPATGGVVRRMRWTQVMNENCMRAYYGATEGGINLSAYRDRMLPLFLAFDPTITVSAQRLSDQVRFIQRRKLLDDATLDRLRLEVLAARASSTPARDTPATSPVPAPAPNLVPGVRQTDPEADGEDDASSVSTQANEQLRRALEEAIERYRSTPESRPRLPRLPMHKRNLALMGALDALLDPYLRASEDLADTHSIMYCGAIAACRVARVRFPDTDRAPRTAGGVPAWQVRIERRISSFRTFIAKLICFRGGNNRPRVMRYVTQAFAGTGTRPCDYMACVTERIDYLKQKVYAWASRIRRYRERVDRFQQNRLFQSDQRKVYRKWEGTNQCVSDGQLPDPTAMINFWRSIWSVPVEHTEGEWMNVVRLECEPIEAMRAVTISPDDVRCAARTTQNWKSPGPDGLHNFWIKWFRSSHERLATQFQDALELGSLPSFMTTGVTFLLHKSGSTTEAKNYRPITCLPTLYKLLTSILRTKINSHIVANNVLAFSQNGCRVGSRGTKELLLIDTTICQQVRRNRGSLSTAWIDYKKAYDSVPHSWLERILELYKIDTALRSLLGACMRQWTTVLRQPGGGDGPPGPRDLIRIERGIFQGDSLSPLWFCLALNPLSTLLKDSGLGCRLQRGGEVISHLLYMDDLKLYAPKRQDLVELLEVTENFSSAIKMEFGVDKCAVMHVQRGKVVNSANLQLSETMTLRSISEVETYKYLGMSQSLGIADGDIRQALKERFFCRLTKVLNSLLSGGNKARAFNTWVMPLLTYSFGILRWTQTELDALDTRVRQLLTTHRMRHPRSSVMRMYIPRKCGGRGFLNAKDLHNREVCSLREYFLNNECGIHRDVVAVDKGLTSLSLANENWRRPKVLSTDDRRAVWKSKELHGRFYKALTGPDVDLLASVNWLRFGDLFGETEGFVCAIADEVMMTNNYRRYILKDGTVDICRACRRPGESLRHIISGCSHLANGEYLHRHNQVARIIHQQLALQYGLVGSEVPYYKYAPMPVLENGRATLYWDRSIITDRTIVANKPDIVLVDRSKRQAVLVDITIPHDENLVKAEKDKLSKYLDLAHEVTAMWDVDSTIIVPIVVSANGLIAKSLDKHLKRLSLDGWIKGQIQKAVLLDTARIVRRFLSLQP

SEQ ID NO: 5618 - protein, 1206 aa, Notocelia uddmanniana
MNTRLRSRAEQRARLPSPPAPSSSSPSSSDDEFATAPDSSESSSDERGPSPPPPQTSARRGRRPLPARLGPTGHSAPPTAPAAGGVVRRMRWTQEMNENCMRAYFGATEGETNLSAYRVRMLPLFQALEPTITVSAQRLSDQVRVIQRNKRLDDLTLDRLRLEALSARAAPTSARDLPATSPAPALAPNTAPRAPRVDPSADGDCADQSVSTQAHEQLRRALDEAITRYRSTPNSRPRLPRLPVNRRNLALMGALNDLLDPYLRASDDLIDTHSIMYCGAIAACRVARVKFPDADRATRTAGGVPAWQVRIERRINTFRTLIAKLICFRGGNNRPRVMRFVNQAFAGTGVRPRDYMACVTERIDFLKQKVYAWASRIRRYRERVDRYQQNRLFQSDQRKVYRKWEGTDHRVCDGQRPDATAMVNFWRSIWSVPVEHTEGAWIGVVEHDCESIEPMGSVTISPEDVSCAIRTAPNWKSPGPDGLHNFWLKWFRCSHERLATQFQQALELGSLPPPLTTGVTSLLYKSGSTTEAKNYRPITCLPTLYKLLTSILRAKINTHIVTNNILAPAQNGCRVGSRGTKELLLIDMTICQRVRRNRGTLSASWIDYKKAYDSVPHSWLRRILELYKVDAALRSFLSACMGQWTTVLRQPGGGDGPSGPQDSIRIERGIFQGDSLSPLWFCLALNPLSTLLQDSGLGCQLRRGGEVISHLLYMDDLKLFAPNRQDLLELLKTTEVFSSAIKMEFGVDKCAVMHVQRGKVVNSTNLQLSETMSLRSLSEAETYKYLGMSQALGIEGEGIKQAVKERFFCRLTKVLNSFLSGGNKARAFNAWVMPLLTYSFGILRWTQTELDALDRRVRVLLTAHRMLHPRSSVMRLYIPRKCGGRGFLNAKDLHNREVCSLRDYFLNSECGMHRDVVAVDASFTPLSMANENWRRFKVLSTEDRKAEWKSKELHGRFYRALTGPDVDLLASVNWLRFGDLFGETEGFVCAIADEVIMTNNYRKYILKDGTVDICRACRRPGESLRHIISGCSHLANGEYLHRHNLVARIIHQQLALSYGLVDFEVPYYKYLPAPVLENGRATLYWDRSIITDRTIVANKPDIVLIDRSKRQAVLVDITIPHDENLVKAEKDKVSKYLDLAHEVTAMWDVDSTIIVPIVVSANGLIAKSLDQHLKRLSLDGWVKGQIQKAVLLDTARIVRRFLSLSP

SEQ ID NO: 5619 - protein, 1210 aa, Notocelia uddmanniana
MITRSQTRRVQASQQSARPSPSPASSSSASASSEEEFATAPDTSSSSSDECGPPPPPPRPPARRGRPPLPARLGPAGQQVPHTAPATGGVVRRMQWSPSMNENCMRAYYGATDGGTNLSAYRVRMLPLFQALEPAISVSAQRLSDQVRVIQRLKRLDDATLDRLRLEALSARAASVSARNPPATLPAPVPAPDTAPGASRVDPSADGDCADQSVSTQAHEQLRRALDEAITRYRSTPNSRPRLPRLPVNRRNLALMGALNDLLDPYLRASDDLIDTHSIMYCGAIAACRVARVKFPDADRATRTAGGVPAWQVRIERRINTFRTLIAKLICFRGGNNRPRVMRFVNQAFAGTGVRPRDYMACVTERIDFLKQKVYAWASRIRRYRERVDRYQQNRLFQSDQRKVYRKWEGTDHRVCDGQRPDATAMVNFWRSIWSVPVEHTEGAWIGVVERDCESIEPMGSVTISPEDVSCAIRTAPNWKSPGPDGLHNFWLKWFRCSHERLATQFQQALELGSLPPPLTTGVTSLLYKSGSTTEAKNYRPITCLPTLYKLLTSILRAKINTHIVTNNILAPAQNGCRVGSRGTKELLLIDMTICQRVRRYRGTLSASWIDYKKAYDSVPHSWLRRILELYKVDAALRSFLSACMGQWTTVLRQPGGGDGPSGPQDSIRIERGIFQGDSLSPLWFCLALNPLSTLLQDSGLGCQLRRGGEVISHLLYMDDLKLFAPNRQDLLELLKTTEVFSSAIKMEFGVDKCAVMHVQRGKVVNSTNLQLSETMSLRSLSEAETYKYLGMSQALGIEGEGIKQAVKERFFCRLTKVLNSFLSGGNKARAFNAWVMPLLTYSFGILRWTQTKLDALDRRVRVLLTAHRMLHPRSSVMRLYIPRKCGGRGFLNAKDLHNREVCSLRDYFLNSECGMHRDVVAVDASFTPLSMANENWRRFKVLSTEDRKAEWKSKELHGRFYRALTGPDVDLLASVNWLRFGDLFGETEGFVCAIADEVIMTNNYRKYILKDGTVDICRACRRPGESLRHIISGCSHLANGEYLHRHNLVARIIHQQLALSYGLVDFEVPYYKYLPAPVLENGRATLYWDRSIITDRTIVANKPDIVLIDRSKRQAVLVDITIPHDENLVKAEKDKVSKYLDLAHEVTAMWDVDSTIIVPIVVSANGLIAKSLDQHLKRLSLDGWVKGQIQKAVLLDTARIVRRFLSLSP

SEQ ID NO: 5620 - protein, 1206 aa, Notocelia uddmanniana
MITRTRSRAAQRARPPSPPAPSSSSPSSSGDEFATAPDTSESSCDERGPPSPPPRPPARRGRPPLPARLGPVGHSALPTAPAAGGVVRRMRWTQEMNENCMRAYFGATEGETNLSAYRVRMLPLFQALEPTITVTAQRLSDQVRVIQRLKRLDDATLDRLHLEALSARTASALARDPPATSPAPVPTPDMAPGVPRVDPSVDEDCANRTVSTQTNEQLRRALEEAITRYRSTPNSRPRLPRLPVNRRNLALMGALNDLLDPYLRASEDLIDTHSILYCGAIAACRVARVKFPDADRAPRTAGGVPAWQVRIERRINTFRTLIAKLICFRGGNDRPRVMRFVNQAFAGTGVRPRDYVTCVTERIDFLKQKVYAWASRIRRYRERVDRYQQNRLFQSDQRKVYRKWEGTDHRVCDGQRPDATAMGNFWRSIWSAPVEHTEGAWIGVVERECESIEPMGSVTISPEDISCAIRTAPNWKSPGPDGLHNFWLKWFRCSHERLATQFQQALELGSLPHLLTTGVTSLLYKSGSTTEAKNYRPITCLPTLYKLLTSILRAKINTHIVANNILAPAQNGCRVGSRGTEELLLIDMTICQRVRRSRGALSAAWIDYKKAYDSVPHSWLRRILELYKVDAALRSFLSACMGQLTTVLRQPGGGDGSSGPQDSIRIERGIFQGDSLSPLWFCLALNPLSTLLKDSGLGCQLRRGGEVISHLLYMDDLKLFAPNRQDLLELLKTTEVFSSAIKMEFGVDKCAVMHVQRGKVVNSTNLQLSETMSLRSLSEAETYKYLGMSQSLGIEGEGIKQAVKERFFCRLTKVLNSFLSGGNKVRAFNAWVMPLLTYSFGILRWTQTELDALDRRVRVLLTTHRMLHPRSSVMRLYIPRKCGGRGFLNAKDLHNREVCSLRDYFLNGEYGMHRDVVAVDASFTPLSMANENWRRFKVLSTEDRKAEWKSRELHGRFYKALTGPDVDLLASVNWLRFGDLFGETEGFVCAIADEVIMTNNYRKYILKDGTVDICRACRRPGESLRHIISGCGHLANGEYLHRHNLVARIIHQQLALSYGLVNFEVPYYKYLPAPVLENGRATLYWDRSIITDRTIVANKPDIVLIDRSKRQAVLVDITIPHDENLVKAEKDKVSKYLDLAHEVTAMWDVDSTIIVPIVVSANGLIAKSLDQHLKRLSLDGWVKGQIQKAVLLDTARIVRRFLSLSP

SEQ ID NO: 5621 - protein, 1117 aa, Notocelia uddmanniana
MRWTQEMNENCMRAYFGATEGETNLSAYRVRMLPLFQALEPTITVSAQRLSDQVRVIQRNKRLDDLTLDRLRLEALSARAAPTSARDLPATSPAPVPAPNTAPRAPRVDPSADGDCADQSVSTQAHKQLRRALDEAITRYRSTPNSRPRLPRLPVNRRNLALMGALNDLLDPYLRASDDLIDTHSIMYCGAIAACRVARVKFPDTDRATRTAGGVPAWQVRIERRINTFRTLIAKLICFRGGNNRPRVIRFVNQAFAGTGVRPRDYMACVTERIDFLKQKVYAWASRIRRYRERVDRYQQNRLFQSDQRKVYRKWEGTEHRVCDGQRPDATAMVNFWRSIWSVPVEHTEGAWIGVVERDCESIEPMGSVTISPEDVSCAIRTAPNWKSPGPDGLHNFWLKWFRCSHERLATQFQQALELGSLPPPLTTGVTSLLYKSGSTTEAKNYRPITCLPTLYKVLTSILRAKINTHIVTNNILAPAQNGCRVGSRGTKELLLIDMTICQRVRRNRGTLSASWIDYKKAYDSVPHSWLRRILELYKVDAPLRSFLSACMGQWTTVLRQPGGGDGPSGPQDSIRIERGIFQGDSLSPLWFCLALNPLSTLLQDSGLGCQLRRGGEVISHLLYMDDLKLFAPNRQDLLELLKTTEVFSSAIKMEFGVDKCAVMHVQRGKVVNSTNLQLSETMSLRSLSEAETYKYLGMSQALGIEGEGIKQAVKERFFCRLTKVLNSFLSGGNKARAFNAWVMPLLTYSFGILRWTQTELDALDRRVRVLLTAHRMLHPRSSVMRLYIPRKCGGRGFLNAKDLHNREVCSLRDYFLNSECGMHRDVVAVDASFTPLSMANENWRRFKVLSTEDRKAEWKSKELHGRFYRALTGPDVDLLASLNWLRFGDLFGETEGFVCAIADEVIMTNNYRKYILKDGTVDICRACGRPGESLRHIISGCSHLANGEYLHRHNLVARIIHQQLALSYGLVDFEVPYYKYLPAPVLENGRATLYWDRSIITDRTIVANKPDIVLIDRSKRQAVLVDITIPHDENLVKAEKDKVSKYLDLAHEVTAMWDVDSTIIVPIVVSANGLIAKRLDQHLKRLSLDGWVKGQIQKAVLLDTARIVRRFLSLSP

SEQ ID NO: 5622 - protein, 1207 aa, Crocallis elinguaria
MITRSRNKAGTASARQPPPPASSSPSSSSGDEYGTPLDTSASSDEDGLPSPPPPPPPARRGRPPLPARLGPVGHSVPRAAPATGGIVRRMRWTSDMNENCMRAYYGATEGGTNMSAYRDRMLPLFQTLEPSVAVSTQRLSDQVRAIQRLKLLDESVLDRLRLEALPIRATSASTRDLSVAPPVPAPLPAPSSVATRIDPVVDEDDCANISVSTQVNEQLRRALEDAILEYQYTPDSRPRLPRLPTNRRNLALMGALNVLLAPYLRASENLFDTHSIMYCGAIAVCRVARVKFPDADRAPRTAGNAPAWQVRIERRINTFRTLIAKLVCFSRGNNRPRVMRFVNQAFAGTGIRPQNYMAGVTERIDFLKQKIYAWVNRIRRYRERVDRYHQNRLFESDQRKVYRNWEGTDQRVSDGQMPDTNAMINFWRGIWSVPVEHTEGDWMRTVEQSCESIETMGSVTIDPIDVSCAIRTAQNWKSPGPDGLHNFWIKWIRCSHECLAVQFQEALELGSLPCFLTTGVTSLLHKSGSTTEAKNYRPITCLPTLYKLLTSILRAKINSHVVANNILAPAQNGCRVGSRGTKELLLIDTAICQQVRRNRGALSTAWIDYKKAYDSVPHSWLERILELYKIDTTLRSFLSTCMRQWTTVLRQPGSGNSPSGPENFIKIERGIFQGDSLSPLWFCLALNPLSTLLRDSRLGCKLRREGEIISHLLYMDDLKLLAPKSPDLMKLLKITEIFSSAIKMEFGVDKCAVMHVQRGKVVNSDNLQLSETMTLRSLSEAETYRYLGMSQSLGIAVGDIKQSVKERFFCRLTKVLNSLLSGGNKARAFNGWVMPLLIYSFGILKWTQTELDSLDRRVRQLLTYHRMLHPPSSVMRLYIPRKWGGRGFLNAKTLHNREVCSLREYFLNNECGMHRDVVAVDRNLTPLSLANENWRKPVVMTTEDRKDVWKGKELHGRFYRALTGSDVDLLASVNWLRFGDLFGETEGFVCAIMDEVIKTNNYRKYIMKDGTVDICRACRRPGESLRHIISGCSHLANGEYLHRHNLVARIIHQQIALQYGLVESEVPYYKYAPAPVLENGRALLYWDRSIITDRTIVANKPDIVLVDRSQRRAVLVDITVPHDENLVKAEKDKLSKYLDLAHEVTAMWNVDSTIIVPIVVSANGLVAKSLDQHLKRLSLDGWIKGRMQKAVLLDTARIVRRFLTLQP

SEQ ID NO: 5623 - protein, 1209 aa, Pammene fasciana
MITRSKTRLQQASPPNARPPSSPASSISSQSSSGDEFATAPDTSESSDERGPPPPPPRPPARRGRPPLPARLGLAGHPAPPRAPAAGGIVRRMRWTQTMNENVMRAYYGATEGGTNLCAYRVRLLPLFRALEPTTNVTAQRLSDQVRVIQRDKRLDDSTLDRLRLEALSAHAASTSARDPPATAPDPMPAPDLASGAPRVDPEEEIATQSVSSTANEQLRRTLEEAITQYRSTNIPRPRLPRLPMNRRNLALMGALNDLLDPFLRTSKDLDDTHSIMYCGAIAACRVARVKFPDAERAPRTAGGVPAWQVRIERRINSFRTLIAKLICFRGGNNRPRVMRFVHQAFAGTDIEPRDYMANVTERIDFLKQKVYAWASRIRRYRERVDRFRQNRLFQSDQRKVYRRWEEADPRVSDVRLPDATAMSDFWRSIWSAPVEHTEGEWMSVVERECETIEPMGAITISPDDVSCAIRTAQNWKSPGPDGLHNFWLKWFRCSHSRLATQFQQALELGSLPPSLTTGVTFLLYKSGSTTEAKNYRPITCLPTLYKLLTSILRAKINAHMVANNILASAQNGCRVGSRGTKELLLIDMTICQRVRRNRGALSAAWIDYKKAYDSVPHSWLERILELYKIDAALRSFLGACMRQWTTVLRQPGGGDDPPGPQDFIRIERGIFQGDSLSPLWLCLALNPLSTLLKDSGLGCRLRREGEVISHLLYMDDLKLFAPNNRDLLELLKTTEVFSSSIKMEFGVDKCAVMHVQRGKVVNSTNLQLSETMTFRSISESETYKYLGMSQSLGIEDAGIKQALRERFFGRLTKVLNSLLSGGNKVRAFNAWVMPLLTYSFGILRWTQTELDALDRRVRQLLTTHSMLHPRSSVMRLYIPRKCGGRGFLNAKNLHNREVYNLRNYFLNNECGMHRDVVAIDKGLTPLSLANENWRKPVVLSTEDRKAVWKSKELHGRFYGALTGPDVDLLASVNWLRFGDLFGETEGFACAIADEVIMTNNYRRYILKDGTVDICRACRRPGESLRHIISGCSHLANGEYLHRHNLVARIIHQQLALLYGLVDHEVPYYKYTPAPVLENGRATLYWDRSIITDRTIVANKPDIVVIDRPQRRAMLVDITVPCDVNLVKAEKDKSSKYLDLAHEVTAMWEVDSAIIVPIVVSANGLIAKSLDQHLERLSLRGCGWIKGQIQKAVILDTARIVRRFLSLRP

SEQ ID NO: 5624 - protein, 1209 aa, Pammene fasciana
MITRSRTKAASTNARPPSSPASSVSSPSSSGDEFATAPDTSESSDECGPPPPPPRPPARRGRPPLPARLGLAGHPVPPRAPAAGGIVRRMRWTPAMNENVMRAYYGATEGGTNLSAYRDRILPLFQALEPTIDTTAQRLSDQVRAIQRLKRLDDATLDRLRLEALSARADSTSVRDPPATSPDPMPVPDLASGAPRIDPSADEEYIASQSMSSTANEQLRRTLEEAITQYRSTNIPRPRLPRLPMNRRNLALMGALNDLLDPILRTSKDLDDTHSIMYCGAIAACRVARVKFPDAERAPRTAGGVPVWQVRIERRINSFRTLIAKLICFRGGNNRPRVMRFVHQAFAGTGIEPRDYMANVTERIDFLKQKVYAWASRIRRYRERVDRFRQNRLFQSDQRKVYRRWDEADPRVSDARLPDATAMTDFWRSIWSAPVEHTEGEWMSVVERECESIEPMGAITISPDDVSCAIRTAQNWKSPGPDGLHNFWLKWFRCSHSRLATQFQQALELGSLPPSLTTGVTFLLYKSGSTTEAKNYRPITCLPTLYKLLTSILRAKINAHIVANNILASSQNGCRVGSRGTKELLLIDMTICQRVRRNRGALSAAWIDYKKAYDSVPHSWLERILELYKVDAALRSFLGACMRQWTTVLRQPGGGDDPPDPHDFIRIERGIFQGDSLSPLWFCLALNPLSTLLKDSGLGCRLRREGEVISHLLYMDDLKLFAPNNRDLMELLKTTEVFSSSIKMEFGVDKCAVMHVQRGKVVNSTNLQLSETMTFRSISESETYKYLGMSQSLGIEDAGIKQALKERFFGRLTKVLNSLLSGGNKVRAFNAWVMPLLTYSFGILRWTQTELDALDRRVRLLLTTHRMLHPRSSVMRLYIPRKCGGRGFLNAKNLHNREVYNLRNYFLNNECGMHRDVVAVDKSLTPLSLANENWRKPVVLSTEDRKAVWKSKELHGRFYGALTGPDVDLLASVNWLRFGDLFGETEGFACAIADEVIMTNNYRRYILKDGTVDICRACRRPGESLRHIISGCSHLANGEYLHRHNLVARIIHQQLALLYGLVDHEVPYYKYTPAPVLENGRATLYWDRSIITDRTIVANKPDIVIIDRSQRRAMLVDITVPCDVNLVKAEKDKSSKYLDLAHEVTAMWEVDSAIIVPIVVSANGLIAKSLDQHLERLSLRGCGWIKGQIQKAVILDTARIVRRFLSLRP

SEQ ID NO: 5625 - protein, 1202 aa, Campaea margaritaria
MFTRSKAATNAHLSSQSAPSSPKSTSSESEYGTPPDTSDVSGPPSPPSPPRPVRRGRPPLPARLGPMGQLAPRPAPATSSKAQRMKWTTTINTSCMRAYYGATEGGTNLTAYRNRMLSLFQTLEPTVAVSAQRLSDQVRAIHRCKLMEQSTLDRLRLEALPVSTTSTSGRDLPETPSIPGPVITSTPVASRVDTEVVDGECGNMSVSSQVTEQLRRTLEDAIRQYRFTSDSRPRLPRVPTHRRNLALMGALDALLAPYLQTSKDLIDTHSILYCGAIAVCRVARVKFPDTEQVPRTLGHAPAWQVRIQRRIDTYRTLIAKLVCFSRGNNRPRVMRFVNQAFAGTDIRPRNYMTCVTERIDFLKQKVYAWANRIRRYRERVNRYCQNRLFQSDQRKVYINWEVTGQRMDDGQLPDVTAMINFWRGIWSVPVEHTEGDWMNIVERACDPIESMEAVSISPIDVRYAIQTAQNWKSPGPDGLQNFWIKWIRSSHSCLAMQFQEAIELGSLPSFMTTGSTTLLFKSGSTTEAKNYRPITCLPTMYKLLTSILRTKINSHIIANNILAPAQNGCRVGSRGTKELLLIDMTICQQVRRKKGALSTAWVDYKKAYDSVPHSWLVRILELYKIDTTLRSFLRTCMGQWSTVLRQPGGGDSVFGPQDFIRIERGIFQGDSLSPLWFCLALNPLSTLLQNSGLGYRLRREGEIISHLLYMDDLKLFAPKRFDLMKLLNITEEFSKSINMEFGVDKCAVMHVQRGKVVNSSNLQLSESLSLRSLSEAETYKYLGMSESLGIVDRDIKQSVKERFFCRLTKVLNSHLSGGNRARAFNGWVMPLLTYSFGILRWTQTELDALDRRVRQQLTLHRMLHPRSSVMRLYIPRKWGGRGFLNAKNLHNREVCSLREYFLNTECGMHRDVVVVDKTLTPLSLANGNWRKPSVLSTDDRKDVWKGKELHGRFYRALTGPDVDLLASVNWLRFGDLFGETEGFVCAIADEVIKTNNYRKYIMKDGTVDICRACRRPGESLRHIISGCSHLANGEYLHRHNQVARIVHQQLALQYGLVELEVPYYKYAPAPVLENGRALLYWDRSVITDRTIVANKPDIVLVDRSQRRAVLVDITVPHDENLVKAEKDKLSKYLDLAHEVTAMWDVDSTIIVPIVVSANGLVAKSLDQHLKRLSLDGWIKGRMQKAVLLDTARIVRRFLSLQP

SEQ ID NO: 5626 - protein, 1020 aa, Ennomos quercinarius
MGPLPVTPRGDPAIDGEESASDSVSTQANEQLRSALEDAILRYRSTPTSRPRLPRLPTNRRNLVLMGALNTLLAPYLRTSEDLVDTHSILYCGAIAACRVARVKFPDTDRAPRPADGAPAWQVRIEKRITTFRTLIAKLVCFSRGNHRPRVMRFVTQAFAGTGIRPQDYMACVTERIDFLKQKVYAWASRIRRYRERVDRYQQNRLFQSDQRKVYRNWEGTGQRVVDGQLPDANATNEFWRSIWSVPVEHTEGDRMRVVERVCEPIESMGSITIDPEDISCAIRTAQNWKSPGPDGLHNFWIKWIRCSYPCLAIQFQEALEAGSLPSFMTTGVTFLFHKSGSTTEAKNYRPITCLPTLYKLLTSILRTKINSHIVANNILAPAQNGCRVGSRGTKELLLIDTAICQQVRRNRGALSTAWIDYKKAYDSVPHSWLERILELYKIDATLRSFLSACMRQWTTVLRQPGGGESVSDPQDFIRIERGIFQGDSLSPLWFCLALNPLSTLLGDSGLGYRLRRGGEIISHLLYMDDLKLFAPQRPQLIELLKITENFSNSINMEFGVDKCAVMHVHRGKVVNSTNLQLSETMTLRSLSESETYRYLGMSESLGISVGDVKRTVKERFFCRLTKVLNSLLSGGNKTRAFNGWVMPLLMYSFGILRWTQTELDALDRKVRQLLTSHRMLHPRSSVMRLYIPRKWGGRGFLNAKTLHNREVCSLRDYFLNNECGMHRDVVAVDKGLTPLSLANENWRKPVVLSTEDRRDVWKGKELHGRFYRALTGPDVDLHASVNWLRFGDLFGETEGFVCAIADEVIKTNNYRKYIMKDGTVDICRACRRPGESLRHIISGCSHLANGEYLHRHNLVARIIHQQLALQYGLVESEVPYYKYTPGPVLENGRALLYWDRSIITDRTIVANKPDIVLVDRSQRRAVLVDITIPHDENLVKAEKDKLSKYLDLAHEVTAMWNVDSTSIVPIVVSANGLIAKSLDQHLEKLSLDGWIKGQIQKAVLLDTARIVRRFLTLQP

SEQ ID NO: 5627 - protein, 1055 aa, Ennomos quercinarius
MLDEPTLDRLRLEALPIRATSPSPRVLPAALPDPGPIMGPLPVTPRGDPAIDGEESASDSVSTQANEQLRSALEDAILQYRSTPTSRPRLPRLPTNRRNLVLMGALNTLLAPYLRTSEDLVDTHSILYCGAIAACRVARVKFPDTDGAPRPADGAPAWQVRIEKRITTFRTLIAKLVCFSRGNHRPRVMRFVTQAFAGTGIRPQDYMACVTERIDFLKQKVYAWASRIRRYRERVDRYQQNRLFQSDQRKVYRNWEGTGQRVVDGQLPDANAMNEFWRSIWSVPVDHTEGDWMRVVERVCEPIESMGSITIDSEDISCAIRTAQNWKSPGPDGLHNFWIKWIRCSYSCLAIQFQEALEAGLLPSFMTTGVTFLLHKSGSTTEAKNYRPITCLPTLYKLLTSILRTKINSHIVANNILAPAQNGCRVGSRGTKELLLIDTAICQQIRRNRGALSTAWIDYKKAYDSVPHSWLERILELYKIDATLRSFLSACMRQWTTVLRQPGGGESVSDPQDFIRIERGIFQGDSLSPLWFCLALNPLSTLLGDSGLGYRLRRGGEIISHLLYMDDLKLFAPQRPQLIELLKITANFSNSINMEFGVDKCAVMHVHGGKVVNSTNLQLSETMTLRSLSESETYRYLGMSESLGISVGDVKRTVKERFFCRLTKVLNSLLSGGNKTRAFNGWVMPLLMYSFGILRWTQTELDALDRKVRQLLTSHRMLHPRSSVMRLYIPRKWGGRGFLNAKTIHNREVCSLREYFLNNECGMHRDVVAVDKGLTPLSLANENWRKPVVLTTEDRRDVWKGKELHGRFYRALTGPDVDLHASVNWLRFGDLFGETEGFVCAIADEVIKTNNYRKYIMKDGTVDICRACRRPGESLRHIISGCSHLANGEYLHRHNLVARIIHQQLALQYGLVESEVPYYKYTPGPVLENGRALLYWDRSIITDRTIVANKPDIVLVDRSQRRAVLVDITIPHDENLVKAEKDKLSKYLDLAHEVTAMWNVDSTSIVPIVVSANGLIAKSLDQHLERLSLDRFRRQYSLTRHVLSGGSSLCSPDHR

SEQ ID NO: 5628 - protein, 963 aa, Cydia splendana
MNRRNLALMGALNALLEPYLRTSKDLDDTHAIMYCGAIAACRVARVKFPDAEHAPRTAGGAPAWQIRIERRISSFRTLIAKLICFRGGNNRPRVMRFVNQAFAGTDIRPRDYMANVTERIDFLKQKVYAWANRIRRYRERVDRFQQNRLFQSDQRKMYRRWEETNLRASDSRPPDATVMNDFWRSIWSVPVGHTEGSWMSVVERECESIEPMGAVTISPDDVNCAIRTAQNWKSPGPDGLHNFWLKWFRCSHSCLAAQFQQALELGSLPPSLTTGVTFLLYKSGSTTEAKNYRPITCLPTLYKLLTSILRAKINAHIVANNILASAQNGCRVGSRGTKELLLIDMTICQQIRRNKGALSAAWIDYKKAYDSVPHSWLGRVLELYKVDAALRAFLSACMGQWTTVLRQPGGGDDRPGPQDFIRIERGIFQGDSLSPLWFCLALNPLSTLLKDLGLGYRLRREGEVISHLLYMDDLKLFAPNSQDLLELLKTTEVFSSAIHMEFGVDKCAVMHVQRGRVVNSTNLQLSETMSFRSISESETYKYLGMSQSLGIEDEGIRRSVKERFFSRLTKVLNSLLSGGNKVRAFNAWVMPLLTYSFGILRWTQTELDALDRRVRSLLTTHRMLHPRSSVMRLYIPRKCGGRGFLNAKDLHNREVYNLRNYFLNNECGMHRDVVAIDRNLTPLSLANQNWRKPVVLSTADRKAAWESKVLHGRFYKALTGPDVDLLASVNWLRFGDLFGETEGFACAIADEVMMTNNYRKYILKDGTVDICRACRRPGESLRHIISGCSHLANGEYLHRHNLVARIIHQQLALLYGLVDREVPYYKYLPAPVLENGRATLYWDRSIITDRTIVANKPDIVLIDRLQRRAVLADVTIPHDENLVKAEKDKSSKYLDLAHEITAMWDVDSTIIVPIVVSVNGLIAKSLDQHLERLSLGGWIKGQMQKAVILDTARIVRRFLTLRP

SEQ ID NO: 5629 - protein, 1209 aa, Cydia splendana
MQTRSKTRAQLASPRNARPPPPSASSVSSQSSSGDEFATAPDTSESSDECGPPPPPSRPPARRGRPPLSARLGPAGHPAPPTAPAAGGVVRRMRWSQTINENVMRAYYGATEGGTNLCAYRVRMLPLFQALEPTIDVTAQRLSDQVRVIQRQKRLDDSTLDRLRLEALSARAASTSARDPPATSPDPVPAPDQAPGAPRVDLSADEEEFAQSVGSTANEQLRRTLDEAITRYRSTPDTRPRLPRLPMNRHNLALMGALNALLEPYLRTSKDLDDTHAIMYCGAIAACRVARVKFPDSERAPRTAGGAPAWQIRIERRISSFRTLIAKLICFRGGNNRPRVMRFVNQAFVGTDIRPRDYMANVTERIDFLKQKVYAWANRIRRYRERVDRFQQNRLFQSDQRKMYRKWEETNLRASDSRPPDATVMNDFWRSIWSVPVGHTEGSWMSVVERECESIEPMGAVTISPDDVSCAIRTAQNWKSPGPDGLHNFWLKWFRCSHSYLAAQFQQALELGSLPPSLTTGVTFLLYKSGSTTEAKNYRPITCLPTLYKLLTSILRAKINAHIVANNILASAQNGCRVGSRGTKELLLIDMTICQQIRRTKGALSAAWIDYKKAYDSVPHSWLGRVLELYKVDAALRAFLSACMGQCTTVLRQPGGGDDRPGPQDFIRIERGIFQGDSLSPLWFCLALNPLSTLLKDLGLGCRLRREGEVISHLLYMDDLKLFAPNTQGLLELLKTTEVFSSAINMEFGVDKCAVMHVQRGKFVNSTNLQLSETMSFRSISESETYKYLGMSQSLGIEDEGIRRSVKERFFSRLTKVLNSLLSGGNKVRAFNAWVMPLLTYSFGILRWTQTELDALDRRVRSLLTTHRMLHPRSSVMRLYIPRKCGGRGFLNAKDLHNREVYNLRNYFLNNECGMHRDVVAVDRNLTPLSLANENWRKPVVLSTADRKAAWESKALHGRFYKALTGPDVDLLASVNWLRFGDLFGETEGFACAIADEVMMTNNYRKYILKDGTVDICRACRRPGESLRHIISGCSHLANGEYLHRHNLVARIIHQQLALLYGLVDREVPYYKYLPAPVLENGRATLYWDRSIITDRTIVANKPDIVLIDRSQRRAVLADVTIPHDENLVKAEKDKSSKYLDLAHEITAMWDVDSTIIVPIVVSANGLIAKSLDQHLERLSLGGWIKGQMQKAVILDTARIVRRFLTLRH

SEQ ID NO: 5630 - protein, 1210 aa, Cydia splendana
MITRSQRRAAELTNNARPPPPPAPPSSSSTTSSGDEFATAPDTDGSSDESGPPPPPPRPPARRGRPPLPARLGPAGHPAPPTAPAAGGIVRRMRWTRNMNENVMRAYYGATEGGTQLSAYRSRILPLFQALEPTINVSEQRLSDQVRVIQRLKRLDDATLDRLRQEALSARADSTSVRDLPATSPDPVPAPDLAPGAPRVDFYTDEGDFASQNVNITANEQLRRTLEEAITQYRVTTNSRPRLPRLPMNRRNLALMGALNALLEPHLRTSKDLDDTHSIMYCGAIAACRVARVKFPDTERAPRTVGGVPAWQARIERRIGSFRTLIAKLICFRGGNNRPRVMHFVNQAFAGTDIRPRDYMANVTERIDFLKQKVYAWANRIRRYRERVDRFQQNRLFQSDQRKVYRKWEEANLRAPDTQPPDATAMTDFWRSIWSVPVGHTEGGWMSVVERECESIEPMGAVTISPDDVSCAIRTAQNWKSPGPDGLHNFWLKWFRCSHSRLAVQFQQALELGSLPPSLTTGVTFLLYKSGSTTEAKNYRPITCLPTLYKLLTSILRAKINAHIVANNILASAQNGCRVGSRGTKELLLIDMTICQQIRRNKRALSAAWIDYKKAYDSVPHSWLGRVLELYKVDAALRAFLSACMRQWTTVLRQPGGGGDRSGPQDFIRIERGIFQGDSLSPLWFCLALNPFSTLLKDLGLGCRLRREGEVISHLLYMDDLKLFAPNSQDLLELLKTTEVFSSAIHMEFGVDKCAVMHVQRGRVVNSTNLQLSETMSFRSISESETYKYLGMSQSLGIEDEGIRRSVKERFFSRLTKVLNSLLSGGNKVRAFNAWVMPLLTYSFGILRWTQTELDALDRRVRSLLTAHRMLHPRSSVMRLYIPRKCGGRGFLNAKDLHNHEVYNLRNYFLNNECGMHRDVVAVDRNLTPLSLANENWRKPVVLSTADRKAAWESKVLHGQFYKALTGPDVDLLASVNWLRFGDLFGETEGFACAIADEVMMTNNYRKYILKDGTVDICRACRRPGESLRHIISGCSHLANGEYLHRHNLVARIIHQQLALLYDLVDREVPYYKYLPAPVLENGRATLYWDRSIITDRTIVANKPDIVIIDRSQRRAVLVDITIPHDENLVKAEKDKSSKYLDLAHEITAMWDVDSTIIVPIVVSVNGLIAKSLDQHLERLSLGGWIKGQMQKAVILDTARIVRRFLSLQP

SEQ ID NO: 5631 - protein, 1078 aa, Cydia splendana
MLPLFQALEPTIDVTAQRLSDQVRVIQRQKRLDDSTLDRLRMEALSARAASTSARDPPATSPDPVPAPDQAPGAPRVDLSADEEEFAQSVSSTANEQLRRTLDEAITQYRSTPNTRPRLPRLPMNRHNLALMGALNALLEPYLRTSKDLDDTHAIMYCGAIAACRVARVKLPDSERAPRTAGGAPAWQVRIERRISSFRTLIAKLICFRGGNNRPRVMRFVNQAFAGTDTRPRDYMANVTERIDFLKQKVYAWANRIRRYRERVDRFQQNRLFQSDQRKMYRKWEETNLRASDSQPPDATVMNDFWRSIWSVPVGHTEGSWMSVVERECESIEPMGAVTISPDDVSCAIRTAQNWKSPGPDGLHNFWLKWFRCSHSCLAAQFQQALELGSLPPSLTTGVTFLLYKSGSTTEAKNYRPITCLPTLYKLLTSILRAKINAHIVANNIFASAQNGCRVGSRGTKELLLIDMTICQQIRRTKGALSAAWIDYKKAYDSVPHSWLGRVLELYKVDAALRAFLSACMGQWTTVLRQPGGGDDRPGPQDFIRIERGIFQGDSLSPLWFCLALNPLSTLLKDLGLGCRLRREGEVISHLLYMDDLKLFAPNTQGLLELLKTTEDFSSAINMEFGVDKCAVMHVQRGRVVNSTNLQLSETMSFRSISESETYKYLGMSQSLGIEDEGIRRSVKERFFSRLTKVLNSLLSGGNKVRAFNAWVMPLLTYSFGILRWTQTELDALDRRVRSLLTTHRMLHPRSSVMRLYIPRKCGGRGFLNAKDFHNREVYNLRNYFLNNECGMHRDVVAVDRNLTPLSLANVNWRKPVVLSTAGRKAAWESKVLHGRFYKALTGPDVDLLASVNWLRFGDLFGETEGFACAIADEVMMTNNYRKYILKDGTVDICRACRRPGESLRHIISGCSHLANGEYLHRHNLVARIIHQQLALLYGLVDREVPYYKYLPAPVLENGRATLYWDRSIITDRTIVANKPDIVLIDRSQRRAVLADVTIPHDENLVKAEKDKSSKYLDLAHEITAMWDVDSTIIVPIVVSANGLIAKSLDQHLERLSLGGWIKGQMQKAVILDTARTL

SEQ ID NO: 5632 - protein, 963 aa, Cydia splendana
MNRRNLALMGALNALLDPHLRTSKDLDDTHSIMYCGAIAACRVARVKFPDAERAPRTAGGVPAWQVRIERRISSFRTLIAKLICFREGNNRPRVMRFVNQAFAGTDIRPRDYMANVTERIDFLKQKVYAWANRIRRYRERVDRFQQNRLFQSDQRKVYRKWEETNLRTPDTQPPDVTAMTDFWRSIWSVPVGHTEGGWMSVVERECESIEPMGAVTISPDDVSCAIRTAQNWKSPGPDGLHNFWLKWFRCSHSRLAAQFQQALELGSLPPSLTTGVTFLLYKSGSTTEAKNYRPITCLPTLYKLLTSILRAKINAHIIANNILASAQNGCRVGSRGTKELLLIDMTICQQIRRNKGALSAAWIDYKKAYDSVPHSWLGRVLELYKVDAALRAFLSACMRQWTTVLRQPGGGDDRPGPQDFIRIKRGIFQGDSLSPLWFCLALNPLSTLLKDLGLGCRLRREGVVISHLLYMDDLKLFAPNSQDLLELLKTTDVFSSAIHMEFGVDKCAVMHVQRGKVVNSTNLQLSETMSFRSISESETYKYLGMSQSLGIEDEGIRRSVKERFFSRLTKVLNSLLSGGNKVRAFNAWVMPLLTYSFGILRWTQTELDALDRRVRSLLTTHRMLHPRSSVMRLYIPRKCGGRGFLNAKDLHNREVYNLRNYFLNNECGMHRDVVAVDRNLTPLSLANENWRKPVVLSTADRKAAWESKVLHGRFYKALTGPDVDLLASVNWLRFGDLFGETEGFACAIADEVMMTNNYRKYILKDGTVDICRACRRPGESLRHIISGCSHLANGEYLHRHNLVARIIHQQLALLYGLVDREVPYYKYLPAPVLENGHATLYWDRSIITDRTIVANKPDIVIIDRSQRRAVLVDITIPHDENLVKAEKDKSSKYLDLAHEITAMWDVDSTIIVPIVVSVNGLIAKSLDQHLERLSLGGWIKGQMQKAVILDTARIVRRFLSLQP

SEQ ID NO: 5633 - protein, 1117 aa, Cydia splendana
MRWSQTMNENVMRAYYGATEGGTDLCAYRVRMLPLFQALEPTIDVTAQRLSDQVRVIQRLKRLDDSTLDRLRLEALSTRAASTSVRDPPATSPDPVPAPDQAPEAPRVDLCADEEEFAQSVSSTANEQLRRTLDEAITQYRSTPNTRPRLPRLPMNRHNLALMGALNALLEPYLRTSKDLDDTYAIMYCGAIAACRVARVKFPDSERAPRTAGGAPAWQIRIERRISSFRTLIAKLICFRGGNNRPRVMRFVNQAFAGTDIRPRDYMANITERIDFLKQKVYAWANRIRRYRERVDRFQQNRLFQSDQRKMYRKWEETNPRASDSQPPEATVMNDFWRSIWSVPVGHTEGSWMSVVERECESIEPMGAVTISPDDVSCAIRTAQNWKSPGPDGLHNFWLKWFRCSHSCLAAQFQQALELGSPPPSLTTGVTFLLYKSGSTTEAKNYRPITCLPTLYKLLTSILRAKINAHIVANNILASAQNGCRVGSRGTKELLLIDMTICQQIRRNRGALSAAWIDYKKAYDSVPHSWLERVLELYKVDTALRAFLSACMRQWTTVLRQPGGGDGSPGPQDFIRIERGIFQGDSLSPLWFCLALNPLSTLLKDLELGCRLRRGGEVISHLLYMDDLKLFAPNSQDLVELLKTTEVFSNAINMEFGVDKCAVMHVQRGKVVNSTNLQLSETMSFRSISESETYKYLGMSQSLGIEEEGIRRSVKERFFSRLTKVLNSLLSGGNKVRAFNAWVMPLLTYSFGILRWTQTELDALDRRVRQLLTTHRMLHPRSSVMRLYIPRKCGGRGFLNAKNLHNREVYNLRNYFLNNECGMHCDVVAADKGLTPLSLANENWRKPVVLSTEDRKAVWKDKQLHGRFYKALTGPDVDLLASVNWLRFGDLFGETEGFACAIADEVLMTNNYRKYILKDGTVDICRACRRPGESLRHIISGCSHLANGEYLHRHNLVARIIHQQLALLYGLVDREVPYYKYSPAPVLENGRATLYWDRSIITDRTIVANKPDIVLIDRSQRRTVLVDVTIPHDENLVKAEKDQSSKYLDLAHEITAMWDVDSTIIVPIVVSANGLIAKSLDQHLERLSLGGWIKGQMQKAVILDTARIVRRFLTLRP

SEQ ID NO: 5634 - protein, 1209 aa, Cydia splendana
MQTRSKTRAQLASPRNARPPPPSASSVSSQSSSGDEFATAPDTSESSDECGPPPPPSRPPARRGRPPLSARLGPAGHPAPPTAPAAGGVVRRMRWSQTINENVMRAYYGATEGGTNLCAYRVRMLPLFQALEPTIDVTAQRLSDQVRVIQRQKRLDDSTLDRLRLEALSARAASTSARDPPATSPDPVPAPDQAPGAPRVDLSADEEEFAQSVGSTANEQLRRTLDEAITRYRSTPDTRPRLPRLPMNRHNLALMGALNALLEPYLRTSKDLDDTHAIMYCGAIAACRVARVKFPDSERAPRTAGGAPAWQIRIERRISSFRTLIAKLICFRGGNNRPRVMRFVNQAFVGTDIRPRDYMANVTERIDFLKQKVYAWANRIRRYRERVDRFQQNRLFQSDQRKMYRRWEETNLRASDSRPPDATVMNDFWRSIWSVPVGHTEGSWMSVVERECESIEPMGAVTISPDDVSCAIRTAQNWKSPGPDGLHNFWLKWFRCSHSYLAAQFQQALELGSLPPSLTTGVTFLLYKSGSTTEAKNYRPITCLPTLYKLLTSILRAKINAHIVANNILASAQNGCRVGSRGTKELLLIDMTICQQIRRTRGALSAAWIDYKKAYDSVPHSWLGRVLELYKVDAALRAFLSACMGQWTTVLRQPGGGDDRPGPQDFIRIERGIFQGDSLSPLWFCLALNPLSTLLKDLGLGCRLWREGEVISHLLYMDDLKLFAPNTQGLLELLKTTEVFSSAINMEFGVDKCAVMHVQRGKVVNSTNLQLSETMSFRSISESETYKYLGMSQSLGIEDEGIRRSVKERFFSRLTKVLNSLLSGGNKVRAFNAWVMPLLTYSFGILRWTQTELDALDRRVRSLLTTHRMLHPRSSVMRLYIPRKCGGRGFLNAKDLHNREVYNLRNYFLNNECGMHRDVVAVDRNLTPLSLANENWRKPVVLSTADRKAAWESKALHGRFYKALTGPDVDLLASVNWLRFGDLFGETEGFACAIADEVMMTNNYRKYIVKDGTVDICRACRRPGESLRHIISGCSHLANGEYLHRHNLVARIIHQQLALLYGLVDREVLYYKYLPAPVLENGRATLYWDRSIITDRTIVANKPDIVLIDRSQRRAVLADVTIPHDENLVKAEKDKSSKYLDLAHEITAMWDVDSTIIVPIVVSANGLIAKSLDHHLERLSLGGWIKGQMQKAVILDTARIVRRFLTLRP

SEQ ID NO: 5635 - protein, 869 aa, Agriopis aurantiaria
MRFVTQAFAGTDITPQHYLANVTERIDYLKQKVYAWANRIRRYRERVDRYWQNRLFQSDQRKVYRGWEETDQRVSDGQRPDANAMINFWRGIWSVPVNHTEGDWMRVVERECESIEPMGSILIDPVDVSCAIRMAQNWKSPGPDGLHNFWIKWIRCSHDRLATQFQEALELGSLPSFMTTGVTFLLHKSGSTTEAKNYRPITCLPTIYKLLTSILRNKINAHIVANNVLAHAQNGCRVGSRGTKELLLIDTAISQQVRRNRGALSAAWIDYKKAYDSVPHSWLERVLELYKIDTTLKSFLCACMRQWTTVLRQPGGGDGTSGPQDLIRIERGIFQGDSFSPLWFCLALNPLSTLLRDSGLGYRLRRDGQVISHLLYMDDLKLFTPKRQDLVELLKITDVFSSAIRMEFGVDKCAVMHVQQGKVVNSPNLQLSEVMTLRSLSEAETYKYLGMSESLGISVENIKKSVKERFFCRLTKVLNSLLSGGNKVRAFNGWVMPLLIYSFGILRWTQTELDALDRRVRQLLTSHRMLHPRSSVMRLYIPRKWGGRGFLNAKNLHNREVCSLRDFFRNSESGMHRDVVAVDRGLTPLSLANENWRKPSVLSIEDRRDVWKGKELHGRFYRALTGPDVDLLSSVNWLRFGDLFGETEGFACAIADEVIKTNNYRKYIMKDGTVDICRACHRPGESLRHIISGCSHLANGEYLHRHNQVARIIHQQLALRYGLVESEVPYYKYAPAPVLENGRALLYWDRSIITDRTIVANKPDIVLVDRSQRRAVLVDITIPHDENLVKAEKDKLSKYLDLAHEVTAMWDVDSTIIVPIVVSVNGLIAKSLDQHLKRLSLDGWVKGQMQKAVILDTARIVRRFLTLQP

SEQ ID NO: 5636 - protein, 1212 aa, Agriopis aurantiaria
MITRSRTKQADTKSARLPSPPASSSSPSTSSGEDEYHTTREASGSSSDTNGPGTPPPPPPARRGRPPLPARLGPVGHSAARPAPATGGVVRRMRWSTIMNEDCMRAYYRATEGGTNLSAYCARMLPLFQALQPTITVSAQRLSDQVRAIHRCKLLDDSVLDRLRQEELRARPIPVSTRDPPVASSAPTLASVPASVVTLAALADPVVDEGDLASGVSDQVREQLRGALEDAISQYRFTPDSRPRLPRLSTHRRNLALMGALNALLAPYLRASEDLVDTHSILYCGAIAACRVARVKFPDTNRAPRTAGGIPAWQVRIERRISTFRTLIAKLVCFRRGNNRPRVMRFVTQAFAGTDIRHQHYLANVTERIDYLKQKVYAWANRIRRYRERVDRYWQNRLFQSDQRKVYRGWEETDQRVSDGQLPDASAMINFWRGIWSVPVEHTEGDWMRVVERECESIEPMGSILIDPVDVSCAIRTAQNWKSPGPDGLHNFWIKWIRCSHDRLATQFQEALELGSLPSFMTTGVTFLLHKSGSTTEAKNYRPITCLPTIYKLLTSILRNKINAHIVANNVLAHAQNGCRVGSRGTKELLLIDTAISQQVRRNKGALSAAWIDYKKAYDSVPHSWLERVLELYKIDTTLKSFLGACMRQWTTVLRQPGGGDGAFGPQDLLRIERGIFQGDSFSPLWFCLALNPLSTLLRDSGLGYRLRRDGQVISHLLYMDDLKLFTPKRQDLVELLKITEGFSSAIRMEFGVDKCAVMHVQRGKVVNSPNLQLSEVMTLRSLSEAETYKYLGMSESLGISVENIKKSVKERFFCRLTKVLNSLLSGGNKVRAFNGWVMPLLIYSFGILRWTQTELDALDRRVRQLLTSHRMLHPRSSVMRLYIPRKWGGRGFLNAKNLHNREVCSLRDFFRNSESGMHRDVVAVDRGLTALSLANENWRKPSVLSIEDRRDVWKGKELHGRFYRALTGPDVDLLASVNWLRFGDLFGETEGFACAIADEVIKTNNYRKYIMKDGTVDICRACHRPGESLRHIISGCSHLANGEYLHRHNLVARIIHQQLALRYSLVESEVPYYKYAPAPVLENGRALLYWDRSIITDRTIVANKPDIVLVDRSQRRAVLADITIPHDENLVKAEKDKLSKYLDLAHEVTAMWDVDSTIIVPIVVSVNGLIAKSLDQHLKRLSLDGWVKGQMQKAVILDTARIVRRFLTLQP

SEQ ID NO: 5637 - protein, 1210 aa, Agriopis aurantiaria
MITRSKVKKNAAGTSTRPPPLPSSSDNSSGEEFLTPPETCSSSTSDEETTLPPPPPPVRRGRPPLPARLGPVGHPASRPAPATGGVVCRMRWTPSVNENCMRAYYEATEGGINLTAYRPRMLSLFQDLEPTVVVSAQRLSDQVRAIHRCKLLDDSVLDRLRLEELRARPTPALMRDPPVASSAPTLASLPASVATLAAPADPVVDEGDLTSNSVSDQVREQLRGALEDAISQYRFDPDSRPRLPRLPTHRRNLALMGALNALLAPYLRASEDLVDTHSILYCGAIAACRVARVKFPDTNRAPRTAGGVPAWQVRIERRISTFRTLIAKLICFRRGNNRPRVMRFVTQAFAGTDIRPQHYLANVMERIDYLKQKVYAWVNRIRRYRERVDRYWQNRLFQSDQRKVYRGWEETDQRVSDGQLPDASAMINFWRGIWSVPVEHTEGDWMRVVERECESIEPMRSILIDSIDVSCAIRTAQNWKSPGPDGLHNFWIKWIRCSHDRLATQFQEALELGSLPSFMTTGVTFLLHKSGSTTEAKNYRPITCLPTIYKLLTSILRNKINAHIVANNVLAHAQNGCRVGSRGTKELLLIDTAISQQVRRNKGALSAAWIDYKKAYDSVPHSWLERVLELYKIDTTLKSFLGACMRQWTTVLRQPGGGDGAFGPQDLLRIERGIFQGDSFSPLWFCLALNPLSTLLRDSGLGYRLRRDGQVISHLLYMDDLKLFTPKRQDLVELLKITEVFSSAIRMEFGVDKCAVMHVQRGKVVNSPNLQLSEVMTLRSLSEAETYKYLGMSESLGISVENIKKSVKERFFCRLTKVLNSLLSGGNKVRAFNGWVMPLLIYSFGILRWTQTELDALDRRVRQLLTLHRMLHPRSSVMRLYIPRKWGGRGFLNAKNLHNREVCSLRDFFRNSESGMHRDVVAVDRGLTALSLANENWRKPSVLSIEDRRDVWKGKELHGRFYRALTGPDVDLLASVNWLRFGDLFGETEGFACAIADEVIKTNNYRKYIMKDGTVDICRACHRPGESLRHIISGCSHLANGEYLHRHNLVARIIHQQLALRYSLVESEVPYYKYAPAPVLENGRALLYWDRSIITDRTIVANKPDIVLVDRSQRRAVLVDITIPHDENLVKAEKDKLSKYLDLAHEVTAMWDVDSTIIVPIVVSVNGLIAKSLDQHLKRLSLDGWVKGQMQKAVILDTARIVRRFLTLQP

SEQ ID NO: 5638 - protein, 1212 aa, Agriopis aurantiaria
MITRSRTKQADTKSARLPSPPASSSSPSTSSGEDEYHTTREASGSSSDTSGPGTPPPPPPARRGRPPLPARLGLVGHSATRPAPATGGVVRRMRWSTIMNEDCMRAYYRATEGGTNLSAYCARMLPLFQALQPTITVSAQRLSDQVRAIHRCKLLDDPVLDRLRQEELRARPIPVSTRDPPVASSAPTLASVPASVVTLAALADPVVDEGDLASGVSDQVREQLRGALEDAISQYRFTPDSRPRLPRLSTHRRNLALMGALNALLAPYLRASEDLVDTHSILYCGAIAACRVARVKFPDTNRAPRTAGGVPAWQVRIERRISTFRTLIAKLVCFRRGNNRPRVMRFVTQAFAGTDIRPQHYLANVTERIDYLKQKVYAWANRIRRYRERVDRYWQNRLFQSDQRKVYRGWEETDQRVSDGQLPDASAMINFWRGIWSMPVEHTEGDWMRVVERECESIEPMGSILIDSIDVSCAIRTAQNWKSPGPDGLHNFWIKWIRCSHDRLATQFQEALELGSLPSFMTTGVTFLLHKSGSTTEAKNYRPITCLPTIYKLLTSILRNKINAHIIANNVLAHAQNGCRVGSRGTKELLLIDTAISQQVRRNKGALSAAWIDYKKAYDSVPHSWLERVLELYKIDTTLKSFLGACMRQWTTVLRQPGGGDGALGPQDLLRIERGIFQGDSFSPLWFCLALNPLSTLLRDSGLGYRLRRDGQVISHLLYMDDLKLFTPKRQDLVELLKITEVFSSAIRMEFGVDKCAVMHVQRGKVVNSPNLQLSEVMTLRSLSEAETYKYLGMSESLGISVENIKKSVKERFFCHLTKVLNSLLSGGNKVRAFNGWVMPLLIYSFGILRWTQTELDALDRRVRQLLTSHRMLHPRSSVMRLYIPRKWGGRGFLNAKNLHNREVCSLRDFFRDSESGMHRDVVAVDRGLTALSLANENWRKPSVLSIEDRRDVWKGKELHGRFYRALTGPDVDLLASVNWLRFGDLFGETEGFACAIADEVIKTNNYRKYIMKDGTVDICRACHRPGESLRHIISGCSHLANGEYLHRHNLVARIIHQQLALRYSLVESEVPYYKYAPAPVLENGRALLYWDRSIITDRTIVANKPDIVLADRSQRRALLVDITIPHDENLVKAEKDKLSKYLDLAHEVTAMWDVDSTIIVPIVVSVNGLIAKSLDQHLKRLSLDGWVKGQMQKAVILDTARIVRRFLTLQP

SEQ ID NO: 5639 - protein, 966 aa, Hedya salicella
MPGAPRVDPDSDEEHCASSVSTQANEQLRRTLEETIERYRFAPDSRPRLPRLPANKRNLALVGALNALLDPYLRASEDLADTHSIMYCGAIAACRVARVKFPDADRAPRTAGGVPAWQVRIERRISTFRTLIAKLICFRGGNNRPRVMRYVAQAFAGTDISSCDYMACVTERIDFLKQKVYAWASRIRRYRERVDRFQQNRLFQSDQRKVYRKWEGTDQRVTDGRLPDPTAMSNFWRSIWSVPVEHTEGEWMNVVERECEPIEAMGAVTISPDDVSCAARTTQNWKSPGPDGLHNFWVKWFRCSHERLATQFQQALELGSLPSFLTTGVTFLLYKSGSTTEAKNYRPITCLPTLYKLLTSILRAKINTHIVANNVLAFSQNGCRVGSRGTKELLLIDTTICQQVRRSRGSLSAAWIDYKKAYDSVPHSWLERILELYKVDTALRSFLGACMRQWTTVLCQPGGRDARPAPQDSIRIKRGIFQGDSLSPLWFCLALNPLSTLLKDSGLGCRLRRGGEIISHLMYMDDLKLFAPKRPELVELLKVTDTFSSAIKMEFGVDKCAVMHVQRGKVVNSTNLELSETMSLRSLSETETYKYLGMSQALTIADGDIRQAVKERFFCRLTKVLNSLLSGGNKARAFNAWVMPLLTYSFGILRWTQTELDALDRRVRMLLTTHRMLQPRSSVMRLYIPRKCGGRGFLNAKDLHNREVCSLREYFLNNECGIHRDVVAVDKGLTPLSLGNENWRRPTVLSTVDRKDVWKSKELHGRFYKALTGPDVDLLASVNWLRFGDLFGETEGFSCAIADEVIMTNNYRRYILKDGTVDICRACRRPGESLRHIMSGCSHLANGEYLHRHNQVARIIHQQLAVKYDLVGSEVPYYKYVPMPVLENGRATLYWDRSILTDRTIVANKPDIVLVDRSKRRAMLVDITIPHDENLVKAERTNSASTLTWLTRSPPCGMLIRRSLRQ

SEQ ID NO: 5640 - protein, 1111 aa, Hedya salicella
MNEHCMRAYYGATEGGTHLSAYRDRMLLLFQTLEPAIAVSAQRLSDQVRAIQRRKLLDDAMLDQLRLEVLAARAASTSSRNPPATSPVSAPALDLVPGAPRVDPGSDEEHCASSVSTQANEQLRRTLEETIERYRFAPDSRPRLPRLPTNRRNLALVGALNALLDPYLRASEDLADTHSIMYCGAIAACRVARVKFPDADRAPRTAGGVPAWQVRIERRISTFRTLIAKLICFRGGNNRPRVMRYVAQAFAGTAVRPRDYMACVTERIDFLKQKVYAWASRIRRYRERVDRFQQNRLFQSDQRKVYRKWEGTDQRVTDGRLPDPTAMNNFWRSIWSVPVEHTEGGWMNVVERECEPIETMGAVTISPDDVSCAARTTQNWKSPGPDGLHNFWVKWFRCSHERLATQFQQALELGSLPSFLTTGVTFLLYKSGSTTEAKNDRPITCLPTLYKLLTSILRAKINTHIVANNVLAFSQNGCRVGSRGTKELLLIDTTICQQVRRNRGTLSAAWIDYKKAYDSVPHSWLGRILELYKIDTVLKSFIGSCMRQWTTVLRQPGGRDGPPDPQDFIRINRGIFQGDSLSPLWFCLALNPLSTLLKDSGLGCRLRRGGEIISHLLYMDDLKLFAPKRPELVELLKVTETFSSAIKMEFGVDKCAIMHVQRGKVVNSTNLQLSETMSLKSLSEVETYKYLGMSQSLSIADGDIKQAVKERFFCRLTKVLNSLLSGGNKARAFNAWVMPLLTYSFGILRWTQTELDALDRRVRMLLTTHRMLHPRSSVMRLYIPRKCGGRGFLNAKDLHNREVCSLREYFLNNECGIHRDVVAVDKGLTPLSLTNENWRRPTVLSTVDRMDVWRSKELHGRFYKALTGPDVDLLASVNWLRFGDLFGETEGFACAIADEVIMTNNYRKYILKDGTVDICRACRRPGVSLRHIISGCSHLANSEYLHRHNQVARIIHQQLALKYGLVGSEVPYYKYAPMLVLENGRATLYWDRSIITDKTIVANKPNIVLVDRSKRRAILIDITIPHDENLVKAEKDKLSKYLDLAHEVTAMWDVDSTIIVPIVVSANGLIAKSLNEHLKRLSLDGWIKGQIQNAVILDTARIVRRFLSVQP

SEQ ID NO: 5641 - protein, 1213 aa, Erannis defoliaria
MITRSKKRNAAVQHARPTPPPVQSSSPSSSSPSEEEFHTCGTSSSSEDVSGPRTPTPPIPVRRGRPPLPARLGPAGQPASRPALAAGGVVRRMRWSQTNNENCMRAYYGATEGGTNLTAYRVRMLSLFQTLEPTVTVSAQRISDQVRAIQRLNLLDQPLLDRLRLEVQSARPTPASTRDLDVASSAPTLASVPTSAATLATSADPVLDEGDCTGMSVSTQVSEQLRRALEDAIGQYRFALNSRPRLPRLPTHRRNLALMGALNALLAPYLRASEDLTDTHSILYCGAIAACRVARVKFPDTNRAPRPAGDVPAWQLRIERRISTFRTLIAKLICFSRGNNRPRVMRFVTQAFAGTGIRPQQYMASVTERIDYLKQKVYAWANRIRRYRERVDRYWQNRLFQSDQRKVYRNWEGTEQRVSDGQLPDASAMTNFWRGIWSVPVEHTEGDWMRVVERECESIEPMGSILIDPVDVSCAIRTAQNWKSPGPDGLHNFWIKWFRCSHDRLATQFQEALELGSLPSFMTTGVTFLLHKSGSTTEPKNYRPITCLPTIYKLLTSILSTKINAHIVANNVLAPAQNGCRVGSRGTKELLLIDMAISQQVRRNKGALSAAWIDYKKAYDSVPHSWLERILELYQIDTTVKSFLGACMRQWTTVLRQPGGGNGSSDSQDLIRIERGIFQGDSLSPSWFCLALNPLSTLLKDSGLGYRLRRGGEIISHLLYMDDLKLFAPKHQDLLELLKTTQVFSSAIRMEFGVDKCAVMRVQRGKVVNSPDLQLSEIMTLRSLSEAETYKYLGMSESLGISVVDIKKSVKERFFCRLTKVLNSLLSGGNKARAFNGWVMPLLIYSFGILRWTQTELDALDRRVRQLLTAHRMLHPRSSVMRLYIPRKWAGRGFLNAKNLHNREVCSLRDYFLNNECGMHRDVVTVDKGLTPLSLANENWRRPSVISTDDRKEVWKSKELHGRFYRALTGPDVDLLASVNWLRFGDLFGETEGFACAIADEVIKTNNYRKYIMKDGTVDICRACHRPGESLRHIISGCSHLANGEYLHRHNQVARIIHQQLALQYGLVESEVPYYKYAPAPVLENGRALLYWDRSIITDRTIVANKPDIVMVDRSQRRAVLVDVTIPHDENLVKAEKDKLSKYLDLAFEITAMWDVDSTIIVPIVVSANGLIAKSLDQYLKRLSLDGWVKGQIQKAVVLDTARIVRRFLTLQP

SEQ ID NO: 5642 - protein, 1213 aa, Erannis defoliaria
MITRSKKRNAAVQHARPTPPPVPSSSPSSSSPSEEEFHTCGTSSSSEDVSGPRTLTPPIPVRRGRPPLPARLGPAGQPASRPALAAGGVVRRMRWSQTNNENCMRAYYGATEGGTNLTAYRVRMLSLFQTLEPTVTVSAQRISDQVRAIQRLNLLDQPLLDRLRLEVQSARPTPASTRDLDVASSAPTLASVPTSAATLATSADPVLDEGDCTGMSVSTQVSEQLRRALEDAIGQYRFALNSRPRLPRLPTHRRNLALMGALNALLAPYLRASEDLTDTHSILYCGAIAACRVARVKFPDTNRALRPAGDVPAWQLRIERRISTFRTLIAKLICFSRGNNRPRVMRFVTQAFAGTGIRPQQYMASVTERIDYLKQKVYAWANRIRRYRERVDRYWQNRLFQSDQRKVYRNWEGTEQRVSDGQLPDASAMTNFWRGIWSVPVEHTEGDWMRVVERECESIEPMGSILIDPVDVSCAIRTAQNWKSPGPDGLHNFWIKWFRCSHDRLATQFQEALELGSLPSFMTTGVTFLLHKSGSTTEPKNYRPITCLPTIYKLLTSILSTKINAHIVANNVLAPAQNGCRVGSRGTKELLLIDMAISQQVRRNKGALSAAWIDYKKAYDSVPHSWLERILELYQIDTTLKSFLGACMRQWTTVLRQPGGGNGSSDSQDLIRIERGIFQGDSLSPSWFCLALNPLSTLLKDSGLGYRLRRGGEVISHLLYMDDLKLFAPKHQDLLELLKTTQVFSSAIRMEFGVDKCAVMRVQRGKVVNSPDLQLSEIMTLRSLSEAETYKYLGMSESLGISVVDIKKSVKERFFCRLTKVLNSLLSGGNKARAFNGWVMPLLIYSFGILRWTQTELDALDRRVRQLLTAHRMLHPRSSVMRLYIPRKWAGRGFLNAKNLHNREVCSLRGYFLNNECGMHRDVVTVDKGLTPLSLANENWRRPSVISTDDRKEVWKSKELHGRFYRALTGPDVDLLASANWLRFGDLFGETEGFACAIADEVIKTNNYRKYIMKDGTVDICRACHRPGESLRHIISGCSHLANGEYLHRHNQVARIIHQQLALQYGLVESEVPYYKYAPAPVLENGRALLYWDRSIITDRTIVANKPDIVMVDRSQRRAVLVDVTIPHDENLVKAEKDKLSKYLDLAFEITAMWDVDSTIIVPIVVSANGLIAKSLDQYLKRLSLDGWVKGQIQRAVVLDTARIVRRFLTLQP

SEQ ID NO: 5643 - protein, 1215 aa, Erannis defoliaria
MITRSQSRRNTAERNARPPSPPAPSSPSASSGDDVFLTPRESSVSSSNSDVSGPRTPAPPPPARRGRPPLPARLGPAGLPASRPALAAGGVVRRMRWSQTNNENCMRAYYGATEGGTNLSAYRVRMLPLFQALEPTVTVSAQRLSDQVRAIQRLNLLDQSLLDRLRLEAQSARPTPASTRDLDVASSAPTLALVPTSAATLVTSADPVVDEGDCTGMSVSTQVSEQLRRALEDAIGQYRFTPNSRPRLPRLPTHRRNLALMGALNALLAPYLRASEDLTDTHSILYCGAIAACRVARVKFPDTNRAPRPAGDVPAWQLRIERRISTFRTLIAKLICFSRGNNRPRVMRFVTQAFAGTGIRPQQYMANVTERIDYLKQKVYAWANRIRRYRERVDRYWQNCLFQSDQRKVYRNWEGNEQRVSDGQLPDASAMTNFWRGIWSVPVEHTEGDWMRVVERECESIEPMGSILIDPVDVSCAIRTAQNWKSPGPDGLHNFWIKWFRCSHDRLATQFQEALELGSLPSFMTTGVTFLLHKSGSTTEPKNYRPITCLPTIYKLLTSILSTKINAHIVANNVLAPAQNGCRVGSRGTKELLLIDMAISQQVRRNKGALSAAWIDYKKAYDSVPHSWLERILELYQIDATLKSFLGACMRQWTTVLRQPGGGNGSSDSQDLIRIERGIFQGDSLSPSWFCLALNPLSTLLKDSGLGYRLRRGGEVISHLLYMDDLKLFAPKHQDLLELLKTTQVFSSAISMEFGVDKCAVMRVQRGKVVNSPHLQLSEIMTLRSLSEAETYKYLGMSESLGISVVDIKKSVKERFFCRLTKVLNSLLSGGNKARAFNGWVMPLLIYSFGILRWTQTELDALDRRVRQLLTAHRMLHPRSSVMRLYIPRKWGGRGFLNAKNLHNREVCSLRDYFLNNECGMHRDVVTVDKGLTPLSLANENWRTPSVLSTDDRKEVWKSKELHGRFYRVLSGPDVDLLASVNWLRFGDLFGETEGFACAIADEVIKTNNYRKYIMKDGTVDICRACHRPGESLRHIISGCSHLANGEYLHRHNQVARIIHQQLALQYGLVESEVPYYKYAPAPVLENGRALLYWDRSIITDRTIVANKPDIVMVDRSQRRAVLVDVTIPHDENLVKAEKDKLSKYLDLAFEITAMWDVDSTIIVPIVVSANGLIAKSLDQYLKRLSLDGWVKGQIQKAVVLDTARIVRRFLTLQS

SEQ ID NO: 5644 - protein, 877 aa, Erannis defoliaria
MGIIIIIIIIIIIIAFAGTGIRPQQYMASVTERIDYLKQKVYAWANRIRRYRERVDRYWQNRLFQSDQRKVYRNWEGTEQRVSDGQLPDASAMTNFWRGIWSVPVEHTEGDWMRVVERECESIEPMGSILIDPVDVSCAIRTAQNWKSPGPDGLHNFWIKWFRCSHDRLATQFQEALELGSLPSFMTTGVTFLLHKSGSTTEPKNYRPITCLPTIYKLLTSILSTKINAHIVANNVLAPAQNGCRVGSRGTKELLLIDMAISQQVRRNKGALSAAWIDYKKAYDSVPHSWLERILELYQIDTTVKSFLGACMRQWTTVLRQPGGGNGSSDSQDLIRIERGIFQGDSLSPSWFCLALNPLSTLLKDSGLGYRLRRGGEIISHLLYMDDLKLFAPKHQDLLELLKTTQVFSSAIRMEFGVDKCAVMRVQRGKVVNSPDLQLSEIMTLRSLSEAETYKYLGMSESLGISVVDIKKSVKERFFCRLTKVLNSLLSGGNKARAFNGWVMPLLIYSFGILRWTQTELDALDRRVRQLLTAHRMLHPRSSVMRLYIPRKWAGRGFLNAKNLHNREVCSLRDYFLNNECGMHRDVVTVDKGLTPLSLANENWRRPSVISTDDRKEVWKSKELHGRFYRALTGPDVDLLASVNWLRFGDLFGETEGFACAIADEVIKTNNYRKYIMKDGTVDICRACHRPGESLRHIISGCSHLANGEYLHRHNQVARIIHQQLALQYGLVESEVPYYKYAPAPVLENGRALLYWDRSIITDRTIVANKPDIVMVDRSQRRAVLVDVTIPHDENLVKAEKDKLSKYLDLAFEITAMWDVDSTIIVPIVVSANGLIAKSLDQYLKRLSLDGWVKGQIQKAVVLDTARIVRRFLTLQP

SEQ ID NO: 5645 - protein, 1215 aa, Biston betularia
MWTRSRTAAASGLHDAHIPSPPAPSTPSASSGDEEFATPLATSASSSSSDVSGPRTPAPPPPARRGRPPLPARLGPAGQSASRSALAAGGVVRRMRWSQTNNENCMRAYYGATEGGINLSAYRVRMLPLFQALEPTVAVSTQRLSDQVRAIQRLQLLDQSVLDRLRLEALPARPTPVSTRDSPVASSAPTLVSVPTSMATLATPTDPVVDVGECTSMGVCSQVSEHLRRTLEDAICQYRFAPDSRPRLPRLPTHRRNLALMGALNALLAPYLRASEDLTDTHSILYCGAIAACRVARVKFPDTNRAPRPAGGVPAWQLRIERRISTFRTLIAKLICFSRGNNRPRVMRFVTQAFAGTGIRPQHYLASVTERIDYLKQKVYAWANRIRRYRERADRYWQNRVFQSDQRKVYRDWEGTGQRVSDRQLPDTSVMTEFWRGIWSLPVEHTEGDWMRVVERECESIESMGSVLIDPVDVSCAIRTAQNWKSPGPDGLHNFWIKWIRCSHDRLATQFQEALELGSLPCFMTTGVTFLLHKTGSTTEAKNYRPITCLPTIYKLLTSILRTKINAHVVANNVLAPAQNGCRVGSRGTKELLLIDMTISQQVRRNKGALSTAWIDYKKAYDSVPHSWLERVLELYKIDTTLKSFLGACMRQWTTVLRQPGSGDGSSEPQDLIRIERGIFQGDSLSPLWFCLALNPLSTLLKESGLGHRLRRGGEVISHLLYMDDLKLFAPKCPDLMELLKTTQVFSNAIKMEFGVDKCAVMHVQRGEVVNCPDLQLSETMTFRSLSEAETYKYLGMSESLGIAVVDIKRSVKERFFCRLTKVLNSFLSGGNKVRAFNGWVMPLLIYSFGILRWTQTELDALDRRVRQQLTTHRMLHPRSSVMRLYIPRKLGGRGFLSTKNLHNREVCSLRDYFRDNECGMHRDVVAVDKGLTPLSLANENWRKPSVLSTEDRKEVWKSKQLHGRFYRVLTGPDVDMLASVNWLRFGDLFGETEGFACAIADEVIKTNNYRKYIMKDGTVDICRACHRPGESLRHIISGCSHLANGEYLHRHNQVARIIHQQLALQYGLVESEVPYYKYAPAPVLENGRALLYWDRSIITDRTIVANKPDIVVVDRAQRRAVLVDITIPHDENLVKAEKDKLSKYLDLAHEITAMWDVDSTIIVPIVVTVNGLIAKSLDQHLKRLSLDGWVKGQLQKAVILDTARIVRRFLTLQP

SEQ ID NO: 5646 - protein, 1207 aa, Apotomis turbidana
MITRSRRKKAEQTNARPPPPPASSSSSPSSSGDEFATAADTSESSDERGPPPPPPQPPARRGRPQLPARLGSTGQPAPTTAPATGGVVRRMRWTRVMNENCMRAYYGATERGINLSAYRDRMLPLFQVFDPTIAVSAQRLSDQVRFIQRRKLLDDATLDRLRLEVLAARAASVPARDPPATSPVPAPAPNLVPGVPLTDPEADVEDYASSVSTQANEQLRRALEEAIGRYRSAPEPRPRLPRLPIHKRNLALMGALDALLDPYLRASEDLADTHSIMYCGAIAACRVARVRFPDTDRAPRTARGVPAWQVRIERRISSFRTLIAKLICFRGGNNRPRVMRYVTQAFAGTGTRPCDYMACVTERIDYLKQKVYAWASRIRRYRERVDRFQQNRLFQSDQRKVYRKWEGADQCVSDGQLPDPTAMINFWRSIWSVPVEHTEGEWMNVVRRECEPIEAMGAVTISPDDVRCAARTIQNWKSPGPDGLHNFWIKWFRSSHERLATQFQDALELGSLPSFMTTGVTFLLHKSGSTTEAKNYRPITCLPTLYKLLTSILRTKINTHIVANNVLAFSQNGCRVGSRGTKELLLIDTTICQQVQRNRGSLSTAWIDYKRAYDSVPHSWLERILELYKIDTALRSLLGACMRQWTTVLRQPGGGDGPPGPQDLIRIERGIFQGDSLSPLWFCLALNPLSTLLKDSGLGCRLRRGGEVISHLLYMDDLKLYAPKRQDLVELLEVTEAFSSAIKMEFGVDKCAVMHVQRGKVVNSANLQLSETMSLRSISEVETYKYLGMSQSLGIADGDIRQALKERFFCRLTKVLNSLLSGGNKARAFNAWVMPLLTYSFGILRWTQTELDALDTRVRQLLTTHRMRHPRSSVMRMYIPRKCGGRGFLNAKDLHNREVCSLREYFLNNECGIHRDVVAVDKGLTSLSLANENWRRPKVLSTDDRRAVWKSKELHGRFYKALTGPDVDLLASVNWLRFGDLFGETEGFVCAIADEVMMTNNYRRYILKDGTVDICRACRRPGESLRHIISGCSHLANGEYLHRHNQVARIIHQQLALRYGLVGSEVPYYKYAPMPVLENGRATLYWDRSIITDRTIVANKPDIVLVDRSKRQAVLVDITIPHDENLVKAEKDKLSKYLDLAHEVTAMWDVDSTSIVPIVVSANGLIAKSLDKHLKRLSLDGWIKGQIQKAVLLDTARIVRRFLSLQP

SEQ ID NO: 5647 - protein, 955 aa, Apotomis turbidana
MGALDALLDPYLRASEDLADTHSIMYCGAIAACRVARVRFPDTDRAPRTARGVPAWQVRIERRISSFRTLIAKLICFRGGNNRPRVMRYVTQAFAGTGTRPCDYMACVTERIDYLKQKVYAWASRIRRYRERVDRFQQNRLFQSDQRKVYRKWEGADQCVSDGQLPDPTAMINFWRSIWSVPVEHTEGEWMNVVRRECEPIEAMGAVTISPDDVRCAARTIQNWKSPGPDGLHNFWIKWFRSSHERLATQFQDALELGSLPSFMTTGVTFLLHKSGSTTEAKNYRPITCLPTLYKLLTSILRTKINTHIVANNVLAFSQNGCRVGSRGTKELLLIDTTICQQVRRNRGSLSAAWIDYKKAYDSVPHSWLERILELYKIDTTLRSLLGACMRQWTTVLRQPGGGDGPPGPQDLIRIERGIFQGDSLSPLWFCLALNPLSTLLKDSGLGCRLRRGGEVISHLLYMDDLKLYAPKRQDLVELLEVTEAFSSAIKMEFGVDKCAVMHVQRGKVVNSANLQLSETMSLRSISEVETYKYLGMSQSLGIADGDIRQALKERFFCRLTKVLNSLLSGGNKARAFNAWVMPLLTYSFGILRWTQTELDALDTRVRQLLTTHRMRHPRSSVMRMYIPRKCGGRGFLNAKDLHNREVCSLREYFLNNECGIHRDVVAVDKGLTPLSLANENWRRPKVLSTDDRRAVWKSKELHGRFYKALTGPDVDLLASVNWLRFGDLFGETEGFVCAIADEVMMTNNYRRYILKDGTVDICRACRRPGESLRHIISGCSHLANGEYLHRHNQVARIIHQQLALRYGLVGSEVPYYKYAPMPVLENGRATLYWDRSIITDRTIVANKPDIVLVDRSKRQAVLVDITIPHDENLVKAEKDKLSKYLDLAHEVTAMWDVDSTSIVPIVVSANGLIAKSLDKHLKRLSLDGWIKGQIQKAVLLDTARIVRRFLSLQP

SEQ ID NO: 5648 - protein, 1211 aa, Apotomis turbidana
MITRSQARRNTAAHTQNARPTPPPVSSSSSPSSSGDEFATAPDTSESSDVVRGPPPPPPRPPARRGRPPLPACLGPTGQSAPTTAPATGGVVRRMRWTQVMNENCMRAYYGATEGGINLSAYRDRMLPLFLAFDPTITVSAQRLSDQVRFIQRRKLLDDATLDRLRLEVLAARAASTPARDTPATSPVPVPAPNLVPGVRQTDPEADGEDDASSVSTQANEQLRRALEEAIERYRSTPESRPRLPRLPMHKRNLALMGALDALLDPYLRASEDLADTHSIMYCGAIAACRVARVRFPDTDRAPRTAGGVPAWQVRIERRISSFRTFIAKLICFRGGNNRPRVMRYVTQAFAGTGTRPCDYMACVTERIDYLKQKVYAWASRIRRYRERVDRFQQNRLFQSDQRKVYRKWEGTNQCVSDGQLPDPTAMINFWRSIWSVPVEHTEGEWMNVVRRECEPIEAMGAVTISPDDVSCAARKAQNWKSPGPDGLHNFWIKWFRSSHERLATQFQDALELGSLPSFMTTGVTFLLHKSGSTTEAKNYRPITCLPTLYKLLTSILKTKINSHIVANNVLAFSQNGCRVGSRGTKELLLIDTTICQQVRRNRGSLSTAWIDYKKAYDSVPHSWLERILELYKIDTALRSLLGACMRQWTTVLRQPGGGDGPPGPRDLIRIERGIFQGDSLSPLWFCLALNPLSTLLKDSGLGCRLRRGGEVISHLLYMDDLKLYAPKRQDLVELLEVTENFSSAIKMEFGVDKCAVMHVQRGKVVNSANLQLSETMTLRSISEVETYKYLGMSQSLGIADGDIRQALKERFFCRLTKVLNSLLSGGNKARAFNTWVMPLLTYSFGILRWTQTELDALDTRVRQLLTTHRMRHPRSSVMRMYIPRKCGGRGFLNAKDLHNREVCSLREYFLNNECGIHRDVVAVDKGLTSLSLANENWRRPKVLSTDDRRAVWKSKELHGRFYKALTEPDVDLLASVNWLRFGDLFGETEGFVCAIADEVMMTNNYRRYILKDGTVDICRACRRPGESLRHIISGCSHLANGEYLHRHNQVARIIHQQLALQYGLVGSEVPYYKYAPMPVLENGRATLYWDRSIITDRTIVANKPDIVLVDRSKRQAVLVDITIPHDENLVKAEKDKLSKYLDLAHEVTAMWDVDSTIIVPIVVSANGLIAKSLDKHLKRLSLDGWIKGQIQKAVLLDTARIVRRFLSLQP

SEQ ID NO: 5649 - protein, 1021 aa, Apotomis turbidana
MAGRTAALYTRPLMRTGIRLSHNTPDSSLHFIHPVFIRWVTSVSIDPYLLMTEPRYLKWSTSFSWVFCSQMVCLLLAPLKLQCMYSVFSLLIRRPDVSRASLHFSKTCCRLFTSSLMMTTSSAYKMSHGGARCRFEVTHHINNNNNNNRPRVMRYVTQAFAGTGTRPCDYMACVTERIDYLKQKVYAWASRIRRYRERVDRFQQNSLFQSDQRKVYRKWEGADQCVSDGQLPDPTAMINFWRSIWSVPVEHTEGEWMNVVRRECEPIEAMGAVTISPDDVRCAARTIQNWKSPGPDGLHNFWIKWFRSSHERLATQFQDALELGSLPSFMTTGVTFLLHKSGSTTEAKNYRPITCLPTLYKLLTSILRTKINTHIVANNVLAFSQNGCRVGSRGTKELLLIDTTICQQVRRNRGSLSTAWIDYKKAYDSVPHSWLERILELYKIDTALRSLLGACMRQWTTVLRQPGGGDGPPGPQDLIRIERGIFQGDSLSPLWFCLALNPLSTLLKDSGLGCRLRRGGVVISHLLYMDDLKLYAPKRQDLVELLEVTEAFSSAIKMEFGVDKCAVMHVQRGKVVNSANLQLSETMSLRSISEVETYKYLGMSQSLGIADGDIRQALKERFFCRLTKVLNSLLSGGNKARAFNAWVMPLLTYSFGILRWTQTELDALDTRVRQLLTTHRMRHPRSSVMRMYIPRKCGGRGFLNTKDLHNREVCSLREYFLNNECGIHRDVVAVDKGLTSLSLANENWRRPKVLSTDDRRAVWKSKELHGRFYKALTGPDVDLLASVNWLRFGDLFGETEGFVCAIADEVMMTNNYRRYILKDGTVDICRACRRPGESLRHIISGCSHLANGEYLHRHNQVARIIHQQLALRYGLVGSEVPYYKYAPMPVLENGRATLYWDRSIITDRTIVANKPDIVLVDRSKRQAVLVDITIPHDENLVKAEKDKLSKYLDLAHEVTAMWDVDSTSIVPIVVSANGLIAKSLDKHLKRLSLDGWIKGQIQKAVLLDTARIVRRFLSLQP

SEQ ID NO: 5650 - protein, 1157 aa, Notocelia uddmanniana
MQICEGKLGFDTELGENRIHLSVWPYSVIIIIIMCGVVRRMRWTQEMNENCMRAYFGATEGETNLSAYRVRMLPLFQALEPTITVSAQRLSDQVRVIQRNKRLDDFTLDRLRLEALSARAAPTSARDLPATSPAPVPAPNTAPRAPRVDPSADGDCADQSVSTQAHEQLRRALDEAITRYRSRPNSRPRLPRLPVNRRNLALMGALNDLLDPYLRASDDLIDTHSIMYCGAIAACRVARVKFPDADRATRTAGGVPAWQVRIERRINTFRTLIAKLICFRGGNNRPRVMRFVNQAFAGTGVRPRDYMACVTERIDFLKQKVYAWASRIRRYRERVDRYQQSRLFQSDQRKVYRKWEGTDYRVCDGQRPDATAMVNFWRSIWSVPVEHTEGAWIGVVERDCESIEPMGSVTISPEDVSCAIRTAPNWKSPGPDGLHNFWLKWFRCSHERLATQFQQALELGSLPPPLTTGVTSLLYKSGSTTEAKNYRPITCLPTLYKLLTSILRVKINTHIVTNNILAPAQNGCRVGSRGTKELLLIDMTICQRVRRNRGTLSASWIDYKKAYDSVPHSWLRRILELYKVDAALRSFLSACMGQWTTVLRQPGGGDGPSGPQDSIRIERGIFQGDSLSPLWFCLALNPLSTLLQDSGLGCQLRRGGEVISHLLYMDDLKLFAPNRQDLLELLKTTEVFSSAIKMEFGVDKCAVMHVQRGKVVNSTNLQLTETMSLRSLSEAETYKYLGMSQTLGIEGEGIKQAVKERFFCRLTKVLNSFLSGGNKARAFNAWVMPLLTYSFGILRWTQTELDALDRRVRVLLTAHRMLHPRSSVMRLYIPRKCGGRGFLNAKDLHNREVCSLRDYFLNSECGMHRDVVAVDASFTPLSMANENWRRFKVLSTEDRKAEWKSKELHGWFYRALTGPDVDLLASVNWLRFGDLFGETEGFVCAIADEVIMTNNYRKYILKDGTVDICRACRRPGESLRHIISGCSHLANCEYLHRHNLVARIIHQQLALSYGLVDFEVPYYKYLPAPVLENGRATLYWDRSIITDRTIVANKPDIVLIDRSKRQAVLVDITIPHDENLVKAEKDKVSKYLDLAHEVTAMWDVDSTIIVPIVVSANGLIAKSLDQHLKRLSLDGWVKGQIQKAVLLDTARIVRRFLSLSP

SEQ ID NO: 5651 - protein, 1127 aa, Notocelia uddmanniana
MVPTGGIVRRMQWSQTMNENCMRAYYEATDGGTNLSAYRVRMIPLFQALEPAISVSAQRLSDQVRVIQRLKRLDDATLDRLRMEALSARAASASARNQPATLPAPVPAPDTTPGVPRVDSSADEVCANQSVSIHAHELMRRALEEAITRYRSTTSSRPRLPRLPVNRRNLALMGALNDLLAPYLRASEDLIDTHSIMYCGAIAACRVARVKFPDADRAPRTAGSVPTWQVRIERRIDTYRTLIAKLICFRGGNSRPRVMRFVNQAFAGTGVRPRDYMTCVTERIDFLKQKVYAWASRIRRYRERVDRYQLNRLFQSDQRKVYRKWEGTDHRVSDGQRPDATAMANFWRSIWSVPVEHTEGAWMDVVKRVCESIEPMGSVTVSPEDVSCAIRTAPNWKSPGPDGLHNFWLKWFRCSHARLAAQFQQAIELGSLPPPLTTGVTSLLYKSGSTTEAKNYRPITCLPTLYKLLTSILRAKINTHIVANNILGPAQNGCRVGSRGTKELLLIDMTICQRVRRNRGTLSAAWIDYKKAYDSVPHSWLRRILELYKVDAVLISFLVACMGQWTTVLRQPGGGEGPSGPQDSIRIERGIFQGDSLSPLWFCLALNPLSTLLKDSGLGCQLRREGEVISHLLYMDDLKLFAPNKHDLLELLKTTEVFSSAIKMEFGVDKCAVMHVQRGKVVNSTNLHISETMALRSLPEAETYKYLGMSQSLGIEGGDIKRAVRERFFCRLTKVLNSFLSGGNKVRAFNAWVMPLLTYSFGILRWTQTELDFLDRRVRVLLAAHRMLHPRSSVMRLYIPRKLGGRGFLNAKDLHKREVCSLRDYFLNSEYGMHRDVVAADASFTPLSMANENWRRFKVLSIEDRRAVWKSKELHGRFYKALTGPEVDLLASVNWLRFGDLFGETEGFVCAIADEVIMTNNYRKYILKDGTVDICRACRRPGESLRHIISGCSHLANGEYLHRHNLVARIIHQQLALLYGLVDFEVPYYKYTPAPVLENGRATLYWDRSVITDRTIVANKPDIVLTDRLKRQAVLVDITIPHDENLVKAEKDKVSKYLDLAHEVTAMWDVDSTIVVPIVVSVNGLIAKSLDQHLKRLSLDGWVKGQIQKAVLLDTARIVRRFLSLSP

SEQ ID NO: 5652 - protein, 1208 aa, Notocelia uddmanniana
MITRSKARLEKKASNPQSARPPPSPASSSSASSSEEFATAPDTSSSSSSDECGPPPPPPRSPARRGRPPLPARLGPAGHPAPPTAPATGGIVRRMQWSQSINENCMRAYYGATDGGTNLSAYRDRMLPLFRALEPAISVSAQRLSDQVRVIQRLKRLDDATLDRLRLEALSARAASASARNPSATLPAPVPALDTAPGADPSADEGCANQSVSSQAYEQLRRALEEAITQYRSTPNSRPRLPRLPVNRRNLALMGALNDLLVPYLGASEDLIDTHSIMYCGAIAACRVARVKFPDADRAPRTAGSVPTWQVRIERRVDTYRTLIAKLICFRGGNSRPRVMRFVNQAFAGTGIRPRDYMTCVTERIDFLKQKVYAWASRIRRYRERLDRYQQNRLFQSDQRKVYRKWDGTDHRVSDGQRPDATAMVNFWRSIWSVPVEHNEGAWMGVVERECESIEPMGSVTISPADVSCAIRTAPNWKSPGPDGLHNFWLKWFRCSHARLAAQFQQALELGSLPPPLTTGVTSLLYKSGSTTEAKNYRPITCLPTLYKLLTSILRAKINTHIVANNILAPAQNGCRVGSRGTKELLLIDMTICQRVRRNRGTLSTAWIDYKKAYDSVPHSWLRRILELYKVDAVLRSFLVACMGQWTTVLGQPGGGEGPSGPQDSIRIERGIFQGDSLSPLWFCLALNPLSTLLKDSGLGCQLRREGEVISHLLYMDDLKLFAPNKHDLLELLKTTEAFSSAIKMEFGVDKCAAMHVQRGKVVNSTNLQISETMDLKSLSEAETYKYLGMSQSLGIEGGDIKRAVKERFFCRLTKVLNSFLSGGNRVRAFNAWVMPLLTYSFGILRWTQTELDFLDRRVRVLLTAHRMLHPRSSVMRLYITRKFGGRGFLNAKDLHNREVCSLRDYFLNSECGMHRDVVAVDASFTPLSMANENWRRLKVLSTEDRRAVWKSKELHGRFYKALTGPDVDLLASVNWLRFGDLFAETEGFVCAIADEVIMTNNYRRYILKDGTVDICRACRRPGESLRHIISGCGHLANGEYLHRHNLVAKIIHQQLALLYGLVDFEVPYYKYTPAPVLENGRATLYWDRSVITDRTIIANKPDIVLTDRLKRQAVLVDITIPHDENLVKAEKDKVSKYLDLAHEVTAMWDVDSTIIVPIVVSANGLIAKSLDQHLKRLSLDGWVKGQMQKAVLLDTARIVRRFLSLSP

SEQ ID NO: 5653 - protein, 1210 aa, Notocelia uddmanniana
MITRSQTRRVQASQQSARPSPSTASSSSASASSEEEFTTAPDTSSSSSDECGPPPPPPRPPARRGRPPLPARLGPAGHPVPHTAPATGGVVRRMQWSPSMNENCMRAYYGATDGGTNLSAYRVRMLPLFQALEPAIFVSAQWLSDQVRVIQRLKRLDDATLDRLRLEALSARAASVSARNPPATLPAPVPAPDTAPGASRVDPSADGDCADQSVSTQAHEQLRRALDEAITRYRSTPNSRPRLPRLPVNRRNLALMGALNDLLDPYLRASDDLIDTHSIMYCGAIAACRVARVKFPDADRATRTAGGVPAWQVRIERRMNTFRTLIAKLICFRGGNNRPRVMRFVNQAFAGTGVRPRDYMACVTERIDFLKQKVYAWASRIRRYRERVDRYQQNRLFQSDQRKVYRKWEGTDHRVCDGQRPDATAMVNFWRSIWSVPVEHTEGAWIGVVERDCESIEPMGSVTISPEDVSCAIRTAPNWKSPGPDGLHNFWLKWFRCSHERLATQFQQALELGSLPPPLTTGVTSLLYKSGSTTEAKNYRPITCLPTLYKLLTSILRAKINTHIVTNNILAPAQNGCRVGSRGTKELLLIDMTICQRVRRNRGTLSASWIDYKKAYDSVPHSWLRRILELYKVDAALRSFLSACMGQWTTVLRQPGGGDGPSGPQDSIRIERGIFQGDSLSPLWFCLALNPLSTLLQDSGLGCQLRRGGEVISHLLYMDDLKLFAPNRQDLLELLKTTEVFSSAIKMEFGVDKCAVMHVQRGKVVNSTNLQLSETMSLRSLSEAETYKYLGMSQALGIEGEGIKQAVKERFFCRLTKVLNSFLSGGNKARAFNAWVMPLLTYSFGILRWTQTELDALDRRVRVLLTAHRMLHPRSSVMRLYIPRKCGGRGFLNAKDLHNREVCSLRDYFLNSECGMHRDVVAVDASFTPLSMANENWRRFKVLSTEDRKAEWKSKELHGRFYSALTGPDVDLLASVNWLRFGDLFGETEGFVCAIADEVIMTNNYRKYILKDGTVDICRACRRPGESLRHIISGCSHLANGEYLHRHNLVARIIHQQLALSYGLVDFEVPYYKYLPAPVLENGRATLYWDRSIITDRTIVANKPDIVLIDRSKRQAVLVDITIPHDENLVKAEKDKVSKYLDLAHEVTAMWDVDSTIIVPIVVSANGLIAKSLDQHLKRLSLDGWVKGQIQKAVLLDTARIVRRFLSLSP

SEQ ID NO: 5654 - protein, 1211 aa, Notocelia uddmanniana
MITRSQTRRVQASQQSARPSPSPASSSSASASSEEEFATAPDTSSSSSDECGPPPPPPRPPARRGRPPLPARLGPAGHPVPHTAPATGGVVRRMQWSPSMNENCMRAYYGATDGGTNLSAYRVRMLPLFQALEPAISVSAQRLSDQVRVIQRLKRLDDATLDRLRLEALSARAASVSARNPPATLPAPVPAPDTAPGASRVDPSADGDCADQSVSTQAHEQLRRALDEAITRYRSTPNSRPRLPRLPVNRRNLALMGALNDLLDPYLRASDDLIDTHSIMYCGAIAACRVARVKFPDADRATRTAGGVPDAWQVRIERRINTFRTLIAKLICFRGGNNRPRVMRFVNQAFAGTGVRPRDYMACVTERIDFLKQKVYAWASRIRRYRERVDRYQQNRLFQSDQRKVYRKWEGTDHRVCDGQRPDATAMVNFWRSIWSVPVEHTEGAWIGVVERDCESIEPMGSVTISPEDVSCAIRTAPNWKSPGPDGLHNFWLKWFRCSHERLATQFQQALELGSLPPPLTTGVTSLLYKSGSTTEAKNYRPITCLPTLYKLLTSILRAKINTHIVTNNILAPAQNGCRVGSRGTKELLLIDMTICQRVRRNRGTLSASWIDYKKAYDSVPHSWLRRILELYKVDAALRSFLSACMGQWTTVLRQPGGGDGPSGPQDSIRIERGIFQGDSLSPLWFCLALNPLSTLLQDSGLGCQLRRGGEVISHLLYMDDLKLFAPNRQDLLELLKTTEVFSSAIKMEFGVDKCAVMHVQRGKVVNSTNLQLSETMSLRSLSEAETYKYLGMSQALGIEGEGIKQAVKERFFCRLTKVLNSFLSGGNKARAFNAWVMPLLTYSFGILRWTQTELDALDRRVRVLLTAHRMLHPRSSVMRLYIPRKCGGRGFLNAKDLHNREVCSLRDYFLNSECGMHRDVVAVDASFTPLSMANENWRRFKVLSTEDRKAEWKSKELHGRFYRALTGPDVDLLASVNWLRFGDLFGETEGFVCAIADEVIMTNNYRKYILKDGTVDICRACRRPGESLRHIISGCSHLANGEYLHRHNLVARIIHQQLALSYGLVDFEVPYYKYLPAPVLENGRATLYWDRSIITDRTIVANKPDIVLIDRSKRQAVLVDITIPHDENLVKAEKDKVSKYLDLAHEVTAMWDVDSTIIVPIVVSANGLIAKSLDQHLKRLSLDGWVKGQIQKAVLLDTARIVRRFLSLSP

SEQ ID NO: 5655 - protein, 976 aa, Notocelia uddmanniana
MYANCLPDGKQDTVNRRNLALMGALNDLLDPYLRASEDLIDTHSILYCGAIAACRVARVKFPDADRAPRTAGGVPAWQVRIERRINTFRTLIAKLICFRGGNDRPRVMRFVNQAFAGTGVRPRDYVTCVTERIDFLKQKVYAWASRIRRYRERVDRYQQSRLFQSDQRKVYRKWEGTDHRVCDGQRPDATAMGNFWRSIWSVPVEHTEGAWIGVVGRECESIEPMGSVTISPEDISCAIRTAPNWKSPGPDGLHNFWLKWFRCSHERLATQFQQALELGSLPHLLTTGVTSLLYKSGSTTEAKNYRPITCLPTLYKLLTSILRAKINTHIVANNILAPAQNGCRVGSRGTKELLLIDMTICQRVRRSRGALSAAWIDYKRAYDSVPHSWLRRILELYKVDAALRSFLSACMGQWTTVLRQPGGGDGSSGPQDPIRIERGIFQGDSLSPLWFCLALNPLSTLLKDSGLGCQLRRGGEVISHLLYMDDLKLFAPNRQDLLELLKTTEVFSSAIKMEFGVDKCAVMHVQRGKVVNSTNLQLSETMSLRSLSEAETYKYLGMSQSLGIEGEGIKQAVKERFFCRLTKVLNSFLSGGNKVRAFNAWVMPLLTYSFGILRWTQTELDALDRRVRVLLTTHRMLHPRSSVMRLYIPRKCGGRGFLNAKDLHNREVCSLRDYFLNSECGMHRDVVAVDASFTPLSMANENWRRFKVLSTEDRKAEWKSRELHGRFYKALTGPDVDLLASVNWLRFGDLFGETEGFVCAIADEVIMTNNYRKYILKDGTVDICRACRRPGESLRHIISGCGHLANGEYLHRHNLVARIIHQQLALSYGLVNFEVPYYKYLPAPVLENGRATLYWDRSIITDRTIVANKPDIVLIDRSKRQAVLVDITIPHDENLVKAEKDKVSKYLDLAHEVTAMWDVDSTIIVPIVVSANGLIAKSLDQHLKRLSLDGWVKGQIQKAVLLDTARIVRRFLSLSP

SEQ ID NO: 5656 - protein, 1117 aa, Notocelia uddmanniana
MRWTQEMNENCMRAYFGATEGETNLSAYRVRMLPLFQALEPTITVSAQRLSDQVRVIQRNKRLDDLTLDRLRLEALSARAAPTSARDLPATSPAPVPAPNTAPRAPRVDPSADGDCADQSVSTQAHEQLRRALDEAITRYRSTPNSRPRLPRLPVNRRNLALMGALNDLLDPYLRASDDLIDTHSIMYCGAIAACRVALVKFPDADRATRTAGGVTAWQVRIERRINTFRTLIAKLICFRGGNNRPRVMRFVNQAFAGTGVRPRDYMACVTERIDFLKQKVYAWASRIRRYRERVDRYQQNRLFQSDQRKVYRKWEGTDHRVCDGQRPDATAMVNFWRSIWSVPVEHTEGAWIGVVKRDCESIEPMGSVTISPEDVSCAIRTAPNWKSPGPDGLHNFWLKWFRCSHERLATQFQQALELGSLPPPLTTGVTSLLYKSGSTTEAKNYRPITCLPTLYKLLTSILRAKINTHIVTNNILAPAQNGCRVGSRGTKELLLIDMTICQRVRRNRGTLSASWIDYKKAYDSVPHSWLRRILELYKVDAALRSFLSACMGQWTTVLRQPGGGDGPSGPQDSIRIERGIFQGDSLSPLWFCLALNPLSTLLQDSGLGCQLRRGGEVISHLLYMDDLKLFAPNRQDLLELLKTTEVFSSAIKMEFGVDKCAVMHVQRGKVVNSTNLQLSETMSLRSLSEAETYKYLGMSQALGIEGEGIKQAVKERFFCRLTKVLNSFLSGGNKARAFNAWVMPLLTYSFGILRWTQTELDALDRRVRVLLTAHRMLHPRSSVMRLYIPRKCGGRGFLNAKDLHNREVCSLRDYFLNSECGMHRDVVAVDASFTPLSMANENWRRFKVLSAEDRKAEWKSKELHGRFYRALTGPGVDLLASVNWLRFGDLFGETEGFVCAIADEVIMTNNYRKYILKDGTVDICRACRRPGESLRHIISGCSHLANGEYLHRHNLVARIIHQQLALSYGLVDFEVPYYKYLPAPVLENGRATLYWDRSIITDRTIVANKPDIVLIDRSKRQAVLVNITIPHDENLVKAEKDKVSKYLDLAHEVTAMWDVDSTIIVPIVVSANGLIAKSLDQHLKRLSLDGWVKGQIQKAVLLDTARIVRRFLSLSP

SEQ ID NO: 5657 - protein, 955 aa, Crocallis elinguaria
MGALNVLLAPYLRASENLFDTHSIMYCGAIAVCRVARVKFPDADRAPRPAGSAPAWQVRIERRINTFRTLIAKLICFSRGNNRPRVMRFVNQAFAGTGIRPQNYMAGVTERIDFLKQKIYARVNRIRRYRERVDRYHQNRLFESDQRKVYRNWEGTDQRVSDGQLPDTNAMINFWRGIWSVPVEHTEGDWMRTVEQSCESIETMGSVTIDPIDVSCAIRTAQNWKSPGPDGLHNFWIKWIRCSHECLAVQFQEALELGSLPRFLTTGVTSLLHKSGSTTEAKNYRPITCLPTLYKLLTSILRAKINSHVVANNILAPAQNGCRVGSRGTKELLLIDTAICQQVRRNKGALSTAWIDYKKAYDSVPHSWLERILELYKIDTTLRTFLSTCMRQWTTVLRQPGSGNSPSGPENFIKIERGIFQGDSLSPLWFCLALNPLSTLLRDSRLGCKLRREGEIISHLLYMDDLKLLAPKSPDLMKLLKITEIFSSAIKMEFGVDKCAVMHVQRGKVVNSDNLQLSETMTLRSLSEAETYRYLGMSQSLGITVGDIKQSVKERFFCRLTKVLNSLLSGGNKARAFNGWVMPLLIYSFGILKWTQTELDSLDRRVRQLLTYHRMLHPRSSVMRLYIPRKWGGRGFLNAKTLHNREVCSLREYFLNNECGMHRDVVAVDRNLTPLSLANENWHKPVVMTTEDRKEVWKGKELHGRFYRALTGSDVDLLASVNWLRFGDLFGETEGFVCAIMDEVIKTNNYRKYIMKDGTVDICRACRRPGESLRHIISGCSHLANGEYLHRHNLVARIIHQQIAFQYGLVESEVPYYKYAPAPVLENGRALLYWDRSIITDRTIVANKPDIVLVDRSQRRAVLVDITVPHDENLVKAEKDKLSKYLDLAHEVTAMWNVDSTIIVPIVVSANGLVAKSLDQHLKRLSLDGWIKGRMQKAVLLDTARIVRRFLTLQP

SEQ ID NO: 5658 - protein, 1207 aa, Crocallis elinguaria
MITRSRNKAGTASARQPPPPASSSPSSSSGVEYGTPLDTSTSSDEDGPPSPPPPPPPARRGRPPLPARLGPVGHSVPRAAPATGGIVRRMRWTSDMNENCMRAYYGATEGGTNMSAYRDRMLPLFQTLEPSVAVSTQRLSDQVRAIQRLKLLDESVLDRLRLEALPIRATSASTRDLSVAPPVPAPLPAPSSVATRIDPVVDEDDCANISVSTQVNEQLRRALEDAILEYQYTPDSRPRLPRLPTNRRNLALMGALNVLLAPYLRASENLFDTHSIMYCGAIAVCRVARVKFPDADRAPRTAGNAPAWQVRIERRINTFRTLIAKLICFSRGNNRPRVMRFVNQAFAGTGIRPQNYMAGVTERIDFLKQKIYAWVNRIRRYRERVDRYHQNRLFESDQRKVYRNWEGTDQRVSDGQMPDTNAMINFWRGIWSVPVEHTEGDWMRTVEQSCESIETMGSVTIDPIDVSCAIRTAQNWKSPGPDGLHNFWIKWIRCSHECLAVQFQEALELGSLPCFLTTGVTSLLHKSGSTTEAKNYRPITCLPTLYKLLTSILRAKINSHVVANNILAPAQNGCRVGSRGTKELLLIDTAICQQVRRNRGALSTAWIDYKKAYDSVPHSWLERILELYKIDTTLRSFLSTCMRQWTTVLRQPGSGNSPSGPENFIKIERGIFQGDSLSPLWFCLALNPLSTLLRDSRLGCKLRREGDIISHLLYMDDLKLLAPKSPDLMKLLKITEIFSSAIKMEFGVDKCAVMHVQRGKVVNSDNLQLSETMTLRSLSEAETYRYLGMSQSLGIAVGDIKQSVKERFFCRLTKVLNSLLSGGNKARAFNGWVMPLLIYSFGILKWTQTELDSLDRRVRQLLTYHRMLHPRSSVMRLYIPRKWGGRGFLNAKTLHNREVCSLREYFLNNECGMHRDVVAVDRNLTPLSLANENWRKPVVMTTEDRKDVWKGKELHGRFYRALTGSDVDLLASVNWLRFGDLFGETEGFVCAIMDEVIKTNNYRKYIMKDGTVDICRACRRPGESLRHIISGCSHLANGEYLHRHNLVARIIHQQIALQYGLVESEVPYYKYAPAPVLENGRALLYWDRSIITDRTIVANKPDIVLVDRSQRRAVLVDITVPHDENLVKAEKDKLSKYLDLAHEVTAMWNVDSTIIVPIVVSANGLVAKSLDQHLKRLSLDGWIKGRMQKAVLLDTARIVRRFLTLQP

SEQ ID NO: 5659 - protein, 785 aa, Peribatodes rhomboidaria
MIDFWRGIWSVPVEHTEGEWMRIVERECESIESMESILIDSVDVSCAIRTAQNWKSPGPDGLHNFWIKWIRCSHDRLAIQFQEALELGSLPSFMTTGVTFLLHKSGSTTDPKNYRPITCLPTIYKLLTSILRNKINMHIVANNVLAPAQNGCRVGSRGTKELLLIDMAISQQVRRNRGALSVAWIDYKKAYDSVPHSWLERILELYKIDITLKSFLSACMRQWTTVLCQPGGGEVSADPQDLIRIERGIFQGDSLSPLWFCLALNPLSTLLKDLGLGHRLRRGGEVISHLLYMDDLKLFAPKRQDLMELLKTTEVFSSAIKMEFGVDKCAVMHVQRGKVANSPNFQLSETMTLRSLSEVETYKYLGMSESLGISVVDIKKSIKERFFCRLTKVLNSLLSGGNKVRAFNGWVMPLLIYSFGILRWTQTELDALDRRVRQLLTTHRMLHPRSSVMRLYIPRKWGGRGMLNAKNLHNREVYRLRSFFRNNDCGMHCDVVAVDKGLTPLSLANDNWRQPSVLSTEDRKSVWKGKELHGRFYRALTGPDVDLLASVNWLRFGDLFGETEGFACAITDEVIKTNNYRKYILKDGTVDICRACHRPGESLRHIISGCSHLANGEYLHRHNQVARIIHQQLALQYGLVESEVPYYKYAPASVLENGRALLYWDRSIITDRTIVANKPDIVLVDRSQRRAVLVDITIPHDENLVKAEKDKLSKYLDLAHEVTAMWDVDSTIIVPIVVTVNGLIAKSLDQHLKRLSLDGWIKGQIQKAVILDTCRIVRRFLTLQP

SEQ ID NO: 5660 - protein, 1120 aa, Peribatodes rhomboidaria
MRWTQVMNENCMRAYYGATEGGTNLTAYRVRMLSLFQVLEPTVTVSTQRLSDQVRAIHRCKLLDQPVLDRLCLEAIRARPIPASTRDRPVASSAPTLASVPASAVTLATMANTDVDGDRTSVNVSSQVSEQLRRTLEDAISQYRYAPDSRPRLPRLPTHRRNMALMGALNVLLAPYLRASENLTDTHSILYCGAIAACRVARVKFPDTSRAPRPAGGVPAWQVRIERRISTFRTLIAKLLCFSRGNTRPRVMRFVTQAFAGTDIRPQYYLANVTERIDYLKQKVYAWANRIRRYKERVDRYWQNRLFQSDQRKVYRGWEGTEQCVIDGHRPDARTMIDFWRGIWSVPVEHTEGEWMRIVERECESIESMESILIDSVDVSCAIRTAQNWKSPGPDGLHNFWIKWIRCSHDRLAIQFQEALELGSLPSFMTTGITFLLHKSGSTTDPKNYRPITCLPTIYKLLTSILRNKINMHIVANNVLAPAQNGCRVGSRGTKELLLIDMAISQQVRRNRGALSVAWIDYKKAYDSVPHSWLERILELYKIDITLKSFLSACMRQWTTVLCQPGGGEVSADPQDLIRIERGIFQGDSLSPLWFCLALNPLSTLLKDLGLGHRLRRGGEVISHLLYMDDLKLFAPKRQDLMELLKTTEVFSSAIKMEFGVDKCAVMHVQRGKVANSPNFQLSETMTLRSLSEVETYKYLGMSESLGISVVDIKKSIKERFFCRLTKVLNSLLSGGNKVRAFNGWVMPLLIYSFGILRWTQTELDALDTRVRQLLTTHRMLHPRSSVMRLYIPRKWGGRGMLNAKNLHNREVYRLRSFFRNNDYGMHCDVVAVDKGLTPLSLANENWRQPSVLSTEDRKSVWKGKELHGRFYRALTGPDVDLLASVNWLRFGDLFGETEGFACAIADEVIKTNNYRKYILKDGTVDICRACHRPGESLRHIISGCSHLANGEYLHRHNQVARIIHQQLALQYGLVESEVPYYKYAPASVLENGRALLYWDRSIITDRTIVANKPDIVLVDRSQRRAVLVDITIPHDENLVKAEKDKLSKYLDLAHEVTAMWDVDSTIIVPIVVTVNGLIAKSLDQHLKRLSLDGWIKGQIQKAVILDTCRIVRRFLTLQP

SEQ ID NO: 5661 - protein, 1209 aa, Pammene fasciana
MQTRSRTRAATAYARPTSSPASSVSSPSSSGDEFATAPDTSESSDECGPPPPPPRPPARRGRPPLPARLGLAGQPAPPRAPAAGGIVRRMRWTCSMNENVMRAYYGATEGGTNLSAYRDRMLPLFQALEPTIDTTAQRLSDQVRVIQRLKRLDDATLDRLRLEALSARADSTSVRDPPATSPDPMPTPDLASGAPRIDPNADEEYIASQSMSSTANEQLRRTLEEAITQYRSTNIPRPRLPRLPMNRRNLALMGALNDLLDPILRTSKDLDDTHSIMYCGAIAACRVARVKFPDAERAPRTTGGVPAWQVRIERRINSFRTLIAKLICFKGGNNRPRVMRFVHQAFAGTDIEPRDYMANITERIDFLKQKVYAWASRIRRYRERVDRFRQNRLFQSDQRKVYRRWEEADPRVSDVRLPDATAMTGFWRSIWSAPVEHTEGEWMSVVERECESIEPMGAITISPDDVSCAIRTAQNWKSPGPDGLHNFWLKWFRCSHSRLATQFQQALELGSLPPSLTTGVTFLLYKSGSTTEAKNYRPITCLPTLYKLLTSILRAKINAHMVANNILASAQNGCRVGSRGTKELLLIDMTICQRVRRNRGALSAAWIDYKKAYDSVPHSWLERILELYKIDTALRSFLGACMRQWTTALRQPGGGDDPPGPQDFIRIERGIFQGDSLSPLWFCLALNPLSTLLKDSGLGCRLRREGEVISHLLYMDDLKLFAPNNRDLLELLKTTEVFSSSIKMEFGVDKCAVMHVQRGKVVNSTNLQLSGTMTFRSISESETYKYLGMSQSLGIEDAGIKQALRERFFGRLTKVLNSLLSGGNKVRAFNAWVMPLLTYSFGILRWTQTELDALDRRVRLLLTTHRMLHPRSSVMRLYIPRKCGGRGFLNAKNLHNREVYNLRNYFLNNECGMHRDVVAVDKGLTPLSLANENWRKPVVLSTEDRRAVWKSKELHGRFYGALTGPDVDLLASVNWLRFGDLFGETEGFACAIADEVIMTNNYRKYILKDGTVDICRACRRPGESLRHIISGCSHLANGEYLHRHNLVARIIHQQLALLYGLVDHEVPYYKYTPAPVLENGRATLYWDRSIITDRTIVANKPDIVVIDRPQRRAMLVDITVPCDVNLVKAEKDKSSKYLDLAHEVTAMWEVDSAIIVPIVVSTNGLIAKSLDQHLERLSLRGCGWIKGQIQKAVILDTARIVRRFLSLRP

SEQ ID NO: 5662 - protein, 1025 aa, Pammene fasciana
MPAPGLASGAPRIDPSADEEEIANQSLSSTANEQLRRTLEEAITQYRSTNITRPRLPRLPMNRRNLALMGALNDLLDPLLRTSKDLDDTHSIMYCGAIAACRVARVKFPDAERAPRTAGGVPAWQVRIERRINSFRTLIAKLICFRGGNNRPRVMRFVHQAFAGTDIEPRDYMANVTERIDFLKQKVYAWASRIRRYRERVDRFRQNRLFQSDQRKVYRRWEEADPRVSDVRLPDATAMTDFWRSIWSVPVEHTEGEWMSVVERECESIEPMGAITISPDDVSCAIRTAQNWKSPGPDGLHNFWLKWFRCSHSRLATQFQQALELGSLPPSLTTGVTFLLYKSGSTTEAKNYRPITCLPTLYKLLTSILRAKINAHMVANNILASAQNGCRVGSRGTKELLLIDMTICQRVRRNRGALSAAWIDYKKAYDSVPHSWLERILELYKIDAALRSFLGACMRQWTTVLRQPGGGDDPPDPQDFIRIERGIFQGDSLSPLWFCLALNPLSTLLKDSGLGCRLRREGEVISHLLYMDDLKLFAPNNRDLLELLKTTEVFSNSIKMEFGVDKCAVMHVQRGKVVNSTNLQLSETMTFRSISESETYKYLGMSQSLGIEDAGIKQALRERFFGRLTKVLNSLLSGGNKVRAFNAWVMPLLTYSFGILRWTQTELDALDRRVRLLLTTHRMLHPRSSVMRLYIPRKCGGRGFLNAKNLHNREVYNLRNYFLNNECGMHRDVVAIDKGLTPLSLANENWRKPVVLSTEDRKAVWKSKELHGRFYGALTGPDVDLLASVNWLRFGDLFGETEGFACAIADEVIMTNNYRRYILKDGTVDICRACRRPGESLRHIISGCSHLANGEYLHRHNLVARIIHQQLALLYGLVAHEVPYYKYTPAPVLENGRATLYWDRSIITDRTIVANKPDIVVIDRPQRRAMLVDITVPCDVNLVKAEKDKSSKYLDLAHEVTAMWEVDSAIIVPIVVSANGLIAKSLDQHLERLSLRGCGWIKGQIQRAVILDTARIVRRFLSLRP

SEQ ID NO: 5663 - protein, 1202 aa, Campaea margaritaria
MFTRSKAATNAHLSSQSAPSSPKSTSSESEYGTPPDTSDVSGPPSPPSPPRPVRRGRPPLPARLGPVGQLAPRPAPATSSKAQRMKWTTTINTSCMRAYYGATEGGTNLTAYRNRMLSLFQTLEPTVAVSAQRLSDQVRAIHRCKLMEQSTLDRLRLEALPVSTTSTSGRDLPETPSIPGPVITSTPVASRVDTEVVDGECGNMSVSSQVTEQLRRTLEDAIRQYRFTSDSRPRLPRVPTHRRNLALMGALDALLAPYLQTSKDLIDTHSILYCGAIAVCRVARVKFPDTEQAPRTLGHAPAWQVRIQRRIDTYRTLIAKLVCFSRGNNRPRVMRFVNQAFAGTDIRPRNYMTCVTERIDFLKQKVYAWANRIRRYRERVDRYCQNRLFQSDQRKVYRNWEVTGQRMDDGQLPDVIAMINFWRGIWSVPVEHTEGDWMNIVERACDPIESMEAVSISPIDVRYAIQTAQNWKSPGPDGLQNFWIKWIRSSHLCLAMQFQEAIELGSLPSFMTTGSTTLLFKSGSTTEAKNYRPITCLPTMYKLLTSILRTKINSHIIANNILAPAQNGCRVGSRGTKELLLIDMTICQQVRRKRGALSTAWVDYKKAYDSVPHSWLVRILELYKIDTTLRSFLRTCMGQWSTVLRQPGGGDSVFGPQDFIRIERGIFQGDSLSPLWFCLALNPLSTLLQNSGLGYRLRREGEIISHLLYMDDLKLFAPKRFDLMKLLNITEEFSKSINMEFGVDKCAVMHVQRGKVVNSSNLQLSETLSLRSLSEAETYKYLGMSESLGIVDRDIKQSVKERFFCRLTKVLNSHLSGGNRARAFNGWVMPLLTYSFGILRWTQTELDALDRRVRQQLTLHRMLHPRSSVMRLYIPRKWGGRGFLNAKNLHNREVCSLREYFLNTECGMHRDVVVVDKTLTPLSLANGNWRKPSVLSTDDRKDVWKGKELHGRFYRALTGPDVDLLASVNWLRFGDLFGETEGFVCAIADEVIKTNNYRKYIMKDGTVDICRACRRPGESLRHIISGCSHLANGEYLHRHNQVARIVHQQLALQYGLVELEVPYYKYAPAPVLENGRALLYWDRSVITDRTIVANKPDIVLVDRSQRRAVLVDITVPHDENLVKAEKDKLSKYLDLAHEVTAMWDVDSTIIVPIVVSANGLVAKSLDQHLKRLSLDGWIKGRMQKAVLLDTARIVRRFLSLQP

SEQ ID NO: 5664 - protein, 1196 aa, Ennomos quercinarius
MITRSRKKQAEQSARLPPPPAPSSPSSSSGDEYGTPPDTTASSDEDGPPSPPPPPPPARRGRPPLPARLGPAGQPAPRPAPATGGIVRRMRWTPTMNENCMRAYYGAIEGGSNLTAYRDRVLSLFQDLEPAVAVSAQRLSDQVRAIQRCKMLDQSTLDRLRLEALPIPATSPSPRVLPAALPDQGPIMGPPPVSPRGDPAIDGEVSVSDSVSTQADEQLRSALEDAILRYRSTSTSRPRLPRLPMNRRNLVLMGALNALLAPYLRTSEDLVDTHSILYWGAIAACRVARVKFPDTDRAPRPADGAPAWQVRIEKLVCFSRGNHRPRVMRFVAQAFTGTGIRPQDYMACATERIDFLKQKVYAWASRIRRYRERVDRYQQNRLFQSDQRKVYRNWEGTSQRVVDGQLPDANAMNEFWRSIWSVPVEHTEGDWMRVVERVCEPIESMGSITIDPEDISCAIRTAQNWKSPGPDGLHNFWIKWIRCSYPCLAIQFQEALEAGSLPSFMTTGVTFLLHKSGSTTEAKNYRPITCLPTLYKLLTSILRTKINSHIVANNILAPAQNGCRVGSRGTKELLLIDTAICQQVRRNRGALSTAWIDYKKAYDSVPHSWLERVLELYKIDATLRSFLSACMRQWTTVLRQPGGGESVSDPQDFIRIERGIFQGDSLSPLWFCLALNPLSTLLGDSGLGYRLRRGSEIISHLLYMDDLKLFAPQRPQLIELLKITENFSNSINMEFGVDKCAVMHVHRGKVVNSTNLQLSETMTLRSLSESETYRYLGMSESLGISVGDVKRTVKERFFCRLTKVLNSLLSGGNKTRAFNGWVMPLLMYSFGILRWTQTELDALDRKVRQLLTSHRMLHPRSSVMRLYIPRKWGGRGFLNAKTLHNREVCSLRDYFLNNECGMHRDVVAVDKGLTPLSLANENWRKPVVLSTEDRRDVWKGKELHGRFYRALTGPDVDLHASVNWLRFGDLFGETEGFVCAIADEVIKTNNYRKYIMKDGTVDICRACRRPGESLRHIISGCSHLANGEYLHRHNLVARIIHQQLALQYGLVESEVPYYKYTPGPVLENDRALLYWDRSIITDRTIVANKPDIVLVDRSQRRAVLVDITIPHDENLVKAEKDKLSKYLDLAHEVTAMWNVDSTSIVPIVVSANGLIAKSLDQHLERLSLDGWIKGQIQKAVLLDTARIVRRFLTLQP

SEQ ID NO: 5665 - protein, 1206 aa, Ennomos quercinarius
MITRSRTKQAEQSARLPPPPAPSSSSSSSGDEYGTPPDTTASSDEDGPPSPPPPPPPARRGRPPLPARLGPAGQPAPRPAPATGGIVRRMRWTQAMNENCMRAYYGATEGGSSLTAYRDRMLSLFQNLEPTVAVSAQRLSDQVRAIQRCKMLDQSTLDRLRLEALPTRATSPSPRVLPAALPDPGPTTGPPPVTPRGDPAIGGEESVSDSVSTQANEQLRSALEDAILRYRSTSTSRPRLPRLPTNRRNLVLMGALNTLLAPYLRTSEDLVDTHSILYCGAIAACRVARVKFPDTDRAPRPADGAPAWQVRIEKRITTFRTLIAKLVCFSRGNHRPRVMRFVTQAFAGTGIRPQDYMACVTERIDFLKQKVYAWASRIRRYRERVDRYQQNRLFQSDQRKVYWNWEGTGQRVVDGQLPDANAMNEFWRSIWSVPVEHTEGDWIRVVKRVCEPIESMGSITIDPEDISCAIRTAQNWKSPGPDGLHNFWIKWIRCSYPCLAIQFQEALEAGSLPSFMTTGVTFLLHKSGTTEAKNYRPITCLPTLYKLLTSILRTKINSHIVANNIFSPAQNGCRVGSRGTKELLLIDTTICQQVRRNRGALSTAWIDYKKAYDSVPHSWLERVLELYKIDTTLRSFLRSCMGQWTTVLRQPGGGDSVSGPQDLIRIERGIFQGDSLSPLWFCLALNPLSTLLEDSKLGYRLRRGGETICHLLYMDDLKLFAPQRPQLIELLKITENFSNSIRMEFGVDKCAVMHVRGGKVVNSTNLQLSETMTLRSLSETETYKYLGMSESLGISVGDVKRTVKERFFCRLTKVLNSLLSGGNKVRAFNGWVMPLLIYSFGILRWTQTELNALDRKVRQLLTSHRMLHPRSSVMRLYIPRKWGGRGFLNAKNLHNREVCSLREYFLNNECGMHRDVVAVDKGLTPLSLANENWRKPVVLSTEDRRDVWKGKELHGRFYRALTGPDVDLHASVNWLRFGDLFGETEGFVCAIADEVIKTNNYRKYIMKDGTVDICRACRRPGESLRHIISGCSHLANGEYLHRHNLVARIIHQQLALQYGLVESEVPYYKYMPGPVLENGRALLYWDRSIITDRTIVANKPDIVLIDRSQRRAVLVDITIPHDENLVKAEKDKLSKYLDLAHEVTAMWNVDSTSIVPIVVSANGLIVKSLDQHLERLSLDGWIKGQIQKAVLLDTARIVRRFLTLQP

SEQ ID NO: 5666 - protein, 1213 aa, Cydia splendana
MQRMITRSQRRAAESTNNARPPPPPAPSSSSSTSSSGDEFATAPDTDGSSDEGGPPPPPPRPPARRGRPPLPARLGPAGHPAPPTAPAAGGIVRRMRWTRDMNENVMRAYYGATEGGTQLSAYRSRILPLFQALEPTITVSEQRLSDQVRVIQRLKRLDDATLDRLRQEALSARADSTSVRDLPATSPDPVPAPDLAPAAPRVDFCTDEGDFASQNVSTTANEQLRRTLEEAITQYRATTNSRPRLPRLPMNRRNLALMGALNALLEPHLRTSKDLDDTHSIMYCGAIAACRVARVKFPDAERAPRTAGGVPAWQVRIERRISSFRTLIAKLICFREGNNRPRVMRFVNQAFAGTDIRPRDYMANVTERIDFLKQKVYAWANRIRRYRERVDRFQQNRLFQSDQRKVYRKWEETNLRTPDTQPPDVTAMTDFWRSIWSVPVGHTEGGWMSVVERECESIEPMGAVTISPDDVSCAIRTAQNWKSPGPDGLHNFWLKWFRCSHSRLAAQFQQALELGSLPPSLTTGVTFLLYKSGSTTEAKNYRPITCLPTLYKLLTSILRAKINAHIIANNILASAQNGCRVGSRGTKELLLIDMTICQQIRRHKGALSAAWIDYKKAYDSVPHSWLGRVLELYKVDAALRAFLSACMRQWTTVLRQPGGGDDRPGPQDFIRIKRGIFQGDSLSPLWFCLALNPLSTLLKDLGLGCRLRREGVVISHLLYMDDLKLFAPNSQDLLELLKTTEVFSSAIHMEFGVDKCAVMHVQRGKVVNSTNLQLSETMSFRSISESETYKYLGMSQSLGIEDEGIRRSVKERFFSRLTKVLNSLLSGGNKVRAFNAWVMPLLTYSFGILRWTQTELDALDRRVRSLLTTHRMLHPRSSVMRLYIPRKCGGRGFLNAKDLHNREVYNLRNYFLNNECGMHRDVVAVDRNLTPLSLANENWRKPVVLSTADRKAAWESKVLHGRFYKALTGPDVDLLASVNWLRFGDLFGETEGFACAIADEVMMTNNYRKYILKDGTVDICRACRRPGESLRHIISGCSHLANGEYLHRHNLVARIIHQQLALLYGLVDREVPYYKYLPAPVLENGHATLYWDRSIITDRTIVANKPDIVIIDRSQRRAVLVDITIPHDENLVKAEKDKSSKYLDLAHEITAMWDVDSTIIVPIVVSVNGLIAKSLDQHLERLSLGGWIKGQMQKAVILDTARIVRRFLSLQP

SEQ ID NO: 5667 - protein, 1118 aa, Cydia splendana
MRWTRDMNENVMRAYYGATEGGTQLSAYRSRILPLFQALEPTITVSEQRLSDQVRVIQRLKRLDDATLDRLRQEALSARADSTSVRDLPATSPDPVPAPDLAPAAPRVDFCTDEGDFASQNVSTTANEQLRRTLEEAITQYRATTNSRPRLPRLPMNRRNLALMGALNALLEPHLRTSKDLDDTHSIMYCGAIAACRVARVKFPDAERAPRTAGGVPAWQVRIERRISSFRTLIAKLICFREGNNRPRVMRFVNQAFAGTDIRPRDYMANVTERIDFLKQKVYAWANRIRRYRERVDRFQQNRLFQSDQRKVYRKWEETNLRTPDTQPPDVTAMTDFWRSIWSVPVGHTEGGWMSVVERECESIEPMRAVTISPDDVSCAIRTAQNWKSPGPDGLHNFWLKWFRCSHSRLAAQFQQALELGSLPPSLTTGVTFLLYKSGSTTEAKNYRPITCLPTLYKLLTSILRAKINAHIIANNILASAQNGCRVGSRGTKELLLIDMTICQQIRRHKGALSAAWIDYKKAYDSVPHSWLGRVLELYKVDAALRAFLSACMRQWTTVLRQPGGGDDRPGPQDFIRIKRGIFQGDSLSPLWFCLALNPLSTLLKDLGLGCRLRREGVVISHLLYMDDLKLFAPNSQDLLELLKTTEVFSSAIHMEFGVDKCAVMHVQRGKVVNSTNLQLSETMSFRSISESETYKYLGMSQSLGIEDEGIRRSVKERFFSRLTKVLNSLLSGGNKVRAFNAWVMPLLTYSFGILRWTQTELDALDRRVRSLLTTHRMLHPRSSVMRLYIPRKCGGRGFLNAKDLHNREVYNLRNYFLNNECGMHRDVVAVDRNLTPLSLANENWRKPVVLSTADRKAAWESKVLHGRFYKALTGPDVDLLASVNWLRFGDLFGETEGFACAIADEVMMTNNYRKYILKDGTVDICRACRRPGESLRHIISGCSHLANGEYLHRHNLVARIIHQQLALLYGLVDREVPYYKYLPAPVLENGHATLYWDRSIITDRTIVANKPDIVIIDRSQRRAVLVDITIPHDENLVKAEKDKSSKYLDLAHEITAMWDVDSTIIVPIVVSVNGLIAKSLDQHLERLSLGGWIKGQMQKAVILDTARIVRRFLSLQP

SEQ ID NO: 5668 - protein, 1213 aa, Cydia splendana
MQRMITRSQRRAAESTNNARPPPPPAPSSSSSTSSSGDEFATAPDTDGSSDEGGPPPPPPRPPARRGRPPLPARLGPAGHPAPPTAPAAGGIVRRMRWTRDMNENVMRAYYGATEGGTQLSAYRSRILPLFQALEPTITVSEQRLSDQVRVIQRLKRLDDATLDRLRQEALSARADSTSVRDLPATSPDPVPAPDLAPAAPRVDFCTDEGDFASQNVSTTANEQLRRTLEEAITQYRATTNSRPRLPRLPMNRRNLALMGALNALLEPHLRTSKDLDDTHSIMYCGAIAACRVARVKFPDAERAPRTAGGVPAWQVRIERRISSFRTLIAKLICFREGNNRPRVMRFVNQAFAGTDIRPRDYMANVTERIDFLKQKVYAWANRIRRYRERVDRFQQNRLFQSDQRKVYRKWEETNLRTPDTQPPDVTAMTDFWRSIWSLPVGHTEGGWMSVVERECESIEPMGAVTISPDDVSCAIRTAQNWKSPGPDGLHNFWLKWFRCSHSRLAAQFQQALELGSLPPSLTTGVTFLLYKSGSTTEAKNYRPITCLPTLYKLLTSILRAKINAHIIANNILASAQNGCRVGSRGTKELLLIDMTICQQIRRHRGALSAAWIDYKKAYDSVPHSWLGRVLELYKVDAALRAFLSACMRQWTTVLRQPGGGDDRPGPQDFIRIKRGIFQGDSLSPLWFCLALNPLSTLLKDLGLGCRLRREGVVISHLLYMDDLKLFAPNSQDLLELLKTTEVFSSAIHMEFGVDKCAVMHVQRGKVVNSTNLQLSETMSFRSISESETYKYLGMSQSLGIEDEGIRRSVKERFFSRLTKVLNSLLSGGNKVRAFNAWVMPLLTYSFGILRWTQTELDALDRRVRSLLTTHRMLHPRSSVMRLYIPRKCGGRGFLNAKDLHNREVYNLRNYFLNNECGMHRDVVAVDRNLTPLSLANENWRKPVVLSTADRKAAWESKVLHGRYYKALTGPDVDLLASVNWLRFGDLFGETEGFACAIADEVMMTNNYRKYILKDGTVDICRACRRPGESLRHIISGCSHLANGEYLHRHNLVARIIHQQLALLYGLVDREVPYYKYLPAPVLENGHATLYWDRSIITDRTIVANKPDIVIIDRSQRRAVLVDITIPHDENLVKAEKDKSSKYLDLAHEITAMWDVDSTIIVPIVVSVNGLIAKSLDQHLERLSLGGWIKGQMQKAVILDTARIVRRFLSLQP

SEQ ID NO: 5669 - protein, 1210 aa, Cydia splendana
MITRSQRRAAESTNNARPPPPPAPSSSASTTSSGDEFATAPDTDGSSDESGPPPPPPRPPARRGRPPLPARLGPAGHPAPPTAPATGGIVRRMRWTRNMNENVMRAYYGATEGGTQLSAYRSRILPLFQALEPTITVSEQRLSDQVRVIQRLKRLDDATLDRLRQEALSARADSTSVRDLPATSPDPVPAPDLAPGAPRVDFCTDEGDFASQNVSTTANEQLRRTLEEAITQYRATTNSRPRLPRLPMNRRNLALMGALNALLEPNLRTSKDLDDTHSIMYCGAIAACRVARVKFPDAERAPRTVGGVPAWQARIERRISSFRTLIAKLICFRGGNNRPRVMRFVNQAFAGTDIRPRDYMANVTERIDFLKQKVYAWANRIRRYRERVDRFQQNRLFQGDQRKVYRKWEETNLRTPDTQPPDVTAMTDFWRSIWSVPVGHTEGGWMSVVERECESIEPMGAVTISPDDVSCAIRTAQNWKSPGPDGLHNFWLKWFRCSHSCLAAQFQQALELGSLPPSLTTGVTFLLYKSGSTTEAKNYRPITCLPTLYKLLTSILRAKINAHIVANNILASAQNGCRVGSRGTKELLLIDMTICQQIRRNKGALSAAWIDYKKAYDSVPHSWLGRVLELYKVDAALRAFLSACMRQWTTVLRQPGGRDDRPGPQDFIRIERGIFQGDSLSPLWFCLALNPLSTLLKDLGLGCRLRREGEVISHLLYMDDLKLFAPNSQDLLELLKTTEVFSSAIHMEFGVDKCAVMHVQRGRVVNSTNLQLSETMSFRSISESETYKYLGMSQSLGIEDEGIRRSVKERFFSRLTKVLNSLLSGGNKVRAFNAWVMPLLTYSFGILRWTQTELDALDRRVRSLLTAHRMLHPRSSVMRLYIPRKCGGRGYLNAKDLHNHEVYNLRNYFLNNECGMHRDVVAVDRNLTPLSLANENWRKPVVLSTADRKAAWESKVLHGRFYKALTGPDVNLLASVNWLRFGDLFGETEGFACAIADEVMMTNNYRKYILKDGTVDICRACRRPGESLRHIISGCSHLANGEYLHRHNLVARIIHQQLALLYDLVDREVPYYKYLPAPVLENGRATLYWDRSIITDRTIVANKPDIVIIDRSQRRAVLVDITIPHDENLVKAEKDKSSKYLDLAHEITAMWDVDSTIIVPIVVSVNGLIAESLDQHLQRLSLGGWIKGQMQKAVILDTARIVRRFLSLQP

SEQ ID NO: 5670 - protein, 1212 aa, Agriopis aurantiaria
MITRSRTKQADTKSARLPSPPASSSSPSTSSGEDEYHTTREASGSSSDTSGPGTPPPPPPARRGRPPLPARLGLVGHSATRPAPATGGVVRRMRWSTIMNEDCMRAYYRATEGGTNLSAYCARMLPLFQALQPTITVSAQRLSDQVRAIHRCKLLDDSVLDRLRQEELRARPIPVSTRDLPVASSAPTLASVPASVVTLAASADPVVDEGDLASGVSDQVREQLRGALEDAISQYRFTPDSRPRLPRLSTHRRNLALMGALNALLAPYLRASEDLVDTHSILYCGAIAACRVARVKFPDTNRAPRTAGGVPAWQVRIERRISTFRTLIAKLVCFRRGNNRPRVMRFVTQAFAGTDIRPQQYLANVTERIDYLKQKVYAWANRIRRYRERVDRYWQNRLFQSDQRKVYRGWEETDQRVSDGQLPDASAMINFWRGIWSVPVEHTEGDWMRVVERECESIEPMESILIDSIDVSCAIRTAQNWKSPGPDGLHNFWIKWIRCSHDRLATQFQEALELGSLPSFMTTGVTFLLHKSGSTTEAKNYRPITCLPTIYKLLTSILRNKINAHIVANNVLAHAQNGCRVGSRGTKELLLIDTAISQQVRRNKGALSAAWIDYKKAYDSVPHSWLERVLELYKIDTTLKSFLGACMRQWTTVLRQPGGGDGAFDPQDLLRIERGIFQGDSFSPLWFCLALNPLSTLLRDSGLGYRLRRDGQVISHLLYMDDLKLFTPKRQDLVELLKITEVFSSAIRMEFGVDKCAVMHVQRGKVVNSPNLQLSEVMTLRSLSEAETYKYLGMSESLGISVENIKKSVKERFFCRLTKVLNSLLSGGNKVRAFNGWVMPLLIYSFGILRWTQTELDALDRRVRQLLTSHRMLHPRSSVMRLYITRKWGGRGFLNAKNLHNREVCSLRDFFRNSESGMHRDVVAVDRGLTALSLANENWRKPSVLSIEDRRDVWKGKELHGRFYRALTGPDVDLLASVNWLRFGDLFGETEGFACAIADEVIKTNNYRKYIMKDGTVDICRACHRPGESLRHIISGCSHLANGEYLHRHNLVARIIHQQLALRYSLVESEVPYYKYAPAPVLENGRALLYWDRSIITDRTIVANKPDIVLVDRSQRRAVLVDITIPHDENLVKAEKDKLSKYLDLAHEVTAMWDVDSTIIVPIVVSVNGLIAKSLDQHLKRLSLDGWVKGQMQKAVILDTARIVRRFLTLQP

SEQ ID NO: 5671 - protein, 1090 aa, Agriopis aurantiaria
MLPLFQDLEPTVTVSAQRLSDQVRAIHRCKLLDDSVLDRLRLEELRARPTPALMRDPPVASSAPTLASLPASVATLAAPADPVVDEGDLTSNSVSDQVREQLRGALEDAISQYRFAPDSRPRLPRLPTHRRNLALMGALNALLAPYLRASEDLVDTHSILYCGAIAACRVARVKFPDTNRAPRTAGGVPAWQVRIERRISTFRTLIAKLICFSRGNNRPRVMRFVTQAFAGTEIRPQHYLANVMERIDYLKQKVYAWVSRIRRYRERVNRYWQNRLFQSDQRKVYRGWEETDQRVSDGQLPDANAMINFWRGIWSVPVEHTEGDWMRVVERECESIEPMGSILIDSVDVSCAIRTAQNWKSPGPDGLHNFWIKWIRCSHDRLATQFQEALELGSLPSFMTTGVTFLLHKSGSTTEAKNYRPITCLPTIYKLLTSILTNKINAHIVANNVLAHAQNGCRVGSRGTKELLLIDTAISQQVRRNKGALSAAWIDYKKAYDSVPHSWLERVLELYKIDTTLKSFLGACMRQWTTVLRQPGGGDGTSGPQDLIRIERGIFQGDSFSPLWFCLALNPLSTLLRDSGLGYRLRRDGQVISHLLYMDDLKLFTPKRQDLVELLKITEVFSSAIRMEFGVDKCAVMHVQRGKVVNSPNLQLSEVMTLRSLSEAETYKYLGMSESLGISVENIKKSVKERFFCRLTKVLNSFLSGGNKVRAFNGWVMPLLIYSFGILRWTQTELDALDRRVRQLLTSHRMLHPRSSVMRLYIPRKWGGRGFLNAKNLHNREVCSLRDFFRSSESGMHRDVVAVDRGLTPLSLANENWRKPSVLSIEDRRDVWKGKELHGRFYRALTGPDVDLLSSVNWLRFGDLFGETEGFACAIADEVIKTNNYRKYIMKDGTVDICRACHRPGESLRHIISGCSHLANGEYLHRHNQVARIIHQQLALRYGLAEFEVPYYKYAPAPVLENGRALLYWDRSIITDRTIVANKPDIVLVDRSQRRAVLVDITIPHDENLVKAEKDKLSKYLDLAHEVTAMWDVDSTIIVPIVVSVNGLIAKSLDQHLKRLSLDGWIKGQMQKAVILDTARIVRRFLTLQP

SEQ ID NO: 5672 - protein, 1211 aa, Agriopis aurantiaria
MITRAKTRAAESNARLPPPPASSSSPSTSSGEDEYHTTREASGSSSDTSGPGTPPPPPPARRGRPPLPARLGPVGHSATRPAPATGGVVRRMRWSRIMNEDCMRAYYRATEGGTNLSAYCARMLPLFQALQPTITVSAQRLSDQVRAIQRCNMLDQSVLDRLRLEEVRTRPTPASTRNPPVASSAPTLASVPASVGTLAALADTAVDEEDLASGVSDQVKEQLRGALEDAISQYRFTSDSRPRLPRLPTHRRNLALMGALNALLAPYLRASEDLVDTHSILYCGAIAACRVAHVKFPDTNRAPRTAGGVPAWQVRIERRINTFRTLIAKLICFRRGNNRPRVMRFVTQAFAGTDIRPQHYLANVTERIDYLKQKVYAWANRIRRYRERVDRYWQNRLFQSDQRKVYRGWEETDQRVSDGQRPDANAMINFWRGIWSVPVNHTEGDWMRVVERECESIEPMGSILIDPVDVSCAIRMAQNWKSPGPDGLHNFWIKWIRCSHDRLATQFQEALELGSLPSFMTTGVTFLLHKSGSTTEAKNYRPITCLPTIYKLLTSILRNKINAHIVANNVLAHAQNGCRVGSRGTKELLLIDTAISQQVRRNRGALSAAWIDYKKAYDSVPHSWLERVLELYKIDTTLKSFLCACMRQWTTVLRQPGGGDGTSGPQDLIRIERGIIQGDSFSPLWFCLALNPLSTLLRDSGLGYRLRRDGQVISHLLYMDDLKLFTPKRQDLVELLKITDVFSSAIRMEFGVDKCAVMHVQQGKVVNSPNLQLSEVMTLRSLSEAETYKYLGMSESLGISVENIKKSVKERFFCRLTKVLNSLLSGGNKVRAFNGWVMPLLIYSFGILRWTQTELDALDRRVRQLLTSHRMLHPRSSVMRLYIPRKWGGRGFLNAKNLHNREVCSLRDFFRNSESGMHRDVVAVDRGLTPLSLANENWRKPSVLSIEDRRDVWKGKELHGRFYRALTGPDVDLLSSVNWLRFGDLFGETEGFACAIADEVIKTNNYRKYIMKDGTVDICRACHRPGESLRHIISGCSHLANGEYLHRHNQVARIIHQQLALRYGLVESEVPYYKYAPAPVLENGRALLYWDRSIITDRTIVANKPDIVLVDRSQRRAVLVDITIPHDENLVKAEKDKLSKYLDLAHEVTAMWDVDSTFIVPIVVSVNGLIAKSLDQHLKRLSLDGWVKGQMQKAVILDTARIVRRFLTLQP

SEQ ID NO: 5673 - protein, 1208 aa, Ennomos fuscantarius
MILRSKTKTADNKCARLPPLPVSSSPSSSSGDEYATPPDTTASSDDDGLPSPPPPPPPARRGRPPLPARLGPVGQPAPRPAPATGGVVRRMRWTQTMNENCMRAYYGATEGGSSLTAYRDRMLSLFQELEPSISVSAQRLSDQVRAIHRCKLLDQSALDRLRLETLPIPATSPSPRVLSAALPDPGPIVGPPLVTPLGGPVIDGEESVSDSVSTQVNEQLRSALEDAILRYRSTPTSRPRLPRLPTNRRNLVLMGALNTLLGPYLRTSEDLVDTHSILYCGAIAVCRVARVKFPDTDRAPRPADGAPAWQVRIEKRITTFRTLIAKLVCFSRGNHRPRVMRFVTQAFAGTGIRPQDYMACVTERIDFLKQKVYAWASRIRRYRERVDRYQMNRLFQSDQRKVYRDWEGTGQRVVDGQLPDANVMNEFWRSIWSVPVDHSEGDWIRVVKHVCEPIESMGSITIDPEDISCAIRTAQNWKSPGPDGLHNFWIKWIRCSYPCLAIQFQEALEAGSLPKFMTTGITFLLHKSGSTMEAKNYRPITCLPTLYKLLTSILRTKINSHITANNILASAQNGCRVGSRGTKELLLIDTAICQQVRRNRGALSTAWIDYKKAYDSVPHSWLKRVLELYKINATLRSFLSACMGQWTTVLRPPGGGDSVSDPQNFIRIERGIFQGDSLSPLWFCLALNPLSTLLGDSGLGYRLRRGGEIISHLLYMDDLKLFAPQRPQLMKLLKITENFSNSIKMEFGVDKCAVMHVHGGKVVNSTNLQLSETMTLRSLSESETYKYLGMSESLGISVGDVKQSVKERFFCRLTKVLNSLLSGGNKARAFNAWVMPLLMYSFGILRWTQTELDALDRKVRQVLTSHRMLHPRSSVMRLYIPRKWGGRGFLNAKNLHNREMYSLREYFLSNECGMHRDVVAVDKGLTPLSLANENWRKPVVLSTDDRRDVWKGKELHGRFNRALTGPDVDLHASVNWLRFGDLFGETEGFVCAIADEVIKTNNYRKYIMKDGTVDICWACRRPGESLRHIISGCSHLANGEYLHRHNLVARIIHQQLALQYGLVESEVPYYKYTPGPVLENGRALLYWDRSIITDRTIVANKPDIVLIDRSQRRAVLVDIAIPHDENLVKAEKDKLSKYLDLAHEVTAMWSVDSTSIVPIVVSANGLIAKSLDQHLERLSLDGWIKGQIQKAVLLDTARIVRRFLTLEP

SEQ ID NO: 5674 - protein, 869 aa, Hedya salicella
MRYVAQAFAGTDVSSCDYMACVTERIDFLKQKVYAWASRIRRYRERVDRFQQNRLFQSDQRKVYRKWEGTGQRVTDGRLPDPTAMSNFWRSIWSVPVEHTEGEWMNVVERECEPIEAMGAVTISPDDVSCAARTTQNWKSPGPDGLHNFWVKWFRCSHERLATQFQQALELGSLPSFLTTGVTFLLYKSGSTTEAKNYRPITCLPTLYKLLTSILRAKINTHIVANNVLAFSQNGCRVGSRGTKELLLIDTTICQQVRRSRGSLSAAWIDYKKAYDSVPHSWLERILELYKVDTALRSFLGACMRQWTTVLCQPGGRDARPAPQDFIRIKRGIFQGDSLSPLWFCLALNPLSTLLKDSGLGCRLRRGGEIISHLMYMDDLKLFAPKRPELVELLKVTDTFSSAIKMEFGVDKCAVMHVQRGKVVNSTNLELSETMSLRSLSETETYKYLGMSQALSIADGDIRQAVKERFFCRLTKVLNSLLSGGNKARAFNAWVMPLLTYSFGILRWTQTELDALDRRVRMLLTTHRMLHPRSSVMRLYIPRKCGGRGFLNAKDLHNREVCSLREYFLNNECGIHRDVVAVDKGLTPLSLANENWRRPTVLSTVDRKDVWKSKELHGRFYKALTGPDVDLLASVNWLRFGDLFGETEGFSCAIADEVIMTNNYRRYILKDGTVDICRACRRPGESLRHIMSGCSYLANGEYLHRHNQVARIIHQQLAVKYDLVGSEVPYYKYVPMPVLENGRATLYWDRSILTDRTIVANKPDIVLVDRSKRRAMLVDITIPHDENLVKAEKDKLSKYLDLAHEVTAMWDVDSTIIVPIVVSVNGLIAKSLDEHLKRLSLDGWIKGQIQKAVILDTARIVRRFLSVQP

SEQ ID NO: 5675 - protein, 1215 aa, Erannis defoliaria
MITRSKANIAAAEPNARPPSPPAPSSPSASSGDDEFLTPRESSATSSDSDVSGPRTPAPPPPVRRGRPPLPARLGPAGLPASRPALAAGGVVRRMRWSQINNENCMRAYYGATEGGTNLSAYRVRMLPLFQALEPTVTVSAQRLSDQVRAIQRLNLLDQSLLDRLRLEAQSARATPASTRDSHVASSAPTLASMPTSAATLATPADPVVDEGDCTSMSVSSQVSEQLRRALEDAICQYRFALNSRPRLPRLPTHRRNLALMGALNALLAPYLRASKDLTDTHSILYCGAIAACRVARVRFPDTNRAPRTVGDVPAWQVRIERCISTFRTLIAKLICFSRGNNRPRVMRFVTQAFSGTGLRPQHYMASVTERIDYLKQKVYAWANRIRRYRERVDRYWQNRLFQSDQRKVYRNWEGAAQRVNDGHLPDANAMTNFWRSIWSVPVEHTEGDWMRVVERECEAIEPMGPILIDPVDVSCAIRTAQNWKSPGPDGLHNFWIKWFRCSHDRLATQFQEALELGSLPSFMTTGITFLLHKSGSTTEPKNYRPITCLPTIYKLLTSILSTKINAHIIANNVLAPAQNGCRVGSRGTKELLLIDMAISQQVRRSKGALSAAWIDYKKAYDSVPHSWLERILELYQIDTTLKSFLGACMRQWTTVLRQPGGGNDSSDPQDLIRIERGIFQGDSLSPSWFCLALNPLSTLLKDSGLGYRLRRGSEVISHLLYIDDLKLFAPKHQDLLELLKTTQVFSSAIRMEFGVDKCAVMRVQRGKVVNSSDLQLSEIMTLRSLSEAETYKYLGMSESLGISVVDIKKSVKERFFCRLTKVFNSLLSGGNKARAFNGWVMPLLIYSFGILRWTQNELDALDRRVRQLLTAHRMLHPRSSVMRLYIPRKWGGRGFLNAKNLHNREVCSLSDYFLNNECGMHRDVVTVDKGLTPLSLANENWRRPSVLSTDDRKEVWKSKELHGRFYRALTGSDVDLLASVNWLRFGDLFGETEGFACAIADEVIKTNNYRKYIMKDGTVDICRACHRPGESLRHIISGCSHLANGEYLHRHNQVARIIHQQLALQYGLVESEVPYYKYAPAPVLENGRVLLYWDRSIITDRTIVANKPDIVMVDRSQRQAVLVDVTIPHDENLVKAEKDKLSKYLDLAFEITAMWDVDSTIIVPIVVSANGLIAKSLDQYLKRLSLGGWVKGQIQKAVVLDTARIVRRFLTLQP

SEQ ID NO: 5676 - protein, 1213 aa, Erannis defoliaria
MITRSKKRNAAVQHARPTPPPVPSSSPSSSSPSEEEFHTCGTSSSSEDVSGPRTLTPPIPVRRGRPPLPARLGPAGQPASRPALAAGGVVRRMRWSQTNNENCMRAYYGATEGGTNLTAYRVRMLSLFQTLEPTVTVSAQRISDQVRAIQRLNLLDQPLLDRLRLEVQSARPTPASTRDLDVVSSAPTLASVPTSAATLATSADPVLDEGDCTGMSVSTQVSEQLRRALEDAIGQYRFALNSRPRLPRLPTHRRNLALMGALNALLAPYLRASEDLTDTHSILYCGAIAACRVARVKFPDTNRAPRPAGDVPAWQLRIERRISTFRTLIAKLICFSRGNNRPRVMRFVTQAFAGTGIRPQQYMASVTERIDYLKQKVYAWANRIRRYRERVDRYWQNRLFQSDQRKVYRNWEGTEQRVSDGQLPDASAMTNFWRGIWSVPVEHTEGDWMRVVERECESIEPMGSILIDPVDVSCAIRTAQNWKSPGPDGLHNFWIKWFRCSHDRLATQFQEALELGSLPSFMTTGVTFLLHKSGSTTEPKNYRPITCLPTIYKLLTSILSTKINAHIVANNVLAPAQNGCRVGSRGTKELLLIDMAISQQVRRNKGALSAAWIDYKKAYDSVPHSWLERILELYQIDTTLKSFLGACMRQWTTVLRQPGGGNGSSDSQDLIRIERGIFQGDSLSPSWFCLALNPLSTLLKDSGLGYRLRRGGEVISHLLYMDDLKLFAPKHQDLLELLKTTQVFSSAIRMEFGVDKCAVMRVQRGKVVNSPDLQLSEIMTLRSLSEAETYKYLGMSESLGISVVDIKKSVKERFFCRLTKVLNSLLSGGNKARAFNGWVMPLLIYSFGILRWTQTELDALDRRVRQLLTAHRMLHPRSSVMRLYIPRKWAGRGFLNAKNLHNREVCSLRDYFLNNECGMHRDVVTVDKGLTPLSLANENWRRPSVISTDDRKEVWKSKELHGRFYRALTGPDVDLLASANWLRFGDLFGETEGFACAIADEVIKTNNYRKYIMKDGTVDICRACHRPGESLRHIISGCSHLANGEYLHRHNQVARIIHQQLALQYGLVESEVPYYKYAPAPVLENGRALLYWDRSIITDRTIVANKPDIVIVDRSQRRAVLVDVTIPHDENLVKAEKDKLSKYLDLAFEITAMWDVDSTIIVPIVVSANGLIAKSLDQYLKRLSLDGWVKGQIQRAVVLDTARIVRRFLTLQP

SEQ ID NO: 5677 - protein, 1215 aa, Biston betularia
MWTRSRTAAASGSHDAQIPPPPAPSTPSASSGDEEFATPLATSASSSSSDVSGPRTPAPPPPARRGRPPLPARLEPAGQSASRSALAVGGVVRRMRWSQTNNENCMRAYYGATEGGINLSAYRVRMLPLFQALEPTVTVSAQRLSDQVRAIQRLQLLDQSVLDRLRLKALPARPTPVSTRDSPVASSAPTLVSVPTSMATLATPIDPVVDVGECASMGVCSQVSEHLRRTLEDAICQYRFAPDSRPRLPRLPTHRRNLALMGALNALLAPYLRASEDLTDTHSILYCGAIAACRVARVKFPDTNRAPRPAGGVPAWQLRIERRIGTFRTLIAKLICFSRGNNRPRVMRFVTQAFAGTGIRPQHYLASVTERIDYLKQKVYAWANRIRRYRERADRYWQNRVFQSDQRKVYRDWEGTGQRVSDRQLPDTSVMTEFWRGIWSLPVEHTEGDWMRVVERECESIESMGSVLIDPVDVSCAIRTAQNWKSPGPDGLHNFWIKWIRCSHDRLATQFQEALELGSLPCLMTTGVTFLLHKTGSTTEAKNYRPITCLPTIYKLLTSILRTKINAHVVANNVLAPAQNGCRVGSRGTKELLLIDMTISQQVRRNKGALSTAWIDYKKAYDSVPHSWLERVLELYKIDTTLKSFLGACMRQWTTVLRQPGSGEGSSEPQDLIRIERGIFQGDSLSPLWFCLALNPLSTLLKESGLGHRLRRGGEVISHLLYMDDLKLFAPKRLDLMELLKTTQVFSNAIKMEFGVDKCAVMHVQRGEVVNCPDLQLSETMTFRSLSEAETYKYLGMSESLGIAVVDIKRSVKERFFCRLTKVLNSLLSGGNKVRAFNGWVMPLLIYSFGILRWTQTELDALDRRVRQQLTTHRMLHPRSSVMRLYIPRKLGGRGFLSAKNLHNREVCSLRDYFRDNECGMHRDVVAVDKGLTPLSLANENWRKPSVLSTEDRKEVWKSKQLHGRFYRVLTGPDVDMLASVNWLRFGDLFGETEGFACAIADEVIKTNNYRKYIMKDGTVDICRACHRPGESLRHIISGCSHLANGEYLHRHNQVARIIHQQLALQYGLVESEVPYYKYAPAPVLENGRALLYWDRSIITDRTIVANKPDIVVVDRAQRRAVLVDITIPHDENLVKAEKNKLSKYLDLAHEITAMWDVDSTIIVPIVVTVNGLIAKSLDQHLKRLSLDGWVKGQLQKAVILDTARIVRRFLTLQP

SEQ ID NO: 5678 - protein, 1102 aa, Biston betularia
MRIACAPIMGLQRGELTFQRTVPGCCLCFRPLNRPSPCLPNDYRIKCGLSSDFLEALPARPTPVSTRDSPVASSAPTLVSVPTSMVTLATPTDHVVDVGECTSMGVCSQVSEHLRRTLEDAICQYRFAPDSRPRLPRLPTHRRNLALMGALNALLAPYLRASEDLTDTHSILYCGAIAACRVARVKFPDTNRAPRPAGNVPAWQLRIERRISTFRTLIAKLICFSRGNNRPRVMRFVTQAFAGTGIRPQHYLASVTERIDYLKQKVYAWANRIRRYRERADRYWQNRVFQSDQRKVYRDWEGTGQRVSDKQLPDTSVMTEFWRGIWSLPVEHTEGDWMRVVERECESIESMGSVLIDPVDVSCAIRTAQNWKSPGPDGLHNFWIKWIRCSHDRLATQFQEALELGSLPCFMTTGVTFLLHKTGSTTEAKNYRPITCLPTIYKLLTSILRTKINAHVVANNVLAPAQNGCRVGSRGTKELLLIDMTISQQVRRNKGALSTAWIDYKKAYDSVPHSWLERVLELYKIDTTLKSFLGACMRQWTTVLRQPGSGDGSSEPQDLIRIERGIFQGDSLSPLWFCLALNPLSTLLKESGLGHRLRRGGEVISHLLYMDDLKLFAPKRPDLMELLKTTQVFSNAIKMEFGVDKCAVMHVQRGEVVNCPDLQLSETMTFRSLSEAETYKYLGMSESLGIAVVDIKRSVKERFFCRLTKVLNSVLSGGNKVRAFNGWVMPLLIYSFGILRWTQTELVALDRRVRQQLTTHRMLHPRSSVMRLYIPRKLGGRGFLSAKNLHNREVCSLRDYFRDNECGMHRDVMAVDKGLTPLSLANENWRKPSVLSTENRKEVWKSKQLHGRFYRVLTGPDVDMLASVNWLRFGDLFGETEGFACAIADEVIKTNNYRKYIMKDGTVDICRACHRPGESLRHIISGCSHLANGEYLHRHNQVARIIHQQLALQYGLVESEVPYYKYAPAPVLENGRALLYWDRSIITDRTIVANKPDIVVVDRAQRRAVLVDITIPHDENLVKAEKDKLSKYLDLAHEITAMWDVDSTIIVPIVVSVNGLIAKSLDQHLKRLSLDGWVKGQLQKAVILDTARIVRRFLTLQP

SEQ ID NO: 5679 - protein, 1207 aa, Blastobasis lacticolella
MITRSKRINQTVNAQPPPTPAPVSSSPSSSNDEFTTASDTSESSDERGLSAAPPPPPARRGRPLPARLGPTGRPAPPMAPATGGVVRRMRWTQSINENVMRAYYGATEGGTNLSAYRDRMLPLFQVLEPAIDVTAQRLSDQVRAIQRLKRLDDSVLDRLRLESLPVRAVPISTMSLPATSPPQVSPPSPAPRVPRTDATVGVEDCTNVSSVSTETNEYVRRTLEETIARYRFAPNSRPRLPRLPTNRRNLALMGAINVLLDSYIRASDNLVDTHSIMYCGAITACRVARVKFSDADRAPRVAGGAPAWQKRIERRINTFRTLIAKLICFKEGNNRPRVMRFVDQAFAGTGISSRDYMACATERIDFLKQKVCAWANRIRRYRERVDRFRLNRLFQSDQRKVYRKWEGTNQSGSDGSLPDASASNNFWRSIWSVPVEHSEGDWMNVVKRECEIIEPMAAVSICPEDVSCAIDTAQNWKCPGPDGLHNFWIKWFRCSHERLATQFQEALEHGSLPTLFTTGITFLLYKSGSTTEAKNYRPITCLPTLYKLLTSILRKKINNHIIENNILAMSQNGCRVGSRGTKELLLIDMTICQKVRRSRGFLSAAWIDYKKAYDSVPHSWLRRVLELYKINATLRSFLDACMRQWITVLSQPVGGIDHSPPQDFIRIERGIFQGDSLSPLWFCLALNPLSTLLKHSELGCRLRREGEVISHLLYMDDLKLFAPKRPDLMELLKITEIFSNAIRMEFGADKCAVMHVQRGKVANTTNLQLSETMSFRSLSEAETYKYLGMSQSLGIVDEGVKQAVKERFFCRLTKVLNSLLSGGNKVRSFNAWVMPLLTYSFGILRWTQTELDALDRRVRLLLTTHRMLHPRSSVMRLYIPRKCGGRGFLSAKTLHNREVCSLRDYFLNNECGMHRAVVAVDRGLTPLSLANENWRKPKVLSTIDRKDVWKSKELHGRFYRALTGPDVDLLASVNWLRFGDLFGETEGFVCAIADEVIMTNNYRRYILKDGTVDICRACRCPGESLRHITSGCGRLANGEYLHRHNLVARFIHQQLALQYGLVESEVPYYKYVPAPVLENGLATLYWDRSVITDRTIVANRPDIVLTDRSKRRAVLVDVTIPHDGNLVKAEKDKQCKYLDLAHEVTAMWDVDSTIIVPIVVSVNGLIAKSLDQHLKSLSLDGWVKGQIQKAVLLETARIVRRFLSLQP

SEQ ID NO: 5680 - protein, 1204 aa, Blastobasis lacticolella
MITRSKRKNQTVNAQPPPTPAPVSSSPSSSNDEFTTASDTSESSDERGLSAAPPPPSARRGRPLPARLGPTGRPAPPMAPATGSVVRRMRWTQSINENVMRAYYGATEGGTNLSAYRDRMLPLFQVLEPAIDVTAQRLSDQVRAIQRLKRLDDSVLDRLRLESLPVRAVPISTMSLPATSPPQVPPAPRVPRTDATVGVEDCTNVSSVSTETNEYVRRTLEETIARYRFAPNSRPRLPRLPTNRRNLALMGAINVLLDSYIRASDNLVDTHSIMYCGAITACRVARVKFSDADRAPRVAGGAPAWQKRIERRVNTFRTLIAKLICFKEGNNRPRVMRFVDQAFAGTGISSRDYMACATERIDFLKQKVCAWANRILRYRERVDRFRLNRLFQSDQRKVYRKWEGTNQSGSDGSLPDASASNNFWRSIWSVPVEHSEGDWMNVVKRECEIIEPMAAVSICPEDVSCAIDTAQNWKCPGPDGLHNFWIKWFRCSHERLATQFQEALEHGSLPTLFTTGITFLLYKSGSTTEAKNYRPITCLPTLYKLLTSILRKKINNHIIENNILAMSQNGCRVGSRGTKELLLIDMTICQQVRRSRGSLSAAWIDYKKAYELVPHSWLRRVLELYKINATLRSFLYACMRQWITVLSQPVGGIDHSPPQDFIRIERGIFQGDSLSPLWFCLALNPLSTLLKHSELGCRLRREGEVISHLLYMDDLKLFAPKRQDLMELLKITEIFSNAIRMEFGADKCAVMHVQRGKVANTTNLQLSETMSFRSLSEAETYKYLGMSQSLGIVDEGVKQAVKERFFCRLTKVLNSLLSGGNKVRSFNAWVMPLLTYSFGILRWTQTELDALDRRVRLLLTTHRMLHPRSSVMRLYTPRKCGGRGFLSAKTLHNREVCSLRDYFLNNECGMHRAVVAVDRGLTPLSLANENWRKPKVLSTIDRKDVWKSKELHGRFYRALTGPDVDLLASVNWLRFGDLFGETEGFVCAIADEVIMTNNYRRYILKDGTVDICRACRCPGESLRHITSGCGRLANGEYLHRHNLVARIIHQQLALQYGLVESEVPYYKYVPAPVLENGLATLYWDRSVITDRTIVANRPDIVLTDRSKRRAVLVDVTIPHDGNLVKAEKDKQCKYLDLAHEVTAMWDVDSTIIVPIVVSVNGLIAKSLDQHLKSLSLDGWVKGQIQKAVLLETARIVRRFLSLQP

SEQ ID NO: 5681 - protein, 1207 aa, Apotomis turbidana
MITRSRQKKAEQTNARPPPPPASSSSSPSSSGDEFATAADTSESSDERGPPPPPPQPPARRGRPQLPARLGPTGQPAPTTAPATGGVVRRMRWTRVMNENCMRAYYGATEGGINLSAYRDRMLPLFQVFDPTIAVSAQRLSDQVRFIQRRKLLDDATLDRLRLEVLAARAASVPARDPPATSPVSAPAPNLVPGVPLTDPEADVEDYASSVSTQANEQLRRALEEAIGRYRSAPEPRPRLPRLPIHKRNLALMGALDALLDPYLRASEDLADTHSIMYCGAIAACRVARVRFPDTDRAPRTARGVPAWQVRIERRISSFRTLIAKLICFRGGNNRPRVMRYVTQAFAGTGTRPCDYMACVTERIDYLKQKVYAWASRIRRYRERVDRFQQNRLFQSDQRKVYRKWEGADQCVSDGQLPDPTAMINFWRSIWSVPVEHTEGEWMNVVRRECEPIEAMGAVTISPDDVRCAARTIQNWKSPGPDGLHNFWIKWFRSSHERLATQFQDALELGSLPSFMTTGVTFLLHKSGSTTEAKNYRPITCLPTLYKLLTSILRTKINTHIVANNVLAFSQNGCRVGSRGTKELLLIDTTICQQVRRNRGSLSAAWIDYKKAYDSVPHSWLERILELYKIDTTLRSLLGACMRQWTTVLRQPGGGDGPPGPQDLIRIERGIFQGDSLSPLWFCLALNPLSSLLKDSGLGCRLRRGGEVISHLLYMDDLKLYAPKRQDLVELLEVTEAFSSAIKMEFGVDKCAVMHVQRGKVVNSANLQLSETMSLRSISEVETYKYLGMSQSLGIADGDIRQALKERFFCRLTKVLNSLLSGGNKARAFNAWVMPLLTYSFGILRWTQTELDALDTRVRQLLTTHRMRHPRSSVMRMYIPRKCGGRGFLNAKDLHNREVCSLREYFLNNECGIHRDVVAVDKGLTPLSLANENWRRPKVLSTDDRRAVWKSKELHGRFYKALTGPDVDLLASVNWLRFGDLFGETEGFVCAIADEVMMTNNYRRYILKDGTVDICRACRRPGESLRHIISGCSHLANGEYLHRHNQVARIIHQQLALRYGLVGSEVPYYKYAPMPVLENGRATLYWDRSIITDRTIVANKPDIVLVDRSKRQAVLVDITIPHDENLVKAEKDKLSKYLDLAHEVTAMWDVDSTSIVPIVVSANGLIAKSLDKHLKRLSLDGWIKGQIQKAVLLDTARIVRRFLSLQP

SEQ ID NO: 5682 - protein, 1114 aa, Apotomis turbidana
MIIIINNYNCAYYGATEGGTNLSAYRDRMLPLFQAFGPTIAVSAQRLSDQVRFIQRRKLLNDATLDRLRLEVLAARAASVPARDPPAMSPVPAPAPNLVPGVPLTDPEADVEDYASSVSTQANEQLRRALEEAIRRYRSAPDSRPRLPRLPMHKRNLALMGALDALLEPYLRASKDLADTHSIMYCGAIAACRVARVRFPDTDRAPRTAGGVPAWQVRIERRISSFRTLIAKLICFRGGNNRPRVMRYVTQAFAGTGTRPCDYMACVTERIDYLKQKVYAWASRIRRYRERVDRFQQNRLFQSDQRKVYRKWEGADQCVSDGQLPDPTAMINFWRIIWSVPVEHTEGEWMNVVRRECEPIEAMGAVIISPDDVSCATRTTQNWKSPGPDGLHNFWIKWFRSSHERLATQFQDALELGSLPSFMTTGVTFLLHKSGSTTEAKNYRPITCLPTLYKLLTSILRTKINTHIVANNVLAFSQNGCRVGSRGTKELLLIDTTICQQVRRNRGSLSTAWIDYKKAYDSVPHSWLERILELYKIDTALRSLLGACMRQWTTFLHQPGGGDGPPGPQDLIRIERGIFQGDSLSPLWFCLALNPLSTLLKDSGLGCRLRRGGEVISHLLYMDDLKLYAPKRQDLVELLEVTEAFSSAIKMEFGVDKCAVMHVQRGKVVNSANLQLSETMSLRSISEVETYKYLGMSQSLGIADGDIRQALKERFFCRLTKVLNSILSGGNKARAFNAWVMPLLTYSFGILKWTQTELDALDTRVRQLLTTHRMRHPRSSVMRLYIPRKCGGRGYLNAKDLHNREVCSLREYFLNNECGIHRDVVAVDKGLTSLSLANENWRRPKVLSTDDRRAVWKSKELHGRFCKALTGPDVDLLASVNWLRFGDLFGETEGFVCAIADEVMMTNNYRRYILKDGTVDICRACRRPGESLRHIISGCSHLANGEYLHRHNQVARIIHQQLALRYGLVGSEVPYYKYAPMPVLENGRATLYWDRSIITDRTIVANKPDIVLVDRSKRQAVLVDITIPHDENLVKAEKDKLSKYLDLAHEVTAMWDVDSTIIVPIVVSANGLIAKSLDKHLKRLSLDGWIKGQIQKAVLLDTARIVRRFLSLQP

SEQ ID NO: 5683 - protein, 1208 aa, Apotomis turbidana
MITRARRQRAEADNARPPPPPAPSSSSSSSSGDDFATAPDTSGSSEDERGPPPPPTRPPARRGRPPLPARLGPTGQPAPSTAPATGGIVRRMRWSQGINENVMRAYYGATEGGISLSAYRDRMLPLFLTLEPAITVTAQRLSDQVRFIQRRKLLDDATLDRLRLEVLAARAASTPARDPSATSPVSAPAPNLVPGVPRTDRDADEEDCASSVSTQANEQLRGALEEAIRRYRSAPDSRPRLPRLPMHKRNLALMGALDALLDPYLRASEDLADTHSIMYCGAIAACRVARVRFPDTERAPRTAEGVPAWQIRIERRINSFRTLIAKLICFRGGNNRPRVMRYVTQAFAGTGTRPCDYMACVTERIDFLKQKVYAWASRIRRYRERVDRFQQNRLFQSDQRKVYRKWEGTDQCVADGQLPDPTAMINFWRSIWSVPVEHTEGEWMNVVRRECEPIEVMGAVTISPDDVSCAARKAQNWKSPGPDGLHNFWIKWFRSSHECLATQLQDALELGSLPSFMTTGVTFLLHKSGSTTEAKNYRPITCLPTLYKLLTSILRTKINTHIVANNILAFSQNGCRVGSRGTKELLLIDTTICQQVRRNRGSLSAAWVDYKKAYDSVPHSWLERILELYKIDTALRSLLSACMGQWTTVLRQPGGGDGPPGPQDLIRIERGIFQGDSLSPLWFCLALNPLSTLLKDSGLGCRLRRRGEVISHLLYMDDLKLYAPKRQDLVELLEVTETFSSAIKMEFGVDKCAVMHVQRGKVINSANLQLSETMSLRSISEAETYKYLGMSQSLGIADGDIRQALKERFFCRLTKVLNSLLSGGNKARAFNAWVMPLLTYSFGILRWTQTELDALDTRVRQLLTTHRMRHPRSSVMRMYIPRKCGGRGFLNAKDLHNREVCSLREYFLNNECGIHRDVVAVDKGLTSLSLANENWRRPKVLSTDDRKAVWKSKELHGRFYKALTGPDVDLLASVNWLRFGDLFGETEGFICAIADEVMMTNNYRRYILKDGTVDICRACRRPGESLRHIISGCSHLANGEYLHRHNQVARIIHQQLALRYGLVGSEVPYYKYAPMPVLENGRATLYWDRSIITDRTIVANKPDIVLVDRSKRQAVLVDITIPHDENLVKAEKDKLSKYLDLAHEVTAMWDVDSTIIVPIVVSANGLIAKSLDKHLKRLSLDGWIKGQIQKAVLLDTARIVRRFLSLQP

SEQ ID NO: 5684 - protein, 1208 aa, Apotomis turbidana
MITRSQRKKAETSHARPPPSPAPSSSTPSSSGDEFATAPDTSESSDDERGPPPPPPRPPARRGRPPLPARLGPTGQSAPSTAPATGGVVRRMRWSQAMNENVMRAYYGATEGGTNLSAYRDRMLPLFLSFDPTIIVSAQRLSDQVRFIQRRKLLDDATLDRLRLEVLAARTSSTPARNPPATSPVSAPAPYLVPEVPRTDRDADGEDCASSVSTQANEQLRRALEEAIRCYRSAPDSRPRLPRLPMHKRNLALMGALDALLDPYLRASEDLADTHSIMYCGAIAACRVARVRFPDTDRAPRTAGGVPAWQVRIERRISSFRTLIAKLICFRGGNNRPRVMRYVTQAFAGTGIRPCDYMACVTERIDYLKQKVYAWANRIRRYRERVDRFQQNRLFQSDQRKVYRKWEGTDQCVTDGQLPDPTAMINFWRSIWSVPVEHTEGEWMNVVRRECEPIENMGAVTISPDDVSCAVRTTQNWKSPGPDGLHNFWIKWFRSSHERLATQFQDALELGSLPSFMTTGATFLLYKSGSTTEAKNYRPITCLPTLYKLLTSILRTKINTHIVANNVLAFSQNGCRVGSRGTKELLLIDTTICQQVRRNRGSLSATWIDYKKAYDSVPHSWLERILELYKIDTALRSLLSSCMRQWTTVLRQPGVGDGPPGPQDLIRIERGIFQGDSLSPLWFCLALNPLSTLLKDSGLGCRLRRGGEVISHLLYMDDLKLYAPKRQDLVELLEVTETFSSAIKMEFGVDKCAVMHVQRGKVVNSANLQLSETMSLRSISEVKTYKYLGMSQSLGIADGDIRQALKERFFCRLTKVLNSLLSGDNKARAFNAWVMPLLTYSFGILRWTQTELDALDTRVRQLLTTHRMRHPRSSVMRMYIPRKCGGRGFLNAKDLHNREVCSLREYFLNNECGIHRDVVAVDKGLTSLSLANENWRRPKVLSTDDRKAVWKSKELHGRFYKALTGPDVDLLASVNWLRFGDLFGETEGFVCAIADEVMMTNNYRRYILKDGTVDICRACRRPGESLRHIISGCSHLANGEYLHRHNQVARIIHQQLALRYGLVGSEVPYYKYAPMPVLENGRATLYWDRSIITDRTIVANKPDIVLVDRSKRQAVLVDITIPHDENLVKAEKDKLSKYLDLAHEVTAIWDVDSTIIVPIVVSANGLIAKSLDKHLKRLSLDGWIKGQIQKAVLLDTARIVRRFLSLQP

SEQ ID NO: 5685 - protein, 1206 aa, Notocelia uddmanniana
MNTRLRSRAEQRARLPSPPAPSSSSPSSSDDEFATAPDSSESSSDERGPSPPPPQTSARRGRRPLPARLGPTGHSAPPTAPAAGGVVRRMRWTQEMNENCMRAYFGATEGETNLSAYRVRMLPLFQALEPTITVSAQRLSDQVRVIQRNKRLDDLTLDRLRLEALSARAALTSARDLPATSPAPVPAPNTAPRAPRVDPSADGDCADQSLSTQAHEQLRRALDEAITRYRSTPNSRPRLPRLPVNRRNLALMGALNDLLDPYLRASNDLIDTHSIMYCGAIAACRVARVKFPDADRATRTAGGVPAWQVRIERRINTFRTLIAKLICFRGGNNRPRVMRFVNQAFAGTGVRPRDYMACVTERIDFLKQKVYAWASRIRRYRERVDRYQQNRLFQSDQRKVYRKWEGTDHRVCDGQRPDATAMVNFWRSIWSVPVEHTEGAWIGVVERDCESIEPMGSVTISPEDVSCAIRTAPNWKSPGPDGLHNFWLKWFRCSHERLATQFQQALELGSLPPPLTTGVTSLLYKSGSTTEAKNYRPITCLPTLYKLLTSILRAKMNTHIVTNNILAPAQNGCRVGSRGTKELLLIDMTICQRVRRNRGALSASWIDYKKAYDSVPHSWLRRILELYKVDAALRSFLSACMGQWTTVLRQPGGGDGPSGPQDSIRIERGIFQGVSLSPLWFCLALNPLSTLLQDSGLGCQLRRGGEVISHLLYMDDLKLFAPNRQDLLELLKTTEVFSSAIKMEFGVDKCAVMHVQRGKVVNSTNLQLSETMSLRSLSEAETYKYLGMSQALGIEGEGIKQAVKERFFCRLTKVLNSFLSGGNKARAFNAWVMPLLTYSFGILRWTQTELDALDRRVRVLLTAHRMLHPRSSVMRLYIPRKCGGRGFLNAKDLHNREVCSLRDYFLNSECGMHRDVVAVDASFTPLSMANENWRRFKVLSTEDRRAEWMSKELHGRFYRALTGPDVDLLASVNWLRFGDLFGETGGFVCAIADEVIMTNNYRKYILKDGTVDICRACRRPGESLRHIISGCSHLANGEYLHRHNLVARIIHQQLALSYGLVDFEVPYYKYLPAPVLENGRATLYWDRSIITDRTIVANKPDIVLIDRSKRQAVLVDITIPHDENLVKAEKDKVSKYLDLAHEVTAMWDVDSTIIVPIVVSANGLIAKSLDQHLKRLSLDGWVKGQIQKAVLLDTARIVRRFLSLSP

SEQ ID NO: 5686 - protein, 1206 aa, Notocelia uddmanniana
MITRTRSRAAQRARPPSPPAPSSSSPSSSGDEFATAPDTSESSCDERGPPSPPPRPPARRGRPPLPARLGPVGHSALPTAPAAGGVVRRMRWTQEMNENCMRAYFGATEGETNLSAYRVRMLPLFQALEPTITVTAQRLSDQVRVIQRLKRLDDATLDRLRLEALSARTASALARDPPATSPAPVPTPDMAPGVPRVDPSVDKDCANQTVSTQTNEQLRRALEEAITRYRSTPNSRPRLPRLPVNRRNLALMGALNDLLDPYLRASEDLIDTHSILYCGAIAACRVARVKFPDADRAPRTAGGVPAWQVRIERRINTFRTVIAKLICFRGGNDRPRVMRFVNQAFAGTGVRPRDYVTCVTERIDFLKQKVYAWASRIRRYRERVDRYQQNRLFQSDQRKVYRKWEGTDHRVCDGQRPDATAMGNFWRSIWSVPVEHTEGAWIGVVERECESIEPMGSVTISPEDISCAIRTAPNWKNPGPDGLHNFWLKWFRCSHERLATQFQQALELGSLPHLLTTGVTSLLYKSGSTTEAKNYRPITCLPTLYKLLTSILRAKINTHIVANKILAPAQNGCRVGSRGTKELLLIDMTICQRVRRSRGALSAAWIDYKKAYDSVPHSWLRRILELYKVDAALRSFLSACMGQWTTVLRQPGGGDGSSGPQDSIRIERGIFQGDSLSPLWFCLALNPLSTLLKDSGLGCQLRRGGEVISHLLYMDDLKLFAPNRQDLLELLKTTEVFSSAIKMEFGVDKCAVMHVQRGKVVNSTNLQLSETMSLRSLSEAETYKYLGMSQSLGIEGEGIKQAVKERFFCRLTKVLNSFLSGGNRVRAFNAWVMPLLTYSFGILRWTQTELDAMDRRVRVLLTAHRMLHPRSSVMRLYIPRKCGGRGFLNAKDLHNREVCSLRDYFLNSECGMHRDVVAVDASFTPLSMANENWRRFKVLSTEDRKEEWKSRELHGRFYKALTGPDVDLLASVNWLRFGDLFGETEGFVCAIADEVIMTNNYRKYILKDGTVDICRACRRPGESLRHIISGCGHLANGEYLHRHNLVARIIHQQLALSYGLVNFEVPYYKYLPAPVLENGRATLYWDRSIITDRTIVANKPDIVLIDRSKRQAVLVDITIPHDENLVKAEKDKVSKYLDLAHEVTAMWDVDSTIIVPIVVSANGLIAKSLDQHLKRLSLDGWVKGQIQKAVLLDTARIVRRFLSLSP

SEQ ID NO: 5687 - protein, 869 aa, Notocelia uddmanniana
MRFVNQAFAGTGVRPRDYMACVTERIDFLKQKVYAWASRIRRYRERVDRYQQNRLFQSDQRKVYRKWEGTDHRVCDGQRPDATAMVNFWRSIWSVPVEHTEGAWIGVVERDCESIEPMGSVTISPEDVSCAIRTAPNWKSPGPDGLHNFWLKWFRCSHERLATQFQQALELGSLPPPLTTGVTSLLYKSGSTTEAKNYRPITCLPTLYKLLTSILRAKINTHIVTNNILAPAQNGCRVGSRGTKELLLIDMTICQRVRRNRGTLSASWIDYKKAYDSVPHSWLRRILELYKVDAALRSFLSACMGQWTTVIRQPGGGDGPSGPQDSIRIERGIFQGDSLSPLWFCLALNPLSTLLQDSGLGCQLRRGGEVISHLLYMDDLKLFAPNRQDLLELLKTTEVFSSAIKMEFGVDKCAVMHVQRGKVVNSTNLQLSETMSLRSLSEAETYKYLGMSQALGTEGEGIKQAVKERFFCRLTKVLNSFLSGGNKARAFNAWVMPLLTYSFGILRWTQTELDALDRRVRVLLTAHRMLHPRSSVMRLYIPRKCGGRGFLNAKDLHNREVCSLSDYFLNSECGMHRDVVAVDASFTPLSMANENWRRFKVLSTEDRRAEWKSKELHGRFYRALTGPDVDLLASVNWLRFGDLFGETEGFVCAIADEVIMTNNYRKYILKDGTVDICRACRRPGESLRHIISGCGHLANGEYLHRHNLVARIIHQQLALSYGLVDFEVPYYKYLPAPVLENGRATLYWDRSIITDRTIVANKPDIVLIDRSKRQAVLVDITIPHDENLVKAEKDKVSKYLDLAHEVTAMWDVDSTIIVPIVVSANGLIAKSLDQHLKRLSLDGWVKGQIQKAVFLDTARIVRRFLSLSP

SEQ ID NO: 5688 - protein, 1206 aa, Notocelia uddmanniana
MNTRLRSRAEQRARLPSPPAPSSSSPSSSDDEFATAPDSSESSSDERGPSPPPPQTSARRGRRPLPARLGPTGHSAPPTAPAAGGVVRRMRWTQEMNENCMRAYFGATEGETNLSAYRVRMLPLFQALEPTITVSAQRLSDQVRVIQRNKRLDDLTLDRLRLEALSARAAPTSARDLPATSPAPVPAPNTAPRAPRVDPSADGDCADQSVSTQAHEQLRRALDEAITRYRSTPNSRPRLPRLPVNRRNLALMGALNDLLDPYLRASDDLIDTHSIMYCGAIAACRVARVKFPDADRATRTAGGVPAWQVRIERRINTFRTLIAKLICFRGGNNRPRVMRFVNQAFAGTGVRPRDYMACVTERIDFLKQKVYAWASRIRRYRERVDRYQQNRLFQSDQRKVYRKWEGTDHRVCDGQRPDATAMVNFWRSIWSVPVEHTEGAWIGVVERDCESIEPMGSVTISPEDVSCAIRTAPNWKSPGLDGLHNFWLKWFRCSHERLATQFQQALELGSLPPPLTTGVTSLLYKSGSTTEAKNYRPITCLPTLYKLLTSILRAKINTHIVTNNILAPAQNGCRVGSRGTKELLLIDMTICQRVRRNRGTLSASWIDYKKAYDSVPHSWLRRILELYKVDSALRSFLSACMGQWTTVLRQPGGGDGPSGPQDSIRIERGIFQGDSLSPLWFCLALNPLSTLLQDSGLGCQLRRGGEVISHLLYMDDLKLFAPNRQDLLELLKTTEVFSSAIKMEFGVDKCAVMHVQRGKVVNSTNLQLSETMSLRSLSESETYKYLGMSQALGIEGEGIKRAVKERFFCRLTKVLNSFLSGGNKARAFNAWVMPLLTYSFGILRWTQTELDALDRRVRVLLTAHRMLHPRSSVMRLYIPRKCGGRGFLNAKGLHNREVCSLRDYFLNSECGMHRDVVAVDASFTPLSMANENWRRFKVLSAEDRKAEWKSKELHGRFYRALTGPDVDLLASVNWLRFGDLFGETEGFVCAIADEVIMTNNYRKYILKDGTVDICRACRRPGESLRHIISGCSHLANGEYLHRHNLVARIIHQQLALSYGLVDFEVPYYKYLPAPVLENGRATLYWDRSIITDRTIVANKPDIVLIDRSKRQAVLVDITIPHDENLVKAEKDKVSKYLDLAHEVTAMWVVDSTIIVPIVVSANGLIAKSLDQHLKRLSLDGWVKGQIQKAVLLDTARIVRRFLSLSP

SEQ ID NO: 5689 - protein, 869 aa, Notocelia uddmanniana
MRFVNQAFAGTGVRPRDYMTCVTERIDFLKQKVYAWASRIRRYRERVDRYQLNRLFQSDQRKVYRKWEGTDHRVSDGRRPDATAMVNFWRSIWSVPVEHTEGAWMDVVKRECESIEPMGSVTVSPEDVSCAIRTAPNWKSPGPDGLHNFWLKWFRCSHARLAAQFQQALELGSLPPPLTTGVTSLLYKSGSTTEAKNYRPITCLPTLYKLLTSILIAKINTHIVANNILAPAQNGCRVGSRGTKELLLIDMTICQRVRRNRGTLLAAWIDYKKAYDSVPHSWLRRILELYKVDAVLRSFLVACMGQWTTVLRQPGGGEGPSGPQDSIRIERGIFQGDSLSPLWFCLALNPLSTLLKDSGLGCQLRREGEVISHLLYMDDLKLFAPNKHDLLELLKTTEVFSSAIKMEYGVDKCAVMHVQRGKVVNSTNLHISETIALRSLSEAETYKYLGMSQSLGIEGGDIKRAVRERFFCRLTKVLNSFLSGGNKVRAFNAWVMPLLTYSFGILRWTQTELDFLDRRVRVLLTAHRMLHPRSSVMRLYIPRKLGGRGFLNAKDLHNREVCSLRDYFLNSEYGMHRDVVAADASFTPLSMANENWRRFKVLSTEDRRAVWKSKELHGRFYKALTGPDVDLLASVNWLRFGDLFGETEGFVCAIADEVIMTNNYRKYILKDGTVDICRACRRPGESLRHIISGCSHLANGEYLHRHNLVARIIHQQLALLYGLVDFEVPYYKYTPAPVLENGRATLYWDRSVITDRTIVANKPDIVLTDRLKRQAVLVDITIPHDENLVKAEKDKVSKYLDLAHEVTAMWDVDSTIIVPIVVSVNGLIAKSLDQHLKRLSLDGWVKGQIQKAVLLDTARIVRRFLSLSP

SEQ ID NO: 5690 - protein, 1208 aa, Crocallis elinguaria
MITRSRTKKAGTASARKTPPPASSSPSSSSGVEYGTPLDTSASSDEDGPPSPPPPPPPARRGRPPLPARLGPAGHSVPRTAPATGGIVRRMRWTSDMNENCMRAYYGATEGGTNMSAYRDRMLPLFQTLEPSVAVSTQRLSDQVRAIQRLKLLDESALDRLRLEALPIRATSASARDLSVAPPVPAPLPAPSSVATRIDPVVDEYDCANISVSTQVNEQLRRALEDAILAYQYTPDSRPRLPRLPTNRRNLALMGALNVLLAPYLRASENLFDTHSIMYCGAIAVCRVARVKFPDADRAPRPAGSAPAWQVRIERRINTFRTLIAKLICFSRGNNRPRVMRFVNQAFAGTGIRPQNYMAGVTERIDFLKQKIYAWVNRIRRYRERVDRYHQNRLFESDQRKVYRNWEGTDQRVSDGQLPDTNAMINFWRGIWSVPVEHTEGDWMRTVEQSCESIETMGSVTIDPIDVSCAIRTAQNWKSPGPDGLHNFWIKWIRCSHECLAVQFQEALELGSLPRFLTTGVTSLLHKSGSTTEAKNYRPITCLPTLYKLLTSILRAKINSHVVANNILAPAQNGCRVGSRGTKELLLIDTAICQQVRRNKGALSTAWIDYKKAYDSVPHSWLERILELYKIDTTLRTFLSTCMRQWTTVLRQPGSGNSPSGPENFIKIERGIFQGDSLSPLWFCLALNPLSTFLRDSRLGCKLRREGEIISHLLYMDDLKLLAPKSPDLMKLLKITEIFSSAIKMEFGVDKCAVMHVQRGKVVNSDNLQLSETMTLRSLSEAETYRYLGMSQSLGITVGDIKQSVKERFFCRLTKVLNSLLSGGNKARAFNGWVMPLLIYSFGILKWTQTELDSLDRRVRQLLTYHRMLHPRSSVMRLYIPRKWGGRGFLNAKTLHNREVCSLREYFLNNECGMHRDVVAVDRNLTPLSLANENWHKPVVMTTEDRKEVWKGKELHGRFYRALTGSDVDLLASVNWLRFGDLFGETEGFVCAIMDEVIKTNNYRKYIMKDGTVDICRACRRPGESLRHIISGCSHLANGEYLHRHNLVARIIHQQIALQYGLVESEVPYYKYAPVPVLENGCALLYWDRSIITDRTIVANKPDIVLVDRSQRRAVLVDITVPHDENLVKAEKDKLSKYLDLAHEVTAMWNVDSTIIVPIVVSANGLVAKSLDQHLKRLSLDGWIKGRMQKAVLLDTARIVRRFLTLQP

SEQ ID NO: 5691 - protein, 869 aa, Crocallis elinguaria
MRFVNQAFAGTGIRPQNYMAGVTERIDFLKQKIYAWVNRIRRYRERVDRYHQNRLFESDQRKVYRNWEGTDQRVSDGQLPDTNAMINFWRGIWSVPVEHTEGDWMRTVEQSCESIETMGSVTIDPIDVSCAIRTAQNWKSPGPDGLHNFWIKWIRCSHECLAVQFQEALELGSLPCFLTTGVTSLLHKSGSTTEAKNYRPITCLPTLYKLLTSILRAKINSHVVANNILAPAQNGCRVGSRGTKELLLIDTAICQQVRRNKGALSTAWIDYKKAYDSVPHSWLERILELYKIDTTLRTFLSTCMRQWTTVLRQPGSGNSPSGPENFIKIERGIFQGDSLSPLWFCLALNPLSTLLRDSRLGCKLRREGEIISHLLYMDDLKLLAPKSPDLMKLLKITEIFSSAIKMEFGVDKCAVMHVQRGKVVNSDNLQLSETMTLRSLSEAETYRYLGMSQSLGITVGDIKQSVKERFFCRLTKVLNSLLSGGNKARAFNGWVMPLLIYSFGILKWTQTELDSLDRRVRQLLTYHRMLHPRSSVMRLYIPRKWGGRGFLNAKTLHNREVCSLREYFLNNECGMHRDVVAVDRNLTPLSLANENWHKPVVMTTEDRKEVWKGKELHGRFYRALTGSDVDLLASVNWLRFGDLFGETEGFVCAIMDEVIKTNNYRKYIMKDGTVDICRACRRPGESLRHIISGCSHLANGEYLHRHNLVARIIHQQIALQYGLVESEVPYYKYAPAPVLENGRALLYWDRSIITDRTIVANKPDIVLVDRSQRRAVLVDITVPHDENLVKAEKDKLSKYLDLAHEVTAMWNVDSTIIVPIVVSANGLVAKSLDQHLKRLSLDGWIKGRMQKAVLLDTARIVRRFLTLQP

SEQ ID NO: 5692 - protein, 1207 aa, Crocallis elinguaria
MITRSRNKAGTASARQPPPPASSSPSSSSGDEYGTPLDTSASSDEDGPPSPPPPPPPARRGRPPLPARLGPAGHSVPRAAPATGGIVRRMRWTSVMNENCMRAYYGATEGGINMSAYRDRMLPLFQTLEPSVAVSTQRLSDQVRAIQRLKLLDESVLDRLRLEALPIRATSASTRDLSVAPPVPAPLPAPSSVATRIDPVVDEDDCANISVSTQVNEQLRRALEDAILEYQYTPDSRPRLPRLPTNRRNLALMGALNVLLAPYLRGSENLFDTHSIMYCGAIAVCRVARVKFPDADRAPRTAGNAPAWQVRIERRINTFRTLIAKLICFSRGNNRPRVMRFVNQAFAGTGIRPQNYMAGVTERIDFLKQKIYAWVNRIRRYRERVDRYHQNRLFESDQRKVYRNWEGTDQRVSDGQMPDTNAMINFWRGIWSVPVEHTEGDWMRTVEQSCESIETMGSVTIDPIDVSCAIRTAQNWKSPGPDGLHNFWIKWIRCSHECLAVQFQEALELGSLPCFLTTGVTSLLHKSGSTTEAKNYRPITCLPTLYKLLTSILRAKINSHVVANNILAPAQNGCRVGSRGTKELLLIDTAICQQVRRNRGALSAAWIDYKKAYDSVPHSWLERILELYKIDTTLRSFLSTCMRQWTTVLRQPGSGNSPSGPENFIKIERGIFQGDSLSPLWFCLALNPLSTLLRDSRLGCKLRREGEIISHLLYMDDLKLLAPKSPDLMKLLKITEIFSSAIKMEFGVDKCAVMHVQRGKVVNSDNLQLSETMTLRSLSEAETYRYLGMSQSLGIAVGDIKQSVKERFFCRLTKVLNSLLSGGNKARAFNGWVMPLLIYSFGILKWTQTELDSLDRRVRQLLTYHRMLHPRSSVMRLYIPRKWGGRGFLNAKTLHNREVCSLREYFLNNECGMHRDVVAVDRNLTPLSLANENWRKPVVMTTEDRKDVWKGKELHGRFYRALTGSDVDLLASVNWLRFGDLFGETEGFVCAIMDEVIKTNNYRKYIMKDGTVDICRACRRPGESLRHIISGCSHLANGEYLHRHNLVARIIHQQIALQYGLVESEVPYYKYAPAPVLENGRALLYWDRSIITDRTIVANKPDIVLVDRSQRRAVLVDITVPHDENLVKAEKDKLSKYLDLAHEVTAMWNVDSTIIVPIVVSANGLVAKSLDQHLKRLSLDGWIKGRMQKAVLLDTARIVRRFLTLQP

SEQ ID NO: 5693 - protein, 1209 aa, Peribatodes rhomboidaria
MLTRLKKKQLAAEASTRPPPPPASSSGSPSSEEDEYATPLDTTDEEAAPTPAPPPPPARRGRPPLPARLGPAGRSAPPTAPASGGVVCRMRWTQVMNENCMRAYYGATEGGTNLTAYRVRMLSLFQVLEPTVTVSTQRLSDQVRAIHRCKLLDQSVLDRLCLEAIRARPIPASTRDRPVASSAPTLASVPASAVTLATMANTDVDGDRTSVNVSSQVSEHLRRALEDAISQYRYAPDSRPRLPRLPTHRRNMALMGALNVLLAPYLRASENLTDTHSILYCGAIAACRVARVKFPDTSRAPRPAGGVPAWQVRIERRISTFRTLIAKLLCFSRGNTRPRVMRFVTQAFAGTDIRPQYYLTNVTERIDYLKQKVYAWANRIRRYRERVDRYWQNRLFQSDQRKVYRGWEGTEQCVIDGHRPDASAMIDFWRGIWSVPVEHTEGEWMRIVERECESIESMESILIDSVDVSCAIRTAQNWKSPGPDGLHNFWIKWIRCSHDRLAIQFQEALELGSLPSFMTTGVTFLLHKSGSTTDPKNYRPITCLPTIYKLLTSILRNKINTHIVANNVLAPAQNGCRVGSRGTKELLLIDMAISQQVRRNKGALSVAWIDYKKAYDSVPHSWPERILELYKIDITLKSFLSACMRQWTTVLCQPGGGEVSADPRDLIRIERGIFQGDSLSPLWFCLALNPLSTLLKDLGLGHRLRRGGEVISHLLYMDDLKLFAPKRQDLMELLKTTEVFSSAIKMEFGVDKCAVMHVQRGKVVNSPNLQLSETMTLRSLSEVETYKYLGMSESLGISVADIKKSIKERFFCRLTKVLNSLLSGGNKVRAFNGWVMPLLIYSFGILRWTQTELDALDRRVRQLLTTHRMLHPRSSVMRLYIPRKWGGRGMLNAKNLHNREVYRLRSFFRNNDCGMHCDVVAVDKGLTPLSLANENWRQPPVLSTEDRKIVWKGKELHGRFYRALTGPDVDLLASVNWLRFGDLFGETEGFACAIADEVIKTNNYRKYILKDGTVDICRACHRPGESLRHIISGCSHLANGEYLHRHNQVARIIHQQLALQYGLVESEVPYYKYAPASVLENGRALLYWDRSIITDRTIVANKPDIVLVDRSQRRAVLVDITIPHDENLVKAEKDKLSKYLDLAHEVTAMWDVDSTIIVPIVVTVNGLIAKSLDQHLKRLSLDGWIKGQIQKAVILDTCRIVRRFLTLQP

SEQ ID NO: 5694 - protein, 1213 aa, Pammene fasciana
MITRSKARQAQADTTNARPPPSPTPSDSSPSSSSDEAFATAADTSESSDECGLPSPPPRPPARRGRPPLPARLGLAGHPVPPKAPAAGGIVRRMRWTQKMNENCMRAYYGATEGGTNLCAYRVRLLPLFRALEPTINVTAQRLSDQVRVIQRDKRLDDSTLDRLRLEALSARAASTSARDPPATLPDPIPAPDLASGAPRVDPSADEEEIATQTVSSTANEQLRRTLEEAITQYRSTNIPRPRLPRLPMNRRNLALMGALNDLLDPILRTSKDLDDTHSIMYCGAIAACRVARVKFPDAERAPRTAGGVPAWQVRIERRINSFRTLIAKLICFRGGNNRPRVMRFVHQAFAGTGIEPRDYMANVTERIDFLKQKVYAWASRIRRYRERVDRFRQNRLFQSDQRKVYRRWEEADPRVSDARLPDATAMTDFWRSIWSAPVEHTEGEWMSVVERECESIEPMGAITISPDDVSCAIRTAQNWKSPGPDGLHNFWLKWFRCSHSRLATQFQQALELGSLPPSLTTGVTFLLYKSGSTTEAKNYRPITCLPTLYKLLTSILRAKINAHIVANNILASSQNGCRVGSRGTKELLLIDMTICQRARRNRGALSAAWIDYKKAYDSVPHSWLERILELYKVDAALRSFLGACMRQWTTVLRQPGGGDDPPDPHDFIRIERGIFQGDSLSPLWFCLALNPLSTLLKDSGLGCRLRREGEVISHLLYMDDLKLFAPNNRDLMELLKTTEVFSSSIKMEFGVDKCAVMHVQRGKVVNSTNLQLSETMTFRSISESETYKYLGMSQSLGIEDAGIKQALKERFFGRLTKVLNSLLSGGNKVRAFNAWVMPLLTYSFGILRWTQTELDALDRRVRLLLTTHRMLHPRSSVMRLYIPRKCGGRGFLNAKNLHNREVYNLRNYFLNNECGMHRDVVAVDKSLTPLSLANENWRKPVVLSTEDRKAVWKSKELHGRFYGALTGPDVDLLASVNWLRFGDLFGETEGFACAIADEVIMTNNYRRYILKDGTVDICRACRRPGESLRHIISGCSHLANGEYLHRHNLVARIIHQQLALLYGLVDHEVPYYKYTPAPVLENGRATLYWDRSIITDRTIVANKPDIVIIDRSQRRAMLVDITVPCDVNLVKAEKDKSSKYLDLAHEVTAMWEVDSAIIVPIVVSANGLIAKSLDQHLERLSLRGCGWIKGQIQKAVILDTARIVRRFLSLRP

SEQ ID NO: 5695 - protein, 1117 aa, Pammene fasciana
MRWTPSINENVMRAYFGATVGGTQLSAYRSKMLPLFQALEPTITVSEQRLSDQVRVIQRLKRLDDATLDRLRLEALSAHAASASTRDPPATSPDPMPAPGRASGAPRVDPSVDEEFTCQSVSTSANEQLRRALEEAITQYRSTNNSRPRLPRLPMNRRNLAIIGALNDLLDPLVRTSKDLDDTHSIMYCGAIAACRVARVKFPDAERAPRTAGGVPAWQVRIERRINSFRTLIAKLICFRGGNDRPRVMRFVNQAFAGTGIEPRDYMANITERIDFLKQKVYAWANRIRRYRKRVERFQQNRLFQSDQRKVYRRWEETDPRVSDAQLPDATAMTDFWRSIWSVPVEHTEGEWMSVVERECETIEPMGATTISPDDVSCAIRTSQNWKSPGPDGLHNFWLKWFRCSHSRLATQFQQALELGSLPPSLTTGVTFLLYKSGSTTEAKNYRPITCLPTLYKLLTSILRAKINAHIVANNILASAQNGCRVGSRGTKELLLIDMTICQRVRRNRGALSAAWIDYKKAYDSVPHSWLERILELYKVDATLRSFLGACMRQWTTVLRQPGGGDDPLGPQDSIRIKRGIFQGDSLSPLWFCLALNPLSTLLKDSELGCQLRREGEAISHLLYMDDLKLFAPNNRDLMELLKTTEVFSSSIKMEFGVDKCAVMHVQRGKVVNSTNLQLSETMTFRSISESETYKYLGMSQSLGIEDAGIKQALRERFFGRLTKVLNSLLSGGNKVRAFNAWVMPLLTYSFGILRWTQTELDALDRRVRLLLTTHRMLHPRSSVMRLYIPRKCGGRGFLNAKNLHNREVYNLRNYFLNNECGMHRDVVAVDKGYTPLSLANENWRKPVVLSTEDRKMVWKSKELHGRFYKALMGPDVDLLASVNWLRFGDLFGETEGFACAIADEVIMTNNYRRYILKDGTVDICRACRRPGESLRHIISGCSHLANGEYLHRHNLVARIIHQQLALQYGLVNREVPYYMYLPAPVLENGRVTLYWDRSIITDRTIVANRPDIVLIDRSQRRAVLVDVAIPHDENLVKAEKDKSSKYLDLAHEITAMWDVDSTIIVPVIVSANGLIAKSLDQHLERLSLGGWIKGQIQKAVVMDTARIVRRFLSLRP

SEQ ID NO: 5696 - protein, 931 aa, Pammene fasciana
MYCGAIAACRVARVKFPDAERAPRTAGGVPAWQVRIERRINSFRTLIAKLICFRGGNDRPRVMRFVNQAFAGTGIEPRDYMANITERIDFLKQKVYSWANRIRRYRKRVERFQQNRLFQSDQRKVYRRWEETDPRVSDAQLPDATAMTDFWRSIWSVPVEHTEGEWMSVVERECESIEPMGATTISPDDVSCAIRTAQNWKSPGPDGLHNFWLKWFRCSHSRLATQFQQALELGSLPPSLTTGVTFLLYKSGSTTEAKNYRPITCLPTLYKLLTSILRAKINAHIVANNILASAQNGCRVGSRGTKELLLIDMTICQRVRRNRGALSAAWIDYKKAYDSVPHSWLERILELYKVDATLRSFLGACMRQWTTVLRQPGGGDDPLGPQDSIRIKRGIFQGDSLSPLWFCLALNPLSTLLKDSGLGCQLRREGEAISHLLYMDDLKLFAPNNRDLMELLKTTEVFSSSIKMEFGVDKCAVMHVQRGKVVNSTNLQLSETMTFRSISESETYKYLGMSQSLGIEDAGIKQALRERFFGRLTKVLNSLLSGGNKVRAFNAWVMPLLTYSFGILRWTQTELDALDRRVRLLLTTHRMLHPRSSVMRLYIPRKCGGRGFLNAKNLHNREVYNLRNYFLNNECGMHRDVVAVDKGLTPLSLANENWRKPVVLSTEDRRMVWKSKELHGRFYKALTGPDVDLLASVNWLRFGDLFGETEGFACAIADEVIMTNNYRRYILKDGTADICRACRRPGESLRHIISGCSHLANGEYLHRHNLVARIIHQQLALQYGLVNREVPYYMYLPAPVLENGRATLYWDRSIITDRTIVANKPDVVLIDRSQRRAVLVDVAIPHDENLVKAEKDKSSKYLDLAHEITAMWDVDSTIIVPVIVSANGLIAKSLDQHLERLSLGGWIKGQMQKAVVMDTARIVRRFLSLRP

SEQ ID NO: 5697 - protein, 1173 aa, Astictopterus jama
MTAPDTSESSDDGRGLSAAPPPPPVRRGRPPLPARLEPVEPSAPRLAPATGGVVRRMRWTSTNNENCMRAYYGATEGETNMTAYRARMLTLFQALEPAITVSAQRLSDQVRVIQRNKRLDDSVLERLRLEALPERTVPDVTRGPPSTPPVFATNVVIPEMTRIDPVVNDGDSANIGVSTQAQEQLRRALVEAIHRYRYTPDSRPRLPRLPTNKHNIALMIALDNLLVPYFETSENLADTHSILYCGAIAACHVARVRFLDPDRVTGPATDVPTWQVRIEQRISKCRTIIAKLFCFRNGNNRPRVMRFVNQAFAGTGIRPSDYLACITERIDFLKQKVYAWAGRIRRYRERVDRFRMNRLFQNDQRKVYRKWEGTNLSVADEPLPDTAAMNDFWRSIWSVPVEHTESDWIGVVTRECESIEPMGAVSISPQDVSWAIRTAHNWKCPGPDGLHSFWIKWFRSSHERLAAQFQYALESGSLPVFLTTGITFLLYKSGGATEAKNYRPITCLPTLYKLLTSILRAKINKHINTNNIMSASQNGCTVGSRGTKELLLTDMTICQHIRRNKGALSTAWIDYKKAYDSVPHSWLRRILELYKINATLRSFLSTCMRQWTTVLRQPNSRDDPLDPSDSIRIERGIFQGDSLSPLWFCLALNPLSTLLRETGLGCRLRRGGEIISHLLYMDDLKLFAPKQPDLIKLLKITEVFSSSIGMEFGVDKCAVMHVQRGKVVNSINLQLSETITLKSLSETETYKYLGMSQSLGIMDGDVKRTLKERFFWRLTKVLNSLLSGANKVRAFNAWVMPLFTYSFGILRWTQTELDALDRKVRQRLTIHRMLHPRSSVMRLYIPRKCGGRGFLNAKNLHNREVCSLRGYFLNSECGLHRDIVAVDKNLTPLSLAKENWRKPTVLSTKDREEVWKSKELHGRFYRALTGPDVDQLASVNWLRFGDLFGETEGFVCAIADEVMMTNNYRRYILRDGTTDICRACRRPGESLRHIISGCSHLANGEYLHRHNLVARIIHQQLAIQYDLIESEVPYYKYTPAPVLENGRATLYWDRSVITDRTIATNRPDIVLTDRLKRQAVLIDITIPHDENLVKAEKDKLTKYLDLAHEVTALWDVDSTIIVPIVVSVNGLIAKSLDQHLKSLSLGGWVKGQMQKAVLLDTARIVRRFLSLRP

SEQ ID NO: 5698 - protein, 1527 aa, Campaea margaritaria
MNARAISVPELITVASSIRVKRPIQSNNNQPPLKRSKVNVDYRNPLYCTFCKRSGHTFNICRNGNDSNAQPTDKSSTMSSATMPRPVSDKICSFCSKPGHTFDTCYRREERVVSNVNSVSNDRSSLNTMRICVGDKILDTVFDSGAECSVMRESVANRLPGQRRQAIQYLRGIGPFPVVSTSTLTAICIIDNINVEIMFHVLSDYEMTSDVLIGANLLHETGLSVIVTKNSATLLSQPRVLHVRSNCPLFENINHDLTNTSEIDELMILLNKYSHVFTRGFAKSRVNTGELEIRLKNPDKYVERRPYRLSPVEREKVEQIVSELIENNIVRESKSPYPSPIILVKKKNGNDRMCVDYRELNANTVRDHFPLPLIADQIDQLAGGRFYSTLDMASGFNQIPISEHSIEKTAFVTPDGLYEYLTMPFGLCNAPSVYQRYINRALGPLLNAGSANSDANNNNNNQVRAIHRCKLMEQSTLDRLRLEALPVSTTSTSGRDLPETPSIPGPVITSTPVASRVDTEVVDGECGNMSVSSQVTEQLRRTLEDAIRQYRFTSDSRPRLPRVPTHRRNLALMGALDALLAPYLQTSKDLIDTHSILYCGAIAVCRVARVKFPDTEQAPRTLGHAPAWQVRIQRRIDTYRTLIAKLVCFSRGNNRPRVMRFVNQAFAGTDIRPRNYMTCVTERIDFLKQKVYAWANRIRRYRERVNRYCQNRLFQSDQRKVYRSWEVTGQRVDDGQLPDATAMINFWRGIWSVPVEHTEGDWMNIVKRACDPIESMEAVSISPIDVRYAIQTAQNWKSPGPDGLQNFWIKWIRSSHSCLAMQFQEAIELGSLPSFMTTGSTTLLFKSGSTTEAKNYRPITCLPTMYKLLTSILRTKINSHITANNILAPAQNGCRVGSRGTKELLLIDMTICQQVRRKRGALSTAWVDYKKAYDSVPHSWLVRILELYKIDTTLRSFLRTCMGQWSTVLRQPGGGDSVFGPQDFIRIERGIFQGDSLSPLWFCLALNPLSTLLQNSGLGYRLRREGEIISHLLYMDDLKLFTPKRFDLMKLLNITEEFSKSINMEFGVDKCAVMHVQRGKVVNSSNLQLSETMSLRSLSEAETYKYLGMSESLGIVDRDMKQSVKERFFCRLTKVLNSHLSGGNRARAFNGWVMPLLTYSFGILRWTQTELDALDRRVRQQLTLHRMLHPRSSVMRLYIPRKWGGRGFLNAKNLHNREVCSLREYFLNTECGMHRDVVVVDKTLTPLSLANGNWRKPSVLSTDDRKDVWKGKELHGRFYRALTGPDVDLLASVNWLRFGDLFGETEGFVCAIADEVIKTNNYRKYIMKDGTVDICRACRRPGESLRHIISGCSHLANGEYLHRHNQVARIVHQQLALQYGLVELEVPYYKYAPAPVLENGRALLYWDRSVITDRTIVANKPDIVLVDRSQRRAVLVDITVPHDENLVKAEKDKLSKYLDLAHEVTAMWDVDSTIIVPIVVSANGLVAKSLDQHLKRLSLDGWIKGRMQKAVLLDTARIVRRFLSLQP

SEQ ID NO: 5699 - protein, 1208 aa, Ennomos quercinarius
MITRSRTRKAETQSARLPPPPAPPSPSSSSGDEYGTPPDTTASSDEDGPPSPPPPPPPARRGRPPLPARLGPAGQPAPRAAPATGGIVRRMRWTQAMNENCMRAYYGATEGGSSLTAYRDRMLSLFQDLEPAVAVSAQRLSDQVRAIQRCKMLDEPTLDRLRLEALPIRATSPSPRVLPAALPDPGPIMGPLPVTPRGDPAIDGEESASDSVSTQANEQLRSALEDAILRYRSTPTSRPRLPRLPTNRRNLVLMGALNTLLAPYLRTSEDLVDTHSILYCGAIAACRVARVKFPDTDRAPRPADCAPAWQVRIEKRITTFRTLIAKLVCFSRGNHRPRVMRFVTQAFAGTGIRPQDYMACVTERIDFLKQKVYAWASRIRRYRERVDRYQQNRLFQSDERKVYRNWEGTGQRVVDGQLPDANAMNEFWRSIWSVPVEHTEGDWMGVVERVCEPIESMGSITIDPEDISCAIRTAQNWKSPGPDGLHNFWIKWIRCSYPCLAIQFQEALEAGSLPSFMTTGVTFLLHKSGSTTEAKNYRPITCLPTLYKLLTSILRTKINSHIVANNILAPAQNGCRVGSRGTKELLLIDTAICQQVRRNRGALSTAWIDYKKAYDSVPHSWLERILELYKIDATLRSFLSACMRQWTTVLRQPGGGESVSDPQDFIRIERGIFQGDSLSPLWFCLALNPLSTLLGDSGLGYRLRRGGEIISHLLYMDDLKLFAPQRPQLIELLKITENFSNSINMEFGVDKCAVMHVHGGKVVNSTNLQLSETMTLRSLSESETYRYLGMSESLGISVGDVKRKVKERFFCRLTKVLNSLLSGGNKTRAFNGWVMPLLMYSFGILRWTQTELDALDRKVRQLLTSHRMLHPRSSVMRLYIPRKWGGRGFLNAKTLHNREVCSLRDYFLNNECGMHRDVVAVDKGLTPLSLANENWRKPVVLSTEDRRDVWKGKELHGRFYRALTGPDVDLHASVNWLRFGDLFGETEGFVCAIADEVIKTNNYRKYIMKDGTVDICRACRRPGESLRHIISGCSHLANGEYLHRHNLVARIIHQQLALQYGLVESEVPYYKYTPGPVLENGRALLYWDRSIITDRTIVANKPDIVLVDRSQRRAVLVDITIPHDENLVKAEKDKLSKYLDLAHEVTAMWNVDSTSIVPIVVSANGLIAKSLDQHLERLSLDGWIKGQIQKAVLLDTARIVRRFLTLQP

SEQ ID NO: 5700 - protein, 1207 aa, Ennomos quercinarius
MITRSRTKQAEQSARLPPPPAPSSSSSSSGDEYGTPPDTTASSDEDGPSSPPPPPPPARRGRPPLPARLGPAGQPAPRPAPATGGIVRRMRWTQTMNENCMRAYYGATEGGSSLTAYRDRMLSLFQDLEPAVAVSAQRLSDQVRAIQRCKMLDEPALDRLRLEALPIRATSPSPRVLPAALPDPGPIMDPLPVTPRGDPAIDGEESVSDSVSTQANEQLRSALEDAILRYRSTPTSRPRLPRLPTNRRNLVLMGALNTLLAPYLRTSEDLVDTHSILYCGAIAACRVARVKFPDTDRAPRPADGAPAWQVRIEKRITTFRTLIAKLVCFSRGNHRPRVMRFVTQAFAGTGIRPQDYMACVTERIDFLKQKVYAWASRIRRYRERVDRYQQNRLFQSDQRKVYRNWEGTGQRVVDGQLPDANAMNEFWRSIWSVPVDHTEGDWMRVVERVCEPIESMGSITIDPEDISCAIRTAQNWKSPGPDGLHNFWIKWIRCSYPCLAIQFQEALEAGSLPSFMTTGVTFLLHKSGSTTEAKNYRPITCLPTLYKLLTSILRTKINSHIVANNILAPAQNGCRVGSRGTKELLLIDTAICQQVRRNRGALSTAWIDYKKAYDSVPHSWLERILELYKIDATLRSFLSACMRQWTTVLRQPGGGESVSDPQDFIRIERGIFQGDSLSPLWFCLALNPLSTLLGDSGLGYRLRRGGEIISHLLYMDDLKLFAPQRPQLIELLKITENFSNSINMEFGVDKCAVMHVHGGKVVNSTNLQLSETMTLRSLSESETYRYLGMSESLGISVGDVKRTVKERFFCRLTKVLNSLLSGGNKTRAFNGWVMPLLMYSFGILRWTQTELDALDRKVRQLLTSHRMLHPRSSVMRLYIPRKWEGRGFLNAKTLHNREVCSLRDYFLNNECGMHRDVVAVDKGLTPLSLANENWRKPVVLSTEDRRDVWKGKELHGRFYRALTGPDVDLHASVNWLRFGDLFGETEGFVCAIADEVIKTNNYRKYIMKDGTVDICRACRRPGESLRHIISGCSHLANGEYLHRHNLVARIIHQQLALQYGLVESEVPYYKYTPGPVLENGRALLYWDRSIITDRTIVANKPDIVLVDRSQRRAVLVDITIPHDENLVKAEKDKLSKYLDLAHEVTAMWNVDSTSIVPIVVSANGLIAKSLDQHLERLSLDGWIKGQIQKAVLLDTARIVRRFLTLQP

SEQ ID NO: 5701 - protein, 1209 aa, Cydia splendana
MITRSKTRSQASITTNARPPPSPVSSVSSQASSGDEFATTPDTSESSDECGPPPPPPRPPARRGRPPLPARLGPAGHHAPPTVPAAGGVVRRMRWSQTMNENVMRAYYGATEGGTDLCAYRVRMLPLFQALEPTIDVTAQRLSDQVRVIQRLKRLDDSTLDRLRLEALSTRAASTSVRDPPATSPDPVPAPDQAPEAPRVDLCADEEEFAQSVSSTANEQLRRTLDEAITQYRSTPNTRPRLPRLPMNRHNLALMGALNALLEPYLRTSKDLDDTHAIMYCGAIAACRVARVKFPDSERAPRTAGGAPAWQIRIERRISSFRTLIAKLICFRGGNNRPRVMRFVNQAFAGTDIRPRDYMANITERIDFLKQKVYAWANRIRRYRERVDRFQQNRLFQSDQRKMYRKWEETNPRASDSQPPEATVMNDFWRSIWSVPVGHTEGSWMSVVERECESIEPMGAVTISPDDVSCAIRTAQNWKSPGPDGLHNFWLKWFRCSHSCLAAQFQQALELGSPPPSLTTGVTFLLYKSGSTTEAKNYRPITCLPTLYKLLTSILRAKINAHIVANNILASAQNGCRVGSRGTKELLLIDMTICQQIRRNRGALSAAWIDYKKAYDSVPHSWLERVLELYKVDTALRAFLSACMRQWTTVLRQPGGGDGSPGPQDFIRIERGIFQGDSLSPLWFCLALNPLSTLLKDLELGCRLRRGGEVISHLLYMDDLKLFAPNSQDLVELLKTTEVFSNAINMEFGVDKCAVMHVQRGKVVNSTNLQLSETMSFRSISESETYKYLGMSQSLGIEEEGIRRSVKERFFSRLTKVLNSLLSGGNKVRAFNAWVMPLLTYSFGILRWTQTELDALDRRVRQLLTTHRMLHPRSSVMRLYIPRKCGGRGFLNAKNLHNRELYNLRNYFLNNECGMHRDVVAADKGLTPLSLANENWRKPVVLSTEDRKAVWKDKQLHGRFYKALTGPDVDLLASVNWLRFGDLFGETEGFACAIADEVMMTNNYRKYILKDGTVDICRACRRPGESLRHIISGCSHLANGEYLHRHNLVARIIHQQLALLYGLVDREVPYYKYSPAPVLENGRATLYWDRSIITDRTIVANKPDIVLIDRSQRRIVLVDVTIPHDENLVKAEKDKSSKYLDLAHEITAMWDVDSTIIVPIVVSANGLIAKSLDQHLERLSLGGWIKGQMQKAVILDTARIVRRFLTLRP

SEQ ID NO: 5702 - protein, 1111 aa, Cydia splendana
MNENVMRAYYGATEGGTNLCAYRVRMLPLFQALEPTIDVTAQRLSDQVRVIQRLKRLDDSTLDRLRLEALSARAASTSVRDPPATSPDPVPAPDQAPGAPRVDLCADGEEFAQSVSSTANEQLRRTLDEAITQYRSTPNTRPRLPRLPMNRRNLALMGALNALLEPYLRTSKDLDDTHAIMYCGAIAACRVARVKFPDAEHAPRTAGGAPAWQIRIERRISSFRTLIAKLICFRGGNNRPRVMRFVNQAFAGTDIRPRDYMANVTERIDFLKQKVYAWANRIRRYRERVDRFQQNRLFQSDQRKMYRRWEETNLRASDSRPPDATVMNDFWRSIWSVPVGHTEGSWMSVVERECESIEPMGAVTISPDDVSCAIRTAQNWKSPGPDGLHNFWLKWFRCSHSCLAAQFQQALELGSLPPSLTTGVTFLLYKSGSTTEAKNYRPITCLPTLYKLLTSILRAKINAHIVANNILASAQNGCRVGSRGTKELLLIDMTICQQIRRNKGALSAAWIDYKKAYDSVPHSWLGRVLELYKVDAALRAFLSACMGQWTTVLRQPGGGDDRPGPQDFIRIERGIFQGDSLSPLWFCLALNPLSTLLKDLGLGCRLRREGEVISHLLYMDDLKLFAPNSQDLLELLKTTEVFSSAIHMEFGVDKCAVMHVQRGRVVNSTNLQLSETMSFRSISESETYKYLGMSQSLGIEDEGIRRSVKERFFSRLTKVLNSLLSGGNKVRAFNAWVMPLLTYSFGILRWTQTELDALDRRVRSLLTTHRMLHPRSSVMRLYIPRKCGGRGFLNAKDLHNREVYNLRNYFLNNECGMHRDVVAVDRNLTPLSLANENWRKPVVLSTADRKAAWESKVLHGRFYKALTGPDVDLLASVNWLRFGDLFGETEGFACAIADEVMMTNNYRKYILKDGTVDICRACRRPGESLRHIISGCSHLANGEYLHRHNLVARIIHQQLALLYGLVDREVPYYKYLPAPVLENGRATLYWDRSIITDRTIVANKPDIVLIDRLQRRAVLADVTIPHDENLVKAEKDKSSKYLDLAHEITAMWDVDSTIIVPIVVSVNGLIAKSLDQHLERLSLGGWIKGQMQKAVILDTARIVRRFLTLRP

SEQ ID NO: 5703 - protein, 1208 aa, Cydia splendana
MITRSRAKAVTTSARPPPPPASSTSSSTSSSGDEFATAPDTDGSSDESGPPPPPPRPPARRGRPPLPARLGPAGHPAPPTAPATGGIVRRMRWTRDMNENVMRAYYGATEGGTQLSAYRSRILPLFQTLEPTITVSEQRLSDQVRVIQRLKRLDDATLDRLRQEALSARADSISVRDLPATSPDPVPAPDLAPGAPRVDFCTDEGDFVSQNVSTTANEQLRRTLEEVITQYRATTNSRPRLPRLPMNRRNLALMGALNALLEPHLRTSKDLDDTHSILYCGAIAACRVARVKFPDAERAPRTVAGVPAWQARIERRISSFRTLIAKLICFRGGNNRPRVMRFVNQAFAGTDIRPRDYMANVTERIDFLKQKVYAWANRIRRYRERVDRFQQNRLFQSDQRKVYRKWEETNLRTPDTQPPDATAMTDFWRSIWSMPVGHTEGGWMSVVERECEFIEPMGAVTISPDDVSCAIRTAQNWKSPGPDGLHNFWLKWFRCSHSRLAAQFQQALELGSLPPSLTTGVTYLLYKSGSTTEAKNYRPITCLPTLYKLLTSILRAKINAHIVANNILASAQNGCRVGSRGTKELLLIDMTICQQIRRNKGALSAAWIDYKKAYDSVPHSWLGRVLELYKVDAALRAFLSACMRQWTTVLRQPGGGDDPPDPQDFIRIERGIFQGDSLSPLWFCLALNPLSTLLKDLGLGCRLRREGEIISHLLYMDDLKLFAPNSQDLSELLKTTEGFSSAINMEFGVDKCAVMHVQRGRVVNSTNLQLSETMSFRSISESETYKYLGMSQSLGIEDEGIRRSVKERFFSRLTKVLNSLLSGGNKVRAFNAWVMPLLTYSFGILRWTQTELDALDRRVRSLLTTHRMLHPRSSVMRLYIPRKCGGRGFLNAKDLHNREVYNLRNYFLNNECGMHRDVVAVDRNLTPLSLANENWRKPVVLSTADRKAAWESKVLHGRFYKALTGPDVDLLASVNWLRFGDLFGETEGFACAIADEVMMTNNYRKYILKDGTVDICRACRRPGESLRHIISGCSHLANGEYLHRHNLVARIIHQQLALLYGLVDREVPYYKYLPAPVLENGRATLYWDRSIITDRTIVANKPDIVIIDRSQRRAVLVDITIPHDENLVKAEKDKSSKYLDLAHEITAMWDVDSTIIVPIVVSVNGLIAKSLDQHLERLSLGGWIKGQMQKAVILDTARIVRRFLSLQP

SEQ ID NO: 5704 - protein, 1208 aa, Cydia splendana
MITRSRAKAVTTSARPPPPPASSTSSSTSSSGDEFATAPDTDGSSDESGPPPPPPRPPARRGRPPLPARLGPAGHPAPPTAPAAGGIVRRMRWTRDMNENVMRAYYGATEGGTQLSAYRSRILPLFQALEPTITVSEQRLSDQVRVIQRLKRLDDATLDRLRQEALSARADLTSVRDLPATSPDPVPAPDLAPGAPRVDFCTDEGDFASQNVSTTANEQLRRTLEEAITQYRATTNSRPRLPRLPMNRRNLALMGALNALLEPYLRTSKDLDDTHSIMYCGAIAACRVARIKFPDAERAPRTVGGVPAWQARIERRISSFRTLIAKLICFRGGNNRPRVMRFVNQAFAGTDIRPCDYMANVTERIDFLKQKVYAWANRIRRYRERVDRFQQNRLFQSDQRKVYRRWEEANLRAPDTQPPDATAMTDFWRSIWSVPVGHTEGGWMSVVERECESIEPMGAVTISPDDVSCAIRTAQNWKSPGPDGLHNFWLKWFRCSHSCLAAQFQQALELGSLPPSLTTGVTFLLYKSGSTTEAKNYRPITCLPTLYKLLTSILRAKINAHIVANNILASAQNGCRVGSRGTKELLLIDMTICQQIRRNKGALSAAWIDYKKAYDSVPHSWLGRVLELYKVDAALRAFLSACMRQWTTVLRQPGGRDDRPGPQDFIRIERGIFQGDSLSPLWFCLALNPLSTLLKDLGLGCRLRREGEVISHLLYMDDLKLFAPNSQDLLGLLKTTEVFSSAIHMEFGVDKCAVMHVQRGRVVNSTNLQLSETMSFRSISESETYKYLGMSQSLGIEDEGIRRSVKERFFSRLTKVLNSLLSGGNKVRAFNAWVMPLLTYSFGILRWTQTELDALDRRVRSLLTAHRMLHPRSSVMRLYIPRKCGGRGFLNAKDLHNHEVYNLRNYFLNNECGMHRDVVAVDRNLTPLSLANENWRKPVVLSTADRKAAWESKVLHGRFYKALTGPDVDLLASVNWLRFGDLFGETEGFACAIADEVMMTNNYRKYILKDGTVDICRACRRPGESLRHIISGCSHLANGEYLHRHNLVARIIHQQLALLYDLVDREVPYYKYLPAPVLENGRATLYWDRSIITDRTIVANKPDIVIIDRSQRRAVLVDITIPHDENLVKAEKDKSSKYLDLAHEITAMWDVDSTIIVPIVVSVNGLIAKSLDQHLERLSLGGWIKGQMQKAVILDTARIVRRFLSLQP

SEQ ID NO: 5705 - protein, 963 aa, Cydia splendana
MNRRNLALMGALNALLEPHLRTSKDLDDTHSIMYCGAIAACRVARVKFPDTERAPRTVGGVPAWQARIERRIGSFRTLIAKLICFRGGNNRPRVMRFVNQAFAGTDIRPRDYMANVTERIDFLKQKVYAWANRIRRYRERVDRFQQNRLFQSDQRKVYRKWEEANLRAPDTQPPDATAMTDFWRSIWSVPVGHTEGGWMSVVERECESIEPMGAVTISPDDVSCAIRTAQNWKSPGPDGLHNFWLKWFRCSHSRLAVQFQQALELGSLPPSLTTGVTFLLYKSGSTTEAKNYRPITCLPTIYKLLTSILRAKINAHIVANNILASAQNGCRVGSRGTKELLLIDMTICQQIRRNKGALSAAWIDYKKAYDSVPHSWLGRVLELYKVDAALRAFLSACMRQWTTVLRQPGGGDDRSGPQDFIRIERGIFQGDSLSPLWFCLALNPLSTLLKDLGLGCRLRREGEVISHLLYMDDLKLFAPNSQDLLELLKTTEVFSSAIHMEFGVDKCAVMHVQRGRVVNSTNLQLSETMSFRSISESETYKYLGMSQSLGIDDEGIRRSVKERFFSRLTKVLNSLLSGGNKVRAFNAWVMPLLTYSFGILRWTQTELDALDRRVRSLLTAHRMLHPRSSVMRLYIPRKCGGRGFLNAKDLHNHEVYNLRNYFLNNECGMHRDVVAVDRNLTPLSLANENWRKPVVLSTADRKAAWESKVLHGRFYKALTGPDVDLLASVNWLRFGDLFGETEGFACAIADEVMMTNNYRKYILKDGTVDICRACRRPGESLRHIISGCSHLANGEYLHRHNLVARIIHQQLALLYDLVDREVPYYKYLPAPVLENGRATLYWDRSIITDRTIVANKPDIVIIDRSQRRAVLVDITIPHDENLVKAEKDKSSKYLDLAHEITAMWDVDSTIIVPIVVSVNGLIAKSLDQHLERLSLGGWIKGQMQKAVILDTARIVRRFLSLQP

SEQ ID NO: 5706 - protein, 1086 aa, Cydia splendana
MLPLFQALEPTIDVTAQRLSDQVRVIQRLKRLDDSTLDRLRLEALSTRAASTSVRDPPATSPDPVPAPDQAPEAPRVDLCADEEEFAQSVSSTANEQLRRTLDEAITQYRSTPNTRPRLPRLPMNRHNLALMGALNALLEPYLRTSKDLDDTHAIMYCGAIAACRVARVKFPDSERAPRTAGGAPAWQIRIERRISSFRTLIAKLICFRGGNNRPRVMRFVNQAFAGTDIRPRDYMANITERIDFLKQKVYAWANRIRRYRECVDRFQQNRLFQSDQRKMYRKWEETNPRASDSQPPEATVMNDFWRSIWSVPVGHTEGSWMSVVERECESIEPMGAVTISPDDVSCAIRTAQNWKSPGPDGLHNFWLKWFRCSHSCLAAQFQQALELGSPPPSLTTGVTFLLYKSGSTTEAKNFRPITCLPTLYKLLTSILRAKINAHIVANNILASVQNGCRVGSRGTKELLLIDMTICQQIRRNRGALSAAWIDYKKAYDSVPHSWLERVLELYKVDTALRAFLSACMRQWTTVLRQPGGGDGSPGPQDFIRIERGIFQGDSLSPLWFCLALNPLSTLLKDLELGCRLRRGGEVISHLLYMDDLKLFAPNSQDLVELLKTTEVFSNAINMEFGVDKCAVMHVQRGKVVNSTNLQLSETMSFRSISESETYKYLGMSQSLGIEEEGIRRSVKERFFSRLTKVLNSLLSGGNKVRAFNAWVMPLLTYSFGILRWTQTELDALDRRVRSLLTTHRMLHPRSSVMRLYIPRKCGGRGFLNAKDLHNREVYNLRNYFLNNECGMHCDVVAVDRNLTPLSLANENWRKPVVLSTEDRKAVWKDKQLHGRFYKALTGPDVDLLASVNWLRFGDLFGETEGFACAIADEVMMTNNYRKYILKDGTVDICRACRRPGESLRHIISGCSHLANGEYLHRHNLVARIIHQQLALLYGLVDREVPYYKYSPAPVLENGRATLYWDRSIITDRTIVANKPDIVLIDRSQRRTVLVDVTIPHDENLVKAEKDKSSKYLDLAHEITAMWDVDSTIIVPIVVSANGLIAKSLDQHLERLSLGGWIKGQMQKAVILDTARIVRRFLTLRP

SEQ ID NO: 5707 - protein, 1145 aa, Cydia splendana
MPPLPARLGPAGHHAPPTVPAAGGVVRRMRWSQTMNENVMRAYYGATEGGTDLCAYRVRMLPLFQALEPTIDVTAQRLSDQVRVIQRLKRLDDSTLDRLRLEALSTRAASTSVRDPPATSPDPVPAPDQAPEAPRVDLCADEEEFAQSVSSTANEQLRRTLDEAITQYRSTPNTRPRLPRLPMNRHNLALMGALNALLEPYLRTSKDLDDTHAIMYCGAIAACRVARVKFPDSERAPRTAGGAPAWQIRIERRISSFRTLIAKLICFRGGNNRPRVMRFVNQAFAGTDTRPRDYMANITERIDFLKQKVYAWANRIRRYRERVDRFQQNRLFQSDQRKMYRKWEETNPRASDSQPPEATVMNDFWRSIWSVPVGHTEGSWMSVVERECESIEPMGAVTISPDDVSCAIRTAQNWKSPGPDGLHNFWLKWFRCSHSCLAAQFQQALELGSPPPSLTTGVTFLLYKSGSTTEAKNYRPITCLPTLYKLLTSILRAKINAHIVANNILASAQNGCRVGSRGTKELLLIDMTICQQIRRNRGALSAAWIDYKKAYDSVPHSWLERVLELYKVDTALRAFLSACMRQWTTVLRQPGGGDGSPGPQDFIRIERGIFQGDSLSPLWFCLALNPLSTLLKDLELGCRLRRGGEVISHLLYMDDLKLFAPNSQDLVELLKTTEVFSNAINMEFGVDKCAVMHVQRGKVVNSTNLQLSETMSFRSISESETYKYLGMSQSLGIEEEGIRRSVKERFFSRLTKVLNSLLSGGNKVRAFNAWVMPLLTYSFGILRWTQTELDALDRRVRQLLTTHRMLHPRSSVMRLYIPRKCGGRGFLNAKNLHNREVYNLRNYFLNNECGMHCDVVAADKGLTPLSLANENWRKPVVLSTEDRKAVWKDKQLHGRFYKALTGPDVDLLASVNWLRFGDLFGETEGFACAIADEVMMTNNYRKYILKDGTVDICRACRRPGESLRHIISGCSHLANGEYLHRHNLVARIIHQQLALLYGLVDREVPYYKYSPAPVLENGRATLYWDRSIITDRTIVANKPDIVLIDRSQRRTVLVDVTIPHDENLVKAEKDKSSKYLDLAHEITAMWDVDSTIIVPIVVSANGLIAKSLDQHLERLSLGGWIKGQMQKAVILDTARIVRRFLTLRP

SEQ ID NO: 5708 - protein, 955 aa, Agriopis aurantiaria
MGALNALLAPYLRASKDLVDTHSILYCGAIAACRVARVKFPDTNRAPRTVGRVPAWQVRIERRISTFRTLIAKLICFRRGNNRPRVMRFVTQAFAGTDIRPQHYLANVTERIDYLKQKVYAWANRIRRYRERVDRYWQNRLFQSDQRKVYRGWEETEQRVSDRQLPDASAMINFWRGIWSVPVEHTEGDWMRVVERECESIEPMGSILIDSVDVSCAIRTAQNWKSPGPDGLHNFWIKWIRCSHDRLATQFQEALELGSLPSFMTTGVTFLLHKSGSTTEAKNYRPITCLPTIYKLLTSILRNKINAHIVANNVLAHAQNGCRVGSRGTKELLLIDTAISQQVRRNRGALSAAWIDYKKAYDSVPHSWLERVLELYKIDTTLKSFLGACMRQWTTVLRQPGSGDGASGPQDLLRIERGIFQGDSFSPLWFCLALNPLSTLLRDSGLGYRLRRDGQVISHLLYMDDLKLFTPKRQDLMELLKITEVFSSAIKMEFGVDKCAVMHVQRGKVVNSPNLQLSETMTLRSLSEVETYKYLGMSESLGISVEDIKKSVKERFFCHLTKVLNSFLSGGNKVRAFNGWVMPLLIYSFGILRWTQTELDALDRRVRQLLTSHRMLHPRSSVMRLYIPRKWGGRGFLNAKNLHNREVCSLRDFFRNSESGMHRDVVAVDRGLTPLSLANENWRKPSVLSIEDRRDVWKGKELHGRFYRALTGPDVDLLSSVNWLRFGDLFGETEGFACAIADEVIKTNNYRKYIMKDGTVDICRACHRPGESLRHIISGCSHLANGEYLHRHNQVARIIHQQLALRYGLVESEMPYYKYAPAPVLENGRALLYWDRSIITDRTIVANKPDIVLVDRSQRRAVLVDITIPHDENLVKAEKDKLSKYLDLAHEVTAMWDVDSTIIVPIVVSVNGLIAKSLDQHLKRLSLDGWVKGQMQKAVILDTARIVRRFLTLQP

SEQ ID NO: 5709 - protein, 1215 aa, Hedya salicella
MQRYFTRSQNTRKISTAATPTHARPTPPPGSSCSPSASSDDFATAPDTSESSDDECGPPPPPPRPPARRGRPPLPARLGPAGHSAPPTALATGGIVRRMRWSQANNENVMRAYYGATEGGTHLSAYRDRMLLLFQTLEPAIAVSAQRLSDQVRVIQRRKLLDDATLDRLRLEVLAARAASTSSRNPPATSPVPAPALDLMPGAPRVDPDSDEEHCVSSVSTQANEQLRRTLEETIERYRFAPDSRPRLPRLPANKRNLALVGALNALLDPYLRASEDLADTHSIMYCGAIAACRVARVKFPDADRAPRTAGGVPAWQVRIERRISTFRTLIAKLICFRGGNNRPRVMRYVAQAFVGTDVSSCDYMACVTERIDFLKQKVYAWASRIRRYRERVDRFQQNRLFQSDQRKVYRKWEGTDQRVTDGRLPDPTAMSNFWRGIWSVPVEHTEGEWMNVVKRECEPIEAMGAVTISSDDVSCAARTTQNWKSPGPDGLHNFWVKWFRCSHERLATQFQQALELGSLRSFLTTGVTFLLYKSGSTTEAKNYRPITCLPTLYKLLTSILRAKINTHIVANNVLAFSQNGCRVGSRGTKELLLIDTTICQQVRRSRGSLSAAWIDYKKAYDSVPHSWLERILELYKVDTALRSFLGACMRQWTTVLCQPGGRDARPASQDFIRIKRGIFQGDSLSPLWFCLALNPLSTLLKDSGLGCRLRRGGEIISHLMYMDDLKLFAPKRPELVELLKVTDTFSSAIKMEFGVDKCAVMHVQRGKVVNSTNLELSEAMSLRSLSETETYKYLGMSQALSIADGDIRQAVKERFFCRLTKVLNSLLSGGNKARAFNAWVMPLLTYSFGILRWTQTELDALDRRVRMLLTTHRMLHPRSSVMRLYIPRKCGGRGFLNAKDLHNREVCSLREYFLNNECGIHRDVVTVDKGLTPLSLANENWRRPTVLSTVYRKDVWKSKELHGRFYKALTGPDVDLLASVNWLRFGDLFGETEGFSCAIADEVIMTNNYRRYILKDGTVDICRACRRPGESLRHIMSGCSHLANGEYLHRHNQVARIIHQQLAVKYGLVGSEVPYYKYVPMPVLENGRATLYWDRSIITDRTIVANKPDIVLVDRSKRRAMLVDITIPHDENLVKAEKDKLSKYLDLAHEVTAMWDVDSTIIVPIVVSVNGLIAKSLDEHLKRLSLDGWIKGQIQKAVILDTARIVRRFLSVQP

SEQ ID NO: 5710 - protein, 1117 aa, Hedya salicella
MRWTQAMNEHCMRAYYGATEGGTHLSAYRDRMLLLFQTLEPAIAVSAQRLSDQVRAIQRRKLLDDAMLDQLRLEVLAARAASTSSRDPPATSPVSAPALDLVPGAPRVDPGSDEEHCASSVSTQANEQLRRTLEETIERYRFAPDSRPRLPRLPTNRRNLALVGALNALLDPYLRASEDLADTHSIMYCGAIAACRVARVKFPDADRAPRTAGGVPAWQVRIERRISTFRTLIAKLICFRGGNNRPRVMRYVAQAFAGTAVRPRDYMACVTERIDFLKQKVYAWASRIRRYRERVDRFQQNRLFQSDQRKVYRKWEGTDQRVTDGRLPDPTAMNNFWGSIWSVPVEHTEGEWMNVVERECEPIETMGAVTISPDDVSCAARTTQNWKSPGPDGLHNFWVKWFRCSHERLATQFQQALELGSLPSFLTTGVTFLLYKSGSTTEAKNYRPITCLPTLYKLLTSILRAKINTHIVANNVLAFSQNGCRVGSRGTKELLLIDTTICQQVQRNRGTLSAAWIDYKKAYDSVTHSWLGRVLELYKIDTVLRSFIGSCMRQWTTVLRQPGGRDGPPDPQDFIRIKRGIFQGDKLSPLWFCLALNPLSTLLKDSGLGCRLRRGGEIISHLLYMDDLKLFAPKRPELVELLKVTETFSSAIKMEFGVDKCAIMHVKRGKVVNSTNLQLSETMSLKSLSEVETYKYLGMSQSLSIEDGDIKQAVRERFFCRLTKVLNSLLSGGNKARAFNAWVMPLLTYSFGILRWTQTELDALDRRVRMLLTTHRMLHPRSSVMRLYIPRKCGGRGFLNAKDLHNREVCSLREYFLNNECGIHRDVVAVDKGLTSLSLANENWRRPTVLSTVDRKDVWRSKELHGRFYKALTGPDVDLLASVNWLRFGDLFGETEGFACAITDEVIMTNNYRKYILKDGTVDICRACRRPGESLRHIISGCSHLANSEYLHRHNQVARIIHQQLAVKYGLVGSEVPYYKYAPMPVLENGRATLYWDRSIITDRTIVANKPDIVLVDRSKRRAILIDITIPHDENLVKAEKDKLSKYLDLAHEVTAMWDVDSTIIVPIVVSANGLIAKSLNEHLKRLSLDGWVKGQIQKAVILDTARIVRRFLSVQP

SEQ ID NO: 5711 - protein, 1218 aa, Erannis defoliaria
MITRSKNKAKTSTAETTNARPPPLPAPSSPSASSGDDVFLTPRESSVSSSDSDVSGPRTPAPPPPARRGRPPLPARLGPAGQPASRPALAAGGVVRRMRWSQTNNENCMRAYYGATEGGTNLTAYRVRMLSLFQALEPTVTVSAQRLSDQVRAIQRLNLLDQSLLDRLHLEAQSARPTPASTRDLDVASSAPTLTSVPTSAATLATSTDPVLDEGDCTGMSVSTQVSEQLRRALEDAIGQYRFTLNSRPRLPRLPTHRRNLALMGALNALLAPYLRASEDLTDTHSILYCGAIAACRVARVTFPDTNRAPRTAGDVPAWQVRIERRISTFRTLIAKLICFSRGNNRPRVMRFVTQAFAETGIRPQQYMASVTERIDYLKQKVYAWASRIRRYRERVDRYRQNRLFQSDQRKVYRNWEGNEQRVSDGHLPDASAMTNFWRSIWSVPVEHTEGDWMRVVERECEFIEPMGSILIDPVDVSCAIRTAQNWKSPGPDGLHNFWIKWFRCSHDRLATQFQEALELGSLPSFMTTGVTFLLHKSGSTTEPKNYRPITCLPTIYKLLTSILSTKINTHIVANNVLAPAQNGCRVGSRGTKELLLIDMAISQQVRRNKGALSAAWIDYKKAYDSVPHSWLERILELYKIDTTLKSFLSACMRQWTTVLRQPGGGNDSSDPQDLIRIERGIFQGDSLSPSWFCLALNPLSTLLKDSGLGYRLRRGGEVISHLLYMDDLKLFAPKHQDLLELLKTTQVFSSAIRMEFGVDKCAVMRVQRGKVVNSPDLQLSEIMTHRSLSEAETYKYLGMSESLGISVVDIKKSVKERFFCRLTKVLNSLLSGGNKARAFNGWVMPLLIYSFGILRWTQTELDALDRRVRQLLTAHRMLHPRSSVMRLYIPRKWGGRGFLNAKNLHNREVCSLRDYFLNNECGMHRDVVTVDKGLTPLSLANENWRRPSVLSTDDRKDVWKSKELHGRFYRALSGPDVDLLASVNWLRFGDLFGETEGFACAIADEVIKTNNYRKYIMKDGTVDICRACHRPGESLRHIISGCSHLANGEYLHRHNQVARIIHQQLALQYGLVESEVPYYKYAPAPVLENGRALLYWDRSIITDRTIVANKPDIVMVDRSQRRAVLVDVTIPHDENLLKAEKDKLSKYLDLAFEITAMWDVDSTIIVPIVVSANGLIAKSLDQYLKRLSLDGWVKGQIQKAVVLDTGRIVRRFLTLQP

SEQ ID NO: 5712 - protein, 1019 aa, Biston betularia
MATLATPTDPVVDVGECTSMAVCSQVSEHLRRTLEDAICQYRFAPDSRPRLPRLPTHRRNLALMGALNALLAPYLRASEDLTDTHSILYCGAIAACRVARVKFPDTNRAPQPAGGVPAWQLRIERRISTFRTLIAKLICFSRGNNRPRVMHFVTQAFAGTDIRPQHYLASVTERIDYLKQKVYAWANRIRRYRERADRYWQNRVFQSDQRKVYRDWEGTGQRVSDRQLPDTSVMTEFWRGIWSLPVEHTEGDWMRVVERECESIESMGSVLIDPVDVSCAIRTAQNWKSPGPDGLHNFWIKWIRCSHDRLATQFQEALELGSLPCFMTTGVTFLLHKTGSTTEAKNYRPITCLPTIYKLLTSILRTKINAHVVANNVLAPAQNGCRVGSRGTKELLLIDMTIISQQVRRNKGALSTAWIDYKKAYDSVPHSWLERVLELYKIDTTLKSFLGACMRQWTTVLRQPGSGDGSSEPQDLIRIERGIFQGDSLSPLWFCLALNPLSTLLKESGLGHRLRRGGEVISHLLYMDDLKLFAPKRPDLMELLKTTQVFSNAIKMEFGVDKCAVMHVQRGEVVNCPDLQLSETMTFRSLSEAETYKYLGMSESLGIAVVDIKRSVKERFFCRLTKVLNSFLSGGNKVRAFNGWVMPLLIYSFGILRWTQTELDALDRRVRQQLTTHRMLHPRSSVMRLYIPRKLGGRGFLSAKNLHNREVCSLRDYFRDNKCGMHRDVVAVDKGLTPLSLANENWRKPSVLSTEDRKEVWKSKQLHGRFYRVLTGPDVDMLASVNWLRFGDLFGETEGFACAIADEVIKTNNYRKYIMKDGTVDICRACHRPAESLRHIISGCSHLANGEYLHRHNQVARIIHQQLALQYGLVESEVPYYKYAPAPVLENGRALLYWDRSIITDRTIVANKPDIVVVDRAQRWAVLVDITIPHDENLVKAEKDKLSKYLDLAHEITAMWDVDSTIIVPIVVTVNGLIAKSLDQHLKRLSLDGWVKGQLQKAVILDTARIVRRFLTLQP

SEQ ID NO: 5713 - protein, 1121 aa, Biston betularia
MRWSQTNNENCMRAYYGATEGGINLSAYRARMLPLFQALEPTVAVSTQRLSDQVRAIQRLQLLDQSVLDRLRLEALPARPTPVSTRDSPVASSAPTLVSVPTSMVTLATPTDPVVDAGECTSMGVCSQVSEHLRRTLEDAICQYRFAPDSRPRLPRLPTHRRNLALMGALNALLAPYLRASEDLTDTHSILYCGAIAACRVARVKFPDTNRAPRPAGNVPAWQLRIERRISTFRTLIAKLICFSRGNNRPRVMRFVTQAFAGTGIRPQHYLASVTERIDYLKQKVYAWANRIRRYRERADRYWQNRVFQSDQRKVYRDWEETGQRVSDRQLPDTSVMTEFWRGIWSLPVEHTEGDWMRVVERECESIESMGSVLIDPVDVSCAIRTAQNWKSPGPDGLHNFWIKWIRCSHDRLATQFQEALELGSLPCFMTTGVTFLLHKTGSTTEAKNYRPITCLPTIYKLLTSILRTKINAHVVANNVLAPAQNGCRVGSRGTKELLLIDMTISQQVRRNKGALSTAWIDYKKAYDSVPHSWLERVLELYKIDTTLKSFLGACMRQWTTVLRQPGSGDGSSEPQDLIRIERGIFQGDSLSPLWFCLALNPLSTLLKESGLGHRLRRGGEVISHLLYMDDLKLFAPKRPDLMELLKTTQVFSNAIKMEFGVDKCAVMHVQRGEVVNCPDLQLSETMTFRSLSEAETYKYLGMSESLGIAVVDIKRSVKERFFCRLTKVLNSLLSGGNKVRAFNGWVMPLLIYSFGILRWTQTELDALDRRVRQQLTTHRMLHPRSSVMRLYIPRKLGGRGFLSAKNLHNREVCSLRDYFRDNECGMHRDVVAVDKGLTPLSLANENWRKPSVLSTEDRKEVWKSKQLHGRFYRVLTGPDVDMLASVNWLRFGDLFGETEGFACAIADEVIKTNNYRKYIMKDGTVDICRACHRPGESLRHIISGCSHLANGEYLHRHNQVARIIHQQLALQYGLVESEVPYYKYAPAPVLENGRALLYWDRSIITDRTIVANKPDIVVVDRAQRRAVLVDITIPHDENLVKAEKDKLSKYLDLAHEITAMWDVDSTIIVPIVVSVNGLIAKSLDQHLKRLSLDGWVKGQLQKAVILDTARIVRRFLTLQP

SEQ ID NO: 5714 - protein, 1211 aa, Apotomis turbidana
MITRSQARRNTAAHTQNARPTPPPVSSSSSPSSSGDEFATAPDTSESSDDVRGPPPPPPRPPARRGRPPLPACLGPTGQSAPTTAPATGGVVRRMRWTQVMNENCMRAYYGATEGGINLSAYRDRMLPLFLAFDPTITVSAQRLSDQVRFIQRRKLLDDATLDRLRLEVLAARAASTPARDTPATSPVPAPAPNLVPGVPQTDPEADGEDDASSISTQANEQLRRALEEAIERYRSTPESRPRLPRLPMHKRNLALMGALDALLDPYLRASEDLADTHSIMYCGAIAACRVARVRFPDTDRAPRTTRGVPAWQVRIERRISSFRTFIAKLICFRGGNNRPRVMRYVTQAFAGTDTRPCDYMACVTERIDYLKQKVYAWASRIRRYRERVDRFQQNRLFQSDQRKVYRKWEGTNQCVSDGQLPDPTAMINFWRSIWSVPVEHTEGEWMNVVRLECEPIEAMGAVTISPDDVRCAARTTQNWKSPGPDGLHNFWIKWFRSSHERLATQFQDALELGSLPSFMTTGVTFLLHKSGSTTEAKNYRPITCLPTLYKLLTSILRTKINSHIVANNVLAFSQNGCRVGSRGTKELLLIDTTICQQVRRNRGSLSTAWIDYKKAYDSVPHSWLERILELYKIDTDLRSLLGACMRQWTTVLRQPGGGDAPPGPRDLIRIERGIFQGDSLSPLWFCLALNPLSTLLKDSGLGCRLRRGGEVISHLLYMDDLKLYAPKRQDLVELLEVTETFSSAIKMEFGVDKCAVMHVQRGKVVNSANLQLSETMTLRSISEVETYKYLGMSQSLGIADGDIRQALKKRFFCRLTKVLNSLLSGGKKARAFNTWVMPLLTYSFGILRWTQTELDALDTRVRQLLTTHRMRHPRSSVMRMYIPRKCGGRGFLNAKDLHNREVCSLREYFLNNECGIHRDVVAVDKGLTSLSLANENWRRPKVLSTDDRRAVWKSKELHGRFYKALTGPDVDLLASVNWLRFGDLFGETEGFVCAIADEVMMTNNYRRYILKDGTVDICRACRRPGESLRHIISGCSHLANGEYLHRHNQVARIIHQQLALQYGLVGSEVPYYKYAPMPVLENGRATLYWDRSIITDRTIVANKPDIVLVDRSKRQAVLVDITIPHDENLVKAEKDKLSKYLDLAHEVTAMWDVDSTIIVPIVVSANGLIAKSLDKHLKRLSLDGWIKGQIQKAVLLDTARIVRRFLSLQP

SEQ ID NO: 5715 - protein, 1117 aa, Apotomis turbidana
MRWSQAMNENVMRAYYGATEGGINLSAYRDRMLPLFLAFDPTIAVSAQRLSDQVRFIQRRKLLDDATLDRLRLEVLAARAASTPARDTSATSPVPAPAPNLVPGVPLTDPEADGEDGASSVSTQANEQLRRALEEAIERYQSTPESRPRLPRLPTHKRNLALMGALDALLDPYLRGSEDLADTHSIMYCGAIAACRVARVRFPDTDRAPRTAGGVPAWQVRIERRISSFRTFIAKLICFRGGNNRPRVMRYVTQAFAGTGTRPCDYMACVTERIDYLKQKVYAWASRIRRYRERVDRFQQNRLFQSDQRKVYRKWEGTNQCVSDGQLPDPTAMINFWRSIWSVPVEHTEGEWMNVVRRECEPIEAMGAVTISPDDVRCATRTTQNWKSPGPDGLHNFWIKWFRSSHERLATQFQDALELGSLPSFMTTGVTFLLHKSGSTTEAKNYRPITCLPTLYKLLTSILRTKINTHIVANNVLAFSQNGCRVGSRGTKELLLIDTTICQQIRRNKGSLSTAWIDYKKAYDSVPHSWLERILELYKIDTALGSLLGACVRQWTTVLRQPGGGDGPPGPRDLIRIERGIFQGDSLSPLWFCLALNPLSTLLKDSRLGCRLRRGGEVISHLLYMDDLKLYAPKRQDLVELLEVTETFSSAIKMEVGVDKCAVMHVQREKVVNSANLQLSETMTLRSISEVETYKYLGMSQSLGIADGDIRQALKERFFCRLTKVLNSLLSGGNKARAFNAWVMPLLTYSFGILRWTQTELDALDTRVRQLLTTHRMRHPRSSVMRMYIPRKCGGRGFLNAKDLHNREVCSLREYFLNNECGIHRDIVAVDKGLTSLSLANENWRRPKVLSTDDRRAVWKSKELHGRFYKALTGPDVDLLASVNWLRFGDLFGETEGFVCAIADEVMMTNNYRRYILKDGTVDIFRACRRPGESLRHIISGCSHLANGEYLHRHNQVARIIHQQLALQYGLVGSEVPYYKYAPMPVLENGRVTLYWDRSIITDRTIVANKPDIVLVDRSKRQAVLVDITIPHDENLVKAEKDKLSKYLDLAHEVTAMWDVDSTIIVPIVVSANGLIAKSLDKHLKRLSLDGWIKGQIQKAVLLYTARIVRRFLSLQP

SEQ ID NO: 5716 - protein, 955 aa, Notocelia uddmanniana
MGALNDLLLPYLRASEDLIDTHSIMYCGAIAACRVARVKFPDADRAPRTAGSVPTWQVRIERRIDTYRTLIAKLICFRGGNSRPRVMRFVNQAFAGTGVRPRDYMTCVTERIDFLKQKVYAWASRIRRYRERVDRYQLNRLFQSDQRKVYRKWEGTDHRVSDGRRPDATAMVNFWRSIWSVPVEHTEGAWMDVVKRECESIEPMGSVTVSPEDVSCAIRTAPNWKSPGPDGLHNFWLKWFRCSHARLAAQFQQALELGSLPPPLTTGVTSLLYKSGSTTEAKNYRPITCLPTLYKLLTSILRAKINTHIVANNILAPAQNGCRVGSRGTKELLLIDMTICQRVRRNRGTLSAAWIDYKKAYDSVPHSWLRRILELYKVDAVLRSFLVACMGQWTTVLRQPGGGEGPSGPQDSIRIERGIFQGDSLSPLWFCLALNPLSTLLKDSGLGCQLRREGEVISHLLYMDDLKLFAPNKHDLLELLKTTEVFSSAIKMEFGVDKCAVMHVQRGKVVNSTNLHISETIALRSLSEAETYKYLGMSQSLGVEGGDIKRAVRERFFCRLTKVLNSFLSGGNKVRAFNAWVMPLLTYSFGILRWTQTELDFLDRRVRVLLTAHRMLHPRSSVMRLYIPRKLGGRGFLNAKDLHNREVCSLRDYFLNSECGMHRDVVAADASFTPLSMANENWRRFKVLSTEDRRAVWKSKELHGRFYKALTGPDVDLLASLNWLRFGDLFGETEGFVCAIADEVIMTNNYRKYILKDGTVDICRACRRPGESLRHIISGCSHLANGEYLHRHNLVARIIHQQLALLYGLVDFEVPYYKYTPAPVLENGPATLYWDRSVITDRTIVANKPDIVLTDRLKRQAVLVDITIPHDENLVKAEKDKVSKYLDLAYEVTAMWDVDSTIIVPIVVSVNGLIAKSLDQHLKRLSLDGWVKGQIQKAVLLDTARIVRRFLSLSP

SEQ ID NO: 5717 - protein, 1206 aa, Notocelia uddmanniana
MNTRLRSRAEQRARLPSPPAPSSSSPSSSNDEFATAPDSSESSSDERGPSPPPPQTSARRGRRPLPARLGPTGHSAPPTAPAAGGVVRRMRWTQEMNENCMRAYFGATEGETNLSAYRVRMLPLFQALEPTITVSAQRLSDQVRVIQRNKRLDDFTLDRLRLEALSARAAPTSARDLPATSPAPVPAPNTAPRAPRVDPSADGDCADQSVSTQAHEQLRRALDEAITRYRSTPNSRPRLPRLPVNRRNLALMGALNDLLDPYLRASDDLIDTHSIMYCGAIAACRVARVKFPDADRATRTAGGVPAWQVRIEQRINTFRTLIAKLICFRGGNNRPRVMRFVNQAFAGTGVRPRDYMACVTERIDFLKQKVYAWASRIRRYRERVDRYQQNRLFQSDQRKVYRKWEGTDYRVCDGQRPDATAMVNFWRSIWSVPVEHTEGAWIGVVERDCESIEPMGSVTISPEDVSCAIRTAPNWKSPGPDGLHNFWLKWFRCSHERLATQFQQALELGSLPPPLTTGVTSLLYKSGSTTEAKNYRPITCLPTLYKLLTSILRAKINTHIVTNNILAPAQNGCRVGSRGTKELLLIDMTICQRVRRNRGTLSASWIDYKKAYDSVPHSWLRRILELYKVDAALRSFLSACMGQWTTVLRQPGGGDGPSGPQDSIRIERGIFQGDSLSPLWFCLALNPLSTLLQDSGLGCQLRRGGEVISHLLYMDDLKLFAPNRHDLLELLKTTEVFSSAIKMEFGVDKCAVMHVQRGKVVNSTNLQLSETMSLRSLSEAETYKYLGMSQTLGIEGEGIKQAVKERFFCRLTKVLNSFLSGGNKARAFNAWVMPLLTYSFGILRWTQTELDALDRRVRVLLTAHRMLHPRSSVMRLYIPRKCGGRGFLNAKDLHNREVCSLRDYFLNSECGMHRDVVAVDASFTPLSMANENWRRFKVLSTEDRKAEWKSKELHGRFYRALTGPDVDLLASVNWLRFGDLFGETEGFVCAIADEVIMTNNYRKYILKDGTVDICRACRRPGESLRHIISGCSHLANGEYLHRHNLVARIIHQQLALSYGLVDFEVPYYKYLPAPVLENGRATLYWDRSIITDRTIVANKPDIVLIDRSKRQAVLVDITIPHDENLVKAEKDKVSKYLDLAHEVTAMWDVDSTIIVPIVVSANGLIAKSLDQHLKRLSLDGWVKGQIQKAVLLDTARIVRRFLSLSP

SEQ ID NO: 5718 - protein, 1206 aa, Notocelia uddmanniana
MITRTRSRAAQRARPPSPPAPSSSSPSSSGDEFATAPDTSESSCDERGPPSPPPRPPARRGRPPLPARLGPVGHSALPTAPAVGGVVRRMRWTQEMNENCMRAYFGATEGETNLSAYRVRMLLLFQALEPTITVTAQRLSDQVRVIQRLKRLDDATLDRLRLEALSARTASALARDPPATSPAPVPTPDMAPGVPRVDPSVDEDCANQTVSTQTNEQLRRALEEAITRYRSTPNSRPRLPRLPVNRRNLALMGALNDLLDPYLRASEDLIDTHSILYCGAIAACRVARVKFPDADRAPRTAGGVPAWQVRIERRINTFRTLIAKLICFRGGNDRPRVMRFVNQAFAGTGVRPRDYVTCVTERIDFLKQKVYAWASRIRRYRERVDRYQQNRLFQSDQRKVYRKWEGTDHRVCDGQRPDATAMGNFWRSIWSVPVEHTEGAWIGVVEHECESIEPMGSVTISPEDISCAIRTAPNWKSPGPDGLHNFWLKWFRCSHERLATQFQQALELGSLPHLLTTGVTSLLYKSGSTTEAKNYRPITCLPTLYKLLTSILRAKINTHIVANNILAPAQNGCRVGSRGTKELLLIDMTICQRVRRSRGALSAAWIDYKKAYDSVPHSWLRRILELYKVDAALRSFLSACMGQWTTVLRQPGGGDGSSGPQDSIRIERGIFQGDSLSPLWFCLALNPLSTLLKDSGLGCQLRRGGEVISHLLYMDDLKLFAPNRQDLLELLKTTEVFSSAIKMEFGVDKCAVMHVQRGKVVNSTNLQLSETMSLRSLSEAETYKYLGMSQSLGIEGEGIKQAVKERFFCRLTKVLNSFLSGGNKVRAFNAWVMPLLTYSFGILRWTQTELDALDRRVRVLLTTHRMLHPRSSVMRLYIPRKCGGRGFLNAKDLHNREVCSLRDYFLNSECGMHRDVVAVDASFTPLSMANENWRRFKVLSTEDRKAEWKSRELHGRFYKALTGPDVDLLASVNWLRFGDLFGETEGFVCAIADEVIMTNNYRKYILKDGTVDICRACRRPGESLRHIISGCGHLANGEYLHRHNLVARIIHQQLALSYGLVNFEVPYYKYLPAPVLENGRATLYWDRSIITDRTIVANKPDIVLIDRSKRQAVLVDITIPHDENLVKAEKDKVSKYLDLAHEVTAMWDVDSTIIVPIVVSANGLIAKSLDQHLKRLSLDGWVKGQIQKAVLLDTARIVRRFLSLSP

SEQ ID NO: 5719 - protein, 955 aa, Notocelia uddmanniana
MGALNDLLDPYLRASDDLIDTHSIMYCGAIAACRVARVKFPDADRATRTAGGVPAWQVRIERRINTFRTLIAKLICFRGGNNRPRVMRFVNQAFAGTGVRPRDYMACVTERIDFLKQKVYAWASRIRRYRERVDRYQQNRLFQSDQRKVYRKWEGTDHRVCDGQRPDATAMVNFWRSIWSVPVEHTEGAWIGVVERDCESIEPMGSVTISPEDVSCAIRTAPNWKSPGPDGLHNFWLKWFRCSHERLATQFQQALELGSLPPPLTTGVTSLLYKSGSTTEAKNYRPITCLPTLYKLLTSILRAKINTHIVTNNILAPAQNGCRVGSRGTKELLLIDMTICQRVRWNRGTLSASWIDYKKAYDSVPHSWLRRILELYKVDAALRSFLSACMGQWTTVLRQPGGGDGPSGPQDSIRIERGIFQGDSLSPLWFCLALNPLSTLLQDSGLGCQLRRGGEVISHLLYMDDLKLFAPNRQDLLELLKTTEVFSSAIKMEFGVDKCAVMHVQRGKVVNSTNLQLSETMSLRSLSEAETYKYLGMSQALGIEGEGIKQAVKERFFCRLTKVLNSFLSGGNKARAFNAWVMPLLTYSFGILRWTQTELDALDRRVRVLLTAHRMLHPRSSVMRLYIPRKCGGRGFLNAKDLHNREVCSLRDYFLNSECGMHRDVVAVDASFTPLSMANENWRRFKVLSTEDRKAEWKSKELHGRFYRALTGPDVDLLASVNWLRFGDLFGETEGFVCAIADEVIMTNNYRKYILKDGTVDICRACRRPGESLRHIISGCSHLANGEYLHRHNLVARIIHQQLALSYGLVDFEVPYYKYLPAPVLENGRATLYWDRSIITDRTIVANKPDIVLIDRSKRQAVLVDITIPHDENLVKAEKDKVSKYLDLAHEVTAMWDVDSTIIVPIVVSANGLIAKSLDQHLKRLSLDGWVKGQIQKAVLLDTARIVRRFLSLSP

SEQ ID NO: 5720 - protein, 1210 aa, Notocelia uddmanniana
MITRSQTRRVQASQQSARPSPSPASSSSASASSEEEFATAPDTSSSSSDECGPPPPPPRPPARRGRPPLPARLGPAGHPVPHTAPATGGVVRRMQWSPSMNENCMRAYYGATDGGTNLSAYRVRMLPLFQALEPAISVSAQRLSDQVRVIQRLKRLDDATLDRLRLEALSARAASVSARNPPATLPAPVPAPDTAPGASRVDPSADGDCADQSVSTQAHEQLRRALDEAITRYRSTPNSRPRLPRLPVNRRNLALMGALNDLLDPYLRASDDLIDTHSIMYCGAIAACRVARVKFPDADRATRTAGGVPAWQVRIERRINTFRTLIAKLICFRGGNNRPRVMRFVNQAFAGTGVRPRDYMACVTERIDFLKQKVYAWASRIRRYRERVDRYQQNRLFQSDQRKVYRKWEGTDHRVCDGQRPDATAMVNFWRSIWSVPVEHTEGAWIGVVERDCESIEPMGSVTISPEDVSCAIRTAPNWKSPGPDRLHNFWLKWFRCSHERLATQFQQALELGSLPPPLTTGVTSLLYKSGSTTEAKNYRPITCLPTLYKLLTSILRAKINMHIVTNNILAPAQNGCRVGSRGTKELLLIDMTICQRVRRNRGTLSASWIDYKKAYDSVPHSWLRRILELYKVDAALRSFLSACMGQWTTVLRQPGGGDGPSGPQDSIRIERGIFQGDSLSPLWFCLALNPLSTLLQDSGLGCQLRRGGEVISHLLYMDDLKLFAPNRQDLLELLKTTEVFSSAIKMEFGVDKCAVMHVQRGKVVNSTNLQLSETMSLRSLSEAETYKYLGMSQALGIEGEGIKQAVKERFFCRLTKVLNSFLSGGNKARAFNAWVMPLLTYSFGILRWTQTELDALDRRVRVLLTAHRMLHPRSSVMRLYIPRKCGGRGFLNAKDLHNREVCSLRDYFLNSECGMHRDVVAVDASFTPLSMANENWRRFKVLSTEDRKAEWKSRELHGRFYRALTGPDVDLLASVNWLRFGDLFGETEGFVCAIADEVIMTNNYRKYILKDGTVDICRACRRPGESLRHIISGCGHLANGEYLHRHNLVARIIHQQLALSYGLVDFEVPYYKYLPAPVLENGRATLYWDRSIITDRTIVANKPDIVLIDRSKRQAVLVDITIPHDENLVKAEKDKVSKYLDLAHEVTAMWDVDSTIIVPIVVSANGLIAKSLDQHLKRLSLDGWVKGQIQKAVLLDTARIVRRFLSLSP

SEQ ID NO: 5721 - protein, 955 aa, Notocelia uddmanniana
MGALNDLLVPYLGASEDLIDTHSIMYCGAIAACRVARVKFPDADRAPRPAGSVPTWQVRIERRVDTYRTLIAKLICFRGGNSRPRVMRFVNQAFAGTGVRPRDYMDCVTERIDFLKQKVYAWASRIRRYRERLDRYQQNRLFQSDQRKVYRKWDGTDHRVSDGQRPDAAAMVNFWRSIWSVPVEHTEGPWIDAVERECESIEPMGSVTISPEDVSCAIRTAPNWKSPGPDGLHNFWLKWFRCSHARLAAQFQQALELGSLPPPLTTGVTSLLYKSGSTTEAKNYTPITCLSTLYKLLTSILRAKINAHIVANNILAPAQNGCRVGSRGTKELLLIDMTICQQVRRNRGALSAAWIDYRKAYDSVPHSWLGRILELYKVDAALRSFLCACMRQWTTVLRQPGGGDGPSVPQDSIRIERGIFQGDSLSPLWFCLALNPFSTLLKDSGLGCQLRRGGEVISHLLYMDDLKLFAPNTHDLLELLITTEVFSSAIKMEFGVDKCAVMHVQRGKIVNSTNLQLSETTSLRSLSEADTYKYLGMSQSLGIEGEGIKRVLRERFFCRLTKVLNSFLSGGNKVRAFNAWVMPLLTYSFGILRWTQTELDLLDRRVRVLLTTNRMLHPRSSVMRLYIPRKLGGRGFLNAKDLHDREVCSLRDYFLNSECGMHRDVVAVDTLLIPLSMANENWRRLKVLSTEDRRAVWRSKELHGRFYKALTGPDVDLLASVNWLRFGDLFGETEGFVCAIADEVIMTNNYRKYILKDGTVDICRACRRPEESLRHIISGCSHLANGEYLHRHNLVARIIHQQLALLYGLVGFEVPYYKYTPAPVLENGRATLYWDRSVITDRTIVANKPDIVLTDRLKRQAILVDITIPHDENLVKAEKDKSSKYLDLAHEVTAMWDVDSTIIVPIVVSANGLIAKSLDQHLKRLSLDGWVKGQIQKAVLLDTARIVRRFLSLSP

SEQ ID NO: 5722 - protein, 1209 aa, Notocelia uddmanniana
MITRSQTRRVQASQQSARPSPSPASSSSSASSEEEFATAPDTSSSSSDECGPPPLPPRPPARRGRPPLPARLGPAGHPVPHTAPATGGVVRRMQWSPSMNENCMRAYYGATDGGTNLSAYRLRMLPLFQALEPAISVSAQRLSDQVRVIQRLKRLDDATLDRLRLEALSARAASVSARNPPATLPAPVPAPDTAPGAPRVDPSADEDCANQSVSTQAHEELRRALEEAITQYRSTPNSRPRLPRLPVNRRNLALMGALNDLLDPYLRASDDLIDTHSIMYCGAIAACRVARVKFPDADRATRTAGGVPAWQVRIERRINTFRTLIAKLICFRGGNNRPRVMRFVNQAFAGTGVRPRDYMACVTERIDFLKQKVYAWASRIRRYRERVDRYQQNRLFQSDQRKVYRKWEGTDHRVCDGQRPDATAMVNFWRSIWSVPVEHTEGAWIGVVERDCESIEPMGSVTISPEDVSCAIRTAPNWKSPGPDGLHNFWLKWFRCSHERLATQFQQALELGSLPPPLTTGVTSLLYKSGSTTEAKNYRPITCLPTLYKLLTSILRAKINTHIVTNNILAPAQNGCRVGSRGTKELLLIDMTICQRVRRNRGTLSASWIDYKKAYDSVPHSWLRRILELYKVDAALRSFLSACMGQWTTVLRQPGGGDGPSGPHDSIRIERGIFQGDSLSPLWFCLALNPLSTLLQDSGLGCQLRRGGEVISHLLYMDDLKLFAPNRQDLLELLKTTEVFSSAIKMEFGVDKCAVMHVQRGKVVNSTNLQLSETMSLRSLSEAETYKYLGMSQALGIEGEGIKQAVKERFFCRLTKVLNSFLSGGNKARAFNAWVMPLLTYSFGILRWTQTELDALDRRVRVLLTAHRMLHPRSSVMRLYIPRKCGGRGFLNAKDLHNREVCSLRDYFLNSECGMHRDVVAVDASFTPLSMANENWRRFGVLSAEDRRAEWKSKELHGRFYRALTGPDVDLLASVNWLRFGDLFGETEGFVCAIADEVIMTNNYRKYILKDGTVDICRACRRPGESLRHIISGCSHLANGEYLHRHNLVARIIHQQLALSYGLVDFEVPYYKYLPAPVLENGRATLYWDRSIITDRTIVANKPDIVLIDRSKRQAVLVDITIPHDENLVKAEKDKVSKYLDLAHEVTAMWDVDSTIIVPIVVSANGLIAKSLDQHLKRLSLDGWVKGQIQKAVLLDTARIVRRFLSLSP

SEQ ID NO: 5723 - protein, 1207 aa, Crocallis elinguaria
MITRSRNKAGTSSARQSPPPASSSPSSSSGVEYGTPLDTSASSDEDGPPSPPPPPPPARRGRPLLPARLGPAGHSVPRAAPATGGIVRRMRWTSDMNENCMRAYYGATEGGTNMSAYRDRMLPLFQTLEPSVAVSAQRLSDQVRAIQRLKLLDESVLDRLRLEALPIRATSASTRDLSVAPPVLAPLLAPSSVATRIDPVVDEDDCANISVSTQVNEQLRRALEDAILDYQYTPDSRPRLPRLPTNRRNLALMGALNVLLAPYLRASENLFDTHSIMYCGAIAVCRVARVKFPDADRAPRTAGSAPAWQVRIERRINTFRTLIAKLICFSRGNNRPRVMRFVNQAFAGTGIRPQNYMAGVTERIDFLKQKIYAWVNRIRRYRERVDRYHQNRLFESDQRKVYRNWEGTDQRVSDGQLPDTNAMINFWRGIWSVPVEHTEGDWMRTVEQSCESIETMGSVTIDPIDVSCAIRTAQNWKSPGPDGLHNFWIKWIRCSHECLAVQFQEALELGSLPCFLTTGVTSLLHKSGSTTEAKNYRPITCLPTLYKLLTSILRVKINSHVVANNILAPAQNGCRVGSRGTKELLLIDTAICQRVRRNKGALSAAWIDYKKAYDSVPHSWLERILELYKIDATLRSFLSMCMRQWTTVLRQPGSGNSPSGPENFIKIERGIFQGDSLSPLWFCLALNPLSTLLRDSRLGCQLRREGEIISHLLYMDDLKLFAPKRPDLMELLKITEIFSNAIKMEFGVDKCAVMHVQRGKVVNSDNLQLSETMTLRSLSEAETYKYLGMSQSLGIAVGDIKQSVKERFFCRLTKVLNSLLSGGNKARAFNGWVMPLLIYSFGILKWTQTELDSLDRRVRQLLTYHRMLHPRSSVMRLYIPRKWGGRGFLNAKTLHNREVCSLREYFLNNECGMHRDVVAVDRNLTPLSLANENWRKPVVMTTEDRKDVWKGKELHGRFYRALTGSDVDLLASVNWLRFGDLFGETEGFVCAIMDEVIKTNNYRKYIMKDGTVDICRACRRPGESLRHIISGCSHLANGEYLHRHNLVARIIHQQIALQYGLVESEVPYYKYAPAPVLENGCALLYWDRSIITDRTIVANKPDIVLVDRSQRRAVLVDITVPHDENLVKAEKDKLSKYLDLAHEVTAMWNVDSTIIVPIVVSANGLVAKSLDQHLKRLSLDGWIKGRMQKAVLLDTARIVRRFLTLQP

SEQ ID NO: 5724 - protein, 1208 aa, Crocallis elinguaria
MITRSRTKKAGTASARKTPPPASSSPSSSSGVEYGTPLDTSASSDEDGPPSPPPPPPPARRGRPPLPARLGPAGHSVPRTAPATGGIVRRMRWTSDMNENCMRAYYGATEGGTNMSAYRDRMLPLFQTLEPSVAVSTQRLSDQVRAIQRLKLLDESALDRLRLEALPIRATSASARDLSVAPPVPAPLPAPSSVATRIDPVVDEDDCANISVSTQVNEQLRRALEDAILEYQYTPDSRPRLPRLPTNRRNLALMGALNVLLAPYLRASENLFDTHSIMYCGAIAVCRVARVKFPDADRVPRPAGSAPAWQVRIERRINTFRTLIAKLICFSRGNNRPRVMRFVNQAFAGTGIRPQNYMAGVTERIDFLKQKIYAWVNRIRRYRERVDRYHQNRLFESDQRKVYRNWEGTDQRVSDGQLPDTNAMINFWRGIWSVPVEHTEGDWMRTVEQSCESIETMGSVTIDPIDVSCAIRTAQNWKSPGPDGLHNFWIKWIRCSHECLAVQFQEALELGSLPRFLTTGVTSLLHKSGSTTEAKNYRPITCLPTLYKLLTSILRAKINSHVVANNILAPAQNGCRVGSRGTKELLLIDTAICQQVRRNKGALSTAWIDYKKAYDSVPHSWLERILELYKIDTTLRTFLSTCMRQWTTVLRQPGIGNSPSGPENFIKIERGIFQGDSLSPLWFCLALNPLSTLLRDSRLGCKLRREGEIISHLLYMDDLKLLAPKSPDLMKLLKITEIFSSAIKMEFGVDKCAVMHVQRGKVVNSDNLQLSETMTLRSLSEAETYRYLGMSQSLGITVGDIKQSVKERFFCRFTKVLNSLLSGGNKARAFNGWVMPLLIYSFGILKWTQTELDSLDRRVRQLLTYHRMLHPRSSVMRLYIPRKWGGRGFLNAKTLHNREVCSLREYFLNNECGMHRDVVAVDRNLTPLSLANENWHKPVVMTTEDRKEVWKGKELHGRFYRALTGSDVDLLASVNWLRFGDLFGETEGFVCAIMDEVIKTNNYRKYIMKDGTVDICRACRRPGESLRHIISGCSHLANGEYLHRHNLVARIIHQQTALQYGLVESEVPYYKYAPVPVLENGCALLYWDRSIITDRTIVANKPDIVLVDRSQRRAVLVDITVPHDENLVKAEKDKLSKYLDLAHEVTAMWNVDSTIIVPIVVSANGLVAKSLDQHLKRLSLDGWIKGRMQKAVLLDTARIVRRFLTLQP

SEQ ID NO: 5725 - protein, 1213 aa, Peribatodes rhomboidaria
MITRSRTRKQQTAETESTRPPPPPSSSSASSSSEEEFVTPPDTTDSSDEEAAPTPAPPPPPARRGRPPLPARLGPAGRSAPPTAPATGGVVCRMRWTRTINENCMRAYYGATEGGINLTAYRVRMLSLFQVLEPTVTVSTQRLSDQVRAIHRCKLLDQSVLDRLCLEAIRARPTPASTRDQLVASSAPTWASVPASAATLATLADTDVDGDRTSVSVSSQVSEHLRRTLEDAISQYRYAPDSRPRLPRLPTHRRNMALMGALNVLLAPYLRASENLTDTHSILYCGAIAACRVARVKFPDTNRAPRPAGGVPAWQVRIERRISTFRTLIAKLLCFSRGNTRPRVMRFVTQAFAGTDIRPQYYLTNVTERIDYLKQKVYAWANRIRRYRERVDRYWQNRLFQSDQRKVYRGWEGTEQCVIDGHRPNASAMIDFWRGIWSVPVEHTEGEWMRVVERECESIESMESILIDSVDVSCAIRTAQNWKSPGPDGLHNFWIKWIRSSHDRLATQFQEALELCSLPSFMTTGVTFLLHKSGSTTDPKNYRPITCLPTIYKLLTSILRNKINTHIVANNVLAPAQNGCRVGSRGTKELLLIDMAISQQVRRNRGALSVAWIDYKKAYDSVPHSWLERVLELYKIDITLKSFLSACMRQWTTVLRQPGGGEVSADPQDLIRIERGIFQGDSLSPLWFCLALNPLSTLLKDLGLGHRLRRGGEVISHLLYMDDLKLFAPKRQDLMELLKTTEVFSSAIKMEFGVDKCAVMHVQRGKVVNSPNLQLSETMNLRSLSEVETYKYLGMSESLGISVVDIKKSIKERFFCRLTKVLNSLLSGGNKMRAFNGWVMPLLIYSFGILRWTQTELDALDRRVRQLLTTHRMLHPRSSVMRLYIPRKWGGRGMLNAKNLHNREVYRLRSFFRNNDYGMHCDVVAVDKGLTPLSLANENWRQPSVLSTEDRKNVWKGKELHGRFYRALTGPDVDLLASVNWLRFGDLFGETEGFTCAIADEVIKTNNYRKYILKDGTVDICRACHRPGESLRHIISGCSHLANGEYLHRHNQVARIIHQQLALQYGLVESEVPYYKYAPASVLENGRALLYWDRSIITDRTIVANKPDIVLVDRSQRRAVLVDITIPHDENLVKAEKDKLSKYLDLAHEVTAMWDVDSTIIVPIVVTVNGLIAKSLDQHLKRLSLDGWIKGQIQKAVILDTCRIVRRFLTLQP

SEQ ID NO: 5726 - protein, 897 aa, Peribatodes rhomboidaria
MSPYTLTHSLPRLLNTKSNILSNLFKIVMRFVTQAFAGTGIRPQYYLANVTERIDYLKQKVYAWANRIRRYRERVDRYWQNRLFQSDQRKVYRGWEGTEQCVIDGHRPDASAMIDFWRGIWSVPVEHTEGEWMRIVERECESIESMESILIDSVDVSCAIRTAQNWKSPGPDGLHNFWIKWIRCSHDRLAIQFQEALELGSLPSFMTTGVTFLLHKSGSTTDPKNYRPITCLPTIYKLLTSILRNKINTHTVANNVLAPAQNGCRVGSRGTKELLLIDMAISQQVRRNKGALSVAWIDYKKAYDSVPHSWLERILELYKIDITLKSFLSACMRQWTTVLCQPGGGEVSADPRDLIRIERGIFQGDSLSPLWFCLALNPLSTLLKDLGLGHRLRRGGEVISHLLYMDDLKLFAPKRQDLMELLKTTEVFSSAIKMEFGVDKCAVMHVQRGKVVNSPNLQLSETMTLRSLSEVETYKYLGMSESLGISVADIKKSIKERFFCRLTKVLNSLLSGGNKVRAFNGWVMPLLIYSFGILRWTQTELDALDRRVRQLLTTHRMLHPRSSVMRLYIPRKWGGRGMLNAKNLHNREVYRLRSFFRNNDCGMHCDVVAVDKGLTPLSLANENWRQPPVLSTEDRKIVWKGKELHGRFYRALTGPDVDLLASVNWLRFGDLFGETEGFACAIADEVIKTNNYRKYILKDGTVDICRACHRPGESLRHIISGCSHLANGEYLHRHNQVARIIHQQLALQYGLVESEVPYYKYAPASVLENGRALLYWDRSIITDRTIVANKPDIVLVDRSQRRAVLVDITIPHDENLVKAEKDKLSKYLDLAHEVTAMWDVDSTIIVPIVVTVNGLIAKSLDQHLKRLSLDGWIKGQIQKAVILDTCRIVRRFLTLQP

SEQ ID NO: 5727 - protein, 1213 aa, Peribatodes rhomboidaria
MITRSRTRKQQTAETESTRPPPPPSSSSASSSSEEEFVTPPDTTDSSDEEAAPTPAPPPPPARRGRPPLPARLGPAGRSAPPTAPATGGVVCRMRWTQAMNENCMRAYYGATEGGTNLTAYRVRMLSLFQVLEPTVTVSTQRLSDQVRAIHRCKLLDQSVLDRLCLEAIRARPTPASTRDQPVASSAPTWASVPASAATLATLADTDVDGDRTSVSVSSQVSGHLRRTLEDAISQYRYAPDSRPRLPRLPTHRRNMALMGALNVLLAPYLRASENLTDTHSILYCGAIAACRVARVKFPDTSRAPRPAGGVPAWQVRIERRISTFRTLIAKLLCFSRGNTRPRVMRFVTQAFAGTDIRPQYYLANVTERIDYLKQKVYAWANRIRRYRDRVDRYWQNRLFQSDQRKVYRGWEGTEQCVIGGHRPDASAMIDFWRGIWSVPVEHIEGEWMRIVERECESIESMESILIDSVDVSCAIRTAQNWKSPGPDGLHNFWIKWIRCSHDRLAIQFQEALELGSLPSFMTTGVTFLLHKSGSTTDPKNYRPITCLPTIYKLLTSILRNKINTHIVANNVLAPAQNGCRVGSRGTKELLLIDMAISQQVRRNKGALSVAWIDYKKAYDSVPHSWLERILELYKIDITLKSFLSACMRQWTTVLRQPGGGEVSADPQDLIRIERGIFQGDSLSPLWFCLALNPLSTLLKDLGLGHRLRRGGEVISHLLYMDDLKLFAPKRQDLMELLKTTEVFSSAIKMEFGVDKCAVMHVQRGKVVNSPNLQLSETMTLRSLSEVETYKYLGMSESLGISVVDIKKSIKERFFCRLTKVLNSLLSGGNKMRAFNGWVMPLLIYSFGILRWTQTELDALDRRVRQLLTTHRMLHPRSSVMRLYIPRKWGGRGMLNAKNLHNREVYRLQSFFRNNDCGMHCDVVAVDKGLTPLSLANENWRQPSVLSTEDRENVWKGKELHGRFYRALTGPDVDLLASVNWLRFGDLFGETEGFACAIADEVIKTNNYRKYILKDGTVDICRACHRPGESLRHIISGCSHLANGEYLHRHNQVARIIHQQLALQYGLVESEVPYYKYAPASVLENGRALLYWDRSIITDRTIVANKPDIVLVDRSQRRAVLVDITIPHDENLVKAEKDKLSKYLDLAHEVTAMWDVDSTIIVPIVVTVNGLIAKSLDQHLKRLSLDGWIKGQIQKAVILDTCRIVRRFLTLQS

SEQ ID NO: 5728 - protein, 1212 aa, Pammene fasciana
MITRSKSRLQQASPPNARPPSSPASSVSSPSSSGDEFATAPDTSESSDECGPPPPPPRPPARRGRPPLPARLGLAGQPAPLRAPAAGGIVRRMRWTQTMNENVMRAYYGATEGGTNLCAYRVRLLPLFQALEPTTNVTAQRLSDQVRVIQRDKRLDDSTLDRLRLEALSAHAASTSARDPPATAPDPMPAPDLASGAPRVDPSADEEEIATQSVSSTANEQLRRTLEEAITQYRSTNIPRPRLPRLPMNKRNLALMGALNDLLDPFLRTSKDLDDTHSIMYCGAIAACRVARVKFPDAERAPRTAGGVPAWQVRIERRINSFRTLIAKLICFRGGNNRPRVMRFVHQAFAGMDIEPRDYMANVTERIDFLKQKVYAWASRIRRYRERVDRFRQNRLFQSDQRKVYRRWEEADPRVSDVRLPDATAMTDFWRSIWSAPVEHTEGEWMSVVERECETIEPMGAITISPDDVSCAIRTAQNWKSPGPDGLHNFWLKWFRCSHSRLATQFQQALELGSLPPSLTTGVTFLLYKSGSTTEAKNYRPITCLPTLYKLLTSILRAKINAHMVANNILASAQNGCRVGSRGTKELLLIDMTICQRVRRNRGALSAAWIDYKKAYDSVPHSWLERILELYKIDAALRSFLGACMRQWTTALRQPGGGDDPPGPQDFIRIERGIFQGDSLSPLWFCLALNPLSTLLKDSGLGCRLRRESEVISHLLYMDDLKLFAPNNRDLLELLKTTEVFSSSIKMEFGVDKCAVMHVQRGKVVNSTNLQLSETMTFRSISESETYKYLGMSQSLGIEDAGIKQALRERFFGRLTKVLNSLLSGGNKVRAFNAWVMPLLTYSFGILRWTQTELDALDRRVRQLLTTHRMLHPRSSVMRLYIPRKCGGRGFLNAKNLHNREVYNLRNYFLNNECGMHRDVVAIDKGLTPLSLANENWRKPVVLSTEDRKAVWKSKELHGRFYGALTGPDVNLLASVNWLRFGDLFGETEGFACAIADEVIMTNNYRRYILKDGTVDICRACRRPGESHRHIISGCSHLANGEYLHRHNLVARIIHQQLALLYGLVDHEVPYYKYTPAPVLENGRATLYWDRSIITDRTIVANKPDIVVIDRPQRRAMLVDITVPCDVNLVKAEKDKSSKYLDLAHEVTAMWEVDSAIIVPIVVSANGLIAKSLDQHLERLSLRGCGWIKGQIQKAVILDTARIVRRFLSLRP

SEQ ID NO: 5729 - protein, 1202 aa, Campaea margaritaria
MFTRSKAATNAHLSSQSAPSSPKSTSSESEYGTPPDTSDVSGPPSPPSPPRPVRRGRPPLPARLGPVGQLAPRPAPATSSKAQRMKWTTTINTSCMRAYYGATEGGTNLTAYRNRMLSLFQTLEPTVAVSAQRLSDQVRAIHRCKLMEQSTLDRLRLEALPVSTTSTSGRDLPETPSIPGPVITSTPVASRVDTEVVDGECGNMSVSSQVTEQLRRTLEDAIRQYRFTSDSRPRLPRVPTHRRNLALMGALDALLAPYLQTSKDLIDTHSILYCGAIAVCRVARVKFPDTEQVPRTLGHAPAWQVRIQRRIDTYRTLIAKLVCFSRGNNRPRVMRFVNKAFAGTDIRPRNYMTCVTERIDFLKQKVYAWANRIRRYRERVNRYCQNRLFQSDQRKVYRNWEVTGQRMDDGQLPDVTAMINFWRGIWSVPVEHTEGDWMNIVERACDPIESMEAVSISPIDVRYAIQTAQNWKSPGPDGLQNFWIKWIRSSHSCLAMQFQEAIELGSLPSFMTTGSTTLLFKSGSTTEAKNYRPITCLPTMYKLLTSILRTKINSHIIANNILAPAQNGCRVGSRGTKELLLIDMTICQQVRRKRGALSTAWVDYKKAYDSVPHSWLVRILELYKIDTTLRSFLRTCMGQWSTVLRQPGGGDSVFGPHDFIRIERGIFQGDSLSPLWFCLALNPLSTLLQNSGLGYRLRREGEIISHLLYMDDLKLFAPKRFDLMNLLNITEEFSKSINMEFGVDKCAVMHVQRGKVVNSSNLQLSETLSLRSLSEAETYKYLGMSESLGIVDRDIKQSVKERFFCRLTKVLNSHLSGGNRARAFNGWVMPLLTYSFGILRWTQTELDALDRRVRQQLTLHRMLHPRSSVMRLYIPRKWGGRGFLNAKNLHNREVCSLREYFLNTECGMHRDVVVVDKTLTPLSLANGNWRKPSVLSTDDRKDVWKGKELHGRFYRALTGPDVDLLASVNWLRFGDLFGETEGFVCAIADEVIKTNNYRKYIMKDGTVDICRACRRPGESLRHIISGCSHLANGEYLHRHNQVARIVHQQLALQYGLVELEVPYYKYAPAPVLENGRALLYWDRSVITDRTIVANKPDIVLVDRSQRRAVLVDITVPHDENLVKAEKDKLSKYLDLAHEVTAMWDVDSTIIVPIVVSANGLVAKSLDQHLKRLSLDGWIKGRMQKAVLLDTARIVRRFLSLQP

SEQ ID NO: 5730 - protein, 1206 aa, Bembecia ichneumoniformis
MILRKRTRNTAEQSARPPPLPVSSSPCSSADEFLTADDKSTSSDEDGSTPPSPPRRPARRGRPPLPASLGPVRPSASRPAPATGGVVRRMRWTHTMNENCMRAYYGATEGATNLTAYRARMLSLFQALEPAVTVTAQRLSDQVRAIQRCQLLEQSALDRLRLDSLPARTTSAATQHLRAALPLSESASIPTSAALLTDPVDQEFCASTNVSTETKEQLRRALEEAISRYHTKPNDRPRLPRLPMHKQNIALMGALNTLLAPYIKASRDLTDTHSILYCGAIAACRVARVKFLNFDRATRDAGDVPAWQVRIERRISKFRTLIAKLIAFSKGNTRPRVMRFVAQAFVGTNIKSKDYLTWATERIDYFKQKVYALANRVRRYKERVQRYQQNRVFQSDQRKVYRQWEGTVNRVDAGQLPDADAMTNFWRGIWSVSDGHTEGDWINIVKQTCEPIEPMGAVTISPADVSCAIRTVQNWKSPGPDGLHNFWIKWFRCSHECLAMQFQKALDLGALPSLFTTGITFLLHKSGSTTEAKNYRPITCLPTLYKLLTSILRSKINSHIVANNILAPAQNGCKIGSRGTKELLLIDMTICQRVRRSGGALSVAWIDYQKAYDSVPHSWLRRILELYKIDTTLRSFLAMCMGQWITGLCQPGYRGGAADLRDMIKIERGIFQGDSLSPLWFSLALNPLSTLLRNLKLGYRLRRGGEVISHLLYMDDLKLFAPKPKDLLELLKITQCFSNAIRMDFGVDKCAVMHVQKGKVVNSPNLQLSNEMSFRSLSEVETYKYLGMSQSLGISDKDIKQTVRTRFFGRLIKVLNSFLSGGNKVRAFNGWVMPLLTYSFGILRWTQTELDGLDRRVRRLLTAHRMLHPRSSVMRLYIPRKLGGRGFLNAKNLHNREVYSLREYFLNHESGVHRDVVAIDKNYTPLSLANGNWRRLVVLSAEDRKNVWKGKELHGRFYKALTGPDVDSLMSVNWLRFGDLFGETEGFVCAIADEVIKTNNYRKYILKDGTVDICRACHRPGETLRHIISGCAHLANGEYLHRHNQVARIIHQRLALRYDLIESEVPYYKYVPAPVLENGHATLYWDRSIITDRTIVANKLDIVVIDRSQRRTMLVDIAVPHDENLVKAEKEKLTKYIDLAHEVTAMWDVDSTIIVPIVVSANGLIAKSLDQHLKRLSLDGWVKGQIQKAVLLDTARIVRRFLTLQP

SEQ ID NO: 5731 - protein, 1207 aa, Ennomos quercinarius
MITRSRKKQAEQSARLPPPPAPSSPSSSSGDEYGTPPDTTASSDEGGPPSPPPPPPPARRGRPPLPARLGPAGQPAPRPAPATGGIVRRMRWTQTMNENCMRAYYGAIEGGSNLTAYRDRMLSLFQDLEPAVAVSAQRLSDQVRAIQRCKMLDQSTLDRLRLEALPIPATSPSPRVLPAALPDQGPIMGPPPVTPRGDPAIDGEVSVSDSVSTQANEQLRSALEDAILRYRSTSTSRPRLPRLPTNRRNLVLMGALNALLAPYLRTSEDLVDTHSILYCGAIAACRVARVKFPDTDRAPRPADGAPAWQVRIEKRITTFRTLIAKLVCFSRGNHRPQVMRFVAQAFTGTGIRPQDYMACATERIDFLKQKVYAWASRIRRYRERVDRYQQNRLFQSDQRKVYRNWEGTSQRVVDGQLPDANAMNEFWRSIWSVPVEHTEGDWMRVVERVCEPIESMGSITIDPEDISCAIRTAQNWKSPGPDGLHNFWIKWIRCSYPCLAIQFQEALEAGSLPSFMTTGVTFLLHKSGSTTEAKNYRPITCLPTLYKLLTSILRTKINSHIVANNILAPAQNGCRVGSRGTKELLLIDTAICQQVRRNRGALSTAWIDYKKAYDSVPHSWLERILELYKIDATLRSFLSACMRQWTTVLRQPGGGESVSDPQDFIRIERGIFQGDSLSPLWFCLALNPLSTLLGDSGLGYRLRRGSEIISHLLYMDDLKLFAPQRPQLIELLKITENFSNSINMEFGVDKCAVMHVHGGKVVNSTNLQLSETMTLRSLSESETYRYLGMSESLGISVGDVKRTVKERFFCRLTKVLNSLLSGGNKTRAFNGWVMPLLMYSFGILRWTQTELDALDRKVRQLLTSHRMLHPRSSVMRLYIPRKWGGRGFLNAKTLHNREVCSLRDYFLNNECGMHRDVVAVDKGLTPLSLANENWRKPVVLSTEDRRDVWKGKELHGRFYRALTGPDVDLHASVNWLRFGDLFGETEGFVCAIADEVIKTNNYRKYIMKDGTVDICRACRRPGESLRHIISGCSHLANGEYLHRHNLVARIIHQQLALQYGLVESEVPYYKYTPGPVLENGRALLYWDRSIITDRTIVANKPDIVLVDRSQRRAVLVDITIPHDENLVKAEKDKLSKYLDLAHEVTAMWNVDSTSIVPIVVSANGLIAKSLDQHLERLSLDGWIKGQIQKAVLLDTARIVRRFLTLQP

SEQ ID NO: 5732 - protein, 1209 aa, Cydia splendana
MQTRSKTRAQLASPRNARPPPPSASSVSSQSSSGDEFATAPDTSESSDECGPPPPPSRPPARRGRPPLSARLGPAGHPAPPTAPAAGGVVRRMRWSQTINENVMRAYYGATEGGTNLCAYRVRMLPLFQALEPTIDVTAQRLSDQVRVIQRQKRLDDSTLDRLRLEALSARAASTSARDPPATSPDPVPAPDQAPGAPRVDLSADEEEFAQSVGSTANEQLRRTLDEAITRYRSTPDTRPRLPRLPMNRHNLALMGALNALLEPYLRTSKDLDDTHAIMYCGAIAACRVARVKFPDSERAPRTAGGAPVWQIRIERRISSFRTLIAKLICFRGGNNRPRVMRFVNQAFVGTDIRPRDYMANVTERINFLKQKVYAWANRIRRYRERVDRFQQNRLFQSDQRKMYRRWEETNPRASDSRPPDATVMNDFWRSIWSVPVGHTEGSWMSVVERECESIEPMGAVTISPDDVSCAIRTAQNWKSPGPDGLHNFWLKWFRCSHSYLAAQFQQALELGSLPPSLTTGVTFLLYKSGSTTEAKNYRPITCLPTLYKLLTSILRAKINAHIVANNILASAQNGCRVGSRGTKELLLIDMTICQQIRRTKGALSAAWIDYKKAYDSVPHAWLGRVLELYKVDAALRAFLSACMGQWTTVLRQPGGGDDRPGPQDFIRIERGIFQGDSLSPLWFCLALNPLSTLLKDLGLGCRLWREGEVISHLLYMDDLKLFAPNTQGLLELLKTTEVFSSAINMEFGVDKCAVMHVQRGKVVNSTNLQLSETMSFRSISESETYKYLGMSQSLGIEDEGIRRSVKERFFSRLTKVLNSLLSGGNKVRAFNAWVMPLLTYSFGILRWTQTELDALDRRVRSLLTTHRMLHPRSSVMRLYIPRKCGGRGFLNAKDLHNREVYNLRNYFLNNECGMHRDVVAVDRNLTPLSLANENWRKPVVLSTADRKAAWESKALHGRFYKALTGPDVDLLASVNWLRFGDLFGETEGFACAIADEVMMTNNYRKYILKDGTVDICRACRRPGESLRHIISGCSHLANGEYLHRHNLVARIIHQQLALLYGLVDREVPYYKYLPAPVLENGRATLYWDRSIITDRTIVANKPDIVLIDRSQRRAVLADVTIPHDENLVKAEKDKSSKYLDLAHEITAMWDVDSTIIVPIVVSANGLIAKSLDHHLERLSLGGWTKGQMQKAVILDTARIVRRFLTLRP

SEQ ID NO: 5733 - protein, 1118 aa, Cydia splendana
MRWTRNMNENVMRAYYGATEGGTQLSAYRSRILPLFQALEPTITVSEQRLSDQVRVIQRLKRLDDATLDRLRQEALSARADPTSVRDLPVTSPDPVPAPDLAPGAPRVDFSTDEGNFASQNVSTTANEQLRRTLEEAITQYRATTNSRPRLPRLPMNRRNLALMGALNALLEPHLRTSKDLDDTHSIMYCGAIAACRVARVKFPDAERAPRTVGGVPAWQARIEQRISSFRTLIAKLICFRGGNNRPRVMRFVNQAFAGTDIRPRDYMANVTERIDFLKQKVYAWANRIRRYRERVDRFQQNRLFQGDQRKVYRKWEETNLRTPDTQPPDVTAMTDFWRSIWSVPVGHTEGGWMSVVERECESIEPMGAVTISPDDVSCAIRTAQNWKSPGPDGLHNFWLKWFRCSHSCLAAQFQQALELGSLPPSLTTGVTFLLYKSGSTTEAKNYRPITCLPTLYKLLTSILRAKINAHIVANNILASAQNGCRVGSRGTKELLLIDMTICQQIRRNKGALSAAWIDYKKAYDSVPHSWLGRVLELYKVDAALRAFLSACMRQWTTVLRQPGGRDDRPGPQDFIRIERGIFQGDSLSPLWFCLALNPLSTLLKDLGLGCRLRREGEVISHLLYMDDLKLFAPNSQDLLELLKTTDVFSSAIHMEFGVDKCAVMHVQRGRVVNSTNLQLSETMSFRSISESETYKYLGMSQSLGIEDEGIRRSVKERFFSRLTKVLNSLLSGGNKVRAFNAWVMPLLTYSFGILRWTQTELDALDRRVRSLLTAHRMLHPRSSVMRLYIPRKCGGRGYLNAKDLHNHEVYNLRNYFLNNECGMHRDVVAVDRNLTPLSLANENWRKPVVLSTADRKAAWESKVLHGRFYKALTGPDVDLLASVNWLRFGDLFGETEGFACAIADEVMMTNNYRKYILKDGTVDICRACRRPGESLRHIISGCSHLANGEYLHRHNLVARIIHQQLALLYDLVDREVPYYKYLPAPVLENGRATLYWDRSIITDRTIVANKPDIVIIDRSQRRAVLVDITIPHDENLVKAEKDKSSKYLDLAHEITAMWDVDSTIIVPIVVSVNGLIAKSLDQHLERLSLGGWIKGQMQKAVILDTARIVRRFLSLQP

SEQ ID NO: 5734 - protein, 1208 aa, Cydia splendana
MITRSKARSQASTTANARPPPSPVSSVSSQSSGDEFATAPDTSESSDECGPPPPPPRPPARRGRPPLPARLGPAGHLAPPTAPAAGGVVRRMRWSQTMNENVMRAYYGATEGGTDLCAYRVRMLPLFQALEPTIDVTAQRLSDQVRVIQRLKRLDDSTLDRLRLEALSARAASTSVRDPPATSPDPVPAPDQAPEAPRVDLCADEEEFAQSVSSTANEQLRRTLDEAITQYRSTPNTRPRLPRLPMNRHNLALMGALNALLEPYLRTSKDLDDTHAIMYCGAIAACRVARVKFPDSERAPRTAGGAPAWQIRIERRISSFRTLIAKLICFRGGNNRPRVMRFVNQAFAGTDIRPRDYMANITERIDFLKQKVYAWANRIRRYRERVDRFQQNRLFQSDQRKMYRKWEETNPRASDSQPPDANVMNDFWRSIWSVPVGHTEGSWMSVVERECESIEPMGAVTISPDDVSCAIRTAQNWKSPGPDGLHNFWLKWFRCSHSCLAAQFQQALELGSPPPSLTTGVTFLLYKSGSTTEAKNYRPITCLPTLYKLLTSILRAKINAHIVANNILASAQNGCRVGSRGTKELLLIDMTICQQIRRNRGALSAAWIDYKKAYDSVPHSWLERVLELYKVDTALRAFLSACMRQWTTVLRQPGGGDESPGPQDFIRIERGIFQGDSLSPLWFCLALNPLSTLLKDLELGCRLRRGGEVISHLLYMDDLKLFAPNSQDLVELLKTTEVFTNAINMEFGVDKCAVMHVQRGKVVNSTNLQLSETMSFRSISESETYKYLGMSQSLGIEEEGIRRSVKERFFSRLTKVLNSLLSGGNKVRAFNAWVMPLLTYSFGILRWTQTELDALDRRVRSLLTTHRMLHPRSSVMRLYIPRKCGGRGFLNAKDLHNREVYNLRNYFLNNECGMHRDVVAVDRNLTPLSLANENWRKPVVLSTADRKAAWESKVLHGRFYKALTGPDVDLLASVNWLRFGDLFGETEGFACAIADEVMMTNNYRKYILKDGTVDICRACRRPGESLRHIISGCSHLANGEYLHRHNLVARIIHQQLALLYGLVDREVPYYKYSPAPVLENGRATLYWDRSIITDRTIVANKPDIVLIDRSQRRTVLVDVTIPHDENLVKAEKDKSSKYLDLAHEITAMWDVDSTIIVPIVVSANGLIAKSLDQHLERLSLGGWIKGQMQKAVILDTARIVRRFLTLRP

SEQ ID NO: 5735 - protein, 1208 aa, Cydia splendana
MITRSRAKAVTTSARPPPPPASSTSSSTSSSGDEFATAPDTDGSSDESGPPPPPPRPPARRGRPPLPARLGPAGHPAPPTAPATGGIVRRMRWTRDMNENVMRAYYGATEGGTQLSAYRSRILPLFQTLEPTITVSEQRLSDQVRVIQRLKRLDDATLDRLRQEALSARADSISVRDLPATSPDPVPAPDLAPGAPRVDFCTDEGDFVSQNVSTTANEQLRRTLEEVITQYRATTNSRPRLPRLPMNRRNLALMGALNALLEPHLRTSKDLDDTHSILYCGAIAACRVARVKFPDAERAPRTVGGVPAWQARIERRISSFRTLIAKLICFRGGNNRPRVMRFVNQAFAGTDIRPRDYMANVTERIDFLKQKVYAWANRIRRYRERVDRFQQNRLFQSDQRKVYRKWEETNLRTPDTQPPDATAMTDFWRSIWSMPVGHTEGGWMSVVERECEFIEPMGAVTISPDDVSCAIRTAQNWKSPGPDGLHNFWLKWFRCSHSRLAAQFQQALELGSLPPSLTTGVTYLLYKSGSTTEAKNYRPITCLPTLYKLLTSILRAKINAHIVANNILASAQNGCRVGSRGTKELLLIDMTICQQIRRNKGALSAAWIDYKKAYDSVPHSWLGRVLELYKVDAALRAFLSACMRQWTTVLRQPGGGDDPPDPQYFIRIERGIFQGDSLSPLWFCLALNPLSTLLKDLGLGCRLRREGEIISHLLYMDDLKLFAPNSQDLSELLKTTEGFSSAINMEFGVDKCAVMHVQRGRVVNSTNLQLSETMSFRSISESETYKYLGMSQSLGIEDEGIRRSVKERFFSRLTKVLNSLLSGGNKVRAFNAWVMPLLTYSFGILRWTQTELDALDRRVRSLLTTHRMLHPRSSVMRLYIPRKCGGRGFLNAKDLHNREVYNLRNYFLNNECGMHRDVVAVDRNLTPLSLANENWRKPVVLSTADRKAAWESKVLHGRFYKALTGPDVDLLASVNWLRFGDLFGETEGFACAIADEVMMTNNYRKYILKDGTVDICRACRRPGESLRHIISGCSHLANGEYLHRHNLVARIIHQQLALLYGLVDREVPYYKYLPAPVLENGRATLYWDRSIITDRTIVANKPDIVIIDRSQRRAVLVDITIPHDENLVKAEKDKSSKYLDLAHEITAMWDVDSTIIVPIVVSVNGLIAKSLDQHLERLSLGGWIKGQMQKAVILDTARIVRRFLSLQP

SEQ ID NO: 5736 - protein, 1212 aa, Agriopis aurantiaria
MITRSRTKQADTKSARLPSPPASSSSPSTSSGEDEYHTTREASGSSSDTSGPGTPPPPPPARRGRPPLPARLGLVGHSATRPAPATGGVVRRMRWSTIMNEDCMRAYYRATEGGTNLSAYCARMLPLFQALQPTITVSAQRLSDQVRAIHRCKLLDDSVLDRLRQEELRARPIPVSTRDLPVASSAPTLASVPASVVTLAASADPVVDEGDLASGVSDQVREQLRGALEDAISQYRFTPDSRPRLPRLSTHRRNLALMGALNALLAPYLRASEDLVDTHSILYCGAIAACRVARVKFPDTNRAPRTAGGVPAWQVRIERRISTFRTLIAKLVCFRRGNNRPRVMRFVTQAFAGTDIRPQHYLANVTERIDYLKQKVYAWANRIRRYRERVDRYWQNRLFQSDQKKVYRGWEETDQRVSDGQLPDASAMINFWRGIWSVPVEHTEGDWMRVVERECESIEPMGSILIDSIDVSCAIRTAQNWKSPGPDGLHNFWIKWIRCSHDRLATQFQEALELGSLPSFMTTGVSFLLHKSGSTTEAKNYRPITCLPTIYKLLTSILRNKINAHIVENNVLAHAQNGCRVGSRGTKELLLIDTAISQQVRRNKGALSAAWIDYKKAYDSVPHSWLERVLELYKIDTTLKSFLGACMRQWTTVLRQPGGGDGAFGPQDLLRIERGIFQGDSFSPLWFCLALNPLSTLLRDSGLGYRLRRDGQVISHLLYMDDLKLFTPKRQDLVELLKITEGFSSAIRMEFGVDKCAVMHVQRGKVVNSPNLQLSEVMTLRSLSEAETYKYLGMSESLGISVENIKKSVKERFFCRLTKVLNSLLSGGNKVRAFNGWVMPLLIYSFGILRWTQTELDALDRRVRQLLTSHRMLHPRSSVMRLYIPRKWGGRGFLNAKNLHNREVCSLRDFFRNSESGMHRDVVAVDRGLTALSLANENWRKPSVLSIEDRRDVWKGKELHGRFYRALTGPDVDLLASVNWLRFGDLFGETEGFACAIADEVIKTNNYRKYIMKDGTVDICRACHRPGESLRHIISGCSHLANGEYLHRHNLVARIIHQQLALRYSLVESEVPYYKYAPAPVLENGRALLYWDRSIITDRTIVANKPDIVLVDRSQRRAVLVDITIPHDENLVKAEKDKLRKYLDLAHEVTAMWDVDSTIIVPIVVSVNGLIAKSLDQHLKRLSLDGWVKGQMQKAVILDTARIVRRFLTLQP

SEQ ID NO: 5737 - protein, 1208 aa, Ennomos fuscantarius
MILRSKTKTADNKCARLPPLPVSSSPSSSSGDEYATPPDTTASSDDDGLPSPPPPPPPARRGRPPLPARLGPVGQPAPRPAPAAGGVVRRMRWTQTMNENCMRAYYGATEGGSSRTAYRDRMLSLFQELEPSISVSAQRLSDQMRAIHRCKLLDQSALDRLRLETLPIPATSPSPRVLSAALPDPGPIVGPPLVTPLGGPVIDGEESVSDSVSTQVNEQLRSALEDAILRYRSTPTSRPRLPRLPTNRRNLVLMGALNTLLGPYLRTSEDLVDTHSILYCGAIAVCRVARVKFPDTDRAPRPADGAPAWQVRIEKRITTFRTLIAKLVCFSRGNHRPRVMRFVTQAFAGTGIRPQDYMACVTERIDFLKQKVYAWASRIRRYRERVDRYQMNRLFQSDQRKVYRDWEGTGQRVVDGQLPDANVMNEFWRSIWSVPVDHSEGDWIRVVKHVCEPIESMGSITIDPEDISCAIRTAQNWKSPGPDGLHNFWIKWIRCSYPCLAIQFQEALEAGSLPKFMTTGITFLLHKSGSTMEAKNYRPITCLPTLYKLLTSILRTKINSHITANNILASAQNGCRVGSRGTKELLLIDTAICQQVRRNRGALSTAWIDYKKAYDSVPHSWLKRVLELYKINATLRSFLSACMGQWTTVLRPPGGGDSVSDPQNFIRIERGIFQGDSLSPLWFCLALNPLSTLLGDSGLGYRLRRGGEIISHLLYMDDLKLFAPQRPQLMKLLKITENFSNSIKMEFGVDKCAVMHVHGGKVVNSTNLQLSETMTLRSLSESETYKYLGMSESLGISVGDVKQSVKERFFCRLTKVLNSLLSGGNKARAFNAWVMPLLMYSFGILRWTQTELDALDRKVRQVLTSHRMLHPRSSVMRLYIPRKWGGRGFLNAKNLHNREMYSLREYFLSNECGMHRDVVAVDKGLTPLSLANENWRKPVILSTDDRRDVWKGKELHGRFYRALTGPDVDLHASVNWLRFGDLFGETEGFVCAIADEVIKTNNYRKYIMKDGTVDICRACRRPGESLRHIISGCSHLANGEYLHRHNLVARIIHQQLALQYGLVESEVPYYKYTPGPVLENGRALLYWDRSIITDRTIVANKPDIVLIDRSQRRAVLVDIAIPHDENLVKAEKDKLSKYLDLAHEVTAMWSVDSTSIVPIVVSANGLIAKSLDQHLERLSLDGWIKGQIQKAVLLDTARIVRRFLTLEP

SEQ ID NO: 5738 - protein, 1118 aa, Ennomos fuscantarius
MRWTQTMNENCMRAYYGATEGGSSLTAYRDRMLSLFQELEPSISVSAQRLSDQVRAIHRCKLLDQSALDRLRLETLPIPATSPSPRVLSAALPDPGPIVGPPLVTPLGGPVIDGEESVSDSVSTQVNEQLRSALEDAILRYRSTPTSRPRLPRLPTNRRNLVLMGALNTLLGPYLRTSEDLVDTHSILYCEAIAVCRVARVKFPDTDRAPRPADGAPAWQVRIEKRITTFRTLIAKLVCFSRGNHRPRVMRFVTQAFAGTGIRPQDYMACVTERIDFLKQKVYAWASRIRRYRERVDRYQMNRLFQSDQRKVYRDWEGTGQHVVDGQLPDANVMNEFWRSIWSVPVDHSEGDWIRVVKHVCEPIESMGSITIDPEDISCAIRTAQNWKSPGPDGLHNFWIKWIRCSYPCLATQFQEALEAGLLPKFMTTGITFLLHKSGSTTEAKNYRPITCLPTLYKLLTSILRTKINSHITANNILAPAQNGCRVGSRGTKELLLIDTAICQQVRRNRGALSTAWIDYKKAYDSVPHSWLKRVLELYKINATLRSFLSACMGQWTTVLRQPGGGDSVSDPQNFIRIERGIFQGDSLSPLWFCLALNPLSTLLGDSGLGYRLRRGGEIMSHLLYMDDLKLFAPQRPQLMKLLKITENFSNSIKMEFGVDKCAVMHVHGGKVVNSTNLQLSETMTLRSLSESETYKYLGMSESLGISVGDVKQSVKERFFCRLTKVLNSLLSGGNKARAFNAWVMPLLMYSFGILRWTQTELDALDRKVRQVLTSHRMLHPRSSVMRLYIPRKWGGRGFLNAKNLHNREMYSLREYFLSNECGMHRDVVAVDKGLTPLSLANENWRKPVVLSTDDRRDVWKGKELHGRFYRALTGPDVDLHASVNWLRFGDLFGETEGFVCAIADEVIKTNNYRKYIMKDGTVDICRACRRPGESLRHIISGCSHLANGEYLHRHNLVARIIHQQLALQYGLVESEVPYYKYTPGPVLENGRALLYWDRSIITDRTIVANKPDIVLIDRSQRRAVLVDIAIPHDENLVKAEKDKLSKYLDLAHEVTAMWSVDSTSIVPIVVSANGLIAKSLDQHLERLSLDGWIKGQIQKAVLLDTARIVRRFLSLQP

SEQ ID NO: 5739 - protein, 1215 aa, Hedya salicella
MQRYFTRSQNTRKISTAATPTHARPTPPPASSCSPSASSDDFATAPDTSESSDDECGPPPPPPRPPARRGRPPLPARLGPAGHSAPPTAPATGGIVRRMRWSQANNENVMRAYYGATEGGTHLSAYRDRMLLLFQTFEPAIAASAQRLSDQVRAIQRRKLLDDATLDRLRLEVLAARAASTSSRNPPATSPVPAPALDLMPGAPRVDPDSDEGHCVSIVSTQANEQLRRTLEETIERYRFAPDSRPRLPRLPANKRNLALVGALNALLDPYLRASEDLADTHSIMYCGAIAACRVARVKFPDADRAPWTAGGVPAWQVRIERRIRTFRTLIAKLICFRGGNNRPRVMRYVAQAFAGTDVSSCDYMACVTERIDFLKQKVYAWASRIRRYRERVDRFQQNRLFQSDQRKVYRKWEGTDQRVTDGRLPDPTAMSNFWRSIWSVPVEHTEGEWMNVVERECEPIEAMGAVTISPDDVSCAARTTQNWKSPGPDGLHNFWVKWFRCSHERLATQFQQALELGSLPSFLTTGVTFLLYKSGSTTEAKNYRPITCLPTLYKLLTSILRAKINTHIVANNVLAFSQNGCRVGSRGTKELLLIDTTICQQVRRSRGSLSAAWIDYKKAYDSVPHSWLERILELYKVDTALRSFLGACMRQWTTVLCQPGGRDARPAPQDFIRIKRGIFQGDSLSPLWFCLALNPLSTLLKDSGLGCRLRRGGEIISHLMYMDDLKLFAPKRPELVELLKVTDTFSSAIKMEFGVDKCAVMHVQRGKVVNSTNLELSETMSLRSLSETETYKYLGMSQALSIADGDIRQAVKERFFCRLTKVLNSLLSGGNKARAFNAWVMPLLTYSFGILRWTQTELDALDRRVRMLLTTHRMLHPRSSVMRLYIPRKCGGRGFLNAKDLHNREVCSLREYFLNNECGIHRDVVAVDKGLTPLSLANENWRRPTVLSTVDRKDVWKSKELHGRFYKALTGPDVDLLASVNWLRFGDLFGETEGFSCAIADEVIMTNNYRRYILKDGTVDICRACRRPGESLRHIMSGCSYLANGEYLHRHNQVARIIHQQLAVKYDLVGSEVPYYKYVPMPVVENGRATLYWDRSILTDRTIVANKPDIVLVDRSKRRAMLVDITIPHDENLVKAEKDKLSKYLDLAHEVTAMWDVDSTIIVPIVVSVNGLIAKSLDEHLKRLSLDGWIKGQIQKAVILDTARIVRRFLSVQP

SEQ ID NO: 5740 - protein, 1238 aa, Erannis defoliaria
MKPDSQMSTQTKENFVKSEKMKTYIMITRSKKRNAAVQHARPTPPPVPSSSPSSSSPSEEEFHTCGTSSSSEDVSGPRTLTPPIPVRRGRPPLPARLGPAGQPASRPALTAGGVVRRMRWSQTNNENCMRAYYGATEGGTNLTAYRVRMLSLFQTLEPTVTVSAQRISDQVRAIQRLNLLDQPLLDRLRLEVQSARPTPASTRDLDVASSAPTLASVPTSAATLATSADPVLDEGDCTGMSVSTQVSEQLRRALEDAIGQYRFALNSRPRLPRLPTHRRNLALMGALNALLAPYLRASEDLTDTHSILYCGAIAACRVARVKFPDTNRAPRPAGDVPAWQLRIERRISTFRTLIAKLICFSRGNNRPRVMRFVTQAFAGTGIRPQQYMASVTERIDYLKQKVYAWANRIRRYRERVDRYWQNRLFQSDQRKVYRNWEGTEQRVSDGQLPDASAMTNFWRGIWSVPVEHTEGDWMRVVERECESIEPMGSILIDPVDVSYAIRTAQNWKSPGPDGLHNFWIKWFRCSHDRLATQFQEALELGSLPSFMTTGVTFLLHKSGSTTEPKNYRPITCLPTIYKLLTSILSTKINAHIVANNVLAPAQNGCRVGSRGTKELLLIDMAISQQVRRNKGALSAAWIDYKKAYDSVPHSWLERILELYQIDTTLKSFLGACMRQWTTVLRQPGGGNGSSDSQDLIRIERGIFQGDSLSPSWFCLALNPLSTLLKDSGLGYRLRRGGEVISHLLYMDDLKLFAPKHQDLLELLKTTQVFSSAIRMEFGVDKCAVMRVQRGKVVNSPDLQLSEIMTLRSLSEAETYKYLGMSESLGISVVDIKKSVKERFFCWLTKVLNSLLSGGNKARAFNGWVMPLLIYSFGILRWTQTELDALDRRVRQLLTAHRMLHPRSSVMRLYIPRKWAGRGFLNAKNLHNREVCSLRDYFLNNECGMHRDVVTVDKGLTPLSLANENWRRPSVISTDDRKEVWKSKELHGRFYRALTGPDVDLLASANWLRFGDLFGETEGFACAIADEVIKTNNYRKYIMKDGTVDICRACHRPGESLRHIISGCSHLANGEYLHRHNQVARIIHQQLALQYGLVESEVPYYKYAPAPVLENGRALLYWDRSIITDRTIVANKPDIVMVDRSQRRAVLVDVTIPHDENLVKAEKDKLSKYLDLAFEITAMWDVDSTIIVPIVVSANGLIAKSLDQYLKRLSLDGWVKGQIQRAVVLDTARIVRRFLTLQP

SEQ ID NO: 5741 - protein, 1215 aa, Erannis defoliaria
MITRSQSRRNTAERNARPPSPPAPSSPSASSGDDVFLTPRESSVSSSNSDVSGPRTPAPPPPARRGRPPLPARLGPAGQPASRPALAAGGVVRRMRWSQTNNENCMRAYYGATEGGTNLSAYRVRMLPLFQALEPTVTVSAQRLSDQVRAIQRLNLLDQSLLDRLRLEAQSARPTPASTRDLDVASSAPTLALVPTSAATLVTSADPVVDEGDCTGMSVSTQVSEQLRRALEDAIGQYRFTPNSRPRLPRLPTHRRNLALMGALNALLAPYLRASDDLTDTHSILYCGAIAACRVARVKFPDTNRAPRPAGDVPAWQLRIERRISTFRTLIAKLICFSRGNNRPRVMRFVTQAFAGTGIRPQQYMANVTERIDYLKQKVYAWANRIRRYRERVDRYWQNRLFQSDQRKVYRNWEGNEQRVSDGQLPDASAMTNFWRGIWSVPVEHTEGDWMRVVERECESIEPMGSILIDPVDVSCAIRTAQNWKSPGPDGLHNFWIKWFRCSHDRLATQFQEALELGSLPSFMTTGVTFLLHKSGSTTEPKNYRPITCLPTIYKLLTSILSTKINAHIVANNVLAPAQNGCRVGSRGTKELLLIDMAISQQVRRNKGALSAAWIDYKKAYDSVPHSWLERILELYQIDATLKSFLSACMRQWTTVLRQPGGGNGSSDSQDLIRIERGIFQGDSLSPSWFCLALNPLSTLLKDSGLGYRLRRGGEVISHLLYMDDLKLFAPKHQDLLELLKTTQVFSSAISMEFGVDKCAVMRVQRGKVVNSPDLQLSEIMTLRSLSEAETYKYLGMSESLGISVVDIKKSVKERFFCRLTKVLNSLLSGGNKARAFNGWVMPLLIYSFGILRWTHTELDALDRRVRQLLTAHRMLHPRSSVMRLYIPRKWGGRGFLNAKNLHNREVCSLRDYFLNNECGMHRDVVTVDKGLTPLSLANENWRTPSVLSTDDRKEVWKSKELHGRFYRVLSGPDVDLLASVNWLRFGDLFGETEGFACAIADEVIKTNNYRKYIMKDGTVDICRACHRPGESLRHIISGCSHLANGEYLHRHNQVARIIHQQLALQYGLVESEVPYYKYAPAPVLENGRALLYWDRSIITDRTIVANKPDIVMVDRSQRRAVLVDVTIPHDENLVKAEKDKLSKYLDLAFKITAMWDVDSTIIVPIVVSANGLIAKSLDQYLKRLSLDGWVKGQIQKAVVLDTARIVRRFLTLQP

SEQ ID NO: 5742 - protein, 955 aa, Biston betularia
MGALNALLAPYLRASEDLTDTHSILYCGAIAACRVARVKFPDTNRAPRPAGGVPAWQLRIERRISTFRTLIAKLICFSRGNNRPRVMRFVTQAFAGTGIRPQHYLASVTERIDYLKQKVYAWANRIRRYRERADRYWQNRVFQSDQRKVYRDWEGTGQRVSDRQLPDTSVMTEFWRGIWSLPVEHTEGDWMRVVERECESIESMGSVLIDPVDVSCAIRTAQNWKSPGPDGLHNFWIKWIRCSHDRLATQFQEALELGSLPCFMTTGVTFLLHKTGSTTEAKNYRPITCLPTIYKLLTSILRTKINAHVVANNVLAPAQNGCRVGSRGTKELLLIDMTISQQVRRNKGALSTAWIDYKKAYDSVPHSWLERVLELYKIDTTLKSFLGACMRQWTTVLRQPGSGDGSSEPQDLIRIERGIFQGDSLSPLWFCLALNPLSTLLKESGLGHRLRRGGEVISHLLYMDDLKLFAPKRPDLMELLKTTQVFSNAIKMEFGVDKCAVMHVQRGEVVNCPDLQLSETMTFRSLSEAETYKYLGMSESLGIAVVDIKRSVKERFFCRLTKVLNSFLSGGNKVRAFNGWVMPLLIYSFGILRWTQTELDALDRRVRQQLTTHRMLHPRSSVMRLYIPRKLGGRGFLSTKNLHNREVCSLRDYFRDNECGMHRDVVAVDKGLTPLSLANENWRKPSVLSTEDRKEVWKSKQLHGRFYRVLTGPDVDMLASVNWLRFGDLFGETEGFACAIADEVIKTNNYRKYIMKDGTVDICRACHRPGESLRHIISGCSHLANGEYLHRHNQVARIIHQQLALQYGLVESEVPYYKYAPAPVLENGRALLYWDRSIITDRTIVANKPDIVVVDRAQRRAVLVDITIPHDENLVKAEKDKLSKYLDLAHEITAMWDVDSTIIVPIVVTVNGLIAKSLDQHLKRLSLDGWVKGQLQNAVILDTARIVRRFLTLQP

SEQ ID NO: 5743 - protein, 1198 aa, Biston betularia
MWTRSRTAAASGLHDAHIPSPPAPSTPSASSGDEEFATPLATSASSSSSDVSGPRTPAPPPPARRGRPPLPARLGPAGQSASRSALAAGGVVRRMRWSQTNNENCMRAYYGATEGGINLSAYRVRMLPLFQALEPTVAVSTQRLSDQVRAIQRLQLLDQSVLDRLRLEALPARPTPVSTRDSPVASSAPTLVSVPTSMATLATPTDPVVDVGECTSMGVCSQVSEHLRRTLEDAICQYRFAPDSRPRLPRLPTHRRNLALMGALNALLAPYLRASEDLTDTHSILYCGAIAACRVARVKFPDTNRAPRPAGGVPAWQLRIERRISTFRTLIAKLICFSRGNNRPRVMRFVTQAFAGTGIRPQHYLASVTERIDYLKQKVYAWANRIRRYRERADRYWQNRVFQSDQRKVYRDWEGTGQRVSDRQLPDTSVMTEFWRGIWSLPVEHTEGDWMRVVERECESIESMGSVLIDPVDVSCAIRTAQNWKSPGPDGLHNFWIKWIRCSHDRLATQFQEALELGSLPCFMTTGVTFLLHKTGSTTEAKNYRPITCLPTIYKLLTSILRTKINAHVVANNVLAPAQNGCRVGSRGTKELLLIDMTISQQVRRNKGALSTAWIDYKKAYDSVPHSWLETVLELYKIDTTLKSFLGACMRQWTTVLRQPGSGDGSSEPQDLIRIERGIFQGDSLSPLWFCLALNPLSTLLKESGLGHRLRRGGEVISHLLYMDDLKLFAPKRPDLMELLKTTQVFSNAIKMEFGVDKCAVMHVQRGEVVNCPDLQLSETMTFRSLSEAETYKYLGMSESLGIAVVDIKRSVKERFFCRLTKVLNSFLSGGNKVRAFNGWVMPLLIYSFGILRWTQTELDALDRRVRQQLTTHRMLHPRSSVMRLYIPRKLGGRGFLSTKNLHNREVCSLRDYFRDNECGMHRDVVAVDKGLTPLSLANENWRKPSVLSTEDRKEVWKSKQLHGRFYRVLTGPDVDMLASVNWLRFGDLFGETEGFACAIADEVIKTNNYRKYIMKDGTVDICRACHRPGESLRHIISGCSHLANGEYLHRHNQVARIIHQQLALQYGLVESEVPYYKYAPAPVLENGRALLYWDRSIITDRTIVANKPDIVVVDRAQRRAVLVDITIPHDENLVKAEKDKLSKYLDLAHEITAMWDVDSTIIVPIVVTVNGLIAKSLDQHLKRLSLDGGSRASFKRQ

SEQ ID NO: 5744 - protein, 1215 aa, Biston betularia
MWTRSRTAAASGLHDAHIPSPPAPSTPSASSGDEEFATPLATSASSSSSDVSGPRTPAPPPPARRGRPPLPARLGPAGQSASRSALAAGGVVRRMRWSQTNNENCMRAYYGATEGGINLSAYRVRMLPLFQALEPTVAVSTQRLSDQVRAIQRLQLLDQSVLDRLRLEALPARPTPVSTRDSPVASSAPTLVSVPTSMATLATPTDPVVDVGECTSMGVCSQVSEHLRRTLEDAICQYRFAPDSRPRLPRLPTHRRNLALMGALNALLAPYLRASEDLTDTHSILYCGAIAACRVARVKFPDTNRAPRPAGGVPAWQLRIERRISTFRTLIAKLICFSRGNNRPRVMRFVTQAFAGTGIRPQHYLASVTERIDYLKQKVYAWANRIRRYRERADRYWQNRVFQSDQRKVYRDWEGTGQRVSDRQLPDTSVMTEFWRGIWSLPVEHTEGDWMRVVERECESIESMGSVLIDPVDVSCAIRTAQNWKSPGPDGLHNFWIKWIRCSHDRLATQFQEALELGSLPCFMTTGVTFLLHKTGSTTEAKNYRPITCLPTIYKLLTSILRTKINAHVVANNVLAPAQNGCRVGSRGTKELLLIDMTISQQVRRNKGALSTAWIDYKKAYDSVPHSWLERVLELYKIDTTLKSFLGACMRQWTTDLRQPGSGDGSSEPQDLIRIERGIFQGDSLSPLWFCLALNPLSTLLKESGLGHRLRRGGEVISHLLYMDDLKLFAPKRPDLMELLKTTQVFSNAIKMEFGVDKCAVMHVQRGEVVNCPDLQLSETMTFRSLSEAETYKYLGMSESLGIAVVDIKRSVKERFFCRLTKVLNSFLSGGNKVRAFNGWVMPLLIYSFGILRWTQTELDALDRRVRQQLTTHRMLHPRSSVMRLYIPRKLGGRGFLSAKNLHNREVCSLRDYFRDNECGMHRDVVAVDKGLTPLSLANENWRKPSVLSTEDRKEVWKSKQLHGRFYRVLTGPDVDMLASVNWLRFGDLFGETEGFACAIADEVIKTNNYRKYIMKDGTVDICRACHRPGESLRHIISGCSHLANGEYLHRHNQVARIIHQQLALQYGLVESEVPYYKYAPAPVLENGRALLYWDRSIITDRTIVANKPDIVVVDRAQRRAVLVDITIPHDENLVKAEKDKLSKYLDLAHEITAMWDVDSTIIVPIVVTVNGLIAKSLDQHLKRLSLDGWVKGQLQKAVILDTARIVRRFLTLQP

SEQ ID NO: 5745 - protein, 1207 aa, Blastobasis lacticolella
MITRSKRKNQTVNAQPPPTPAPVSSSPSSSNDEFTTASDTSESSDERGLSAAPPPPPARRGRPLPARLGPTGRPAPPMAPATGSVVRRMRWTQSINENVMRAYYGATEGGTNLSAYRDRMLPLFQVLEPAIDVTAQRLSDQVRAIQRLKRLDDSVLDRLRLESLPVRAVPISTMSLPATSPPQVSPPSPAPRVPRTDATVGVEDCTNVSSVSTETNEYVRRTLEETIARYRFAPNSRPRLPRLPTNRRNLALMGAINVLLDSYIRASDNLVDTHSIMYCGAITACRVARVKFSDADRAPRVAGGAPAWQKRIERRINTFRILIAKLICFKEGNNRPRVMRFVDQAFAGTGISSRDYMACATECIDFLKQKVCAWANRIRRYRERVDRFRLNRLFQSDQRKVYRKWEGTNQSGSDGSLPDASASNNFWRSIWSVPVEHSEGDWMNVVKRECEIIEPMAAVSICPEDVSCAIDTAQNWKYPGPDGLHNFWIKWFRCSHERLATQFQEALEHGSLPTLFTTGITFLLYKSGSTTEAKNYRPITCLPTLYKLLTSILRKKINNHIIENNILAMSQNGCRLGSRGTKELLLIDMTICQQVRRSRGSLSAAWIDYKKAYDSVPHSWLRRVLELYKINATLRSFLDACMRQWITVLSQPVGGIDHSPPQDFIRIERGIFQGDSLSPLWFCLALNPLSTLLKHSELGCRLRREGEIISHLLYMDDLKLFAPKRQDLMELLKITEIFSNAIRMEFGADKCAVMHVQRGKVANTTNLQLSETMSFRSLSEAETYKYLGMSQSLGIVDEGVKQAVKERFFCRLTKVLNSLLSGGNKVRSFNAWVMPLLTYSFGILRWTQTELDALDRRVRLLLTTHRMLHPRSSVMRLYIPRKCGGRGFLSAKTLHNREVCSLRDYFLNNECGMHRAVVAVDRGLTPLSLANENWRKPKVLSTIDRKDVWKSKELHGRFYRALTGPDVDLLASVNWLRFGDLFGETEGFVCAIADEVIMTNNYRRYILKDGTVDICRACRCPGESLRHITSGCGRLANGEYLHRHNLVARIIHQQLALQYGLVESEVPYYKYVPAPVLENGLATLYWDRSVITDRTIVANRPDIVLTDRSKRRAVLVDVTIPHDGNLVKAEKDKQCKYLDLAHEVTAMWDVDSTIIVPIVVSVNGLIAKSLDQHLKILSLDGWVKGQIQKAVLLETARIVRRFLSLQP

SEQ ID NO: 5746 - protein, 1207 aa, Apotomis turbidana
MITRSRRKKAEQTNARPPPPPASSSSSPSSSGDEFATAADTSESSDERGPPPPPPQPPARRGRPQLPARLGPTGQPAPTTAPATGGVVRRMRWTRVMNENCMRAYYGATEGGINLSAYRDRMLPLFQVFDPTIAVSAQRLSDQVRFIQRRKLLDDATLDRLRLEVLAARAASVPARDPPATSPVPAPAPNLVPGVPLTDPEADVEDYASIVSTQANEQLRRALEEAIGRYRSAPEPRLRLPRLPIHKRNLALMGALDALLDPYLRASEDLADTHSIMYCGAIAACRVARVRFPDTDRAPRTARGVPAWQVRIERRISSFRTLIAKLICFRGGNNRPRVMRYVTQAFAGTGTRPCDYMACVTERIDYLKQKVYAWASRIRRDRERVDRFQQNRLFQSDQRKVYRKWEGADQCVSDGQLPDPTAMINFWRSIWSVPVEHTEGEWMNVVRRECEPIEAMGAVTISPDDVRCAARTIQNWKSPGPDGLHNFWIKWFRSSHERLATQFQDALELGSLPSFMTTGVTFLLHKSGSTTEAKNYRPITCLPTLYKLLTSILRTKINTHIVANNVLAFSQNGCRVGSRGTKELLLIDTTICQQVRRNRGSLSTAWIDYKKAYDSVPHSWLERILELYKIDTALRSLLGACMRQWTTVLRQPGGGDGPPGPQDLIRIERGIFQGDSLSPLWFCLALNPLSTLLKDSGLGCRLRRGGEVISHLLYMDDLKLYAPKLQDLVELLEVTEAFSSAIKMEFGVDKCAVMHVQRGKVVNSANLQLSETMSLRSISEVETYKYLGMSQSLGIADGDIRQALKERFFCRLTKVLNSLLSGGNKARAFNAWVMPLLTYSFGILRWTQTELDALDTRVRQLLTTHRMRHPRSSVMRMYIPRKCGGRGFLNAKDLHNREVCSLREYFLNNECGIHRDVVAVDKGLTSLSLANENWRRPKVLSTDDRRAVWKSKELHGRFYKALTGPDVDLLASVNWLRFGDLFGETEGFVCAIADEVMMTNNYRRYILKDGTVDICRACRRPGESLRHIISGCSHLANGEYLHRHNQVARIIHQQLALRYGLVGSEVPYYKYAPMPVLENGRATLYWDRSIITDRTIVANKPDIVLVDRSKRQAVLVDITIPHDENLVKAEKDKLSKYLDLAHEVTAMWDVDSTSIVPIVVSANGLIAKSLDKHLKRLSLDGWIKGQIQKAVLLDTARIVRRFLSLQP

SEQ ID NO: 5747 - protein, 858 aa, Notocelia uddmanniana
MRFVNQAFAGTGVRPRDYVTCVTERIDFLKQKVYAWASRIRRYRERVDRYQQNRLFQSVQRKVYRKWEGTDHRVCDGQRPDATAMGNFWRSIWSAPVEHTEGAWIGVVERECESIEPMGSVTISPEDISCAIRTAPNWKSPGPDELHNFWLKWFRCSHERLATQFQQALELGSLPHLLTTGVTSLLYKSGSTTEAKNYRPITCLPTLYKLLTSILRAKINTHIVANNILAPAQNGCRVGSRGTKELLLIDMTIFQRVRRSRGALSAAWIDYKKAYDSVPHSWLRRILELYKVDAALRSFLSACMGQWTIVLRQPGGGDGSSGPQDSIRIERGIFQGDSLSPLWFCLALNPLSTLLKDSGLGCQLRRGGEVISHLLYMDDLKLFAPNRQDLLELLKTTEVFSSAIKMEFGVDKCAVMHVQRGKVVNSTNLQLSETMSLRSLSEAETYKYLGMSQSLGIEGEGIKQAVKERFFCRLTKVLNSFLSGGNRVRAFNAWVMPLLTYSFGILRWTQTELDALDRRVRVLLTTHRMLHPRSSVMRLYIPRKCGGRGFLNAKDLHNREVCSLRDYFLNSECGMHRDVVAVDASFTPLSMANENWRRFKVLSTEDRKAEWKSRELHGRFYKALTGPDVDLLASVNWLRFGDLFGETEGFVCAIADEVIMTNNYRKYILKDGTVDICRACRRPGESLRHIISGCVHLANGEYLHRHNLVARIIHQQLALSYGLVNFEVPYYKYLPAPVLENGRATLYWDRSIITDRTIVANKPDIVLIDRSKRQAVLVDITIPHDENLVKAEKDKVSKYLDLAHEVTAMWDVDSTIIVPIVVSANGLIAKSLDQHLKILSLDGWVKGYRRRYSWTRRG

SEQ ID NO: 5748 - protein, 1210 aa, Notocelia uddmanniana
MITRSQTRRVQASQQSARPSPSPASSSSASASSEEEFATAPDTSSSSSDECGPPPPPPRPPARRGRPPLPARLGPAGHPVPHTAPATGGVVRRMQWSPSMNENCMRAYYGATDGGTNLSAYRVRMLPLFQALEPAISVSAQRLSDQVRVIQRLKRLDDATLDRLRLEALSARAASVSARNPPATLPAPVPAPDTAPGASRVDPSADGDCADQSVITQAHEQLRRALDEAITRYRSTPNSRPRLPRLPVNRRNLALMGALNDLLDPYLRASDDLIDTHSIMYCGAIAACRVARVKFPDADRATRTAGGVHAWQVRIERRINTFRTLIAKLICFRGGNNRPRVMRFVNQAFAGTGVRPRDYMACVTERIDFLKQKVYAWASRIRRYRERVDRYQQNRLFQSDQRKVYRKWEGTDHRVCDGQRPDATAMVNFWRSIWSVPVEHTEGAWIGVVERDCESIEPMGSVTISPEDVSCAIRTAPNWKSPGPDGLHNFWLKWFRCSHERLATQFQQALELGSLPPPLTTGVTSLLYKSGSTTEAKNYRPMTCLPTLYKLLTSILRAKINMHIVTNNILAPAQNGCRVGSRGTKELLLIDMTICQRVRRNRGTLSASWIDYKKAYDSVPHSWLRRILELYKVDAALRSFLSACMGQWTTVLRQPGGGDGPSGPQDSIRIERGIFQGDSLSPLWFCLALNPLSTLLQDSGLGCQLRRGGEVISHLLYMDDLKLFAPNRQDLLELLKTTEVFSSAIKMEFGVDKCAVMHVQRGKVVNSTNLQLSETMSLRSLSEAETYKYLGMSQALGIEGEGIKQAVKERFFCRLTKVLNSFLSGGNKARAFNAWVMPLLTYSFGILRWTQTELDALDRRVRVLLTAHRMLHPRSSVMRLYIPRKCGGRGFLNAKDLHNREVCSLRDYFLNSECGMHRDVVAVDASFTPLSMANENWRRFKVLSTEDRKAEWKSKELHGRFYRALTGPDVDLLASVNWLRFGDLFGETEGFVCAIADEVIMTNNYRRYILKDGTVDICRACRRPGESLRHIISGCGHLANGEYLHRHNLVARIIHQQLALSYGLVDFEVPYYKYLPAPVLENGRATLYWDRSIITDRTIVANKPDIVLIDRSKRQAVLVDITIPHDENLVKAEKDKVSKYLDLAHEVTAMWDVDSTIIVPIVVSANGLIAKSLDQHLKRLSLDGWVKGQIQKAVLLDTARIVRRFLSLSP

SEQ ID NO: 5749 - protein, 1134 aa, Notocelia uddmanniana
MHPAPSTAPATGGAVRRMRWTQEINENCMRAYFGATEGGTNLSAYRVRMLSLFQALEPTITVTAQRLSDQVRVIQRNKRLDDSTLDRLRLESLSARLASTSARDLPSATPALVPTFDTAPGVSRVDPNADEDYATQSVSTQAHEQLGRALEDAIRRYRSTPNSRPRLPRLPVNRRNLALMGALNDLLDPYLRASDDLIDTHSIMYCGAIAACRVARVKFPDADRAPLTVGSIPAWQVRIERRVNTFRTLIAKLICFRGGNSRPRVMRFVSQAFAGSGVRPRDYLACVTERIDFLKQKVHAWASRIRRYRERVDRYQQNRLFQSDQRKVYRKWDGTDHHVCDGQRPDATAMVSFWRSIWSVPVEHTEGAWMGVVERECESIEPMESVTISPEDVSCAIRTAPNWKSPGPDGLHNFWLKWFRCSHARLAAQFQQALELGSLPRPLTTGVTSLLYKSGSTTEAKNYRPITCLPTLYKLLTSILRAKINTHIVANNILAPAQNGCRVGSRGTKELLLIDMTICQRVRRNKGTLSAAWIDYKKAYDSVPHSWLRRVLELYKVDAALRSFLAACMEQWTTVLRQSGGGEGLSGAQDFIRIERGIFQGDSLSPLWFCLALNPLSTLLKDSGLGCQLRREGEVISHLLYMDDLKLFAPNKHDLFELLKTTEVFSSAIKMEFGVDKCAVMHVQRGKVVNSTNLQISETMALRSLSEAETYKYLGMSQSLGIEGGDIKQAVRERFFCRLTKVLNSFLTGGNRVRAFNAWVMPLLTYSFGILRWTQTELDFLDRRVRVLLTAHRMLHPRSSVMRLYIPRKFGGRGFLNAKDLHNREVCSLRDYFLNSKCEMHRGVVAVDASFTPLSMANGNWRRFKVLSTEDRKAVWKSKELHGRFYKALTGPDVDLLASVNWLRFGDLFAETEGFVCAITDEVIMTNNYRKYILKDGTVDICRACRRPGESLRHIISGCGHLANGEYLHRHNLVAKIIHQQLALLYGLVNFEVPYYKYTSAPVLENGRATLYWDRSVITDRTIIANKPDIVLTDRLKRQAVLVDITIPHDENLVKAEKDKASKYLDLAHEITAMWDVDSTIIVPIVVSANGLIAKSLDQHLKRLSLDGWVKGQIRKAVLLDTARIVRRFLSLSP

SEQ ID NO: 5750 - protein, 1206 aa, Notocelia uddmanniana
MNTRLRSRAEQRARLPSPPAPSSSSPSSSDDEFATAPDSSESSSDERGPSPPPPQTSARRGRRPLPARLGPTGHSAPPTAPAAGGVVRRMRWTQEMNENCMRAYFGATEGETNLSAYRVRMLPLFQALEPTITVSAQRLSDQVRVIQRNKRLDDLTLDRLRLEALSARAAPTSARDLPATSPAPVPAPNTAPRAPRVDPSADGDCADQSVSTQAHEQLRRALDEAITRYRSTPNSRPRLPRLPVNRRNLALMGALNDLLDPYLRASDDLIDTHSIMYCGAIAACRVARVKFPDADRATRTAGGVPAWQVRIERRINTFRTLIAKLICFRGGNNRPRVMRFVNQAFAGTGVRPRDYMACVTERIDFLKQKVYAWASRIRRYRERVDRYQQNRLFQSDQRKVYRKWEGTDHRVCDGQRPDATVMVNFWRSIWSVPVEHTEGAWIGVVERDCESIEPMGSVTISPEDVSCAIRTAPNWKSPGPDGLHNFWLKWFRCSHERLATQFQQALELGSLPPPLTTGVTSLLYKSGSTTEAKNYRPITCLPTLYKLLTSILRAKINTHIVTNNILAPAQNGCRVGSRGTKELLLIDMTICQRVRRNRGTLSASWIDYKKAYDSVPHSWLRRILELYKVDAALRSFLSACMGQWTTVLRQPGGGDGPSGPQDSIRIERGIFQGDSLSPLWFCLALNPLSTLLQDSGLGCQLRRGGEVISHLLYMDDLKLFAPNRQDLLELLKTTEVFSSAIKMEFGVDKCAVMHVQRGKVVNSTNLQLSETMSLRSLSEAETYKYLGMSQALGIEGEGIKQAVKERFFCRLTKVLNSFLSGGNKARAFNAWVMPLLTYSFGILRWTQTELDALDRRVRVLLTAHRMLHPRSSVMRLYIPRKCGGRGFLNAKGLHNREVCSLRDYFLNSECGMHRDVVAVDASFTPLSMANENWRRFKVLSTEDRKAEWKSKELHGRFYRALTGPDVDLLASVNWLRFGDLFGETEGFVCAIADEVIMTNNYRKYILKDGTVDICRACRRPGESLRHIISSCGHLANGEYLHRHNLVARIIHQQLALSYGLVDFEVPYYKYLPAPVLENGRATLYWDRSIITDRTIVANKPDIVLIDRSKRQAVLVDITIPHDENLVKAEKDKVSKYLDLAHEVTAMWDVDSTIIVPIVVSANGLIAKSLDQHLKRLSLDGWVKGQIQKAVLLDTARIVRRFLSLSP

SEQ ID NO: 5751 - protein, 955 aa, Notocelia uddmanniana
MGALNDLLVPYLGASEDLIDTHSIMYCGAIAACRVARVKFPDADRAPRTAGSVPTWQVRIERRVDTYRTLIAKLICFRGGNSRPRVMRFVNQAFAGTGIRPRDYMTCVTERIDFLKQKVYAWASRIRRYRERLDRYQQNRLFQSDQRKVYRKWDGTDHRVSDGQRPDATAMVNFWRSIWSVPVEHNEGAWMGVVERECESIEPMGSVTISPADVSCAIRTAPNWKSPGPDGLHNFWLKWFRCSHARLAAQFQQALELGSLPPPLTTGVTSLLYKSGSTTEAKNYRPITCLPTLYKLLTSILRAKINTHIVANNILAPAQNGCRVGSRGTKELLLIDMTICQRVRRNRGTLSTAWIDYKKAYDSVPHSWLRRILELYKVDAVLRSFLVACMGQWTTVLRQPGGGEGPSGPQDSIRIERGIFQGDSLSPLWFCLALNPLSTLLKDSGLGCQLRREGEVISHLLYMDDLKLFAPNKHDLLELLKTTEAFSSAIKMEFGVDKCAAMHVQRGKVVNSTNLQISETMDLRSLSEAETYKYLGMSQSLGIEGGDIKRAVKERFFCRLTKVLNSFLSGGNRVRAFNAWVMPLLTYSFGILRWTQTELDFLDRRVRVLLTAHRMLHPRSSVMRLYIPRKFGGRGFLNAKDLHNREVCSLRDYFPNSECGMHRDVVAVDASFTPLSMANENWRRLKVLSTEDRRAVWKSKELHGRFYKALTGPDVDLLASVNWLRFGDLFAETEGFVCAIADEVIMTNNYRRYILKDGTVDICRACRRPGESLRHIISGCGHLANGEYLHRHNLVAKIIHQQLALLYGLVDFEVPYYKYTPAPVLENGRATLYWDRSVITDRTIIANKPDIVLTDRLKRQAVLVDITIPHDENLVKAEKDKVSKYLDLAHEVTAMWDVDSTIIVPIVVSANGLIAKSLDQHLKRLSLDGWVKGQMQKAVLLDTARIVRRFLSLSP

SEQ ID NO: 5752 - protein, 1114 aa, Notocelia uddmanniana
MQWSQSINENCMRAYYGATDGGTNLSAYRDRMLPLFRALEPAISVSAQRLSDQVRVIQRLKRLDDATLDRLRLEALSARAASASARNPSATLPAPVPALDTAPGADPSADEGCANQSVSSQAYEQLRRALEEAITQYRSTPNSRPRLPRLPVNRCNLALMGALNDLLVPYLGASEDLIDTHSIMYCGAIAACRVARVKFPDADRAPRTAGSVPTWQVRFERRVDTYRTLVANLICFRGGNSRPRVIRFVNQVFAGTGIRPRDYMTCVTERIDFLKQKVYAWASRIRRYRERLDRYQQNRLFQSDQRKVYRKWDGTDHRVSDGQRLDATAIVNFWRSIWSVPVEHNEGAWMGVVERECESIEPMGSVTISPADVRCAIRTAPNWKSPGPDGLHNFWLKWFRCSHARLAAQFQQALELGSLPPPLTTGVTSLLYKSGSTTEAKNYRPVTCLPTLYKLLTSILRAKINTHIVANNILAPAQNGCRVGSRGTKELLLLDMTICQRVRRNRGTLSTAWIDYKKAYDSVPHSWLRRILELYKVDAVLRSFLVACMGQWTTVLRQPGGGEGPSGPQDSIRIERGIFQGDSLSPLWFCLALNPLSTLLKDSGLGCQLRREGEVISHLLYMDDLKLFAPNKHDLLELLITTEAFSSAIKMEFGVNKCAAMHVQRGKVVNSTNLQISETMEFRSLSETETYKYLGMSQSLGIEGGDIKRALKERFFCRLTKVLNSFLSGGNRVRAFNAWVMPLLTYSFGILRWTQTELDFLDRRVRVLLTAHRMLHPRSSVMRLYIPRKFGGRGFLNAKDLHNREVCSLRDYFLNSECGMHRDVVAVDASFTPLSMANENWRRLKVLSTEDRRAVWKSKELHGRFYKALTGPDVDLLASVNWLRFGDLFAETEGFVCAIADEVIMTNNYRKYILKDGTVDICRACRRPGESLRHIISGCGHLANGEYLHRHNLVAKIIHQQLALLYGLVDFEVPYYKYTPAPVLENGRATLYWDRSVITDRTIIANKPDIVLTDRLKRQAVLVDITIPHDENLVKAEKDKVSKYLDLAHEVTAMWDVDSTIIVPIVVFANGLIAKSLDQHLKRLSLDGWVKGQMQKAVLLDTARIVRRFLSVSP

SEQ ID NO: 5753 - protein, 1207 aa, Crocallis elinguaria
MITRSRNKAGTASARQSPPPASSSPSSSSGDEYGTPLDTSASSDEDGPPSPPPPPPPARRGRPPLPARLGPAGHSVPRAAPATGGIVRRMRWTSDMNENCMRAYYGATEGGTNMSAYRDRMLPLFQTLEPSVAVSAQRLSDQVRAIQRLKLLDESVLDRLRLEALPIRATSASTRDLSVAPPVLAPLPAPSSVATRIDPVVDEDDCANMSVSTQVNEQLRRALEDAILDYQYTLDSRPRLPRLPTNRRNLALMGALNVLLAPYLRASENLFDTHSIMYCGAIAVCRVARVKFPDADRAPRTAGSAPAWQVRIERRINTFRTLIAKLICFSRGNNRPRVMRFVNQAFAGTGIRPQNYMAGVTERIDFLKQKIYAWVNRIRRYRERVDRYHQNRLFESDQRKVYRNWEGTDQRVSDGQLPDTNAMINFWRGIWSVPVEHTEGDWMRTVEQSCESIETMGSVTIDPIDVSCAIRTAQNWKSPGPDGLHNFWIKWIRCSHECLAVQFQEALELGSLPCFLTTGVTSLLHKSGSTTEAKNYRPITCLPTLYKLLTSILRVKINSHVVANNILAPAQNGCRVGSRGTKELLLIDTAICQRVRRNRGALSAAWIDYKKAYDSVPHSWLERILELYKIDATLRSFLGMCMRQWTTVLRQPDSGNSPSGPENFIKIERGIFQGDSLSPLWFCLALNPLSTLLRDSRLGCQLRREGEIISHLLYMDDLKLFAPKRPDLMELLKITEIFSSAIKMEFGVDKCAVMHVQRGKVVNSDNLQLSETMTLRSLSEAETYKYLGMSQSLGIAVGDIKQSVKERFFFRLTKVLNSLLSGGNKARAFNGWVMPLLIYSFGILKWTQTELDSLDRRVRQLLTYHRMLHPRSSVMRLYIPRKWGGRGFLNAKTLHNREVCSLREYFLNNECGMHRDVVAVDRNLTPLSLANENWRKPVVMTTEDRKDVWKGKELHGRFYRALTGSDVDLLASVNWLRFGDLFGETEGFVCAIMDEVIKTNNYRKYIMKDGTVDICRACRRPGESLRHIISGCSHLANGEYLHRHNLVARIIHQQIALQYGLVESEVPYYKYAPAPVLENGRALLYWDRSIITDRTIVANKPDIVLVDRSQRRAVLVDITVPHDENLVKAEKDKLSKYLDLAHEVTAMWNVDSTIIVPIVVSANGLVAKSLDQHLKRLSLDGWIKGRMQKAVLLDTARIVRRFLTLQP

SEQ ID NO: 5754 - protein, 1207 aa, Crocallis elinguaria
MITRSRNKAGTASARQPPPPASSSPSSSSGDEYGTPLDTSASSDEDGPPSLPPPPPPARRGRPPLPARLGPAGHSVPRAAPATGGIVRRMRWTSVMNENCMRAYYGATEGGINMSAYRDRMLPLFQTLEPSVAVSTQRLSDQVRAIQRLKLLDESVLDRLRLEALPIRATSASTRDLSVAPPVPAPLPAPSSVATRIDPVVDEDDCANISVSTQVNEQLRRALEDAILEYQYTPDSRPRLPRLPTNRRNLALMGALNVLLAPYLRGSENLFDTHSIMYCGAIAVCRVARVKFPDADRAPRTAGNAPAWQVRIERRINTFRTLIAKLICFSRGNNRPRVMRFVNQAFAGTGIRPQNYMAGVTERIDFLKQKIYAWVNRIRRYRERVDRYHQNRLFESDQRKVYRNWEGTDQRVSDGQMPDTNAMINFWRGIWSVPVEHTEGDWMRTVEQSCESIETMGSVTIDPIDVSCAIRTAQNWKSPGPDGLHNFWIKWIRCSHECLAVQFQEALELGSLPCFLTTGVTSLLHKSGSTTEAKNYRPITCLPTLYKLLTSILRAKINSHVVANNILAPAQNGCRVGSRGTKELLLIDTAICQQVRRNRGALSTAWIDYKKAYDSVPHSWLERILELYKIDTTLRSFLSTCMRQWTTVLRQPGSGNSPSGPENFIKIERGIFQGDSLSPLWFCLALNPLSTLLRDSRLGCKLRREGEIISHLLYMDDLKLLAPKSPDLMKLLKITEIFSSAIKMEFGVDKCAVMHVQRGKVVNSDNLQLSETMTLRSLSEAETYRYLGMSQSLGIAVGDIKQSVKERFFCRLTKVLNSLLSGGNKARAFNGWVMPLLIYSFGILKWTQTELDSLDRRVRQLLTYHRMLHPRSSVMRLYIPRKWGGRGFLNAKTLHNREVCSLREYFLNNECGMHRDVVAVDRNLTPLSLANENWRKPVVMTTEDRKDVWKGKELHGRFYRALTGSDVDLLASVNWLRFGDLFGETEGFVCAIMDEVIKTNNYRKYIMKDGTVDICRACRRPGESLRHIISGGSHLANGEYLHRHNLVARIIHQQIALQYGLVESEVPYYKYAPAPVLENGRALLYWDRSIITDRTIVANKPDIVLVDRSQRRAVLVDITVPHDENLVKAEKDKLSKYLDLAHEVTAMWNVDSTIIVPIVVSANGLVAKSLDQHLKRLSLDGWIKGRMQKAVLLDTARIVRRFLTLQP

SEQ ID NO: 5755 - protein, 1210 aa, Pammene fasciana
MITRAQTKAAQQQRARPPPSPTPSSSSPSSSGDEYATAPDANISESSSDERGSSPSPPPPPARRGKRPLPARLGPAGQPAPPTAPAAGGPVRRMRWTPSINENVMRAYFGATVGGTQLSAYRSKMLPLFQALEPTITVSEQRLSDQVRVIQRLKRLDDATLDRLRLEALSAHAASASTRDPPATSPDPMPAPGRASGAPRVDPSVDEEFTCQSVSTSANEQLRRALEEAITQYRSTNNSRPRLPRLPMNRRNLAIIGALNDLLDPLVRTSKDLDDTHSIMYCGAIAACRVARVKFPDAERAPRTAGGVPAWQVRIERRINSFRTLIAKLICFRGGNDRPRVMRFVNQAFAGTGIEPRDYMANITERIDFLKQKVYAWANRIRRYRKRVERFQQNRLFQSDQRKVYRRWEETDPRVSDAQLPDATAMTDFWRSIWSVPVEHTEGEWMSVVERECETIEPMGATTISPDDVSCAIRTSQNWKSPGPDGLHNFWLKWFRCSHSRLATQFQQALELGSLPPSLTTGVTFLLYKSGSTTEAKNYRPITCLPTLYKLLTSILRAKINAHIVANNILASAQNGCRVGSRGTKELLLIDMTICQRVRRNRGALSAAWIDYKKAYDSVPHSWLERILELYKVDATLRSFLGACMRQWTTVLRQPGGGDDPLGPQDSIRIKRGIFQGDSLSPLWFCLALNPLSTLLKDSGLGCQLRREGEAISHLLYMDDLKLFAPNNRDLMELLKTTEVFSSSIKMEFGVDKCAVMHVQRGKVVNSTNLQLSETMTFRSISESETYKYLGMSQSLGIEDAGIKQALRERFFGRLTKVLNSLLSGGNKVRAFNAWVMPLLTYSFGILRWTQTELDALDRRVRLLLTTHRMLHPRSSVMRLYIPRKCGGRGFLNAKNLHNREVYNLRNYFLNNECGMHRDVLAVDKGLTPLSLANENWRKPVVLSTEDRKMVWKSKELHGRFYKALMGPDVDLLASVNWLRFGDLFGETEGFACAIADEVIMTNNYRRYILKDGTVDICRACRRPGESLRHIISGCSHLANGEYLHRHNLVARIIHQQLALQYGLVNREVPYYMYLPAPVLENGRVTLYWDRSIITDRTIVANRPDIVLIDRSQRRAVLVDVAIPHDENLVKAEKDKSSKYLDLAHEITAMWDVDSTIIVPVIVSANGLIAKSLDQHLERLSLGGWIKGQIQKAVVMDTARIVRRFLSLRP

SEQ ID NO: 5756 - protein, 1209 aa, Pammene fasciana
MITRSRTKAASTNARPPSSPASSVSSPSSSGDEFATAPDTSESSDECGPPPPPPRPPARRGRPPLPARLGLAGHPVPPRAPAAGGIVRRMRWTPAMNENVMRAYYGATEGGTNLSAYRDRILPLFQALEPTIDTTAQRLSDQVRAIQRLKRLDDATLDRLRLEALSAHADSTSVRDPPATSPDPMPVPDLASGAPRIDPSADEEYIASQSMSSTANEQLRRTLEEAITQYRSTNIPRPRLPRLPMNRRNLALMGALNDLLDPILRTSKDLDDTHSIMYCGAIAACRVARVKFPDAERAPRTAGGVPVWQVRIERRINSFRTLIAKLICFRGGNNRPRVMRFVHQAFAGTGIEPRDYMANVTERIDFLKQKVYAWASRIRRYRERVDRFRQNRLFQSDQRKIYRRWEEADPRVSDVRLPDATAMTDFWRSIWSAPVEHTEGEWMSVVERECESIEPMGAITINPDDVSCAIRTAQNWKSPGPDGLHNFWLKWFRCSHSRLATQFQQALELGSLPPSLTTGVTFLLYKSGSTTEAKNYRPITCLPTLYKLLTSILRAKINAHIVANNILASSQNGCRVGSRGTKELLLIDMTICQRVRRNRGALSATWIDYKKAYDSVPHSWLERILELYKVDAALRSFLGACMRQWTTVLRQPGGGDDPPDPHDFIRIERGIFQGDSLSPLWFCLALNPLSTLLKDSGLGCRLRREGEVISHLLYMDDLKLFAPNNRDLMELLKTTEVFSSSIKMEFGVDKCAVMHVQRGKVVNSTNLQLSETMTFRSISESETYKYLGMSQSLGIEDAGIKQALKERFFGRLTKVLNSLLSGGNKVRAFNAWVMPLLTYSFGILRWTQTELDALDRRVRLLLTTHRMLHPRSSVMRLYIPRKCGGRGFLNAKNLHNREVYNLRNYFLNNECGMHRDVVAVDKSLTPLSLANENWRKPVVLSTEDRKAVWKSKELHGRFYGALTGPDVDLLASVNWLRFGDLFGETEGFACAIADEVIMTNNYRRYILKDGTVDICRACRRPGESLRHIISGCSHLANGEYLHRHNLVARIIHQQLALLYGLVDHEVPYYKYTPAPVLENGRATLYWDRSIITDRTIVANKPDIVIIDRSQRRAMLVDITVPCDVNLVKAEKDKSSKYLDLAHEVTAMWEVDSAIIVPIVVSANGLIAKSLDQHLERLSLRGCGWIKGQIQKAVILDTARIVRRFLSLRP

SEQ ID NO: 5757 - protein, 1205 aa, Pammene fasciana
MITRSRTKAASTNARPPSSPASSVSSPSSSGDEFATAPDTSESSDECGPPPPPPRPPARRGRPPLPARLGLAGHPVPPRAPAAGGIVRRMRWTPAMNENVMRAYYGATEGGTNLTAYRDRILPLFQALEPTIDTTAQRLSDQVRAIQRLKRLDDATLDRLRLEALSARADSTSVRDPPATSPDPMPVPDLASGALRIDPSADEEYIASQSMSSTANEQLRRTLEEAITQYRSTNIPRPRLPRLPMNRRNLALMGALNDLLDPILRTSKDLDDTHSIMYCGAIAACRVAQVKFPDAERAPRTAGGVPVWQVRIERHINSFRTLIAKLICFRGGNNRPRVMRFVHQAFAGTGIEPRDYMANVTERIDFLKQKVYAWASRIRRYRERVDRFRQNRLFQSDQRKVYRRWEEADPRVSDVRLPDATAMTDFWRSIWSAPVEHAEGEWMSVVERECESIEPMGAITISPDDVSCAIRTAQNWKSPGPDGLHNFWLKWFRCSHSRLATQFQQALELGSLPPSLTTGVTFLLYKSGSTTEAKNYRPITCLPTLYKLLRAKINAHIVANNILASSQNGCRVGSRGTKELLLIDMTICQRVRRNRGALSAAWIDYKKAYDSVPHSWLERILELYKVDAALRSFLGACMRQWTTVLRQPGGGDDPPDPHDFIRIERGIFQGDSLSPLWFCLALNPLSTLLKDSGLGCRLRREGEVISHLLYMDDLKLFAPNNRDLMELLKTTEVFSSSIKMEFGVDKCAVMHVQRGKVVNSTNLQLSETMTFRSISESETYKYLGMSQSLGIEDAGIKQALKERFFGRLTKVLNSLLSGGNKVRAFNAWVMPLLTYSFGILRWTQTELDALDRRVRLLLTTHRMLHPRSSVMRLYIPRKCGGRGFLNAKNLHNREVYNLRNYFLNNECGMHRDVVAVDKSLTPLSLANENWRKPVVLSTEDRKAVWKSKELHGRFYGALTGPDVDLLASVNWLRFGDLFGETEGFACAIADEVIMTNNYRRYILKDGTVDICRACRRPGESLRHIISACSHLANGEYLHRHNLVARIIHQQLALLYGLVDHEVPYYKYTPAPVLENDRATLYWDRSIITDRTIVANKPDIVVIDRPQRRAMLVDITVPCDVNLVKAEKDKSSKYLDLAHEVTAMWEVDSAIIVPIVVSANGLIAKSLDQHLERLSLRGCGWIKGQIQKAVILDTARIVRRFLTLRP

SEQ ID NO: 5758 - protein, 1212 aa, Pammene fasciana
MITRSKTRLQQASPPNARPPSSPASSVSSQSSSGDEFATAPDTSESSDERGPPPPPPRPPARRGRPPLPARLGLAGHPAPPRAPAAGGIVRRMRWTQTMNENVMRAYYGATEGGTNLCAYRVRLLPLFRALEPTTNVTAQRLSDQVRVIQRDKRLDDSTLDRLRLEALSAHAASTSARDPPATAPDPMPAPDLASGAPRVDPSADEEEIATQSVSSTANEQLRRTLEEAITQYRSTNIPRPRLPRLPMNRRNLALMGALNDLLDPFLRTSKDLDDTHSIMYCGAIAACRVARVKFPDAERAPRTAGGVPAWQVRIERRINSFRTLIAKLICFRGGNNRPRVMRFVHQAFAGTDIEPRDYMANVTERIDFLKQKVYAWASRIRRYRERVDRFRQNRLFQSDQRKVYRRWEEADPRVSDVRLPDATAMSDFWRSIWSAPVEHTEGEWMSVVERECETIEPMGAITISPDDVSCAIRTAQNWKSPGPDGLHNFWLKWFRCSHSRLATQFQQALELGSLPPSLTTGVTFLLYKSGSTTEAKNYRPITCLPTLYKLLTSILRAKINAHMVANNILASAQNGCRVGSRGTKELLLIDMTICQRVRRNRGALSAAWIDYKKAYDSVPHSWLERILELYKIDAALRSFLGACMRQWTTVLRQPGGGDDPPGPQDFIRIERGIFQGDSLSPLWFCLALNPLSTLLKDSGLGCRLRREGEVISHLLYMDDLKLFAPNNRDLLELLKTTEVFSSSIKMEFGVDKCAVMHVQRGKVVNSTNLQLSETMTFRSISESETYKYLGMSQSLGIEDAGIKQALRERFFGRLTKVLNSLLSGGNKVRAFNAWVMPLLTYSFGILRWTQTELDALDRRVRQLLTTHRMLHPRSSVMRLYIPRKCGGRGFLNAKNLHNREVYNLRNYFLNNECGMHRDVVAIDKGLTPLSLANENWRKPVVLSTEDRKAVWKSKELHGRFYGALTGPDVDLLASVNWLRFGDLFGETEGFACAIADEVIMTNNYRRYILKDGTVDICRACRRPGESLRHIISGCSHLANGEYLHRHNLVARIIHQQLALLYGLVDHEVPYYKYTPAPVLENGRATLYWDRSIITDRTIVANKPDIVVIDRPQRRAMLVDITVPCDVNLVKAEKDKSSKYLDLAHEVTAMWEVDSAIIVPIVVSANGLIAKSLDQHLERLSLRGCGWIKGQIQKAVILDTARIVRRFLSLRP

SEQ ID NO: 5759 - protein, 1212 aa, Pammene fasciana
MITRSKTRLQQASPPNARPPSSPASSVSSPSSSGDEFATAPDTSESSDERGPPPPPPRPPARRGRPPLPARLGLAGHPVPPRAPAAGGIVRRMRWTQSMNENVMRAYYGATEGGTNLCAYRDRMLPLFQALEPTIDTTAQRLSDQVRVIQRLKRLDDATLDRLRLEALSARAASTSARDPPATSLDPMPASDLASGAPRIDPSADEEEIANQSVSSTANEQLRRTLEEAITQYRSTNITRPRLPRLPMNRRNLALMGALNDLLDPLLRTSKDLDDTHSIMYCGAIAACRVARVKFPDAERAPRTAGGVPAWQVRIERRINSFRTLIAKLICFRGGNNRPRVMRFVHQAFAGMDIEPRDYMANVTERIDFLKQKVYAWASRIRRYRERVDRFRQNRLFQSDQRKVYRRWEEADPRVSDVRLPDATAMTDFWRSIWSAPVEHTEGEWMSVVERECESIEPMGAITISPDDVSCAIRTAQNWKSPGPDGLHNFWLKWFRCSHSRLATQFQQALELGSLPPSLTTGVTFLLYKSGSTTEAKNYRPITCLPTLYKLLTSILRAKINAHMVANNILASAQNGCRVGSRGTKELLLIDMTICQRVRRNRGALSAAWIDYKKAYDSVPHSWLERILELYKIDAALRSFLGACMRQWTTVLRQPGGGDDPPGPQDFIRIERGIFQGDSLSPLWFCLALNPLSTLLKDSGLGCRLRREGEVISHLLYMDDLKLFAPNNRDLLELLKTTEVFSNSIKMEFGVDKCAVMHVQRGKVVNSTNLQLSETMTFRSISESETYKYLGMSQSLGIEDAGIKQALRERFFGRLTKVLNSLLSGGNKVRAFNAWVMPLLTYSFGILRWTQTELDALDRRVRLLLTTHRMLHPRSSVMRLYIPRKCGGRGFLNAKNLHNREVYNLRNYFLNNECEMHRDVVAIDKGLTPLSLANENWRKPVVLSTEDRKAVWKSKELHGRFYGALTGPDVDLLASVNWLRFGDLFGETEGFACAIADEVIMTNNYRRYILKDGTVDICRACRRPGESLRHIISGCSHLANGEYLHRHNLVARIIHQQLALLYGLVDHEVPYYKYTPAPVLENGRATLYWDRSIITDRTIVANKPDIVIIDRSQRRAMLVDITVPCDVNLVKAEKDKSSKYLDLAHEVTAIWEVDSTIIVPIVVSANGLIAKSLDQHLERLSLRGCGWIKGQIQKAVTLDTARIVRRFLSLRP

SEQ ID NO: 5760 - protein, 1208 aa, Ennomos quercinarius
MITRSRTRKAETQSARLPPPPAPSSPSSSSGDEYGTPPDTTASSDEDGPPSPPPPPPPARRGRPPLPARLGPAGQPAPRPAPATGGIVRRMRWTQAMNENCMRAYYGATEGGSSLTAYRDRMLSLFQDLEPAVAVSAQRLSDQVRAIQRCKMLDEPTLDRLRLEALPIRATSPSPRVLPAALPDPGPIMGPLPVTPRGDPAIDGEESASDSVSTQANEQLRSALEDAILRYRSTPTSRPRLPRLPTNRRNLVLMGALNTLLAPYLRTSEDLVDTHSILYCGAIAACRVARVKFPDPDRAPRPADGAPAWQVRIEKRITTFRTLIAKLVCFSRGNHRPRVMRFVTEAFAGTGIRPQDYMACVTERIDFLKQKVYAWASRIRRYRERVDRYQQNRLFQSDQRKVYRNWEGTGQRVVDGQLPDANAMNEFWRSIWSVPVEHTEGDWMRVVERVCEPIESMGSITIDPEDISCAIRTAQNWKSPGPDGLHDFWIKWIRCSYPCLAIQFQEALEAGSLPSFMTTGVTFLLHKSGSTTEAKNYRPITCLPTLYKLLTSILRTKINSHIVANNILAPAQNGCRVGSRGTKELLLIDTAICQQVRRNRGALSTAWIDYKKAYDSVPHSWLERILELYKIDATLRSFLSACMRQWTTVLRQPGGGESVSDPQDFIRIERGIFQGDSLSPLWFCLALNPLSTLLGDSGLGYRLRRGGEIISHLLYMDDLKLFAPQRPQLIELLKITENFSNSINMEFGVDKCAVMHVHRGKVVNSTNLQLSETMTLRSLPESETYRYLGMSESLGISVGDVKRTVKERFFCRLTKVLNSLLSGGNKTRAFNGWVMPLLMYSFGILRWTQTELDALDRKVRQLLTSHRMLHPRSSVMRLYIPRKWGGRGFLNAKTLHNREVCSLRDYFLNNECGMHRDVVAVDKGLTPLFLANENWRKPVVLSTEDRRDVWKGKELHGRFYRALTGPDVDLHASVNWLRFGDLFGETEGFVCAIADEVIKTNNYRKYIMKDGTVDICRACRRPGESLRHIISGCSHLANGEYLHRHNLVARIIHQQLALQYGLVESEVPYYKYTPGPVLENGRALLYWDRSIITDRTIVANKPDIVLVDRSQRRAVLVDITIPHDENLVKAEKDKLSKYLDLAHEVTAMWNVDSTSIVPIVVSANGLIAKSLDQHLERLSLDGWIKGQIQKAVLLDTARIVRRFLTLQP

SEQ ID NO: 5761 - protein, 1210 aa, Cydia splendana
MITRSQRRAAELTNNARPPPPPAPPSSSSTTSSGDEFATAPDTDGSSDESGPPPPPPRPPARRGRPPLPARLGPAGHPAPPTAPAAGGIVRRMRWTRNMNENVMRAYYGATEGGTQLSAYRSRILPLFQALEPTINVSEQRLSDQVRVIQRLKRLDDATLDRLRQEALSARADSTSVRDLPATSPDPVPAPDLAPGAPRVDFYTDEGDFASQNVNTTANEQLRRTLEEAITQYRVTTNSRPRLPRLPMNRRNLALMGALNALLEPHLRTSKDLDDTHSIMYCGAIAACRVARVKFPDTERAPRTVGGVPAWQARIERRIGSFRTLIAKLICFRGGNNRPRVMRFVNQAFAGTDIRPRDYMANVTERIDFLKQKVYAWANRIRRYRERVDRFQQNRLFQSDQRKVYRKWEEANLRAPDTQPPDATAMTDFWRSIWSVPVGHTEGGWMSVVERECESIEPMGAVTISPDDVSCAIRTAQNWKSPGPDGLHNFWLKWFRCSHSRLAVQFQQALELGSLPPSLTTGVTFLLYKSGSTTEAKNYRPITCLPTLYKLLTSILRAKINAHIVANNILASAQNGCRVGSRGTKELLLIDMTICQQIRRNKRALSAAWIDYKKAYDSVPHSWLGRVLELYKVDAALRAFLSACMRQWTTVLRQPGGGGDRSGPQDFIRIERGIFQGDSLSPLWFCLALNPLSTLLKDLGLGCRLRREGEVISHLLYMDDLKLFAPNSQDLLELLKTTEVFSSAIHMEFGVDKCAVMHVQRGRVVNSTNLQLSETMSFRSISESETYKYLGMSQSLGIEDEGIRRSVKERFFSRLTKVLNSLLSGGNKVRAFNAWVMPLLTYSFGILRWTQTELDALDRRVRSLLTAHRMLHPRSSVMRLYIPRKCGGRGFLNAKDLHNHEVYNLRNYFLNNECGMHRDVVAVDRNLTPLSLANENWRKPVVLSTADRRAAWESKVLHGRFYKALTGPDVDLLASVNWLRFGDLFGETEGFACAIADEVMMTNNYRKYILKDGTVDICRACRRPGESLRHIISGCSHLANGEYLHRHNLVARIIHQQLALLYDLVDREVPYYKYLPAPVLENGRATLYWDRSIITDRTIVANKPDIVIIDRSQRRAVLVDITIPHDENLVKAEKDKSSKYLDLAHEITAMWDVDSTIIVPIVVSVNGLIAKSLDQHLERLSLGGWIKGQMQKAVILDTARIVRRFLSLQP

SEQ ID NO: 5762 - protein, 1210 aa, Cydia splendana
MITRSQRRAAELTNNARPPPPPAPPSSSSTTSSGDEFATAPDTDGSSDESGPPPPPPRPPARRGRPPLPARLGPAGHPAPPTAPAAGGIVRRMRWTRNMNENVMRAYYGATEGGTQLSAYRSRILPLFQALEPTINVSEQRLSDQVRVIQRLKRLDDATLDRLRQEALSARADSTSVRDLPATSPDPVPAPDLAPGAPRVDFYTDEGDFASQNVNTTANEQLRRTLEEAITQYRVTTNSRPRLPRLPMNRRNLALMGALNALLEPHLRTSKDLDDTHSIMYCGAIAACRVARVKFPDTERAPRTVGGVPAWQARIERRIGSFRTLIAKLICFRGGNNRPRVMRFVNQAFAGTDIRPRDYMANVTERIDFLKQKVYAWANRIRRYRERVDRFQQNRLFQSDQRKVYRKWEEANLRAPDTQPPDATAMTDFWRSIWSVPVGHTEGGWMSVVERECESIEPMGAVTISPDDVSCAIRTAQNWKSPGPDGLHNFWLKWFRCSHSRLAVQFQQALELGSLPSSLTTGVTFLLYKSGSTTEAKNYRPITCLPTLYKLLTSILRAKINAHIVANNILASAQNGCRVGSRGTKELLLIDMTICQQIRRNKRALSAAWIDYKKAYDSVPHSWLGRVLELYKVDAALRAFLSACMRQWTTVLRQPGGGGDRSGPQDFIRIERGIFQGDSLSPLWFCLALNPLSTLLKDLGLGCRLRREGEVISHLLYMDDLKLFAPNSQDLLELLKTTEVFSSAIHMEFGVDKCAVMHVQRGRVVNSTNLQLSETMSFRSISESETYKYLGMSQSLGIENEGIRRSVKERFFSRLTKVLNSLLSGGNKVRAFNAWVMPLLTYSFGILRWTQTELDALDRRVRSLLTAHRMLHPRSSVMRLYIPRKCGGRGFLNAKDLHNHEVYNLRNYFLNNECGMHRDVVAVDRNLTPLSLANENWRKPVVLSTADRKAAWESKVLHGRFYKALTGPDVDLLASVNWLRFGDLFGETEGFACAIADEVMMTNNYRKFILKDGTVDICRACRRPGESLRHIISGCSHLANGEYLHRHNLVARIIHQQLALLYDLVDREVPYYKYLPAPVLENGRATLYWDRSIITDRTIVANKPDIVIIDRSQRRAVLVDITIPHDENLVKAEKDKSSKYLDLAHEITAMWDVDSTIIVPIVVSVNGLISKSLDQHLERLSLGGWIKGQMQKAVILDTARIVRRFLSLQP

SEQ ID NO: 5763 - protein, 1208 aa, Cydia splendana
MITRSRAKAVTTSARPPPPPASSTSSSTSSSGDEFATAPDTDGSSDESGPPPPPPRPPARRGRPPLPARLGPAGHPAPPTAPATGGIVRRMRWTRDMNENVMRAYYGATEGGTQLSAYRSRILPLFQTLEPTITVSEQRLSDQVRVIQRLKRLDDATLDRLRQEALSARADSISVRDLPATSPDPVPAPDLAPGAPRVDFCTDEGDLVSQNVSTTANEQLRRTLEEVITQYRATTNSRPRLPRLPMNRRNLALMGALNALLEPHLRTSKDLDDTHSILYCGAIAACRVARVKFPDAERAPRTVGGVPAWQARIERRISSFRTIIAKLICFRGGNNRPRVMRFVNQAFAGTDIRPRDYMANVTERIDFLKQKVYAWANRIRRYRERVERFQQNRLFQSDQRKVYRKWEETNLRTPDTQPPDATAMTDFWRSIWSMPVGHTEGSWMSVIERECESIEPMGAVTISPDDVSCAIRTAQNWKSPGPDGLHNFWLKWFRCSHSCLAAQFQQALELGSLPPSLTTGVTFLLYKSGSTTEAKNYRPITCLPTLYKLLTSILRAKINAHIVANNILASAQNGCRVGSRGTKELLLIDMTICQQIRRTKGALSAAWIDYKKAYDSVPHSWLGRVLELYKVDAALRAFLSACMGQWTTVLRQPGGGDDQPGPQDFIRIERGIFQGDSLSPLWFCLALNPLSTLLKDLGLGCRLRREGEVISHLLYMDDLKLFAPNTQGLLELLKTTEVFSSAINMEFGVDKCAVMHVQRGRVVNSTNLQLSETMSFRSISESETYKYLGMSQSLGIEDEGIRRSVKERFFSRLTKVLNSLLSGGNKVRAFNAWVMPLLTYSFGILRWTQTELDALDRRVRSLLTTHRMLHPRSSVMRLYIPRKCGGRGFLNAKDLHNREVYNLRNYFLNNECGMHRDVVAVDRNLTPLSLANENWRKPVVLSTADRKAAWENKVLHGRFYKALTGPDMDLLASVNWLRFGDLFGETEGFACAIADEVMMTNNYRKYILKDGTVDICRACRRPGESLRHIISGCSHLANGEYLHRHNLVARIIHQQLALLYGLVDREVPYYKYLPAPVLENGRATLYWDRSIITDRTIVANKPDIVLIDRSQRRAVLADVTIPHDENLVKAEKDKSSKYLDLAHEITAMWDVDSTIIVPIVVSANGLIAKSLDQHLERLSLGGWIKGQMQKAVILDTARIVRRFLSLQP

SEQ ID NO: 5764 - protein, 1208 aa, Cydia splendana
MITRSRTKAVTTSARPPPPPASSTSSSTSSSGDEFATAPDTDGSSDESGPPPPPPRPPARRGRPPLPARLGPAGHPAPPTAPATGGIVRRMRWTRDMNENVMRAYYGATEGGTQLSAYRSRILPLFQTLEPTITVSEQRLSDQVRVIQRLKRLDDATLDRLRQEALSARADSTSVRDLPATSPDPVPVPDLAPEAPRVDFCTDEGDFASQNVSTTANEQLRRTLEEAITQYRATTNSRPRLPRLPMNRRNLALMGALNALLEPYLRTSKDLDDTHSIMYCGAIAACRVARVKFPDAERAPRTVGGVPAWQVRIERRISSFRTLIAKLICFRGGNNRPRVMRFVNQAFAGTDIGPRDYMANVTERIDFLKQKVYAWANRIRRYRERVDRFQQNRLFQSDQRKVYRKWEETNLRTPDTQPPDATAMTDFWRSIWSMPVGHTEGGWMSVVERECEFIEPMGAVTISPDDISCAIRTAQNWKSPGPDGLHNFWLKWFRCSHSRLAAQFQQALELGSLPPSLTTGVTYLLYKSGSTTEAKNYRPITCLPTLYKLLTSILRAKINAHIVANNILASAQNGCRVGSRGTKELLLIDMTICQQIRRNKGALSAAWIDYKKAYDSVPHSWLGRVLELYKVDAALRAFLSACMRQWTTVLRQPGGGDDPPDPQDFIRIERGIFQGDSLSPLWFCLALNPLSTLLKDLGLGCRLRREGEIISHLLYMDDLKLFAPNSQDLSELLKTTEGFSSAINMEFGVDKCAVMHVQRGRVVNSTNLQLSETMSFRSISESETYKYLGMSQSLGIEEEGIRRSVKERFFSRLTKVLNSLLSGGNKVRAFNAWVMPLLTYSFGILRWTQTELDALDRRVRSLLTTHRMLHPRSSVMRLYIPRKCGGRGFLNAKDLHNREVYNLRSYFLNNECGMHRDVVAVDRNLTPLSLANENWRKPVVLSTADRKAAWESKVLHGRFYKALTGPDVDLLASVNWLRFGDLFGETEGFACAIADEVMMTNNYRKYILKDGTVDICRACRRPGESLRHIISGCSHLANGEYLHRHNLVARIIHQQLALLYGLVDREVPYYKYLPAPVLENGRATLYWDRSIITDRTIVANKPDIVIIDRSQRRAVLVDITIPHDENLVKAEKDKSSKYLDLAHEITAMWDVDSTIIVPIVVSVNGLIAKSLDQHLERLSLGGWIKGQMQKAVILDTARIVRRFLSLQP

SEQ ID NO: 5765 - protein, 1212 aa, Agriopis aurantiaria
MITRSRTKQADTKSARLPSPPASSSSPSTSSGEDEYHTTREASGSSSDTSGPGTPPPPPPARRGRPPLPARLGLVGHSATRPAPATGGVVRRMRWSTIMNEDCMRAYYRATEGGTNLSAYCARMLPLFQALQPTITVSAQRLSDQVRAIHRCKLLDDSVLDRLRQEELRARPIPVSTRDLPVASSAPTLASVPASVVTLAASADPVVDEGDLASGVSDQVREQLRGALEDAISQYRFTPDSRPRLPRLSTHRRNLALMGALNALLAPYLRASEDLVDTHSILYCGAIAACRVARVKFPDTNRAPRTAGGVPAWQVRIERRISTFRTLIAKLVCFRRGNNRPRVMRFVTQAFAGTDIRPQQYLANVTERIDYLKQKVYAWANRIRRYRERVDRYWQNRLFQSDQRKVYRGWEETDQRVSDGQLPDASAMINFWRGIWSVPVEHTEGDWMRVVERECESIEPMESILIDSIDVSCAIRTAQNWKSPEPDGLHNFWIKWIRCSHDRLATQFQEALELGSLPSFMTTGVTFLLHKSGSTTEAKNYRPITCLPTIYKLLTSILRNKINAHIVANNVLAHAQNGCWVGSRGTKELLLIDTAISQQVRRNKGALSAAWIDYKKAYDSVPHSWLERVLELYKIDTTLKSFLGACMRQWTTVLRQPGGGDGAFDPQDLLRIERGIFQGDSFSPLWFCLALNPLSTLLRDSGLGYRLRRDGQVISHLLYMDDLKLFTPKRQDLVELLKITEVFSSAIRMEFGVDKCAVMHVQRGKVVNSPNLQLSEVMTLRSLSEAETYKYLGMSESLGISVENIKKSVKERFFCRLTKVLNSLLSGGNKVRAFNGWVMPLLIYSFGILRWTQTELDALDRRVRQLLTSHRMLHPRSSVMRLYIPRKWGGRGFLNAKNLHNREVCSLRDFFRNSESGMHRDVVAVDRGLTALSLANENWRKPSVLSIEDRRDVWKGKELHGRFYRALIGPDVDLLASVNWLRFGDLFGETEGFACAIADEVIKTNNYRKYIMKDGTVDICRACHRPGESLRHIISGCSHLANGEYLHRHNLVARIIHQQLALRYSLVESEVPYYKYAPAPVLENGRALLYWDRSIITDRTIVANKPDIVLVDRSQRRAVLVDITIPHDENLVKAEKDKLSKYLDLAHEVTAMWDVDSTIIVPIVVSVNGLIAKSLDQHLKRLSLDGWVKGQMQKAVILDTARIVRRFLTLQP

SEQ ID NO: 5766 - protein, 1089 aa, Agriopis aurantiaria
MLPLFQALQPTITVSAQRLSDQVRAIHRCKLLDDSVLDRLRQEELRARPIPVSTRDPPVASSAPTLASLPASVVTLAALADPVVDEGDLASGVSDQVREQLRGALEDAISQYRFTPDSRPRLPRLPTHRRNLALMGALNALLAPYLRASEDLVDTHSILYCGAIAACRVARVKFPDTNRAPRTAGGVPAWQVRIERRINTFRTLIAKLVCFRRGNNRPRVMRFVTQAFAGTDIRPQHYLANVTERIDYLKQKVYAWANRIRRYRERVDRYWQNRLFQSDQRKVYRGWEETDQRVSDGRLPDASAMINFWRGIWSVPVEHTEGDWMHVVERECESIEPMGSILIDSVDVSCAIRTAQNWKSPGPDGLHNFWIKWVRCSHDRLATQFQKALELGSLPSFMTTGVTFLLHKSGSTTEAKNYRPITCLPTIYKLLTSILRNKINAHIVANNVLAHAQNGCRVGSRGTKELLLIDTAISQQVRRNRGALSAAWIDYKKAYDSVPHSWLERVLELYKIDTTLKSFLGACMRQWTTVLRQPGGGDGTSGPQDLLRIERGIFQGDSFSPLWFCLALNPLSTLLRDSGLGYRLRRDGQVISHLLYMDDLKLFTPKRQDLVELLKITDVFSSAIRMEFGVDKCAVMHVQRGKVVNSPNLQLSEVMTLRSLSEAETYKYLGMSESLGISVENIKKSVKERFFCRLTKVLNSLLSGGNKVRAFNGWVMPLLIYSFGILRWTQTELDALDRRVRQLLTSHRMLHPRSSVMRLYIPRKWGGRGFLNAKNLHNREVCSLRDFFRNSESGMHRDVVAVDRGLTPLSLANENWRKPSVLSIEDRRDVWKGKELHGRFYRALTGPDVDLLSSVNWLRFGDLFGETEGFACAIADEVIKTNNYRKYIMKDGTVDICRACHRPGESLRHIISGCSHLANGEYLHRHNQVARIIHQQLALRYGLVESEVPYYKYSPAPVLENGRALLYWDRSIITDRTIVANKPDIVLVDRSQRRAVLVDITIPHDENLVKAEKDKLSKYLDLAHEVTAMWDVDSTIIVPIVVSVNGLIAKSLDQHLKRLSLDGWVKGQMQKAVILDTARIVRRFLTLQP

SEQ ID NO: 5767 - protein, 1212 aa, Agriopis aurantiaria
MITRSRTKQADTKSARLPSPPASSSSPSTSSGEDEYHTTREASGSSSDTSGPGTPPPPPPARRGRPPLPARLGPVGHSAARPAPATGGVVRRMRWSTIMNEDCMRAYYRATEGGTNLSAYCARMLPLFQALQPTITVSAQRLSDQVRAIHRCKLLDDSVLDRLRQEELRARPIPVSTRDPPVASSAPTLASVPASVVTLAALADPVVDEGDLASGVSDQVREQLRGALEDAISQYRFTPDSRPRLPRLSTHRRNLALMGALNALLAPYLRASEDLVDTHSILYCGAIAACRVARVKFPDTNRAPRTAGGVPAWQVRIERRISTFRTLIAKLVCFRRGNNRPRVMRFVTQAFAGTDIRPQHYLANVTERVDYLKQKVYAWANRIRRYRERVDRYWQNRLFQSDQRKVYRGWEETDQRVSDGQLPDASAMINFWRGIWSVPVEHTEGDWMRVVERECESIEPMGSILIDSIDVSCAIRTAQNWKSPGPDGLHNFWIKWIRCSHDRLATQFQEALELGSLPSFMTTGVTFLLHKSGSTTEAKNYRPITCLPTIYKLLTSILRNKIYAHIVANNVLAHAQNGCRVGSRGTKELLLIDTAISQQVRRNKGALSAAWIDYKKAYDSVPHSWLERVLELYKIDTTLKSFLGACMRQWTTVLRQPGGGDGAFGPQDLLRIERGIFQGDSFSPLWFCLALNPLSTLLRDSGLGYRLRRDGQVISHLLYMDDLKLFTPKRQDLVELLKITEGFSSAIRMEFGVDKCAVMHVQRGKVVNSPNLQLSEVMTLRSLSEAETYKYLGMSESLGISVENIKKSVKERFFCRLTKVLNSLLSGGNKVRAFNGWVMPLLIYSFGILRWTQTELDALDRRVRQLLTSHRMLHPRSSVMRLYIPRKWGGRGFLNAKNLHNREVCSLRDFFRNSESGMHRDVVAVDRGLTALSLANENWRKPSVLSIEDRRDVWKGKELHGRFYRALTGPDVDLLASVNWLRFGDLFGETEGFACAIADEVIKTNNYRKYIMKDGTVDICRACHRPGESLRHIISGCSHLANGEYLHRHNLVARIIHQQLALRYSLVESEVPYYKYAPAPVLENGRALLYWDRSIITDRTIVANKPDIVLVDRSQRRAVLVDITIPHDENLVKAEKDKLSKYLDLAHEVTAMWDVDSTIIVPIVVSVNGLIAKSLDQHLKRLSLDGWVKGQMQKAVILDTARIVRRFLTLQS

SEQ ID NO: 5768 - protein, 1211 aa, Hedya salicella
MLTRQRARAASTPDSNARPPPPPASSSSSASSSGDEFATAPDTNSQSSDDERGPPPPPPRPPARRGRPPLPARLGPAGHPAPPTAPATGGVVRRMRWTQAMNEHCMRAYYGATEGGTHLSAYRDRMLLLFQTLEPAIAVSAQRLSDQVRAIQRRKLLDDAMLDQLRLEVLAARAASTSSRNPPAKSPVSAPALDLVPGAPRVDPGSDEEHCASSVSTQANEQLRRTLEETIERYRFAPESRPRLPRLPTNRRNLALVGALNALLDPYLRASEDLADTHSIMYCGAIAACRVARVKFPDADRAPRTAGGVPAWQVRIERRISTFRTLIAKLICFRGGNNRPRVMRYVAQAFAGTAVRPRDYMACVTERIDFLKQKVYAWASRIRRYRERVDRFQQNRLFQSDQRKVYRKWEGTDQRVTDGRLPDPTAMNNFWGSIWSVPVEHTEGEWMNVVERECEPIETMGAVTISPDDVSCAARTTQNWKSPGPDGLHNFWVKWFRCSHERLATQFQQALELGSLPSFLTTGVTFLLYKSGSTTEAKNYRPITCLPTLYKLLTSILRAKINTHIVANNVLAFSQNGCRVGSRGTKELLLIDTTICQQVRRNRGTLSAAWIDYKKAYDSVPHSWLGRILELYKIDTVLKSFIGSCMRQWTTVLRQPGGRDGPPDPQDFIRIKRGIFQGDSLSPLWFCLALNPLSTLLKDSGLGCRLRRGGEIISHLLYMDDLKLFAPKRPELVELLKVTETFSSAIKMEFGVDKCATMHVQRGKVVNSTNLQLSETMSLKSLSEVETYKYLGMSQSLSIADGDIKQAVKERFFCRLTKVLNSLLSGGNKARAFNAWVMPLLTYSFGILRWTQTELDALDRRIRMLLTTHRMLHPRSSVMRLYIPRKCGGRGFLNAKDLHNREVCSLREYFLNNECGIHRDVVAVDKGLTSLSLANENWRRPTVLSTVDRKDVWRSKELHGRFYKALTGPDVDLLASVNWLRFGDLFGETEGFACAITDEVIMTNNYRKYILKDGTVDICRACRRPGESLRHIISGCSHLANSEYLHRHNQVARIIHQQLAVKYGLVGSEVPYYKYAPMPVLENGRATLYWDRSIITDRTIVANKPDIVLVDRSKCRAILIDITIPHDENLVKAEKDKLSKYLDLAHEVTAMWDVDSTIIVPIVVSANGLIAKSLNEHLKRLSLDGWVKGQIQKAVILDTARIVRRFLSVQP

SEQ ID NO: 5769 - protein, 1215 aa, Erannis defoliaria
MITRSKSTQAGNDNNARPPPPPAPSSPSASSGDDEFHTPRESSASSSGSDVSGPRTPAPRPPARRGRPPLPARLGPAGQPASRPALAAGGVVRRMRWSQINNENCMRAYYGATEGGINLSAYRVRMLPLFQALEPTVTVSAQRLSDQVRAIQRLNLLDQSLLDRLRLEAHSARPTPASTRDSHVASSAPTLASVPTSAATLATPADPVVDEGDCTSMIVSSQVSEQLRRTLEDAIGQYRFALNSRPRLPRLPTHRRNLALMGALNALLAPYLRASEDLTDTHSILYCGAIAACRVARVKFPDTNRAPRPAGDVPAWQLRIERRISTFRTLIAKLICFSRGNNRPRVMRFVTQAFAGTGIRPQQYMANVTERIDYLKQKVYAWANRIRRYRERVDRYWQNRLFQSDQRKVYRNWEGNEQRVSDGQLPDASAMTNFWRGIWSVPVEHTEGDWMRVVERECESIEPMGSILIDPVDVSCAIRTAQNWKSPGPDGLHNFWIKWFRCSHDRLATQFQEALELGSLPSFMTTGVTFLLHKSGSTTEPKNYRPITCLPTIYKLLTSILSTKINAHIVANNVLAPAQNGCRVGSRGTKELLLIDMAISQQVRRNKGALSAAWIDYKKAYDSVPHSWLERILELYQIDATLKSFLGACMRQWTTVLRQPGGGNGSSDSQDLIRIERGIFQGDSLSPSWFCLALNPLSTLLKDSGLGYRLRRGGEVISHLLYMDDLKLFAPKHQDLLELLKTTQVFSSAISMEFGVDKCAVMRVQRGKVVNSPDLQLSEIMTLRSLSEAETYKYLGMSESLGISVVDIKKSVKERFFCRLTKVLNSLLSGGNKARAFNGWVMPLLIYSFGILRWTQTELDALDRRVRQLLTAHRMLHPRSSVMRLYITRKWGGRGFLNAKNLHNREVCSLRDYFLNNECGMHRDVVTVDKGLTPLSLANENWRTPSVLSTDDRKEVWKSKELHGRFYRVLSGPDVDLLASVNWLRFGDLFGETEGFACAIADEVIKTNNYRKYIMKDGTVDICRACHRPGESLRHIISGCSHLANGEYLHRHNQVARIIHQQLALQYGLVESEVPYYKYAPAPVLENGRALLYWDRSIITDRTIVANKPDIVMVDRSQRRAVLVDVTIPHDENLVKAEKDKLSKYLDLAFEITAMWDVDSTIIVPIVVSANGLIAKSLDQYLKRLSLDGWVKGQIQKAVVLDTARIVRRFLTLQP

SEQ ID NO: 5770 - protein, 1215 aa, Erannis defoliaria
MITRSQSRRNTAERNARPPSPPAPSSPSASSGDDVFLTPRESSVSSSNSDVSGPRTPAPPPPARRGRPPLPARLGPAGQPASRPALAAGGVVRRMRWSQTNNENCMRAYYGATEGGTNLSAYRVRMLPLFQALEPTVTVSAQRLSDQVRAIQRLNLLDQSLLDRLRLEAQSARPTPASTRDLDVASSAPTLALVPTSAATLVTSADPVVDEGDCTGMSVSTQVSEQLRRALEDAIGQYRFTPNSRPRLPRLPTHRRNLALMGALNALLAPYLRASEDLTDTHSILYCGAIAACRVARVKFPDTNRAPRPAGDVPAWQLRIERRISTFRTLIAKLICFSRGNNRPRVMRFVTQAFAGTGIRPQQYMANVTERIDYLKQKVYAWANRIRRYRERVDRYWQNRLFQSDQRKVYRNWEGNEQRVSDGQLPDASAMTNFWRGIWSVPVQHTEGDWMRVVERECEPIEPMGSILIDPVDVSCAIRTAQNWKSPGPDGLHNFWIKWFRCSHDRLATQFQEALELGSLPSFMTTGVTFLLHKSGSTTEPKNYRPITCLPTIYKLLTSILSTKINAHIVANNVLAPAQNGCRVGSRGTKELLLIDMAISQQVRRNKGALSAAWIDYKKAYDSVPHSWLERILELYQIDATLKSFLGACMRQWTTVLRQPGGGNGSSDSQDLIRIERGIFQGDSLSPSWFCLALNPLSTLLKDSGLGYRLRRGGEVISHLLYMDDLKLFAPKHQDLLELLKITQVFSSAISMEFGVDKCAVMRVQRGKVVNSPDLQLSEIMTLRSLSEADTYKYLGMSESLGISVVDIKKSVKERFFCRLTKVLNSLLSGGNKARAFNGWVMPLLIYSFGILRWTQTELDALDRRVRQLLTAHRMLHPRSSVMRLYIPRKWGGRGFLNAKNLHNREVCSLRDYFLNNECGMHRDVVTVDKGLTPLSLANENWRTPSVLSTDDRKEVWKSKELHGRFYRVLSGPDVDLLASVNWLRFGDLFGETEGFACAIADEVIKTNNYRKYIMKDGTVDICRACHRPGESLRHIISGCSHLANGEYLHRHNQVARIIHQQLALQYGLVESEVPYYKYAPAPVLENGRALLYWDRSIITDRTIVANKPDIVMVDRSQRRAVLVDVTIPHDENLVKAEKDKLSKYLDLAFEITAMWDVDSTIIVPIVVSANGLIAKSLDQYLKRLSLDGWIKGQIQKAVVLDTARIVRRFLTLQP

SEQ ID NO: 5771 - protein, 1215 aa, Erannis defoliaria
MITRSQSRRNTAERNARPPSPPAPSSPSASSGDDVFLTPRESSVSSSNSDVSGPRTPAPPPPARRGRPPLPARLGPAGLPASRPALAAGGVVRRMRWSQTNNENCMRAYYGATEGGTNLSAYRVRMLPLFQALEPTVTVSAQRLSDQVRAIQRLNLLDQSLLDRLRLEAQSARPTPASTRDLDVASSAPTLALVPTSAATLVTSADPVVDEGDCTGMSVSTQVSEQLRRALEDAIGQYRFTPNSRPRLPRLPTHRRNLALMGALNALLAPYLRASEDLTDTHSILYCGAIAACRVARVKFPDTNRAPRPAGDVPAWQLRIERRISTFRTLIAKLICFSRGNNRPRVMRFVTQAFAGTGIRPQQYMANVTERIDYLKQKVYAWANRIRRYRERVDRYWQNRLFQSDQRKVYRNWEGNEQRVSDGQLPDASAMTNFWRGIWSVPVEHTEGDWMRVVERECESIEPMGSILIDPVDVSCAIRTAQNWKSPGPDGLHNFWIKWFRCSHDRLATQFQEALELGSLPSFMTTGVTFLLHKSGSTTEPKNYRPITCLPTIYKLLTSILSTKINAHIVANNVLAPAQNGCRVGSRGTKELLLIDMAISQQVRRNKGALSAAWIDYKKAYDSVPHSWLERILELYQIDATLKSFLGACMRQWTTVLRQPGGGNGSSDSQDLIRIERGIFQGDSLSPSWFCLALNPLSTLLKDSGLGYRLRRGGEVISHLLYMDDLKLFAPKHQDLLELLKTTQVFSSAICMEFGVDKCAVMRVQRGKVVNSPDLQLSEIMTLRSLSEAETYKYLGMSESLGISVVDIKKSVKERFFCRLTKVLNSLLSGGNKARAFNGWVMPLLIYSFGILRWTQTELDALDRRVRQLLTAHRMLHPRSSVMRLYIPRKWGGRGFLNAKNLHNREVCSLRDYFLNNECGMHRDVVTVDKGLTPLSLANENWRTPSVLSTDDRKEVWKSKELHGRFYRVLSGPDVDLLASVNWLRFGDLFGETEGFACAIADEVIKTNNYRKYIMKDGTVDICRACHRPGESLRHIISGCSHLANGEYLHRHNQVARIIHQQLALQYGLVESEVPYYKYAPAPVLENGRALLYWDRSIITDRTIVANKPDIVMVDRSQRRAVLVDVTIPHDENLVKAEKDKLSKYLDLAFEITAMWDVDSTIIVPIVVSANGLIAKSLDQYLKRLSLDGWVKGQIQKAVVLDTARIVRRFLTLQP

SEQ ID NO: 5772 - protein, 989 aa, Erannis defoliaria
MINNDNDAIGQYRFTPNSRPRLPRLPTHRRNLALMGALNALLAPYLRASEDLTDTHSILYCGAIAACRVARVKFPDTNRAPRPAGDVPAWQLRIERRISTFRTLIAKLICFSRGNNRPRVMRFVTQAFAGTGIRPQQYMANVTERIDYLKQKVYAWANRIRRYRERVDRYWQNRLFQSDQRKVYRNWEGNEQRVSDGQLPDASAMTNFWRGIWSVPVEHTEGDWMRVVERECESIEPMGSILIDPVDVSCAIRTAQNWKSPGPDGLHNFWIKWFRCSHDRLATQFQEALELGSLPSFMTTGVTFLLHKSGSTTEPKNYRPITCLPTIYKLLTSILSTKINAHIVANNVLAPAQNGCRVGSRGTKELLLIDMAISQQVRRNKGALSAAWIDYKKAYDSVPHSWLERILELYQIDATLKSFLGACMRQWTTVLHQPGGGNGSSDSQDLIRIERGIFQGDSLSPSWFCLALNPLSILLKDSGLGYRLRRGGEVISHLLYMDDLKLFAPKHQDLLELLKTTQVFSSAISMEFGVDKCAVMRVQRGKVVNSPDLQLSEIMTLRSLSEAETYKYLGMSESLGISVVDIKKSVKERFFCRLTKVLNSLLSGGNKARAFNGWVMPLLIYSFGILRWTQTELDALDRRVRQLLTAHRMLHPRSSVMRLYIPRKWGGRGFLNAKNLHNREVCSLRDYFLNNECGMHRDVVTVDKGLTPLSLANENWRTPSVLSTDDRKEVWKSKELHGRFYRVLSGPDVDLLASVNWLRFGDLFGETEGFACAIADEVIKTNNYRKYIMKDGTVDICRACHRPGESLRHIISGCSHLANGEYLHRHNQVARIIHQQLALQYGLVESEVPYYKYAPAPVLENGRALLYWDRSIITDRTIVANKPDIVMVDRSQRRAVLVDVTIPHDENLVKAEKDKLSKYLDLAFEITAMWDVDSTIIVPIVVSANGLIAKSLDQYLKRLSLDGWVKGQIQKVVVLDTARIVRRFLTLQP

SEQ ID NO: 5773 - protein, 1215 aa, Biston betularia
MWTRSRTAAASGLHDAHIPSPPAPSTPSASSGDEEFATPLATSASSSSSDVSGPRTPAPPPPARRGRPPLPARLGPAGQSASRSALAAGGVVRRMRWSQTNNENCMRAYYGATEGGINLSAYRVRMLPLFQALEPTVAVSTQRLSDQVRAIQRLQLLDQSVLDRLRLEALPARPTPVSTRDSPVASSAPTLVSVPTSMATLATPTDPVVDVGECTSMGVCSQVSEHLRRTLEDAICQYRFAPDSRPRLPRLPTHRRNLALMGALNALLAPYLRASEDLTDTHSILYCGAIAACRVARVKFPDTNRAPRPAGGVPAWQLRIERRISTFRTLIAKLICFSRGNNRPRVMRFVTQAFAGTGIRPQHYLASVTERIDYLKQKVYAWANRIRRYRERADRYWQNRVFQSDQRKVYRDWEGTGQRVSDRQLPDTSVMTEFWRGIWSLPVEHTEGDWMRVVERECESIESMGSVLIDPVDVSCAIRTAQNWKSPGPDGLHNFWIKWIRCSHDRLATQFQEALELGSLPCFMTTGVTFLLHKTGSTTEAKNYRPITCLPTIYKLLTSILRTKINAHVVANNVLAPAQNGCRVGSRGTKELLLIDMTISQQVRRNKGALSTAWIDYKKAYDSVPHSWLERVLELYKIDTTLKSFLGACMRQWTTVLRQPGSGDGSSEPQDLIRIERGIFQGGSLSPLWFCLALNPLSTLLKESGLGHRLRRGGEVISHLLYMDDLKLFAPKRSDLMELLKTTQVFSNAIKMEFGVDKCAVMHVQLGEVVNCPDLQLSETMTFRSLSEAETYKYLGMSESLGIAVVDIKRSVKERFFCRLTKVLNSFLSGGNKVRAFNGWVMPLLIYSFGILRWTQTELDALDRRVRQQLTTHRMLHPRSSVMRLYIPRKLGGRGFLSAKNLHNREVCSLRDYFRDNECGMHRDVVAVDKGLTPLSLANENWRKPSVLSTEDRKEVWKSKQLHGRFYRVLTGPDVDMLASVNWLRFGDLFGETEGFACAIADEVIKTNNYRKYIMKDGTVDICRACHRPGESLRHIISGCSHLANGEYLHRHNQVARIIHQQLALQYGLVESEVPYYKYAPAPVLENGRALLYWDRSIITDRTIVANKPDIVVVDRAQRRAVLVDITIPHDENLVKAEKDKLSKYLDLAHEITAMWDVDSTIIVPIVVTVNGLIAKSLDQHLERLSLDGWVKGQLQKAVILDTARIVRRFLTLQP

SEQ ID NO: 5774 - protein, 1215 aa, Biston betularia
MWTRSRTAAASGLHDAHIPSPPAPSTPSASSGDEEFATPLATSASSSSSDVSGPRTPAPPPPARRGRPPLPARLGPAGQSASRSALAAGGVVRRMRWSQTNNENCMRAYYGATEGGINLSAYRARMLPLFQALEPTVAVSTQRLSDQVRAIQRLQLLDQSVLDRLRLEALPARPTPVSTRDSPVASSAPTLVSVPTSMVTLATPTDPVVDAGECTSMGVCSQVSEHLRRTLEDAICQYRFAPDSRPRLPRLPTHRRNLALMGALNALLAPYLRASEDLTDTHSILYCGAIAACRVARVKFPDTNRAPRPAGGVPAWQMRIERRISTFRTLIAKLICFSRGNNRPRVMRFVTQAFAGTGIRPQHYLASVTERIDYLKQKVYAWANRIRRYRERADRYWQNRVFQSDQRKVYRDWEGTGQRVSDRQLPDTSVMTEFWRGIWSLPVEHTEGDWMRVVERECESIESMGSVLIDPVDVSCAIRTAQNWKSPGPDGLHNFWIKWIRCSHDRLATQFQEALELGSLPCFMTTGVTFLLHKTGSTTEAKNYRPITCLPTIYKLLTSILRTKINAHVVANNVLAPAQNGCRVGSRGTKELLLIDMTISQQVRRNKGALSTAWIDYKKAYDSVPHSWLERVLELYKIDTTLKSFLGACMRQWTTVLRQPGSGDGSSEPQDLIRIERGIFQGDSLSPLWFCLALNPLSTLLKESGLGHRLRRGGEVISHLLYMDDLKLFAPKRPDLMELLKTTQVFSNAIKMEFGVDKCAVMHVQRGEVVNCPDLQLSETMTFRSLSEAETYKYLGMSESLGIAVVDIKRSVKERFFCRLTKVLNSLLSGGNKVRAFNGWVMPLLIYSFGILRWTQTELDALDRRVRQQLTTHRMLHPRSSVMRLYIPRKLGGRGFLSAKNLHNREVCSLRDYFRDNECGMHRDVVAVDKGLTPLSLANENWRKPSVLSTEDRKEIWKSKQLHGRFYWVLTGPDVDMLASVNWLRFGDLFGETEGFACAIADEVIKTNNYRKYIMKDGTVDICRACHRPGESLRHIISGCSHLANGEYLHRHNQVARIIHQQLALQYGLVESEVPYYKYAPAPVLENGRALLYWDRSIITDRTIVANKPDIVVFDRAQRRAVLVDITIPHDENLVKAEKDKLSKYLDLAHEITAMWDVDSTIIVPIVVSVNGLIAKSLDQHLKRLSLDGWVKGQLQKAVILDTARIVRRFLTLQP

SEQ ID NO: 5775 - protein, 1124 aa, Blastobasis lacticolella
MAPATGGVVRRMRWTQSINENVMRAYYGATEGGTNLSAYRDRMLPLFQVLEPAIDVTAQRLSDQVRAIQRLKRLDDSVLDRLRLESLPVRAVPISTMSLPATSPPQVSPPSPAPRVPRTDATVGVEDCTNVSSVSTETNEYVRRTLEETIARYRFAPNSRPRLPRLPTNRRNLALMGAINVLLDSYIRASDNLVDTHSIMYCGAITACRVARDRAPRVAGGAPAWQKRIERRINTFRTLIAKLICFKEGNNRPRVMRFVDQAFAGTGISSRDYMACATKRIDFLKQKVCAWANRIRRYRERVDRFRLNRLFQSDQRKVYRKWEGTNQSGSDGSLPDASASNNFWRSIWSVPVEHSEGDWMNVVKRECEIIEPMAAVSICPEDVSCAIDTAQNWKCPGPDGLHNFWIKWFRCSHERLATQFQEALEHGSLPTLFTTGITFLLYKSGSTTEAKNYRPITCLPTLYKLLTSILRKKINNHIIENNILAMSQNGCRVGSRGTKELLLIDMTICQQVRRSRGSLSAAWIDYKKAYDSVPHSWLRRVLELYKINATLRSFLDACMRQWITVLSQPVGGIDHSPPQDFIRIERGIFQGDSLSPLWFCLALNSLSTLLKHSELGCRLRREGEIISHLLYMDDLKLFAPKRQDLMELLKITEIFSNAIRMEFGADKCAVMHVQRGKVANTTNLQLSETMSFRSLSEAETYKYLGMSQSLGIVDEGVKQAVKERFFCRLTKVLNSLLSGGNKVRSFNAWVMPLLTYSFGILRWTQTELDALDRRVRLLLTTHRMLHPRSSVMRLYIPRKCGGRGFLSAKTLHNREVCSLRDYFLNNECGMHRAVVAVDRGLTPLSLANENWRKPKVLSTIDRKDVWKSKELHGRFYRALTGPDVDLLASVNWLRFGDLFGETEGFVCAIADEVIMTNNYRRYILKDGTVDICRACRCPGESLRHITSGCGRLANGEYLHRHNLVARIIHQQLALQYGLVESEVPYYKYVPAPVLENGLATLYWDRSVITDRTIVANRPDIVLTDRSKRRAVLVGVTIPHDGNLVKAEKDKQCKYLDLAHEVTAMWDVDSTIIVPIVVSVNGLIAKSLEQHLKSLSLDGWVKGQIQKAVLLETARIVRRFLSLQP

SEQ ID NO: 5776 - protein, 1037 aa, Apotomis turbidana
MSSTPARDPPATSPDPAPAPNLVPEVPRTDRDADEEECASSVSTHANEQLRRALEEAIRRYRSAPDSRPRLPRLPMHKRNLALMGALDALLDPYLRASEDLADTHSIMYCGAIAACRVARVRFPDTDRAPRTAGGVPAWQVRIERRISSFRTLIAKLICFRGGNNRPRVMRYVTQAFAGTGTRPRDYMACVTERIDYLKQKVYAWASRIRRYRERVDRFQQNRLFQSDQRKVYRKWEGTDQCVTDGQQPDPTAMINFWRSIWSVPVEHTEGEWMNVVRRECEPIEAMGAVTISPDDVGCAVRTTQNWKSPGPDGLHNFWIKWFRSSHGRLATQFQDALELGSLPSFMTTGATFLLYKSGSTTEAKNYRPITCLPTLYKLLTSILRTKINTHIVANNVLAFSQNGCRVGSRGTKELLLIDTTICQQVRRNRGLSVAWIDYKKAYDSVPHSWLERILELYKIDTALRSLLGACMRQWTTVLRQPGGGDGPPGPQDLIRIERGIFQGDSLSPLWFCLALNPLSILLKDSGLGCRLRRGGEVISHLLYMDDLKLYAPKRQDLVELLEVTETFSSAIKMEFGVDKCAVMHVQRGEVVNSANLQLSETMSLRSISEVETYKYLGMSQSLGIADGDIRQALKERFFCRLTKVLNSLLSGGNKARAFNAWVMPLLTYSFGILRWTQTELDALDTRVRQLLTTNRMRHPRSSVMRMYIPRKCGGRGFLNAKDLHNREVCSLREYFLNNECGIHRDVVAVDKGLTSLSLANENWRRPKVLSTDDRRAVWKSKELHGRFYKALTGPDVDLLASVNWLRFGDLFGETEGFVCAIADEVMMTNNYRRYILKDGTVDICRACRRPGESLRHIISGCSHLANGEYLHRHNQVARIIHQQLALQYGLVGSEVPYYKYAPMPVLENGRATLYWDRSIITDRTIVANKPDIVLVDRSKRQAVLVDITIPHDENLVKAEKDKLSKYLDLAHEVTAMWDVDSTIIVPIVVSANGLIAKSLDKHLKRLSLDGWIKGQIQKAVLLDTARIVRRFLSLQP

SEQ ID NO: 5777 - protein, 1208 aa, Notocelia uddmanniana
MITRTRSRAAQRARPPSPPAPSSSSPSSSGDEFATAPDTSESSCDERGPPSPPPRPPARRGRPPLPARLGPVGHSALPTAPAAGGVVRRMRWTQEMNENCMRAYFGATEGETNLSAYRVRMLPLFQALEPTITVTAQRLSDQVRVIQRLKRLDDATLDRLRLEALSARTASALARDPPATSPAPVPTPDMAPGVPRVDPSVDEDCANQTVSTQTNEQLRRALEEAITRYRSTPNSRPRLPRLPVNRRNLALMGALNDLLDPYLRASEDLIDTHSILYCGAIAACRVARVKFPDADRAPRTAGGVPAWQVRIERRINTFRTLIAKLICFRGGNDRPRVMRFVNQAFAGTGVRPRDYVTCVTERIDFLKQKVYAWASRIRRYRERVDRYQQNRLFQSDQRKVYRKWEGTDHRVCDGQRPDATAMGNFWRSIWSVPVEHTEGAWIGVVERECESIEPMGSVTISPEDISCAIRTAPNWKSPGPDGLHNFWLKWFRCSHERLATQFQQALELGSLPHLLTTGVTRTSLLYKSGSTTEAKNYRPITCLPTLYKLLTSILRAKINTHIVANNILAPAQNGCRVGSRGTKELLLIDMTICQRVRRSRGALSAAWIDYKKAYDSVPHSWLRRILELYKVDAALRSFLSACMGQWTTVLRQPGGGDGSSGPQDSIRIKRGIFQGDSLSPLWFCLALNPLSTLLKDSGLGCQLRRGGEVISHLLYMDDLKLFAPNRQDLLELLKTTEVFSSAIKMEFGVDKCAVMLVQRGKVVNSTNLQLSETMSLRSLSEAETYKYLGMSQSLGIEGEGIKQAVKERFFCRLTKVLNSFLSGGNKVRAFNAWVMPLLTYSFGILRWTQTELDALDRRVRVLLTTHRMLHPRSSVMRLYIPRKCGGRGFLNAKDLHNREVCSLRDYFLNSECGMHRDVVAVDASFTPLSMANENWRRFKVLSTEDRKAEWKSRELHGRFYKALTGPDVDLLASVNWLRFGDLFGETEGFVCAIADEVIMTNNYRRYILKDGTVDICRACRRPGESLRHIISGCGHLANGEYLHRHNLVARIIHQQLALSYGLVNFEVPYYKYLPAPVLENGRATLYWDRSIITDRTIVANKPDIVLIDRSKRQAVLVDITIPHDENLVKAEKDKVSKYLDLAHEVTAMWDVDSTIIVPIVVSANGLIAKSLDQHLKRLSVDGWVKGQIQKAVLLDTARIVRRFLSMSP

SEQ ID NO: 5778 - protein, 1208 aa, Notocelia uddmanniana
MITRSKARQEASTQSARPPSLTASSDSSPSSSGDEFATAPDTSESSDESGSPPTPPRPPARRGRPPLPARLEPAGHPAPPTAPATGGIVRRMQWSQTMNENCMRAYYGATDGGTNLSAYRVRMLPLFQALEPAISVSAQRLSDQVRVIQRLKRLGDATLDRLRMEALSARAASASARNPPATLPAPVPAPDMAPGAPRVDSSADEDCANQSVSTHAHELLRRALEEAITQYRSTPNSRPRLPRLPVNRRNLALMVALNDLLVPYFGASADLIDTHSIMYCGAIAACRVARVKFPDADRAPRTTGSVPTWQVRIERRVDTYRTLIAKLICFRGGNNRPRVMRFVNQAFAGTGVRPRDYMACVTERIDFLKQKVYAWASRIRRYRERLDRYQQNRLFQSDQRKVYRKWDGTDHRVSDGQRPDATAMVNFWRSIWSVPVEHTEGAWMDVVKRECESIEPMGSVTVSPEDVSCAIRTAPNWKSPGPDGLHNFWLKWFRCSHARLAAQFQQALEIGSLPPPLTTGVTSLLYKSGSTTEAKNYRPITCLPTLYKLLTSILRAKINTHIVANNILAPAQNGCRVGSRGTKELLLIDMTICQRVRRNRGTLSAAWIDYKKAYDSVPHSWLKRILELYKVDAVLRSFLVACMGQWTTVLRQPGGGEGPSGPQDSIRIERGIFQGDSLSPLWFCLALNPLSTLLKDSGLGCQLRREGEVISHLLYMDDLKLFAPNKHDLLELLKTTEVFSSAIKMEFGVDKCAVMHVQRGKVVNSTNLHISETMALRSLSEAETYKYLGMSQSLGIEGGDIKRAVKERFFCRLTKVLNSFLSGGNKVRAFNAWVMPLLTYSFGILSWTQTELDFLDRRVRVLLTAHRMLHPRSSVMRLYIPRKLGGRGFLNAKDLHNREVYSLRDYFLNSECGMHRDVVAVDASFTPLSMANENWRRFKVLSTEDRRAVWKSKELHGRFYKALAGPDVDLLASVNWLRFGDLFGETEGFVCAIADEVIMTNNYRKYILKDGTVDICRACRRPGESLRHIISGCSHLANGEYLHRHNLVARIIHQQLALLYGLVDFEVPYYKYTPAPVLENGRATLYWDRSVITDRTIVANKPDIVLTDRLKRQAVLVDITIPHDENLVKAEKDKVSKYLDLAHEVTAMWDVDSTIIVPIVVSVNGLIAKSLDQHLKRLSLDGWVKGQIQKAVLLDTARIVRRFLSLSP

SEQ ID NO: 5779 - protein, 1208 aa, Notocelia uddmanniana
MITRSKARLEKKASNPQSARPPPSPASSSSASSSEEFATAPDTSSSSSSDECGPPPPPPRPPARRGRPPLPARLGPAGHPAPPTAPATGGLVRRMQWSQSINENCMRAYYGATDGGTNLSAYRDRMLPLFRALEPAISVSAQRLSDQVRVIQRLKRLDDATLDRLRLEALSARAASASARNPSATLPAPVPALDTAPGADPSADEGCANQSVSSQAYEQLRRALEEAITQYRSTPNSRPRLPRLPVNRRNLAFMGALNDLLVPYLGASEDLIDTHSIMYCGAIAACRVARVKFPDADRAPRTAGSVPTWQVRIERRVDTYRTLIAKLICFRGGNSRPRVMRFVNQAFAGTGIRPRDYMTCVTERIDFLKQKVYAWASRIRRYRERLDRYQQNRLFQSDQRKVYRKWDGTDHRVSDGQRPDATAMVNFWRSIWSVPVEHNEGAWMGVVERECESIEPMGSVTISPADVSCAIRTAPNWKSPGPDGLHNFWLKWFRCSHARLAAQFQQALELGSLPPPLTTGVTSLLYKSGSTTEAKNYRPITCLPTLYKLLTSILRAKINTHIVANNILAPAQNGCRVGSRGTKELLLIDMTICQRVRRNRGTLSTAWIDYKKAYDSVPHSWLRRILELYKVDAVLRSFLVACMGQWTTVLRQPGGGEGPSGPQDSIRIERGIFQGDSLSPLWFCLALNPLSTLLKDSGLGCQLRREGEVISHLLYMDDLKLFAPNKHDLLELLKTTEAFSSAIKMEFGVDKCAAMHVQRGKVVNSTNLQISETMDLKSLSEAETYKYLGMSQSLGIEGGDIKRAVKERFFCHLTKVLNSFLSGGNRVRAFNAWVMPLLTYSFGILRWTQTELDFLDRRVRVLLTAHRMLHPRSSVMRLYIPRKFGGRGFLNAKDLHNREVCSLRDYFLNSECGMHRDVVAVDASFTPLSMANENWRRLKVLSTEDRRVVWKSKELHGRFYKALTGPDVDLLASVNWLRFGDLFAETEGFVCAIADEVIMTNNYRRYILKDGTVDICRACRRPGESLRHIISGCGHLANGEYLHRHNLVAKIIHQQLALLYGLVDFEVPYYKYTPAPVLENGRATLYWDRSVITNRTIIANKPDIVLTDRLKRQAVLVDITIPHDENLVKAEKDKVSKYLDLAHEVTAMWDVDSTIIVPIVVSANGLIAKSLDQHLKRLSLDGWVKGQMQKAVLLDTARIVRRFLSLSP

SEQ ID NO: 5780 - protein, 1211 aa, Notocelia uddmanniana
MITRSKARLKKQTSNPKSARPPPSPVSSSSASSSEEFATAPDTSSSSSSDECGPPPPPPRPPARRGRPPLPARLGPAGHPAPPTAPATGGIVRRMQWSQSINENCMRAYYGATDGGTNLSAYRVRMLTLFRALEPAISVSAQRLSDQVRVIQRLKRLDDATLDRLRLEALSARAASVSARDPLATLPAPMPAPDTATGAPRVDLSTDGDCANQSVSTQADGQLRRALEEAITRYRSTTSSRPRLPRLPVNRRNLALMGALNDLLVPYLRASEDLIDTHSIMYCGAIAACRVARVKFPDADRAPRTAGSVPTWQVRIERRIDTYRTLIAKLICFRGGNSRPRVMRFVNQAFAGTGVRPRDYMTCVTERIDFLKQKVYAWASRIRRYRERVDRYQLNRLFQSDQRKVYRKWEGTDHRVSDGQRPDATAMVNFWRSIWSVPVEHNEGAWIDVVKRECESIEPMGSVTVSPEDVSCAIRTAPNWKSPGPDGLHNFWLKWFRCSHARLAAQFQQALELGSLPSPLTTGVTSLLYKSGSTTEAKNYRPITCLPTLYKLLTSILRAKINTHIVANNILAPAQNGCRVGSRGTKELLLIDMTICQRVRRNRGTLSAAWIDYKKAYDSVPHSWLRRILELYKVDAVLRSFLVACMGQWTTVLRQPEGGGGPSGPQDSIRIERGIFQGDSLSPLWFCLALNPLSTLLKDSGLGCQLRREGEVISHLLYMDDLKLFAPNKHDLLELLKTTEVFSSAIKMEFGVDKCAVMHVQRGKVVNSTNLHISETIALRSLSEAETYKYLGMSQSLGIEGEDIKRAVRERFFCRLTKVLNSFLSGGNKVRAFNAWVMPLLTYSFGILRWTQTELDFLDRRVRVLLTAHRMLHPRSSVMRLYIPRKLGGRGFLNAKDLHNREVCSLRDYFLNSECGMHRDVVAADASFTPLSMANENWRRFKVLSTDDRRAVWKSKELHGRFYKALTGPDVDLLASVNWLRFGDLFGETEGFVCAIADEVIMTNNYRKYILKDGTVDICRPCRRPGESLRHIISGCSHLANGEYLHRHNLVARIIHQQLALLYGLVDFEVPYYKYTPAPVLENGRATLYWDRSVITDRTIVANKPDIVLTDRLKRQAVLVDITIPHDENLVKAEKDKVSKYLDLAHEVTAMWDVDSTIIVPIVVSVNGLIAKSLDQHLKRLSLDGWVKGQIQKAVLLDTARIVRRFLSLSP

SEQ ID NO: 5781 - protein, 1206 aa, Notocelia uddmanniana
MITRTRSRAAQRARPPSPPAPSSSSPSSSGDEFATAPDTSESSCDERGPPSPPPRPPARRGRPPLPARLGPVGHSALPTAPAAGGVVRRMRWTQEMNENCMRAYFGATEGETNLSAYRVRMLPLFQALEPTITVTAQRLSDQVRVIQRLKRLDDATLDRLRLEALSARTASALARDPPATSPAPVPTPDMAPGVPRVDPSVDEDCANQTVSTQTNEQLRRALEEAITRYRSTPNSRPRLPRLPVNRRNLALMGALNDLLDPYLRASEDLIDTHSILYCGAIAACRVARVKFPDADRAPRTAGGVPAWQVRIERRINTFRTLIAKLICFRGGNDRPRVMRFVNQAFAGTGVRPRDYVTCVTERIDFLKQKVYAWASRIRRYRERVDRYQQNRLFQSDQRKVYRKWEGTDHRVCDGQRPDATAMGNFWRSIWSVPVEHTEGAWIGVVERECESIEPMGSVTISPEDISCAIRTAPNWKSPGPDGLHNFWLKWFRCSYERLATQFQQALELGSLPHLLTTGVTSLLYKSGSTTEAKNYRPITCLPTLYKLLTSILRAKINTHIVANNILAPAQNGCRVGSRGTKELLLIDMTICQRVRRSRGALSAAWIDYKKAYDSVPHSWLRRILELYKVDAALRSFLSACMGQWTTVLRQPGGGDGSSGPQDSIRIERGIFQGDSLSPLWFCLALNPLSTLLKDSGLGCQLRRGGEVISHLLYMDDLKLFAPNRQDLLELLKTTEVFSSAIKMEFGVDKCAVMHVQRGKVVNSTNLQLSETMSLRSLSEAETYKYLGMSQSLGIEGEGIKQAVKERFFCRLTKVLNSFLSGGNKVRAFNAWVMPLLTYSFGILRWTQTELDALDRRVRVLLTTHRMLHPRSSVMRLYIPRKCGGRGFLNAKDLHNREVCSLRDYFLNSECGMHRDVVAVDASFTPLSMANENWRRFKVLSTEDRKAEWKSRELHGRFYKALTGPDVDLLASVNWLRFGDLFGETEGFVCAIADEVIMTNNYRKYILKDGTVDICRACRRPGESLRHIISGCGHLANGEYLHRHNLVARIIHQQLALSYGLVNFEVPYYKYLPAPVLENGRATLYWDRSIITDRTIVANKPDIVLIDRSKRQAVLVDITIPHDENLVKAEKDKVSKYLDLAHEVTAMWDVDSTIIVPIVVSANGLIAKSLDQHLKRLSLDGWVKGQIQKAVLLDTARIVRRFLSLSP

SEQ ID NO: 5782 - protein, 1208 aa, Crocallis elinguaria
MITRSRTKKAGTASARKTPPPASSSPSSSSGVEYGTPLDTSASSDEDGPPSPPPPPPPARRGRPPLPARLGPAGHSVPRTAPATGGIVRRMRWTSDMNENCMRAYYGATEGGTNMSAYRDRMLPLFQTLEPSVAVSTQRLSDQVRAIQRLKLLDESALDRLRLEALPIRATSASARDLSVAPPVPAPLPAPSSVATRIDPVVDEDDCANISVSTQVNEQLRRALEDAILEYQYTPDSRPRLPRLPTNRRNLALMGALNVLLAPYLRASENLFDTHSIMYCGAIAVCRVARVKFPDADRAPRPAGSAPAWQVRIERRINTFRTLIAKLICFSRGNNRPRVMRFVNQAFAGTGIRPQNYMAGVTERIDFLKQKIYAWVNRIRRYRERVDRYHQNRLFESDQRKVYRNWEGTDQRVSDGQLPDTNAMINFWRGIWSVPVEHTEGDWMRTVEQSCESIETMGSVTIDPIDVSCAIRTAQNWKSPGPDGLHNFWIKWIRCSHECLAVQFQEALELGSLPRFLTTGVTSLLHKSGSTTEAKNYRPITCLPTLYKLLTSILRAKINSHVVANNILAPAQNGCRVGSRGTKELLLIDTAICQQVRRNKGALSTAWIDYKKAYDSVPHSWLERILELYKIDTTLRTFLSTCMRQWTTVLRQPGSGNSPSGPENFIKIERGIFQGDSLSPLWFCLALNPLSTLLRDSRLGCKLRREGEIISHLLYMDDLKLLAPKSPDLMKLLKITEIFSSAIKMEFGVDKCAVMHVQRGKVVNSDNLQLSETMTLRSLSEAETYRYLGMSQSLGITVGDIKQSVKERFFCRLTKVLNSLLSGGNKARAFNGWVMPLLIYSFGILKWTQTELDSLDRRVRQLLTYHRMLHPRSSVMRLYIPRKWGGRGFLNAKTLHNREVCSLREYFLNNECGMHRDVVAVDRNLTPLSLANENWHKPVVMTTEDRKEVWKGKELHGRFYRALTGSDVDLLASVNWLRFGDLFGETEGFVCAIMDEVIKTNNYRKYIMKDGTVDICRACRRPGESLRHIISGCSHLANGEYLHRHNLVARIIHQQIALQYGLVESEVPYYKYAPVPVLENGCALLYWDRSIITDRTIVANKPDIVLVDRSQRRAVLVDITVPHDENLVKAEKDKLSKYLDLAHEVTAMWNVDSTIIVPIVVSANGLAAKSLDQHLKRLSLDGWIKGRMQKAVLLDTARIVRRFLTLQP

SEQ ID NO: 5783 - protein, 1208 aa, Crocallis elinguaria
MITRSRTKKAGTASARQTPPPASSSPSSSSGVEYGTPLDTSASSDEDGPPSPPPPPPPARRGRPPLPARLGPAGHSVPRAAPATGGIVRRMRWTSDMNENCMRAYYGATEGGTNMSAYRERMLPLFQTLEPSVAVSTQRLSDQVRAIQRLKLLDESVLDRLRLEALPIRATSASARDLSVAPPVPAPLPAPSSVATRIDPVVDEDDCANISVSTQVNEQLRRALEDAILEYQYTPDSRPRLPRLPTNRRNLALMGALNVLLAPYLRASENLFDTHSIMYCGAIAVCRVARVKFPDADRAPRPAGSAPAWQVRIERRINTFRTLIAKLICFSRGNNRPRVMRFVNQAFAGTGIRPRNYMAGVTERIDFLKQKIYAWVNRIRRYRERVDRYHQNRLFESDQRKVYRNWEGTDQRVSDGQLPDTNAMINFWRGIWSVPVEHTEGDWMRTVEQSCESIETMGSVTIDPIDVSCAIRTAQNWKSPGPDGLHNFWIKWIPCSHECLAVQFQEALELGSLPRFLTTGVTSLLHKSGSTAEAKNYRPITCLPTLYKLLTSILRAKINSHVVANNILAPAQNGCRVGSRGTKELLLIDTAICQQVRRNKGALSTAWIDYKKAYDSVPHSWLERILELYKIDTTLRSFLSTCMRQWTTVLRQPGSGNSPSGPENFIKIERGIFQGDSLSPLWFCLALNPLSTLLRDSRLGCKLRREGEIISHLLYMDDLKLLAPKSPDLMKLLKITEIFSSAIKMEFGVDKCAVMHVQRGKVVNSDNLQLSETMTLRSLSEAETYRYLGMSQSLGIAVGDIKQSVKERFFCRLTKVLNSLLSGGNKARAFNGWVMPLLIYSFGILKWTQTELDSLDRRVRQLLTYHRMLHPRSSVMRLYIPRKWGGRGFLNAKTLHNREVCSLREYFLNNECGMHRDVVAVDRNLTPLSLANENWRKPVVMTTEDRKDVWKGKELHGRFYRALTGSDVDLLASVNWLRFGDLFGETEGFVCAIMDEVIKTNNYRKYIMKDGTVDICRACRRPGESLRHIISGCSHLANGEYLHRHNLVARIIHQQIALQYGLVESEVPYYKYAPAPVLENGRALLYWDRSIITDRTIVANKPDIVLVDRSQRRAVLVDITVPHDENLVKAEKDKLSKYLDLAHEVTAMWNVDSTIIVPIVVSANGLVAKSLDQHLKRLSLDGWIKGRMQKAVLLDTARIVRRFLSLQP

SEQ ID NO: 5784 - protein, 1207 aa, Crocallis elinguaria
MITRSRNKAGTASARQSPPPASSSPSSSSGDEYGTPLDTSASSDEDGPPSPPPPPPPARRGRPPLPARLGPAGHSVPRAAPATGGIVRRMRWTSDMNENCMRAYYGATEGGTNMSAYRDRMLPLFQTLEPSVAVSAQRLSDQVRAIQRLKLLDESVLDRLRLEALPIRATSASTRDLSVAPPVLAPLPAPSSVATRIDPVVDEDDCANISVSTQVNEQLRRALEDAILDYQYTPDSRPRLPRLPTNRRNLALMGALNVLLAPYLRASENLFDTHSIMYCGAIAVCRVARVKFPDADRAPRTAGSAPAWQVRIERRINTFRTLIAKLVCFSRGNNRPRVMRFVNQAFAGTGIRPQNYMAGVTERIDFLKQKIYAWVNRIRRYRERVDRYHQNRLFESDQRKVYRNWEGTDQRVSDGQLPDTNAMINFWRGIWSVPVEHTEGDWMRTVEQSCESIETMGSVTIDPIDVSCAIRTAQNWKSPGPDGLHNFWIKWIRCSHECLAVQFQEALELGSLPCFLTTGVTSLLHKSGSTTEAKNYRPITCLPTLYKLLTSILRVKINSHVVANNILAPAQNGCRVGSRGTKELLLIDTAICQRVRRNKGALSAAWIDYKKAYDSVPHSWLERILELYKIDATLRSFLSMCMRQWTTVLRQPGSGNSPSGPENFIKIERGIFQGDSLSPLWFCLALNPLSTLLRDSRLGCQLRREGEIISHLLYMDDLKLFAPKRPDLMELLKITEIFSSAIKMEFGVDKCAVMHVQRGKVVNSDNLQLSETMTLRSLSEAETYKYLGMSQSLGIAVGDIKQSVKERFFCRLTKVLNSLLSGGNKARAFNGWVMPLLIYSFGILKWTQTELDSLDRRVRQLLTYHRMLHPRSSVMRLYIPRKWGGRGFLNAKTLHNREVCSLREYFLNNECGMHRDVVAVDRNLTPLSLANENWRKPVVMTTEDRKDVWKGKELHGRFYRALTGSDVDLLASVNWLRFGDLFGETEGFVCAIMDEVIKTNNYRKYIMKDGTVDICRACRRPGESLRHIISGCSHLANGEYLHRHNLVARIIHQQIALQYGLVESEVPYYKYAPAPVLENGRALLYWDRSIITDRTIVANKPDIVLVDRSQRRAVLVDITVPHDENLVKAEKDKLSKYLDLAHEVTAMWNVDSTIIVPIVVSANGLVAKSLDQHLKRLSLDGWIKGRMQKAVLLDTARIVRRFLTLQP

SEQ ID NO: 5785 - protein, 1207 aa, Crocallis elinguaria
MITRSRNKAGTASARQSPPPASSSPSSSSGDEYGTPLDTSASSDEDGPPSPPPPPPPARRGRPPLPARLGPAGHSVPRAAPATGGIVRRMRWTSDMNENCMRAYYGATEGGTNMSAYRDRMLPLFQTLEPSVAVSAQRLSDQVRAIQRLKLLDESVLDRLRLEALPIRATSASTRDLSVAPLVLAPLPAPSSVATRIDPVVDEDDCANISVSTQVNEQLRRALEDAILDYQYTPDSRPRLPRLPTNRRNLALMGALNVLLAPYLRASENLFDTHSIMYCGAIAVCRVARVKFPDADRAPRIAGSAPAWQVRIERRINTFRTLIAKLVCFSRGNNRPRVMRFVNQAFAETGIRPQNYMAGVTERIDFLKQKIYAWVNRIRRYRERVDRYHQNRLFESDQRKVYRNWEGTDQRVSDGQLPDTNAMINFWRGIWSVPVEHTEGDWMRTVEQSCESIETMGSVTIDPIDVSCAIRTAQNWKSPGPDGLHNFWIKWIRCSHECLAVQFQEALELGSLPCFLTTGVTSLLHKSGSTTEAKNYRPITCLPTLYKLLTSILRVKINSHVVANNILAPAQNGCRVGSRGTKELLLIDTAICQRVRRNKGALSAAWIDYKKAYDSVPHSWLERILELYKIDATLRSFLGMCMRQWTTVLRQPGSGNSPSGPENFIKIERGIFQGDSLSPLWFCLALNPLSTLLRDSRLGCQLRREGEIISHLLYMDDLKLFAPKRPDLMELLKITEIFSSAIKMEFGVDKCAVMHVQRGKVVNSDNLQLSETMTLRSLSEAETYKYLGMSQSLGIAVGVIKQSVKERFFCRLTKVLNSLLSGGNKARAFNGWVMPLLIYSFGILKWTQTELDSLDRRVRQLLTYHRMLHPRSSVMRLYIPRNWGGRGFLNAKTLHNREVCSLREYFLNNECGMHRDVVAVDRNLTPLSLANENWRKPVVMTTEDRKDVWKGKELHGRFYRALTGSDVDLLASVNWLRFGDLFGETEGFVCAIMDEVIKTNNYRKYIMKDGTVDICRACRRPGESLRHIISGCSHLANGEYLHRHNLVARIIHQQIALQYGLVESEVPYYKYAPAPVLENGRALLYWDRSVITDRTIVANKPDIVLVDRSQRRAVLVDITVPHDENLVKAEKDKLSKYLDLAHEVTAMWNVDSTIIVPIVVSANGLVAKSLDQHLKRLSLDGWIKGRMQKAVLLDTARIVRRFLTLQP

SEQ ID NO: 5786 - protein, 1011 aa, Peribatodes rhomboidaria
MANTDVDGDRTSVNVSSQVSEHLRRALEDAISQYRYAPDSRPRLPRLPTHRRNMALMGALNVLLAPYLRASENLTDTHSILYCGAIAACRVARVKFPDTSRAPRPAGGVPAWQVRIERRISTFRTLIAKLLCFSRGNTRPRVMRFVTQAFAGTDIRPQYYLANVTERIDYLKQKVYAWANRIRRYRERVDRYWQNRLFQSDQRKVYRGWEGTEQCVIDGHRPDASAMIDFWRGIWSVPVEHTEGEWMRIVERECESIESMESILIDSVDVSCAIRTAQNWKSPGPDGLHNFWIKWIRCSHDRLAIQFQEALELGSLPSFMTTGVTFLLHKSGSTTDPKNYRPITCLPTIYKLLTSILRNKINTHIVANNVLAPAQNGCRVGSRGTKELLLIDMAISQQVRRSKGALSVAWIDYKKAYDSVPHSWLERILELYKIDITLKSFLSACMRQWTTVLCQPGGGEVSADPRDLIRIERGIFQGDSLSPLWFCLALNPLSTLLKDLGLGHRLRRGGEVISHLLYMDDLKLFAPKRQDLMELLKTTEVFSSAIKMEFGVDKCAVMHVQRGKVVNSPNLQLSETMTLRSLSEVETYKYLGMSESLGISVADIKKSIKERFFCRLTKVLNSLLSGGNKVRAFNGWVMPLLIYSFGILRWTQTELDALDRRVRQLLTTHRMLHPRSSVMRLYIPRKWGGRGMLNAKNLHNREVYRLRSFFRNNDCGMHCDVVAVDKGLTPLSLANENWRQPPVLSTEDRKIVWKGKELHGRFYRALTGPDVDLLASVNWLRFGDLFGETEGFACAIADEVIKTNNYRKYILKDGTFDICRACHRPGESLRHIISGCSHLANGEYLHRHNQVARIIHQQLALQYGLVESEVPYYKYAPASVLENGRALLYWDRSIITDRTIVANKPDIVLVDRSQRRAVLVDITIPHDENLEKAEKDKLSKYLDLAHEVTAMWDVDSTIIVPIVVTVNGLIAKSLDQHLKRLSLDGWIKGQIQKAVILDTCRIVRRFLTLQP

SEQ ID NO: 5787 - protein, 1212 aa, Pammene fasciana
MITRSKTRLQQASPPNARPPSSPASSVSSPSSSGDEFATAPDTSESSDERGPPPPPPRPPARRGRPPLPARLGLAGHPVPPRAPAAGGIVRRMRWTPAMNENVMRAYYGATEGGTNLCAYRDRMLPLFQALEPTIDTTAQRLSDQVRVIQRLKRLDDATLDRLRLEALSARAASTSARDPPATSPDPMPAPDLASGAPRIDPSADEEEIANQSLSSTANEQLRRTLEEAITQYRSTNITRPRLPRLPMNRRNLALMGALNDLLDPLLRTSKDLDDTHSIMYCGAIAACRVARVKFPDAERAPRTAGGVPAWQVRIERRINSFRTLIAKLICFRGGNNRPRVMRFVHQAFAGTDIEPRDYMANVTERIDFLKQKVYAWASRIRRYREREDRFRQNRLFQSDQRKVYRRWEEADPRVSDVRLPDATAMTDFWRSIWSVPVEHTEGEWMSVVARECESIEPMGAITISPDDVSCAIRTAQNWKSPGPDGLHNFWLKWFRCSHSRLATQFQQALELGSLPPSLTTGVTFLLYKSGSTTEAKNYRPITCLPTLYKLLTSILRAKINAHMVANNILASAQNGCRVGSRGTKELLLIDMTICQRVRRNRGALSAAWIDYKKAYDSVPHSWLERILELYKIDAALRSFLGACMRQWTTVLRQPRGGDDPPDPQDFIRIERGIFQGDSLSPLWFCLALNPLSTLLKDSGLGCRLQREGEVISHLLYMDDLKLFAPNNRDLLELLKTTEVFSNSIKMEFGVDKCAVMHVQRGKVVNSTNLQLSETMTFRSISESETYKYLGMSQSLGIEDAGIKQALRERFFGRLTKVLNSLLSGGNRVRAFNAWVMPLLTYSFGILRWTQTELDALDRRVRQLLTTHRMLHPRSSVMRLYIPRKCGGRGFLNAKNLHNREVYNLRNYFLNNECGMHRDVVAIDKGLTPLSLANENWRKPVVLSTEDRKAVWKSKELHGRFYGALTGPDVDLLASVNWLRFGDLFGETEGFACAIADEVIMTNNYRRYILKDGTVDICRACRRPGESLRHIISGCSHLANGEYLHRHNLVARIIHQQLALLYGLVAHEVPYYKYIPAPVLENGRATLYWDRSIITDRTIVANKPDIVVIDRPQRRAMLVDITVPCDVNLVKAEKDKSSKYLDLAHEVTAMWEVDSAIIVPIVVSANGLIAKSLDQHLERLSLRGCGWIKGQIQKAVILDTARIVRRFLSLRP

SEQ ID NO: 5788 - protein, 1212 aa, Pammene fasciana
MITRSKSRQQQASPPNARPPSSPASSVSSPSSSGDEFATAPDTSESSDECGPPPPPPRPPARRGRPPLPARLGLAGQPAPPRAPAAGGIVRRMRWTQTMNENVMRAYYGATEGGTNLCAYRVRLLPLFQALEPTTNVTAQRLSDQVRVIQRDKRLDDSTLDRLRLEALSAHAASTSARDPPATAPDPMPAPDLASGAPRVDPSADEEEIATQSVSSTANEQLRRTLEEAITQYRSTNIPRPRLPRLPMNKRNLALMGALNDLLDPFLRTSKDLDDTHSIMYCGAIAACRVARVKFPDAERAPRTAGGVPAWQVRIERRINSFRTLIAKLICFRGGNNRPRVMRFVHQAFAGMDIEPRDYMANVTERIDFLKQKVYAWASRIRRYRERVDRFRQNRLFQSDQRKVYRRWEEADPRVSDVRLPDATAMTDFWRSIWSAPVEHTEGEWMNVVERECESIEPMGAITISPDDVSCAIRTSQNWKSPGPDGLHNFWLKWFRCSHSRLATQFQHALELGSLPPSLTTGVTFLLYKSGSTTEAKNYRPITCLPTLYKLLTSILRAKINAHMVANNILASAQNGCRVGSRGTKELLLIDMTICQRVRRNRGALSAAWIDYKKAYDSVPHSWLERILELYKVDAALRSFLGACMRQWTTVLRQPGGGDDPPGPQDFIRIERGIFQGDSLSPLWFCLALNPLSTLLKDSGLGCRLRREGEVISHLLYMDDLKLFAPNNRDLLELLKTTEVFSSSIKMEFGVDKCAVMHVQRGKVVNSTNLQLSETMTFRSISESETYKYLGMSQSLGIEDVGIKQALKERFFGRLTKVLNSLLSGGNKVRAFNAWVMPLLTYSFGILRWTQTELDALDRRVRLLLTTHRMLHPRSSVMRLYIPRKCGGRGFLNAKNLHNREVYNLRNYFLNNECGMHRDVVTVDKNLTPLSLANENWRKPVVLSTEDRKAVWKSKELHGRFYGALTGPDVDLLASVNWLRFGDLFGETEGFACAIADEVIMTNNYRRYILKDGTVDICRACRRPGESLRHIISGCSHLANGEYLHRHNLVARIIHQQLALLYGLVAHEVPYYKYIPAPVLENDRATLYWDRSIITDRTIVANKPDIVVIDRPQRRAMLVDITVPCDVNLVKAEKDKSSKYLDLAHEVTAMWEVDSAIIVPIVVSANGLIAKSLDQHLERLSLRGCGWIKGQIQKAVILDTARIVRRFLTLRP

SEQ ID NO: 5789 - protein, 1204 aa, Pammene fasciana
MITRSKARQAQADTTNARPPPSPTPSDSSPSSSSDEAFATAADTSESSDECGLPSPPPRPPARRGRPPLPARLGLAGHPVPPKAPAAGGIVRRMRWTQKMNENCMRAYYGATEGGTNLCAYRVRLLPLFRALEPTINVTAQRLSDQVRVIQRDKRLDDSTLDRLRLEALSARAASTSARDPPATLPNPIPAPDLASGAPRVDPSADEEEIATQTVSSTANEQLRRTLEEAITQYRSTNIPRPRLPRLPMNRRNLALMGALNDLLDPILRTSKDLDDTHSIMYCGAIAACHVARVKFPDAERAPRTAGGVPAWQVRIERRINSFRTLIAKLICFRGGNNRPRVMRFVHQAFAGTGIEPRDYMANVTERIDFLKQKVYAWASRIRRYRERVDRFRQNRLFQSDQRKVYRRWEEADPRVSDARLPDATAMTDFWRSIWSAPVEHTEGEWMSVVERECESIEPMGAITISSAQNWKSPGPDGLHNFWLKWFRCSHSRLATQFQQALELGSLPPSLTTGVTFLLYKSGSTTEAKNYRPITCLPTLYKLLTSILRAKINAHIVANNILASSQNGCRVGSRGTKELLLIDMTICQRARRNRGALSAAWIDYKKAYDSVPHSWLERILELYKVDAALRSFLGACMRQWTTVLRQPGGGDDPPDPHDFIRIERGIFQGDSLSPLWFCLDLNPLSTLLKDSGLGCRLRREGEVISHLLYMDDLKLFAPNNRDLMELLKTTEVFSSSIKMEFGVDKCAVMHVQRGKVVNSTNLQLSETMTFRSISESETYKYLGMSQSLGIEDAGIKQTLKERFFGRLTKVLNSLLSGGNKVRAFNAWVMPLLTYSFGILRWTQTELDALDRRVRLLLTTHRMLHPRSSVMRLYIPRKCGGRGFLNAKNLHNREVYNLRNYFLNNECGMHRDVVAVDKSLTPLSLANENWRKPVVLSTEDRKAVWKSKELHGRFYGALTGPDVDLLASVNWLRFGDLFGETEGFACAIADEVIMTNNYQRYILKDGTVDICRACRRPGESLRHIISGCSHLANGEYLHRHNLVARIIHQQLALLYGLVDHEVPYYKYTPAPVLENGRATLYWDRSIITDRTIVANKPDIVIIDRSQRRAMLVDITVPCDVNLVKAEKDKSSKYLDLAHEVTAMWEVDSAIIVPIVVSANGLIAKSLDQHLERLSLRGCGWIKGQIQKAVILDTARIVRRFLSLRP

SEQ ID NO: 5790 - protein, 1210 aa, Pammene fasciana
MITRSKARAATTHARPPSPLASSSSPSTSSSSDDFETAPDTDESSDESGPPPPPPQPPARRGRPPLPARLGPTGHPVPPRAPAAGGIVRRMRWTCSMNENVMRAYYGATEGGTNLCAYRARILPLFQALEPTIDTTTQRLSDQVRVIQRLKRLDDATLDRLRLEALSARAASTSARDPPATSPDPMPAPDLASGAPRIDPSADEEYIASQSVSSTANEQLRRTLEEAITQYRSTNIPRPRLPRLPMNRRNLALMGALNDLLDPILRTSKDLDDTHSIMYCGAIAACRVARIKFPDAERAPRTAGGVPAWQVRIERRINSFRTLIAKLICFRGGNNRPRVMRFVYQAFAGTDIEPRDYMANITERIDFLRQKVYAWASRIRRYRERVDRFRQNRLFQSDQRKVYRRWEEADPRVSDVRLPDATAMTDFWRSIWSAPVEHTEGEWMNVVERECESIEPMGAITISPDDVSCAIRTSQNWKSPGPDGLHNFWLKWFRCSHSRLATQFQHALELGSLPPSLTTGVTFLLYKSGSTTEAKNYRPITCLPTLYKLLTSILRAKINAHMVANNILASAQNGCRVGSRGTKELLLIDMTICQRVRRNRGALSAAWIDYKKAYDSVPHSWLERILELYKVDAALRSFLGACMRQWTTVLRQPGGGDDPPGPQDFIRIERGIFQGDSLSPLWFCLALNPLSTLLKDSGLGCRLRREGEVISHLLYMDDLKLFAPNNRDLLELLKTTEVFSSSIKMEFGVDKCAVMHVERGKVVNSTNLQLSETMTFRSISESETYKYLGMSQSLGIEDVGIKQALKERFFGRLTKVLNSLLSGGNKVRAFNAWVMPLLTYSFGILRWTQTELDALDRRVRLLLTTHRMLHPRSSVMRLYIPRKCGGRGFLNAKNLHNREVYNLRNYFLNNECGMHRDVVTVDKNLTPLSLANENWRKPVVLSTEDRKAVWKSKELHGRFYGALTGPDVDLLASVNWLRFGDLFGETEGFACAIADEVIMTNNYRRYILKDGTVDICRACRRPGESLRHIISGCSHLANGEYLHRHNLVARIIHQQLALLYGLVAHEVPYYKYTPAPVLENGRATLYWDRSIITDRTIVANKPDIVVIDRPQRRAMLVDITVPCDVNLVKAEKDKSSKYLDLAHEVTAMWEVDSAIIVPIVVSANGLIAKSLDQHLERLSLRGCGWIKGQIQKAVILDTARIVRRFLSLRP

SEQ ID NO: 5791 - protein, 869 aa, Ennomos quercinarius
MRFVTQAFAGTGIRPQDYMACVTERIDFLKQKVYAWASRIRRYRERVDRYQQNRLFQSDQRKVYRNWEGTGQRVVDGQLPDANAMNEFWRSIWSVPVEHTEGDWMRVVERVCEPIESMGSITIDPEDISCAIRTAQNWKSPGPDGLHNFWIKWIRCSYPCLAIQFQEALEAGSLPSFMTTGVTFLLHKSGSTTEAKNYRPITCLPTLYKLLTSILRTKINSHIVANNILAPAQNGCRVGSRGTKELLLIDTAICQQVRRNRGALSTAWIDYKKAYDSVPHSWLERILELYKIDATLRSFLSACMRQWTTVLRQPGGGESVSDPQDFIRIERGIFQGDSLSPLWFCLALNPLSTLLGDSGLGYRLRRGGEIISHLLYMDDLKLFAPQRPQLIELLKITENFSNSINMEFGVDKCAVMHVHGGKVVNSTNLQLSETMTLRSLSESETYRYLGMSESLGISVGDVKRTVKERFFCRLTKVLNSLLSGGNKTRAFNGWVMPLLMYSFGILRWTQTELDALDRKVRQLLTSHRMLHPRSSVMRLYIPRKWGGRGFLNAKTLHNREVCSLRDYFLNNECGMHRDVVAVDKGLTPLSLANENWRKPVVLSTEDRRDVWKGKELHGRFYRALTGPDVDLHASVNWLRFGDLFGETEGFVCAIADEVIKTNNYRKYIMKDGTVDICRACRRPGESLRHIISGCSHLANGEYLHRHNLVARIIHQQLALQYGLVESEVPYYKYTPGPVLENGRALLYWDRSIITDRTIVANKPDIVLVDRSQRRAVLVDITIPHDENLVKAEKDKLSKYLDLAHEVTAMWNVDSTSIVPIVVSANGLIAKSLDQHLERLSLDGWIKGQIQKAVLLDTARIVRRFLTLQP

SEQ ID NO: 5792 - protein, 1209 aa, Cydia splendana
MQTRSKTRAQLASPRNARPPPPSASSVSSQSSSGDEFATAPDTSESSDECGPPPPPPRPPARRGRPPLSARLGPAGHPAPPTTPAAGGVVRRMRWSQTMNENVMRAYYGATEGGTNLCAYRVRMLPLFQALEPTIDVTAQRLSDQVRVIQRQKRLDDSTLDRLRMEALSARAASTSARDPPATSPDPVPAPDQVPGAPRVDLSADEEEFAQSVSSTANEQLRRTLDEAITQYRSTPNTRPRLPRLPMNRHNLALMGALNALLEPYLRTSKDLDDTHAIMYCGATAACRVARVKFPDSERAPRTAGGAPAWQVRIERRISSFRTLIAKLICFRGGNNRPRVMRFVSQAFAGTDTRPRDYMANVTERIDFLKQKLYAWANRIRRYRERVDRFQQNRLFQSDQRKMYRKWEETNLRESDSQPPDATVMNDFWRSIWSVPVGHTEGSWMSVVERECESIEPMGAVTISPDDVSCAIRTAQNWKSPGPDGLHNFWLKWFRCSYSCLAAQFQQALELGSLPPSLTTGVTFLLYKSGSTTEAKNYRPITCLPTLYKLLTSILRAKINAHIVANNILASAQNGCRVGSRGTKELLLIDMTICQQIRRTKGALSAAWIDYKKAYDSVPHSWLGRVLELYKVDAALRAFLSACMGQWTTVLRQPGGGDDRPGPQDFIRIERGIFQGDSLSPLWFCLALNPLSTLLKDLGLGCRLRREGEVISHLLYMDDLKLFAPNTQGLLELLKTTEDFSSAINMEFGVDKFAVMHVQRGRVVNSTNLQLSETMSFRSISESETYKYLGMSQSLGIEDEGIRRSVKERFFSRLTKVLNSLLSGGNKVRAFNAWVMPLLTYSFGILRWTQTELDALDRRVRSLLTTHRMLHPRSSVMRLYIPRKCGGRGFLNAKDLHNREVYNLRNYFLNNECGMHRDVVAVDRNLTPLSLANENWRKPVVLSTADRKAAWESKVLHGRFYKALTGPDVDLLASVNWLRFGDLFGETEGFACAIADEVMMTNNYRKYILKDGMVDICRACRRPGESLRHIISGCSHLANGEYLHRHNLVARIIHQQLALLYGLVDREVPYYKYLPAPVLENGRATLYWDRSIITDRTIVANKPDIVLIDRSQRRAVLADVTIPHDENLVKAEKDKSSKYLDLAHEITAMWDVDSTIIVPIVVSANGLIAKSLDQHLERLLLGGWIKGQMQKAVILDTARIVRRFLTLRP

SEQ ID NO: 5793 - protein, 963 aa, Cydia splendana
MNKHNLALMGALNALLEPYLRTSKDLDDTHAIMYCGAIAACRVARVKFPDSERAPRTAGGAPAWQIRIERRISSFRTLIAKLICFRGGNNRPRVMRFVNQAFVGTDIRPRDYMANVTERIDFLKQKVYAWANRIRRYRERVDRFQQNRLFQSDQRKMYRRWEETNLRASDSRPPDATVMNDFWRSIWSVPVGHTEGSWMSVVERECESIEPMGAVTISPDDVSCAIRTAQNWKSPGPDGLHNFWLKWFRCSHSYLAAQFQQALELGSLPPSLTTGVTFLLYKSGSTTEAKNYRPITCLPTLYKLLTSILRAKINAHIVANNILASAQNGCRVGSRGTKELLLIDMTICQQIRRTKGALSAAWIDYKKAYDSVPHSWLGRVLELYKVDAALRAFLSACMGQWTTVLRQPGGGDDRPGPQDFIRIERGIFQGDSLSPLWFCLALNPLSTLLKDLGLGCRLRREGEVISHLLYMDDLKLFAPNTQGLLELLKTTEVFSSAINMEFGVDKCAVMHLQQGKVVNSTNLQLSETMSFRSISESETYKYLGMSQSLGIEDEGIRRSVKERFFSRLTKVLNSLLSGGNKVRAFNAWVMPLLTYSFGILRWTQTELDALDRRVRSLLTTHRMLHPRSSVMRLYIPRKCGGRGFLNAKDLHNREVYNLRNYFLNNECGMHRDVVAVDRNLTPLSLANENWRKPVVLSTADRKAAWESKALHGRFYKALTGPDVDLLASVNWLRFGDLFGETEGFACAIADEVMMTNNYRKYILKDGTVDICRACRRPGESLRHIISGCSHLANGEYLHRHNLVARIIHQQLALLYGLVDREVPYYKYLPAPVLENGRATLYWDRSIITDRTIVANKPDIVLIDRSQRRAVLADVTIPHDENLVKAEKDKSSKYLDLAHEITAIWDVDSTIIVPIVVSANGLIAKSLDHHLERLSLGGWIKGQMQKAVILDTARIVRRFLTLRP

SEQ ID NO: 5794 - protein, 1208 aa, Cydia splendana
MITRSKARSQASTTANARPPPSPVSSVSSQSSGDEFATAPDTSESSDECGPPPPPPRPPARRGRPPLPARLGPAGHLAPPTAPAAGGVVRRMRWSQTMNENVMRAYYGATEGGTDLCAYRVRMLPLFQTLEPTIDVTAQRLSDQVRVIQRLKRLDDSTLDRLRLEALSARAASTSVRDPPATSPDPVPAPDQAPEAPRVDLCADEEEFAQSVSSTANEQLRRTLDEAITQYRSTPNTRPRLPRLPMNRHNLALMGALNALLEPYLRTSKDLDDTHAIMYCGAIAACRVARVKFPDSERAPRTAGGAPAWQIRIERRISSFRTLIAKLICFRGGNNRPRVMRFVNQAFAGTDIRPRDYMANITERIDFLKQKVYAWANRIRRYRERVDRFQQNRLFQSDQRKMYRKWEETNPRASDSQPPDATVMNDFWRSIWSVPVGHTEGSWMSVVERECESIEPMGAVTISPDDVSCAIRTAQNWKSPGPDGLHNFWLKWFRCSHSCLAAQFQQALELGSPPPSLTTGVTFLLYKSGSTTEAKNYRPITCLPTLYKLLTSILRAKINAHIVANNILASAQNGCRVGSRGTKELLLIDMTICQQIRRNRGALSAAWIDYKKAYDSVPHSWLERVLELYKVDTALRAFLSACMRQWTTVLRQPGGGDESPGPQDFIRIERGIFQGDSLSPLWFCLALNPLSTLLKDLELGCRLRRGGEVISHLLYMDDLKLFAPNSQDLVELLKTTEVFSNAINMEFGVDKCAVMHVQRGKVVNSTNLQLSETMSFRSISESETYKYLGMSQSLGIEEEGIRRSVKERFFSRLTKVLNSLLSGGNKVRAFNAWVMPLLTYSFGILRWTQTELDALDRRVRSLLTTHRMLHPRSSVMRLYIPRKCGGRGFLNAKDLHIREVYNLRNYFLSNECGMHRDVVAVDRNLTPLSLANENWRKPVVLSTADRKAAWESKVLHGRFYKALTGPDVDLLASVNWLRFGDLFGETEGFACAIADEVMMTNNYRKYILKDGTVDICRACRRPGESLRHIISGCSHLANGEYLHRHNLVARIIHQQLAVLYGLVDREVPYYKYSPAPVLENGRATLYWDRSIITDRTIVANKPDIVLIDRSQRRTVLVDVTIPHDENLVKAEKDKSSKYLDLAHEITAMWDVDSTIIVPIVVSANGLIAKSLDQHLERLSLGGWIKGQMQKAVILDTARIVRRFLTLRP

SEQ ID NO: 5795 - protein, 963 aa, Cydia splendana
MNRRNLALMGALNALLEPYLRTSKDLDDTHSIMYCGAIAACRVARIKFPDAERAPRTAGGVPAWQARIERRISSFRTLIAKLICFRGGNNRPRVMRFVNQAFAGTDIRPRDYMANVTERIDFLKQKVYAWANRIRRYRERVDRFQQNRLFQSDQRKVYRRWEETNLRTPDTQPPDATAMTNFWRSIWSVPVGHTEGSWMSVVERECESIEPMGAVTISPDDVSCAIRTAQNWKSPGPDGLHNFWLKWFRCSHSRLAAQFQQALELGSLPPSLTTGVTSLLYKSGSTTEAKNYRPITCLPILYKLLTSILRAKINAHIVANNILASAQNGCRVGSRGTKELLLIDMTICQQIWRNRGALSAAWIDYKKAYDSVPHSWLGRVLELYKVDAALRAFLSACMRQWTTVLRQPGGRDDRPGPQDFIRIERGIFQGDSLSPLWFCLALNPLSTLLKDLGLGCRLRREGEVISHLLYMDDLKLFAPNSQDLLELLKTTEVFSSAIHMEFGVDKCAVMHVQRGRVVNSTNLQLSETMSFRSISESETYKYLGMSQSLGIEDEGIRRSVKERFFSRLTKVLNSLLSGGNKVRAFNAWVMPLLTYSFGILRWTQTELDALDRRVRSLLTTHRMLHPRSSVMRLYIPRKCGGRGFLNAKDLHNREVYNLRNYFLNNECGMHRDVVAVDRNLTPLSLANENWRKPVVLSTADRKAAWESKVLHGRFYKALTGPDVDLLASVNWLRFGDLFGETEGFACAIADEVMMTNNYRKYILKDGTVDICRACRRPGESLRHIISGCSHLANGEYLHRHNLVARIIHQQLALLYGLVDREVPYYKYLPAPVLENGHATLYWDRPIITDRTIVANKPDIVIIDRSQRRAVLVDITIPHDENLVKAEKDKSSKYLDLAHEITAMWDVDSTIIVPIVVSVNGLIAKSLDQHLERLSLGGWIKGQMQKAVILDTARIVRRFLSLQP

SEQ ID NO: 5796 - protein, 1120 aa, Cydia splendana
MDMRWTRNMNENVMRAYYGATEGGTQLSAYRSRILPLFQALEPTINVSEQRLSDQVRVIQRLKRLDDATLDRLRQEALSARADSTSVRDLPATSPDPVPAPDLAPGAPRVDFYTDEGDFASQNVNTTANEQLRRTLEEAITQYRVTTNSRPRLPRLPMNRRNLALMGALNALLEPHLRTSKDLDDTHSIMYCGAIAACRVARVKFPDTERAPRTVGGVPAWQARIERRIGSFRTLIAKLICFRGGNNRPRVMRFVNQAFAGTDIRPRDYMANVTERIDFLKQKVYAWANRIRRYRERVDRFQQNRLFQSDQRKVYRKWEEANLRAPDTQPPDATAMTDFWRSIWSVPVGHTEGGWMSVVERECESIEPMGAVTTSPDDVSCAIRTAQNWKSPGPDGLHNFWLKWFRCSHSRLAVQFQQALELGSLPPSLTTGVTFLLYKSGSTTEAKNYRPITCLPTLYKLLTSILRAKINAHIVANNILASAQNGCRVGSRGTKELLLIDMTICQQIRRNKRALSAAWIDYKKAYDSVPHSWLGRVLELYKVDAALRAFLSACMRQWTTVLRQPGGGGDRSGPQDFIRIERGIFQGDSLSPLWFCLALNPLSTLLKDLGLGCRLRREGEVISHLLYMDDLKLFAPNSQDLLELLKTTEVFSSAIHMEFGVDKCAVMHVQRGRVVNSTNLQLSETMSFRSISESETYKYLGMSQSLGIEDEGIRRSVKERFFSRLTKVLNSLLSGGNKVRAFNAWVMPLLTYSFGILRWTQTELDALDRRVRSLLTAHRMLHPRSSVMRLYIPRKCGGRGFLNAKDLHNHEVYNLRNYFLNNECGMHRDVVAVDRNLTPLSLANENWRKPVVLSTADRKAAWESKVLHGRFYKALTGPDVDLLASVNWLRFGDLFGETEGFACAIADEVMMTNNYRKYILKDGTVDICRACRRPGESLRHIISGCSHLANGEYLHRHNLVARIIHQQLALLYDLVDREVPYYKYLPAPVLENGRATLYWDRSIITDRTIVANKPDIVIIDRSQRRAVLVDITIPHDENLVKAEKDKSSKYLDLAHEITAMWDVDSTIIVPIVVSVNGLIAKSLDQHLERLSLGGWIKGQMQKAVILDTARIVRRFLSLQP

SEQ ID NO: 5797 - protein, 963 aa, Cydia splendana
MNRHNLALMGALNALLEPYLRTSKDLDDTHTIMYCGAIAACRVARVKFPDSERAPRTAGGAPAWQIRIERRISSFRTLIAKLICFRGGNNRPRVMRFVNQAFVGTDIRPRDYMANVTERIDFLKQKVYAWANRIRRYRERVDRFQQNRLFQSDQRKMYRKWEETNLRASDSRPPDATVMNDFWRSIWSVPVGHTEGSWMSVVERECESIEPMGAVTISPDDVSCAIRTAQNWKSPGPDGLHNFWLKWFRCSHSYLAAQFQQALELGSLPPSLTTGVTFLLYKSGSTTEAKNYRPITCLPTLYKLLTSILRAKINAHIVANNILASAQNGCRVGSRGTKELLLIDMTICQQIRRTKGALSAAWIDYKKAYDSVPHSWLGRVLELYKVDAALRAFLSACMGQWTTVLRQPGGGDDRPGPQDFIRIERGIFQGDSLSPLWFCLALNPLSTLLKDLGLGCRLRREGEVISHLLYMDDLKLFAPNTQGLLELLKTTEVFSSAINMEFGVDKCAVMHVQRGKVVNSTNLQLSETMSFRSISESETYKYLGMSQSLGIEDEGIRRSVKERFFSRLTKVLNSLLSGGNKVRAFNAWVMPLLTYSFGILRWTQTELDALDRRVRSLLTTHRMLHPRSSVMRLYIPRKCGGRGFLNAKDLHNREVYNLRNYFLNNECGMHRDVVAVDRNLTPLSLANENWRKPVVLSTADRKAAWESKALHGRFYKALTGPDVDLLASVNWLRFGDLFGETEGFACAIADEVMMTNNYRKYILKDGTVDICRACRRPGESLRHIISGCSHLANGEYLHRHNLVARIIHQQLALLYSLVDREVPYYKYLPAPVLENGRATLYWDRSIITDRTIVANKPDIVLIDRSQRRAVLADVTIPHDENLVKAEKDKSSKYLDLAHEITAMWDVDSTIIVPIVVSANGLIAKSLDQHLERLSLGGWIKGQMQKAVILDTARIVRRFLTLRP

SEQ ID NO: 5798 - protein, 1211 aa, Agriopis aurantiaria
MITRAKTRAAESNARLPPPPASSSSPSTSSGEDEYHTTREASGSSSDTSGPGTPPPPPPARRGRPPLPARLGPVGHSATRPAPATGGVVRRMRWSRIMNEDCMRAYYRATEGGTNLSAYCARMLPLFQALQPTITVSAQRLSDQVRAIQRCNMLDQSVLDRLRLEEVRTRPTPASTRNPPVASSAPTLASVPASVGTLAALADTAVDEEDLASGVSDQVKEQLRGALEDAISQYRFTSDSRPRLPRLPTHRRNLALMGALNALLAPYLRASEDLVDTHSILYCGAIAACRVARVKFPDTNRAPRTAGGVPAWQVRIERRINTFRTLIAKLICFRRGNNRPRVMRFVTQAFAGTDIRPQHYLANVTERIDYLKQKVYAWANRIRRYRERVDRYWQNRLFQSDQRKVYRGWEETDQRVSDGQRPDANAMINFWRGIWSVPVNHTEGDWMRVVERECESIEPMGSILIDPVDVSCAIRMAQNWKSPGPDGLHNFWIKWIRCSHDRLATQFQVALELGSLPSFMTTGVTFLLHKSGSTTEAKNYRPITCLPTIYKLLTSILRNKINAHIVANNVLAHAQNGCRVGSRGTKELLLIDTAISQQVRRNRGALSAAWIDYKKAYDSVPHSWLERVLELYKIDTTLKSFLCACMRQWTTVLRQPGGGDGTSGPQDLIRIERGIFQGDSFSPLWFCLALNPLSSLLRDSGLGYRLRRDGQVISHLLYMDDLKLFTPKRQDLVELLKITDVFSSAIRMEFGVDKCAVMHVQRGKVVNSPNLQLSEVMTLRSLSEAETYKYLGMSESLGISVENIKKSVKERFFCRLTKVLNSLLSGGNKVRAFNGWVMPLLIYSFGILRWTQTELDALDRRVRQLLTSHRMLHPRSSVMRLYIPRKWGGRGFLNAKNLHNREVCSLRDFFRNSESGMHRDVVAVDRGLTPLSLANENWRKPSVLSIEDRRDVWKGKELHGRFYRALTGPDVDLLSSVNWLRFGDLFGETEGFACAIADEVIKTNNYRKYIMKDGTVDICRACHRPGESLRHIISGCSHLANGEYLHRHNQVARIIHQQLALRYGLVESEVPYYKYAPAPVLENGRALLYWDRSIITDRTIVANKPDIVLVDRSQRRAVLVDITIPHDENLVKAEKDKLSKYLDLAHEVTAMWDVDSTIIVPIVVSVNGLIAKSLDQHLKRLSLDGWVKGQMQKAVILDTARIVRRFLTLQP

SEQ ID NO: 5799 - protein, 1214 aa, Agriopis aurantiaria
MITRSKTSAAARLTNAQPPPPPASSSSPSSSSGEDEYHTTREASGSSSDTSGPGTPPPPPPARRGRPPLPARLGLVGHSATRPAPATGGVVRRMRWSPTMNENCMRAYYRATEGGTNLSAYCARMLPLFQDLEPTVTVSAQRLSDQVRAIHRCKLLDDSVLDRLRLEELRARPTPALMRDPPVASSAPTLASLPASVATLAAPADPVVDEGDLTSNSVSDQVREQLRGALEDAISQYRFAPDSRPRLPRLPTHRRNLALMGALNALLAPYLRASEDLVDTHSILYCGAIAACRVARVKFPDTNRAPRTAGGVPAWQVRIERRISTFRTLIAKLICFSRGNNRPRVMRFVTQAFAGTEIRPQHYLANVMERIDYLKQKVYAWVSRIRRYRERVNRYWQNRLFQSDQRKVYRGWEETDQRVSDGQLPDANAMINFWRGIWSVPVEHTEGDWMRVVERECESIEPMGSILIDSVDVSCAIRTAQNWKSPGPDGLHNFWIKWIRCSHDRLATQFQEALELGSLPSFMTTGVTFLLHKSGSTTEAKNYRPITCLPTIYKLLTSILRNKINAHIVANNVLAHAQNGCRVGSRGTKELLLIDTAISQQVRRNKGALSAAWIDYKKAYDSVPHSWLERVLELYKIDTTLKSFLGACMRQWTTVLRQPGGGDGTSGPQDLIRIERGIFQGDSFSPLWFCLALNPLSTLLRDSGLGYRLRRDGQVISHLLYMDDLKLFTPKRQDLVELLKITEVFSSAIRMEFGVDKCAVMHVQRGKVVNSPNLQLSEVMTLRSLSEAETYKYLGMSESLGISVENIKKSVKERFFCRLTKVLNSLLSGGNKVRAFNGWVMPLLIYSFGILRWTQTELDALDRRVRQLLTSHRMLHPRSSVMRLYIPRKWGGRGFLNAKNLHNREVCSLRDFFRNSESGMHRDVVAVDRGLTPLSLANENWRKPSVLSIEDRRDVWKGKELHGRFYRALTGPDVDLLSSVNWLRFGDLFGETEGFACAIADEVIKTNNYRKYIMKDGTVDICRACHRPGESLRHIISGCSHLANGEYLHRHNQVARIIHQQLALRYGLAESEVPYYKYAPAPVLENGRALLYWDRSIITDRTIVANKPDIVLVDRSQRRAVLVDITIPHDENLVKAEKDKLSKYLDLAHEVTAMWDVDSTIIVPIVVSVNGLIAKSLDQHLKRLSLDGWIKGQMQKAVILDTARIVRRFLTLQP

SEQ ID NO: 5800 - protein, 1214 aa, Agriopis aurantiaria
MITRSKTSAAARLTNAQPPPPPASSSSPSSSSGEDEYHTTREASGSSSDTSGPGTPPPPPPARRGRPPLPARLGLVGHSATRPAPATGGVVRRMRWSPTMNENCMRAYYRATEGGTNLSAYCARMLPLFQDLEPTVTVSAQRLSDQVRAIHRCKLLDDSVLDRLRLEELRARPTPALMRDPPVASSAPTLASLPASVATLAAPADPVVDEGDLTSNSVSDQVREQLRGALEDAISQYRFAPDSRPRLPRLPTHRRNLALMGALNALLAPYLRASEDLVDTHSILYCGAIAACRVARVKFPDTNRAPRTAGGVPAWQVRIERRISTFRTLIAKLICFSRGNNRPRVMRFVTQAFAGTEIRPQHYLANVMERIDYLKQKVYAWVSRIRRYRERVNRYWQNRLFQSDQRKVYRGWEETDQRVSDGQLPDANAMINFWRGIWSVPVEHTEGDWMRVVERECESIEPMGSILIDSVDVSCAIRTAQNWKSPGPDGLHNFWIKWIRCSHDRLATQFQEALELGSLPSFMTTGVTFLLHKSGSTTEAKNYRPITCLPTIYKLLTSILRNKINAHIVANNVLAHAQNGCRVGSRGTKELLLIDTAISQQVRRNRGALSAAWIDYKKAYDSVPHSWLERVLELYKIDTTLKSFLGACMRQWTTVLRQPGGGDGTSGPQDLIRIERGIFQGDSFSPLWFCLALNPLSTLLRDSGLGYRLRRDGQVISHLLYMDDLKLFTPKRQDLVELLKITEVFSSAIRMEFGVDKCAVMHVQRGKVVNSPNLQLSEVMTLRSLSEAETYKYLGMSESLGISVENIKKSVKERFFCRLTKVLNSFLSGGNKVRAFNGWVMPLLIYSFGILRWTQTELDALDRRVRQLLTSHRMLHPRSSVMRLYIPRKWGGRGFLNAKNLHNREVCSLRDFFRNSESGMHRDVVAVDRGLTPLSLANENWRKPSVLSIEDRRDVWKGKELHGRFYRALTGPDVDLLSSVNWLRFGDLFGETEGFACAIADEVIKTNNYRKYIMKDGTVDICRACHRPGESLRHIISGCSHLANGEYLHRHNQVARIIHQQLALRYGLAESEVPYYKYAPAPVLENGSALLYWDRSIITDRTIVANKPDIVLVDRSQRRAVLVDITIPHDENLVKAEKDKLSKYLDLAHEVTAMWDVDSTIIVPIVVSVNGLIAKSLDQHLKRLSLDGWIKGQMQKAVILDTARIVRRFLTLQP

SEQ ID NO: 5801 - protein, 1215 aa, Erannis defoliaria
MITRSQSRRNTAERNARPPSPPAPSSPSASSGDDVFLTPRESSVSSSNSDVSGPRTPAPPPPARRGRPPLPARLGPAGLPASRPALAAGGVVRRMRWSQTNNENCMRAYYGATEGGTNLSAYRVRMLPLFQALEPTVTVSAQRLSDQVRAIQRLNLLDQSLLDRLRLEAQSARPTPASTRDLDVASSAPTLALVPTSAATLVTSADPVVDEGDCTGMSVSTQVSEQLRRALEDAIGQYRFTPNSRPRLPRLPTHRRNLALMGALNALLAPYLRASEDLTDTHSILYCGAIAACRVARVKFPDTNRAPRPAGDVPAWQLRIERRISTFRTLIAKLICFSRGNNRPRVMRFVTQAFAGTGIRPQQYMANVTERIDYLKQKVYAWANRIRRYRERVDRYWQNRLFQSDQRKVYRNWEGNEQRVSDGQLPDASAMTNFWRGIWSVPVEHTEGDWMRVVERECESIEPMGSILIDPVDVSCAIRTAQNWKSPGPDGLHNFWIKWFRCSHDRLATQFQEALELGSLPSFMTTGVTFLLHKSGSTTEPKNYRPITCLPTIYKLLTSILSTKINAHIVANNVLAPAQNGCRVGSRGTKELLLIDMAISQQVRRNKGALSAAWIDYKKAYDSVPHSWLERILELYQIDATLKSFLGACMRQWTTVLRQPGGGNGSSDSQDLIRIERGIFQGDSLSPSWFCLALNPLSILLKDSGLGYRLRRGGEVISHLLYMDDLKLFAPKHQDLLELLKTTQVFSSAISMEFGVDKCAVMRVQRGKVVNSPDLQLSEIMTLRSLSEAETYKYLGMSESLGISVVDIKKSVKERFFCRLTKVLNSLLSGGNKARAFNGWVMPLLIYSFGILRWTQTELDALDRRVRQLLTAHRMLHPRSSVMRLYIPRKWGGRGFLNAKNLHNREVCSLRDYFLNNECGMHRDVVTVDKGLTPLSLANENWRTPSVLSTDDRKEVWKSKELHGRFYRVLSGPDVDLLASVNWLRFGDLFGETEGFACAIADEVIKTNNYRKYIMKDGTVDICRACHRPGESLRHIISGCSHLANGEYLHRHNQVARIIHQQLALQYGLVESEVPYYKYAPAPVLENGRALLYWDRSIITDRTIVANKPDIVMVDRSQRRAVLVDVTIPHDENLVKAEKDKLSKYLDLAFEITAMWDVDSTIIVPIVVSANGLIAKSLDQYLKRLSLDGWVKGQIQKAVVLDTARIVRRFLTLQP

SEQ ID NO: 5802 - protein, 1213 aa, Erannis defoliaria
MITRSKKRNAAVQHARPTPPPVPSSSPSSSSPSEEEFHTCGTSSSSEDVSGPRTPTPPIPVRRGRPPLPARLGPAGQPASRPALAAGGVVRRMRWSQTNNENCMRAYYGATEGGTNLTAYRVRMLSLFQTLEPTVTVSAQRISDQVRAIQRLNLLDQPLLDRLRLEVQSARPTPASTRDLDVASSAPTLASVPTSAATLATSADPVLDEGDCTGMSVSTQVSEQLRRALEDAIGQYRFALNSRPRLPRLPTHRRNLALMGALNALLAPYLRASEDLTDTHSILYCGAIAACRVARVKFPDTNRAPRPAGDVPAWQLRIERRISTFRTLIAKLICFSRGNNRPRVMRFVTQAFAGTGIRPQQYMASVTERIDYLKQKVYAWANRIRRYRERVDRYWQNRLFQSDQRKVYRNWEGTEQRVSDGQLPDASAMTNFWRGIWSVPVEHTEGDWMRVVERECESIEPMGSILIDPVDVSCAIRTAQNWKSPGPDGLHNFWIKWFRCSHDRLATQFQEALELGSLPSFMTTGVTFLLHKSGSTTEPKNYRPITCLPTIYKLLTSILSTKINAHIVANNVLAPAQNGCRVGSRGTKELLLIDMAISQQVRRNRGALSAAWIDYKKAYDSVPHSWLERILELYQIDTTVKSFLGACMRQWTTVLRQPGGGNGSSDSQDLIRIERGIFQGDSLSPSWFCLALNPLSTLLKNSGLGYRLRRGGEIISHLLYMDDLKLFAPKHQDLLELLKTTQVFSSAIRMEFGVDKCAVMRVQRGKVVNSPDLQLSEIMTLRSLSEAETYKYLGMSESLGISVVDIKKSVKERFFCRLTKVLNSLLSGGNKARAFNGWVMPLLIYSFGILRWTQTELDALDRRVRQLLTAHRMLHPRSSVMRLYIPRKWAGRGFLNAKNLHNREVCSLRDYFLNNECGMHRDVVTVDKGLTPLSLANENWRRPSVISTDDRKEVWKSKELHGRFYRALTGPDVDLLASVNWLRFGDLFGETEGFACAIADEVIKTNNYRKYIMKDGTVDICRACHRPGESLRHIISGCSHLANGEYLHRHNQVARIIHQQLALQYGLVESEVPYYKYAPAPVLENGRALLYWDRSIITDRTIVANKPDIVMVDRSQRRAVLVDVTIPHDENLVKAEKDKLSKYLDLAFEITAMWDVDSTIIVPIVVSANGLIAKSLDQYLKRLSLDGWVKGQIQKAVVLDTARIVRRFLTLQP

SEQ ID NO: 5803 - protein, 1215 aa, Erannis defoliaria
MITRSQSRRNTAERNARPPSPPAPSSPSASSGDDVFLTPRESSVSSSNSDVSGPRTPAPPPPARRGRPPLPARLGPAGLPASRPALAAGGVVRRMRWSQTNNENCMRAYYGATEGGTNLSAYRVRMLPLFQALEPTVTVSAQRLSDQVRAIQRLNLLDQSLLDRLRLEVQSARPTPASTRELDVASSAPTLALVPTSAATLVTSADPVVDEGDCTGMSVSTQVSEQLRRALEDAIGQYRFTPNSRPRLPRLPTHRRNLALMGALNALLAPYLRASEDLTDTHSILYCGAIAACRVARVKFPDTNRAPRPAGDVPAWQLRIERRISTFRTLIAKLICFSRGNNRPRVMRFVTQAFAGTGIRPQQYMANVTERIDYLKQKVYAWANRIRRYRERVDRYWQNRLFQSDQRKVYRNWEGNEQRVSDGQLPDASAMTNFWRGIWSVPVEHTEGDWMRVVERECESIEPMGSILIDSVDVSCAIRTAQNWKSPGPDGLHNFWIKWFRCSHDRLATQFQEALELGSLPSFMTTGVTFLLHKSGSTTEPKNYRPITCLPTIYKLLTSILSTKINAHIVANNVLAPAQNGCRVGSRGTKELLLIDMAISQQVRRNKGALSAAWIDYKKAYDSVPHSWLERILELYQIDATLKSFLGACMRQWTTVLRQPGGGNGSSDSQDLIRIERGIFQGDSLSPSWFCLALNPLSTLLKDSGLGYRLRRGGEVISHLLYMDDLKLFAPKHQDLLELLKTTQVFSSAISMEFGVDKCAVMRVQRGKVVNSPDLQLSEIMTLRSLSEAETYKYLGMSESLGISVVDIKKSVKERFFCRLTKVLNSLLSGGNKAHAFNGWVMPLLIYSFGILRWTQTELDALDRRVRQLLTAHRMLHPRSSVMRLYIPRKWGARGFLNAKNLHNREVCSLRDYFLNNECGMHRDVVTVDKGLTPLSLANENWRTPSVLSTDDRKEVWKSKELHGRFYRVLSGPDVDLLASVNWLRFGDLFGETEGFACAIADEVIKTNNYRKYIMKDGTVDICRACHRPGESLRHIISGCSHLANGEYLHRHNQVARIIHQQLALQYGLVESEVPYYKYAPAPVLENGRALLYWDRSIITDRTIVANKPDIVMVDRSQRRAVLVDVTIPHDENLVKAEKDKLSKYLDLAFEITAMWDVDSTIIVPIVVSANGLIAKSLDQYLKRLSLDGWVKGQIQKAVVLDTARIVRRFLTLQP

SEQ ID NO: 5804 - protein, 1216 aa, Erannis defoliaria
MITRSKAIRNAAEQHSARPPSPPAPSSPSASSGEDVFVTPRESSASSTDSDVSGPRTPAPPPPARRGRPPLPARLGPAGLPASRPALAAGGVVRRMRWSQTNNENCMRAYYRATEVGTNLTAYRVRMLSLFQALEPTVTVSAQRLSDQVRAIQRLNLLDQSLLDRLRLEAQSARSTPVSTRDSHVASSAPTLASMPTSVATLATPADPVVDEGDDTGMSVTTQVSEQLRRALEDAISQYRFALNSRPRLPRLPTHRRNLALMGALNALLAPYLRASEDLTDTHSILYCGAVAACRVARVKFPDSNRAPRTAGDVPAWQARIERRISTFRTLIAKLICFSRGNNRPRVMRFVTQAFAGTGIRPQQYMASVTERIDYLKQKVYAWASRIRRYRERVDRYWQNRVFQSDQRKVYRNWEGAEQRVSDGHLPDANAMTNFWRGIWSVPVEHTEGDWMRVVERECESIEPMGSILIDPVDVSCAIRTAQNWKSPGPDGLHNFWIKWFRCSHDRLATQFQEALELGSLPSFMTTGVTFLLHKSGSTTEPKNYRPITCLPTIYKLLTSILSTKINTHIVANNVLAPAQNGCRVGSRGTKELLLIDMAISQQVRRNKGALSAAWIDYKKAYDSVPHSWLERILELYKIDTTLKSFLSACMRQWTTVLRQPGGGNDSFDPQDLIRIERGIFQGDSLSPSWFCLALNPLSTLLKDSGLGYRLRRGGEVISHLLYMDDLKLFAPKHQDLLELLKTTQVFSSAIRMEFGVDKCAVMRVQRGKVVNSPDLQLSEIMTLRSLSEAETYKYLGMSESLGISVVDIKKSVKERFFCRLAKVLNSLLSGGNKARAFNGWVMPLLIYSFGILRWTQTELDALDRRVRQLLTAHRMLHPRSSVMRLYIPRKWGGRGFLNAKNLHNREVCSLRDYFLNNECGMHRDVVTVDKGLTPLSLANENWRRPSVLSTDDRKDVWKSKELHGRFYRALSGPDVDLLASVNWLRFGDLFGETEGFACAIADEVIKTNNYRKYIMKDGTVDICRACHRPGESLRHIISGCSHLANGEYLHRHNQVARIIHQQLALQYGLLESEVPYYKYAPAPVLENGRALLYWDRSIITDRTIVANKPDIVMVDRSQRRAVLVDVTIPHDENLVKAEKDKLSKYLDLAFEITAMWDVDSTIIVPIVVSANGLIAKSLDQYLKRLSLDGWVKGQIQKAVVLDTARIVRRFLTLQP

SEQ ID NO: 5805 - protein, 1218 aa, Erannis defoliaria
MITRSKNKAKTSTAETTNARPPPLPAPSSPSASSGDDVFLTPRESSVSSSDSDVSEPRTPAPPPPARRGRPPLPARLGPAGLPASRLALAAGGVVRRMRWSQTNNENCMRAYYGATEGGTNLTAYRVRMLSLFQALEPTVTVSAQRLSDQVRAIQRLNLLDQSLLDRLHLEAQSARPTPASTRDLDVASSAPTLTSVPTSAATLATSTDPVLDEGDCTGMSVSTQVSEQLRRALEDAIGQYRFTLNSRPRLPRLPTHRRNLALMGALNALLAPYLRASEDLTDTHSILYCGAIAACRVARVRFPDTNRAPRTAGDVPAWQVRIERRISTFRTLIAKLICFSRGNNRPRVMRFVTQAFAETGIRPQQYMASVTERIDYLKQKVYAWASRIRRYRERVDRYRQNRLFQSDQRKVYQNWEGNEQRVSDGHLPDASAMTNFWRSIWSVPVEHTEGDWMRVVERECEFIEPMGSILIDPVDVSCAIRTAQNWKSPGPDGLHNFWIKWFRCSHDRLATQFQEALELGSLPSFMTTGVTFLLHKSGSTTEPKNYRPITCLPTIYKLLTSILSTKINTHIVANNVLAPAQNGCRVGSRGTKELLLIDMAISQQVRRNKGALSAAWIDYKKAYDSVPHSWLERILELYKIDTTLKSFLSACMRQWTTVLRQPGGGNDSSDPQDLIRIERGIFQGDSLSPSWFCLALNPLSTLLKDSGLGYRLRRGGEVISHLLYMDDLKLFAPKHQDLLELLKTTQVFSSAIRMEFGVDKCAVMRVQRGKVVNSPDLQLSEIMTLRSLSEAETYKYLGMSESLGISVVDIKKSVKERFFCRLTKVLNSLLSGGNKARAFNGWVMPLLIYSFGILRWTQTELDALDRRVRQLLTAHRMLHPRSSVMRLYIPRKWGGRGFLNAKNLHNREVCSLRDYFLNNECGMHRDVVTVDKGLTLLSLANENWRRPSVLSTDDRKDVWKSKELHGRFYRALSGPDVDLLASVNWLRFGDLFGETEGFACAIADEVIKTNNYRKYIMKDGTVDICRACHRPGESLRHIISGCSHLANGEYLHRHNQVARIIHQQLALQYGLVESEVPYYKYAPAPVLENGRALLYWDRSIITDRTIVANKPDIVMVDRSQRRAVLVDVTIPHDENLLKAEKDKLSKYLDLAFEITAMWDVDSTIIVPIVVSANGLIAKSLDQYLKRLSLDGWVKGQIQKAVVLDTARIVRRFLTLQP

SEQ ID NO: 5806 - protein, 1215 aa, Erannis defoliaria
MITRSQSRRNTAERNARPPSPPAPSSPSASSGDDVFLTPRESSVSSSNSDVSGPRTPAPPPPARRGRPPLPARLGPAGLPASRPALAAGGVVRRMRWSQTNNENCMRAYYGATEGGTNLSAYRVRMLPLFQALEPTVTVSAQRLSDQVRAIQRLNLLDQSLLDRLRLEAQSARPTPASTRDLDVASSAPTLALVPTSAATLVTSADPVVDEGDCTGMSVSTQVSEQLRRALEDAIGQYRFTPNSRPRLPRLPTHRRNLALMGALNALLAPYLRASEDLTDTHSILYCGAIAACRVARVKFPDTNRAPRPAGDVPAWQLRIERRISTFRTLIAKLICFSRGNNRPRVMRFVTQAFAETGIRPQQYMANVTERIDYLKQKVYAWANRIRRYRERVDRYWQNRLFQSDQRKVYRNWEGNEQRVSDGQLPDASAMTNFWRGIWSVPVEHTEGDWMRVVERECESIEPMGSILIDPVDVSCAIRTAQNWKSPGPDGLHNFWIKWFRCSHDRLATQFQEALELGSLPSFMTTGVTFLLHKSGSTTEPKNYRPITCLPTIYKLLTSILSTKINAHIVANNVLAPAQNGCRVGSRGTKELLLIDMAISQQVRRNKGALSAAWIDYKKAYDSVPHSWLERILELYQIDATLKSFLGACMRQWTTVLRQPGGGNGSSDSQDLIRIERGIFQGDSLSPSWFCLALNPLSTLLKDSGLGYRLRRGGEVISHLLYMDDLKLFAPKHQDLLELLKTTQVFSSAISMEFGVDKCAVMRVQRGKVVNSPDLQLSEIMTLRSLSEAETYKYLGMSESLGISVVDIKKSVKERFFCRLTKVLNSLLSGGNKARAFNGWVMPLLIYSFGILRWTQTELDALDRRVRQLLTAHRMLHPRSSVMRLYIPRKWGGRGFLNAKNLHNREVCSLRDYFLNNECGMHRDVVTVDKGLTPLSLANENWRTPSVLSTDDRKEVWKSKELHGRFYRVLSGPDVDLLASVNWLRFGDLFGETEGFACAIADEVIKTNNYRKYIMKDGTVDICRACHRPGESLRHIISGCSHLANGEYLHRHNQVARIIHQQLALQYGLVESEVPYYKYAPAPVLENGRALLYWDRSIITDRTIVANKPDIVMVDRSQRRAVLVDVTIPHDENLVKAEKDKLSKYLDLAFEITAMWDVDSTIIVPIVVSANGLIAKSLDQYLKRLSLDGWVKGQIQKAVVLDTARIVRRFLTLQP

SEQ ID NO: 5807 - protein, 1216 aa, Erannis defoliaria
MITRSKAIRNAAEQHSARPPSPPAPSSPSASSGEDVFVTPRESSASSTDSDVSGLRTPAPPPPARRGRPPLPARLGPAGLPASRPALAAGGVVRRMRWSQTDNENCMRAYYRATEVGTNLTAYRVRMLSLFQALEPTVTVSTQRLSDQVRAIQRLNLLDQSLLDRLRLEAQSARSTPVSTRDSHVASSAPTLASMPTSVATLATPADPVVDEGDDTGMSVTTQVSEQLRRALEDAISQYRFALNSRPRLPRLPTHRRNLALMGALNALLAPYLRASEDLTDTHSILYCGAVAACRVARVKFPDSNRAPRTAGDVPAWQARIERRISTFRTLIAKLICFSRGNNRPRVMRFVTQAFAGTGIRPQQYMASVTERIDYLKQKVYAWASRIRRYRERVDRYWQNRVFQSDQRKVYRNWEGAEQRVSDGHLPDANAMTNFWRGIWSVPVEHTEGDWMRVVERECESIEPMGSILIDPVDVSCAIRTAQNWKSPGPDGLHNFWIKWFRCSHDRLATQFQEALELGSLPSFMTTGVTFLLHKSGSTTEPKNYRPITCLPTIYKLLTSILSTKINTHIVANNVLAPAQNGCRVGSRGTKELLLIDMAISQQVRRNKGALSAAWIDYKKAYDSVPHSWLERILELYKIDTTLKSFLSACMRQWTTVLRQPGGGNDSFDPQDLIRIERGIFQGDSLSPSWFCLALNPLSTLLKDSGLGYRLRRGGEVISHLLYMDDLKLFAPKHQDLLELLKTTQVFSSAIRMEFGVDKCAVMRVQRGKVVNSPDLQLSEIMTLRSLSEAETYKYLGMSESLGISVVDIKKSVKERFFCRLAKVLNSLLSGGNKARAFNGWVMPLLIYSFGILRWTQTELDALDRRVRQLLTAHRMLHPRSSVMRLYIPRKWGGRGFLNAKNLHNREVCSLRDYFLNNECGMHRDVVTVDKGLTPLSLANENWRRPSVLSTDDRKDVWKSKELHGRFYRALSGPDVDLLASVNWLRFGDLFGETEGFACAIADEVIKTNNYRKYIMKDGTVDICRACHRPGESLRHIISGCSHLANGEYLHRHNQVARIIHQQLALQYGLVESEVPYYKYAPAPVLENGRALLYWDRSIITDRTIVANKPDIVMVDRSQRRAVLVDVTIPHDENLVKAEKDKLSKYLDLAFEITAMWDVDSTIIVPIVVSANGLIAKSLDQYLKRLSLDGWVKGQIQKAVVLDTARIVRRFLTLQP

SEQ ID NO: 5808 - protein, 1215 aa, Biston betularia
MWTRSRTAAASGLHDAHIPSPPAPSTPSASSGDEEFATPLATSASSSSSDVSGPRTPAPPPPARRGRPPLPARLGPAGQSASRSALAAGGVVRRMRWSQTNNENCMRAYYGATEGGINLSAYRVRMLPLFQALEPTVAVSTQRLSDQVRAIQRLQLLDQSVLDRLRLEALPARPTPVSTRDSPVASSAPTLVSVPTSMATLATPTDPVVDVGECTSMGVCSQVSEHLRRTLEDAICQYRFAPDSRPRLPRLPTHRRNLALMGALNALLAPYLRASEDLTDTHSILYCGAIAACRVARVKFPDTNRAPRPAGGVPAWQLRIERRISTFRTLIAKLICFSRGNNRPRVMRFVTQAFAGTGIRPQHYLASVTERIDYLKQKVYAWANRIRRYRERADRYWQNRVFQSDQRKVYRDWEGTGQRVSDRQLPDTSVMTEFWRGIWSLPVEHTEGDWMRVVERECESIESMGSVLIDPVDVSCAIRTAQNWKSPGPDGLHNFWIKWIRCSHDRLATQFQEALELGSLPCFMTTGVTFLLHKTGSTTEAKNYRPITCLPTIYKLLTSILRTKINAHVVANNVLAPAQNGCRVGSRGTKELLLIDMTISQQVRRNKGALSTAWIDYKKAYDSVPHSWLERVLELYKIDTTLKSFLGACMRQWTTVLRQPGSGDGSSEPQDLIRIEQGIFQGDSLSPLWFCLALNPLSTLLKESGLGHRLRRGGEVISHLLYMDDLKLFAPKRPDLMELLKTTQVFSNAIKMEFGVDKCAVMHVQRGEVVNCPDLQLSETMTFRSLSEAETYKYLGMSESLGIAVVDIKRSVKERFFCRLTKVLNSFLSGGNKVRAFNGWVMPLLIYSFGILRWTQTELDALDRRVRQQLTTHRMLHPRSSVMRLYIPRKLGGRGFLSTKNLHNREVCSLRDYFRDNECGMHRDVVAVDKGLTPLSLANENWRKPSVLSTEDRKEVWKSKQLHGRFYRVLTGPDVDMLASVNWLRFGDLFGETEGFACAIADEVIKTNNYRKYIMKDGTVDICRACHRPGESLRHIISGCSHLANGEYLHRHNQVARIIHQQLALQYGLVESEVPYYKYAPAPVLENGRALLYWDRSIITDRTIVANKPDIVVVDRAQRRAVLVDITIPHDENLVKAEKDKLSKYLDLAHEITAMWDVDSTIIVPIVVTVNGLIAKSLDQHLKRLSLDGWVKGQLQKAVILDTARIVRRFLTLQP

SEQ ID NO: 5809 - protein, 1018 aa, Biston betularia
MATLAIPTDPVVDVGECTSMGVCSQVSEHLRRTLEDAICQYRFAPNSRPRLPRLPTHRRNLALMGALNALLAPYLRASEDLTDTHSILYCGAIAACRVARVKFPDTNRAPRPAGGVPAWQLRIERRISTFRTLIAKLICFSRGNNRPRVMRFVTQAFAGTGIRPQHYLASVTERIDYLKQKVYAWANRIRRYRERADRYWQNRVFQSDQRKVYRDWEGTGQRVSDRQLPDTSVMTEFWRGIWSLPVEHTEGDWMRVVERECESIESMGSVLIDPVDVSCAIRTAQNWKSPGPDGLHNFWIKWIRCSHDRLATQFQEALELGSLPCFMTTGVTFLLHKTGSTTEAKNYRPITCLPTIYKLLTSILRTKINAHVVANNVLAPAQNGCRVGSRGTKELLLIDMTISQQVRRNKGALSTAWIDYKRAYDSVPHSRLERVLELYKIDTTLKSFLGACMRQWTTVLRQPGSGDGSFEPQDLIRIERGIFQGDSLSPLWFCLALNPLSTLLKESGLGHRLRRGGEVISHLLYMDDLKLFAPKRPDLMELLKTTQVFSNAIKMEFGVDKCAVMHVQRGEVVNSPDLQLSETMTFRSLSEAETYKYLGMSESLGIAVVDIKRSVKERFFCRLTKVLNSLLSGGNKVRAFNGWVMPLLIYSFGILRWTQTELDALDRKVRQQLTTHRMLHPRSSVMRLYIPRKLGGRGFLSAKNLHNREVCSLRDYFRDNECGMHRDVVAVDKGLTPLSLANENWRKPSVLSTEDRKEVWKSKQLHGRFYRVLTGPDVDMLASVNWLRFGDLFGETEGFACAIADEVIKTNNYRKYIMKDGTVDICRACHRPGESLRHIISGCSHLANGEYLHRHNQVARIIHQQLALQYGLVESEVPYYKYAPAPVLENGRALLYWDRSIITDRTIVANKPDIVVVDRAQRRAVLVDITIPHDENLVKAEKDKLSKYLDLAHEITAMWDVDSTIIVPIVVTVNGLIAKSLDQHLKRLSLDGWVKGQLQKAVILDTARIVRRFLTLQP

SEQ ID NO: 5810 - protein, 1215 aa, Biston betularia
MWTRSRTAAASGLHDAHIPSPPAPSTPSASSGDEEFATPLATSASSSSSDVSGPRTPAPPPPARRGRPPLPARLGPAGQSASRSALAAGGVVRRMRWSQTNNENCMRAYYGATEGGINLSAYRVRMLPLFQALEPTVAVSTQRLSDQVRAIQRLQLLDQSVLDRLRLEALPARPTPVSTRDSPVASSAPTLVSVPTSMATLATPTDPVVDVGECTSMGVCSQVSEHLRRTLEDAICQYRFAPDSRPRLPRLPTHRRNLALMGALNALLAPYLRASEDLTDTHSILYCGAIAACRVARVKFPDTNRAPRPAGGVPAWQLRIERRISTFRTLIAKLICFSRGNNRPRVMRFVTQAFAGTGIRPQHYLASVTERIDYLKQKVYAWANRIRRYRERADRYWQNRVFQSDQRKVYRDWEGTGQRVSDRQLPDTSVMTEFWRGIWSLPVEHTEGDWMRVVERECESIESMGSVLIDPVDVSCAIRTAQNWKSPGPDGLHNFWIKWIRCSHDRLATQFQEALELGSLPCFMTTGVTFLLHKTGSTTEAKNYRPITCLPTIYKLLTSILRTKINAHVVANNVLAPAQNGCRVGSRGTKELLLIDMTISQQVRRNKGALSTAWIDYKKAYDSVPHSWLERVLELYKIDTTLKSFLGACMRQWTTVLRQPGSGDGSSEPQDLIRIERGIFQGDSLSPLWFCLALNPLSTLLKESGLGHRLRRGGEVISHLLYMDDLKLFAPKRPDLMELLKTTQVFSNAIKMEFGVDKCAVMHVQLGEVVNCPDLQLSETMTFRSLSEAETYKYLGMSESLGIAVVDIKRSVKERFFCRLTKVLNSFLSGGNKVRAFNGWVMPLLIYSFSILRWTQTELDALDRRVRQQLTTHRMLHPRSSVMRLYIPRKLGGRGFLSAKNLHNREVCSLRDYFRDNECGMHRDVVAVDKGLTPLSLANENWRKPSVLSTEDRKEVWKSKQLHGRFYRVLTGPDVDMLASVNWLRFGDLFGETEGFACAIADEVIKTNNYRKYIMKDGTVDICRACHRPGESLRHIISGCSHLANGEYLHRHNQVARIIHQQLALQYGLVESEVPYYKYAPAPVLENGRALLYWDRSIITDRTIVANKPDIVVVDRAQRRAVLVDITIPHDENLVKAEKDKLSKYLDLAHEITAMWDVDSTIIVPIVVTVNGLIAKSLDQHLKRLSLDGWVKGQLQKAVILDTARIVRRFLTLQP

SEQ ID NO: 5811 - protein, 1215 aa, Biston betularia
MWTRSRTAAASGLHDAHIPSPPAPSTPSASSGDEEFATPLATSASSSSSDVSGPRTPAPPPPARRGRPPLPARLGPAGQSASRSALAAGGVVRRMRWSQTNNENCMRAYYGATEGGINLSAYRVRMLPLFQALEPTVAVSTQRLSDQVRAIQRLQLLDQSVLDRLRLEALPARPTPVSTRDSPVASSAPTLVSVPTSMVTLATPTDPVVDAGECTSMGVCSQVSEHLRRTLEDAICQYRFAPDSRPRLPRLPTHRRNLALMGALNALLAPYLRASEDLTDTHSILYCGAIAACRVARVKFPDTNRAPRPAGGVPAWQLRIERRISTFRTLIAKLICFSRGNNRPRVMRFVTQAFAGTGIRPQHYLASVTERIDYLKQKVYAWANRIRRYRERADRYWQNRVFQSDQRKVYRDWEGTGQRVSDRQLPDTSVMTEFWRGIWSLPVEHTEGDWMRVVERECESIESMGSVLIDPVDVSCAIRTAQNWKSPGPDGLHNFWIKWIRCSHDRLATQFQEALELGSLPCFMTTGVTFLLHKTGSTTEAKNYRPITCLPTIYKLLTSILRTKINAHVVANNVLAPAQNGCRVGSRGTKELLLIDMTISQQVRRNKGALSTAWIDYKKAYDSVPHSWLERVLELYKIDTTLKSFLGACMRQWTTVLRQPGSGDGSSEPQDLIRIERGIFQGDSLSPLWFCLALNPLSTLLKESGLGHRLRRGGEVISHLLYMDDLKLFAPKRPDLMELLKTTQVFSNAIKMEFGVDKCAVMHVQRGEVVNCPDLQLSETMTFRSLSEAETYKYLGMSESLGIAVVDIKRSVKERFFCRLTKVLNSLLSGGNKVRAFNGWVMPLLIYSFGILRWTQTELDALDRRVRQQLTTHRMLHPRSSVMRLYIPRKLGGRGFLSAKNLHNREVCSLRDYFRDNECGMHRDVVAVDKGLTPLSLANENWRKPSVLSTEDRKEVWKSKQLHGRFYRVLTGPDVDMLASVNWLRFGDLFGETEGFACAIADEVIKTNNYRKYIMKDGTVDICRACHRPGESLRHIISGCSHLANGEYLHRHNQVARIIHQQLALQYGLVESEVPYYKYAPAPVLENGRALLYWDRSIITDRTIVANKPDIVVVDRAQRRAVLVDITIPHDENLVKAEKDKLSKYLDLAHEITAMWDVDSTIIVPIVVSVNGLIAKSLDQHLKRLSLDGWVKGQLQKAVILDTARIVRRFLTLQP

SEQ ID NO: 5812 - protein, 1207 aa, Apotomis turbidana
MITRSRRKKAEQTNARPPPPPASSSSSPSSSGDEFATAADTSESSDERGPPPPPPQPPARRGRPQLPARLGPTGQPAPTTAPATGGVVRRMRWTRVMNENCMRAYYGATEGGINLSAYRDRMLPLFQVFDPTIAVSAQRLSDQVRFIQRRKLLDDATLDRLRLEVLAARAASVPARDPPATSPVPAPAPNLVPGVPLTDPEADVEDYASSVSTQANEQLRRALEEAIGRYRSAPEPRLRLPRLPIHKRNLALMGALDALLDPYLRASEDLADTHSIMYCGAIAACRVARVRFPDTDRAPRTARGVPAWQVRIERRISSFRTLIAKLICFRGGNNRPRVMRYVTQAFAGTGTRPCDYMACVTERIDYLKQKVYAWASRIRRYRERVDRFQQNRLFQSDQRKVYRKWEGADQCVSDGQLPDPTAMINFWRSIWSVPVEHTEGEWMNVVRRECEPIEAMGAVTISPDDVRCAARTIQNWKSPGPDGLHNFWIKWFRSSHERLATQFQDALELGSLPSFMTTGVTFLLHKSGSTTEAKNYRPITCLPTLYKLLTSILRTKINTHIVANNVLAFSQNGCRVGSRGTKELLLIDTTICQQVRRNRGSLSTAWIDYKKAYDSVPHSWLERILELYKIDTALRSLLGACMRQWTTVLRQPGGGDGPPGPQDLIRIERGIFQGDSLSPLWFCLALNPLSTLLKDSGLGCRLRRGGEVISHLLYMDDLKLYAPKRQDLVELLEVTEAFSSAIKMEFGVDKCAVMHVQRGKVVNSANLQLSETMSLRSISEVETYKYLGMSQSLGIADGDIRQALKERFFCRLTKVLNSLLSGGNKARAFNAWVMPLLTYSFGILRWTQTELDALDTRVRQLLTAHRMRHPRSSVMRMYIPRKCGGRGFLNAKDLHNREVCSLREYFLNNECGIHRDVVAVDKGLTSLSLANENWRRPKVLSTDDRRAVWKSKELHGRFYKALTGPDVDLLASVNWLRFGDLFGETEGFVCAIADEVMMTNNYRRYILKDGTVDICRACRRPGESLRHIISGCSHLANGEYLHRHNQVARIIHQQLALRYGLVGSEVPYYKYAPMPVLENGRATLYWDRSIITDRTIVANKPDIVLVDRSKRQAVLVDITIPHDENLVKAEKDKLSKYLDLAHEVTAMWDVDSTSIVPIVVSANGLIAKSLDKHLKRLSLDGWIKGQIQKAVLLDTARIVRRFLSLQP

SEQ ID NO: 5813 - protein, 865 aa, Apotomis turbidana
MACVTERIDYLKQKVYAWTSRIRRYRERVDRFQQNRLFQSDQRKVYRKWEGTDQCVTDGQLPDPTAMINFWRSIWSVPVEHTEGEWMNVVRRECEPIENMGAVTISPDDVSCAVRTTQNLKSPEPDGLHNFWIKWFRSSHERLATQFQDALELGSLPSFMTTGATFLLYKSGSTTEAKNYRPITCLPTLYKLLTSILRTKINTHIVANNVLAFSQNGCRVGSRGTKELLLIDTTICHQVRRNRGSLTAAWIDYKKAYDSVPHSWLERILELYKINTALRSLLRSCMRQWTTVLRQPGGGDGPPGPQVMIRIERGIFQGDNLSPLWFCLALNPLSTLLKDSRLGCRLRKGGEVISYLLYMDDLKLYASKRQDLVELLEVTETFSSAIKMEFGVDKCAVMHVQRGKVVNSANLQLTETMSLKYISEAETYKYLGMSQSLGIADGDIRQALKVRFFCRLTKVLNSLLSGGNKARAFNAWVMPLLTYSFGILRWTQTELYALDTRVRQLLTTHRMRHPRSSVMRMYIPRKCGGRGFLNAKDLHNREVCSLREYFLNNECGIHRDVVAVDKGLTSLSLANENWRRPKVLSTDDRRAVWKSKELHGRFYKALTGPDVDLLASVNWLCFGDLFGETEGFVCAIADEVMMTNNYRRYILKDGTVDICRACRRPGESLRHIISGCSHLANGEYLHRHNQVARIIHQQLALRYGLVGSEVPYYKYAPMPVLENGRATLYWDRSIITDRTIVANKPDIVLVDRSKRQAVLVDITIPHDENLVKAEKDKLSKYLDLAHEVTAMWDVDSTIIVPIVVSANGLIAKSLDKHLKRLSLDGWIKGQIQKAPPGYGAHCQEVPLSAALTTGSLGPAPLPAAP

SEQ ID NO: 5814 - protein, 961 aa, Apotomis turbidana
MHKRNLALMGALDALLDPYLRASEDLADTHSIMYCGAIAACRVARVRFPDTDRAPRTAGGVPAWQVRIERRISSFRTLIAKLICFRGGNNRPRVMRYVTQAFAGTGTRPCDYMACVTERIDYLKQKVYAWASRIRRYRERVDRFQQNSLFQSDQRKVYRKWEGTDQCVTDGQLPDPTAMINFWRSIWSVPVEHTEGEWMNVVRRECEPIENMGAVTISPDDVGCAVRTTQNWKSPGPDGLHNFWIKWFRSSHERLATQFQDALELGSLPSFMTTGATFLLYKSGSTTEAKNYRPITCLPTLYKLLTSILRTKINTHIVANNVLAFSQNGCRVGSRGTKELLLIDTTICQQVRRNRGSLSATWIDYKKAYDSVPHSWLERILELYKIDTALRSLLSSCMRQWTTVLRQPGGGDGPPGPQDLIRIERGIFQGDSLSPLWFCLALNPLSTLLKDSGLGCRLRRGGEVISHLLYMDDLKLYAPKRQDLVELLEVTEAFSSAIKMEFGVDKCAVMHVQRGKVVNSANLQLSETMSLRSISEVETYKYLGMSQTLAIADGDIRQALKERFFCRLTKVLNSLLSGGNKARAFNAWVMPLLTYSFGILRWTQTELDALDTRVRQLLTTHRMRHPRSSVMRMYIPRKCGGRGFLNAKDLHNREVCSLREYFLNNECGIHRDVVAVDKGLTSLSLANENWRRPKVLSTDDRRAVWKSKELHGRFYKALTGPDVDLLASVNWLRFGDLFGETEGFVCAIADEVMMTNNYRRYILKDGTVDICRACRRPGESLRHIISGCSHLANGEYLHRHNQVARIIHQQLALRYGLVGSEVPYYKYAPMPVLENGRATLYWDRSIITDRTIVANKPDIVLVDRSKRQAVLVDITIPHDENLVKAEKDKLSKYLDLAHEVTAMWDVDSTIIVPIVVSANGLIAKSLDKHLKRLSLDGWIKGQIQKAVLLDTARIVRRFLSL

SEQ ID NO: 5815 - protein, 1207 aa, Apotomis turbidana
MITRSRRKKAEQTNARPPPPPASSSSSPSSSGDEFATAADTSESSDERGPPPPPPRPAARRGRPPLPARLGPTGQPAPTTAPATGGIVRRMRWTRVMNENCMRAYYGATEGGTNLSAYRDRMLPLFQAFDPTIAVSAQRLSDQVRFIQRRKLLNDATLDRLRLEVLAARAASVPARDPPAMSPVPAPAPNLVPGVPLTDPEADVEDYASSVSTQANEQLRRALEEAIRRYRSAPDSRPRLPRLPMHKRNLALMGALDALLEPYLRASKDLADTHSIMYCGAIAACRVARVRFPDTDRAPRTAGGVPAWQVRIERRISSFRTLIAKLICFRGGNNRPRVMRYVTQAFAGTGTRPCDYMACVTERIDYLKQKVYAWASRIRRYRERVDRFQQNRLFQSDQRKVYRKWEGADQCVSDGQLPDPTAMINFWRSIWSVPVEHTEGEWMNVVRRECEPIEAMGAVIISPDDVSCATRTTQNWKSPGPDGLHNFWIKWFRSSHERLATQFQDALELGSLPSFMTTGVTFLLHKSGSTTEAKNYRPITCLPTLYKLLTSILRTKINTHIVANNVLAFSQNGCRVGSRGTKELLLIDTTICQQVRRNRGSLSTAWIDYKKAYDSVPHSWLERILELYKIDTALRSLLGACMRQWTTVLRQPGGGYGPPGPQDLIRIERGIFQGDSLSPLWFCLALNPLSTLLKDSGLGCRLRRGGEVISHLLYMDDLKLYAPKRQDLVEPLEVTEAFSSAIKMEFGVDKCAVMHVQRGKVVNSANLQLSETMSLRSISEVETYKYLGMSQSLGIADGDIRQALKERFFCRLTKVLNSLLSGGNKARAFNAWVMPLLTYSFGILKWTQTELDALDTRVRQLLTTHRMRHPRSSVMRLYIPRKCGGRGYLNAKDLHNREVCSLREYFLNNECGIHRDVVAVDKGLTSLSLANENWRRPKVLSTDDRRAVWKSKELHGRFCKALTGPDVDLLASVNWLRFGDLFGETEGFVCAIADEVMMTNNYRRYILKDGTVDICRACRRPGESLRHIISGCSHLANGEYLHRHNQVARIIHQQLALRYGLVGSEVPYYKYAPMPVLENGRATLYWDRSIITDRTIVANKPDIVLVDRSKRQAVLVDITIPHDENLVKAEKDKLSKYLDLAHEVTAMWDVDSTVIVPIVVSANGLIAKSLDKHLKRLSLDGWIKGQIQKAVLLDTARIVRRFLSLQP

SEQ ID NO: 5816 - protein, 1206 aa, Notocelia uddmanniana
MNTRLRSRAEQRARLPSPPAPSSSSPSSSDDEFATAPDSSESSSDERGPSPPPPQTSARRGRRPLPARLGPTGHSAPPTAPAAGGVVRRMRWTQEMNENCMRAYFGATEGETNLSAYRVRMLPLFQALEPTITVSAQRLSDQVRVIQRNKRLDDLTLDRLRLEALSARAAPTSARDLPATSPAPVPAPNTAPRAPRVDPSADGDCADQSVSTQAHEQLRRALDEAITRYRSTPNSRPRLPRLPVNRRYLALMGALNDLLDPYLRASDDLIDTHLIMYCGAIAACRVARVKFPDADRATRTAGGVPAWQVRIERRINTFRTLIAKLICFRGGNNRPRVMRFVNQAFAGTGVRPRDYMACVTERIDFLKQKVYAWASRIRRYRERVDRYQQNRLFQSDQRKVYRKWEGTDHRVCDGQRPDATAMVNFWRSIWSVPVEHTEGAWIGVVERDCESIEPMGSVTISPEDVSCAIRTAPNWKSPGPDGLHNFWLKWFRCSHERLATQFQQALELGSLPPPLTTGVTSLLYKSGSTTEAKNYRPITCLPTLYKLLTSILRAKINTHIVTNNILAPAQNGCRVGSRGTKELLLIDMTICQRVRRNRGTLSASWIDYKKAYDSVPHSWLRRILELYKVDAALRSFLSACMGQWTTVLRQPGGGDGPSGPQDSMRIERGIFQGDSLSPLWFCLALNPLSTLLQDSGLGCQLRRGGEVISHLLYMDDLKLFAPNRQDLLELLKTTEVFSSAIKMEFGVDKCAVMHVQRGKVVNSTNLQLSETMSLRSLSEAETYKYLGMSQALGIEGEGIKQAVKERFFCRLTKVLNSFLSGGNKARAFNAWVMPLLTYSFGILRWTQTELDALDRRVRVLLTAHRMLHPRSSVMRLYIPRKCGGRGFLNAKDLHNREVCSLRDYFLNSECRMHRDVVAVDASFTPLSMANENWRRFKVLSTEDRKAEWKSKELHGRFYRALTGPDVDLLASVNWLRFGDLFGETKGFVCAIADEVIMTNNYRKYILKDGTVDICRACRRPGESLRHIISGCSHLANGEYLHRHNLVARIIHQQLALSYGLVDFEVPYYKYLPAPVLENGRATLYWDRSIITDRTIVANKPDIVLIDRSKRQAVLVDITIPHDENLVKAEKDKVSKYLDLAHEVTAMWDVDSTIIVPIVVSANGLIAKSLDQHLKRLSLDGWVKGQIQKAVLLDTARIVRRFLSLSP

SEQ ID NO: 5817 - protein, 869 aa, Notocelia uddmanniana
MRFVNQAFAGTGVRPRDYMDCVTERIDFLKQKVYAWASRIRRYRERLDRYQQNRLFQSDQRKVYRKWDGTDHRVSDGQRPDASAMVNFWRSIWSVPVEHTEGPWIGAVERECESIEPMGSVTISPEDVSCAIRTAPNWKSPGPDGLHNFWLKWFRCSHARLAAQFQQALELGSLPPPLTTGVTSLLYKSGSTTEAKNYRPITCLPTLYKLLTFILRAKINAHIVANNILAPAQNGCRVGSRGTKELLLIDMTICQQVRRNRGALSAAWIDYRKAYDSVPHSWLGRILELYKVDAALRSFLRACMRQWTTVLRQPGGRDGPSVPQDSIRIERGIFQGDSLSPLWFCLALNPLSTLLKDSGLGCQLRRGGEVISHLLYMDDLKLFAPNTHDLLELLKTTEVFSSAIKMEFGVDKCAVMHVQRGKIVNSTNLQLSETTSLRSLSEADTYKYLGMSQSLGIKGEGIKRVLRERFFCRLTKVLNSFLSGGNKVRAFNAWVMPLLTYSFGILRWTQTELDLLDRRVRVLLTTNRMLHPRSSVMRLYIPRKLGGRGFLNSKDLHNREVCSLRDYFLNSECGMHRDVVAVDTLLTPLSMANENWRRLKVLSTEDRRAVWRSKELHGRFYKALTGPEVDLLASVNWLRFGDLFGETEGFICAIADEVIMTNNYRKYILKDGTVDICRACRRPGESLRHIISGCSHLANGEYLHRHNLVARIIHQQLALLYGLVGFEVPYYKYTPAPVLENGRATLYWDRSVITDRTIVANKPDIVLTDRLKRQAILVDITIPHDENLVKAEKDKSSKYLDLAHEVTAMWDVDSTIIVPIVVSANGLIAKSLDQHLKRLSLDGWVKGQIQKAVLLDTARIVRRFLSLSP

SEQ ID NO: 5818 - protein, 1107 aa, Notocelia uddmanniana
MRAYFGATEGETNLSAYRVRMLPLFQALEATITVTAQRLSDQVRVIQRLKRLDDATLDRLRLEALSARTASALARDPPATSPAPVPTPDMAPGVPRVDPSVDEDCANQTVSTQTNEQLRRALEEAITRYRSTPNSRPRLPRLPVNRRNLALMGALNDLLDPYLRASEDLIDTHSILYCGAIAACRVARVKFPDADRAPRTAGGVPAWQVRIERRINTFRTLIAKLICFRGGNDRPRVMRFVNQAFAGTGVRPRDYVTCVTERIDFLKQKVYAWASRIRRYRERVDRYQQNRLFQSDQRKVYRKWEGTDHRVCDGQRPDATAMGNFWRSIWSVPVEHTEGAWIGVVERECESIEPMGSVTISPEDISCAIRTAPNWKSPGPDGLHNFWLKWFRCSHERLATQFQQALELGSLPHLLTTGVTSLLYKSGSTTEAKNYRPITCLPTLYKLLTSILRAKINTHIVANNILAPAQNGCRVGSRGTKELLLIDMTICQRVRWSRGALSAAWIDYKKAYDSVPHSWLRRILELYKVDAALRSFLSACMGQWTTVLRQPGGGDGSSGPQDSIRIERGIFQGDSLSPLWFCLALNPLSTLLKDSGLGCQLRRGGEVISHLLYMDDLKLFAPNRQDLLELLKTTEVFSSAIKMEFGVDKCAVMHVQRGKVVNSTNLQLSETMSLRSLSEAETYKYLGMSQSLGIEGEGIKQAVKERFSCRLRKVLNSFLSGGNKVRAFNAWVMPLLTYSFGILRWTQTELDALDRRVRVLLTTHRMLHPRSSVMRLYIPRKCGGRGFLNAKDLHNREVCSLRDYFLNSECGMHRDVVAVDASFTPLSMANENWRRFKVLSTEDRKAEWKSRELHGRFYKALTGPDVDLLASVNWLRFGDLFGETEGFVCAIADEVIMTNNYRKYILKDGTVDICRACRRPGESLRHIISGCGHLANGEYLHRHNLVARIIHQQLALSYGLVNFEVPYYKYLPAPVLENGRATLYWDRSIITDRTIVANKPDIVLIDRSKRQAVLVDITIPHDENLVKAEKDKVSKYLDLAHEVTAMWDVDSPTIIVPIVVSANGLIGKSLDQHLKRLSLDGWVKGQIQKAVLLDTAWIVRRFLSLSP

SEQ ID NO: 5819 - protein, 942 aa, Notocelia uddmanniana
MFIIIINTHSIMYCGAVTACRVARVKFPDADRAPRTTGSVPTWQVRIERRVDTYRTLIAKLICFRGGNNRPRVMRFVNQAFAGSGVRPHDYMACVTERIDFLKQKVYAWASRICRYRERLDRYQQNRLFQSDQRKVYRKWDGTDHRVSDGQRPDATAMANFWRSIWSVPVEHTEGAWMDVVKRECESIEPMGSVTVSPEDVSCAIRTAPNWKSPGPDGLHNFWLKWFRCSHARLAAQFQQALELGSLPPPLTTGVTSLLYKSGSTTEAKNYRPITCLPTLYKLLTSILRAKINTHIVANNILAPAQNGCRVGSRGTKELLLIDMTICQRVRRNRGTLSAAWIDYKKAYDSVPHSWLRRILELYKVDAVLRYFLVACMGQWTTVLRQPGGGEGPSGPQDSIRIERGIFQGDSLSPLWFCLALNPLSTLLKDSGLGCQLRREGEVISHLLYMDDLKLFAPNKHDLLELLKTTEVFSSAIKMEFGVDKCAVMHVQRGKVVNSTNLHISETMALSSLSEAETYKYLGMSQSLGIEGGDIKRAVRERFFCRLTKVLNSFLSGGNKVRAFNAWVMPLLTYSFGILRWTQTELDFLDRRVRVLLTAHRMLHPRSSVMRLYIPRKLGGRGFLNAKDLHNREVCSLRDYFLNSECGMHRDVGAADASFTPLSMANENWRRFKVLSIEDRRAVWKSKELHGRFYKALMGPDVDLLASVNWLRFGDLFGETEGFVCAIADEVIMTNNYRKYILKDGTVDICRACRRPGESLRHIISGCSHLANGEYLHRHNLVARIIHQQLALLYGLVDFEVPYYKYTPAPVLENGRATLYCDRSVITDRTIVANKPDIVLTDRLKRQAVLVDITIPHDENLVKAEKDKVSKYLDLAHEVTAMWDVDSTIIVPIVVSVICLIAKSLDQHLKRLSLDGWVKGQIQTAVLLDTARIVRRFLSLSP

SEQ ID NO: 5820 - protein, 955 aa, Notocelia uddmanniana
MGALNDLLDPYLRASDDLIDTHSIMYCGAIAACRVARVKFPDADRATRTAGGVPAWQVRIERRINTFRTLIAKLICFRGGNNRPRVMRFVNQAFAGTGVRPRDYMACVTERIDFLKQKVYAWASRIRRYRERVDRYQQNRLFQSDQRKVYRKWEGTDHRVCDGQRPDATAMVNFWRSIWSVPVEHTEGAWIGVVERDCESIEPMGSVTISPEDVSCAIRTAPNWKSPGPDGLHNFWLKWFRCSHERLATQFQQALELGSLPPPLTTGVTSLLYKSGSTTEAKNYRPITCLPTLYKLLTSILRAKINTHIVTNNILAPAQNGCRVGSRGTKELLLIDMTICQRVRRNRGTLSASWIDYKKAYDSVPHSWLRRILELYKVDAALRSFLSACMGQWTTVLRQPGGGDGPSGPQDSIRIERGIFQGDSLSPLWFCLALNPLSTLLQDSGLGCQLRRGGEVISHLLYMDDLKLFAPNRQDLLELLKTTEVFSSAIKMEFGVDKCAVMHVQRGKVVNSTNLQLSETMSLRSLSEAETYKYLGMSQALGIEGEGIKQAVKERFFCRLTKVLNSFLSGGNKARAFNAWVMPLLTYSFGILRWTQTELDALDRRVRVLLTAHRMLHPRSSVMRLYIPRKCGGRGFLNAKDLHNREVCSLMDYFLNSECGMHRDVVAVDASFTPLSMANENWRRFKVLSAEDRKAEWKSKELHGRFYRALTGPDVDLLASVNWLRFGDLFGETEGFVCAIADEVIMTNNYRKYILKDGTVDICRACRRPGESLRHIISGCGHLANGEYLHRHNLVARIIHQQLALSYGLVDFEVPYYKYLPAPVLENGRATLYWDRSVITDRTIVANKPDIVLIDRSKRQAVLVDITIPHDENLVKAEKDKVSKYLDLAHEVTAMWDVDSTIIVPIVVSANGLIAKSLDQHLKRLSLDGWVKGQIQKAVLLDTARIVRRFLSLSP

SEQ ID NO: 5821 - protein, 955 aa, Notocelia uddmanniana
MGALNDLLVPYLGASEDLIDTHSIMYCGAIAACRVARVKFPDADRPPRTAGSVPTWQVRIERRVDTYRTLIAKLICFRGGNSRPRVMRFVNQAFAGTGIRPRDYMTCVTERIDFLKQKVYAWASRIRRYRERLDRYQQNRLFQSDQRKVYRKWDGTDHRVSDGQRPDATAMVNFWRSIWSVPVEHNEGAWMGVVERECESIEPMGSVTISPADVSCAIRTAPNWKSPGPDGLHNFWLKWFRCSHARLAAQFQQALELGSLPPPLTTGVTSLLYKSGSTTEAKNYRPITCLPTLYKLLTSILRAKINTHIVANNILAPAQNGCRVGSRGTKELLLIDMTICQRVRRNRGTLSTAWIDYKKAYDSVPHSWLRRILELYKVDAVLRSFLVACMGQWTTVLRQPGGGEGPSGPQDSIRIERGIFQGDSLSPLWFCLALNPLSTLLKDSGLGCQLRREGEVISHLLYMDDLKLFAPNKHDLLELLKTTEAFSSAIKMEFGVDKCAAMHVQRGKVVNSTNLQISETMDLRSLSEAETYKYLGMSQSLGIEGGDIKRAVKERFFCRLTKVLNSFLSGGNRVRAFNAWVMPLLTYSFGILRWTQTELDFLDRRVRVLLTAHRMLHPRSSVMRLYIPRKFGGRGFLNAKDLHNREVCSLRDYFLNSECGMHRDVVAVDASFTPLSMANENWRRLKVLSTEDRRAVWKSKELHGRFYKALTGPDVDLLASVNWLRFGDLFAETEGFVCAIADEVIMTNNYRRYILKDGTVDICRACRRPGESLRHIISGCGHLANGEYLHRHNLVAKIIHQQLALLYGLVDFEVPYYKYTPAPVLENGRATLYWDRSVITDRTIIANKPDIVLTDRLKRQAVLVDITIPHDENLVKAEKDKVSKYLDLAHEVTAMWDVDSTIIVPIVVSANGLIAKSLDQHLKRLSLDGWVKGQMQKAVLLDTARIVRRFLSLSP

SEQ ID NO: 5822 - protein, 1206 aa, Notocelia uddmanniana
MITRTRSRAAQRARPPSPPAPSSSSPSSSGDEFATAPDTSESSCDERGPPSPPPRPPARRGRPPLPARLGPVGHSALPTAPAAGGVVRRMRWTQEMNENCMRAYFGATEGETNLSAYRVRMLPLFQALEPTITVTAQRLSDQVRVIQRLKRLDDATLDRLRLEALSARTASALARDPPATSPAPVPTPDMAPGVPRVDPSVDEDCANQTVSTQANEQLRRALEEAITRYRFTPNSRPRLPRLPVNRRNLALMGALNDLLDPYLRASEDLIDTHSILYCGAIAACRVARVKFPDADRAPRTAGGVPAWQVRIERRVNTFRTLIAKLICFRGGNDRPRVMRFVNQAFAGTGVRPRDYVTCVTERIDFLKQKVYAWASRIRRYRERVDRYQQNRLFQSDQRKVYRKWEGTDHRVCDGQRPDATAMGNFWRSIWSVPVEHTEGAWIGVVERECESIEPMGSVTISPEDISCAIRTAPNWKSPGPDGLHNFWLKWFRCSHERLATQFQQALELGSLPHLLTTGVTSLLYKSGSTTEAKNYRPITCLPTLYKLLTSILRAKINTHIVANNILAPAQNGCRVGSRGTKELLLIDMTICQRVRRSRGALSAAWIDYKKAYDSVPHSWLRRILELYKVDAALRSFLSACMGQWTTVLRQPGGGDGSSGPQDSIRIERGIFQGDSLSPLWFCLALNPLSTLLKDSGLGCQLRRGGEVISHLLYMDDLKLFAPNRQDLLELLKTTEVFSSAIKMEFGVDKCAVMHVQRGKVVNSTNLQLSETMSLRSLSEAETYKYLGMSQSLGIEGEGIKQAVKERFFCRLTKVLNSFLSGGNKVRAFNAWVMPLLTYSFGILRWTQTELDALDRRVRVLLTAHRMLHPRSSVMRLYIPRKCGGRGFLNAKDLHNREVCSLRDYFLNGECGMHRDVVAVDASFTPLSMANENWRRFKVLSTEDRKAEWKSRELHGRFYKALTGPDVDLLASVIWLRFGDLFGETEGFVCAIADEVIMTNNYRKYILKDGTVDICRACRRPGESLRHIISGCGHLANGEYLHRHNLVARIIHQQLALSYGLVNFEVPYYKYLPAPVLENGRATLYWDRSIITDRTIVANKPDIVLIDRSKRQAVLVDITIPHDENLVKAEKDKVSKYLDLAHEVTAMWDVDSTIIVPIVVSANGLIAKSLDQHLKRLSLDGWVKGQIQKAVLLDTARIVRRFLSLSP

SEQ ID NO: 5823 - protein, 1207 aa, Crocallis elinguaria
MITRSRNKAGTASARQPPPPASSSPSSSSGVEYGTPLDTSASSDEDGPPSPPPPPPPARRGRPPLPARLGPVGHSVPRAAPATGGIVRRMRWTSDMNENCMRAYYGATEGGTNMSAYRDRMLPLFQTLEPSVAVSTQRLSDQVRAIQRLKLLDESVLDRLRLEALPIRATSASTRDLSVAPPVPAPLPAPSSVATRIDPVVDEDDCANISVSTQVNEQLRRALEDAILEYQYTPDSRPRLPRLPTNRRNLALMGALNVLLAPYLRASENLFDTHSIMYCGAIAVCRVARVKFPDADRAPRTAGNAPAWQVRIERRINTFRTLIAKLVCFSRGNNRPRVMRFVNQAFAGTGIRPQNYMAGVTERIDFLKQKIYAWVNRIRRYRERVDRYHQNRLFESDQRKVYRNWEGTDQRVSDGQMPDTNAMINFWRGIWSVPVEHTEGDWMRTVEQSCESIETMGSVTIDPIDVSCAIRTAQNWKSPGPDGLHNFWIKWIRCSHECLAVQFQEALELGSLPRFLTTGVTSLLHKSGSTTEAKNYRPITCLPTLYKLLTSILRAKINSHVVANNILAPAQNGCRVGSRGTKELLLIDTAICQQVRRNKGALSTAWIDYKKAYDSVPHSWLERILELYKIDTTLRTFLSACMRQWTTVLRQPGSGNSPSGPENFIKIERGIFQGDSLSPLWFCLALNPLSTLLRDSRLGCKLRREGEIISHLLYMDDLKLLAPKSPDLMKLLKITEIFSSAIKMEFGVDKCAVMHVQRGKVVNSDNLQLSETMTLRSLSEAETYRYLGMSQSLGITVGDIKQSVKERFFCRLTKVLNSLLSGGNKARAFNGWVMPLLIYSFGILKWTQTELDSLDRRVRQLLTYHRMLHPRSSVMRLYIPRKWGGRGFLNAKTLHNREVCSLREYFLNNECGMHRDVVAVDRNLTPLSLANENWHKPVVMTTEDRKEVWKGKELHGRFYRALTGSDVDLLASVNWLRFGDLFGETEGFVCAIMDEVIKTNNYRKYIMKDGTVDICRACRRPGESLRHIISGCSHLANGEYLHRHNLVARIIHQQIALQYGLVESEVPYYKYAPVPVLENGCALLYWDRSIITDRTIVANKPDIVLVDRSQRRAVLVDITVPHDENLVKAEKDKLSKYLDLAHEVTAMWNVDSTIIVPIVVSANGLVAKSLDQHLKRLSLDGWIKGRMQKAVLLDTARIVRRFLTLQP

SEQ ID NO: 5824 - protein, 1208 aa, Crocallis elinguaria
MITRSRTKKAGTASARKTPPPASSSPSSSSGVEYGTPLDTSASSDEDGPPSPPPPPPPARRGRPPLPARLGPAGHSVPRAAPATGGIVRRMRWTSDMNENCMRAYYGATEGGTNMSAYRDRMLPLFQTLEPSVAVSTQRLSDQVRAIQRLKLLDESVLDRLRLEALPIRATSASARDLSVAPPVPAPLPAPSSVATPIDPVVDEDDCANISVSTQVNEQLRRALEDAILEYQYTPDSRPRLPRLPTNRRNLALMGALNVLLTPYLRASENLFDTHSIMYCGAIAVCRVARVKFPDADRAPRPAGSAPAWQVRIERRINTFRTLIAKLICFSRGNNRPRVMRFVNQAFAGTGIRPQNYMAGVTERIDFLKQKIYAWVNRIRRYRERVDRYHQNRLFESDQRKVYRNWEGTDQRVSDGQLPDTNAMINFWRGIWSVPVEHTEGDWMRTVEQSCESIETMGSVTIDPIDVSCAIRTAQNWKSPGPDGLHNFWIKWIRCSHECLAVQFQEALELGSLPRFLTTGVTSLLHKSGSTTEAKNYRPITCLPTLYKLLTSILRAKINSHVVANNILAPAQNGCRVGSRGTKELLLIDTAICQQVRRNKGALSTAWIDYKKAYDSVPHSWLERILELYKIDTTLRTFLSTCMRQWTTVLRQPGSGSSPSGPENFIKIERGIFQGDSLSPLWFCLALNPLSTLLRDSRLGCKLRREGEIISHLLYMDDLKLLAPKSPDLMKLLKITEIFSSAIKMEFGVDKCAVMHVQRGKVVNSDNLQLSETMTLRSLSEAETYRYLGMSQSLGITVGDIKQSVKERFFCRLTKVLNSLLSGGNKARAFNGWVMPLLIYSFGILKWTQTELDSLDRRVRQLLTYHRMLHPRSSVMRLYIPRKWGGRGFLNAKTLHNREVCSLREYFLNNECGMHRDVVAVDRNLTPLSLANENWHKPVVMTTEDRKEVWKGKELHGRFYRALTGSNVDLLASVNWLRFGDLFGETEGFVCAIMDEVIKTNNYRKYIMKDGTVDICRACRRPGESLRHIISGCSHLANGEYLHRHNLVARIIHQQIAFQYGLVESEVPYYKYAPAPVLENGRALLYWDRSIITDRTIVANKPDIVLVDRSQRRAVLVDITVPHDENLVKAEKDKLSKYLDLAHEVTAMWNVDSTIIVPIVVSANGLVAKSLDQHLKRLSLDGWIKGRMQKAVLLDTARIVRRFLTLQP

SEQ ID NO: 5825 - protein, 1212 aa, Peribatodes rhomboidaria
MITRSKTKKEADTPSTRPPPPPSSSSECPSSEEDEYATPLDTTDTSNEEAAPTPAPPPPPARRGRPPLPARLGPAGRSAPPTAPATGGVVCRMRWTRTINENCMRAYYEATEGGTNLTAYRVRILSLFQVLEPTVTVSAQRLSDQVRAIHRCKLLDQSVLDRLCLEAIRARPTPASTRDRPVASSAPTWASVPASAATLATLADTDVDGDRTSVSVSSQVSEHLRRTLEDAISQYRYAPDSRPRLPRLPTHRRNMALMGALNVLLAPYLRASENLTDTHSILYCGAIAACRVARVKFPDTSRAPRPAGGVPAWQVRIERRISTFRTLIAKLLCFSRGNSRPRVMRFVTQAFAGTDIRPQYYLANVTERIDYLKQKVYAWASRIRRYRERVDRYWQNRLFQSDQRKVYRGWEGTEQCAIDGHRPDASAMIDFWRGIWSVPVEHTEGEWMRIVERECESIESMESILIDSVDVSCAIRTAQNWKSPGPDGLHNFWIKWIRCSHDRLAIQFQEALELCSLPSFMTTGVTFLLHKSGSTTDPKNYRPITCLPTIYKLLTSILRNKINTHIVANNVLAPAQNGCRVGSRGTKELLLIDMAISQQVRRSKGALSVAWIDYKKAYDSVPHSWLERILELYKIDITLKSFLSACMRQWTTVLRQPGGGEVSADPQDLIRIERGIFQGDSLSPLWFCLALNPLSTLLKDLGLGHRLRRGGEVISHLLYMDDLKLFAPKRQDLMELLKTTEVFSSAIKMEFGVDKCAVMHVQRGKVVNSPNLQLSETMTLRSLSEVETYKYLGMSESLGISVVDIKKSIKERFFCRLTKVLNSLLSGGNRMRAFNGWVMPLLIYSFGILRWTQTELDALDRRVRQLLTTHRMLHPRSSVMRLYIPRKWGGRGMLNAKNLHNREVYRLRSFFRNNDCGMHCDVVAVDKGLTPLSLANENWRQPSVLSTEDRKNVWKGKELHGRFYRALTGPDVDLLASVNWLRFGDLFGETEGFACAIADEVIKTNNYRKYILKDGTVDICRACHRPGESLRHIISGCSHLANGEYLHRHNQVARIIHQQLALQYGLVESEVPYYKYAPASVLENGRALLYWDRSIITDRTIVANKPDIVLVDRSQRRAVLVDITIPHDENLVKAEKDKLSKYLDLAHEVTAMWDVDSTIIVPIVVTVNGLIAKSLDQHLKRLSLDGWIKGQIQKAVILDTCRIVRRFLTLQP

SEQ ID NO: 5826 - protein, 965 aa, Pammene fasciana
MNRRNLALMGALNDLLAPFLRTSKDLDDTHSIMYCGAIAACRVARVKFPDAERAPRTAGGVPAWQVRIERRINSFRTLIAKLICFRGGNNRPRVMRFVHQAFAGTGIEPRDYMANVIERIDFLKQKVYAWASRIRRYRERVDRFRQNRLFQSDQRKVYRRWEKADPRVSDERLPDATAMADFWRSIWSAPVEHTEGEWMSVVERECESIEPMGAITISPDDVSCAIRTTQNWKSPGPDGLHNFWLKWFRCSHSRLATQFQQALELGSLPPSLTTGVTFLLYKSGSTMEAKNYRPITCLPTLYKLLTSILRAKINAHMVANNILASAQNGCRVGSRGTKELLLIDMTICQRARRNRGALSAAWIDYKKAYDSVPHSWLERILELYKVDAALRSFLGACMRQWTTVLRQPGGGDDPPGPQDFIRIERGIFQGDSLSPLWFCLALNPLSTLLKDSGLGCRLRREGEVISHLLYMDDLKLFAPNNRDLLELLKTTEVFSNSIQMEFGVDKCAVMHVQRGKVVNSTNLQLSETMTFRSISESETYKYLGMSQSLGIEDAGIKQALRERFFGRLTKVLNSLLSGGNKVRAFNAWVMPLLTYSFGILRWTQTELDALDRRVRLMLTTHRMLHPRSSVMRLYIPRKCGGRGFLNAKNLHNCEVYNLRNYFLNNECGMHRDVVAIDKGLTPLSLANENWRKPVVLSTEDRKAVWKSKELHGRFYGALTGPDVDLLASVNWLRFGDLFGETEGFACAIADEVIMTNNYRRYILKDGTVDICRACRRPGESLRHIISGCSHLANGEYLHRHNLVARIIHQQLALLYGLVAHEVPYYKYIPAPVLENDRATLYWDRSIITDRTIVANKPDIVVIDRPQRRAMLVDITVPCDVNLVKAEKDKSSKYLDLAHEVTAMWEVDSAIIVPIVVSANGLIAKSLDQHLERLSLRGCGWIKGQIQRAVILDTARIVRRFLTLRP

SEQ ID NO: 5827 - protein, 965 aa, Pammene fasciana
MNRRNLALMGALNDLLDPILRTSKDLDDTHSIMYCGAIAACRVARIKFPDAERAPRTAGGVPAWQVRIERRINSFRTLIAKLICFRGGNNRPRVMRFVYQAFAGTDIEPRDYMANVTERIDFLRQKVYAWASRIRRYRERVDRFRQNRLFQSDQRKVYRRWEEADPRVSDVRLPDATAMTDFWRSIWSAPVEHTEGEWMNVVERECESIEPMGAITISPDDVSCAIRTSQNWKSPGPDGLHNFWLKWLRCSHSRLATQFQHALELGSLPPSLTTGVTFLLYKSGSTTEAKNYRPITCLPTLYKLLTSILRAKINAHMVANNILASAQNGCRVGSRGTKELLLIDMTICQRVRRNRGALSAAWIDYKKAYDSVPHSWLERILELYKVDAALRSFLGACMRQWTTVLRQPGGGDDPPGPQDFIRIERGIFQGDSLSPLWFCLALNPLSTLLKDSGLGCRLRREGEVISHLLYMDDLKLFAPNNRDLLELLKTTEVFSSSIKMEFGVDKCAVMHVQRGKVVNSTNLQLSETMTFRSISESETYKYLGMSQSLGIEDVGIKQALKERFFGRLTKVLNSLLSGGNKVRAFNAWVMPLLTYSFGILRWTQTELDALDRRVRLLLTTHRMLHPRSSVMRLYIPRKCGGRGFLNAKNLHNREVYNLRNYFLNNECGMHRDVVTVDKNLTPLSLANENWRKPVVLSTEDRKAVWKSKELHGRFYGALTGPDVDLLASVNWLRFGDLFGETEGFACAIADEVIMTNNYRRYILKDGTVDICRACRRPGESLRHIISGCSHLANGEYLHRHNLVARIIHQQLALLYGLVAHEVPYYKYTPAPVLENGRATLYWDRSIITDRTIVANKPDIVVIDRPQRRAMLVDITVPCDVNLVKAEKDKSSKYLDLAHEVTAMWEVDSAIIVPIVVSANGLIAKSLDQHLERLSLRGCGWIKGQIQKAVILDTARIVRRFLSLRP

SEQ ID NO: 5828 - protein, 999 aa, Pammene fasciana
MSSTANEQLRRTLEEAITQYRSTNIPRPRLPRLPMNRRNLALMGALNDLLDPILRTSKDLDDTHSIMYCGAIAACRVARVKFPDAERAPRTAGGVPVWQVRIERRINSFRTLIAKLICFRGGNNRPRVMRFVHQAFAGTGIEPRDYMANVTERIDFLKQKVYAWASRIRRYRERVDRFRQNRLFQSDQRKVYRRWEEADPRVSDVRLPDATAMTDFWRSIWSAPVEHTEGEWMSVVERECESIEPMGAITISLDDVSCAIRTAQNWKSPGPDGLHNFWLKWFRCSHSRLATQFQQALELGSLPPSLTTGVTYLLYKSGSTTEAKNYRPITCLPTLYKLLTSILRAKINAHIVANNILASSQNGCRVGSRGTKELLLIDMTICQRVRRKRGALSAAWIDYKKAYDSVPHSWLERILELYKVDAALRSFLGACMRQWTTVLRQPGGGDDPPDPHDFIRIERGIFQGDSLSPLWFCLALNPLSTLLKDSGLGCRLRREGEVISHLLYMDDLKLFAPNNRDLMELLKTTEVFSNSIKMEFGVDKCAVMHVQRGKVVNSTNLQLSETMTFRSISESETYKYLGMSQSLGIEDAGIKQALKERFFGRLTKVLNSLLSGGNKVRAFNAWVMPLLTYSFGILRWTQTELDALDRRVRLLLTTHRMLHPRSSVMRLYIPRKCGGRGFLNAKNLHNREVYNLRNYFLNNECGMHRDVVAVDKSLTPLSLANENWRKPVVLSTEDRKAVWKSKELHGRFYGALTGPDVDLLASVNWLRFGDLFGETEGFACSIADEVIMTNNYRRYILKDGTVDICRACRRPGESLRHIISGCSHLANGEYLHRHNLVARIIHQQLALLYGLVDHEVPYYKYTPAPVLENGRATLYWDRSIITDRTIVANKPDIVVIDRPQRRAMLVDITVPCDVNLVKAEKDKSSKYLDLAHEVTAMWEVDSAIIVPIVVSANGLIAKSLDQHLERLSLRGCGWIKGQIQKAVILDTARIVRRFLTLRP

SEQ ID NO: 5829 - protein, 1208 aa, Ennomos quercinarius
MITRSKAKTAGNECARLPPLPVPSSPSSSSDDEYATPPDTTASSDEDGPSSPPPPPPPARRGRPPLPARLGPAGQPAPRPAPATGGIVRRMRWTQTMNENCMRAYYGATEGGSSLTAYRDRMLSLFQDLEPAVAVSAQRLSDQVRAIQRCKMLDEPALDRLRLEALSIRATSPSPRVLPAALPDPGPIMDPLPVTPRGDPAIDGEESVSDSVSTQANEQLRSALEDAILRYRSTPTSRPRLPRLPTNRRNLVLMGALNTLLAPYLRTSEDLVDTHSILYCGAIAACRVAHVKFPDTDRAPRPADGAPAWQVRIEKRITTFRTLIAKLVCFSRGNHRPRVMRFVTQAFAGTGIRPQEYMACVTERIDFLKQKVYAWASRIRRYRGRVDRYQQNRLFQSDQRKVYRNWEGTGQRVVDGQLPDANAMNEFWRSIWSVPVDHTEGDWMRVVERVCEPIESMGSITIDPEDISCAIRTAQNWKSPGPDGLHNFWIKWIRCSYPCLAIQFQEALEAGSLPSFMTTGVTFLLHKSGSTTEAKNYRPITCLPTLYKLLTSILRTKINSHIVANNILAPAQNGCRVGSRGTKELLLIDTAICQQVRRNRGALSTAWIDYKKAYDSVPHSWLERILELYKIDATLRSFLSACMRQWTTVLRQPGGGESVSDAQDFIRIERGIFQGDSLSPLWFCLALNPLSTLLGDSGLGYRLRRGGEIISHLLYMDDLKLFAPQRPQLIELLKITENFSNSINMEFGVDKCAVMHVHRGKVVNSTNLQLSETMTLRSLSESETYKYLGMSESLGISVGDVKRTVKERFFCRLTKVLNSLLSGGNRTRAFNGWVMPLLMYSFGILRWTQTELDALDRKVRQLLTSHRMLHPRSSVMRLYIPRKWGGRGFLNAKTLHNREVCSLRDYFLNNECGMHRDVVAVDKGLTPLSLANENWRKPVVLSTEDRRDVWKGKELHGRFYRALTGPDVDLHASVNWLRFGDLFGETEGFLCAIADEVIKTNNYRKYIMKDGTVDICRACRRPGESLRHIISGCSHLANGEYLHRHNLVARIIHQQLALQYGLVESEVPYYKYTPGPVLENGRALLYWDRSIITDRTIVANKPDIVLVDRSQRRAVLVDITIPHDENLVKAEKDKLSKYLDLAHEVTAMWNVDSTSIVPIVVSANGLIAKSLDQHLERLSLDGWIKGQIQKAVLLDTARIVRRFLTLQP

SEQ ID NO: 5830 - protein, 1209 aa, Cydia splendana
MQTRSKTRAQLASPRNARPPPPSASSVSSQSSSGDEFATAPDTSESSDECGPPPPPSRPPARRGRPPLSARLGPAGHPAPPTAPAAGGVVRRMRWSQTNNENVMRAYYGATEGGTNLCAYRVRMLPLFQALEPTIDVTAQRLSDQVRVIQRQKRLDDSTLDRLRLEALSARAASTSARDPPATSPDPVPAPDQAPGAPRVDLSADEEEFAQSVGSTANEQLRRTLDEAITRYRSTPDTRPRLPRLPMNKHNLALMGALNALLEPYLRTSKDLDDTHAIMYCGAIAACRVARVKFPDSERAPRTAGGAPAWQIRIERRISSFRTLIAKLICFRGGNNRPRVMRFVNQAFVGTDIRPRDYMANVTERIDFLKQKVYAWANRIRRYRERVDRFQQNRLFQSDQRKMYRRWEETNLRASDSRPPDATVMNDFWRSIWSVPVGHTEGSWMSDVERECESIEPMGAVTISPDDVSCAIRTAQNWKSPGPDGLHNFWLKWFRCSHSYLAAQFQQALELGSLPPSLTTGVTFLLYKSGSTTEAKNYRPITCLPTLYKLLTSILRAKINAHIVANNILASAQNGCRVGSRGTKELLLIDMTICQQIRRNKGALSAAWIDYKKAYDSVPHSWLGRVLELYKVDAALRAFLSACMGQWTTVLRQPGGGDDRPGPQDFIRIERGIFQGDSLSPLWFCLALNPLSTLLKDLGLGCRLRREGEVISHLLYMDDLKLFAPNTQGLLELLKTTEVFSSAINMEFGVDKCAVMHVQQGKVVNSTNLQLSETMSFRSISESETYKYLGMSQSLGIEDEGIRRSVKERFFSRLTKVLNSLLSGGNKVRAFNAWVMPLLTYSFGILRWTQTELDALDRRVRSLLTTHRMLHPRSSVMRLYIPRKCGGRGFLNAKDLHNREVYNLRNYFLNNECGMHRDVVAVDRNLTPLSLANENWRKPVVLSTADRKAAWESKALHGRFYKALTGPDVDLLASVNWLRFGDLFGETEGFACAIADEVMMTNNYRKYILKDGTVDICRACRRPGESLRHIISGCSHLANGEYLHRHNLVARIIHQQLALLYGLVDREVPYYKYLPAPVLENGRATLYWDRSIITDRTIVANKPDIVLIDRSQRRAVLADVTIPHDENLVKAEKDKSSKYLDLAHEITAMWDVDSTIIVPIVVSANGLIAKSLDHHLERLSLGGWIKGQMQKAVILDTARIVRRFLTLRP

SEQ ID NO: 5831 - protein, 1194 aa, Cydia splendana
MITRSKTRSQASITTNARPPPSPVSSVSSQASSGDEFATAPDTSESSDECGPPPPPPRPPARRGRPPLPARLGPAGHHAPPTVPAAGGVVRRMRWSQTMNENVMRAYYGATEGGTDLCAYRVRMLPLFQALEPTIDVTAQRLSDQVRVIQRLKRLDDSTLDRLRLEALSTRAASTSVRDPPATSPDPVPAPDQAPEAPRVDLCADEEEFAQSVSSTANEQLRRTLDEAITQYHSTPNTRPRLPRLPMNRHNLALMGALNALLEPYLRTSKDLDDTHAIMYCGAIAACRVARVKFPDSERAPRTAGGAPAWQIRIERRISSFRTLIAKLICFRGGNNRPRVMRFVNQAFAGTDIRPRDYMANITERIDFLKQKVYAWANRIRRYRERVDRFQQNRLFQSDQRKMYRKWEETNPRASDSQPPEAHTEGSWMSVVERECESIEPMGAVTISPDDVSCAIRTAQNWKSPGPDGLHNFWLKWFRCSHSCLAAQFQQALELGSPPPSLTTGVTFLLYKSGSTTEAKNYRPITCLPTLYKLLTSILRAKINAHIVANNILASAQNGCRVGSRGTKELLLIDMTICQQIRRNRGALSAAWIDYKKAYDSVPHSWLERVLELYKVDTALRAFLSACMRQWTTVLRQPGGGDGSPGPQDFIRIERGIFQGDSLSPLWFCLALNPLSTLLKDLELGCRLRRGGEVISHLLYMDDLKLFAPNSQDLVELLKTTEVFSNAINMEFGVDKCAVMHVQRGKVVNSTNLHLSETMSFRSISESETYKYLGISQSLGIEEEGIRRSVMERFFSRLTKVLNSLLSGGNKVRAFNAWVMPLLTYSFGILRWTQTELDALDRRVRQLLTTHRMLHPRSSVMRLYIPRKCGGRGFLNAKNLHNREVYNLRNYFLNNECGMHCDVVAADKGLTPLSLANENWRKPVVLSTEDRKAVWKDKQLHGRFYKALTGPDVDLLASVNWLRFGDLFGETEGFACAIADEVMMTNNYRKYILKDGTVDICRACRRPGESLRHIISGCSHLANGEYLHRHNLVARIIHQQLALLYGLVDREVPYYKYSPAPVLENGRATLYWDRSIITDRTIVANKPDIVLIDRSQRRTVLVDVTIPHDENLVKAEKDKSSKYLDLAHEITAAMWDVDSTIIVPIVVSANGLIAKSLDQHLERLSLGGWIKGQMQKAVILDTARIVRRFLTLRP

SEQ ID NO: 5832 - protein, 1209 aa, Cydia splendana
MQTRSKTRAQLASPRNARPPPPSASSVSSQSSSGDEFATAPDTSESSDECGPPPPPSRPPARRGRPPLSARLGPAGHPAPPTVPAAGGVVRRMRWSQTNNENVMRAYYGATEGGTNLCAYRVRMLPLFQALEPTIDVTAQRLSDQVRVIQRQKRLDDSTLDRLRLEALSARAASTSARDPPATSPDPVPAPDQAPGAPRVDLSADEEEFAQSVGSTANEQLRRTLDEAITRYRSTPDTRPRLPRLPMNKHNLALMGALNALLEPYLRTSKDLDDTHAIMYCGAIAACRVARVKFPDSERAPRTAGGAPAWQIRIERRISSFRTLIAKLICFRGGNNRPRVMRFVNQAFVGTDIRPRDYMANVTERIDFLKQKVYAWANRIRRYRERVDRFQQNRLFQSDQRKMYRRWEETNLRASDSRPPDATVMNDFWRSIWSVPVGHTEGSWMSVVERECESIEPMGAVTISPDDVSCAIRTAQNWKSPGPDGLHNFWLKWFRCSHSYLAAQFQQALELGSLPPSLTTGVTFLLYKSGSITEAKNYRPITCLPTLYKLLTSILRAKINAHIVANNILASAQNGCRVGSRGTKELLLIDMTICQQIRRTKGALSAAWIDYKKAYDSVPHSWLGRVLELYKVDAALRAFLSACMGQWTTVLRQPGGGDDRPGPQDFIRIERGIFQGDSLSPLWFCLALNPLSTLLKDLGLGCRLRREGEVISHLLYMDDLKLFAPNTQGLLELLKTTEVFSSAINMEFGVDKCAVMHVQQGKVVNSTNLQLSETMSFRSISESETYKYLGMSQSLGIEDEGIRRSVKERFFSRLTKVLNSLLSGGNKVRAFNAWVMPLLTYSFGILRWTQTELDALDRRVRSLLTTHRMLHPRSSVMRLYIPRKCGGRGFLNAKDLHNREVYNLRNYFLNNECGMHRDVVAVDRNLTPLSLANENWRKPVVLSTADRKAAWESKALHGRFYKALTGPDVDLLASVNWLRFGDLFGETEGFACAIADEVMMTNNYRKYILKDGTVDICRACRRPGESLRHIISGCSHLANGEYLHRHNLVARIIHQQLALLYGLVDREVPYYKYLPAPVLENGRATLYWDRSIITDRTIVANKPDIVLIDRSQRRAVLADVTIPHDENLVKAEKDKSSKYLDLAHEITAMWDVDSTIIVPIVVSANGLIAKSLDHHLERLSLGGWIKGQMQKAVILDTARIVRRFLTLRP

SEQ ID NO: 5833 - protein, 955 aa, Cydia splendana
MGALNALLEPYLRTSKDLDDTHSIMYCGAIAACRVARVKFPDAERAPRTVGGVPAWQVRIERRISSFRTLIAKLICFRGGNNRPRVMRFVNQAFAGTDIRPRDYMANVTERIDFLKQKVYAWANRIRRYRERVDRFQQNRLFQSDQRKVYRRWEEANLRTPDTRPPDATAMTDFWRSIWSVPAGHTEGSWMSVVEHECESIEPMGAVIISPDDVSCAIRTAQNRKSPGPDGLHNFWLKWFRCSHSRLAAQFQQALELGSLPPSLTTGVTFLLYKSGSTTEAKNYRPITCLPTLYKLLTSILRAKINAHIVANNILASAQNGCRVGSRGTKELLLIDMTIGQQIRRNRGALSAAWIDYKKAYDSVPHSWLGRVLELYKVDAALRAFLSACMRQWTTVLRQPGGWDDPPDPQDFIRIERGIFQGDSLSPLWFCLALNPLSTLLKDLGLGCRLRREGEIISHLLYMDDLKLFAPNSQDLSELLKTTEGFSSAINMEFGVDKCAVMHVQRGRVVNSTNLQLSETMSFRSISESETYKYLGMSQSLGIEDEGIRRSVKERFFSRLTKVLNSLLSGGNKVRAFNAWVMPLLTYSFGILRWTQTELDALDRRVRSLLTTHRMLHPRSSVMRLYIPRKCGGRGFLNAKDLHNREVYNLRNYFLNNECGMHRDVVAVDRNLTPLSLANENWRKPVVLSTADRKAAWESKVLHGRFYKALTGPDVDLLASVNWLRFGDLFGETEGFACAIADEVMMTNNYRKYILKDGTVDICRACRRPGESLRHIISGCSHLANGEYLHRHNLVARIIHQQLALLYGLVDREVPYYKYLPAPVLENGHATLYWDRSIITDRTIVANKPDIVIIDRSQRRAVLVDITIPHDENLVKAEKDKSSKYLDLAHEITAMWDVDSTIIVPIVVSVNGLIAKSLDQHLERLSLGGWIKGQMQKAVILDTARIVRRFLSLQP

SEQ ID NO: 5834 - protein, 1208 aa, Cydia splendana
MITRSKARSQASTTANARPPPSPVSSVSSQSSGDEFATAPDTSESSDECGPPPPPPRPPARRGRPPLPARLGPAGHLAPPTAPAAGGVVRRMRWSQTMNENVMRAYYGATEGGTDLCAYRVRMLPLFQTLEPTIDVTAQRLSDQVRVIQRLKRLDDSTLDRLRLEALSARAASTSVRDPPATSPDPVPAPDQAPEAPRVDLCADEEEFAQSVSSTANEQLRRTLDEAITQYRSTPNTRPRLPRLPMNRHNLALMGALNALLEPYLRTSKDLDDTHAIMYCGAIAACRVARVKFPDSERAPRTAGGAPAWQIRIERRISSFRTLIAKLICFRGGNNRPRVMRFVNQAFAGMDIRPRDYMANITERIDFLKQKVYAWANRIRRYRERVDRFQQNRLFQSDQRKMYRKWEETNPRASDSQPPDATVMNDFWRSIWSVRVGHTEGSWMSVVERECESIEPTGAVTISPDDVSCAIRTAQNWKSPGPDGLHNFWLKWFRCSHSCLAAQFQQALELGSPPPSLTTGVTFLLYKSGSTTEAKNYRPITCLPTLYKLLTSILRAKINAHIVANNILASAQNGCRVGSRGTKELLLIDMTICQKIRRNRGALSAAWIDYKKAYDSVPHSWLERVLELYKVDTALRAFLSACMRQWTTVLRQPGGGDESPGPQDFIRIERGIFQGDSLSPLWFCLALNPLSTLLKDLELGCRLRRGGEVISHLLYMDDLKLFAPNSQDLVELLKTTEVFSNAINMEFGVDKCAVMHVQRGKVVNSTNLQLSETMSFRSISESETYKYLGMSQSLGIEEEGIRRSVKERFFSRLTKVLNSLLSGGNKVRAFNAWVMPLLTYSFGILRWTQTELDALDRRVRSLLTTHRMLHPRSSVMRLYIPRKCGGRGFLNAKDLHNREVYNLRNYFLNNECGMHRDVVAVDRNLTPLSLANENWRKPVVLSTADRKAAWESKVLHGRFYKALTGPDVDLLASVNWLRFGDLFGETEGFACAIADEVMMTNNYRKYILKDGTVDICRACRRPGESLRHIISGCSHLANGEYLHRHNLVARIIHQQLALLYGLVDREVPYYKYSPAPVLENGRATLYWDRSIITDRTIVANKPDIVLIDRSQRRTVLVDVTIPHDENLVKAEKDKSSKYLDLAHEITAMWDVDSTIIVPIVVSANGLIAKSLDQHLERLSLGGWIKGQMQKAVILDTARIVRRFLTLRP

SEQ ID NO: 5835 - protein, 1208 aa, Cydia splendana
MITRSRAKAVTTSARPPPPPASSTSSSTLSSGDEFATAPDTDGSSDESGPPPPPPRPPVRRGRPPLPARLGPAGHPAPPTAPATGGIVRRMRWTRDMNENVMRAYYGATEGGTQLSAYRSRILPLFQTLEPTITVSEQRLSDQVRVIQRLKRLDDATLDRLRQEALSARADSISVRDLPATSPDPVPAPDLAPGAPRVDFCTDEGDFVSQNVSTTANEQLRRTLEEVITQYRATTNSRPRLPRLPMNRRNLALMGALNALLEPHLRTSKDLDDTHSILYCGAIAACRVARVKFPDAERAPRTVGGVPAWQARIERRISSFRTLIAKLICFRGGNNRRRVMRFVNQAFAGTDIRPRDYMANVTERIDFLKQKVYAWANRIRRYRERVDRFQQNRLFQSDQRKVYRKWEETNLRTPDTQPPDATAMTDFWRSIWSMPVGHTVGGWMSVVERECEFIEPMGAVTISPDDISCAIRTAQNWKSPGPDGLHNFWLKWFRCSHSRLAAQFQQALELGSLPPSLTTGVTYLLYKSGSTTEAKNYRPITCLPTLYKLLTSILRAKINAHIVANNILASAQNGCRVGSRGTKELLLIDMTICQQIRRNKGALSAAWIDYKKAYDSVPHSWLGRVLELYKVDAALRAFLSACMRQWTTVLRQPGGGDDPPDPQDFIRIERGIFQGDSLSPLWFCLALNPLSTLLKDLGLGCRLRREGEIISHLLYMDDLKLFAPNSQDLSELLKTTEGFSSAINMEFGVDKCAVMHVQRGRVVNSTNLQLSETMSFRSISESETYKYLGMSQSLGIEDEGIRRSVKERFFSRLTKVLNSLLSGGNKVRAFNAWVMPLLTYSFGILRWTQTELDALDRRVRSLLTTHRMLHPRSSVMRLYIPRKCGGRGFLNAKDLHNREVYNLRNYFLNNEGGMHRDVVAVDRNLTPLSLANENWRKPVVLSTADRKAAWESKVLHGRFYKALTGPDVDLLASVNWLRFGDLFGETEGFACAIADEVMMTNNYRKYILKDGTVDICRACRRPGESLRHIISGCSHLANGEYLHRHNLVARIIHQQLALLYGLVDREVPYYKYLPAPVLENGRATLYWDRSIITDRTIVANKPDIVIIDRSQRRAVLVDITIPHDENLVKAEKDKSSKYLDLAHEITAMWDVDSTIIVPIVVSVNGLIAKSLDQHLERLSLGGWIKGQMQKAVILDTARIVRRFLSLQP

SEQ ID NO: 5836 - protein, 869 aa, Agriopis aurantiaria
MRFVTQAFAGTDIRHQHYLANVTERIDYLKQKVYAWANRIRRYRERVDRYWQNRLFQSDQRKVYRGWEETDQRVSDGQLPDASAMINFWRGIWSVPVEHTEGDWMRVVERECESIEPMGSILIDPVDVSCAIRTAQNWKSPGPDGLHNFWIKWIRCSHDRLATQFQEALELGSLPSFMTTGVTFLLHKSGSTTEAKNYRPITCLPTIYKLLTSILRNKINAHIVANNVLAHAQNGCRVGSRGTKELLLIDTAISQQVRRNKGALSAAWIDYKKAYDSVPHSWLERVLELYKIDTTLKSFLGACMRQWTTVLRQPGGGDGAFGPQDLLRIERGIFQGDSFSPLWFCLALNPLSTLLRDSGLGYRLRRDGQVISHLLYMDDLKLFTPKRQDLVELLKITEGFSSAIRMEFGVDKCAVMHVQRGKVVNSPNLQLSEVMTLRSLSEAETYKYLGMSESLGISVENIKKSVKERFFCRLTKVLNSLLSGGNKVRAFNGWVMPLLIYSFGILRWTQTELDALDRRVRQLLTSHRMLHPRSSVMRLYIPRKWGGRGFLNAKNLHNREVCSLRDFFRNSESGMHRDVVAVDRGLTALSLANENWRKPSVLSIEDRRDVWKGKELHGRFYRALTGPDVDLLASVNWLRFGDLFGETEGFACAIADEVIKTNNYRKYIMKDGTVDICRACHRPGESLRHIISGCSHLANGEYLHRHNLVARIIHQQLALRYSLVESEVPYYKYAPAPVLENGRALLYWDRSIITDRTIVANKPDIVLVDRSQRRAVLADITIPHDENLVKAEKDKLSKYLDLAHEVTAMWDVDSTIIVPIVVSVNGLIAKSLDQHLKRLSLDGWVKGQMQKAVILDTARIVRRFLTLQP

SEQ ID NO: 5837 - protein, 1214 aa, Agriopis aurantiaria
MITRSKTSAAARLTNAQPPPPPASSSSPSSSSGEDEYHTTREASGSSSDTSGPGTPPPPPPARRGRPPLPARLGLVGHSATRPAPATGGVVRRMRWSPTMNENCMRAYYRATEGGTNLSAYCARMLPLFQDLEPTVTVSAQRLSDQVRAIHRCKLLDDSVLDRLRLEELRARPTPALMRDPPVASSATTLASLPASVATLAAPADPVVDEGDLTSNSVSDQVREQLRGALEDAISQYRFAPDSRPRLPRLPTHRRNLALMGALNALLAPYLRASEDLVDTHSILYCGAIAACRVARVKFPDTNRAPRTAGGVPAWQVRIERRISTFRTLIAKLICFSRGNNRPRVMRFVTQAFAGTEIRPQHYLANVMERIDYLKQKVYAWVSRIRRYRERVNRYWQNRLFQSDQRKVYRGWEETDQRVSDGQLPDANAMINFWRGIWSVPVEHTEGDWMRVVERECESIEPMGSILIDSVDVSCAIRTAQNWKSPGPDGLHNFWIKWIRCSHDRLATQFQEALELGSLPSFMTTGVTFLLHKSGSTTEAKNYRPITCLPTIYKLLTSILRNKINAHIVANNVLAHAQNGCRVGSRGTKELLLIDTAISQQVRRNKGALSAAWIDYKKAYDSVPHSWLERVLELYKIDTTLKSFLGACMRQWTTVLRQPGGGDGTSGPQDLIRIERGIFQGDSFSPLWFCLALNPLSTLLRDSGLGYRLRRDGQVISHLLYMDDLKLFTPKRQDLVELLKITEVFSSAIRMEFGVDKCAVMHVQRGKVVNSPNLQLSEVMTLRSLSEAETYKYLGMSESLGISVENIKKSVKERFFCRLTKVLNSFLSGGNKVRAFNGWVMPLLIYSFGILRWTQTELDALDRRVRQLLTSHRMLHPRSSVMRLYIPRKWGGRGFLNAKNLHNREVCSLRDFFRNSESGMHRDVVAVDRGLTPLSLANENWRKPSVLSIEDRRDVWKGKELHGRFYRALTGPDVDLLSSVNWLRFGDLFGETEGFACAIADEVIKTNNYRKYIMKDGTVDICRACHRPGESLRHIISGCSHLANGEYLHRHNQVARIIHQQLALRYGLAESEVPYYKYAPAPVLENGRALLYWDRSIITDRTIVANKPDIVLVDRSQRRAVLVDITIPHDENLVKAEKDKLSKYLDLAHEVTAMWDVDSTIIVPIVVSVNGLIAKSLDQHLKRLSLDGWIKGQMQKAVILDTARIVRRFLTLQP

SEQ ID NO: 5838 - protein, 1215 aa, Hedya salicella
MQRYFTRSQNTRKISTAATPTHARPTPPPASSCSPSASSDDFATAPDTSESSDDECGPPPPPPRPPARRGRPPLPARLGPAGHSAPPTAPATGGIVRRMRWSQANNENVMRAYYGATEGGTHLSAYRDRMLLLFQTFEPAIAASAQRLSDQVRAIQRRKLLDDATLDRLRLEVLAARAASTSSRNPPATSPVPAPALDLMPGAPRVDPDSDEGHCVSIVSTQANEQLRRTLEETIERYRFAPDSRPRLPRLPANKRNLALVGALNALLDPYLRASEDLADTHSIMYCGAIAACRVARVKFPDADRAPRTAGGVPAWQVRIERRISTFRTLIAKLICFRGGNNRPRVMRYVAQAFAGTDVSSCDYMACVTERIDFLKQKVYAWASRIRRYRERVDRFQQNRLFQSDQRKVYRKWEGTDQRVTDGRLPDPTAMSNFWRSIWSVPVEHTEGEWMNVVERECEPIEAMGAVTISPDDVSCAARTTQNWKSPGPDGLHNFWVKWFRCSHERLATQFQQALELGSLPSFLTTGVTFLLYKSGSTTEAKNYRPITCLPTLYKLLTSILRAKINTHIVANNVLAFSQNGCRVGSRGTKELLLIDTTICQQVRRSRGSLSAAWIDYKKAYDSVPHSWLERILELYKVDTALRSFLGACMRQWTTVLCQPGGRDARPAPQDFIRIKRGIFQGDSLSPLWFCLALNPLSTLLKDSGLGCRLRRGGEIISHLMYMDDLKLFAPKRPELVELLKVTDTFSSAIKMEFGVDKCAVMHVQRGKVVNSTNLELSETMSLRSLSETETYKYLGMSQALSIADGDIRQAVKERFFCRLTKVLNSLLSGGNKARAFNAWVMPLLTYSFGILRWTQTELDALDRRVRMLLTTHRMLHPRSSVMRLYIPRKCGGRGFLNAKDLHNREVCSLREYFLNNECGIHRDVVAVDKGLTPLSLANENWRRPTVLSTVDRKDVWKSKELHGRFYKALTGPDVDLLASVNWLRFGDLFGETEGFSCAIADEVIMTNNYRRYILKDGTVDICRACRRPGESLRHIMSGCSYLANGEYLHRHNQVARIIHQQLAVKYDLVGSEVPYYKYVPMPVLENGRATLYWDRSILTDRTIVANKPDIVLVDRSKRRAMLVDITIPHDENLVKAEKDKLSKYLDLAHEVTAMWDVDSTIIVPIVVSVNGLIAKSLDEHLKRLSLDGWIKGQIQKAVILDTARIVRRFLSVQP

SEQ ID NO: 5839 - protein, 931 aa, Hedya salicella
MYCGAIAACRVARVKFPDADRAPRTAGGVPAWQVRIERRISTFRTLIAKLICFRGGNNRPRVMRYVAQAFAGTAVRPRDYMACVTERIDFLKQKVYAWASRIRRYRERVDRFQQNRLFQSDQRKVYRKWEGTDQRVTDGRLPDPTAMNNFWGSIWSVPVEHTEGEWMNVVERECEPIETMGAVTISPDDVSCAARTTQNWKSPGPDGLHNFWVKWFRCSHERLATQFQQALELGSLPSFLTTGVTFLLYKSGSTTEAKNYRPITCLPTLYKLLTSILRAKINTHIVANNVLAFSQNGCRVGSRGTKELLLIDTTICQQVRRNRGTLSAAWIDYKKAYDSVPHSWLGRVLELYKIDTVLRSFIGSCMRQWTTVLRQPGGRDGPPDPQDFIRIKRGIFQGDSLSPLWFCLALNPLSTLLKDSGLGCRLRRGGEIISHLLYMDDLKLFAPKRPELVELLKVTETFSSAIKMEFGVDKCAIMHVQRGKVVNSTNLQLSETMSLKSLSEVETYKYLGMSQSLSIADGDIKQAVRERFFCRLTKVLNSLLSGGNKARAFNAWVMPLLTYSFGILRWTQTELDALDRRVRMLLTTHRMLHPRSSVMRLYIPRKCGGRGFLNAKDLHNREVCSLREYFLNNECGIHRDVVAVDKGLTSLSLANENWRRPTVLSTVDRKDVWRSKELHGRFYKALTGPDVDLLASVNWLRFGDLFGETEGFACAITDEVIMTNNYRKYILKDGTVDICRACRRPGESLRHIISGCSHLANSEYLHRHNQVARIIHQQLAVKYGLVGSEVPYYKYAPMPVLENGRATLYWDRSIITDRTIVANKPDIVLVDRSKRRAILIDITIPHDENLVKAEKDKLSKYLDLAHEVTAMWDVDSTIIVPIVVSANGLIAKSLNEHLKRLSLDGWVKGQIQKAVILDTARIVRRFLSVQP

SEQ ID NO: 5840 - protein, 1213 aa, Erannis defoliaria
MITRSKKRNAAVQHARPTPPPVPSSSPSSSSPSEEEFHTCGTSSSSEDVSGPRTLTPPIPVRRGRPPLPARLGPAGQPASRPALAAGGVVRRMRWSQTNNENCMRAYYGATEGGTNLTAYRVRMLSLFQTLEPTVTVSAQRISDQVRAIQRLNLLDQPLLDRLRLEAQSARPTPASTRDLDVASSAPTLASVPTSAATLATSADPVLDEGDCTGMSVSTQVSEQLRRALEDAIGQYRFALNSRPRLPRLPTHRRNLALMGALNALLAPYLRASEDLTDTHSILYCGAIAACRVARVKFPDTSRAPRPAGDVPAWQLRIERRISTFRTLIAKLICFSRGNNRPRVMRFVTQAFAGTGIRPQQYMASVTERIDYLKQKVYAWANRIRRYRERVDRYWQNRLFQSDQRKVYRNWEGTEQRVSDGQLPDASAMTNFWRGIWSVPVEHTEGDWMRVVERECESIEPMGSILIDPVDVSCAIRTAQNWKSPGPDGLHNFWIKWFRCSHDRLATQFQEALELGSLPSFMTTGVTFLLHKSGSTTEPKNYRPITCLPTIYKLLTSILSIKINAHIVANNVLAPAQNGCRVGSRGTKELLLIDMAISQQVRRNKGALSAAWIDYKKAYDSVPHSWLERILELYQIDTTLKSFLGACMRQWTTVLRQPGGGNGSSDSQDLIRIERGIFQGDSLSPSWFCLALNPLSTLLKDSGLGYRLRRGGEVISHLLYMDDLKLFAPKHQDLLELLKTTQVFSSAIRMEFGVDKCAVMRVQRGKVVNSPDLQLSEIMTLRSLSEAETYKYLGMSESLGISVVDIKKSVKERFFCRLTKVLNSLLSGGNKARAFNGWVMPLLIYSFGILRWTQTELDALDRRVRQLLTAHRMLHPRSSVMRLYIPRKWAGRGFLNAKNLHNREVCSLRDYFLNNECGMHRDVVTVDKGLTPLSLANENWRRPSVISTDDRKEVWKSKELHGRFYRALTGPDVDLLASANWLRFGDLFGETEGFACAIADEVIKTNNYRKYIMKDGTVDICRACHRPGESLRHIISGCSHLANGEYLHRHNQVARIIHQQLALQYGLVESEVPYYKYAPAPVLENGRALLYWDRSIITDRTIVANKPDIVMVDRSQRRAVLVDVTIPHDENLVKAEKDKLSKYLDLAFEITAMWDVDSTIIVPIVVSANGLIAKSLDQYLKRLSLDGWVKGQIQRAVVLDTARIVRRFLTLQP

SEQ ID NO: 5841 - protein, 1218 aa, Erannis defoliaria
MITRSKNKAKTSTAETTNARPPPLPAPSSPSASSGDDVFLTPRESSVSSSDSDVSGPRTPAPPPPARRGRPPLPARLGPAGQPASRPALAAGGVVRRMRWSQTNNENCMRAYYGATEGGTNLTAYRVRMLSLFQALEPTVTVSAQRLSDQVRAIQRLNLLDQSLLDRLHLEAQSARATPASTRDLDVASSAPTPTSVPTSAATLATSTDPVLDEGDCTGMSVSTQVSEQLRRALEDAIGQYRFTLNSRPRLPRLPTHRRNLALMGALNALLAPYLRASEDLTDTHSILYCGAIAACRVARVRFPDTNRAPRTAGDVPAWQVRIERRISTFRTLIAKLICFSRGNNRPRVMRFVTQAFAETGIRPQQYMACVTERIDYLKQKVYAWASRIRRYRERVDRYRQNRLFQSDQRKVYRDWEGNEQRVSDGHLPDASAMTNFWRSIWSVPVEHTEGDWMRVVERECEFIEPMGSILIDPVDVSCAIRTAQNWKSPGPDGLHNFWIKWFRCSHDRLATQFQEALELGSLPSFMTTGVTFLLHKSGSTTEPKNYRPITCLPTIYKLLTSILSTKINTHIVANNVLAPAQNGCRVGSRGTKELLLVDMAISQQVRRNKGALSAAWIDYKKAYDSVPHSWLERILELYKIDTTLKSFLSACMRQWTTVLRQPGGGNDSSDPQDLIRIERGIFQGDSLSPSWFCLALNPLSTLLKDSGLGYRLRRGGEVISHLLYMDDLKLFAPKHQDLLELLKTTQVFSSAIRMEFGVDKCAVMRVQRGKVVNSPDLQLSEIMTLRSLSEAETYKYLGMSESLGISVVDIKKSVKERFFCRLTKVLNSLLSGGNKARAFNGWVMPLLIYSFGILRWTQTELDALDRRVRQLLTAHRMLHPRSSVMRLYIPRKWGGRGFLNAKNLHNREVCSLRDYFLNNECGMHRDVVTVDKGLTPLSLANENWRRPSVLSTDDRKDVWKSKELHGRFYRALSGPDVDLLASVNWLRFGDLFGETEGFACAIADEVIKTNNYRKYIMKDGTVDICRACHRPGESLRHIISGCSHLANGEYLHRHNQVARIIHQQLALQYGLVESEVPYYKYAPAPVLENGRALLYWDRSIITDRTIVANKPDIVMVDRSQRRAVLVDVTIPHDENLLKAEKDKLSKYLDLAFEITAMWDVDSTIIVPIVVSANGLIAKSLDQYLKRLSLDGWVKGQIQKAVVLDTARIVRRFLTLQP

SEQ ID NO: 5842 - protein, 1215 aa, Biston betularia
MWTRSRTAAASGLHDAHIPSPPAPSTPSASSGDEEFATPLATSASSSSSDVSGPRTPAPPPPARRGRPPLPARLGPAGQSASRSALAAGGVVRRMRWSQTNNENCMRAYYGATEGGINLSAYRVRMLPLFQALEPTVAVSTQRLSDQVRAIQRLQLLDQSVLDRLRLEALPARPTPVSTRDSPVASSAPTLVSVPTSMATLATPTDPVVDVGECTSMGVCSQVSEHLRRTLEDAICQYRFAPDSRPRLPRLPTHRRNLALMGALNALLAPYLRASEDLTDTHSILYCGAIAACRVARVKFPDTNRAPRPAGGVPAWQLRIERRISTFRTLIAKLICFSRGNNRPRVMRFVTQAFAGTGIRPQHYLASVTERIDYLKQKVYAWANRIRRYRERADRYWQNRVFQSDQRKVYRDWEGTGQRVSDRQLPDTSVTTEFWRGIWSLPVEHTEGDWMRVVERECESIESMGSVLIDPVDVSCAIRTAQNWKSPGPDGLHNFWIKWIRCSHDRLATQFQEALELGSLPCFMTTGVTFLLHKTGSTTEAKNYRPITCLPTIYKLLTSILRTKINAHVVANNVLAPAQNGCRVGSRGTKELLLIDMTISQQVRRNKGALSTAWIDYKKAYDSVPHSWLERVLELYKIDTTLKSFLGACMRQWTTVLRRPGSGDGSSEPQDLIRIERGIFQGDSLSPLWFCLALNPLSTLLKESGLGHRLRRGGEVISHLLYMDDLKLFAPKRPDLMELLKTTQVFSNAIKMEFGVDKCVVMHVQRGEVVNCPDLQLSETMTFRSLSEAETYKYLGMSESLGIAVVDIKRSVKERFFCRLTKVLNSFLSGGNKVRAFNGWVMPLLIYSFGILRWTQTELDALDRRVRQQLTTHRMLHPRSSVMRLYIPRKLGGRGFLSTKNLHNREVCSLRDYFRDNECGMHRDVVAVDKGLTPLSLANENWRKPSVLSTEDRKEVWKSKQLHGRFYRVLTGPDVDMLASVNWLRFGDLFGETEGFACAIADEVIKTNNYRKYIMKDGTVDICRACHRPGESLRHIISGCSHLANGEYLHRHNQVARIIHQQLALQYGLVESEVPYYKYAPAPVLENGRALLYWDRSIITDRTIVANKPDIVVVDRAQRRAVLVDITIPHDENLVKAEKDKLSKYLDLAHEITAMWDVDSTIIVPIVVTVNGLIAKSLDQHLKRLSLDGWVKGQLQKAVILDTARIVRRFLTLQP

SEQ ID NO: 5843 - protein, 1215 aa, Biston betularia
MWTRSRTAAASGLHDAHIPSPPAPSTPSASSGDEEFATPLATSASSSSSDVSGPRTPAPPPPARRGRPPLPARLGPAGQSASRSALAAGGVVRRMRWSQTNNENCMRAYYGATEGGINLSAYRVRMLPLFQALEPTVAVSTQRLSDQVRAIQRLQLLDQSVLDRLRLEALPARPTPVSTRDSPVASSAPTLVSVPTSMATLATPTDPVVDVGECTSMGVCSQVSEHLRRTLEDAICQYRFAPDSRPRLPRLPTHRRNLALMGALNALLAPYLRASEDLTDTHSILYCGAIAACRVARVKFPDTNRAPRPAGGVPAWQLRIERRISTFRTLIAKLICFIRGNNRPRVMRFVTQAFAGTGIRPQHYLASVTERIDYLKQKVYAWANRIRRYRERADRYWQNRVFQSDQRKVYRDWEGTGQRVSDRQLPDTSVMTEFWRGIWSLPVEHTEGDWMRVVERECESIESMGSVLIDPVDVSCAIRTAQNWKSPGPDGLHNFWIKWIRCSHDRLATQFQEALELGSLPCFMTTGVTFLLHKTGSTTEAKNYRPITCLPTIYKLLTSILRTKINAHVVANNVLAPAQNGCRVGSRGTKELLLIDMTISQQVRRNKGALSTAWIDYKKAYDSVPHSWLERVLELYKIDTTLKSFLGACMRQWTTVLRQPGSGDGSSEPQDLIRIERGIFQGDSLSPLWFCLALNPLSTLLKESGLGHRLRRGGEVISHLLYMDDLKLFAPKRPDLMELLKTTQVFSNAIKMEFGVDKCAVMHVQRGEVVNCPDLQLSETMTFRSLSEAETYKYLGMSESLGIAVVDIKRSVKERFFCRLTKVLNSFLSGGNKVRAFNGWVMPLLIYSFGILRWTQTELDALDRRVRQQLTTHRMLHPCSSVMRLYIPRKLGGRGFLSAKNLHNREVCSLRDYFRDNECGMHRDVVAVDKGLTPLSLANENWRKPSVLSTEDRKEVWKSKQLHGRFYRVLTGPDVDMLASVNWLRFGDLFGETEGFACAIADEVIKTNNYRKYIMKDGTVDICRACHRPGESLRHIISGCSHLANGEYLHRHNQVARIIHQQLALQYGLVESEVPYYKYAPAPVLENGRALLYWDRSIITDRTIVANKPDIVVVDRAQRRAVLVDITIPHDENLVKAEKDKLSKYLDLAHEITAMWDVDSTIIVPIVVTVNGLIAKSLDQHLKRLSLDGWVKGQLQKAVILDTARIVRRFLTLQP

SEQ ID NO: 5844 - protein, 1215 aa, Biston betularia
MQTRSKTRKPAEYLDAQEPPPPAPSTPSASSGDEEFATPLATSASSSSSDVSGPRTPAPPPPTRRGRPPLSARLGPAGQSAPRSALAAGGVVRRMRWSHTNNENCMRAYYGATEGGINLSAYRVRMLPLFQALEPTVTVSAQRLSDQVRAIQRLQLLDQSVLDRLRLEVLPTRLTPISTRDPPVASSAPTLVSVPTSEATLATPTDLEVDIGDYMSMSVCSQVSEHLRRTLEDAICQYRFAPDSRPRLPRLPTHRRNLVLMGALNALLAPYLQASEDLTDTHSILYCGAIAACRVARVKFPDTNRAPRPAGGVPAWQLRIERRIGTFRTLIAKLICFSRGNNRPRVMRFVTQAFAGTGIRPQHYLASVTERIDYLKQKVYAWANRIRRYRERAVRYWQNRVFQSDQRKVYRNWEGTGQRVSDGQLPGTSAMTEFWRGIWSLPVEHTEGDWMRVVERECESIESMGSVLIDPVDVSCAIRTAQNWKSPGPDGLHNFWIKWIRCSHDRLATQFQEALELGSLPRFMTTGVTFLLHKTGSTTEAKNYRPITCLPTIYKLLTSILRTKINTHVVANNILAPAQNGCKVGSRGTKELLLIDMTISQQVRRNKGALSTAWIDYKKAYDSVPHSWLERVLDLYKIDPTLKSFLGACMRQWTTALRQPGSGDGSSEPQDLIRIERGIFQGDSLSPLWFCLALNPLSTLLKDSGLGHRLRRGSEVISHLLYMDDLKLFAPKRPDLMELLKTTQVFSSAIKMEFGVDKCAVMHVQRGKIVNCPDLQLSETMTLRSLSEAETYKYLGMSESLGIAVADIKRSVKERFFCRLTKVFNSLLSGGNKVRAFNGWVMPLLIYSFGILKWTQTELDALDRKVRQQLTTHRMLHPRSSVMRLYIPRKLGGRGFLSAKNLHNREVCSLRDYFRDNECGMHRDVVAVDRGLTPLSLANENWRKPSVLSTEDRTEVWKSKQLHGRFYRVLTGPDVDMLASVNWLRFGDLFGETEGFACAIADEVIKTNNYWKYIMKDGTVDICRACHRPGESLRHIISGCSHLANGEYLHRHNQVARIIHQQLALQYGLVESEVPYYKYAPAPVLENGRALLYWDRSIITDRTIIANKPDIVVVDRAQRRAVLVDITIPHDENLVKAEKDKLSKYLDLAHEITAMWDVDSTIIVPIVVTVNGLIAKSLDQHLKRLSLDCWVKGQLQKAVILDTARIVRRFLTLQP

SEQ ID NO: 5845 - protein, 869 aa, Biston betularia
MRFVTQAFAGTGIRPQHYLASVTERIDYLKQKVYAWANRIRRYRERADRYWQNRVFQSDQRKVYRDWEGTGQRVSDRQLPDTSVMTEFWRGIWSLPVEHTEGDWMRVVERECESIESMGSVLIDPVDVSCAIRTAQNWKSPGPDGLHNFWIKWIRCSHDRLATQFQEALELGSLPCFMTTGVTFLLHKTGSTTEAKNYRPITCLPTIYKLLTSILRTKINAHVVANNVLAPAQNGCRVGSRGTKELLLIDMTISQQVRRNKGALSTAWIDYKKAYDSVPHSWLERVLELYKIDTTLKSFLGACMRQWTTVLRQPGSGDGSSEPQDLIRIERGIFQGDSLSPLWFCLALNPLSTLLKESGLGHRLRRGGEVISHLLYMDDLKLFAPKRPDLMELLKTTQVFSNAIKMEFGVDKCAVMHVQLGEVVNCPDLQLSETMTFRSLSEAETYKYLGMSESLGIAVVDIKRSVKERFFCRLTKVLNSFLSGGNKVRAFNGWVMPLLIYSFGILRWTQTELDALDRRVRQQLTTHRMLHPRSSVMRLYIPRKLGGRGFLSAKNLHNREVCSLRDYFRDNECGMHRDVVAVDKGLTPLSLANENWRKPSVLSTEDRKEVWKSKQLHGRFYRVLTGPDVDMLASVNWLRFGDLFGETEGFACAIADEVIKTNNYRKYIMKDGTVDICRACHRPGESLRHIISGCSHLANGEYLHRHNQVARIIHQQLALQYGLVESEVPYYKYAPAPVLENGRALLYWDRSIITDRTIVANKPDIVVVDRAQRRAVLVDITIPHDENLVKAEKDKLSKYLDLAHEITAMWDVDSTIIVPIVVTVNGLIAKSLDQHLERLSLDGWVKGQLQKAVILDTARIVRRFLTLQP

SEQ ID NO: 5846 - protein, 1202 aa, Anthocharis cardamines
MLTRNRARGQLQRSARPTPSSASSSSGSTSSSADYVMPPTSLTSSDEERQRPSPSRPRSSRRGRRPPPACLGSSGQQAPSAAPAAGGLVRRMRWTIQLNESVMRAYYGATEGGINLTGYRSRMLPLFQALEPATNVGAQRLSDQVRVILRNKLLNESVLERLRAEVTTSQPPVIMLPVPADVLPQGDVSVDVVACGGDESDQVTSQDKEHMRIILRDTIEQYRFVPALDRPSIPHLPMHRRNMAVVGVLDGFLQPYFANSQNLADTHSILYCGAVAVCRVARLKFQDRERVSRASGVPVWQSRIECRISVARTLIAKLICFRGGNTRPRIMRFVSQAFVGTNIRPENYMEWVTERIDFLKQKVYAWANRIRRYRARAERYNVNRVFQINQRKVYRSWEKSDQGGVGGRFPDANVMSSFWRGIWSSPVNHTEGTWIGTVDRAYESIQPMENVIISPHDIDCAIRSAQNWKCPGPDGLHNFWLKWFRSAHTTLAVQLQDAIDCGSLPTFITTGRTFLLHKSGCTTDPKNYRPITCLPTIYKLLTSILTTKIYMHIEANNILAQAQNGCRPGSRGTKELLLIDMTISQQVRRARRNLSVAWIDYKKAYDSVPHSWLVRVLELYKVNTTLKFFLESCMRHWCTVLCWPGNGDVSFDPTNLVRIERGIFQGDSLSPLWFCLALNPLSILLKDSGLGYRLRREGEIISHLLYMDDLKLFTLKKPDLVRLLKVANDFSRSIGMEFGVEKCAIMHVERGRVVNSQDLQLSQEITLKSLSQAETYRYLGMSESLGIANADIKQVVKDRFFGRLTKVLNSLLSGGNKVRAFNAWVLPVLVYSFGILRWTQTELDAVDVRVRRQLTLHRMHHPRSSVMRLYIPRKCGGRGFLNAKNQHNREICNLRQYFMASVGRMQRDVVAVDKGLTPLSLANQNWRMPPVLSTADREEIWKSKELHGRFYRALHGSDVDLLSSVSWLRFGDLFGETEGFVCAITDEVMMTNNYRKYILRDGTIDICRACHRPGESLRHIISGCSHLANGEYLHRHNQVAKILHQQLALSYGLAGTEVPYYKYTPLPVLENGRATLYWDRSIITDRFIAANKPDIVLIDRVARRALLVDVTVPHDENLVKAEKDKLSKYLDLAHEISSMWDVDSTIIVPIVISAHGLIAKSFDQHLKKLSLGCWVKGQMQKAVLLDTARIVRRFLSLPPPHR

SEQ ID NO: 5847 - protein, 1206 aa, Blastobasis lacticolella
MITRSKRKNQTVNAQPPPTPAPVSSSPSSSNDEFTTASDTSESSDERGLSAAPPPPPARRGRPLPARLGPTGRPAPPMAPATGSVVRRMRWTQSINENVMRAYYGATEGGTNLSAYRDRMLPLFQVLEPAIDVTAQRLSDQVRAIQRLKRLDDSVLDRLRLESLPVRAVPISTMSLPATSPPQVSPSPAPRVPRTDATVGVEDCTNVSSVSTETNEYVRRTLEETIARYRFAPNSRPRLPRLPTNRRNLALMGAINVLLDSYIRASDNLVDTHSIMYCGAITACRVARVKFSDADRAPRVAGGAPAWQKRIERRINTFRTLIAKLICFKEGNNRPRVMRFVDQAFAGTGISSRDYMACATERIDFLKQKVCAWANRIRRYRERVDRFRLNRLFQSDQRKVYRKWEGTNESGSDGSLPDASASNNFWRSIWSVPVEHSEGDWMNVVKRECEIIEPMAAVSICPEDVSCAIDTAQNWKCPGPDGLHNFWIKWFRCSHERLATQFQEALEHGSLPTLFTTGITFLLYKSGSTTEAKNYRPITCLPTLYKLLTSILRKKINNHIIENNILAMSQNGCRVGSRGTKELLLIDMTICQQVRRSRGSLSAAWIDYKKAYDSVPHSWLRRVLELYKINATLRSFLDACMRQWITVLSQPVGGVDHSPPQDFIRIERGIFQGDSLSPLWFCLALNPLSTLLKHSELGCRLRREGEVISHLLYMDDLKLFAPKRQDLMELLKITEIFSNAIRMEFGADKCAVMHVQRGKVANTTNLQLSETMSFRSLSEAETYKYLGMSQSLGIVDEGVKQAVKERFFCRLTKVLNSLLSGGNKVRSFNAWVMPLLTYSFGILRWTQTELDALDRRVRLLLTTHRMLHPRSSVMRLYIPRKCGGRGFLSAKTLHNREVCSLRDYFLNNECGMHRAVVAVDRGLTPLSLANENWRKPKVLSTIDRKDVWKSKELHGRFYRALTGPDVDLLASVNWLRFGDLFGETEGFVCAIADEVIMTNNYRRYILKDGTVDICRACRCPGESLRHITSGCGRLANGEYLHRHNLVARIIHQQLALQYGLVESEVPYYKYVPAPVLENGLATLYWDRSVITDRTIVANRPDIVLTDRSKRRAVLVDVTIPHDGNLVKAEKDKQCKYLDLAHEVTAMWDVDSTIIVPIVVSVNGLIAKSLDQHLKSLSLDGWVKGQIQKAVLLETARIVRRFLSLQP

SEQ ID NO: 5848 - protein, 1129 aa, Blastobasis lacticolella
MAPATGGVVRRMRWTQSINENVMRAYYGATEGGTNLSAYRDRMLPLFQVLEPAIDVTAQRLSDQVRAIQRLKRLDDSVLDRLRLESLPVRAVPISTMSLPATSPPQVSPPSPAPRVPRTDATVGVEDCTNVSSVSTETNEYVRRTLEETIARYRFAPNSRPRLPRLPTNRRNLALMGAINVLLDSYIRASDNLVDTHSIMYCGAITACRVARVKFSDADRAPRVAGAPAWQKRIERRINTSRTLIAKLICFKEGNNRPRVMRFVDQAFAGTGISSRDYMVCATERIDFLKQKVCAWANRIRRYRERVDRFRLNRLFQSDQRKVYRKWEGTNQSGSDGSLPDASASNNFWRSIWSVPVEHSEGDWMNVVKRECEIIEPMAAVSICPEDVSCAIDTAQNWKCPGPDGLHNFWIKWFRCSHERLATQFQEALEHGSLPTLFTTGITFLLYKSGSTTEAKNYRPITCLPTLYKLLTSILRKKINNHIIENNILAMSQNGCRVGSRGTKELLLIDMTICQQVRRSRGSLSAAWIDYKKAYDSVPHSWLRRVLELYKINATLRSFLDACMRQWITVLSQPVGGIDHSPPQDFIRIERGIFQGDSLSPLWFCLALNPLSTLLKHSELGCRLRREGEVISHLLYMDDLKLFAPKRQDLMELLKITEIFSNAIRMEFGADKCAVMHVQRGKVANTTNLQLSETMSFRSLSEAETYKYLGMSQSLGIVDEGVKQAVKERFFCRLTKVLNSLLSGGNKVRSFNAWVMPLLTYSFGILRWTQTELDALDRRVRLLLTTHRMLHPRSSVMRLYIPRKCGGRGFLSAKTLHNREVCSLRDYFLNNECGMHRAVVAVDRGLTPLSLANENWRKPKVLSTIDRKDVWKSKELHGRFYRALTGPDVDLLASVNWLRFGDLFGETEGFVCAIADEVIMTNNYRRYILKDGTVDICRACRCPGESLRHITSGCGRLANGEYLHRHNLVARIIHQQLALQYGLVESEVPYYKYVPAPVLENGLATLYWDRSVITDRTIVANRPDIVLTDRSKRRAVLVDVTIPHDGNLVKAEKDKQCKYLDLAHEVTAMWDVDSTIIVPIVVSVNGLIAKSLDQHLKSLSLDGWVKGQIQKAVLLETARIVRRFLSLQP

SEQ ID NO: 5849 - protein, 1208 aa, Apotomis turbidana
MITRARRQRAEADNARPPPPPAPSSSSSSSSGDDFATAPDTSGSSEDERGPPPKPTRPPARRGRPPLPARLGPTGQPAPPTAPATGGIVRRMRWSQGINENVMRAYYGATEGGISLSAYRDRMLPLFLTLEPAITVTAQRLSDQVRFIQRRKLLDDATLDRLRLEVLAARAASTPARDPSATPPVSAPAPNLVPGVPRTDRDADEEDCASSVSTQANEQLRGALEEAIRRYRSAPDSRPRLPRLPMHKRNLALMGALDALLDPYLRASEDLADTHSIMYCGAIAACRVARVRFPDTERAPRTAEGVPAWQIRIERRINSFRTLIAKLICFRGGNNRPRVMRYVTQAFAGTGTRPCDYMACVTERIDFLKQKVYAWASRIRRYRERVDRFQQNRLFQSDQRKVYRKWEGTDQCVADGQLPDPTAMINFWRSIWSVPVEHTEGEWMNVVRRECEPIEVMGAVTISPDDVSCAARKAQNWKSPGPDGLHNFWIKWFRSSHECLATQLQDALELGSLPSFMTTGVTFLLHKSGSTTEAKNYRPITCLPTLYKLLTSILRTKINTHIVANNILAFSQNGCRVGSRGTKELLLIDTTICQQVRRNRGSLSAAWVDYKKAYDSVPHSWLERILELYKIDTALRSLLSACMGQWTTVLRQPGGGDGPPGPQDLIRIERGIFQGDSLSPLWFCLALNPLSTLLKDSGLGCRLRRGGEVISHLLYMDDLKLYAPKRQDLVELLEVTETFSSAIKMEFGVDKCAVMHVQRGKVVNSANLQLSETMSLRSISEAETYKYLGMSQSLGIADGDIRQALKERFFCRLTKVLNSLLSGGNKARAFNAWVMPLLTYSFGILRWTQTELDALDTRVRQLLTTHRMRHPRSSVMRMYIPRKCGGRGFLHAKDLHNREVCSLREYFLNNECGIHRDVVAVDKGLTSLSLANENWRRPKVLSTDDRKAVWKSKELHGRFCKALTGPDVDLLASVNWLRFGDLFGETEGFICAIADEVMMTNNYRRYILKDGTVDICRACRRPGESLRHIISGCSHLANGEYLHRHNQVARIIHQQLALRYGLVGSEVPYYKYAPMPVLENGRATLYWDRSIITDRTIVANKPDIVLVDRSKRQAVLVDITIPHDENLVKAEKDKLSKYLDLAHEVTAMWDVDSTIIVPIVVSANGLIAKSLDKHLKRLSLDGWIKGQIQKAVLLDTARIVRRFLSLQP

SEQ ID NO: 5850 - protein, 1207 aa, Apotomis turbidana
MITRSRRKKAEQTNARPPPPPASSSSSPSPSGDEFATAADTSESSDERGPPPPPPQPPARRGRPQLPARLGPTGQPAPTTAPATGGVVRRMRWTRVMNENCMRAYYGATEGGINLSAYRDRMLPLFQVFDPTIAVSAQRLSDQVRFIQRRKLLDDATLDRLRLEVLAARAASVPARDPPATSPVPAPAPNLVPGVPLTDPEADVEDYASSVSTQANEQLRRALEEAIGRYRSAPEPRPRLPRLPIHKRNLALMGALDALLDPYLRASEDLADTHSIMYCGAIAACRVARVRFPDTDRAPRTARGVPAWQVRIERRISSFRTLIAKLICFRGGNNRPRVMRYVTQAFAGTGTRPCDYMACVTERIDYLKQKVYAWASRIRRYRERVDRFQQNSLFQSDQRKVYRKWEGADQCVSDGQLPDPTAMINFWRSIWSVPVEHTEGEWMNVVRRECEPIEAMGAVTISPDDVRCAARTIQNWKSPGPDGLHNFWIKWFRSSHERLATQFQDALVLGSLPSFMTTGVTFLLHKSGSTTEAKNYRPITCLPTLYKLLTSILRTKINTHIVANNVLAFSQNGCRVGSRGTKELLLIDTTICQQVRRNRGSLSTAWIDYKKAYDSVPHSWLERILELYKIDTALRSLLGACMRQWTTVLRQPGGGDGPPGPQDLIRIERGIFQGDSLSPLWFCLALNPLSTLLKDSGLGCRLRRGGEVISHLLYMDDLKLYAPKRQDLVELLEVTEAFSSAIKMEFGVDKCAVMHVQRGKVVNSANLQLSETMSLRSISEVETYKYLGMSQSLGIADGDIRQALRERFFCRLTKVLNSLLSGGNKARAFNAWVMPLLTYSFGILRWTQTELDALDTRVRQLLTTHRMRHPRSSVMRMYIPRKCGGRGFLNAKDLHNREVCSLREYFLNNECGIHRDVVAVDKGLTSLSLANENWRRPKVLSTDDRRAVWKSKELHGRFYKALTGPDVDLLASVNWLRFGDLFGETEGFVCAIADEVMMTNNYRRYILKDGTVDICRACRRPGESLRHIISGCSHLANGEYLHRHNQVARIIHQQLALRYGLVGSEVPYYKYAPMPVLENGRATLYWDRSIITDRTIVANKPDIVLIDRSKRQAVLVDITIPHDENLVKAEKDKLSKYLDLAHEVTAMWDVDSTSIVPIVVSANGLIAKSLDKHLKRLSLDGWIKGQIQKAVLLDTARIVRRFLSLQP

SEQ ID NO: 5851 - protein, 1206 aa, Notocelia uddmanniana
MNTRLRSRAEQRARLPSPPAPSSSSPSSSDDEFATAPDSSESSSDERGPSPPPPQTSARRGRRPLPARLGPTGHSAPPTAPAAGGVVRRMRWTQEMNENCMRAYFGATEGETNLSAYRVRMLPLFQALEPTITVSAQRLSDQVRVIQRNKRLDDLTLDRLRLEALSARAAPTSARDLPATSPAPVPAPNTAPRAPRVDPSADGDCADQSLSTQAHEQLRRALDEAITRYRSTPNSRPRLPRLPVNRRNLALMGALNDLLDPYLRASNDLIDTHSIMYCGAIAACRVARVKFPDADRATRTAGGVPAWQVRIERRINTFRTLIAKLICFRGGNNRPRVMRFVNQAFAGTGVRPRDYMACVTERIDFLKQKVYAWASRIRRYRERVDRYQQNRLFQSDQRKVYRKWEGTDHRVCDGQRPDATAMVNFWRSIWSVPVEHTEGAWIGVVERDCESIEPMGSVTISPEDVSCAIRTAPNWKSPGPDGLHNFWLKWFRCSHERLATQFQQALELGSLPPPLTTGVTSLLYKSGSTTEAKNYRPITCLPTLYKLLTSILRAKINTHIVTNNILAPAQNGCRVGSRGTKELLLIDMTICQRVRRKRGALSASWIDYKKAYDSVPHSWLRRILELYKVDAALRSFLSACMGQWTTVLRRPGGGDGPSGPQDSIRIERGIFQGDSLSPLWFCLALNPLSTLLQDSGLGCQLRRGGEVISHLLYMDDLKLFAPNRQDLLELLKTTEVFSSAIKMEFGVDKCAAMHVQRGKVVYSTNLQLSETMSLRSLSEAETYKYLGMSQALGIEGEGIKQAVKERFFCRLTKVLNSFLSGGNKARAFNAWVMPLLTYSFGILRWTQTELDALDRRVRVLLTAHRMLHPRSSVMRLYIPRKCGGRGFLNAKDLHNREVCSLRDYFLNSECGMHRDVVAVDASFTPLSMANENWRRFKVLSTEDRKAEWKSRELHGRFYRALTGPDVDLLASVNWLRFGDLFGETEGFVCAIADEVIMTNNYRKYILKDGTVDICRACRRPGESLRHIISGCSHLANGEYLHRHNLVARIIHQQLALSYGLVDFEVPYYKYLPAPVLENGRATLYWDRSIITDRTIVANKPDIVLIDRSKRQAVLVDITIPHDENLVKAEKDKVSKYLDLAHEVTAMWDVDSTIIVPIVVSANGLIAKSLDQHLKRLSLDGWVKGQIQKAVLLDTARIVRRFLSLSP

SEQ ID NO: 5852 - protein, 889 aa, Notocelia uddmanniana
MYHIVRSEMVSAMCIPYFLIIFVLRGLCAVGFGPTHAFQRSGTPWSRDVEKTYNNNNNNIRRYRERVDRYQLNRLFQSDQRKVYRKWEGTDHRVSDGQRPDATAMVNFWRSIWSVPVEHNEGAWIDVVKRECESIEPMGSVTVSPEDVSCAIRTAPNWKSPGPDGLHNFWLKWFRCSHARLAAQFQQALELGSLPSPLTTGVTSLLYKSGSTTEAKNYRPITCLPTLYKLLTSILRAKINTHIVANNILAPAQNGCRVGSRGTKELLLIDMTICQRVRRNRGTLSAAWIDYKKAYDSVPHSWLRRILELYKVDAVLRSFLVACMGQWTTVLRQPEGGEGPSGPQDSIRIERGIFQGDSLSPLWFCLALNPLSTLLKDSGLGCQLRREGEVISHLLYMDDLKLFAPNKHDLLELLKTTEVFSSAIKMEFGVDKCAVMHVQRGKVVNSTNLHISETIALRSLSEAETYKYLGMSQSLGIEGEDIKRAVRERFFCRLTKVLNSFLSGGNKVRAFNAWVMPLLTYSFGILRWTQTELDFLDRRVRVLLTAHRMLHPRSSVMRLYIPRKLGGRGFLNAKDLHNREVCSLRDYLLNSECGMHRDVVAADASFTPLSMANENWRRFKVLSTDDRRAVWKSKELHGRFYKALTGPDVDLLASVNWLRFGDLFGETEGFVCAIADEVIMTNNYRKYILKDGTVDICRACRRPGESLRHIISGCSHLANGEYLHRHNLVARIIHQQLALLYGLVDFEVPYYKYTPAPVLENGRATLYWDRSVITDRTIVANKPDIVLTDRLKRQAVLVDITIPHDENLVKAEKDKVSKYLDLAHEVTAMWDVDSTIIVPIVVSVNGLIAKSLDQHLKRLSLDGWVKGQIQKAVLLDTARIVRRFLSLSP

SEQ ID NO: 5853 - protein, 1206 aa, Notocelia uddmanniana
MITRTRSRAAQRARPPSPPAPSSSSPSSSGDEFATAPDTSESSCDERGPPSPPPRPPARRGRPPLPARLGPVGHSALSTAPAAGGVVRRMRWTQEMNENCMRAYFGATVGETNLSAYRVRMLPLFQALEPTITVTAQRLSDQVRVIQRLKRLDDATLDRLRLEALSARTASALARDPPATSPAPVPTPDMAPGVPRVDPSVDEDCANLTVSTQANEQLRRALEEAITRYRSTPNSRPRLPRLPVNRRNLALMGALNDLLDPYLRASEDLIDTHSILYCGAIAACRVARVKFPDADRAPRTAGGVPAWQVRIERRINTFRTLIAKLICFRGGNDRPRVMRFVNQAFAGTGVRPRDYVTCVTERIDFLKQKVYAWASRIRRYRERVDRYQQNRLFQSDQRKVYRKWEGTDHRVCDGQRPDATAMGNFWRSIWSVPVEHTEGAWIGVVERECESIEPMGPVTISPEDISCAIRTAPNWKIPGRDGLHNFWLKWFRCSHERLATQFQQALELGSLPHLLTTGVTSLLYKSGSTTEAKNYRPITCLPTLYKLLTSILRAKINTHIVANNILAPAQNGCRVGSRGTKELLLIDMTICQRVRRSRGALSAAWIDYKKAYDSVPHSWLRRILELYKVDAALRSFLSACMGQWTTALRQPGGGDGSSGPQDSIRIERGIFQGDSLSPLWFCLALNPLSTLLKDSGLGCQLRRGGEVISHLLYMDDLKLFAPNRQDLLELLKTTEVFSSAIKMEFGVDKCAVMHVQRGKVVNSTNLQLSETMSLRSLSEAETYKYLGMSQSLGIEGEGIKQAVKERFFCRLTKVLNSFLSGGNKVRAFNAWVVPLLTYSFGILRWTQTELDALDRRVRVLLTAHRMLHPRSSVMRLYIPRKCGGRGFLNAKDLHNREVCSLRDYFLNSECGMHRDVVAVDASLTPLSMANENWRRFKVLSTEDRKAEWKSRELHGRFYKALTGPDVDLLASVNWLRFGDLFGETEGFVCAIADEVIMTNNYRKYILKDGTVDICRACRRPGESLRHIISGCGHLANGEYLHRHNLVARIIHQQLALSYGLVDFEVPYYKYLPAPVLENGRATLYWDRSIITDRTIVANKPDIVLIDRSKRQAVLVDITIPHDENLVKAEKDKVSKYLDLAHEVTAMWDVDSTIIVPIVVSANGLIAKSLDQHLKRLSLDGWVKGQIQKAVLLDTARIVRRFLSLSP

SEQ ID NO: 5854 - protein, 1210 aa, Notocelia uddmanniana
MITRSKARLEKKASNPQSARPPPSPASSSSASSSEEFATAPDTSSSSSSDECGPPPPPPRPPARRGRPPLPARLGPAGHPAPPTAPATGGLVRRMQWSQSINENCMRAYYGATDGGTNLSAYRDRMLPLFRALEPAISVSAQRLSDQVRVIQRLKRLDDATATLDRLRLEALSARAASASARNPSATLPAPVPALDTAPGADPSADEGCANQSVSSQAYEQLRRALEEAITQYRSTPNSRPRLPRLPVNRRNLALMGALNDLLVPYLGASEDLIDTHSIMYCGAIAACRVARVKFPDADRAPRTAGSVPTWQVRIERRVDTYRTLIAKLICFRGGNSRPRVMRFVNQAFAGTGIRPRDYMTCVTERIDFLKQKVYAWASRIRRYRERLDRYQQNRLFQSDQRKVYRKWDGTDHRVSDGQRPDATAMVNFWRSIWSVPVEHNEGAWMGVVERECESIEPMGSVTISPADVSCAIRTAPNWKSPGPDGLHNFWLKWFRCSHARLAAQFQQALELGSLPPPLTTGVTSLLYKSGSTTEAKNYRPITCLPTLYKLLTSILRAKINTHIVANNILAPAQNGCRVGSRGTKELLLIDMTICQRVRRNRGTLSTAWIDYKKAYDSVPHSWLRRILELYKVDAVLRSFLVACMGQWTTVLRQPGGGEGPSGPQDSIRIERGIFQGDSLSPLWFCLALNPLSTLLKDSGLGCQLRREGEVISHLLYMDDLKLFAPNKHDLLELLKTTEAFSSAIKMEFGVDKCAAMHVQRGKVVNSTNLQISETMDLKSLSEAETYKYLGMSQSLGIEGGDIKRAVKERFFCRLTKVLNSFLSGGNRVRAFNAWVMPLLTYSFGILRWTQTELDFLDRRVRVLLTAHRMLHPRSSVMRLYIPRKFGGRGFLNAKDLHNREVCSLRDYFLNSECGMHRDVVAVDASFTPLSMANENWRRLKVLSTEDRRAVWKSKELHGRFYKALTGPDVDLLASVNWLRFGDLFAETEGFVCAIADEVIMTNNYRRYILKDGTVDICRACRRPGESLRHIISGCGHLANGEYLHRHNLVAKIIHQQLALLYGLVDFEVPYYKYTPAPVLENGRATLYWDRSVITDRTIIANKPDIVLTDRLKRQAVLVDITIPHDENLVKAEKDKVSKYLDLAHEVTAMWDVDSTIIVPIVVSANGLIAKSLDQHLKRLSLDGWVKGQMQKAVLLDTARIVRRFLSLSP

SEQ ID NO: 5855 - protein, 1207 aa, Crocallis elinguaria
MITRSRNKAGTASARQPPPPASSSPSSSSGDEYGTPLDTNASSDEDGPPSPPPPPPPARRGRPPLPARLGPVGHSVPRAAPATGGIVRRMRWTSVMNENCMRAYYGATEGGTNMSAYRDRMLPLFQTLEPSVAVSTQRLSDQVRAIQRLKLLDESVLDRLRLEALPIRATSASTRDLSVAPPVPAPLPAPSSVATRIDPVVDEDDCANISVSTQVNEQLRRALEDAILEYQYTPDSRPRLPRLPTNRRNLALMGALNVLLAPYLRASENLFDTHSIMYCGAIAVCRVARVKFPDADRAPRTAGSAPAWQVRIERRINTFRTLIAKLVCFSRGNNRPRVMRFVNQAFAGTGIRPQNYMAGVTERIDFLKQKIYAWVNRIRRYRERVDRYHQNRLFESDQRKVYRNWEGTDQRVSDGQMPDTNAMINFWRGIWSVPVEHTEGDWMRTVEQSCESIETMGSVTIDPIDVSCAIRTAQNWKSPGPDGLHNFWIKWIRCSHECLAVQFQEALELGSLPCFLTTGVTSLLHKSGSTTEAKNYRPITCLPTLYKLLTSILRAKINSHVVANNILAPAQNGCRVGSRGTKELLLIDTAICQQVRRNKGALSTAWIDYKKAYDSVPHSWLERILELYKIDTTLRSFLSTCMRQWTTVLRQPGSGNSPSGPENFIKIERGIFQGDSLSPLWFCLALNPLSTLLRDSRLGCKLRREGEIISHLLYMDDLKLLAPKSPDLMKLLKITEIFSSAIKMEFGVDKCAVMHVQRGKVVNSDNLQLSETMTLRSLSEAETYRYLGMSQSLGIAVGDIKQSVKERFFCRLTKVLNSLLSGGNKARAFNGWVMPLLIYSFGILKWTQTELDSLDRRVRQLLTYHRMLHPRSSVMRLYIPRKWGGRGFLNAKTLHNREVCSLREYFLNNECGMHRDVVAVDRNLTPLSLANENWRKPVVMTTEDRKDVWKGKELHGRFYRALTGSDVDLLASVNWLRFGDLFGETEGFVCAIMDEVIKTNNYRKYIMKDGTVDICRACRRPGESLRHIISGCSHLANGEYLHRHNLVARIIHQQIALQYGLVESEVPYYKYAPAPVLENGRALLYWDRSIITDRTIVANKPDIVLVDRSQRRAVLVDITVPHDENLVKAEKDKLSKYLDLAHEVTAMWNVDSTIIVPIVVSANGLVAKSLDQHLKRLSLDGWIKGRMQKAVLLDTARIVRRFLTLQP

SEQ ID NO: 5856 - protein, 1207 aa, Crocallis elinguaria
MITRSRNKAGTASARQPPPPASSSPSSSSGDEYGTPLDTSASSDEDGPPSPPPPPPPARRGRPPLPARLGPVGHSVPRAAPATGGIVRRMRWTSDMNENCMRAYYGATEGGTNMSAYRDRMLPLFQTLEPSVAVSTQRLSDQVRAIQRLKLLDESVLDRLRLEALPIRATSASARDLSVAPPVPAPLPAPSSVATRIDPVVDEDDCANISVSTQVNEQLRRALEDAILEYQYTPDSRPRLPRLPTNRRNLALMGALNVLLAPYLRASENLFDTHSIMYCGAIAVCRVARVKFPDADRAPRPAGSAPAWQVRIERRINTFRTLIAKLICFSRGNNRPRVMRFVNQAFAGTGIRPQNYMAGVTERIDFLKQKIYAWVNRIRRYRERVDRYHQNRLFESDQRKVYRNWEGTDQRVSDGQLPDTNAMINFWRGIWSVPVEHTEGDWMRTVEQSCESIETMESVTIDPIDVSCAIRTAQNWKSPGPDGLHNFWIKWIRCSHECLAVQFQEALELGSLPRFLTTGVTSLLHKSGSTTEAKNYRPITCLPTLYKLLTSILRAKINSHVVANNILAPAQNGCRVGSRGTKELLLIDTAICQQVRRNKGALSTAWIDYKKAYDSVPHSWLERILELYKIDTTLRTFLSTCMRQWTTVLRQPGSGNSPSGPENFIKIERGIFQGDSLSPLWFCLALNPLSTLLRDSRLGCKLRREGEIISHLLYMDDLKLLAPKSPDLMKLLKITEIFSSAIKMEFGVDKCAVMHVQRGKVVNSDNLQLSETMTLRSLSEAETYRYLGMSQSLGITVGDIKQSVKERFFCRLTKVLNSLLSGGNKARAFNGWVMPLLIYSFGILKWTQTELDSLDRRVRQLLTYHRMLHPRSSVMRLYIPRKWGGRGFLNAKTLHNREVCSLREYFLNNECGMHRDVVAVDRNLTPLSLANENWHKPVVMTTEDRKEVWKGKELHGRFYRALTGSDVDLLASVNWLRFGDLFGETEGFVCAIMDEVIKTNNYRKYIMKDGTVDICRACRRPGESLRHIISGCSHLANGEYLHRHNLVARIIHQQIALQYGLVESEVPYYKYAPAPVLENGRALLYWDRSIITDRTIVANKPDIVLVDRSQRRAVLVDITVPHDENLVKAEKDKLSKYLDLAHEVTAMWNVDSTIIVPIVVSANGLVAKSLDQHLKRLSLDGWIKGRMQKAVLLDTARIVRRFLTLQP

SEQ ID NO: 5857 - protein, 1213 aa, Ectropis grisescens
MITRSKTRIEAESRSAQPTPVRVPSPPSLSSEDDAFLTPRDTSASSSDEDATRTPSPRRPGRRGRPPLPARLGPAEHSASRPAFATGGVVRRMRWTQQMNENCMRAYYRATEGGTHLTAYCARMLRLFQALEPTVAVSAQRLSDQVRAICRCKLLDVSALDRLRLEEQRTRPASASARDPPAASSTLTLASVPTSVVTLAAPVDSDIEEEDSASSYVSNQVIEQLRSTLEDAILRYRSTPTSRPRLPRLPTHKRNLALMGALNTLLVPYLGTSKDLTDTHSILYCGAIAACRVARVKFPDTDRTTRTAGNVPVWQVRIERRISKFRTLIAKLICFSQGNNRPRVMRFVAQAFAGTGISPQHYLANVAERIDYLKQKVYAWANRIRRYRERVDRYRQNRDFQSDQRKVYRNWEGTSPRVNDTQLPDASAMKNFWRSIWSVPVEHTEGAWMRVIERACEPIEPMESITIDSVDVSCAIRTTQNWKSPGPDGLHNFWIKWFRCSHERLATQFQEALETGSLPSFMTTGVTFLLHKSGSTTEPKNYRPITCLATIYKLLTSILRAKINAHIVANNVLASSQNGCKIGSRGTKELLLIDTTICQQVKRNKGALSAAWIDYKKAYDAVPHSWLERVLELYKINPTLKSFLSKCMGQWVTVLRQPGGVDNSFVSEDLIRIERGIFQGDSLSSLWFCLSLNPLSTLLKDSELGYRLRRGGEVISHLLYMDDLKLFAPKRQDLLELLKTTEVFSNAIKMEFGVDKCAVMHVQRGKVVNSENLQLSETITLRSLSEDETYKYLGMSQSLGISADDIKKSVKERFLCRLTKVLKSLLSGGNKARAFNGWVMPLLIYSFGILRWTQTELDALDRKVRQLLTTHRMLHPRSSVMRLYIPRKCGGRGFLNAKNLHNREVCSLRDYFRNSESGMHRDVVAVDRSFTPLSMANENWRKPSVLSTDDRKEVWKSKELHGRFYRALTSPDVNLLASVNWLRFGDLFGETEGFACAIADEVIKTNNYRKYIMKDGTVDICRACRRPGESLRHVISGCSHLANGEYLHRHNLVARIIHQQLALRYGLVESEVPYYKYAPLPVLENGRALLYWDRSIITDRTIVANKPDIVLVDRSQRRAVIVDITIPHDENLVKAEKDKLSKYLDLAHEVTAMWDVDSTIIVPIVVSANGLVAKSLDQHLKRLSLDGWIKGQMQKAVILDTARIVRRFLSLQP

SEQ ID NO: 5858 - protein, 1120 aa, Pammene fasciana
MRWTCSMNENVMRAYYGATEGGTNLCAYRARILPLFQALEPTIDTTTQRLSDQVRVIQRLKRLDDATLDRLRLEALSARAASTSARDPPATSPDPVPAPDLASGAPRIDPSADEGYIASQSVSSTANEQLRRTLEEAITQYRSTNIPRPRLPRLPMNRRNLALMGALNDLLDPILRTSKDLDDTHSIMYCGAIAACRVARIKFPDAERAPRTAGGVPAWQVRIERRINSFRTLIAKLICFRGGNNRPRVMRFVHQAFAGTDIEPRDYMANITERIDFLRQKVYAWASRIRRYRERVDRFRQNRLFQSDQRKVYRRWEEADPRVSDVRLPDATAMTDFWRSIWSAPVEHTEGEWMNVVERECESIEPMGAITISPDDVSCAIRTSQNWKSPGPDGLHNFWLKWFRCSHSRLATQFQHALELGSLPPSLTTGVTFLLYKSGSTTEAKNYRPITCLPTLYKLLTSILRAKINAHMVANNILASAQNGCRVGSRGTKELLLIDMTICQRVRRNRGALSAAWIDYKKAYDSVPHSWLERIMELYKVDAALRSFLGACMRQWTTVLRQPGGGDDPPGPQDFIRIERGIFQGDSLSPLWFCLALNPLSTLLKDSGLGCRLRREGEVISHLLYMDDLKLFAPNNRDLLELLKTTEVFSSSIKMEFGVDKCAVMHVQRGKVVNSTNLQLSETMTFRSISESETYKYLGMSQSLGIEDVGIKQALKERFFGRLTKVLNSLLSGGNKVRAFNAWVMPLLTYSFGILRWTQTELDALDRRVRLLLTTHRMLHPRSSVMRLYIPRKCGGRGFLNAKNLHNREVYNLRNYFLNNECGMHRDVVTVDKNLTPLSLANENWRKPVVLSTEDRKAVWKSKELHGRFYGALTGPDVDLLASVNWLRFGDLFGETEGFACAIADEVIMTNNYRRYILKDGTVDICRTCRRPGESLRHIISGCSHLANGEYLHRHNLVARIIHQQLALLYGLVAHEVPYYKYIPAPVLENDRATLYWDRSIITDRTIVANKPDIVVIDRPQRRAMLVDITVPCDVNLVKAEKDKSSKYLDLAHEVTAMWEVDSAIIVPIVVSANGLIAKSLDQHLERLSLRGCGWIKGQIQKAVILDTARIVRRFLTLRP

SEQ ID NO: 5859 - protein, 965 aa, Pammene fasciana
MNKRNLALMGALNDLLDPFLRTSKDLDDTHSIMYCGAIAACRVARVKFPDAERAPRTAGGVPAWQVRIERRINSFRTLIAKLICFSGGNNRPRVMRFVHQAFAGMDIEPRDYMANVTERIDFLKQKVYAWASRIRRYRERVDRFRQNRLFQSDQRKVYRRWEEADPRVSDVRLPDATAMTDFWRSIWSAPVEHTEGEWMSVVERECETIEPMGAITISPDDVSCAIRTAQNWKSPGPDGLHNFWLKWFRCSHSRLATQFQQALELGSLPPSLTTGVTFLLYKSGSTTEAKNYRPITCLPTLYKLLTSILRAKINAHMVANNILASAQNGCRVGSRGTKELLLIDMTICQRVRRNRGALSAAWIDYKKAYDSVPHSWLERILELYKIDAALRSFLGACMRQWTTVLRQPGGGDDPPGPQDFIRIERGIFQGDSLSPLWFCLALNPLSTLLKDSGLGCRLRRESEVISHLLYMDDLKLFAPNNRDLLELLKTTEVFSSSIKMEFGVDKCAVMHVQRGKVVNSTNLQLSETMTFRSISESETYKYLGMSQSLGIEDAGIKQALRERFFGRLTKVLNSLLSGGNKVRAFNAWVMPLLTYSFGILRWTQTELDALDRRVRQLLTTHRMLHPRSSVMRLYIPRKCGGRGFLNAKNLHNREVYNLRNYFLNNECGMHRDVVAIDKGLTPLSLANENWRKPVVLSTEDRKAVWKSKELHGRFYGALTGPDVDLLASVNWLRFGDLFGETEGFACAIADEVIMTNNYRRYILKDGTVDICRACRRPGESLRHIISGCSHLANGEYLHRHNLVARIIHQQLALLYGLVDHEVPYYKYTPAPVLENGRATLYWDRSIITDRTIVANKPDIVVIDRPQRRAMLVDITVPCDVNLVKAEKDKSSKYLDLAHEVTAMWEVDSAIIVPIVVSANGLIAKSLDQHLERLSLRGCGWIKGQIQKAVILDTARIVRRFLSLRP

SEQ ID NO: 5860 - protein, 1120 aa, Pammene fasciana
MRWTQSMNENVMRAYYGATEGGTNLCAYRDRMLPLFQALEPTIDTTAQRLSDQVRVIQRLKRLDDATLDRLRLEALSARAASTSARDPPATSLDPMPASDLASGAPRIDPSADEEEIANQSVSSTANEQLRRTLEEAITQYRSTNITRPRLPRLPMNRRNLALMGALNDLLDPLLRTSKDLDDTHSIMYCGAIAACRVARVKFPDAERAPRTAGGVPAWQVRIERRINSFRTLIAKLICFRGGNNRPRVMRFVHQAFAGMDIEPRDYMANVTERIDFLKQKVYAWASRIRRYRERVDRFRQNRLFQSDQRKVYRRWEEADPRVSDVRLPDATAMTDFWRSIWSAPVEHTEGEWMSVVERECESIEPMGAITISPDDVSCAIRTAQNWKSPGPDGLHNFWLKWFRCSHSRLATQFQQALELGSLPPSLTTGVTFLLYKSGSTTEAKNYRPITCLPTLYKLLTSILRAKINAHMVANNILASAQNGCRVGSRGTKELLLIDMTICQRVRRNRGALSAAWIDYKKAYDSVPHSWLERILELYKIDAALRSFLSACMRQWTTVLRQPGGGDDPPGPQDFIRIERGIFQGDSLSPLWFCLALNPLSTLLKDSGLGCRLRREGEVISHLLYMDDLKLFAPNNRDLLELLKTTEVFSNSIKMEFGVDKCAVMHVQRGKVVNSTNLQLSETMTFRSISESETYKYLGMSQSLGIEDAGIKQALRERFFGRLTKVLNSLLSGGNKVRAFNAWVMPLLTYSFGILRWTQTELDALDRRVRLLLTTHRMLHPRSSVMRLYIPRKCGGRGFLNAKNLHNREVYNLRNYFLNNECEMHRDVVAIDKGLTPLSLANENWRKPVVLSTEDRKAVWKSKELHGRFYGALTGPDVDLLASVNWLRFGDLFGETEGFACAIADEVIMTNNYRRYILKDGTVDICRACRRPGESLRHIISGCSHLANGEYLHRHNLVARIIHQQLALLYGLVDHEVPYYKYTPAPVLENGRATLYWDRSIITDRTIVANKPDIVIIDRSQRRAMLVDITVPCDVNLVKAEKDKSSKYLDLAHEVTAMWEVDSTIIVPIVVSANGLIAKSLDQHLERLSLRGCGWIKGQIQKAVILDTARIVRRFLSLRP

SEQ ID NO: 5861 - protein, 1205 aa, Bembecia ichneumoniformis
MKLRKRKHEAEQSARPTPLPVSSSPCSSAEEFLTADDKSTSSNDDGPTPPSPPRRPARRGRPPLPASLGPARPSASRPAPATGGVVRRMRWTHTMNENCMRAYYGATEGATNLTAYRARMLSLFQSLEPAVTVTAQRLSDQVRAIQRGQLLEQSALDRLRLDSLPARTTSAATQDLRGALPLPESASIPTSAALLTDPVDQEICASTNVSTETKEQLRRALEEAISRYHTKPNDRPRLPRLPMHKQNIALMGALNTLLAPYIKASRDLTDTHSILYCGAIAACRVARVKFLNFDRATRGAEDVPAWQVRIERRISKFRTLIAKLISFCRGNTRPRVMRFVAQAFVGTNIKSKDYLTWATERIDYFKQKVYALANRVRRYKERVHRYRQNRLFQSDQRKVYRDWEKTNQSVNVGHPPAPEVMLKFWRDIWSVSDEHTEGDWISIVEQACEPITTMKAVNISPTDVSCAIRSTQNWKSPGPDGLHNFWIKMIQCSHECLAMQFQEALELGTLPTFLTTGITFLLHKSGSTTEAKNYRPITCLPTIYKLLTSILRTKINSHILENNILDTAQNGCKIGSRGTKELLLIDMTICQRVRRNSGALSVAWIDYQKAYDSVPHSWLRRILELYKIDTTLRSFLAMCMGQWITGLCQPCYRGGAADLRDTIKIKRGIFQGDSLSPLWFSLALNPLSTLLRNLKLGYRLRRGGEVISHLLYMDDLKLFAPKPKDLLELLKITQCFSNAIRMDFGVDKCAVMHVQKGKVVNSPNLQLSNEVSFKSLSEVQTYKYLGMSQSLGISDKDIKETVKTRFFGRLIKVLNSLLSGGNKVRAFNGWVMPLLTYSFGILRWTQTELDGLDRRVRRLLTAHRMLHPRSSVMRLYIPRKLGGRGFLNAKNLHNREVYSLREYFLNHESGVHRDVVAIDKNFTPLSLENGNWRKLVVLSTEDRKSVWKGKELHGRFYKALTGPDVDSLMSVNWLRFGDLFGETEGFVCAIADEVIKTNNYRKYILKDGTVDICRACHRPGETLRHIISGCAHLSNGEYLHRHNQVARIIHQQLAIRYGLIESEVPYYKYVPAPVLENGHATLYWDRSIITDRTIVANKPDIVVIDRSQRRTMLVDIAVPHDENLVKAEKEKLTKYIDLAHEVTAMWDVDSTIIVPIVVSANGLIAKSLDQHLKRLSLDGWIRGQIQKAVLLDTARIVRRFLTLQP

SEQ ID NO: 5862 - protein, 1207 aa, Ennomos quercinarius
MITRSRTKQAEQSARLPPPPAPSSSSSSSGDEYGTPPDTTASSDEDGPPSPPPPPPPARRGRPPLPARLGPAGQPAPRPAPATGGIVRRMRWTQAMNENCMRAYYGATEGGSSLTAYRDRMLSLFQNLEPTVAVSAQRLSDQVRAIQRCKMLDQSTLDRLRLEALPTRATSPSPRVLPAALPDPGPTTGPPPVTPRGDPAIGGEESVSDSVSTQANEQLRSALENAILRYRSTSTSRPRLPRLPTNRRNLVLMGALNTLLAPYLRTSEDLVDTHSILYCGAIAACRVARVKFPDTDRAPRPADGAPAWQVRIEKRITTFRTLIAKLVCFSRGNHRPRVMRFVTQAFAGTGIRPQDYMACVTERIDFLKQKVYAWASRIRRYRERVDRYQQNRLFQSDQRKVYRNWEGTGQRVVDGQLPDANAMNEFWRSIWSVPVEHTEGDWIRVVKRVCEPIESMGSITIDPEDISCAIRTAQNWKSPGPDGLHNFWIKWIRCSYPCLAIQFQEALEAGSLPSFMTTGVTFLLHKSGSTTEAKNYRPITCLPTLYKLLTSILRTKINSHIVANNILAPAQNGCRVGSRGTKELLLIDTTICQQVRRNRGALSTAWIDYKKAYDSVPHSWLERVLELYKIDTTLRSFLRSCMGQWTTVLRQPGGGDSVSGPQDLIRIERGIFQGDSLSPLWFCLALNPLSTLLEDSKLGYRLRRGGETICHLLYMDDLKLFAPQRPQLIELLKITENFSNSIRMEFGVDKCAVMHVRGGKVVNSTNLQLSETMTLRSLSEAETYKYLGMSESLGISVGDVKRTVKERFFCRLTKVLNSLLSGGNKVRAFNGWVMPLLIYSFGILRWTQTELDALDRKVRQLLTSHRMLHPRSSVMRLYIPRKWGGRGFLNAKNLHNREVCSLREYFLNNECGMHRDVVAVDKGLTPLSLANENWRKPVVLSTEDRRDVWKGKELHGWFYRALTGPDVDLHASVNWLRFGDLFGETEGFVCAIADEVIKTNNYRKYIMKDGTVDICRACRRPGESLRHIISGCSHLANGEYLHRHNLVARIIHQQLALQYGLVESEVPYYKYTPGPVLENGRALLYWDRSIITDRTIVANKPDIVLIDRSQRRAVLVDITIPHDENLVKAEKDKLSKYLDLAHEVTAMWNVDSTSIVPIVVSANGLIAKSLDQHLERLSLDGWIKGQIQKAVLLDTARIVRRFLTLQP

SEQ ID NO: 5863 - protein, 1221 aa, Ennomos quercinarius
MFYNNSYWYPTFIMITRSRTRKAETQSARLPPPPAPSSPSSSSGDEYGTPPDTTASSDEDGPPSPPPPPPPARRGRPPLPARLGPAGQPAPRAAPATGGIVRRMRWTQAMNENCMRAYYGATEGGSSLTAYRDRMLSLFQDLEPAVAVSAQRLSDQVRAIQRCKMLDEPTLDRLRLEALPIRATSPSPRVLPAALPDPGPIMGPLPVTPRGDPAIDGEESASDSVSTQANEQLRSALEDAILRYRSTPTSRPRLPRLPTNRRNLVLMGALNTLLAPYLRTSEDLVDTHSILYCGAIAACRVARVKFPDTDRAPRPADGAPAWQVRIEKRITTFRTLIAKLVCFSRGNHRPRVMRFVTQAFAGTGIRPQDYMACVTERIDFLKQKVYAWASRIRRYRERVDRYQQNRLFQSDQRKVYRNWEGTGQRVVDGQLPDANATNEFWRSIWSVPVEHTEGDWMRVVERVCEPIESMGSITIDPEDISCAIRTAQNWKSPGPDGLHNFWIKWIRCSYPCLAIQFQEALEAGSLPSFMTTGVTFLLHKSGSTTEAKNYRPITCLPTLYKLLTSILRTKINSHIVANNILAPAQNGCRVGSRGTKELLLIDTAICQQVRRNRGALSTAWIDYKKAYDSVPHSWLERILELYKIDATLRSFLSACMRQWTTVLRQPGGGESVSDPQDFIRIERGIFQGDSLSPLWFCLALNPLSTLLGDSGLGYRLRRGGEIISHLLYMDDLKLFAPQRPQLIELLKITENFSNSINMEFGVDKCAVMHVHRGKVVNSTNLQLSETMTLRSLSESETYRYLGMSESLGISVGDVKRTVKERFFCRLTKVLNSLLSGGNKTRAFNGWVMPLLMYSFGILRWTQTELDALDRKVRQLLTSHRMLHPRSSVMRLYIPRKWGGRGFLNAKTLHNREVCSLRDYFLNNECGMHRDVVAVDKGLTPLSLANENWRKPVVLSTEDRRDVWKGKELHGRFYRALTGPDVDLHASVNWLRFGDLFGETEGFVCAIADEVIKTNNYRKYIMKDGTVDICRACRRPGESLRHIISGCSHLANGEYLHRHNLVARIIHQQLALQYGLVESEVPYYKYTPGPVLENGRALLYWDRSIITDRTIVANKPDIVLVDRSQRRAVLVDITIPHDENLVKAEKDKLSKYLDLAHEVTAMWNVDSTSIVPIVVSANGLIAKSLDQHLERLSLDGWIKGQIQKAVLLDTARIVRRFLTLQP

SEQ ID NO: 5864 - protein, 1086 aa, Cydia splendana
MLPLFQALEPTIDVTAQRLSDQVRVIQRLKRLDDSTLDRLRLEALSARAASTSVRDPPATSPDPVPAPDQAPEAPRVDLCADEEEFAQSVSSTANEQLRRTLDEAITQYRSTPNTRPRLPRLPMNRHNLALMGALNALLEPYLRTSKDLDDTHAIMYCGAIAACRVARVKFPDSERAPRTAGGAPAWQIRIERRISSFRTLIAKLICFRGGNNRPRVMRFVNQAFAGTDIRPRGYMANITERIDFLKQKVYAWANRIRRYRERVDRFQQNRLFQSDQRKMYRKWEETNPRASDSQPPDATAMNDFWRSIWSVPVGHTEGSWMSVVERECESIEPMGAVTISPDDVSCAIRTAQNWKSPGPDGLHNFWLKWFRCSHSCLAAQFQQALELGSPPPSLTTGVTFLLYKSGSTTEAKNYRPITCLPTLYKLLTSILRAKINAHIVANNILASAQNGCRVGSRGTKELLLIDMTICQQIRRNRGALSAAWIDYKKAYDSVPHSWLERVLELYKVDTALRAFLSACMRQWTTVLRQPGGGDESPGPQDFIRIERGIFQGDSLSPLWFCLALNPLSTLLKDLELGCRLRRGGEVISHLLYMDDLKLFAPNSQDLVELLKTTEVFSNAINMEFGVDKCAVMHVQRGKVVNSTNLQLSETMSFRSISESETYKYLGMSQSLGIEEEGIRRSVKERFFSRLTKVLNSLLSGGNKVRAFNAWVMPLLTYSFGILRWTQTELDALDRRVRSLLTTHRMLHPRSSVMRLYIPRKCGGRGFLNAKDLHNREVYNLRNYFLNNECGMHRDVVAVDRNLTPLSLANENWRKPVVLSTADRKAAWESKVLHGRFYKALTGPDVDLLASVNWLRFGDLFGETEGFACAIADEVMMTNNYRKYILKDGTVDICRACRRPGESLRHIISGCSHLANGEYLHRHNLVARIIHQQLALLYGLVDREVPYYKYSPAPVLENGRATLYWDRSIITDRTIVANKPDIVLIDRSQRRTVLVDVTIPHDENLVKAEKDKSSKYLDLAHEITAMWDVDSTIIVPIVVSANGLIAKSLDQHLERLSLGGWIKGQMQKAVILDTARIVRRFLTLRP

SEQ ID NO: 5865 - protein, 1150 aa, Cydia splendana
MKYLLRSNYLLICAAGHPAPPTAPATGGIVRRMRWTRDMNENVMRAYYGATEGGTQLSAYRSRILPLFQTVEPTITVSEQRLSDQVRVIQRLKRLDDATLDRLRQEALSARADSTLVRGLPATSPDPVPVPDLAPEAPRVDFCTDEGDFASQNVSTTANEQLRRTLEEAITQYRATTNSRPRLPRLPMNRRNLALMGALNALLEPYLRTSKDLDDTHSIMYCGAIAACRVARVKFPDAERAPRTAGGVPAWQARIERRISSFRTLIAKLICFRGGNNRPRVMRFVNQAFAGTDIRPRDYMANVTERIDFLKQKVYAWANRIRRYRERVDRFQQNRLFQSDQRKVYRRWEETNLRTPDTQPPDATAMTNFWRSIWSVPVGHTEGSWMSVVKRECESIEPMGAVTISPDDVSCAIRTAQNWKSPGPDGLHNFWLKWFRCSHSRLAAQFQQALELGSLPPSLTTGVTFLLYKSGSTTEAKNYRPITCLPTLYKLLTSILRAKINAHIVVNNILASAQNGCRVGSRGTKELLLIDMTICQQIRRNRGALSAAWIDYKKAYDSVPHSWLGRVLELYKVDAALRAFLSACMRQWTTVLRQPGGRDDRPGPQDFIRIERGIFQGDSLSPLWFCLALNPLSTLLKDLGLGCRLRREGEVISHLLYMDDLKLFAPNSQDLLELLKTTEVFSSAIHMEFGVDKCAVMHVQRGRVVNSTNLQLSETMSFRSISESETYKYLGMSQSLGIEDEGIRRSVKERFFSRLTKVLNSLLSGGNKVRAFNAWVMPLLTYSFGILRWTQTELDALDRRVRSLLTTHRMLHPRSSVMRLYIPRKCGGRGFLNAKDLHNREVYNLRNYFLNNECGMHRDVVAVDRNLTPLSLANENWRKPVVLSTADRKAAWESKVLHGRFYKALTGPDVDLLASVNWLRFGDLFGETEGFACAIADEVMMTNNYRKYILKDGTVDICRACRRPGESLRHIISGCSHLANGEYLHRHNLVARIIHQQLALLYGLVDREVPYYKYLPAPVLENGHATLYWDRSIITDRTIVANKPDIVIIDRSQRRAVLVDITIPHDENLVKAEKDKSSKYLDLAHEITAMWDVDSTIIVPIVVSVNGLIAKSLDQHLERLSLGGWIKGQMQKAVILDTARIVRRFLSLQP

SEQ ID NO: 5866 - protein, 1209 aa, Cydia splendana
MQTRSKTRAQLASPRNARPPPPSASSVSSQSSSGDEFATAPDTSESSDECGPPPPPSRPPARRGRPPLSARLGPAGHPAPPTAPAAGGVVRRMRWSQTINENVMRAYYGATEGGTNLCAYRVRMLPLFQALEPTIDVTAQRLSDQVRVIQRQKRLDDSTLDRLRLEALSARAASTSARDPPATSPDPVPAPDQAPGAPRVDLSADEEEFAQSVGSTANEQLRRTLDEAITRYRSTPDTRPRLPRLPMNRHNLALMGALNALLEPYLRTSKDLDDTHAIMYCGAIAACRVARVKFPDSERAPRTAGGAPAWQIRIERRISSFRTLIAKLICFRGGNNRPRVMRFVNQAFVGTDIRPRDYMANVTERIDFLKQKVYAWANRIRRYRERVDRFQQNRLFQSDQRKMYRRWEETNLRASDSRPPDATVMNDFWRSIWSVPVGHTEGSWMSVVERECESIEPMGAVTISPDDVSCAIRTAQNWKSPGPDGLHNFWLKWFRCSHSYLAAQFQQALELGSLPPSLTTGVTFLLYKSGSTTEAKNYRPITCLPTLYKLLTSILRAKINAHIVANNILASAQNGCRVGSRGTKELLLIDMTICQQIRRTKGALSAAWIDYKKAYDSVPHSWLGRVLELYKVDAALRAFLSACMGQWTTVLRQPGGGDDRPGPQDFIRIERGIFQGDSLSPLWFCLALNPLSTLLKDLGLGCRLRREGEVISHLLYMDDLKLFAPNTQGLLELLKTTEVFSSAINMEFGVDKCAVMHVQQGKVVNSTNLQLSETMSFRSISESETYKYLGMSQSLGIEDEGIRRSVKERFFSRLTKVLNSLLSGGNKVRAFNAWVMPLLTYSFGILRWTQTELDALDRRVRSLLTTHRMLHPRSSVMRLYIPRKCGGRGFLNAKDLHNREVYNLRNYFLNNECGMHRDVVAVDRNLTPLSLANENWRKPVVLSTADRKAAWESKALHGRFYKALTGPDVDLLASVNWLRFGDLFGETEGFACAIADEVMMTNNYRKYILKDGTVDICRACRRPGESLRHIISGCSHLANGEYLHRHNLVARIIHQQLALLYGLVDREVPYYKYLPAPVLENGRATLYWDRSIITDRTIVANKPDIVLIDRSQRRAVLADVTIPHDENLVKAEKDKSSKYLDLAHEITAMWDVDSTIIVPIVVSANGLIAKSLDHHLERLSLGGWIKGQMQKAVILDTARIVRRFLTLRP

SEQ ID NO: 5867 - protein, 1117 aa, Cydia splendana
MRWSQTMNENVMRAYYGATEGGTDLCAYRVRMLPLFQALEPTIDVTAQRLSDQVRVIQRLKRLDDSTLDRLRLEALSTRAASTSVRDPPATSPDPVPAPDQAPEAPRVDLCADEEEFAQSVSSTANEQLRRTLDEAITQYRSTPNIRPRLPRLPMNRHNLALMGALNALLEPYLRTSKDLDDTHAIMYCGAIAACRVARVKFPDSERAPRTAGGAPAWQIRIERRISSFRTLIAKLICFRGGNNRPRVMRFVNQAFAGTDIRPSDYMANITERIDFLKQKVYAWANRIRRYRERVDRFQQNRLFQSDQRKMYRKWEETNPRASDSQPPEATVMNDFWRSIWSVPVGHTEGSWMSVVERECESIEPMGAVTISPDDVSCAIRTAQNWKSPGPDGLHNFWLKWFRCSHSCLAAQFQQALELGSPPPSLTTGVTFLLYKSGSTTEAKNYRPITCLPTLYKLLTSILRAKINAHIVANNILASAQNGCRVGSRGTKELLLIDMTICQQIRRNRGALSAAWIDYKKAYDSVPHSWLERVLELYKVDTALRAFLSACMRQWTTVLRQPGGGDGSPGPQDFIRIERGIFQGDSLSPLWFCLALNPLSTLLKDLELGCRLRRGGEVISHLLYMDDLKLFAPNSQDLVELLKTTEVFSNAINMEFGVDKCAVMHVQRGKVVNSTNLQLSETMSFRSISESETYKYLGMSQSLGIEEEGIRRSVKERFFSRLTKVLNSLLSGGNKVRAFNAWVMPLLTYSFGILRWTQTELDALDRRVRQLLTTHRMLHPRSSVMRLYIPRKCGGRGFLNTKNLHNREVYNLRNYFLNNECGMHCDVVAADKGLTPLSLANENWRKPVVLSTEDRKAVWKDKQLHGRFYKALTGPDVDLLASVNWLRFGDLFGETEGFACAIADEVMMTNNYRKYILKDGTVDICRACRRPGESLRHIISGCSHLANGEYLHRHNLVARIIHQQLALLYGLVDREVPYYKYSPAPVLENGRATLYWDRSIITDRTIVANKPDIVLIDRSQRRTVLVDVTIPHDENLVKAEKDKSSKYLDLAHEITAMWDVDSTIIVPIVVSANGLIAKSLDQHLERLSLGGWIKGQMQKAVILDTARIVRRFLTLRP

SEQ ID NO: 5868 - protein, 1213 aa, Erannis defoliaria
MITRSKKRNAAVQHARPTPPPVPSSSPSSSSPSEEEFHTCGTSSSSEDVSGPRTLTPPIPVRRGRPPLSARLGPAGQPASRPALAAGGVVHRMRWSQTNNENCMRAYYGATEGGTNLTAYRVRMLSLFQTLEPTVTVSAQRISDQVRAIQRLNLLDQPLLDRLRLEVQSARPTPASTRDLDVASSAPTLASVPTSAATLATSADPVLDEGDCTGMSVSTQVSEQLRRALEDAIGQYRFALNSRPRLPRLPTHRRNLALMGALNALLAPYLRASEDLTDTHSILYCGAIAACRVARVKFPDTNRAPRPAGDVPAWQLRIERRISTFRTLIAKLICFSRGNNRPRVMRFVTQAFAGTGIQPQQYMASVTERIDYLKQKVYAWANRIRRYRERVDRYWQNRLFQSDQRKVYRNWEGTEQRVSDGQLPDASAMTNFWRGIWSVPVEHTEGDWMRVVERECESIEPMGSILIDPVDVSCAIRTAQNWKSPGPDGLHNFWIKWFRCSHDRLATQFQEALELGSLPSFMTTGVTFLLHKSGSTTEPKNYRPITCLPTIYKLLTSILSTKINAHIVANNVLAPAQNGCRVGSRGTKELLLIDMAISQQVRRNKGALSAAWIDYKKAYDSVPHSWLERILELYQIDTTLKSFLGACMRQWTTVLRQPGGGNGSSDSQDLIRIERGIFQGDSLSPSWFCLALNPLSTLLKDSGLGYRLRRGGEVISHLLYMDDLKLFAPKHQDLLELLKTTQVFSSAIRMEFGVDKCAVMRVQRGKVVNSPDLQLSEIMTLRSLSEAETYKYLGMSESLGISVVDIKKSVKERFFCRLTKVLNSLLSGGNKARAFNGWVMPLLIYSFGILRWTQTELDALDRRVRQLLTAHRMLHPRSSVMRLYIPRKWAGRGFLNAKNLHNREVCSLRDYFLNNECGMHRDVVTVDKGLTPLSLANENWRRPSVISTDDRKEVWKSKELHGRFYRALTGPDVDLLASANWLRFGDLFGETEGFACAIADEVIKTNNYRKYIMKDGTVDICRACHRPGESLRHIISGCSHLANGEYLHRHNQVARIIHQQLALQYGLVESEVPYYKYAPAPVLENGRALLYWDRSIITDRTIVANKPDIVMVDRSQRRAVLVDVTIPHDENLVKAEKDKLSKYLDLAFEITAMWDVDSTIIVPIVVSANGLIAKSLDQYLKRLSLDGWVKGQIQRAVVLDTARIVRRFLTLQP

SEQ ID NO: 5869 - protein, 1215 aa, Biston betularia
MWTRSRTAAASGLHDAHIPSPPAPSTPSASSGDEEFATPLATSASSSSSDVSGPRTPAPPPPARRGRPPLPARLGPAGQSASRSALAAGGVVRRMRWSQTNNENCMRAYYGATEGGINLSAYRVRMLPLFQALEPTVAVSTQRLSDQVRAIQRLQLLDQSVLDRLRLEALPARPTPVSTRDSPVASSAPTLVSVPTSMATLATPTDPVVDVGECTSMGVCSQVSEHLRRTLEDAICQYRFAPDSRPRLPRLPTHRRNLALMGALNALLAPYLRASEDLTDTHSILYCGAIAACRVARVKFPDTNRAPRPAGGVPAWQLRIERRISTFRTLIAKLICFSRGNNRPRVMRFVTQAFAGTGIRPQHYLASVTERIDYLKQKVYAWANRIRRYRERADRYWQNRVFQSDQRKVYRDWEGTGQRVSDRQLPDTSVMTEFWRGIWSLPVEHTEGDWMRVVERECESIESMGSVLIDPVDVSCAIRTAQNWKSPGPDGLHNFWIKWIRCSHDRLATQFQEALELGSLPCFMTTGVTFLLHKTGSTTEAKNYRPITCLPTIYKLLTSILRTKINAHVVANNVLAPAQNGCRVGSRGTKELLLIDMTISQQVRRNKGALSTAWIDYKKAYDSVPHSWLERVLELYKIDTTLKSFLGACMRQWTTVLRQPGSGDGSSEPQDLIRIERGIFQGDSLSPLWFCLALNPLSTLLKESGLGHRLRRGGEVISHLLYMDDLKLFAPKRPDLMELLKTTQVFSNAIKMEFGVDKCAVMHVQRGEVVNCPDLQLSETMTFRSLSEVETYKYLGMSESLGIAVVDIKRSVKERFFCRLTKVLNSLLSGGNKVRAFNGWVMPLLIYSFGILRWTQTELDALDRKVRQQLTTHRMLHPRSSVMRLYIPRKLGGRGFLSAKNLHNREVCSLRDYFRDNECGMHRDVVAVDKGLTPLSLANENWRKPTVLSTEDRKEVWKSKQLHGRFYRVLTGPDVDMLASVNWLRFGDLFGETEGFACAIADEVIKTNNYRKYIMKDGTVDICRACHRPGESLRHIISGCSHLANGEYLHRHNQVARIIHQQLALQYGLVESEVPYYKYAPAPVLENGRALLYWDRSIITDRTIVANKPDIVVVDRAQRRAVLIDITIPHDENLVKAEKDKLSKYLDLAHEITAMWDVDSTIIVPIVVTVNGLIAKSLDQHLKRLSLDGWVKGQLQKAVILDTARIVRRFLTLQP

SEQ ID NO: 5870 - protein, 1121 aa, Biston betularia
MRWSQTNNENCMRAYYGATEGGINLSAYRVRMLPLFQALEPTVAVSTQRLSDQVRAIQRLQLLDQSVLDRLRLEALPARPTPVSTRDSPVASSAPTLVSVPTSMATLATPTDPVVDVGECTSMGVCSQVSEHLRRTLEDAICQYRFAPDSRPRLPRLPTHRRNLALMGALNALLAPYLRASEDLTDTHSILYCGAIAACRVARVKFPDTNRAPRPAGGVPAWQLRIERRISTFRTLIAKLICFSRGNNRPRVMRFVTQAFAGTGIRPQHYLASVTERIDYLKQKVYAWANRIRRYRERADRYWQNRVFQSDQRKVYRDWEGTGQRVSDRQLPDTSVMTEFWRGIWSLPVEHTEGDWMRVVERECESIESMGSVLIDPVDVSCAIRTAQNWKSPGPDGLHNFWIKWIRCSHDRLATQFQEALELGSLPCFMTTGVTFLLHKTGSTTEAKNYRPITCLPTIYKLLTSILRTKINAHVVANNVLAPAQNGCRVGSRGTKELLLIDMTISQQVRRNKGALSTAWIDYKKAYDSVPHSWLERVLELYKIDTTLKSFLGACMRQWTTVLRQPGSGDGSSEPQDLIRIERGIFQGDSLSPLWFCLALNPLSTLLKESGLGHRLRRGGEVISHLLYMDDLKLFAPKRPDLMELLKTTQVFSNAIKMEFGVDKCAVMHVQRGEVVNCPDLQLSETMTFRSLSEAETYKYLGMSESLGIAVVDIKRSVKERFFCRLTKVLNSFLSGGNKVRAFNGWVMPLLIYSFGILRWTQTELDALDRRVRQQLTTHRMLHPRSSVMRLYIPRKLGGRGFLSAKNLHNREVCSLRDYFRDNECGMHRDVVAVDKGLTPLSLANENWRKPSVLSTEDRKEVWKSKQLHGRFYRVLTGPDVDMLASVNWLRFGDLFGETEGFACAIADEVIKTNNYRKYIMKDGTVDICRACHRPGESLRHIISGCSHLANGEYLHRHNQVARIIHQQLALQYGLVESEVPYYKYAPAPVLENGRALLYWDRSIITDRTIVANKPDIVVVDRAQRRAVLVDITIPHDENLVKAEKDKLSKYLDLAHEITAMWDVDSTIIVPIVVTVNGLIAKSLDQHLKRLSLDGWVKGQLQKAVILDTARIVRRFLTLQP

SEQ ID NO: 5871 - protein, 1207 aa, Blastobasis lacticolella
MITRSKRKNQTVNAQPPPTPAPVSSSPSSSNDEFTTASDTSESSDERGLSAAPPPPPARRGRPLPARLGPTGRPAPPMAPATGSVVRRMRWTQSINENVMRAYYGATEGGTNLSAYRDRMLPLFQVLEPAIDVTAQRLSDQVRAIQRLKRLDDSVLDRLRLESLPVRAVPISTMSLPATSPPQVSPPSPAPRVPRTDATVGVEDCTNVSSVSTETNEYVRRTLEETIARYRFAPNSRPRLPRLPTNRRNLALMGAINVLLDSYIRASDNLVDTHSIMYCGAITACRVARVKFSDADRAPRVAGGAPAWQKRIERRINTFRTLIAKLICFKEGNNRPRVMRFVDQAFAGTGISSRDYMTCATERIDFFKQKVCAWANRIHRYRERVDRFRLNRLFQSDQRKVYRKWEGTNQSGSDGSLPDASASNNFWRCIWSVPVEHSEGDWMNVVKRECEIIEPMAAVSICPEDVSCAIDTAQNWKCPGPDGLHNFWIKWFRCSHERLATQFQEALEHGSLPTLFTTGITFLLYKSGSTTEAKNYRPITCLPTLYKLLTSILRKKINNLFIENNILAMSQNGCRVGSRGTKELLLIDMTICQQVRRRRGSLSAAWIDYKKAYDSVPHSWLRRVLELYKINATLRSFLDACMRQWITVLSQPVGGIDHSPPQDFIRIKRGIFQGDSLSPLWFCLALNPLSTLLKHSELGCRLRREGEVISHLLYMDDLKLFAPKRQDLMELLKITEIFSNAIRMEFGADKCAVMHVQRGKVANTTNLQLSETMSFRSLSEAETYKYLGMSQSLGIVDEGVKQAVKERFFCRLTKVLNSLLSGGNKVRSFNAWVMPLLTYSFGILRWTQTELDALDRRVRLLLTTHRMLHPRSSVMRLYIPRKCGGRGFLSAKTLHNREVCSLRDYFLNNECGMHRAVVAVDRGLTPLSLANENWRKPKVLSTIDRKDVWKSKELHGRFYRALTGPDVDLLASVNWLRFGDLFGETEGFVCAIADEVIMTNNYRRYILKDGTVDICRACRCPGESLRHITSGCGRLANGEYLHRHNLVARIIHQQLALQYGLVESEVPYYKYVPAPVLENGLATLYWDRSVITDRTIVANRPDIVLTDRSKRRAVLVDVTIPHDGNLVKAEKDKQCKYLDLAHEVTAMWDVDSTIIVPIVVSVNGLIAKSLDQHLKSLSLDGWVKGQIQKAVLLETARIVRRFLSLQP

SEQ ID NO: 5872 - protein, 1090 aa, Apotomis turbidana
MKCLYRKYHQNLLTHRLRVRRRHSPQTKKLQETHFFETNLSILYQNMQSIWNKIHILHTFTEDYPQVHVICVSESWLNTEKKDLVKISNYNICSFFCREHHEGGGVFIMIKNGIEQYERPDITSLSLEMIFELCAVELPKLNLLIVNIYWPNSKREIEVFYTSLNKLLCIIARKDSKKRVIIIIIIIIISWQVRIERRISSFRTLIAKLICFRGGNNRPRVMRYVTQAFAGTGIRPCDYMACVTERIDYLKQKVYAWANRIRRYRERVDRFQQNRLFQSDQRKVYRKWEGTDQCVTDGQLPDPTAMINFWRSIWSVPVEHTEGEWMNVVRRECEPIENMGAVTISPDDVGCAVRTTQNWKSPGPDGLHNFWIKWFRSSHERLATQFQDALELGSLPSFMTTGATFLLYKSGSTTEAKNYRPITCLPTLYKLLTSILRTKINTHIVANNVLAFSQNGCRVGSRGTKELLLIDTTICQQVRRNRGSLSATWIDYKKAYDSVPHSWLERILELYKIDTALRSLLSSCMRQWTTVLRQPGVGDGPPGPQDLIRIERGIFQGDSLSPLWFCLALNPLSTLLKDSGLGCRLRRGGEVISHLLYMDDLKLYAPKRQDLVELLEVTETFSSAIKMEFGVDKCAVMHVQRGKVVNSANLQLSETMSLRSISEVETYKYLGMSQSLAIADGDIRQALKERFFCRLTKVLNSLLSGGNKARAFNAWVMPLLTYSFGILRWTQTELDALDTRVRQLLTTHRMRHPRSSVMRMYIPRKCGGRGFLNAKDLHNREVCSLREYFLNNECGIHRDVVAVDKGLTSLSLANENWRRPKVLSTDDRRAVWKSKELHGRFYKALTGPDVDLLASVNWLRFGDLFGETEGFVCAIADEVMMTNNYRRYILKDGTVDICRACRRPGESLRHIISGCSHLANGEYLHRHNQVARIIHQQLALRYGLVGSEVPYYKYAPMPVLENGRATLYWDRSIITDRTIVANKPDIVLVDRSKRQAVLVDITIPHDENLVKAEKDKLSKYLDLAHEVTAMWDVDSTIIVPIVVSANGLIAKSLDKHLKRLSLDGWIKGQIQKAVLLDTARIVRRFLSLQP

SEQ ID NO: 5873 - protein, 1026 aa, Notocelia uddmanniana
MRIKNKTFDTATGAPRVDLSTDGDCANQSVSTQADGQLRRALEEAITRYRSTTSSRPRLPRLPVNRRNLALMGALNDLLVPYLRASEDLIDTHSIMYCGAIAACRVARVKFPDADRAPRTAGSVPTWQVRIERRIDTYRTLIAKLICFRGGNSRPRVMRFVNQAFAGTGVRPRDYMTCVTERIDFLKQKVYAWASRIRRYRERVDRYQLNRLFQSDQRKVYRKWEGTDHRVSDGRRPDATAMVNFWRSIWSVPVEHTEGAWMDVVKRECESIEPMGSVTISPEDVSCAIRTAPNWKSPGPDGLHNFWLKWFRCSHARLAAQFQQALELGSLPPPLTTGVTSLLYKSGSTTEAKNYRPITCLPTLYKLLTSILRAKINTHIVANNILAPAQNGCRVGSRGTKELLLIDMTICQRVRRNRGTLSAAWIDYKKAYDSVPHSWLRRILELYKVDAVLRSFLVACMGQWTTVLRQPGGGEGPSGPQDSIRIERGIFQGDSLSPLWFCLALNPLSTLLKDSGLGCQLRREGEVISHLLYMDDLKLFAPNKHDLLELLKTTEVFSSAIKMEFGVDKCAVMHVQRGKVVNSTNLHISETIALRSLSEAETYKYLGMSQSLGIEGGDIKRAARERFFCRLTKVLNSFLSGGNKVRAFNAWVMPLLTYSFGILRWTQTELDFLDRRVRVLLTAHRMLHPRSSVMRLYIPRKLGGRGFLNAKDLHNREVCSLRDYFLNSECGMHRDVVAADASFTALSMANENWRRFKVLSTEDRRAVWKSKELHGRFYKALAGPDVDLLASVNWLRFGDLFGETEGFVCAIADEVIMTNNYRKYILKDGTVDICRACRRPGESLRHIISGCSHLANGEYLHRHNLVARIIHQQLALLYGLVDFEVPYYKYTPAPVLENGRATLYWDRSVITDRTIVANKPDIVLTDRLKRQAVLIDITIPHDENLVKAEKDKVSKYLDLAHEVTAMWDVDSTIIVPIVVSVNGLIAKSLDQHLKRLSLDGWVKGQIQKAVLLDTARIVRRFLSLSP

SEQ ID NO: 5874 - protein, 1206 aa, Notocelia uddmanniana
MNTRLRSRAEQRARLPSPLAPSSSSPSSSDDEFATAPDSSESSSDERGPSPPPPQTSARRGRRPLPTRLGPTGHSAPPTAPAAGGVVRRMRWTQEMNENCMRAYFGATEGETNLSAYRVRMLPLFQALEPTITVSAQRLSDQVRVIQRNKRLDDLTLDRLRLEALSARAAPTSARDLPATSPAPVPAPNTAPRAPRVDPSADGDCADQSVSTQAHEQLRRALDEAITRYRSTPNSRPRLPRLPVNRRNLALMGALNDLLDPYLRASDDLIDTHSIMYCGAIAACRVARVKFPDADRATRTAGGVPAWQVRIERRINTFRTLIAKLICFRGGNNRPRVMRFVNQAFAGTGVRPRDYMACVTERIDFLKQKVYAWASRIRRYRERVDRYQQNRLFQSDQRKVYRKWEGTDHRVCDGQRPDATAMVNFWRSIWSVPVEHTEGAWIGVVERDCESIEPMGSVTISPEDVSCAIRTAPNWKSPGPDGLHNFWLKWFRCSHERLATQFQQAIELGSLPPPLTTGVTSLLYKSGSTTEAKNYRPITCLPTLYKLLTSILRAKINTHIVTNNILAPAQNGCRVGSRGTKELLLIDMTICQRVRRNRGTLSASWIDYKKAYDSVPHSWLRRILELYKVDAALRSFLSACMGQWTTVLRQPGGGDGPSGPQDSIRIERGIFQGDSLSPLWFCLALNPLSTLLQDSGLGCQLRRGGEVISHLLYMDDLKLFAPNRQDLLELLKTTEVFSSAIKMEFGVDKCAVMHVQRGKVVNSTNLQLSETMSLRSLSEAETYKYLGMSQALGIEGEGIKQAVKERFFCRLTKVLNSFLSGGNKARAFNAWVMPLLTYSFGILRWTQTELDALDRRVRVLLTAHRMLHPRSSVMRLYIPRKCGGRGFLNAKDLHNREVCSLRDYFLNSECGMHRDVVAVDASFTPLSMANENWRRFKVLSTEDRKAEWKSKELHGRFYRALTGPDVDLLASVNWLRFGDLFGETEGFVCAIADEVIMTNNYRKYILKDGTVDICRACRRPGESLRHIISGCGHLANGEYLHRHNLVARIIHQQLALSYGLVDFEVPYYKYLPAPVLENGRATLYWDRSIITDRTIVANKPDIVLIDRSKRQAVLVDITIPHDENLVKAEKDKVSKYLDLAHEVTAMWDVDSTIIVPIVVSANGLIAKSLDQHLKRLSLDGWVKGQIQKAVLLDTARIVRRFLSLSP

SEQ ID NO: 5875 - protein, 1121 aa, Notocelia uddmanniana
MITRSKARQEASTQSARPPSLTASSDSSPSSSGDEFATAPDTSESSDESGSPPTPPRPPARRGRPRLDDATLDRLRMEALSARAASASARNPPATLPAPVPAPDMAPGAPRVDSSADEDCANQSVSTHAHELLRRALEEAITQYRSTPNSRPRLPRLPVNRRNLALMGALNDLLVPYFGASADLIDTHSIMYCGAIAACRVARVKFPDADRAPRTTGSVPTWQVRIGRRVDTYRTLIAKLICFRGGNNRPRVMRFVNQAFAGTGVRPRDYMACVTERIDFLKQKVYAWASRIRRYRERVDRYQQNRLFQSDQRKVYRKWDGTDHRVSDGQRPDATAMVNFWRSIWSVPVEHTEGAWMDVVKRECDSIEPMGSVTVSPEDVSCAIRTAPNWKSPGPDGLHNFWLKWFRCSHARLAAQFQQALDIGSLPPPLTTGVTSLLYKSGSTTEAKNYRPITCLPTLYKLLTSILRAKINTHIVANNILAPAQNGCRVGSRGTKELLLIDMTICQRVRRNRGTLSAAWIDYKKAYDSVPHSWLKRILELYKVDAVLRSFLVACMGQWTTVLRQPGGGEGPSGPQDSIRIERGIFQGDSLSPLWFCLALNPLSTLLKDSGLGCQLRREGEVISHLLYMDDLKLFAQNKHDLLELLKTTEVFSSAIKMEFGVDKCAVMHVQRGKVVNSTNLHISETMALRSLSEAETYKYLGMSQSLGIEGGDIKRAVKERFFCRLTKVLNSFLSGGNKDRAFNAWVMPLLTYSFGILRWTQTELDFLDRRVRVLLTAHRMLHPRSSVMRLYIPRKLGGRGFLNAKDLHNREVYSLRDYFLNSECGMHRDVVAVDASFTPLSMANENWRRFKVLSTEDRRAVWKSKELHGRFYKALAGPDVDLLASVNWLRFGDLFGETEGFVCAIADEVVMTNNYRKYILKDGTVDICRACRRPGESLRHIISGCSHLANGEYLHRHNLVARIIHQQLALLYGLVDFEVPYYKYTPAPVLENGRATLYWDRSVITDRTIVANKPDIVLTDRLKRQAVLVDITIPHDENLVKAEKDKVSKYLDLAHEVTAMWDVDSTIIVPIVVSVNGLIAKSLDQHLKRLSLDGWVKGQIQKAVLLDTARIVRRFLSLSP

SEQ ID NO: 5876 - protein, 1211 aa, Notocelia uddmanniana
MITRSKARLKKQTSNPKSARPPPSPVSSSSASSSEEFATAPDTSSSSSSDECGPPPPPPRPPARRGRPPLPARLGPAGHPAPPTAPATGGIVRRMQWSQSINENCMRAYYGATDGGTNLSAYRVRMLTLFRALEPAISVSAQRLSDQVRVIQRLKRLDDATLDRLRLEALSARAASVSARDPLATLPAPMPAPDTATGAPRVDLSTDGDCANQSVSTQADGQLRRALEEAITRYRSTTSSRPRLPRLPVNRRNLALMGALNDLLVPYLRASEDLIDTHSIMYCGAIAACRVARVKFPDADRAPRTAGSVPTWQVRIERRIDTYRTLIAKLICFRGGNSRPRVMRFVNQAFAGTGVRPRDYMTCVTERIDFLKQKVYAWASRIRRYRERVDRYQLNRLFQSDQRKVYRKWEGTDHRVSDGQRPDATAMVNFWRSIWSVPVEHNEGAWIDVVKRECESIEPMGSVTVSPEDVSCAIRTAPNWKSPGPDGLHNFWLKWFRCSHARLAAQFQQALELGSLPSPLTTGVTSLLYKSGSTTEAKNYRPITCLPTLYKLLTSILRAKINTHIVANNILAPAQNGCRVGSRGTKELLLIDMTICQRVRRNRGTLSAAWIDYKKAYDSVPHSWLRRILELYKVDAVLRSFLVACMGQWTTVLRQPEGGEGPSGPQDSIRIERGIFQGDSLSPLWFCLALNPLSTLLKDSGLGCQLRREGEVISHLLYMDDLKLFAPNKHDLLELLKTTEVFSSAIKMEFGVDKCAVMHVQRGKVVNSTNLHISETIALRSLSEAETYKYLGMSQSLGIEGEDIKRAVRERFFCRLTKVLNSFLSGGNKVRAFNAWVMPLLTYSFGILRWTQTELDFLDRRVRVLLTAHRMLHPRSSVMRLYIPRKLGGRGFLNAKDLHNREVCSLRDYFLNSECGMHRDVVAADASFTPLSMANENWRRFKVLSTDDRRAVWKSKELHGRFYKALTGPDVDLLASVNWLRFGDLFGETEGFVCAIADEVIMTNNYRKYILKDGTVDICRACRRPGESLRYIISGCSHLANGEYLHRHNLVARIIHQQLALLYGLVDFEVPYYKYTPAPVLENGRATLYWDRSVITDRTIVANKPDIVLTDRLKRQAVLVDITIPHDENLVKAEKDKVSKYLDLAHEVTAMWDVDSTIIVPIVVSVNGLIAKSLDQHLKRLSLDGWVKGQIQKAVLLDTARIVRRFLSLSP

SEQ ID NO: 5877 - protein, 1209 aa, Notocelia uddmanniana
MITRSQTRRVQASQQSARPSPSPASSSSSASSEEEFATAPDTSSSSSDECGPPPLPPRPPARRGRPPLPARLGPAGHPVPHTAPATGGVVRRMQWSPSMNENCMRAYYGATDGGTNLSEYRVRMLPLFQALEPAISVSAQRLSDQVRVIQRLKRLDDATLDRLRLEALSARAASVSARNPPATLPAPVPAPDTAPGAPRVDPSADEDCANQSVSTQAHEELRRALEEAITQYRSTPNSRPRLPRLPVNRRNLALMGALNDLLDPYLRASDDLIDTHSIMYCGAIAACRVARVKFPDADRATRTAGGVPAWQVRIERRINTFRTLIAKLICFRGGNNRPRVMRFVNQAFAGTGVRPRDYMACVTERIDFLKQKVYAWASRIRRYRERVDRYQQNRLFQSDQRKVYRKWEGTDHRVCDGQRPDATAMVNFWRSIWSVPVEHTEGAWIGVVERDCESIEPMGSVTISPEDVSCAIRTAPNWKSPGPDGLHNFWLKWFRCSHERLATQFQQALELGSLPPPLTTGVTSLLYKSGSTTEAKNYRPITCLPTLYKLLTSILRAKINTHIVTNNILAPAQNGCRVGSRGTKELLLIDMTICQRVRRNRGTLSASWIDYKKAYDSVPHSWLRRILELYKVDAALRSFLSACMGQWTTVLRQPGGGDGPSGPHDSIRIKRGIFQGDSLSPLWFCLALNPLSTLLQDSGLGCQLRRGGEVISHLLYMDDLKLFAPNRQDLLELLKTTEVFSSAIKMEFGVDKCAVMHVQRGKIVNSTNLQLSETMSLRSLSEAETYKYLGMSQALGIEGEGIKQAVKERFFCRLTKVLNSFLSGGNKARAFNAWVMPLLTYSFGILRWTQTELDALDRRVRVLLTAHRMLHPRSSVMRLYIPRKCGGRGFLNAKDLHNREVCSLRDYFLNSECGMHRDVVAVDASFTPLSMANENWRRFGVLSAEDRRAEWKSKELHGRFYRALTGPDVDLLASVNWLHFGDLFGETEGFVCAIADEVIMTNNYRKYILKDGTVDICRACRRPGESLRHIISGCSHLANGEYLHRHNLVARIIHQQLALSYGLVDFEVPYYKYLPAPVLENGRATLYWDRSIITDRTIVANKPDIVLIDRSKRQAVLVDITIPHDENLVKAEKDKVSKYLDLAHEVTAMWDVDSTIIVPIVVSANGLIAKSLDQHLKRLSLDGWVKGQIQKAVLLDTARIVRRFLSLSP

SEQ ID NO: 5878 - protein, 955 aa, Notocelia uddmanniana
MGALNDLLVPYLGASEDLIDTHSIMYCGAIAACRVARVKFPDADRAPRPAGSVPTWQVRIERRVDTYRTLITKLICFRGGNSRPRVMRFVNQAFAGTGVRPRDYMDCVTERIDFLKQKVYAWASRIRRYRERLDRYQQNRLFQSDQRKVYRKWDGTDHRVSDGQRPDAAAMVNFWRSIWSVPVEHTEGPWIGAVERECESIEPMGSVTISPEDVSCAIRMAPNWKSPGPDGLHNFRLKWFRCSHARLAAQFQQALELGSLPPPLTTGVTSLLYKSGSTTEAKNYRPITCLPTLYKLLTSILRAKINAHIVANNILAPAQNGCRVGSRGTKELLLIDMTICQQVRRNRGALSAAWIDYRKAYDSVPHSWLGRILELYKVDAALRSFLCACMRQWTTVLRQPGGGDGPSVPQDSIRIERGIFQGDSLSPLWFCLALNPLSTLLKDSGLGCQLRRGGEVISHLLYMDDLKLFAPNTHNLLELLKTTEVFSSAIKMEFGVDKCAVMHVQRGKIVNSTNLQISETTSLRSLSEADTYKYLGMSQSLGIEGGGIKRVLRERFFCRLTKVLNSFLSGGNKVRAFNAWVMPLLTYSFGILRWTQTELDLLDRRVRVLLTTNRMLHPRSSVMRLYIPRKLGGRGFLNAKDLHNREVCSLRDYFLNSECGMHRDVVAVDTLLTPLSMANENWRRLKVLSTEDRRAVWKSKELHGRFYKALTGPDVDLLASVNWLRFGDLFGETEGFVCAIADEVIMTNNYRKYILKDGTVDICRACCRPGESLRHIISGCSHLANGEYLHRHNLVARIIHQQLALLYGLVGFEVPYYKYTPAPVLENGRATLYWDRSVITDRTIVANKPDIVLTDRLKRQAILVDITIPHDENLVKAEKDKSSKYLDLAHEVTAMWDVDSTIIVPIVVSANGLIAKSLDQHLKRLSLDGWVKGQIQKAVLLDTARIVRRFLSLSP

SEQ ID NO: 5879 - protein, 1207 aa, Crocallis elinguaria
MITRSRNKAGTASARQSPPPASSSPSSSSGDEYGTPLDTSASSDEDGPPSPPPPPPPARRGRPPLPARLGPAGHSVPRAAPATGGIVRRMRWTSDMNENCMRAYYGATEGGTNMSAYRDRMLPLFQTLEPSVAVSAQRLSDQVRAIQRLKLLDESVLDRLRLEALPIRATSASTRDLSVAPPVLAPLPAPSSVATRIDPVVDEDDCANISVSTQVNEQLRRALEDAILDYQYTPDSRPRLPRLPTNRRNLALMGALNVLLAPYLRASENLFDTHSIMYCGAIAVCRVARVKFPDADRAPRTAGSAPAWQVRIERRINTFRTLIAKLICFSRGNNRPRVMRFVNQAFAGTGIRPQNYMAGVTERIDFLKQKIYAWVNRIRRYRERVDRYHQNRLFESDQRKVYRNWEGTDQRVSDGQLPDTNAMINFWRGIWSVPVEHTEGDWMRTVEQSCESIETMGSVTIDPIDVSCAIRTAQNWKSPGPDGLHNFWIKWIRCSHECLAVQFQEALELGSLPCFLTTGVTSLLHKSGSTTEAKNYRPITCLPTLYKLLTSILRVKINSHVVANNILAPAQNGCRVGSRGTKELLLIDTAICQRVRRNRGALSAAWIDYKKAYDSVPHSWLERILELYKIDATLRSFLGMCMRQWTTVLRQPDSGNSPSGPENFIKIERGIFQGDSLSPLWFCLALNPLSTLLRDSRLGCQLRREGEIISHLLYMDDLKLFAPKRPDLMELLKITEIFSSAIKMEFGVDKCAVMHVQRGKVVNSDNLQLSETMTLRSLSEAETYKYLGMSQSLGIAVGDIKQSVKERFFFRLTKVLNSLLSGGNKARAFNGWVMPLLIYSFGILKWTQTELDSLDRRVRQLLTYHRMLHPRSSVMRLYIPRKWGGRGFLNAKTLHNREVCSLREYFLNNECGMHRDVVAVDRNLTPLSLANENWRKPVVMTTEDRKDVWKGKELHGRFYRALTGSDVDLLASVNWLRFGDLFGETEGFVCAIMDEVIKTNNYRKYIMKDGTVDICRACRRPGESLRHIISGCSHLANGEYLHRHNLVARIIHQQIALQYGLVESEVPYYKYAPAPVLENGRALLYWDRSIITDRTIVANKPDIVLVDRSQRRAVLVDITVPHDENLVKAEKDKLSKYLDLAHEVTAMWNVDSTIIVPIVVSANGLVAKSLDQHLKRLSLDGWIKGRMQKAVLLDTARIVRRFLTLQP

SEQ ID NO: 5880 - protein, 1228 aa, Peribatodes rhomboidaria
MSHNQNTKNLEIKLWKMITRSRTRKAADTTSTRPPPSPSSSSEGPSSEEDEYATPLDTTGSSDEEAAPTPAPPPPPARRGRPPLPARLGPAGRPAPPTAPATGGVVCRMRWTQAMNENCMRAYYGATEGGTNLTAYRVRMLSLFQVLEPTVTVSTQRLSDQVRAIHRCKLLDQSVLDRLCLEAIRARPTPASTRDQPVASSAPTRASVPALAATLATMADTDVDGDRTSASVSSQVSEHLRRTLEDAIFQYRFAPDSRPRLPRLPTHRHNMALMGALNVLLAPYLRASENLTDTHSILYCGAIAACRVARVKFPDTSRAQRPAGGVPAWQVRIERRISTFRTLIAKLLCFSRGNTRPRVMRFVTQAFAGTDIRPQYYLANVTERIDYLKQKVYAWANRIRRYRERVDRYWQNRLFQSDQRKVYRGWERTEQCVIDGHRPDASAMIDFWRGIWSVPVEHTEGEWMRIVERECESIESMESILIDSVDVSCAIRTAQNWKSPGPDGLHNFWIKWIRCSHDRLAIQFQEALELCSLPSFMTTGVTFLLHKSGSTTDPKNYRPITCLPTIYKLLTSILRNKINTHIVANNVLAPAQNGCRVGSRGTKELLLIDMAISQQVRRSKGALSVAWIDYKKAYDSVPHSWLERILELYKIDITLKSFLSACMRQWTTVLRQPGGGEVSADPQDLIRIERGIFQGDSLSPLWFCLALNPLSTLLKDLGLGHRLRRGGEVISHLLYMDDLKLFAPKRQDLMELLKTTEVFSSAIKMEFGVDKCAVMHVQRGKVVNSPNLQLSETMTLRSLSEVETYKYLGMSESLGISVVDIKKSIKERFFCRLTKVLNSLLSGGNKMRAFNGWVMPLLIYSFGILRWTQTELDALDRRVRQLLTTHRMLHPRSSVMRLYIPRKWGGRGMLNAKNLHNREVYRLRSFFRNNDCGMHCDVVAVDKGLTPLSLANENWRQPSVLSTEDRKNVWKGKELHGRFYRALTGPDVDLLASVNWLRFGDLFGETEGFACAIADEVIKTNNYRKYILKDGTVDICRACHRPGESLRHIISGCSHLANGEYLHRHNQVARIIHQQLALQYGLVESEVPYYKYAPASVLENGRALLYWDRSIITDRTIVANKPDIVLVDWSQRRAVLVDITIPHDENLVKAEKDKLSKYLDLAHEVTAMWDVDSTIIVPIVVTVNDLIAKSLDQHLKRLSLDGWIKGHIQKAVILDTCRIVRRFLTLQP

SEQ ID NO: 5881 - protein, 1210 aa, Pammene fasciana
MITRSKARAATTHARPPSPLASSSSPSTSSSSDDFETAPDTDESSDESGPPPPPPQPPARRGRPPLPARLGPTGHPVPPRAPAAGGIVRRMRWTCSMNENVMRAYYGATEGGTNLCAYRARILPLFQALEPTIDTTTQRLSDQVRVIQRLKRLDDATLDRLRLEALSARAASTSARDPPATSPDPMPAPDLASGAPRIDPSADEEYIASQSVSSTANEQLRRTLEEAITQYRSTNIPRPRLPRLPMNRRNLALMGALNDLLDPILRTSKDLDDTHSIMYCGAIAACRVARIKFPDAERAPRTAGGVPAWQVRIERRINSFRTLIAKLICFRGGNNRPRVMRFVYQAFAGTDIEPRDYMANITERIDFLRQKVYAWASRIRRYRERVDRFRQNRLFQSDQRKVYRRWEEADPRVSDVRLPDATAMTDFWRSIWSAPVEHTEGEWMNVVERECESIEPMGAIIISPDDVSCAIRTSQNWKSPGPDGLHNFWLKWFRCSHSRLATQFQHALELGSLPPSLTTGVTFLLYKSGSTTEAKNYRPITCLPTLYKLLTSILRAKINAHMVANNILASAQNGCRVGSRGTKELLLIDMTICQRVRRSRGALSAAWIDYKKAYDSVPHSWLERILELYKVDAALRSFLGTCMRQWTTVLRQPGGGDDPPGPQDFIRIERGIFQGDSLSPLWFCLALNPLSTLLKDSGLGCRLRREGEVISHLLYMDDLKLFAPNNRDLLELLKTTEVFSSSIKMEFGVDKCAVMHVQRGKVVNSTNLQLSETMTFRSISESETYKYLGMSQSLGIEDVGIKQALKERFFGRLTKVLNSLLSGGNKVRAFNAWVMPLLTYSFGILRWTQTELDALDRRVRLLLTTHRMLHPRSSVMRLYIPRKCGGRGFLNAKNLHNREVYNLRNYFLNNECGMHRDVVTVDKNLTPLSLANENWRKPVVLSTEDRKAVWKSKELHGRFYGALTGPDVDLLASVNWLRFGDLFGETGGFACAIADEVIMTNNYRRYILKDGTVDICRACRRPGESLRHIISGCSHLANGEYLHRHNLVARIIHQQLALLYGLVDHEVPYYKYTPAPVLENGRATLYWDRSIITDRTIVANKPDIVVIDRPQRRAMLVDITVPCDVNLVKAEKDKSSKYLDLAHEVTAMWEVDSAIIVPIVVSANGLIAKSLDQHLERLSLRGCGWIKGQMQKAVILDTARIVRRFLSLRP

SEQ ID NO: 5882 - protein, 1212 aa, Pammene fasciana
MITRSKTRLQQASPPNARPPSSPASSVSSPSSSGDEFATAPDTSESSDERGPPPPPPRPPARRGRPPLPARLGLAGHPVPPRAPAAGGIVRRMRWTQSMNENVMRAYYGATEGGTNLCAYRDRMLPLFQALEPTIDTTAQRLSDQVRVIQRLKRLDDATLDRLRLEALSARAASTSARDPPATSLDPMPASDLASGAPRIDPSADEEEIANQSVSSTANEQLRRTLEEAITQYRSTNITRPRLPRLPMNRRNLALMGALNDLLDPLLRTSKDLDDTHSIMYCGAIAACRVARVKFPDAERAPRTAGGVPAWQVRIERRINSFRTLIAKLICFRGGNNRPRVMRFVHQAFAGMDIEPRDYMANVTERIDFLKQKVYAWASRIRRYRERVDRFRQNRLFQSDQRKVYRRWEEADPRVSDVRLPDATAMTDFWRSIWSAPVEHTEGEWMSVVERECESIEPMGAITISPDDVSCAIRTAQNWKSPGPDGLHNFWLKWFRCSHSRLATQFQQALELGSLPPSLTTGVTFLLYKSGSTTEAKNYRPITCLPTLYKLLTSILRAKINAHMVANNILASAQNGCRVGSRGTKELLLIDMTICQRVRRNRGALSAAWIDYKKAYDSVPHSWLERILELYKIDAALRSFLGACMRQWTTVLRQPGGGDDPPGPQDFIRIERGIFQGDSLSPLWFCLALNPLSTLLKDSGLGCRLRREGEVISHLLYMDDLKLFAPNNRDLLELLKTTEVFSNSIKMEFGVDKCAVMHVQRGKVVNSTNLQLSETMTFRSISESETYKYLGMSQSLGIEDAGIKQALRERFFGRLTKVLNSLLSGGNKVRAFNAWVMPLLTYSFGILRWTQTELDALDRRVRLLLTTHRMLHPRSSVMRLYIPRKCGGRGFLNAKNLHNREVYNLRNYFLNNECEMHRDVVAIDKGLTPLSLANENWRKPVVLSTEDRKAVWKSKELHGRFYGALTGPDVDLLASVNWLRFGDLFGETEGFACAIADEVIMTNNYRRYILKDGTVDICRACRRPGESLRHIISGCSHLANGEYLHRHNLVARIIHQQLALLYGLVDHEVPYYKNTPAPVLENGRATLYWDRSIITDRTIVANKPDIVIIDRSQRRAMLVDITVPCDVNLVKAEKDKSSKYLDLAHEVTAMWEVDSTIIVPIVVSANGLIAKSLDQHLERLSLRGCGWIKGQIQKAVILDTARIVRRFLSLRP

SEQ ID NO: 5883 - protein, 1211 aa, Pammene fasciana
MITRSQARAATTHARPPPSPASSCSSSTSSSGDKFETAPDTDGSSDDYGPPPPPPRRPPARRGRPPLPARLGLAGHPAPPRAPAAGGIVRRMRWTPSMNENVMRAYYGATEGGTNLSAYRDRMLPLFQALEPTIDTTAQRLSDQVRVIQRLKRLDDVILDRLRLEALSVRAATTSARDPPATSPDPMPAPDLASGVPRVDPSADEVDIANQSVSSTANEQLRRTLEEAITQYRSTNITRPRIPRLPMNRRNLALMGALNDLLAPFLRISKDLDDTHSIMYCGAIAACRVARVKFPDAERAPRTAGGVPAWQVRIERRINSFRTLIAKLICFRGGNNRPRVMRFVHQAFAGTGIEPRDYMANVIERIDFLKQKVYAWASRIRRYRERVDRFRQNRLFQSDQRKVYRRWEKADPRVSDERLPDATAMADFWRSIWSAPVEHTEGEWMSVVERECESIEPMGAITISPDDVSCAIRTAQNWKSPGPDGLHNFWLKWFRCSHSRLATQFQQALELGSLPPSLTTGVTFLLYKSGSTMEAKNYRPITCLPTLYKLLTSILRAKINAHMVANNILASAQNGCRVGSRGTKELLLIDMTICQRARRNRGALSAAWIDYKKAYDSVPHSWLERILELYKVDAALRSFLGACMRQWTTVLRQPGGGDDPPGPQDFIRIERGIFQGDSLSPLWFCLALNPLSTLLKDSGLGCRLRREGEVISHLLYMDDLKLFAPNNRDLLELLKTTEVFSNSIQMEFGVDKCAVMHVQRGKVVNSTNLQLSETMTFRFISESETYKYLGMSQSLGIADAGIKQALRERFFGRLTKVLNSLLSGGNKVRAFNAWVMPLLTYSFGILRWTQTELDALDRRVRLMLTTHRMLHPRSSVMRLYIPRKCGGRGFLNAKNLHNREVYNLRNYFLNNECGMHRDVVAIDKGLTPLSLANENWRKPVVLSTEDRKAVWKSKELHGRFYGALTGPDVDLLASVNWLRFGDLFGETEGFACAIADEVIMTNNYRRYILKDGTVDICRACRRPGESLRHIISGCSHLANGEYLHRHNLVARIIHQQLALLYGLVAHEVPYYKYIPAPVLENDRATLYWDRSIITDRTIVANKPDIVVIDRPQRRAMLVDITVPCDVNLVKAEKDKSSKYLDLAHEVTAMWEVDSAIIVPIVVSANGLIAKSLDQHLERLSLRGCGWIKGQIQRAVILDTARIVRRFLTLRP

SEQ ID NO: 5884 - protein, 965 aa, Pammene fasciana
MNRRNLALMGALNDLLDPFLRTSKDLDDTHSIMYCGAIAACRVARVKFPDAERAPRTAGGVPAWQVRIERRINSFRTLIAKLICFRGGNNRPRVMRFVHQAFAGTDIEPRDYMANVTERIDFLKQKVYAWASRIRRYRERVDRFRQNRLFQSDQRKVYRRWEEADPRVSDVRLPDATAMSDFWRSIWSAPVEHTEGEWMSVVERECETIEPMGAITISPDDVSCAIRTAQNWKSPGPDGLHNFWLKWFRCSHSRLATQFQQALELGSLPPSLTTGVTFLLYKSGSTTEAKNYRPITCLPTLYKLLTSILKAKINAHMVANNILASAQNGCRVGSRGTKELLLIDMTICQRVRRNRGALSAAWIDYKKAYDSVPHSWLERILELYKIDAALRSFLGACMRQWTTVLRQPGGGDDPPGPQDFIRIERGIFQGDSLSPLWFCLALNPLSTLLKDSGLGCRLRREGEVISHLLYMDDLKLFAPNNRDLLELLKTTEVFSSSIKMEFGVDKCAVMHVQRGKVVNSTNLQLSETMTFRSISESETYKYLGMSQSLGIEDAGIKQALRERFFGRLTKVLNSLLSGGNKVRAFNAWVMPLLTYSFGILRWTQTELDALDRRVRQLLTTHRMLHPRSSVMRLYIPRKCGGRGFLNAKNLHNREVYNLRNYFLNNECGMHRDVVAIDKGLTPLSLANENWRKPVVLSTEDRKAVWKSKELHGRFYGALTGPDVDLLASVNWLRFGDLFGETEGFACAIADEVIMTNNYRRYILKDGTVDICRACRRPGESLRHIISGCSHLANGEYLHRHNLVARIIHQQLALLYGLVDHEVPYYKYTPAPVLENGRATLYWDRSIITDRTIVANKPDIVVIDRPQRRAMLVDITVPCDVNLVKAEKDKSSKYLDLAHEVTAMWEVDSAIIVPIVVSANGLIAKSLDQHLERLSLRGCGWIKGQIQKAVILDTARIVRRFLSLRP

SEQ ID NO: 5885 - protein, 1206 aa, Bembecia ichneumoniformis
MILRKRTRNTAEQSARPPPLPVSSSPCSSADEFLTADDKSTSSDEDGSTPPSPPRRPARRGRPPLPASLGPVRPSASRPAPATGGVVRRMRWTHTMNENCMRAYYGATEGATNLTAYRAGMLSLFQALEPAVTVTAQRLSDQVRAIQRCQLLEQSALDRLRLDSLPARTTSAATQHLRAALPLSESASIPTSAALLTDPVDQEFCASTNVSTETKEHLRRALEEAISRYHTKPNDRPRLPRLPMHKQNIALMGALNTLLAPYIKASRDLTDTHSILYCGAIAACRVARVKFLNFDRATRDAGDVPAWQVRIERRISKFRTLIAKLIAFSKGNTRPRVMRFVAQAFVGTNIKSKDYLTWATERIDYFKQKVYALANRVRRYKERVQRYQQNRVFQSDQRKVYRQWEGTVNRVDAGQLPDADAMTNFWRGIWSVSDGHTEGDWINIVKQTCEPIEPMGAVTISPADVSCAIRTVQNWKSPGPDGLHNFWIKWFRCSHECLAMQFQKALDLGALPSLFTTGITFLLHKSGSTTEAKNYRPITCLPTLYKLLTSILRSKINSHIVANNILAPAQNGCKIGSRGTKELLLIDMTICQRVRRSGGALSVAWIDYQKAYDSVPHSWLRRILELYKIDTTLRSFLAMCMGQWITGLCQPGYRGGAADLRDMIKIERGIFQGDSLSPLWFSLALNPLSTLLRNLKLGYRLRRGGEVISHLLYMDDLKLFAPKPKDLLELLKITQCFSNAIRMDFGVDKCAVMHVQKGKVVNSPNLQLSNEMSFRSLSEVETYKYLGMSQSLGISDKDIKQTVRTRFFGRLIKVLNSFLSGGNKVRAFNGWVMPLLTYSFGILRWTQTELDGLDRRVRRLLTAHRMLHPRSSVMRLYIPRKLGGRGFLNAKNLHNREVYSLREYFLNYESGVHRDVVAIDKNYTPLSLANGNWRRLVVLSAEDRKNVWKGKELHGRFYKALTGPDVDSLMSVNWLRFGDLFGETEGFVCAIADEVIKTNNYRKYILKDGTVDICRACHRPGETLRHIISGCAHLANGEYLHRHNQVARIIHQRLALRYDLIESEVPYYKYVPAPVLENGHATLYWDRSIITDRTIVANKPDIVVIDRSQRRTMLVDIAVPHDENLVKAEKEKLTKYIDLAHEVTAMWDVDSTIIVPIVVSANGLIAKSLDQHLKRLSLDGWVKGQIQKAVLLDTARIVRRFLTLQP

SEQ ID NO: 5886 - protein, 1209 aa, Cydia splendana
MQTRSKTRAQLASPRNARPPPPSASSVSSQSSSGDKFATAPDTSESSDECGPPPPPSRPPARRGRPPLSARLGPAGHPAPPTAPAAGGVVRRMRWSQTINENVMRAYYGATEGGTNLCAYRVRMLPLFQALEPTIDVTAQRLSDQVRVIQRQKRLDDSTLDRLRLEALSARAASTSARDPPATSPDPVPAPDQAPGAPRVDLSADEEDFAQSVGSTANEQLRRTLDEAITRYRSTPDTRPRLLRLPMNRHNLALMGALNALLEPYLRTSKDLDDTHAIMYCGAIAACRVARVKFPDSERAPRTAGGAPAWQIRIERRISSFRTLIAKLICFRGGNNRPRVMRFVNQAFVGTDIRPRDYMANVTERIDFLKQKVYAWANRIRRYRERVDRFQQNRLFQSDQRKMYRKWEETNLRASDSRPPDATVMNDFWRSIWSVPVGHTEGSWMSVVERECESIEPMGAVTISPDDVSCAIRTAQNWKSPGPDGLHNFWLKWFRCSHSYLAAQFQQALELGSLPPSLTTGVTFLLYKSGSTTEAKNYRPITCLPTLYKLLTSILRAKINAHIVANNILASAQNGCRVGSRGTKELLLIDMTICQQIRRTKGALSAAWIDYKKAYDSVPHSWLGRVLELYKVDAALRAFLSACMGQWTTVLRQPGGGDDRPGPQDFIRIERGIFQGDSLSPLWFCLALNPVSTLLKDLGLGCRLRREGEVISHLLYMDDLKLFAPNTQGLLELLKTTEVFNSAINMEFGVDKCAVMHVQRGKVVNSTNLQLSDTMSFRSISESETYKYLGMSQSLGIEDEGIRRSVKERFFSRLTKVLNSLLSGGNKVRAFNAWVMPLLTYSFGILRWTQTELDALDRRVRSLLTTHRMLHPRSSVMRLYIPRKCGGRGFLNAKDLHNREVYNLRNYFLNNECGMHRDVVAVDRNLTPLSLANENWRKPVVLSTADRKAAWESKALHGRFYKALTGPDVDLLASVNWLRFGDLFGETEGFACAIADEVMMTNNYRKYILKDGTVDICRACRRPGESLRHIISGCSHLANGEYLHRHNLVARIIHQQLALLYGLVDREVPYYKYLPAPVLENGRATLYWDRSIITDRTIVANKPDIVLIDRSQRRAVLADVTIPHDENLVKAEKDKSSKYLDLAHEITAMWDVDSTIIVPIVVSANGLIAKSLDQHLERLSLGGWIKGQMQKAVILDTARIVRRFLTLRP

SEQ ID NO: 5887 - protein, 1209 aa, Cydia splendana
MITRSKARSLASTTANARPPPSPVSSVSSQSSSGDEFATAPDTSESSDEFGPPPPPPRPPARRGRPPLPARLGPAGHLAPPTAPAAGGVVRRMRWSQTMNENVMRAYYGATEGGTDLCAYRVRMLPLFQALEPTIDVTAQRLSDQVRVIQRLKRLDDSTLDRLRLEALSTRAASTSVRDPPATSPDPVPAPDQAPEAPRVDLCADEEEFAQSVSSTANEQLRRTLDEAITQYRSTPNTRPRLPRLPMNRHNLALMGALNALLEPYLRTSKDLDDTHAIMYCGAIAACRVARVKFPDSERAPRTAGGAPAWQIRIERRISSFRTLIAKLICFRGGNNRPRVMRFVNQAFAGTDIRPRDYMANITERIDFLKQKVYAWANRIRRYRERVDRFQQNRLFQSDQRKMYRKWEETNPRASDSQPPEATVMNDFWRSIWSVPVGHTEGSWMSVVERECESIEPMGAVTISPDDVSCAIRTAQNWKSPGPDGLHNFWLKWFRCSHSCLAAQFQQALELGSPPPSLTTGVTFLLYKSGSTTEAKNFRPITCLPTLYKLLTSILRAKINAHIVANNILASVQNGCRVGSRGTKELLLIDMTICQQIRRNRGALSAAWIDYKKAYDSVPHSWLERVLELYKVDTALRAFLSACMRQWTTVLRQPGGGDGSPGPQDFIRIERGIFQGDSLSPLWFCLALNPLSTLLKDLELGCRLRRGGEVISHLLYMDDLKLFAPNSQDLVELLKTTEVFSNAINMEFGVDKCAVMHVQRGKVVNSTNLQLSETMSFRSISESETYKYLGMSQSLGIEEEGIRRSVKERFFSRLTKVLNSLLSGGNKVRAFNAWVMPLLTYSFGILRWTQTELDALDRRVRSLLTTHRMLHPRSSVMRLYIPRKCGGRGFLNAKDLHNREVYNLRNYFLNNECGMHRDVVAVDRNLTPLSLANENWRKPVVLSTEDRKAVWKDKQLHGRFYKALTGPDVDLLASVNWLRFGDLFGETEGFACAIADEVMMTNNYRKYILKDGTVDICRACRRPGESLRHIISGCSHLANGEYLHRHNLVARIIHQQLALLYGLVDREVPYYKYSPAPVLENGRATLYWDRSIITGRTIVANKPDIVLIDRSQRRTVLVDVTIPHDENLVKAEKDKSSKYLDLAHEITAMWDVDSTIIVPIVVSANGLIAKSLDQHLERLSLGGWIKGQMQKAVILDTARIVRRFLTLRP

SEQ ID NO: 5888 - protein, 1208 aa, Cydia splendana
MITRSRAKAVTTSARPPPPPASSTSSSTSSSGDEFATAPDTDGSSDESGPPPPPPRPPARRGRPPLPARLGPAGHPAPPTAPATGGIVRRMRRTRDMNENVMRAYYGATEGGTQLSAYRSRILPLFQTLEPTITVSEQRLSDQVRVIQRLKRLDDATLDRLRQEALSARADSISVRDLPATSPDPVPAPDLAPGAPRVDFCTDEGDLVSQNVSTTANEQLRRTLEEVITQYRATTNSRPRLPRLPMNRRNLALMGALNALLEPHLRTSKDLDDTHSILYCGAIVACRVARVKFPDAERAPRTVGGVPAWQARIERRISSFRTLIAKLICFRGGNNRPRVMRFVNQAFAGTDIRPRDYMANVTERIDFLKQKVYAWANRIRRYRERVERFQQNRLFQSDQRKVYRKWEETNLRTPDTQPPDATAMTDFWRSIWSMPVGHTEGSWMSVIERECESIEPMGAVTISPDDVSCAIRTAQNWKSPGPDGLHNFWLKWFRCSHSCLAAQFQQALELGSLPPSLTTGVTFLLYKSGSTTEAKNYRPITCLPTLYKLLTSILRAKINAHIVANNILASAQNGCRVGSRGTKELLLIDMTICQQIRRTKGALSAAWIDYKKAYDSVPHSWLGRVLELYKVDAALRAFLSACMGQWTTVLRQPGGGDDQPGPQDFIRIERGIFQGDSLSPLWFCLALNPLSTLLKDLGLGCRLRREGEVISHLLYMDDLKLFAPNTQGLLELLKTTEVFSSAINMEFGVDKCAVMHVQRGRVVNSTNLQLSETMSFRSISESETYKYLGMSQSLGIEDEGIRRSVKERFFSRLTKVLNSLLSGGNKVRAFNAWVMPLLTYSFGILRWTQTELDALDRRVRSLLTTHRMLHPRSSVMRLYIPRKCGGRGFLNAKDLHNREVYNLRNYFLNNECGMHRDVVAVDRNLTPLSLANENWRKPVVLSTADRKAAWENKVLHGRFYKALTGPDVDLLASVNWLRFGDLFGETEGFACAIADEVMMTNNYRKYILKDGTVDICRACRRPGESLRHIISGCSHLANGEYLHRHNLVARIIHQQLALLYGLVDREVPYYKYLPAPVLENGRATLYWDRSIITDRTIVANKPDIVLIDRSQRRAVLADVTIPHDENLVKAEKDKSSKYLDLAHEITAMWDVDSTIIVPIVVSANGLIAKSLDQHLERLSLGGWIKGQMQKAVILDTARIVRRFLSLQP

SEQ ID NO: 5889 - protein, 1117 aa, Cydia splendana
MRWSQTMNENVMRAYYGATEGGTDLCAYRVRMLPLFQALEPTIDVTAQRLSDQVRVIQRLKRLDDSTLDRLRLEALSTRAASTSVRDPPATSPDPVPAPDQAPEAPRVDLCADEEQFAQSVSSTANEQLRRTLDEAITQYRSTPNTRPRLPRLPMNRHNLALMGALNALLEPYLRTSKDLDDTHAIMYCGAIAACRVARVKFPDSERAPRTAGGAPAWQIRIERRISSFRTLIAKLICFRGGNNRPRVMRFVNQAFAGTDIRPRDYMANITERIDFLKQKVYAWANRIRRYRERVDRFQQNRLFQSDQRKMYRKWEETNPRASDSQPPEATVMNDFWRSIWSVPVGHTEGSWMSVVERECESIEPMGAVTISPDDVSCAIRTAQNWKSPGPDGLHNFWLKWFRCSHSCLAAQFQQALELGSPPPSLTTGVTFLLYKSGSTTEAKNYRPITCLPTLYKLLTSILRAKINAHIVANNILASAQNGCRVGSRGTKELLLIDMTICQQIRRNRGALSAAWIDYKKAYDSVPHSWLERVLELYKVDTALRAFLSACMRQWTTVLRQPGGGDGSPGPQDFIRIERGIFQGDSLSPLWFCLALNPLSTLLKDLELGCRLRRGGEVISHLLYMDDLKLFAPNSQDLVELLKTTEVFSNAINMEFGVDKCAVMHVQRGKVVNSTNLQLSETMSFRSISESETYKYLGMSQSLGIEEEGIRRSVKERFFSRLTKVLNSLLSGGNKVRAFNAWVMPLLTYSFGILRWTQTELDALDRRVRQLLTTHRMLHPRSSVMRLYIPRKCGGRGFLNTKNLHNREVYNLRNYFLNNECGMHCDVVAADKGLTPLSLANENWRKPVVLSTEDRKAVWKDKQLHGRFYKALTGPDVDLLASVNWLRFGDLFGETEGFACAIADEVMMTNNYRKYILKDGTVDICRACRRPGESLRHIISGCSHLANGEYLHRHNLVARIIHQQLALLYGLVDREVPYYKYSPAPVLENGRATLYWDRSIITDRTIVANKPDIVLIDRSQRRTVLVDVTIPHDENLVKAEKDKSSKYLDLAHEITAMWDVDSTIIVPIVVSANGLIAKSLDQHLERLSLGGWIKGQMQKAVILDTARIVRRFLTLRP

SEQ ID NO: 5890 - protein, 1205 aa, Cydia splendana
MITRSRAKAVTTSARPPPPPASSTSSSTSSSGDEFATAPDTDGSSDESGPPPPPPRPPARRGRPPLPARLGPAGHPAPPTAPATGGIVRRMRWTRDMNENVMRAYYGATEGGTQLSAYRSRILPLFQALEPTITVSEQRLSDQVRVIQRLKRLDDATLDRLRQEALSARADSISVRDLPATSPDRFRAGVGAPRVDFCTDEGDFASQNVSTTANEQLRRTLEEAITQYRATTNSRPRLPRLPMNSRNLALMGALNALLEPHLRTSKDLDDTHSIMYCGAIAACRVARVKFPDAERAPRTVGGVPAWQARIERRISSFRTLIAKLICFRGGNNRPRVMRFVNQAFAGTDIRPRDYMANVTERIDFLKQKVYAWANRIRRYRERVDRFQQNRLFQSDQRKVYRKWEETNLRTPDTQPPDATAMTDFWRSIWSVPVGHTEGSWMSVVERECESIEPMGAVTISPDDVSCAIRTAQNWKSPGPDGLHNFWLKWFRCSHSCLAAQFQQALELGSLPPSLTTGVTFLLYKSGSTTEAKNYRPITCLPTLYKLLTSILRAKINAHIVANNILASAQNGCRVGSRGTKELLLIDMTICQQIRRNKGALSAAWIDYKKAYDSVPHSWLGRVLELYKVDAALRVFLSACMRQWTTVLRQPGGGDDRPGPQDFIRIERGIFQGDSLSPLWFCLALNPLSTLLKDLGLGCRLRREGEVISHLLYMDDLKLFAPNSQDLLELLKITEIFSSAINMEFGVDKCAVMYVQRGRVVNSTNLQLSETMSFRSISESETYKYLGMSQSLGIEDEGIRRSVKERFFSRLTKVLNSLLSGGNKVRAFNAWVMPLLTYSFGILRWTQTELDSLDRRVRSLLTAHRMLHPRSSVMRLYIPRKCGGRGFLNAKDLHNREVYNLRNYFLNNECGMHRDVVAVDRNLTPLSLANENWRKPVVLSTADRKAAWESKVLHGRFYKALTGPDVDLLASVNWLRFGDLFGETEGFACAIADEVMMTNNYRKYILKDGTVDICRACRRPGESLRHIISGCSHLANGEYLHRHNLVARIIHQQLALLYGLVDREVPYYKYLPAPVLENGRATLYWDRSIITDRTIVANKPDIVIIDRSQRRAVLVDITIPHDENLVKAEKDKSSKYLDLAHEITAMWDVDLTIIVPIVVSVNGLIAKSLDQHLERLSLGGWIKGQMQKAVILDTARIVRRFLSLRP

SEQ ID NO: 5891 - protein, 1213 aa, Cydia splendana
MQRMITRSQRRAAESTNNARPPPPPAPSSSSSTSSSGDEFATAPDTDGSSDEGGPPPPPPRPPARRGRPPLPARLGPAGHPAPPTAPAAGGIVRRMRWTRDMNENVMRAYYGATEGGTQLSAYRSRILPLFQALEPTITVSEQRLSDQVRVIQRLKRLDDATLDRLRQEALSARADSTSVRDLPATSPDPVPAPDLAPAAPRVDFCTDEGDFASQNVSTTANEQLRRTLEEAITQYRATTNSRPRLPRLPMNRRNLALMGALNALLDLHLRTSKDLDDTHSIMYCGAIAACRVARVKFPDAERAPRTAGGVPAWQVRIERRISSFRTLIAKLICFREGNNRPRVMRFVNQAFAGTDIRPRDYMANVTERIDFLKQKVYAWANRIRRYRERVDRFQQNRLFQSDQRKVYRKWEETNLRTPDTQPPDVTAMTDFWRSIWSVPVGHTEGGWMSVVERECESIEPMGAVTISPDDVSCAIRTAQNWKSPGPDGLHNFWLKWFRCSHSRLAAQFQQALELGSLPPSLTTGVTFLLYKSGSTTEAKNYRPITCLPTLYKLLTSILRAKINAHIIANNILASAQNGCRVGSRGTKELLLIDMTICQQIRRNKGALSAAWIDYKKAYDSVPHSWLGRVLELYKVDAALRAFLSACMRQWTTVLRQPGGGDDRPGPQDFIRIKRGIFQGDSLSPLWFCLALNPLSTLLKDLGLGCRLRREGVVISHLLYMDDLKLFAPNSQDLLELLKTTDVFSSAIHMEFGVDKCAVMHVQRGKVVNSTNLQLSETMSFRSISESETYKYLGMSQSLGIEDEGIRRSVKERFFSRLTKVLNSLLSGGNKVRAFNAWVMPLLTYSFGILRWTQTELDALDRRVRSLLTTHRMLHPRSSVMRLYIPRKCGGRGFLNAKDLHNREVYNLRNYFLNNECGMHRDVVAVDRNLTPLSLANENWRKPVVLSTADRKAAWESKVLHGRFYKALTGPDVDLLASVNWLRFGDLFGETEGFACAIADEVMMTNNYRKYILKDGTVDICRACRRPGESLRHIISGCSHLANGEYLHRHNLVARIIHQQLALLYGLVDREVPYYKYLPAPVLENGHATLYWDRSIITDRTIVANKPDIVIIDRSQRRAVLVDITIPHDENLVKAEKDKSSKYLDLAHEITAMWDVDSTIIVPIVVSVNGLIAKSLDQHLERLSLGGWIKGQMQKAVILDTARIVRRFLSLQP

SEQ ID NO: 5892 - protein, 1209 aa, Cydia splendana
MQTRSKTRAQLASPRNARPPPPSASSVSSQSSSGDEFATAPDTSESSDECGPPPPPSRPPARRGRPPLSARLGPAGHPAPPTAPAAGGVVRRMRWSQTINENVMRAYYGATEGGTNLCAYRVRMLPLFQALEPTIDVTAQRLSDQVRVIQRQKRLDDSTLDRLRLEALSARAASTSARDPPATSPDPVPAPDQAPGAPRVDLSADEEEFAQSVGSTANEQLRRTLDEAITRYRSTPDTRPRLPRLPMNRHNLALMGALNALLEPYLRTSKDLDDTHAIMYCGAIAACRVARVKFPDSERAPRTAGGAPAWQIRIERRISSFRTLIAKLICFRGGNNRPRVMRFVNQAFVGTDIRPRDYMANVTERIDFLKQKVYAWANRIRRYRERVDRFQQNRLFQSDQRKMYRKWEETNLRASDSRPPDATVMNDFWRNIWSVPVGHTEGSWMSVVERECESIEPMGAVTISPDDVSCAIRTAQNWKSPGPDGLHNFWLKWFRCSHSYLAAQFQQALELGSLPPSLTTGVTFLLYKSGSTTEAKNYRPITCLPTLYKLLTSILRAKINAHIVANNILASAQNGCRVGSRGTKELLLIDMTICQQIRRTRGALSAAWIDYKKAYDSVPHSWLGRVLELYKVDAALRAFLSACMGQWTTVLRQPGGGDDRPGPQDFIRIERGIFQGDSLSPLWFCLALNPLSTLLKDLGLGCRLRREGEVISHLLYMDDLKLFAPNTQGLLELLKTTEVFSSAINMEFGVDKCAVMHVQRGKVVNSTNLQLSETMSFRSISESETYKYLGMSQSLGIEDEGIRRSVKERFFSRLTKVLNSLLSGGNKVRAFNAWVMPLLTYSFGILRWTQTELDALDRRVRSLLTTHRMLHPRSSVMRLYIPRKCGGRGFLNAKDLHNREVYNLRNYFLNNECGMHRDVVAVDRNLTPLSLANENWRKPVVLSTADRKAAWESKVLHGRFYKALTGPDVDLLASVNWLRFGDLFGETEGFACAIADEVMMTNNYRKYILKDGTVDICRACRRPGESLRHIISGCSHLANGEYLHRHNLVARIIHQQLALLYGLVDREVPYYKYLPAPVLENGRATLYWDRSIITDRTIVANKPDIVLIDRSQRRAVLADVTIPHDENLVKAEKDKSSKYLDLAHEITAMWDVDSTIIVPIVVSANGPIAKSLDQHLERLSLGGWIKGQMQKAVILDTARIVRRFLTLRP

SEQ ID NO: 5893 - protein, 1208 aa, Ennomos fuscantarius
MILRSKTKTADNKCARLPPLPVSSSPSSSSGDEYATPPDTTASSDDDGLPSPPPPPPPARRGRPPLPARLGPVGQPAPRPAPATGGVVRRMRWTQTMNENCMRAYYGATEGGSSLTAYRDRMLSLFQELEPSISVSAQRLSDQVRAIHRCKLLDQSALDRLRLETLPIPATSPSPRVLSAALPDPGPIVGPPLVTPLGGPVIDGEESVSDSVSTQVNEQLRSALEDAILRYRSTPTSRPRLPRLPTNRRNLVLMGALNTLLGPYLRTSEDLVDTHSILYCGAIAVCRVARVKFPDTDRAPRPADGAPAWQVRIEKRITTFRTLIAKLVCFSRGNHRPRVMRFVTQAFAGTGIRPQDYMACVTERIDFLKQKVYAWASRIRRYRERVDRYQMNRLFQSDQRKVYRDWEGTGQRVVDGQLPDANVMNEFWRSIWSVPVDHSEGDWIRVVKHVCEPIESMGSITIDPEDISCAIRTAQNWKSPGPDGLHNFWIKWIRCSYPCLAIQFQEALEAGSLPKFMTTGITFLLHKSGSTMEAKNYRPITCLPTLYKLLTSILRTKINSHITANNILASAQNGCRVGSRGTKELLLIDTAICQQVRRNGGALSTAWIDYKKAYDLVPHSWLKRVLELYKINATLRSFLSACMGQWTTVLRPPGGGDSVSDPQNFIRIERGIFQGDSLSPLWFCLALNPLSTLLGDSGLGYRLRRGGEIISHLLYMDDLKLFAPQRPQLMKLLKITENFSNSIKMEFGVDKCAVMHVHGGKVVNSTNLQLSETMTLRSLSESETYKYLGMSESLGISVGDVKQSVKERFFCRLTKVLNSLLSGGNKARAFNAWVMPLLMYSFGILRWTQTELDALDRKVRQVLTSHRMLHPRSSVMRLYIPRKWGGRGFLNAKNLHNREMYSLREYFLSNECGMHRDVVAVDKGLTPLSLANENWRKPVVLSTDDRRDVWKGKELHGRFYRALTGPDVDLHASVNWLRFGDLFGETEGFVCAIADEVIKTNNYRKYIMKDGTVDICRACRRPGESLRHIISGCSHLANGEYLHRHNLVARIIHQQLALQYGLVESEVPYYKYTPGPVLENGRALLYWDRSIITDRTIVANKPDIVLIDRSQRRAVLVDIAIPHDENLVKAEKDKLSKYLDLAHEVTAMWSVDSTSIVPIVVSANGLIAKSLDQHLERLSLDGWIKGQIQKAVLLDTARIVRRFLTLEP

SEQ ID NO: 5894 - protein, 1208 aa, Ennomos fuscantarius
MILRSKTKTADNKCARLPPLPVSSSPSSSSGDEYATPPDTTASSDDDGLPSPPPPPPPARRGRPPLPARLGPVGQPAPRPAPATGGVVRRMRWTQTMNENCMRAYYGATEGGSSLTAYRDRMLSLFQELEPSISVSAQRLSDQVRAIHRCKLLDQSALDRLRLETLPIPATSPSPRVLSAALPDPGPIVGPPLVTPLGGPVIDGEESVSDSVSTQVNEQLRSALEDAILRYRSTPTSRPRLPRLPTNRRNLVLMGALNTLLGPYLRTSEDLVDTHSILYCGAIAVCRVARVKFPDTDRAPRPADGAPAWQVRIEKRITTFRTLIAKLVCFSRGNHRPRVMRFVTQAFAGTGIRPQDYMACVTERIDFLKQKVYAWASRIRRYRERVDRYQMNRLFQSDQRKVYRDWEGTGQRVVDGQLPDANVMNEFWRSIWSVPVDHSEGDWIRVVKHVCEPIESMGSITIDPEDISCAIRTAQNWKSPGPDGLHNFWIKWIRCSYPCLAIQFQEALEAGSLPKFMTTGITFLLHKSGSTMEAKNYRPITCLPTLYKLLTSILRTKINSHITANNILASAQNGCRVGSRGTKELLLIDTAICQQVRRNGGALSTAWIDYKKAYDSVPHSWLKRVLELYKINATLRSFLSACMGQWTTVLRPPGGGDSVSDPQNFIRIERGIFQGDSLSPLWFCLALNPLSTLLGDSGLGYRLRRGGEIISHLLYMDDLKLFAPQRPQLMKLLKITENFSNSIKMEFGVDKCAVMHVHGGKVVNSTNLQLSETMTLRSLSESETYKYLGMSESLGISVGDVKQSVKERFFCRLTKVLNSLLSGGNKARAFNAWVMPLLMYSFGILRWTQTELDALDRKVRQVLTSHRMLHPRSSVMRLYIPRKWGGRGFLNAKNLHNREMYSLREYFLSNECGMHRDVVAVDKGLTPLSLANENWRKPVVLSTDDRRDVWKGKELHGRFYRALTGPDVDLHASVNWLRFGDLFGETEGFVCAIADEVIKTNNYRKYIMKDGTVDICRACRRPGESLRHIISGCSHLANGEYLHRHNLVARIIHQRLALQYGLVESEVPYYKYTPGPVLENGRALLYWDRSIITDRTIVANKPDIVLIDRSQRRAVLVDIAIPHDENLVKAEKDKLSKYLDLAHEVTAMWSVDSTSIVPIVVSANGLIAKSLDQHLERLSLDGWIKGQIQKAVLLDTARIVRRFLTLEP

SEQ ID NO: 5895 - protein, 1117 aa, Hedya salicella
MRWSQANNENVMRAYYGATEGGTHLSAYRDRMLLLFQTFEPAIAASAQRLSDQVRAIQRRKLLDDATLDRLRLEVLAARAASTSSRNPPATSPVPAPALDLMPGAPRVDPDSDEGHCVSIVSTQANEQLRRTLEETIERYRFAPDSRPRLPRLPANKRNLALVGALNALLDPYLRASEDLADTHSIMYCGAIAACRVARVKFPDADRAPRTAGGVPAWQVRIERRISTFRTLIAKLICFRGGNNRPRVMRYVAQAFAGTDVSSCDYMACVTERIDFLKQKVYAWASRIRRYRERVDRFQQNRLFQSDQRKVYRKWEGTDQRVTDGRLPDPTAMSNFWRSIWSVPVEHTEGEWMNVVERECEPIEAMGAVTISPDDVSCAARTTQNWKSPGPDGLHNFWVKWFRCSHERLATQFQQALELGSLPSFLTTGVTFLLYKSGSTTEAKNYRPITCLPTLYKLLTSILRAKINTHIVANNVLAFSQNGCRVGSRGTKELLLIDTTICQQVRRSRGSLSAAWIDYKKACDSVPHSWLGRILELYKVDTALRSFLGACMRQWTTVLCQPGGRDARPAPQDFIRIKRGIFQGDSLSPLWFCLALNPLSTLLKDSGLGCRLRRGGEIISHLMYMDDLKLFAPKRPELVELLKVTDTFSSAIKMEFGVDKCAVMHVQRGKVVNSTNLELSETMSLRSLSETETYKYLGMSQALSIADGDIRQAVKERFFCRLTKVLNSLLSGGNKARAFNAWVMPLLTYSFGILRWTQTELDALDRRVRMLLTTHRMLHPRSSVMRLYIPRKCGGRGFLNAKDLHNREVCSLREYFLNNECGIHRDVVAVDKGLTPLSLANENWRRPTVLSTVDRKDVWKSKELHGRFYKALTGPDVDLLASVNWLRFGDLFGETEGFSCAIADEVIMTNNYRRYILKDGTVDICRACRRPGESLRHIMSGCSYLANGEYLHRHNQVARIIHQQLAVKYDLVGSEVPYYKYVPMPVLENGRATLYWDRSILTDRTIVANKPDIVLVDRSKRRAMLVDITIPHDENLVKAEKDKLSKYLDLAHEVTAMWDVDSTIIVPIVVSVNGLIAKSLDEHLKRLSLDGWIKGQIQKAVILDTARIVRRFLSVQP

SEQ ID NO: 5896 - protein, 1215 aa, Hedya salicella
MQRYFTRSQNTRKISTAATPTHARPTPPPASSCSPSASSDDFATAPDTSESSDDECGPPPPPPRPPARRGRPPLPARLGPAGHSAPPTAPATGGIVRRMRWSQANNENVMRAYYGATEGGTHLSAYRDRMLLLFQTFEPAIAASAQRLSDQVRAIQRRKLLNDATLDRLRLEVLAARAASTSSRNPPATSPVPAPALDLMPGAPRVDPDSDEGHCVSIVSTQANEQLRRTLEETIERYRFAPDSRPRLPRLPANKRNLALVGALNALLDPYLRASEDLADTHSIMYCGAIAACRVARVKFPDADRAPRTAGGVPAWQVRIERRISTFRTLIAKLICFRGGNNRPRVMRYVAQAFAGTDVSSCDYMACVTERIDFLKQKVYAWASRIRRYRERVDRFQQNRLFQSDQRKVYRKWEGTDQRVTDGRLPDPTAMSNFWRSIWSVPVEHTEGEWMNVVERECEPIEAMGAVTISPDDVSCAARTTQNWKSPGPDGLHNFWVKWFRCSHERLATQFQQALELGSLPSFLTTGVTFLLYKSGSTTEAKNYRPITCLPTLYKLLTSILRAKINTHIVANNVLAFSQNGCRVGSRGTKELLLIDTTICQQVRRSRGSLSAAWIDYKKAYDSVPHSWLERILELYKVDTALRSFLGACMRQWTTVLCQPGGRDARPAPQDFIRIKRGIFQGDSLSPLWFCLALNPLSTLLKDSGLGCRLRRGGEIISHLMYMDDLKLFAPKRPELVELLKVTDTFSSAIKMEFGVDKCAVMHVQRGKVVNSTNLELSETMSLRSLSETETYKYLGMSQALSIADGDIRQAVKERFFCRLTKVLNSLLSGGNKARAFNAWVMPLLTYSFGILRWTQTELDALDRRVRMLLTTHRMLHPRSSVMRLYIPRKCGGRGFLNAKDLHNREVCSLREYFLNNECGIHRDVVAVDKGHTPLSLANENWRRPTVLSTVDRKDVWKSKELHGRFYKALTGPDVDLLASVNWLRFGDLFGETEGFSCAIADEVIMTNNYRRYILKDGTVDICRACRRPGESLRHIMSGCSYLANGEYLHRHNQVARIIHQQLAVKYDLVGSEVPYYKYVPMPVLENGRATLYWDRSILTDRTIVANKPDIVLVDRSKRRAMLVDITIPHDENLVKAEKDKLSKYLDLAHEVTAMWDVDSTIIVPIVVSVNGLIAKSLDEHLKRLSLDGWIKGQIQKAVILDTARIVRRFLSVQP

SEQ ID NO: 5897 - protein, 869 aa, Hedya salicella
MRYVAQAFAGTDVSSCDYMACVTERIDFLKQKVYAWASRIRRYRERVDRFQQNRLFQSDQRKVYRKWEGTDQRVTDGRLPDPTAMSNFWRSIWSVPVEHTEGEWMNVVERECEPIEAMGAVTISPDDVSCAARSTQNWKSPGPDGLHNFWVKWFRCSHERLATQFQQALELGSLPSFLTTGVTFLLYKSGSTTEAKNYRPITCLPTLYKLLTSILRAKINTHIVANNVLAFSQNGCRVGSRGTKELLLIDTTICQQVRRSRGSLSAAWIDYKKAYDSVPHSWLERILELYKVDTALRSFLGACMRQWTTVLCQPGGRDARPAPQDFIRIKRGIFQGDSLSPLWFCLALNPLSTLLKDSGLGCRLRRGGEIISHLMYMDDLKLFAPKRPELVELLKVTDTFSSAIKMEFGVDKCAVMHVQRGKVVNSANLELSETMSLRSLSETETYKYLGMSQALSIADGDIRQAVKERFFCRLTKVLNSLLSGGNKARAFNAWVMPLLTYSFGILRWTQTELEALDRRVRMLLTTHRMLHPRSSVMRLYIPRKCGGRGFLNAKDLHNREVCSLREYFLNNECGIHRDVVAVDKGLTPLSLANENWRRPTVLSTVDRKDVWKSKELHGRFYKALTGPDVDLLASVNWLRFGDLFGETEGFSCAIADEVIMTNNYRRYILKDGTIDICRACRRPGESLRHIMSGCSHLANGEYLHRHNQVARIIHQQLAVKYDLVGSEVPYYKYVPMPGLENGRATLYWDRSILTDRTIVANKPDIVLVDRSKRRAMLVDITIPHDENLVKAEKDKLSKYLDLAHEVTAMWDVDSTIIVPIVVSVNGLIAKSLDEHLKRLSLDGWIKGQIQKAVILDTARIVRRFLSVQP

SEQ ID NO: 5898 - protein, 1218 aa, Erannis defoliaria
MITRSKNKAKTSTAETTNARPPPLPAPSSPSASSGDDVFLTPRESSVSSSDSDVSGPRTPAPPPPARRGRPPLPARLGPAGQPASRPALAAGGVVRRMRWSQTNNENCMRAYYGATEGGTNLTAYRVRMLSLFQALEPTVTVSAQRLSDQVRAIQRLNLLDQSLLDRLHLEAQSARPTPASTRDLDVASSAPTLTSVPTSAATLATSTDPVLDEGDYTGMSVSTQVSEQLRRALEDAIGQYRFTLNSRPRLPRLPTHRRNLALMGALNALLAPYLRASEDLTDTHSILYCGAIAACRVARVRFPDTNRAPRTAGDVPAWQVRIERRISTFRTLIAKLICFSRGNNRPRVMRFVTQAFAETGIRPQQYMASVTERIDYLKQKVYAWASRIRRYRERVDKYRQNCLFQSDQRKVYQNWEGNEQRVSDGHLPDASAMTNFWRSIWSVPVEHTEGDWMRVVERECEFIEPMGSILIDPVDVSCAIRTAQNWKSPGPDGLHNFWIKWFRCSHDRLATQFQEALELGSLPSFMTTGVTFLLHKSGSTTEPKNYRPITCLPTIYKLLTSILSTKINTHIVANNVLAPAQNGCRVGSRGTKELLLIDMAISQQVRRNKGALSAAWIDYKKAYDSVPHSWLERILELYKIDTTLKSFLSACMRQWTTVLRQPGGGNDSSDPQDLIRIERGIFQGDSLSPSWFCLALNPLSTLLKDSGLGYRLRRGGEVISHLLYMDDLKLFAPKHQDLLELLKTTQVFSSAIRMEFGVDKCAVMRVQRGKVVNSPDLQLSEIMTLRSLSEAETYKYLGMSESLGISVVDIKKSVKERFFCRLTKVLNSLLSGGNKARAFNGWVMPLLIYSFGILRWTQTELDALDRRVRQLLTAHRMLHPRSSVMRLYIPRKWGGRGFLNAKNLHNREVCSLRDYFLNNECGMHRDVVTVDKGLTPLSLANENWRRPSVLSTDDRKDVWKSKELHGRFYRALSGPDVDLLASVNWLRFGDLFGETEGFACAIADEVIKTNNYRKYIMKDGTVDICRACHRPGESLRHIISGCSHLANGEYLHRHNQVARIIHQQLALQYGLVESEVPYYKYAPAPVLENGRALLYWDRSIITDRTIVANKPDIVMVDRSQRRAVLVDVTIPHDENLLKAEKDKLSKYLDLAFEITAMWDVDSTIIVPIVVSANGLIAKSLDQYLKRLSLDGWVKGQIQKAVVLDTARIVRRFLTLQP

SEQ ID NO: 5899 - protein, 955 aa, Erannis defoliaria
MGALNALLAPYLRASEDLTDTHSILYCGAIAACRVARVKFPDTNRAPRPAGDVPAWQLRIERRISTFRTLIAKLICFSRGNNRPRVMRFVTQAFAGTGIRPQQYMASVTERIDYLKQKVYAWANRIRRYRERVDRYWQNRLFQSDQRKVYRNWEGTEQRVSDGQLPDASAMTNFWRGIWSVPVEHTEGDWMRVVERECESIEPMGSILIDPVDVSCAIRTAQNWKSPGPDGLHNFWIKWFRCSHDRLATQFQEALELGSLPSFMTTGVTFLLHKSGSTTEPKNYRPITCLPTIYKLLTSILSTKINAHIVANNVLAPAQNGCRVGSRGTKELLLIDMAISQQVRRNKGALSAAWIDYKKAYDSVPHSWLERILELYQIDTTLKSFLGACMRQWTTVLRQPGGGNGSSDSQDLIRIERGIFQGDSLSPSWFCLALNPLSTLLKDSGLGYRLRRGGEVISHLLYMDDLKLFAPKHQDLLELLKTTQVFSSAIRMELGVDKCAVMRVQRGKVVNSPDLQLSEIMTLRSLSEAETYKYLGMSESLGISVVDIKKSVKERFFCRLTKVLNSLLSGGNKARAFNGWVMPLLIYSFGILRWTQTELDALDRRVRQLLTAHRMLHPRSSVMRLYIPRKWAGRGFLNAKNLHNREVCSLRDYFLNNECGMHRDVVTVDKGLTPLSLANENWRRPSVISTDDRKEVWKSKELHGRFYRALTGPDVDLLASANWLRFGDLFGETEGFACAIADEVIKTNNYRKYIMKDGTVDICRACHRPGESLRHIISGCSHLANGEYLHRHNQVARIIHQQLALQYGLVESEVPYYKYAPAPVLENGRALLYWDRSIITDRTIVANKPDIVMVDRSQRRAVLVDVTIPHDENLVKAEKDKLSKYLDLAFEITAMWDVDSTIIVPIVVSANGLIAKSLDQYLKRLSLDGWVKGQIQKAVVLDTARIVRRFLTLQP

SEQ ID NO: 5900 - protein, 1213 aa, Erannis defoliaria
MITRSKKRNAAVQHARPTPPPVPSSSPSSSSPSEEEFHTCGTSSSSEDVSGPRTLTPLIPVRRGRPPLPARLGPAGQPASRPALAAGGVVRRMRWSQTNNENCMRAYYGATEGGTNLTAYRVRMLSLFQTLEPTVTVSAQRISDQVRAIQRLNLLDQPLLDRLRLEVQSARPTPASTRDLDVASSAPTLASVPTSAATLATSADPVLDEGDCTGMSVSTQVSEQLRRALEDAIGQYRFALNSRPRLPRLPTHRRNLALMGALNALLAPYLRASEDLTDTHSILYCGAIAACRVARVKFPDTNRAPRPAGDVPAWQLRIERRISTFRTLIAKLICFSRGNNRPRVMRFVTQAFAGTGIRPQQYMTSVTERIDYLKQKVYAWANRIRRYRERVDRYWQNRLFQSDQRKVYRNWEGTEQRVSDGQLPDASAMTNFWRGIWSVPVEHTEGDWMRVVERECESIEPMGSILIDPVDVSCAIRMAQNWKSPGPDGLHNFWIKWFRCSHDRLATQFQEALELGSLPSFMTTGVTFLLHKSGSTTEPKNYRPITCLPTIYKLLTSILSTKINAHIVANNVLAPAQNGCRVGSRGTKELLLIDMAISQQVRRNKGALSAAWIDYKKAYDSVPHSWLERILELYQIDTTLKSFLGACMRQWTTVLRQPGGGNGSSDSQDLIRIERGIFQGDSLSPSWFCLALNPLSTLLKDSGLGYRLRRGGEVISHLLYMDDLKLFAPKHQDLLELLKTTQVFSSAIRMEFGVDKCAVMRVQRGKVVNSPDLQLSEIMTLRSLSEAETYKYLGMSESLGISVVDIKKSVKERFFCRLTKVLNSLLSGGNKARAFNGWVMPLLIYSFGILRWTQTELDALDRRVRQLLTAHRMLHPRSSVMRLYIPRKWAGRGFLNAKNLHNREVCSLRDYFLNNECGMHRDVVTVDKGLTPLSLANENWRRPSVISTDDRKEVWKSKELHGRFYRALTGPDVDLLASANWLRFGDLFGETEGFACAIADEVIKTNNYRKYIMKDGTVDICRACHRPGESLRHIISGCSHLANGEYLHRHNQVARIIHQQLALQYGLVESEVPYYKYTPAPVLENGRALLYWDRSIITDRTIVANKPDIVMVDRSQRRAVLVDVTIPHDENLVKAEKDKLSKYLDLAFEITAMWDVDSTIIVPIVVSANGLIAKSLDQYLKRLSLDGWVKGQIQRAVVLDTARIVRRFLTLQP

SEQ ID NO: 5901 - protein, 1215 aa, Erannis defoliaria
MITRSKSTQAGNDNNARPPPPPAPSSPSASSGDDEFHTPRESSASSSGSDVSGPRTPAPRPPARRGRPPLPARLGPAGQPASRPALAAGGVVRRMRWSQINNENCMRAYYGATEGGINLSAYRVRMLPLFQALEPTVTVSAQRLSDQVRAIQRLNLLDQSLLDRLRLEAHSARPTPASTRDSHVASSAPTLASVPTSAATLATPADPVVDEGDCTSMIVSSQVSEQLRRTLEDAIGQYRFALNSRPRLPRLPTHRRNLALMGALNALLAPYLRASEDLTDTHSILYCGAIAACRVARVKFPDTNRAPRPAGDVPAWQLRIERRISTFRTLIAKLICFSRGNNRPRVMRFVTQAFAGTGIRPQQYMANVTERIDYLKQKVYAWANRIRRYRERVDRYWQNRLFQSDQRKVYRNWEGNEQRVSDGQLPDASAMTNFWRGIWSVPVEHTEGDWMRVVERECESIEPMGSILIDPVDVSCAIRTAQNWKSPGPDGLHNFWIKWFRCSHDRLATQFQEAFELGSLPSFMTTGVTFLLHKSGSTTEPKNYRPITCLPTIYKLLTSILSTKINAHIVANNVLAPAQNGCRVGSRGTKELLLIDMAISQQVRRNKGALSAAWIDYKKAYDSVPHSWLERILELYQIDTTLKSFLGACMRQWTTVLRQPGGGNGSSDSQDLIRIERGIFQGDSLSPSWFCLALNPLSTLLKDSGLGYRLRRGGEVISHLLYMDDLKLFAPKHQDLLELLKTTQVFSSAISMEFGVDKCAVMRVQRGKVVNSPDLQLSEIMTLRSLSEAETYKYLGMSESLGISVVDIKKSVKERFFCRLTKVLNSLLSGGNKARAFNGWVMPLLIYSFGILRWTQTELDALDRRVRQLLTAHRMLHPRSSVMRLYIPRKWGGRGFLNAKNLHNREVCSLRDYFLNNECGMHRDVVTVDKGLTPLSLANENWRTPSVLSTDDRKEVWKSKELHGRFYRVLSGPDVDLLASVNWLRFGDLFGETEGFACAIADEVIKTNNYRKYIMKDGTVDICRACHRPGESLRHIISGCSHLANGEYLHRHNQVARIIHQQLALQYGLVESEVPYYKYAPAPVLENGRALLYWDRSIITDRTIVANKPDIVMVDRSQRRAVLVDVTIPHDENLVKAEKDKLSKYLDLAFEITAMWDVDSTIIVPIVVSANGLIAKSLDQYLKRLSLDGWVKGQIQKAVVLDTARIVRRFLTLQP

SEQ ID NO: 5902 - protein, 955 aa, Biston betularia
MGALNALLAPYLRASEDLTDTHSILYCGAIAACRVARVKFPDTNRAPRPAGGVPAWQLRIERRISTFRALIAKLICFSRGNNRPRVMRFVTQAFAGTGIRPQHYLASVTERIDYLKQKVYAWANRIRRYRERADRYWQNRVFQSDQRKVYRDWEGTGQRVSDRQLPDTSVMTEFWRGIWSLPVEHTEGDWMRVVERECESIESMGSVLIDPVDVSCAIRTAQNWKSPGPDGLHNFWIKWIRCSHDRLATQFQEALELGSLPCFMTTGVTFLLHKTGSTTEAKNYRPITCLPTIYKLLTSILRTKINAHVVANNVLAPAQNGCRVGSRGTKELLLIDMTISQQVRRNKGALSTAWIDYKKAYDSVPHSWLERVLELYKIDTTLKSFLGACMRQWTTVLRQPGSGDGSSEPQDLIRIERGIFQGDSLSPLWFCLALNPLSTLLKESGLGHRLRRGGEVISHLLYMDDLKLFAPKRPDLMELLKTTQVFSNAIKMEFGVDKCAVMHVQRGEVVNCPDLQLSETMTFRSLSEAETYKYLGMSESLGIAVVDIKRSVKERFFCRLTKVLNSFLSGGNKVRAFNGWVMPLLIYSFGILRWTQTELDALDRRVRQQLTTHRMLHPRSSVMRLYIPRKLGGRGFLSAKNLHNREVCSLRDYFRDNECGMHRDVVAVDKGLTPLSLANENWRKPSVLSTEDRKEVWKSKQLHGRFYRVLTGPDVDMLASVNWLRFGDLFGETEGFACAIADEVIKTNNYRKYIMKDGTVDICRACHRPGESLRHIISGCSHLANGEYLHRHNQVARIIHQQLALQYGLVESEVPYYKYAPAPVLENGRALLYWDRSIITDRTIVANKPDIVVVDRAQRRAVLVDITIPHDENLVKAEKDKLSKYLDLAHEITAMWDVDSTIIVPIVVTVNGLIAKSLDQHLERLSLDGWVKGQLQKAVILDTARIVRRFLTLQP

SEQ ID NO: 5903 - protein, 1215 aa, Biston betularia
MWTRSRTAAASGLHDAHIPSPPAPSTPSASSGDEEFATPLATSASSSSSDVSGPRTPAPPPPARRGRPPLPARLGPAGQSASRSALAAGGVVRRMRWSQTNNENCMRAYYGATEGGINLSAYRVRMLPLFQALEPTVAVSTQRLSDQVRAIQRLQLLDQSVLDRLRLEALPARPTPVSTRDSPVASSAPTLVSVPTSMATLATPTDPVVDVGECTSMAVCSQVSEHLRRTLEDAICQYRFAPDSRPRLPRLPTHRQNLALMGALNALLAPYLRASEDLTDTHSILYCGAIAACRVARVKFPDTNRAPRPAGGVPAWQLRIERRISTFRTLIAKLICFSRGNNRPRVMRFVTQAFAGTDIRPQHYLASVTERIDYLKQKVYAWANRIRRYRERADRYWQNRVFQSDQRKVYRDWEGTGQRVSDRQLPDTNVMTEFWRGIWSLPVEHTEGDWMRVVERECESIESMGSVLIDPVDVSCAIRTAQNWKSPGPDGLHNFWIKWIRCSHDRLATQFQEALELGSLPCFMTTGVTFLLHKTGSTTEAKNYRPITCLPTIYKLLTSILRTKINAHVVANNVLAPAQNGCRVGSRGTKELLLIDMTISQQVRRNKGALSTAWIDYKKAYDSVPHSWLERVLELYKIDTTLKSFLGACMRQWTTVLRQPGSGDGSSEPQDLIRIERGIFQCDSLSPLWFCLALNPLSTLLKESGLGHRLRRGGEVISHLLYMDDLKLFAPKRPDLMELLKTTQVFSNAIKMEFGVDKCAVMHVQRGEVVNCPDLQLSETMTFRSLSEAETYKYLGMSESLGIAVVDIKRSVKERFFCRLTKVLNSLLSGGNKVRAFNGWVMPLLIYSFGILRWTQTELDALDRRVRQQLTTHRMLHPRSSVMRLYIPRKLGGRGFLSAKNLHNREVCSLRDYFRDNECGMHRDVVAVDKGLTPLSLANENWRKPSVLSTEDRKEVWKSKQLHGRFYRVLTGPDVDMLASVNWLRFGDLFGETEGFACAIADEVIKTNNYRKYIMKDGTVDICRACHRPGESLRHIISGCSHLANGEYLHRHNQVARIIHQQLALQYGLVESEVPYYKYAPAPVLENGRAMLYWDRSIITDRTIVANKPDIVVVDRAQRRAVLVDITIPHDENLVKAEKDKLSKYLDLAHEITAMWDVDSTIIVPIVVTVNGLIAKSLDQHLKRLSLDGWVKGQLQKAVILDTARIVRRFLTLQP

SEQ ID NO: 5904 - protein, 1215 aa, Biston betularia
MWTRSRTAAASGLHDAHIPSPPAPSTPSASSGDEEFATPLATSASSSSSDVSGPRTPAPPPPARRGRPPLPARLGPAGQSASRSALAAGGVVRRMRWSQTNNENCMRAYYGATEGGINLSAYRVRMLPLFQALEPTVAVSTQRLSDQVRAIQRLQLLDQSVLDRLRLEALPARPTPVSTRDSPVASSAPTLVSVPTSMATLATPTDPVVDVGECTSMAVCSQVSEHLRRTLEDAICQYRFAPDSRPRLPRLPTHRRNLALMGALNALLAPYLRASEDLTDTHSILYCGAIAACRVARVKFPDTNRAPRPAGGVSAWQLRIERRISTFRTLIAKLICFSRGNNRPRVMRFVTQAFAGTDIRPQHYLASVTERIDYLKQKVYAWANRIRRYRERADRYWQNRVFQSDQRKVYRDWEGTGQRVSDRQLPDTSVMTEFWRGIWSLPVEHTEGDWMRVVERECESIESMGSVLIDPVDVSCAIRTAQNWKSPGPDGLHNFWIKWIRCSHDRLATQFQETLELGSLPCFMTTGVTFLLHKTGSTTEAKNYRPITCLPTIYKLLTSILRTKINAHVVANNVLAPAQNGCRVGSRGTKELLLIDMTISQQVRRNKGALSTAWIDYKKAYDSVPHSWLERVLELYKIDTTLKSFLGACMGQWTTVLRQPGSGDGSSEPQDLIRIERGIFQGDSLSPLWFCLALNPLSTLLKESGLGHRLRRGGEVISHLLYMDDLKLFAPKRPDLMELLKTTQVFSNAIKMEFGVDKCAVMHVQRGEVVNCPDLQLSETMTFRSLSEAETYKYLGMSESLGIAVVDIKRSVKERFFCRLTKVLNSFLSGGNKVRAFNGWVMPLLIYSFGILRWTQTELDALDRRVRQQLTTHRMLHPRSSVMRLYIPRKLGGRGFLSAKNLHNREVCSLRDYFRDNECGMHRDVVAVDKGLTPLSLANENWRKPSVLSTEDRKEVWKSKQLHGRFYRVLTGPDVDMLASVNWLRFGDLFGETEGFACAIADEVIKTNNYRKYIMKDGTVDICRVCHRPGESLRHIISGCSHLANGEYLHRHNQVARIIHQQLALQYGLVESEVPYYKYAPAPVLENGRALLYWDRSIITDRTIVANKPDIVVVDRAQRRAVLVDITIPHDENLVKAEKDKLSKYLDLAHEITAMWDVDSTIIVPIVVTVNGLIAKSLDQHLKRLSLDGWVKGQLQKAVILDTARIVRRFLTLQP

SEQ ID NO: 5905 - protein, 1211 aa, Apotomis turbidana
MITRSQARRNTAAHTQNARPTPPPVSSSSSPSSSGDEFATAPDTSESSDVVRGPPPPPPRPPARRGRPPLPACLGPTGQSAPTTAPATGGVVRRMRWTQVMNENCMRAYYGATEGGINLSAYRDRMLPLFLAFDPTITVSAQRLSDQVRFIQRRKLLDDATLDRLRLEVLAARAASTPARDTPATSPVPVPAPNLVPGVRQTDPEADGEDDASSVSTQANEQLRRALEEAIERYRSTPESRPRLPRLPMHKRNLALMGALDALLDPYLRASEDLADTHSIMYCGAIAACRVARVRFPDTDRAPRTAGGVPAWQVRIERRISSFRTFIAKLICFRGGNNRPRVMRYVTQAFAGTGTRPCDYMACVTERIDYLKQKVYAWASRIRRYRERVDRFQQNRLFQSDQRKVYRKWEGTNQCVSDGQLPDPTAMINFWRSIWSVPVEHTEGEWMNVVRRECEPIEAMGAVTISPDDVSCAARKAQNWKSPGPDGLHNFWIKWFRSSHERLATQFQDALELGSLPSFMTTGVTFLLHKSGSTTEAKNYRPITCLPTLYKLLTSILKTKINSHIVANNVLAFSQNGCRVGSRGTKELLLIDTTICQQVRRNRGSLSTAWIDYKKAYDSVPHSWLERILELYKIDTALRSLLGACMRQWTTVLRQPGGGDGPPGPRDLIRIERGIFQGDSLSPLWFCLALNPLSTLLKDSGLGCRLRRGGEVISHLLYMDDLKLYAPKRQDLVELLEVTENFSSAIKMEFGVDKCAVMHVQRGKVVNSANLQLSETMTLRSISEVETYKYLGMSQSLGIADGDIRQALKERFFCRLTKVLNSLLSGGNKARAFNTWVMPLLTYSFGILRWTQTELDALDTRVRQLLTTHRMRHPRSSVMRMYIPRKCGGRGFLNAKDLHNREVCSLREYFLNNECGIHRDVVAVDKGLTSLSLANENWRRPKVLSTDDRRAVWKSKELHGRFYKALTGPDVDLLASVNWLRFGDLFGETEGFFCAIADEVMMTNNYRRYILKDGTVDICRACRRPGESLRHIISGCSHLANGEYLHRHNQVARIIHQQLALQYGLVGSEVPYYKYAPMPVLENGRATLYWDRSIITDRTIVANKPDIVLVDRSKRQAVLVDITIPHDENLVKAEKDKLSKYLDLAHEVTAMWDVDSTIIVPIVVSANGLIAKSLDKHLKRLSLDGWIKGQIQKAVLLDTARIVRRFLSLQP

SEQ ID NO: 5906 - protein, 1206 aa, Notocelia uddmanniana
MNTRLRSRAEQRARLPSPPAPSSSSPSSSDDEFATAPDSSESSSDERGPSPPPPQTSARRGRRPLPARLGPTGHSAPPTAPAAGGVVRRMRWTQEMNENCMRAYFGATEGETNLSAYRVRMLPLFQALEPTITVSAQRLSDQVRVIQRNKRLDDLTLDRLRLEALSARAAPTSARDLPATSPAPVPAPNTAPRAPRVDPSADGDCADQSVSTQAHEQLRRALDEAITRYRSTPNSRPRLPRLPVNRRNLALMGALNDLLDPYLRASDDLIDTHSIMYCGAIAACRVARVKFPDADRATRTAGGVPAWQVRIERRINTFRTLIAKLICFRGGNNRPRVMRFVNQAFAGTGVRPRDYMACVTERIDFLKQKVYAWASRIRRYRERVDRYQQNRLFQSDQRKVYRKWEGTDHRVCDGQRPGATAMVNFWRSIWSVPVEHTEGAWIGVVERDCESIEPMGSVTISPEDVSCAIRTAPNWKSPGPDGLHNFWLKWFRCSHERLATQFQQALELGSLPPPLTTGVTSLLYKSGSTTEAKNYRPITCLPTLYKLLTSILRAKINTHIVTNNILAPAQNGCRVGSRGTKELLLIDMTICQRVRRNRGTLSASWIDYKKAYDSVPHSWLRRILELYKVDAALRSFLSTCMGQWTTVLRQPGGGDGPSGPQDSIRIERGIFQGDSLSPLWFCLALNPLSTLLQDSGLGCQLRRGGEVISHLLYMDDLKLFAPNRQDLLELLKTTEVFSSAIKMEFGVDKCAVMHVQRGKVVNSTNLQLSETMSLRSLSEAETYKYLGMSQALGIEGEGIKQAVKERFFCRLTKVLNSFLSGGNKARAFNAWVMPLLTYSFGILRWTQTELDALDRRVRVLLTAHRMLHPRSSVMRLYIPRKCGGRGFLNAKDLHNREVCSLRDYFLNSECGMHRDVVAVDASFTPLSMANENWRRFKVLSTEDRKAEWKSKELHGRFYRALTGPDVDLLASVNWLRFGDLFGETEGFVCAIADEVIMTNNYRKYILKDGTVDICRACRRPGESLRHIISGCSHLANGEYLHRHNLVARIIHQQLALSYGLVDFEVPYYKYLPAPVLENGRATLYWDRSIITDRTIVANKPDIVLIDRSKRQAVLVDITIPHDENLVKAEKDKVSKYLDLAHEVTAMWDVDSTIIVPIVVSANGLIAKSLDQHLKRLSLDGWVKGQIQKAVLLDTARMVRRFLSLSP

SEQ ID NO: 5907 - protein, 1230 aa, Notocelia uddmanniana
MITRSQTRRVQASQQSARPSPSPASSSSASASSEEEFATAPDTSSSSSDECGPPPPPPRSPARRGRPPLPARLGPAGHPVPHTAPATGGVVRRMQWSPSMNENCMRAYYGATDGGTNLSAYRVRMLPLFQALEPAISVSAQRLSDQVRVIQRLKRLDDATLDRLRLEALSARAASVSARNPPATLPAPVPAPDTAPGASRVDPSADGDCADQSVSTQAHDQLRRALDEAITRYRSTPNSRPRLPRLPVNRRNLALMGALNDLLDPYLRASDDLIDTHSIMYCGAIAACRVARVKFPDADRATRTAGGVPAWQVRIERRINTFRTLIAKLICFRGGNNRPRVMRFVNQAFAGTGVRPRDYMACVAERIDFLKQKVYAWASRIRRYRERVDRYQQNRLFQSDQRKVYRKWEGTDHRVCDGQRPDATAMVNFWRSIWSVPVEHTEGAWIGVVERDCESIEPMGSVTISPEDVSCAIRTAPNWKSPGPDGLHNFWLKWFRCSHERLATQFQQALELGSLPPPLTTGVTSLLYKSGSTTEAKNYRPITCLPTLYKLLTSILRAKINTHIVTNNILAPAQNGCRVGSRGTKELLLIDMTICQRVRRNRGTLSASWIDYKKAYDSVPHSWLRRILELYKVDAALRSFLSACMGQWTTVLRQPGGGDGPSGPQDSIRIERGIFQGDSLSPLRFCLALNPLSTLLRDSGLGCQLRRGGEVISHLLYMDDLKLFAPNRQDLLELLKTTEVFSSAIKMEFGVDKCAVMHVQRGKVVNSTNLQLSETMSLRSLSEAETYKYLGMSQALGIEGEGIKQAVKERFFCRLTKVLNSFLSGGNKARAFNAWVMPLLTYSFGILRWTQTELDALDRRVRVLLTAHRMLHPRSSVMRLYIPRKCGGRGFLNAKDLHNREVCSLRDYFLNSECGMHRDVVAVDASFTPLSMANENWRRFKVLSTEDRKAEWKSKELHGRFYRALTGPDVDLLASVNWLRFGDLFGETEGFVCAIADEVIMTNNYRKYILKDGTVDICRACRRPGESLRHIISGCGHLANGEYLHRHNLVARIIHQQLALSYGLVDFKVPYYKYLPAPVLENGRATLYWDRSIITDRTIVANKPDIVLIDRSKRQAVLVDITIPHDENLVKAEKDKVSKYLDLAHEVTAMWDVDSTIIVPIVVSANGLIAKSLDQHLKRLSLDGWVKGQIQKAVLLDTARIVRRFLSGGGRQRPNHRWLRPCLAAGGTLG

SEQ ID NO: 5908 - protein, 1210 aa, Boloria selene
MITRSQARKTAVHTSNARPTPPPVSSFSSPSSSGDEFATAPDTSESSDDERGTPPPPPRTPARRGRPPLPARLGPTGQPAPTMAPATGGVVRRMRWTQVMNENCMRAYYGATEGGINLSAYRDRMLPLFLTFDPTIAVSAQRLSDQVRFIQRRKLLDDATLDRLRLEVLAARAAFTPALGPPATSPAPVPTPNLVPGVPLADHGAGEEECASGVNTQANEQLRRALEEAIGRYRSTPESRPRIPRLPMHKRNLALMGAMDALLDPYLRASEDLTDTHSIMYCGAIAVCRAARVRFPDTDRAPRTTAGVPAWQIRIERRVGSFRTLIAKLICFREGNSRPRVMRYVTQAFAGTGTRPCDYMACVTERIDYLKQKVCAWASRIRRYRVRVDRFQQNRLFQSDQRKVYRRWEGTNQCVGDGQLPDPSAMTNFWRSIWSVPVEHTESEWMNVVGRECESIETMGAVTISPDDVGCAARATQNWKSPGPDGLHNFWIKWFRSSHERLAAQFQHALELGSLPSFMTTGVTFLLHKSGSTTEAKNYRPITCLPTLYKLLMSILRTKINTHIIANNVLAFSQNGCRVGSRGTKELLLIDTTICQQVRRNRGSLSAAWIDYKKAYDSVPHSWLERVLVLYKIDTTLRSLLGACMRRWTTVLYQPGGGDGLPGPQDLIRIKRGIFQGDSLSPLWFCLALNPLSTLLKDSGLGCRLRRGGEVISHLLYMDDLKLYASKRQDLVELLKVTETFSSAIKMEFGVDKCAIMHVQRGKVVNSANLQLSDIISLRSISEVETYKYLGMSQSLGIADGDIRQALRQRFFCRLTKVLNSLLSGGNKARAFNAWVMPLLTYSFGILRWTQTELDALDTRVRQLLTVYRMRHPRSSVMRLYIPRKCGGRGFLNAKDLHNREVCSLREYFLNKECGIHRDVVAVDKGLTSLSLANENWRRPKVLSTDDRRTVWKCKELHGRFYKALTGPDVDLLASVNWLRFGDLFGETEGFVCAIADEVMMTNNYRRYILRDGTVDICRACRRPGESLRHIISGCSHLANGEYLHRHNQVARIIHQQLALRYGLVGSEVPYYKYAPLPVLQNGRATLYWDRSIITDRTIVANKPDIVLVDRSKRQAMLVDIAIPHDENLVKAEKDKLSKYLDLAHEVTAMWDVDSTIIVPLVVSANGLIAKSLDKHLKRLSLDGWIKGQMQKAVLLDTARIVRRFLSLQP

SEQ ID NO: 5909 - protein, 1208 aa, Crocallis elinguaria
MITRSRTKKAGTASARKTPPPASSSPSSSSGVEYGTPLDTSASSDEDGPPSPPPPPPPARRGRPPLPARLGPAGHSVPRAAPATGGIVRRMRWTSDMNENCMRAYYGATEGGTNMSAYRDRMLPLFQTLEPSVAVSTQRLSDQVRAIQRLKLLDESVLDRLRLEALPIRATSASARDLSVAPPVPAPLPAPSSVATPIDPVVDEDDCANISVSAQVNEQLRRALEDAILEYQYTPDSRPRLPRLPTNRRNLALMGALNVLLAPYLRASENLFDTHSIMYCGAIAVCRVARVKFPDADRAPRPAGSAPAWQVRIERRINTFRTLIAKLICFSRGNNRPRVMRFVNQAFAGTGIRPQNYMAGVTERIDFLKQKIYAWVNRIRRYRERVDRYHQNRLFESDQRKVYRNWEGTDQRVSDGQLPDTNAMINFWRGIWSVPVEHTEGDWMRTVEQSCESIETMGSVTIDPIDVSCAIRTAQNWKSPGPDGLHNFWIKWIRCSHECLAVQFQEALELGSLPRFLTTGVTSLLHKSGSTTEAKNYRPITCLPTLYKLLTSILRAKINSHVVANNILAPAQNGCRVGSRGTKELLLIDTAICQQVRRNKGALSTAWIDYKKAYDSVPHSWLERILELYKIDTTLRTFLSTCMRQWTTVLRQPGSGNSPSGPENFIKIERGIFQGDSLSPLWFCLALNPLSTLLRDSRLGCKLRREGEIISHLLYMDDLKLLAPKSPDLMKLLKITEIFSSAIKMEFGVDKCAVMHVQRGKVVNSDNLQLSETMTLRSLSEAETYRYLGMSQSLGITVGDIKQSVKERFFCRLTKVLNSLLSGGNKARAFNGWVMPLLIYSFGILKWTQTELDSLDRRVRQLLTYHRMLHPRSSVMRLYIPRKWGGRGFLNAKTLHNREVCSLREYFLNNECGMHRDVVAVDRNLTPLSLANENWHKPVVMTTEDRKEVWKGKELHGRFYRALTGSDVDLLASVNWLRFGDLFGETEGFVCAIMDEVIKTNNYRKYIMKDGTVDICRACRRPGESLRHIISGCSHLANGEYLHRHNLVARIIHQQIAFQYGLVESEVPYYKYAPAPVLENGRALLYWDRSIITDRTIVANKPDIVLVDRSQRRAVLVDITVPHDENLVKAEKDKLSKYLDLAHEVTAMWNVDSTIIVPIVVSANGLVAKSLDQHLKRLSLDGWIKGRMQKAVLLDTARIVRRFLTLQP

SEQ ID NO: 5910 - protein, 1208 aa, Crocallis elinguaria
MITRSRTKKAGTASAQQTPPPASSSPSSSSGVEYGTPLDTSVSSDEDGPPSPPPPPPPARRGRPPLPARLGPVGHSVPRAAPATGGIVRRMRWTSDMNENCMRAYYGATEGGTNMSAYRDRMLPLFQTLEPSVAVSTQRLSDQVRAIQRLKLLDESVLDRLRLEALPIRATSASTRDLSVAPPVPAPLPAPSSVATRIDPVVDEDDCANISVSTQVNEQLRRALEDAILEYQYTPDSRPRLPRLPTNRRNLALMGALNVLLAPYLRASENLFDTHSIMYCGAIAVCRVARVKFPDADRAPRTAGNAPAWQVRIERRINTFRTLIAKLVCFSRGNNRPRVMRFVNQAFAGTGIRPQNYMAGVTERIDFLKQKIYAWVNRIRRYRERVDRYHQNRLFESDQRKVYRNWEGTDQRVSDGQMPDTNAMINFWRGIWSVPVEHTEGDWMRTVEQSCESIETMGSVTIDTIDVSCAIRTAQNWKSPGPDGLHNFWIKWIRCSHECLAVQFQEALELGSLPCFLTTGVTSLLHKSGSTTEAKNYRPITCLPTLYKLLTSILRAKINSHVVANNILAPAQNGCRVGSRGTKELLLIDTAICQQVRRNKGALSTAWIDYKKAYDSVPHSWLERILELYKIDTTLRSFLSTCMRQWTTVLRQPGSGNSPSGPENFIKIERGIFQGDSLSPLWFCLALNPLSTLLRDSRLGCKLRREGEIISHLLYMDDLKLLAPKSPDLMKLLKITEIFSSAIKMEFGVDKCAVMHVQRGKVVNSDNLQLSETMTLRSLSEAETYRYLGMSQSLGIAVGDIKQSVKERFFCRLTKVLNSVLSGGNKARAFNGWVMPLLIYSFGILKWTQTELDSLDRRVRQLLTYHRMLHPRSSVMRLYIPRKWGGRGFLNAKTLHNREVCSLREYFLNNECGMHRDVVAVDRNLTPLSLANENWRKPVVMTTEDRKDVWKGKELHGRFYRALTGSDVDLLASVNWLRFGDLFGETEGFVCAIMDEVIKTNNYRKYIMKDGTVDICRACRRPGESLRHIISGCSHLANGEYLHRHNLVARIIHQQIALQYGLVESEVPYYKYAPAPVLENGRALLYWDRSIITDRTIVANKPDIVLVDRSQRRAVLVDITVPHDENLVKAEKDKLSKYLDLAHEVTAMWNVDSTIIVPIVVSANGLVAKSLDQHLKRLSLDGWIKGRMQKAVLLDTARIVRRFLTLQP

SEQ ID NO: 5911 - protein, 1120 aa, Pammene fasciana
MRWTPSMNENVMRAYYGATEGGTNLCAYRDRMLPLFQALEPTINTTAQRLSDQVRVIQRLQRLDDATLDRLRLEALSARAASTSARDPPAMSLDPMPASDLASGAPRIDPSADEEEIANQSVSSTANEQLRRTLEEAITQYRSTNITRPRLPRLPMNRRNLALMGALNDLLDPLLRTSKDLDDTHSIMYCGAIAACRVARVKFPDAERAPRTAGGVPAWQVRIERRINSFRTLIAKLICFRGGNNRPRVMRFVHQAFAGTDIEPRDYMANVTERIDFLKQKVYAWASRIRRYRERVDRFRQNRLFQSDQRKVYRRWEEADPRVSDVRLPDATAMTDFWRSIWSAPVEHTEGEWMSIVERECETIEPMGAITISPDDVSCAIRTAQNWKSPGPDGLHNFWLKWFRCSHSRLATQFQQALELGSLPPSLTTGVTFLLYKSGSTTEAKNYRPITCLPTLYKLLTSILRAKINAHMVANNILASAQNGCRVGSRGTKELLLIDMTICQRVRRNRGALSAAWIDYKKAYDSVPHSWLERILELYKIDAALRSFLGACMRQWTTVLRQPGGGDDPPGPQDFIRIERGIFQGDSLSPLWFCLALNPLSTLLKDSGLGCRLRREGEVISHLLYMDDLKLFAPNNRDLLELLKTTEVFSNSIKMEFGVDKCAVMHVQRGKVVNSTNLQLSETMTFRSISESETYKYLGMSQSLGIEDAGIKQALRERFFGRLTKVLNSLLSGGNKVRAFNAWVMPLLTYSFGILRWTQTELDALDRRVRLLLTTHRMLHPRSSVMRLYIPRKCGGRGFLNAKNLHNREVYNLRNYFLNNECEMHRDVVAIDKGLTPLSLANENWRKPVVLSTEDRKAVWKSKELHGRFYGALTGPDVDLLASVNWLRFGDLFGETEGFACAIADEVIMTNNYRRYILKDGTVDICRACRRPGESLRHIISGCSHLANGEYLHRHNLVARIIHQQLALLYGLVDHEVPYYKYTPAPVLENGRATLYWDRSIITDRTIVANKPDIVVIDRPQRRAMLVDITVPCDVNLVKAEKDKSSKYLDLAHEVTAMWEVDSAIIVPIVVSANGLIAKSLDQHLERLSLRGCGWIKGQIQKAVILDTARIVRRFLSLRP

SEQ ID NO: 5912 - protein, 1210 aa, Pammene fasciana
MITRSKARAATTHARPPSPLASSSSPSTSSSSDDFETAPDTDESSDESGPPPPPPQPPARRGRPPLPARLGPTGHPVPPRAPAAGGIVRRMRWTCSMNENVMRAYYGATEGGTNLCAYRARILPLFQALEPTIDTTTQRLSDQVRVIQRLKRLDDATLDRLRLEALSARAASTSARDPPATSPDPMPAPDLASGAPRIDPSADEEYIASQSVSSTANEQLRRTLEEAITQYRSTNIPRPRLPRLPMNRRNLALMGALNDLLDPILRTSKDLDDTHSIMYCGAIAACRVARIKFPDAERAPRTAGGVPAWQVRIERRINSFRTLIAKLICFRGGNNRPRVMRFVYQAFAGTDIEPRDYMANITERIDFLRQKVYAWASRIRRYRERVDRFRQNRLFQSDQRKVYRRWEEADPRVSDVRLPDATAMTDFWRSIWSAPVEHTEGEWMNVVERECESIEPMGAITISPDDVSCAIRTSQNWKSPGPDGLHNFWLKWCRCSHSRLATQFQHALELGSLPPSLTTGVTFLLYKSGSTTEAKNYRPITCLPTLYKLLTSILRAKINAHMVANNILASAQNGCRVGSRGTKELLLIDMTICQRVRRNRGALSAAWIDYKKAYDSVPHSWLERILELYKVDAALRSFLGACMRQWTTVLRQPGGGDDPPGPQDFIRIERGIFQGDSLSPLWFCLALNPLSTLLKDSGLGCRLRKEGEVISHLLYMDDLKLFAPNNRDLLELLKTTEVFSSSIKMEFGVDKCAVMHVERGKVVNSTNLQLSETMTFRSISESETYKYLGMSQSLGIEDVGIKQALKERFFGRLTKVLNSLLSGGNKVRAFNAWVMPLLTYSFGILRWTQTELDALDRRVRLLLTTHRMLHPRSSVMRLYIPRKCGGRGFLNAKNLHNREVYNLRNYFLNNECGMHRDVVTVDKNLTPLSLANENWRKPVVLSTEDRKAVWKSKELHGRFYGALTGPDVDLLASVNWLRFGDLFGETEGFACAIADEVIMTNNYRRYILKDGTVDICRACRRPGESLRHIISGCSHLANGEYLHRHNLVARIIHQQLALLYGLVAHEVPYYKYTPAPVLENGRATLYWDRSIITDRTIVANKPDIVVIDRPQRRAMLVDITVPCDVNLVKAEKDKSSKYLDLAHEVTAMWEVDSAIIVPIVVSANGLIAKSLDQHLERLSLRGCGWIKGQIQKAVILDTARIVRRFLSLRP

SEQ ID NO: 5913 - protein, 1209 aa, Pammene fasciana
MITRSRTKAASTNARPPSSPASSVSSPSSSGDEFATAPDTSESSDECGPPPPPPRPPARRGRPPLPARLGLAGHPVPPRAPAAGGIVRRMRWTPAMNENVMRAYYGATEGGTNLSAYRDRILPLFQALEPTIDTTAQRLSDQVRAIQRLKRLDDATLDRLRLEALSARVDSTSVRDPPATSPDPMPVPDLASGAPRIDPSADEEYIASQSMSSTANEQLRRTLEEAITQYRSTNIPRPRLPRLPMNRRNLALMGALNDLLDPILRTSKDLDDTHSIMYCGAIAACRVARVKFPDAERAPRTAGGVPVWQVRIERRINSFRTLIAKLICFRGGNNRPRVMRFVHQAFAGTGIEPRDYMANVTERIDFLKQKVYAWASRIRRYRERVDRFRQNRLFQSDQRKVYRRWEEADPRVSDVRLPDATAMTDFWRSIWSAPVEHTEGEWMSVVERECESIEPMGAITISPDDVSCAIRTAQNWKSPGPDGLHNFWLKWFRCSHSRLATQFQQALELGSLPPSLTTGVTFLLYKSGSTTEAKNYRPITCLPTLYKLLTSILRAKINAHIVANNILASSQNGCRVGSRGTKELLLIDMTICQRVRRNRGALSAAWIDYKKAYDSVPHSWLERILELYKVDAALRSFLGACMRQWTTVLRQPGGGDDPPDPHDFIRIERGIFQGDSLSPLWFCLALNPLSTLLKDSGLGCRLRREGEVISHLLYMDDLKLFAPNNRDLMELLKTTEVFSSSIKMEFGVDKCAVMHVQRGKVVNSTNLQLSETMTFRSISESETYKYLGMSQSLGIEDAGIKQALRERFFGRLTKVLNSLLSGGNKVRAFNAWVMPLLTYSFGILRWTQTELDALDRRVRLLLTTHRMLHPRSSVMRLYIPRKCGGRGFLNAKNLHNREVYNLRNYFLNNECGMHRDVVAVDKSLTPLSLANENWRKPVVLSTEDRKAVWKSKELHGRFYGALTGPDVDLLASVNWLRFGDLFGETEGFACAIADEVIMTNNYRRYILKDGTVDICRACRRPGESLRHIISGCSHLANGEYLHRHNLVARIIHQQLALLYGLVDHEVPYYKYTPAPVLENGRATLYWDRSIITDRTIVANKPDIVIIDRSQRRAMLVDITVPCDVNLVMAEKDKSSKYLDLAHEVTAMWEVDSAIIVPIVVSANGLIAKSLDQHLERLSLRGCGWIKGQIQKAVILDTARIVRRFLSLRP

SEQ ID NO: 5914 - protein, 1032 aa, Pammene fasciana
MFFKTITLFIPDLASGAPRVDPSADEEEIATQSVSSTANEQLRRTLEEAITQYRSTNIPRPRLPRLPMNRRNLALMGALNDLLDPFLRTSKDLDDTHSIMYCGAIAACRVARVKFPDAERAPRTAGGVPAWQVRIERRINSFRTLIAKLICFRGGNNRPRVMRFVHQAFAGTDIEPRDYMANVTERIDFLKQKVYAWASRIRRYRERVDRFRQNRLFQSDQRKVYRRWEEADPRVSDVRLPDATAMSDFWRSIWSAPVEHTEGEWMSVVERECETIEPMGAITISPDDVSCAIRTAQNWKSPGPDGLHNFWLKWFRCSHSRLATQFQQALELGSLPPSLTTGVTFLLYKSGSTTEAKNYRPITCLPTLYKLLTSILRAKINAHMVANNILASAQNGCRVGSRGTKELLLIDMTICQRVRRNRGALSAAWIDYKKAYDSVPHSWLERILELYKIDAALRSFLGACMRQWTTVLRQPGGGDDPPGPQDFIRIERGIFQGDSLSPLWFCLALNPLSTLLKDSGLGCRLRREGEVISHLLYMDDLKLFAPNNRDLLELLKTTEVFSSSIKMEFGVDKCAVMHVQRGKVVNSTNLQLSETMTFRSISESETYKYLGMSQSLGIEDAGIKQALRERFFGRLTKVLNSLLSGGNKVRAFNAWVMPLLTYSFGILRWTQTELDALDRRVRQLLTTHRMLHPRSSVMRLYIPRKCGGRGFLNAKNLHNREVYNLRNYFLNNECGMHRDVVAIDKGLTPLSLANENWRKPVVLSTEDRKAVWKSKELHGRFYGALTGPDVDLLASVNWLRFGDLFGETEGFACAIADEVIMTNNYRRYILKDGTVDICRACRRPGESLRHIISGCSHLANGEYLHRHNLVARIIHQQLALLYGLVDHEVPYYKYTPAPVLENGRATLYWDRSIITDRTIVANKPDIVVIDRPQRRAMLVDITVPCDVNLVKAEKDKSSKYLDLAHEVTAMWEVDSAIIVPIVVSANGLIAKSLDQHLERLSLRGCGWIKGQIQKAVILDTARIVRRFLSLRP

SEQ ID NO: 5915 - protein, 1113 aa, Pammene fasciana
MRTSCAPTMGLQRGGTNLCAYRVRLLPLFQALEPTTNVTAQRLSDQVRVIQRDKRLDDSTLDRLRLEALSAHAASTSARDPPATAPDPMPAPDLASGAPRVDPSADEEEIATQSVSSTANEQLRRTLEEAITQYRSTNIPRPRLPRLPMNKRNLALMGALNDLLDPFLRTSKDLDDTHSIMYCGAIAACRVARVKFPDAERAPRTAGGVPAWQVRIERRINSFRTLIAKLICFRGGNNHPRVMRFVHQAFAGMDIEPREYMANVTERIDFLKQKVYAWASRIRRYRERVDRFRQNRLFQSDQRKVYRRWEEADPRVSDVRLPDATAMTDFWRSIWSAPVEHTEGEWMSVVERECETIEPMGAITISPDDVSCAIRTAQNWKSPGPDGLHNFWLKWFRCSHSRLATQFQQALELGSLPPSLTTGVTFLLYKSGSTTEAKNYRPITCLPTLYKLLTSILRAKINAHMVANNILASAQNGCRVGSRGTKELLLIDMTICQRVRWNRGALSAAWIDYKKAYDSVPHSWLERILELYKIDAALRSFLGACMRQWTTVLRQPGGGDDPPGPQDFIRIERGIFQGDSLSPLWFCLALNPLSTLLKDSGLGCRLRRESEVISHLLYMDDLKLFAPNNRDLLELLKTTEVFSSSIKMEFGVDKCAVMHVQRGKVVNSRNLQLSETMTFRSISESETYKYLGMSQSLGIEDAGIKQALRERFFGRLTKVLNSLLSGGNKVRAFNAWVMPLLTYSFGILRWTQTELDALDRRVRQLLTTHRMLHPRSSVMRLYIPRKCGGRGFLNAKNLHNREVYNLRNYFLNNECGMHRDVVAIDKGLTPLSLANENWRKPVVLSTEDRKAVWKSKELHGRFYGALTGPDVDLLASVNWLRFGDLFGETEGFACAIADEVIMTNNYRRYILKDGTVDICRACRRPGESLRHIISGCSHLANGEYLHRHNLVARIIHQQLALLYGLVDHEVPYYKYTPAPVLENGRATLYWDRSIITDRTIVANKPDIVVIDRPQRRAMLVDITVPCDVNLVKAEKDKSSKYLDLAHEVTAMWEVDSAIIVPIVVSANGLIAKSLDQHLERLSLRGCGWIKGKIQKAVILDTARIVRRFLSLRP

SEQ ID NO: 5916 - protein, 1118 aa, Ennomos quercinarius
MRWTPIMNENCMRAYYGAVEGGSNLTAYRDRMLSLFQNLEPSVSVSAQRLSDQVRAIHRCKLLDQSTLDRLRLETLPIRATSPSPRVLPAALPDPGPIMGPPPVTPRGDPAIDAEESASDSVSTQANEQLRSALEDAILRYRSTPTSRPRLPRLPTNRRNLVLMGALNTLLAPYLRTSEDLVDTHSILYCGAIAACRVARVKFPDTDRAPRPADGAPAWQVRIEKRITTFRTLIAKLVCFSRGNHRPRVMRFVTQAFAGTGIRPQDYMASVTERIDFLKQKVYAWASRIRRYRERVDRYQQNRLFQSDQRKVYRNWEGTGQRVVDGQLPDANAMNEFWRSIWSVPVEHTEGDWMRVVERVCEPIESMGSITIDPEDISCAIRTAQNWKSPGPDGLHNFWIKWIRCSYPCLAIQFQEALEAGSLPSFMTTGVTFLLHKSGSTTEAKNYRPITCLPTLYKLLTSILRTKINSHIVANNILAPAQNGCRVGSRGTKELLLIDTAICQQVRRNRGALSTAWIDYKKAYDSVPHSWLERILELYKIDATLRSFLSACMRQWTTVLRQPGGGESVSDPQDFIRIERGIFQGDSLSPLWFCLALNPLSTLLGDSGLGYRLRRGGEIISHLLYMDDLKLFAPQRPQLIELLKITENFSNSINMEFGVDKCAVMHVHRGKVVNSTNLQLSETMTLRSLSESETYRYLGMSESLGISVGDVKRTVKERFFCRLTKVLNSLLSGGNKTRAFNGWVMPLLMYSFGILRWTQTELDALDRTVRQLLTSHRMLHPRSSVMRLYIPQKWGGRGLLNAKTLHNREVCSLQDYFLNNECGMHRDVVAVDKGLTPLSLANENWRKPVVLSTEDRRDVWKGKELHGRFYRALTGPDVDLHASVNWLRFGDLFGETEGFVCAIADEVIKTNNYRKYIMKDGTVDICRACRRPGESLRHIISGCSHLANGEYLHRHNLVARIIHQQLALQYGLVESEVPYYKYTPGPVLENGRALLYWDRSIITDRTIVANKPDIVLIDRSRRRAVLVDITIPHDENLVKAEKDKLSKYLDLAHEVTAMWNVDSTSIVPIVVSANGLIAKSLDQHVERLSLDGWIKGQIQKAVLLDTARIVRRFLTLQP

SEQ ID NO: 5917 - protein, 1208 aa, Ennomos quercinarius
MITRSRTRKAETQSARLPPPPAPSSPSSSSGDEYGTPPDTTASSDEDGPPSPPPPPPPARRGRPPLPARLGPAGQPAPRAAPATGGIVRRMRWTQAMNENCMRAYYGATEGGSSLTAYRDRMLSLFQDLEPAVAVSAQRLSDQVRAIQRCKMLDEPTLDRLRLEALPIRATSPSPRVLPAALPDPGPIMGPLPVTPRGDPAIDGEESASDSVSTQANEQLRSALEDAILRYRSTPTSRPRLPRLPTNRRNLVLMGALNTLLAPYLRTSEDLVDTHSILYCGAIAACRVARVKFPDTDRAPRPADGAPAWQVRIEKRITTFRTLIAKLVCFSRGNHRPRVMRFVTQAFAGTGIRPQDYMACVTERIDFLKQKVYAWASRIRRYRERVDRYQQNRLFQSDQRKVYRNWEGTGQRVVDGQLPDANATNEFWRSIWSVPVEHTEGDWMRVVERVCEPIESMGSITIDPEDISCAIRTAQNWKSPGPDGLHNFWIKWIRCSYPCLAIQFQEALEAGSLPSFMTTGVTFLLHKSGSTTEAKNYRPITCLPTLYKLLTSILRTKINSHIVANNILAPAQNGCRVGSRGTKELLLIDTAICQQVRRNRGALSTAWIDYKKAYDSVPHSWLERILELYKIDATLRSFLSACMRQWTTVLRQPGGGESVSDPQDFIRIERGIFQGDSLSPLWFCLALNPLSTLLGDSGLGYRLRRGGEIISHLLYMDDLKLFAPQRPQLIELLKITENFSNSINMEFGVDKCAVMHVHRGKVVNSTNLQLSETMTLRSLSESETYRYLGMSESLGISVGDVKRTVKERFFCRLTKVLNSLLSGGNKTRAFNGWVMPLLMYSFGILRWTQTELDALDRKVRQLLTSHRMLHPRSSVMRLYIPRKWGGRGFLNAKTLHNREVCSLRDYFLNNECGMHRYVVAVDKGLTPLSLANENWRKPVVLSTEDRRDVWKGKELHGRFYRALTGPDVDLHASVNWLRFGDLFGETEGFVCAIADEVIKTNNYRKYIMKDGTVDICRACRRPGESLRHIISGCSHLANGEYLHRHNLVARIIHQQLALQHGLVESEVPYYKYTPGPVLENGRALLYWDRSIITDRTIVANKPDIVLVDRSQRRAVLVDITIPHDENLVKAEKDKLSKYLDLAHEVTAMWNVDSTSIVPIVVSANGLIAKSLDQHLEKLSLDGWIKGQIQKAVLLDTARIVRRFLTLQP

SEQ ID NO: 5918 - protein, 1208 aa, Ennomos quercinarius
MITRSRTRKAETQSARLPPPPAPSSPSSSSGDEYGTPPDTTASSDEDGPPSPPPPPPPARRGRPPLPARLGPAGQPAPRAAPATGGIVRRMRWTQAMNENCMRAYYGATEGGSSLTAYRDRMLSLFQDLEPAVAVSAQRLSDQVRAIQRCKMLDEPTLDRLRLEALPIRATSPSPRVLPAALPDPGPIMGPLPVTPRGDPAIDGEESASDSVSTQANEQLRSALEDAILRYRSTPTSRPRLPRLPTNRRNLVLMGALNTLLAPYLRTSEDLVDTHSILYCGAIAACRVARVKFPDTDRAPRPADGAPAWQVRIEKRITTFRTLIAKLVCFSRGNHRPRVMRFVTQAFAGTGIRPQDYMACVTERIDFLKQKVYAWASRIRRYRERVDRYQQNRLFQSDQRKVYRNWEGTGQRVVDGQLPDANATNEFWRSIWSVPVEHTEGDWMRVVERVCEPIESMGSITIDPEDISCAIRTAQNWKSPGPDGLHNFWIKWIRCSYPCLAIQFQEALEAGSLPSFMTTGVTFLLHKSGSTTEAKNYRPITCLPTLYKLLTSILRTKINSHIVANNILAPAQNGCRVGSRGTKELLLIDTAICQQVRRNRGALSTAWIDYKKAYDSVPHSWLERILELYKIDATLRSFLSACMRQWTTVLRQPGGGESVSDPQDFIRIERGIFQGDSLSPLWFCLALNPLSTLLGDSGLGYRLRRGGEIISHLLYMDDLKLFAPQRPQLIELLKITENFSNSINMEFGVDKCAVMHVHRGKVVNSTNLQLSETMTLRSLSESETYRYLGMSESLGISVGDVKRTVKERFFCRLTKVLNSLLSGGNKTRAFNGWVMPLLMYSFGILRWTQTELDALDRKVRQLLTSHRMLHPRSSVMRLYIPRKWGGRGLLNAKTLHNREVCSLRDYFLNNECGMHRDVVAVDKGLTPLSLANENWRKPVVLSTEDRRDVWKGKELHGRFYRALTGPDVDLHASVNWLRFGDLFGETEGFVCAIADEVIKTNNYRKYIMKDGTVDICRACRRPGESLRHIISGCSHLANGEYLHRHNLVARIIHQQLALQYGLVESEVPYYKYTPGPVLENGRALLYWDRSIITDRTIVANKPDIVLVDRSQRRAVLVDITIPHDENLVKAEKDKLSKYLDLAHEVTAMWNVDSTSIVPIVVSANGLIAKSLDQHLERLSLDGWIKGQIQKAVLLDTARIVRRFLTLQP

SEQ ID NO: 5919 - protein, 1207 aa, Ennomos quercinarius
MITRSRTKQAEQSARLPPPPVPSSSSSSSGDEYGTPPDTTASSDEDGPPSPPPPPPPARRGRPPLPARLGPAGQPAPRPAPATGGIVRRMRWTQAMNENCMRAYYGATEGGSSLTAYRYRMLSLFQNLEPAVAVSAQRLSDQVRAIQRCKMLDQSTLDRLRLEALPTRATSPSPRVLPAALPDPGPITGPPPVTPRGDPAIGGEESVSDSVSTQANEQLRSALEDAILRYRSTPTSRPRLPRLPTNRRNLVLMGALNTLLAPYLRTSEDLVDTHSILYCGAIAACRVARVKFPDTDRAPRPADGAPAWQVRIEKRITTFRTLIAKLVCFSRGNHRPRVMRFVTQAFTGTGIRPQDYMACVTKRIDFLKQKVYAWASRIRRYRERVDRYQQNRLFQSDQRKVYRNWERTGQRVVDGQLPDANAMSEFWRSIWSVPVEHTEGDWMRVVERACEPIESMGSITIDPEDISCAIWTAQNWKSPGPDGLHNFWIKWILCSYPCLAIQFQEALEAGSLPSFMTTGVTFLLHKSGSTTEAKNYRPITCLPTLYKLLTSILRTKINSHIVANNVLAPAQNGCRVGSRGTKELLLIDTAICQQIQRNRGALSTAWIDYKKAYDSVPHSWLERILELYKIDATLRSFLSTCMRQWTTVLRQPGRGESVSDPQDLIRIERGIFQGDSLSPLWFCLALNPLSTLLKDSGLGYRLRRGGETISHLLYMDDLKLFTPQRPQLIELLKITENFSNSIKMEFGVDKCAVMHVHGGKVVNSTNLQLSETMTLRSLSESETYRYLGMSESLGISVGDVKRTVKERFFCRLTKVLNSLLSGGNKVRAFNGWVMPLLIYSFGILRWTQTELDALDRKVRQLLTSHRMLHPRSSVMRLYIPRKWGGRGFLNAKTLHNREVCSLREYFLNNECGMHRDMVAVDKGLTPLSLANENWRKPVVLSTEDRRDVWKGKELHGRFYRALTGPDVDLHASVNWLRFGDLFGETEGFVCAIADEVIKTNNYRKYIMKDGTVDICRACRRPGVSLRHIISGCSHLANGEYLHRHNLVARIIHQQLALQYGLVESEVPYYKYTPGPVLENGRALLYWDRSIITDRTIVANKPDIVLVDRPQRRAVLVDITIPHDENLVKAEKDKLSKYLDLAHEVTAMWSVDSTSIVPIVVSANGLIAKSLDQHLERLSLNGWIKGQIQKAVLLDTARIVRRFLTLQP

SEQ ID NO: 5920 - protein, 1208 aa, Cydia splendana
MITRSKARSQASTTANARPPPSPVSSVSSQSSGDEFATAPDTSESSDECGPPPPPPRPPARRGRPPLPARLGPAGHLAPPTAPAAGGVVRRMRWSQTMNENVMRAYYGATEGGTDLCAYRVRMLPLFQALEPTIDVTAQRLSDQVRVIQRLKRLDDSTLDRLRLEALSARATSTSVRDPPATSPDPVPAPDQAPEAPRVDLCADEEEFAQSVSSTANEQLRRTLDEAITQYRSTPNTRPRLPRLPMNRHNLALMGALNALLEPYLRTSKDLDDTHAIMYCGAIAACRVARVKFPDSERAPRTAGGAPAWQIRIERRISSFRTLIAKLICFRGGNNRPRVMRFVNQAFAGTDIRPRDYMANITERIDFLKQKVYAWANRIRRYRERVDRFQQNRLFQSDQRKMYRKWEETNPRASDSQPPDATVMNDFWRSIWSVPVGHTEGSWMSVVERECESIEPMGAVTISPDDVSCAIRTAQNWKSPGPDGLHNFWLKWFRCSHSCLAAQFQQALELGSPPPSLTTGVTFLLYKSGSTTEAKNYRPITCLPTLYKLLTSILRAKINAHIVANNILASAQNGCRVGSRGTKELLLIDMTICQQIRRNRGALSAAWIDYKKAYDSVPHSWLERILELYKVDTALRAFLSACMRQWTTVLRQPGGGDESPGPQDFIRIERGIFQGDSLSPLWFCLALNPLSTLLKDLELGCRLRRGGEVISHLLYMDDLKLFAPNSQDLVELLKTTEVFSNAINMEFGVDKCAVMHVQRGKVVNSTNLQLSETMSFRSISESETYKYLGMSQSLGIEEEGIRRSVKERFFSRLTKVLNSLLSGGNKVRAFNAWVMPLLTYSFGILRWTQTELDALDRRVRSLLTTHRMLHPRSSVMRLYIPRKCGGRGFLNAKDLHNREVYNLRNYFLNNECGMHRDVVAVDRNLTPLSLANENWRKPVVLSTADRKAAWESKVLHGRFYKALTGPDVDLLASVNWLRFGDLFGETEGFACAIADEVMMTNNYRKYILKDGTVDICRACRRPGESLRHIISGCSHLANGEYLHRHNLVARIIHQQLALLYGLVDREVPYYKYSPAPVLENGRATLYWDRSIITDRTIVANKPDIVLIDRSQRRTVLVDVTIPHDENLVKAEKDKSSKYLDLAHEITAMWDVDSTIIVPIVVSANGLIAKSLDQHLERLSLGGWIKGQMQKAVILDTARIVRRFLTLRP

SEQ ID NO: 5921 - protein, 1209 aa, Cydia splendana
MQTRSKTRAQLASPRNARPPPPSASSVSSQSSSGDEFATAPDTSESSYECGPPPPPSRPPARRGRPPLSARLGPAGHPAPPTAPAAGGVVRRMRWSQTINENVMRAYYGATEGGTNLCAYRVRMLPLFQALEPTIDVTAQRLSDQVRVIQRQKRLDDSTLDRLRLEALSARAASTSARDPPATSPDPVPAPDQAPGAPRVDLSADEEEFAQSVGSTANEQLRRTLDEAITRYRSTPDTRPRLPRLPMNRHNLALMGALNALLEPYLRTSKDLDDTHAIMYCGAIAACRVARVKFPDSERAPRTAGGAPAWQIRIERRISSFRTLIAKLICFRGGNNRPRVMRFVNQAFVGTDIRPRDYMANVTERIDFLKQKVYAWANRIRRYRERVDRFQQNRLFQSDQRKMYRKWEETNLRASDSRPPDATVMNDFWRSIWSVPVGHTEGSWMSVVERECESIEPMGAVTISPDDVSCAIRTAQNWKSPGPDGLHNFWLKWFRCSHSYLAAQFQQALELGSLPPSLTTGVTFLLYKSGSTTEAKNYRPITCLPTLYKLLTSVLRAKINAHIVANNILASAQNGCRVGSRGTKELLLIDMTICQQIRRTKGALSAAWIDYKKAYDSVPHSWLGRVLELYKVDAALRAFLSACMGQWTTVLRQPGGGDNRPGPQDFIRIERGIFQGDSLSPLWFCLALNPLSTLLKDLGLGCRLRREGEVISHLLYMDDLKLFAPNTQGLLELLKTTEVFSSAINMEFGVDKCAVMHVQRGKVVNSTNLQLSETMSFRSISESETYKYLGMSQSLGIEDEGIRRSVKERFFSRLTKVLNSLLSGGNKVRAFNAWVMPLLTYSFGILRWTQTELDALDRRVRSLLTTHRMLHPRSSVMRLYIPRKCGGRGFLNAKDLHNREVYNLRNYFLNNECGMHRDVVAVDRNLTPLSLANENWRKPVVLSTADRKAAWESKALHGRFYKALTGPDVDLLASVNWLRFGDLFGETEGFACAIADEVMMTNNYRKYILKDGTVDICRACRRPGESLRHIISGCSHLANGEYLHRHNLVARIIHQQLALLYGLVDREVPYYKYLPAPVLENGRATLYWDRSIITDRTIVANKPDIVLIDRSQRRAVLADVTIPHDENLVKAEKDKSSKYLDLAHEITAMWDVDSTIIVPIVVSANGLIAKSLDQHLERLSLGGWIKGQMQKAVILDTARIVRRFLTLRP

SEQ ID NO: 5922 - protein, 869 aa, Cydia splendana
MRFVNQAFAGTDIRPRDYMANITERIDFLKQKVYAWANRIRRYRERVDRFQQNRLFQSDQRKMYRKWEETNPRASDSQPPDATVMNDFWRSIWSVPVGHTEGSWMSVVERECESIEPMGAVTISPDDVSCAIRTAQNWKSPGPDGLHNFWLKWFRCSHSCLAAQFQQALELGSPPPSLTTGVTFLLYKSGSTTEAKNYRPITCLPTLYKLLTSILRAKINAHIVANNILASAQNGCRVGSRGTKELLLIDMTICQQIRRNRGALSAAWIDYKKAYDSVPHSWLERVLELYKVDTALRAFLSACMRQWTTVLRQPGGGDESPGPQDFIRIERGIFQGDSLSPLWFCLALNPLSTLLKDLELGCRLRRGGEVISHLLYMDDLKLFAPNSQDLVELLKTTEVFSNAINMEFGVDKCAVMHVQRGKVVNSTNLQLSETMSFRSISESETYKYLGMSQSLGIEEEGIRRSVKERFFSRLTKVLNSLLSGGNKVRAFNAWVMPLLTYSFGILRWTQTELDALDRRVRSLLTTHRMLHPRSSVMRLYIPRKCGGRGFLNAKDLHNREVYNLRNYFLNNECGMHRDVVAVDRNLTPLSLANENWRKPVVLSTADRKAAWESKVLHGRFYKALTGPDVDLLASVNWLRFGDLFGETEGFACAIADEVMMTNNYRKYILKDGTVDICRACRRPGESLRHIISGCSHLANGEYLHRHNLVARIIHQQLALLYGLVDREVPYYKYSPAPVLENGRATLYWDRSIITDRTIVANKPDIVLIDRSQRRTVLVDVTIPHDENLVKAEKDKSSKYLDLAHEITAMWDVDSTIIVPIVVSANGLIAKSLDQHLERLSLGGWIKGQMQKAVILDTARIVRRFLTLRP

SEQ ID NO: 5923 - protein, 1209 aa, Cydia splendana
MQTRSKTRAQLASPRNARPPPPSASSVSSQSSSGDEFATAPDTSESSDECGPPPPPSRPPARRGRPPLSARLGPAGHPAPPTAPAAGGVVRRMRWSQTINENVMRAYYGATEGGTNLCAYRVRMLPLFQALEPTIDVTAQRLSDQVRVIQRQKRLDDSTLDRLRLEALSARAASTSARDPPATSPDPVPAPDQAPGAPRVDLSADEEEFAQSVGSTANEQLRRTLDEAITRYRSTPDTRPRLPRLPMNRHNLALMGALNALLEPYLRTSKDLDDTHAIMYCGAIAACRVARVKFPDSERAPRTAGGAPAWQIRIERRISSFRTLIAKLICFRGGNNRPRVMRFVNQAFVGTDIRPRDYMANVTERIDFLKQKVYAWANRIRRYRERVDRFQQNRLFQSDQRKMYRRWEETNLRASDSRPPDATVMNDFWHSIWSVPVGHTEGSWMSVVERECESIEPMGAVTISPDDVSCAIRTAQNWKSPGPDGLHNFWLKWFRCSHSYLAAQFQQALELGSLPPSLTTGVTFLLYKSGSTTEAKNYRPITCLPTLYKLLTSILRAKINAHIVANNILASAQNGCRVGSRGTKELLLIDMTICQQIRRTRGALSAAWIDYKKAYDSVPHSWLGRVLELYKVDAALRAFLSACMGQWTTVLRQPGGGDDRPGPQDFIRIERGIFQGDSLSPLWFCLALNPLSTLLKDLGLGCRLWREGEVISHLLYMDDLKLFAPNTQGLLELLKTTEVFSSAINMEFGVDKCAVMHVQRGKVVNSTNLQLSETMSFRSISESETYKYLGMSQSLGIEDEGIRRSVKERFFSRLTKVLNSLLSGGNKVRAFNAWVMPLLTYSFGILRWTQTELDALDRRVRSLLTTHRMLHPRSSVMRLYIPRKCGGRGFLNAKDLHNREVYNLRNYFLNNECGMHRDVVAVDRNLTPLSLANENWRKPVVLSTADRKAAWESKALHGRFYKALTGPDVDLLASVNWLRFGDLFGETEGFACAIADEVMMTNNYRKYILKDGTVDICRACRRPGESLRHIISGCSHLANGEYLHRHNLVARIIHQQLALLYGLVDREVPYYKYLPAPVLENGRATLYWDRSIITDRTIVANKPDIVLIDRSQRRAVLADVTIPHDENLVKAEKDKSSKYLDLAHEITAMWDVDSTIIVPIVVSANGLIAKSLDHHLERLSLGGWIKGQMQKAVILDTARIVRRFLTLRP

SEQ ID NO: 5924 - protein, 1213 aa, Cydia splendana
MKTMITRSQRRAAESTNNARPPPPPTPSSSSSTSSSGDEFATPPDTDGFSDEGGPPPPPPRPPARRGRPPLPARLGPAGHPAPPTAPATGGIVRRMRWTRTMNENVMRAYYGATEGGTQLSAYRSRILPLFQALEPTITVSEQRLSDQVRVIQRLKRLDDATLDRLRQEALSARADSTSVRDLPATSPDPVPAPDLAPAAPRVDFCTDEGDFASQNVSTTANEQLRRTLEEAITQYRATTNSRPRLPRLPMNRRNLALMGALNALLEPYLRTSKDLDDTHSIMYCGAIAACRVARVKFPDAERAPRNVGGVPAWQARIERRISSFRTLIAKLICFRGGNNRPRVMRFVNQAFAGTDIRPRDYMANVTERIDFLKQKVYAWANRIRRYRERVDRFQQNRLFQSDQRKVYRKWEETNLRTPDTQPPDATAMTDFWRSIWSVPVGHTEGSWMSVVERECESIEPMGAVTISPDDVSCAIRTAQNWKSPGPDGLHNFWLKWFRCSHSRLAAQFQQALELGSLPPSLTTGVTFLLYKSGSTTEAKNYRPITCLPTLYKLLTSILRAKINAHIVANNILASAQNGCRVGSRGTKELLLIDMTICQQIRRNKGALSAAWIDYKKAYDSVPHSWLGRVLELYKVDAALRAFLSTCMGQWTTVLRQPGGGDDRLGPQDFIRIERGIFQGDSLSPLWFCLALNPLSTLLKDLGLGCRLQREGEVISHLLYMDDLKLFAPNSQDLLELLKTTEVFSSAINMEFGVDKCAVMHVQRGRVVNSRNLQLSETMSFRSISESETYKYLGMSQSLGIEDEGIRRSVKERFFSRLTKVLNSLLSGGNKVRAFNAWVMPLLTYSFGILRWTQTELDALDRRVRSLLTAHRMLHPRSSVMRLYIPRKCGGRGFLNAKDLHNREVYNLRNYFLNNECGMHRDVVAVDRNLTPLSLANENWRKPVVLSTADRKAAWESKVLHGRFYKALTGPDVDLLASVNWLRFGDLFGETEGFACAIADEVMMTNNYRKYILKDGTVDICRACRRPGESLRHIISGCSHLANGEYLHRHNLVARIIHQQLALLYGLVDREVPYYKYLPAPVLENGRATLYWDRSIITDRTIVANKPDIVIIDRSQRRAVLVDITIPHDENLVKAEKDKSSKYLDLAHEITAMWDVDSTIIVPIVVSVNGLIAKSLDQHLERLLLGGWIKGQMQKAVILDTARIVRRFLSLRP

SEQ ID NO: 5925 - protein, 1113 aa, Cydia splendana
MRWSQTMNENVMRAYYGATEGGTDLCAYRVRMLPLFQALEPTIDVTAQRLSDQVRVIQRLKRLDDSTLDRLRLEALSARAASTSVRDPPATSPDPVPAPDQAPEAPRVDLCADEEEFAQSVSEQLRRTLDEAITQYRSTPNTRPRLPRLPMNRHNLALMGALNALLEPYLRTSKDLDDTHAITYCGAIAACRVARVKFPDSERAPRTAGDAPAWQIRIERRISSFRTLIAKLICFRGGNNRPRVMRFVNQAFAGTDIRPRDYMANITERIDFLKQKVYAWANRIRRYRERVDRFQQNRLFQSDQRKMYRKWEETNPSASDSQPPDATVMNDFWRSIWSVPVGHTEGSWMSVVERECESIEPMGAVTISPDDVSCAIRTAQNWKSPGPDGLHNFWLKWFRCSHSCLAAQFQQALELGSPPPSLTTGVTFLLYKSGSTTEAKNYRPITCLPTLYKLLTSILRAKINAHIVANNILASAQNGCRVGSRGTKELLLIDMTICQQIRRNRGALSAAWIDYKKAYDSVPHSWLERVLEMYKVDTALRAFLSACMRQWTTVLRQPGGGDESPGPQDFIRIERGIFQGDSLSPLWFCLALNPLSTLLKDLELGCRLRRGGEVISHLLYMDDLKLFAPNSQDLVELLKTTEVFSNAINMEFGVDKCAVMHVQRGKVVNSTNLQLSETMSFRSISESETYKYLGMSQSLGIEEEGIRRSVKERFFSRLTKVLNSLLSGGNKVRAFNAWVMPLLTYSFGILRWTQTELDALDRRVRQLLTTHCMLHPRSSVMRLYIPRKCGGRGFLNAKNLHNREVYNLRNYFLNNECGMHRDVVAADKGLTPLSLANENWRKPVVLSTEDRKAVWKDKQLHGRFYKALMGPDVDLPASVNWLRFGDLFGETEGFACAIADEVIMTNNYRRYILKDGTVDICRACRRPGESLRHIISGCSHLANGEYLHRHNLVARIIHQQLALLYGLVDREVPYYKYSPALVLENGRATLYWDRSIITDRTIVANKPDIVLIDRSQRRTVLVDVTIPHDENLVKAEKDKSSKYLDLAHEITAMWDVDSTIIVPIVVSANGLIAKSLDQHLERLSLGGWIKGQMQKAVILDTARIVRRFLTLRP

SEQ ID NO: 5926 - protein, 1212 aa, Agriopis aurantiaria
MITRSRTKQADTKSARLPSPPASSSSPSTSSGEDEYHTTREASGSSSDTSGPGTPPPPPPARRGRPPLPARLGLVGHSATRPAPATGGVVRRMRWSTIMNEDCMRAYYRATEGGTNLSAYCARMLPLFQALQPTITVSAQRLSDQVRAIHRCKLLDDSVLDRLRQEELRARPIPVSTRDPPVASSAPTLASVPASVVTLAALADPVVDEGDLASGVSDQVREQLRGALEDAISQYRFTPDSRPRLPRLSTHRRNLALMGALNALLAPYLRASEDLVDTHSILYCGAIAACRVARVKFPDTNRAPRTAGGVPAWQVRIERRISTFRTLIAKLVCFRRGNNRPRVMRFVTQAFAGTDIRPQHYLANVTERIDYLKQKVYAWANRIRRYRERVDRYWQNRLFQSDQRKVYRGWEETDQRVSDGQLPDASAMINFWRGIWSMPVEHTEGDWMRVVERECESIEPMGSILIDSIDVSCAIRTAQNWKSPGPDGLHNFWIKWIRCSHDRLATQFQEALELGSLPSFMTTGVTFLLHKSGSTTEAKNYRPITCLPTIYKLLTSILRNKINAHIVANNVLAHAQNGCRVGSRGTKELLLIDTAISQQVRRNKGALSAAWIDYKKAYDSVPHSWLERVLELYKIDTTLKSFLGACMRQWTTVLRQPGGGDGAFGPQDLLRIERGIFQGDSFSPLWFCLALNPLSTLLRDSGLGYRLRRDGQVISHLLYMDDLKLFTPKRQDLVELLKITEVFSSAIRMEFGVDKCAVMHVQRGKVVNSPNLQLSEVMTLRSLSEAETYKYLGMSESLGISVENIKKSVKERFFCRLTKVLNSLLSGGNKVRAFNGWVMPLLIYSFGILRWTQTELDALDRRVRQLLTSHRMLHPRSSVMRLYIPRKWGGRGFLNAKNLHNREVCSLRDFFRNSESGMHRDVVAVDRGLTALSLANENWRKPSVLSIEDRRDVWKGKELHGRFYRALTGPDVDLLASVNWLRFGDLFGETEGFACAIADEVIKTNNYRKYIMKDGTVDICRACHRPGESLRHIISGCSHLANGEYLHRHNLVARIIHQQLALRYSLVESEVPYYKYAPAPVLENGRALLYWDRSIITDRTIVANKPDIVLVDRSQRRAVLVDITIPHDENLVKAEKDKLSKYLDLAHEVTAMWDVDSTIIVPIVVSVNGLIAKSLDQHLKRLSLDGWVKGQMQKAVILDTARIVRRFLTLQP

SEQ ID NO: 5927 - protein, 955 aa, Ennomos fuscantarius
MGALNTLLGPYLRTSEDLVDTHSILYCGAIAVCRVARVKFPDTDRAPRPADGAPAWQVRIEKRITTFRTLIAKLVCFSRGNHRPRVMRFVTQAFAGTGIRPQDYMACVTERIDFLKQKVYAWASRIRRYRERVDRYQMNRLFQSDQRKVYRDWEGTGQRVVDGQLPDANVMNEFWRSIWSVPVDHSEGDWIRVVKHVCEPIESMGSITIDPEDISCAIRTAQNWKSPGPDGLHNFWIKWIRCSYPCLAIQFQEALEAGSLPKFMTTGITFLLHKSGSTMEAKNYRPITCLPTLYKLLTSILRTKINSHITANNILASAQNGCRVGSRGTKELLLIDTAICQQVRRNGGALSTAWIDYKKAYDSVPHSWLKRVLELYKINATLRSFLSACMGQWTTVLRPPGGGDSVSDPQNFIRIERGIFQGDSLSPLWFCLALNPLSTLLGDSGLGYRLRRGGEIISHLLYMDDLKLFAPQRPQLMKLLKITENFSNSIKMEFGVDKCAVMHVHGGKVVNSTNLQLSETMTLRSLSESETYKYLGMSESLGISVGDVKQSVKERFFCRLTKVLNSLLSGGNKARAFNAWVMPLLMYSFGILRWTQTELDALDRKVRQVLTSHRMLHPRSSVMRLYIPRKWGGRGFLNAKNLHNREMYSLREYFLSNECGMHRDVVAVDKGLTALSLANENWRKPVVLSTDDRRDVWKGKELHGRFYRALTGPDVDLHASVNWLRFGDLFGETEGFVCAIADEVIKTNNYRKYIMKDGTVDICRACRRPGESLRHIISGCSHLANGEYLHRHNLVARIIHQQLALQYGLVESEVPYYKYTPGPVLENGRALLYWDRSIITDRTIVANKPDIVLIDRSQRRAVLVDIAIPHDENLVKAEKDKLSKYLDLAHEVTAMWSVDSTSIVPIVVSANGLIAKSLDQHLERLSLDGWIKGQIQKAVLLDTARIVRRFLTLEP

SEQ ID NO: 5928 - protein, 1208 aa, Ennomos fuscantarius
MILRSKTKTADNKCARLPPLPVSSSPSSSSGDEYATPPDTTASSDDDGLPSPPPPPPPARRGRPPLPARLGPAGQPAPRPAPATGGVVRRMRWTQTMNENCMRAYYGATEGGSSLTAYQDRMLSLFQELEPSISVSAQRLSDQVRAIHRCKLLDQSALDRLRLETLPIPATSPSPRVLSAALSDPGPIVGPPLVTPLGGPVIDGEESVSDSVSTQVNELLRSALEDAILRYRSTPTSRPRLPRLPTNRRNLVLMGALNTLLGPYLRTSEDLVDTHSILYCGAIAVCRVARVKFPDTDRAPRPADGAPAWQVRIEKRITTFRTLIAKLVCFSRGNHRPRVMRFVTQAFAGTGIRPQDYMACVTERIDFLKQKVYAWASRIRRYRERVDRYQMNRLFQSDQRKVYRDWEGTGQRVVDGQLPDANVMNEFWRNIWSVPVDHSEGDWIRVVKHVCEPIESMGSITIDPEDISCAIRTAQNWKSPGPDGLHNFWIKWIRCSYPCLATQFQEALEAGSLPKFMTTGITFLLHKSGSTTEAKNYRPITCLPTLYKLLTSILRTKINSHITANNILAPAQNGCRVGSRGTKELLLIDTAICQQVRRNRGALSTAWIDYKKAYDSVPHSWLRRVLELYKINATLRSFLSACMGQWTTILRQPGGGDSVSDPQNFIRIERGIFQGDSLSPLWFCLVLNPLSTLLGDSGLGYRLRRGGEIISHLLYMDDLKLFAPQRPQLMKLLKITENFSNSIKMEFGVDKCAVMHVHGGKVVNSTNLQLSETMTLRSLSESETYKYLGMSESLGISVGDVKQSVKERFFCRLTKVLNSLLSGGNKARAFNAWVMPLLMYSFGILRWTQTELDALDRKVRQVLTSHRMLHPRSSVMRLYIPRKWGGRGFLNAKNLHNREMYSLREYFLSNECGMHRDVVAVDKGLTPLSLANGNWRKPVVLSTDDRRDVWKDKELHGRFYRALTGPDVDLHASVNWLRFGDLFGETEGFVCAIADEVIKTNNYRKYIMKDGTVDICRACRRPGESLRHIISGCSHLANGEYLHRHNLVARIIHQQLALQYGLVESEVPYYKYTTGPVLENGRALLYWDRSIITDRTIVANKPDIVLIDRSQRRAVLVDIAIPHDENLVKAEKDKLSKYLDLAHEVTAMWSVDSTSIVPIVVSANGLIAKSVDQHLERLSLDGWIKGQIQKAVLLDTARIVRRFLTLQP

SEQ ID NO: 5929 - protein, 1215 aa, Hedya salicella
MQRYFTRSQNTRKISTAATPTHARPTPPPASSCSPSASSDDFATAPDTSESSDDECGPPPPPPRPPTRRGRPPLPARLGPAGHSAPPTAPATGGIVRRMRWSQANNENVMRAYYGATEGGTHLSAYRDRMLLLFQTFEPAIAASAQRLSDQVRAIQRRKLLDDATLDRLRLEVLAARAASTSSRNPPATSPVPAPALDLMPGAPRVDPDSDEGHCVSIVSTQANEQLRRTLEETIERYRFAPDSRPRLPRLPANKRNLALVGALNALLDPYLRASEDLADTHSIMYCGAIAACRVARVKFPDADRAPRTAGGVPAWQVRIQRRISTFRTLIAKLICFRGGNNRPRVMRYVAQAFAGTDVSSCDYMACVTERIDFLKQKVYAWASRIRRYRERVDRFQQNRLFQSDQRKVYRKWEGTDQRVTDGRLPDPTAMSNFWRSIWSVPVEHTEGEWMNVVERECEPIEAMGAVTISPDEVSCAARTTQNWKSPGPDGLHNFWVKWFRCSHERLATQFQQALELGSLPSFLTTGVTFLLYKSGSTTEAKNYRPITCLPTLYKLLTSILRAKINTHIVANNVLAFSQNGCRVGSRGTKELLLIDTTNCQQVRRSRGSLSAAWIDYKKAYDSVPHSWLERILELYKVDTALRSFLGACMRQWTTVLCQPGGRDARPAPQDFIRIKRGIFQGDSLSPLWFCLALNPLSTLLKDSGLGCRLRRGGEIISHLMYMDDLKLFAPKRPELVELLKVTDTFSSAIKMEFGVDKCAVMHVQRGKVVNSTNLELSETMSLRSLSETETYKYLGMSQALSIADGDIRQAVKERFFCRLTKVLNSLLSGGNKARAFNAWVMPLLTYSFGILRWTQTELDALDRRVRMLLTTHRMLHPRSSVMRLYIPRKCGGRGFLNAKDLHNREVCSLREYFLNNECGIHRDVVAVDKGLTPLSLANESWRRPTVLSTVDRKDVWKSKELHGRFYKALTGPDVDLLASVNWLRFGDLFGETEGFSCAIADEVIMTNNYRRYILKDGTVDICRACRRPGESLRHIMSGCSYLANGEYLHRHNQVARIIHQQLAVKYDLVGSEVPYYKYVPMPVLENGRATLYWDRSILTDRTIVANKPDIVLVDRSKRRAMLVDITIPNDENLVKAEKDKLSKYLDLAHEVTAMWDVDSTIIVPIVVSVNGLIAKSLDEHLKRLSLDGWIKGQIQKAVILDTARIVRRFLSVQP

SEQ ID NO: 5930 - protein, 1215 aa, Hedya salicella
MQRYFTRSQNTRKISTAATPTHARSTPPPASSCSPSASSDDFATAPDTSESSDDECGPPPPPPRPPARRGRPPLPARLGPAGHSAPPTAPATGGIVRRMRWSQANNENVMRAYYGATEGGTHLSAYRDRMLLLFQTFEPAIAASAQRLSDQVRAIQRRKLLDDATLDRLRLEVLAARAASTSSRNPPATSPVPAPALDLMPGAPRVDPDSDEGHCVSIVSTQANEQLRRTLEETIERYRFAPDSRPRLPRLPANKRNLALVGALNALLDPYLPASEDLADTHSIMYCGAIAACRVARVKFPDADRAPRTAGGVPAWQVRIERRISTFRTLIAKLICFRGGNNRPRVMRYVAQAFAGTDVSSCDYMACVTERIDFLKQKVYAWASRIRRYRERVDRFQQNRLFQSDQRKVYRKWEGTDQRVTDGRLPDPTAMSNFWRSIWSVPVEHTEGEWMNVVERECEPIEAMGAVTISPDDVSCAARTTQNWKSPGPDGLHNFWVKWFRCSHERLATQFQQALELGSLPSFLTTGVTFLLYKSGSTTEAKNYRPITCLSTLYKLLTSILRAKINTHIVANNVLAFSQNGCRVGSRGTKELLLIDTTICQQVRRSRGSLSAAWIDYKKAYDSVPHSWLERILELYKVDTALRSFLGACMRQWTTVLCQPGGRDARPAPQDFIRIKRGIFQGDSLSPLLFCLALNPLSTLLKDSGLGCRLRRGGEINSHQMYMDDLKLFAPKRPELEELLKVTDTFSSAIKMEFGVDKCAVMHVQRGKVVNSTNLELSETMSLRSLSETETYKYLGMSQALSIADGDIRQAVKERFFCRLTKVLNSLLSGGNKARAFNAWVMPLLTYSFGILRWTQTELDALDRRVRMLLTTHRMLHPRSSVMRLYIPRKCGGRGFLNAKDLHNREVCSLREYFLNNECGIHRDVVAVDKGLTPLSLANENWRRPTVLSTVDRKDVWKSKELHGRFYKALTGPDVDLLASVNWLRFGDLFGETEGFSCAIADEVIMTNNYRRYILKDGTVDICRACRRPGESLRHIMSGCSYLANGEYLHRHNQVARIIHQQLAVKYDLVGSEVPYYKYVPMPVLENGRATLYWDRSILTDRTIVANKPDIVLVDRSKRRAMLVDITIPHDENLVKAEKDKLSKYLDLAHEVTAMWDVDSTIIVPIVVSVNGLIAKSLDEHLKRLSLDGWIKGQIQKAVILDTARIVRRFLSVQP

SEQ ID NO: 5931 - protein, 1207 aa, Erannis defoliaria
MITRSKKAQQAAHTAQCTRPPPPPSCSSGSSSSDDEFVTPPDTSASSDENASPTPPPPRPPVRRGRPPLPARLGPVGHSAPQLALTVGGVVCRMRWSQHNNENCMRAYYGATEGGTNLSAYRVRMLPLFQALEPTITVSAQRLSDQVRAIQRLNLLDQSLLDRLRLETQSARPTPVSTRDIHVASSAPTLALVPTSAATLATSTDPVVDEGGCTGMSVSSQVSEQLRRALEDAIGQYRSTPNSRPRLPRLPTHRRNLALMGALNVLLAPYLWASEDLTDTHSILYCGAIAACRVACVKFPDTNRAPRTAGVVPAWQVRIERRISTFRTLIAKLICFSRGNNRPRVMRFVTQAFAGTGIRPQQYMASVTERIDYLKQKVYAWANRIRRYRERVDRYWQNRLFQSDQRKVYRNWEGAEQRVSDGHLPDASAMTNFWRSIWSVPVEHTEGDWMRIVERECEAIEPMGPILIDPVDVSCAIRTAQIWKSPGPDGLHNFWIKWFRCSHDRLATQFQEALELGSLPSFMTTGVTFLLHKSGSTTEPKNYRPITCLPTIYKLLTSILSTKINAHIVANNVLAPAQNGCKVGSRGTKELLLIDMAISQQVRRNKGALSAAWIDYKKAYDSVPHSWLERILELYQIDTTLKSFLGACMRQWTTVLRQPGGGNDSSDPEDLIRIERGIFQGDSLSPSWFCLALNPLSTLLKDSGLGYRLRRGGEVISHLLYMDDLKLFAPKHQDLLELLKTTKVFSSAIRMEFGVDKCAVMRVQRGKVVNSPDLQLSEIMTLRSLSEAETYKYLGMSESLGISVVDIKKSVKERFFCRLTKVLNSLLSGGNKARAFNGWVMPLLIYSFGILRWTQTELDALDRRVRQLLTAHRMLHPCSSVMRLYIPRKWGGRGFLNAKNLHNREVCSLRDYFLNNECGMHRDVVTVDKGLTPLSLANENWCRPSVLSTDDRKDVWKSKELHGRFYRALSGPDVDLLASVNWLRFGDLFGETEGFACAIADEVFKTNNYRKYIMKDGTVDICRACHRPGESLRHIISGCSHLANGEYLHRHNQVARIIHQQLALQYGLVESESAPVLENGRALLYWDRSIITDRTIVANKPDIVMVDRSQRRAVLVDVTIPHDENLLKAEKDKLSKYLDLAFEITAMWDVDSTIIVPIVVSANGLIAKSLDQYLKRLSLDGWVKGQMQKAVVLDTARIVRRFLTLQP

SEQ ID NO: 5932 - protein, 1213 aa, Erannis defoliaria
MITRSKKRNAAVQHARPIPPPVPSSSPSSSSPSEEEFHTCGTSSSSEDVSGPRTLTPPIPVRRGRPPLPARLGPAGQPASRPALAAGGVVRRMRWSQTNNENCMRAYYGATEGGTNLTAYRVRMLSLFQTLEPTVTVSAQRISDQVRAIQRLNLLDQPLLDRLRLEVQSARPTPASTRDLDVASSAPTLASVPTSAATLATSADPVLDEGDCTGMSVSTQVSEQLRRALEDAIGQYRFALNSRPRLPRLPTHRRNLALMGALNALLAPYLRASEDLTDTHSILYCGAIAACRVARVKFPDTNRAPRPAGDVPAWQLRIERRISTFRTLIAKLICFSRGNNRPRVMRFVTQAFAGTGIRPQQYMASVTERIDYLKQKVYAWANRIRRYRERVDRYWQNRLFQSDQRKVYRNWEGTEQRVSDGQLPDASAMTNFWRGIWSVPVEHTEGDWMRVVERECESIEPMGSILIDPVDVSCAIRTAQNWKSPGPDGLHNFWIKWFRCSHDRLATQFQEALELGSLPSFMTTGVTFLLHKSGSTTEPKNYRPITCLPTIYKLLTSILSTKINAHIVANNVLAPAQNGCRVGSRGTKELLLIDMAISQQVRRNKGALSAAWIDYKKAYDSVPHSWLERILELYQIDTTLKSFLGACMRQWTTVLRQPGGGNGSSDSQDLIRIERGIFQGDSLSPSWFCLALNPLSTLLKDSGLGYRLRRGGEVISHLLYMDDLKLFAPKHQDLLELLKTTQVFSSAIRMEFGVDKCAVMRVQRGKVVNSPDLQLSEIMTLRSLSEAETYKYLGMSESLGISVVDIKKSVKERFFCRLTKVLNSLLSGGNKARAFNGWMMPLLIYSFGILRWTQTELDALDRRVRQLLTAHRMLHPRSSVMRLYIPRKWAGRGFLNAKNLHNREVCSLRDYFLNNECGMHRDVVTVDKGLTPLSLANENWRRPSVISTDDRKEVWKSKELHGRFYRALTGPDVDLLASANWLRFGDLFGETEGFACAIADEVIKTNNYRKYIMKDGTVDICRACHRPGESLRHIISGCSHLANGEYLHRHNQVARIIHQQLALQYGLVESEVPYYKYAPAPVLENGRALLYWDRSIITDRTIVANKPDIVMVDRSQRRAVLVDVTIPHDENLVKAEKDKLSKYLDLAFEITAMWDVDSTIIVPIVVSANGLIAKSLDQYLKRLSLDGWVKGQIQRAVVLDTARIVRRFLTLQP

SEQ ID NO: 5933 - protein, 1215 aa, Erannis defoliaria
MITRSKSTQAGNDNNARPPPPPAPSSPSASSGDDEFHTPRESSASSSGSDVSGPRTPAPRPPARRGRPPLPARLGPAGQPASRPALAAGGVVRRMRWSQINNENCMRAYYGATEGGINLSAYRVRMLPLFQALEPTVTVSAQRLSNQVRAIQRLNLLDQSLLDRLRLEAHSARPTPASTRDSHVASSAPTLASVPTSAATLATPADPVVDEGDCTSMIVSSQVSEQLRRTLEDAIGQYRFALNSRPRLPRLPTHRRNLALMGALNALLAPYLRTSEDLTDTHSILYCGAIAACRVARVKFPDTNRAPRPAGDVPAWQLRIERRISTFRTLIAKLICFSRGNNRPRVMRFVTQAFAGTGIRPQQYMASVTERIDYLKQKVYAWANRIRRYRERVDRYWQNRLFQSDQRKVYRYWEGNEQRVSDGQLPDASAMTNFWRGIWSVPVEHTEGDWMRVVERECESIEPMGSILIDPVDVSCAIRTAQNWKSPGPDGLHNFWIKWFRCSHDRLATQFQEALELGSLPSFMTTGVTFLLHKSGSTTEPKNYRPITCLPTIYKLLTSILSTKINAHIVANNVLAPAQNGCRVGSRGTKELLLIDMAISQQVRRNKGALSAAWIDYKKAYDSVPHSWLERILELYQIDTTLKSFLGACMRQWTTVLRQPGGGNGSSDSQDLIRIERGIFQGDSLSPSWFCLALNPLSTLLKDSGLGYRLRRGGEVISHLLYMDDLKLFAPKHQDLLELLKTTQVFSSAISMEFGVDKCAVMRVQRGKVVNSPDLQLSEIMTLRSLSEAETYKYLGMSESLGISVVDIKKSVKERFFCRLTKVLNSLLSGGNKARAFNGWVMPLLIYSFGILRWTQTELDALDRRVRQLLTAHRMLHPRSSVMRLYIPRKWGGRGLLNAKNLHNREVCSLRDYFLNNECGMHRDVVTVDKGLTPLSLANENWRTPSVLSTDDRKEVWKSKELHGRFYRVLSGPDVDLLASVNWLRFGDLFGETEGFACAIADEVIKTNNYRKYIMKDGTVDICRACHRPGESLRHIISGCSHLANGEYLHRHNQVARIIHQQLALQYGLVESEVPYYKYAPAPVLENGRALLYWDRSIITDRTIVANKPDIVMVDRSQRRAVLVDVTIPHDENLVKAEKDKLSKYLDLAFEITAMWDVDSTIIVPIVVSANGLIAKSLDQYLKRLSLDGWVKGQIQKAVVLDTARIVRRFLTLQP

SEQ ID NO: 5934 - protein, 1215 aa, Biston betularia
MWTRSRTAAASGLHDAHIPSPPAPSTPSASSGDEEFATPLATSASSSSSDVSGPRTPAPPPPARRGRPPLPARLGPAGQSASRSALAAGGVVRRMRWSQTNNENCMRAYYGATEGGINLSAYRVRMLPLFQALEPTVAVSTQRLSDQVRAIQRLQLLDQSVLDRLRLEALPARPTPVSTRDSPVASSAPTLVSVPTSMATLATPTDPVVDVGECTSMGVCSQVSEHLRRTLEDAICQYRFAPDSRPRLPRLPTHRRNLALMGALNALLAPYLRASEDLTDTHSILYCGAIAACRVARVKFPDTNRAPRPAGGVPAWQLRIERRISTFRTLIAKLICFSRGNNRPRVMRFVTQAFAGTGIRPQHYLASVTERIDYLKQKVYAWANRIRRYRERADRYWQNRVFQSDQRKVYRDWEGTGQRVSDRQLPDTSVMTEFWRGIWSLPVEHTEGDWMRVVERECESIESMGSVLIDPVDVSCAIRTAQNWKSPGPDGLHNFWIKWIRCSHDRLATQFQEALELGSLPCFMTTGVTFLLHKTGSTTEAKNYRPITCLPTIYKLLTSILRTKINAHVVANNVLAPAQNGCRVGSRGTKELLLIDMTISQQVRRNKGALSTAWIDYKKAYDSVPHSWLERVLELYKIDTTLKSFLGACMRQWTTVLRRPGSGDGFSEPQDLIRIERGIFQGDSLSPLWFCLALNPLSTLLKESGLGHRLRRGGEVISHLLYMDDLKLFAPKRPDLMELLKTTQVFSNAIKMEFGVDKCAVMHVQRGEVVNCPDLQLSETMTFRSLSEAETYKYLGMSESLGIAVVDIKRSVKERFFCRLTKVLNSFLSGGNKVRAFNGWVMPLLIYSFGILRWTQTELDALDRRVRQQLTTHRMLHPRSSVMRLYIPRKLGGRGFLSTKNLHNREVCSLRDYFRDNECGMHRDVVAVDKGLTPLSLANENWRKPSVLSTEDRKEVWKSKQLHGRFYRVLTGPDVDMLASVNWLRFGDLFGETEGFACAIADEVIKTNNYRKYIMKDGTVDICRACHRPGESLRHIISGCSHLANGEYLHRHNQVARIIHQQLALQYGLVESEVPYYKYAPAPVLENGRALLYWDRSIITDRTIVANKPDIVVVDRAQRRAVLVDITIPHDENLVKAEKDKLSKYLDLAHEITAMWDVDSTIIVPIVVTVNGLIAKSLDQHLKRLSLDGWVKGQLQKAVILDTARIVRRFLTLQP

SEQ ID NO: 5935 - protein, 1215 aa, Biston betularia
MWTRSRTAAASGLHDAHIPSPPAPSTPSASSGDEEFATPLATSASSSNSDVSGPRTPAPPPPARRGRPPLPARLGPAGQSASRSALAAGGVVRRMRWSQTNNENCMRAYYGATEGGINLSAYRVRMLPLFQALEPTVAVSTQRLSDQVRAIQRLQLLDQSVLDRLRLEALPARPTPVSTRDSPVASSAPTLVSVPTSMATLATPTDPVVDVGECTSMAVCSQVSEHLRRTLEDAICQYRFAPDSRPRLPRLPTHRRNLALMGALNALLAPYLRASEDLTDTHSILYCGAIAACRVARVKFPDTNRAPRPAGGVPAWQLRIERRISTFRTLIAKLICFSRGNNRPRVMRFVTQAFAGTDIRPQHYLASVTERIDYLKQKVYAWANRIRRYRERADRYWQNRVFQSDQRKVYRDWEGTGQRVSDRQLPDTSVMTEFWRGIWSLPVEHTEGDWMRVVERECESIESMGSVLIDPVDVSCAIRTAQNWKSPGPDGLHNFWIKWIRCSHDRLATQFQEALELGSLPCFMTTGVTFLLHKTGSTTEAKNYRPITCLPTIYKLLTSILRTKINAHVVANNVLAPAQNGCRVGSRGTKELLLIDMTISQQVRRNKGALSTAWIDYKKAYDSVPHSWLERVLELYKIDTTLKSFLGACMRQWTTVLRQPGSGDGSSEPQDLIRIERGIFQGDSLSPLWFCLALNPLSTLLKESGLGHRLRGGGEVISHLLYMDDLKLFAPKRPDLMELLKTTQVFSNAIKMEFGVDKCAVMHVQRGEVVNCPDLQLSETMTFRSLSEAETYKYLGMSESLGIAVVDIKRSVKERFFCRLTKVLNSLLSGGNKVRAFNGWVMPLLIYSFGILRWTQTELDALDRRVRQQLTTHRMLHPRSSVMRLYIPRKLGGRGFLSAKNLHNREVCSLRDYFRDNECGMHRDVVAVDKGLTPLSLANENWRKPSVLSTEDRKEVWKSKQLHGRFYRVLTGPDVDMLASVNWLRFGDLFGETEGFACAIADEVIKTNNYRKYIMKDGTVDICRACHRPGESLRHIISGCSHLANGEYLHRHNQVARIIHQQLALQYGLVESEVPYYKYAPAPVLENGRALLYWDRSIITDRTIVANKPDIVVVDRAQRRAVLVDITIPHDENLVKAEKDKLSKYLDLAHEITAMWDVDSTIIVPIVVTVNGLIAKSLDQHLKRLSLDGWVKGQLQKAVILDTARIVRRFLTLQP

SEQ ID NO: 5936 - protein, 1215 aa, Biston betularia
MWTRSRTAAASGLHDAHIPSPPAPSTPSASSGDEEFATPLATSASSSSSDVSGPRTPAPPPPARRGRPPLPARLGPAGQSASRSALAAGGVVRRMRWSQTNNENCMRAYYGATEGGINLSAYRARMLPLFQALEPTVAVSTQRLSDQVRAIQRLQLLDQSVLDRLRLEALPARPTPVSTRDSPVASSAPTLVSVPTSMVTLATPTDPVIDAGECTSMGVCSQVSEHLRRTLEDAICQYRFAPDSRPRLPRLPTHRRNLALMGALNALLAPYLRASEDLTDTHSILYCGAIAACRVARVKFPDTNRAPRPAGGVPAWQMRIERRISTFRTLIAKLICFSRGNNRPRVMRFVTQAFAGTGIRPQHYLASVTERIDYLKQKVYAWANRIRRYRERADRYWQNRVFQSDQRKVYRDWEGTGQRVSDRQLPDTSVMTEFWRGIWSLPVEHTEGVWMRVVERECESIESMGSVLIDPVDVSCAIRTAQNWKSPGPDGLHNFWIKWIRCSHDRLATQFQEALELGSLPCFMTTGVTFLLHKTGSTTEAKNYRPITCLPTIYKLLTSILRTKINAHVVANNVLAPAQNGCRVGSRGTKELLLIDMTISQQVRRNKGALSTAWIDYKKAYDSVPHSWLERVLELYKIDTTLKSFLGACMRQWTTVLRQPGSGDGSSEPQDLIRIERGIFQGDSLSPLWFCLALNPLSTLLKESGLGHRLRRGGEVISHLLYMDDLKLFAPKRPDLMELLKTTQVFSNAIKMEFGVDKCAVMHVQRGEVVNCPDLQLSETMTFRSLSEAETYKYLGMSESLGIAVVDIKRSVKERFFCRLTKVLNSLLSGGNKVRAFNGWVMPLLIYSFGILRWTQTELDALDRRVRQQLTTHRMLHPRSSVMRLYIPRKLGGRGFLSAKNLHNREVCSLRDYFRDNECGMHRDVVAVDKGLTPLSLANENWRKPSVLSTEDRKEIWKSKQLHGRFYWVLTGPDVDMLASVNWLRFGDLFGETEGFACAIADEVIKTNNYRKYIMKDGTVDICRACHRPGESLRHIISGCSHLANGEYLHRHNQVARIIHQQLALQYGLVESEVPYYKYAPAPVLENGRALLYWDRSIITDRTIVANKPDIVVVDRAQRRAVLVDITIPHDENLVKAEKDKLSKYLDLAHEITAMWDVDSTIIVPIVVSVNGLIAKSLDQHLKRLSLDGWVKGQLQKAVILDTARIVRRFLTLQP

SEQ ID NO: 5937 - protein, 1121 aa, Biston betularia
MRWSQTNNENCMRAYYGATEGGINLSAYRVRMLPLFQALEPTVAVSTQRLSDQVRAIQRLQLLDQSVLDRLRLEALPARPTPVSTRDSPVASSAPTLVSVPTSMATLATPTDPVVDVGECTSMAVCSQVSEHLRRTLEDAICQYRFAPDSRPRLPRLPTHRRNLALMGALNALLAPYLRASEDLTDTHSILYCGAIAACRVARVKFPDTNRAPRPAGGVPARQLRIERRISTFRTLIAKLICFSRRNNRPRVMRFVTQAFAGTDIRPQHYLASVTERIDYLKQKVYAWANRIRRYRERADRYWQNRVFQSDQRKVYRDWEGTGQRVSDRQLPDTSVMTEFWRGIWSLPVEHTEGDWMRVVERECESIESMGSVLIDPVDVSCAIRTAQNWKSPGPDGLHNFWIKWIRCSHDRLATQFQEALELGSLPCFMTTGVTFLLHKTGSTTEAKNYRPITCLPTIYKLLTSILRTKINAHVVANNVLAPAQNGCRVGSRGTKELLLIDMTISQQVRQNKGALSTAWIDYKKAYDSVPHSWLERVLELYKIDTTLKSFLGACMRQWTTVLRQPGSGDGSSEPQDLIRIERGIFQGDSLSPLWFCLALNPLSTLLKESGLGHRLRRGGEVISHLLYMDDLKLFAPKRPDLMELLKTTQVFSNAIKMEFGVDKCAVMHVQRGEVVNCPDLQLSETMTFRSLSEAETYKYLGMSESLGIAVVDIKRSVKERFFCRLTKVLNSFLSGGNKVRAFNGWVMPLLIYSFGILRWTQTELDALDRRVRQQLTTHRMLHPRSSVMRLYIPRKLGGRGFLSAKNLHNREVCSLRDYFRDNECGMHRDVVAVDKGLTPLSLANENWRKPSVLSTEDRKEVWKSKQLHGRFYRVLTGPDVDMLASVNWLRFGDLFGETEGFACAIADEVIKTNNYRKYIMKDGTVDICRACHRPGESLRHIISGCSHLANGEYLHRHNQVARIIHQQLALQYGLVESEVPYYKYAPAPVLENGRALLYWDRSIITDRTIVANKPDIVVVDRAQRRAVLVDITIPHDENLVKAEKDKLSKYLDLAHEITAMWDVDSTIIVPIVVTVNGLIAKSLDQHLKRLSLDGWVKGQLQKAVILDTARIVRRFLTLQP

SEQ ID NO: 5938 - protein, 963 aa, Apotomis turbidana
MHKRNLALMGALDALLDPYLRTSEDLADTHSIMYCGAVAACRVARVRFPDTDRAPRTAGGVPAWQVRIERRISSFRTLIAKLICFRGGNNRPRVMRYVTQAFAGTDTRPCDYMACVTERIDYLKQKVYAWASRIRRYRERVDRFQQFRLFKSDQRKVYRKWEGTDQCVTDGQLSDPTAMINFWRSIWSVPVEHTEGEWMNVVRRECEPIENMGAVTISPDDVGCAVRTTQNWKSPGPDGLHNFWIKWFRSSHERLATQFQDALELGSLPSFMTTGATFLLYKSGSTTEPKNYRPITCLLTLYKLLTSILRTKINTHIVANNVLAFSQNGCRVGSRGTKELLLIDTTICQQVRRNRGSLSAAWIDYKKAYDSVPHSWLERILELYKIDTALRSLLSSCMRQWTTVLRQPGGGDGPPGPQDLIRIERGIFQGDSLSPLWFCLALNPLSTLLKDSGLGCRLRRGGEVISHLLYMDDLKLYAPKRQDLMELLEVTETFSSAIKMEFGVDKCAVMHVQRGNVVNSANLQLSETMSLRSISEAETYKYLGMSQSLGIADGDIRQALKERFFCRLTKVLNSLLSGGNKARAFNAWVMPLLTYSFGILRWTQTELDALDTRVRQLLTTHRMRHPRSSVMRMYIPRKCGGRGFLNAKDLHNREVCSLREYFLNNECEIHRDVVAVDKGLTSLSLANENWRRPKVLSTDDRRAVWKSKELHGRFYKALTGPDVDLLASVNWLRFGDLFGETEGFVCAIADEVMMTNNYRRYILKDGTVDICRACRRPGESLRHIISGCSHLANGEYLHRHNQVARIIHQQLALRYGLVGSEVPYYKYAPMPVLENGRATLYWDRSIITDRTIVANKPDIVLVDRSKRQAVLVDITIPHDENLVKAEKDKLSKYLDLAHEVTAMWDVDSTIIVPIVVSANGLIAKSLDKHLKRLSLDGWIKGQIQKAVLLDTARIVRRFLSLQP

SEQ ID NO: 5939 - protein, 955 aa, Notocelia uddmanniana
MGALNDLLDPYLRASDDLIDTHSIMYCGAIAACRVARVKFPDADRATRTAGGVPAWQVRIERRINTFRTLIAKLICFRGGNNRPRVMRFVNQAFAGTGVRPRDYMACVTERIDFLKQKVYAWASRIRRYRERVDRYQQNRLFQSDQRKVYRKWEGTDHRVCDGQRPDATAMVNFWRSIWSVPVEHTEGAWIGVVERDCESIEPMGSVTISPEDVSCAIRTAPNWKSPGPDGLHNFWLKWFRCSHERLATQFQQALELGSLPPPLTTGVTSLLYKSGSTTEAKNYRPITCLPTLYKLLTSILRAKINTHIVTNNILAPAQNGCRVGSRGTKELLLIDMTICQRVRRNRGTLSASWIDYKKAYDSVPHSWLRRILELYKVDAALRSFLSACMGQWTTVLRQPGGGDGPSGPQDSIRIERGIFQGDSLSPLWFCQALNPLSTLLQDSGLGCQLRRGGEVISHLLYMDDLKLFAPNRQDLLELLKTTEVFSSAIKMEFGVDKCAVMHVQRGKVVNSTNLQLSETMSLRSLSEAETYKYLGMSQALGIEGEGIKQAVKERFFCRLTKVLNSFLSSGNKARAFNAWVMPLLTYSFGILRWTQTELDALDRRVRALLTAHRMLHPRSSVMRLYIPRKCGGRGFLNAKDLHNREVCSLRDYFLNSECGMHRDVVAVDASFTPLSMANENWRRFKVLSAEDRKAEWKSKELHGRFYRALTGPDVDLLASVNWLRFGDLFGETEGFVCAVADEVIMTNNYRKYILKDGTVDICRACRRPGESLRHIISGCSHLANGEYLHRHNLVARIIHQQLALSYGLVDFEVPYYKYLPAPVLENGRATLYWDRSIITDRTIVANKPDIVLIDRSKRQAVLVDITIPHDENLVKAEKDKVSKYLDLAHEVTAMWDVDSTIIVPIVVSANGLIAKSLDQHLKRLSLDGWVKGQIQKAVLLDTARIVRRFLSLSP

SEQ ID NO: 5940 - protein, 1201 aa, Notocelia uddmanniana
MHTSQKPITVLKYDHEKQSASRSVYTKRTPTISDSSPSSSGDEFATAPDTSESSDESGPPPPPPRPPARRGRPPLPARLEPAGHPAPPTAPATGGIVRRMQWSQTMNENCMRAYYGATDGGTNLSAYRVRMLPLFQAPEPAISVSAQRLSDQVRVIQRLKWLDDATLDRLRMEALSARAASASARNPPATLPAPVPAADTAPGVPRVDSSADEDCANQSVSTNAHELMRRALEEAITQYRSTPNSRPRLPRLPVNRRNLALMGALNDLLVPYFGASEDLIDTHSIMYCGAVAACRVARVKFPDADRAPRTTGSVPTWQVRIERRVDTYRTLIAKLICFRGGNNRPRVMRFVNQAFAGSGVRPHDYMACVTERIDFLKQKVYAWASRIRRYRERLDRYQQNRLFQSDQRKVYRKWDGIDHRVSDGQRPDATAMVNFWRSIWSVPVEHTEGAWMEVVKRECESIEPMGSVTVSPEDVSCAIRTAPNWKSPGPDGLHNFWLKWFRCSHARLAAQFQQALELGSLPPPLTTGVTSLLYKSGSTTEAKNYRPITCLPTLYKLLTSILRALINTHIVANNILAPAQNGCRVGSRGTKELLLIDMTICQRVRRNRGTLSAAWIDYKKAFDSVPHSWLRRILELYKVDAVLRSFLVACMGQWTTVLRQPGGGEGPSGPQDSIRIERGIFQGDSLSPLWFCLALNPLSTLLKDSGLGCQLQREGEVISHLLYMEDLKLFAPNKHDLLELLKTTEVFSSAIKMEFGVDKCAVMHVQRGKVVNSTNLHISETMALRSLSEAETYKYLGMSQSLGIEGGDIKRAVGERFFCRLTKVLNSFLSGGNKVRAFNAWVMPLLTYSFGILRWTQTELDFLGRRVRVLLTAHRMLHPRSSVMRLYIPRKLGGRGFLNAKDLHNREVCSLRDYFLNSECGMHRDVVAADASFTPLSMANENWRRFEVLSIEDRRAVWKSKELHGRFYKALTGPDVDLLASVNWLRFGDLFGETEGFVCAIADEVIMTNNYRKYILKDGTVDICRACRRPGESLRHIISGCSHLANGEYLHRHNLVARIIHQQLALLYGLVDFEVPYYKYTPAPVLENGRATLYWDRSVITDRTIVANKPDIVLTDRLKRQAVLVDITIPHDENLVKAEKDKVSKYLDLAHEVTAMWDVDSTIIVPIVVSVNDYSEESQPTSQETLVRWLGQRSNTEGGTP

SEQ ID NO: 5941 - protein, 869 aa, Notocelia uddmanniana
MRFVNQAFAGTGVRPRDYMACVTERIDFLKQKVYAWASRIRRYRERVDRYQQNRLFQSDQRKVYRKWEGTDHRVCDGQRPDATAMVNFWRSIWSVPVEHTEGAWIGVVERDCESIEPMGSVTISPEDVSCAIRTAPNWKSPGPDGLHNFWLKWFRCSHERLATQFQQALELGSLPPPLTTGVTSLLYKSGSTTEAKNYRPITCLPTLYKLLTSILRAKINTHIVTNNILAPAQNGCRVGSRGTKELLLIDMTICQRVRRNRGTLSASWIDYKKAYDSVPHSWLRRILELYKVDAALRSFLSACMGQWTTVLRQPGGGDGPSGPQDSIRIERGIFQGDSLSPLWFCLALNPLSTLLQDSGLGCQLRRGGEVISHLLYMDDLKLFAPNRQDLLELLKTTEVFSSAIKMEFGVDKCAVMHVQRGKVVNSTNLQLSETMSLRSLSEAETYKYLGMSQALGIEGEGIKQAMKERFFCRLTKVLNSFLSGGNKARAFNAWVMPLLTYSFGILRWTQTELDALDRRVRVLLTAHRMLHPRSSVMRLYIPRKCGGRGFLNAKDLHNREVCSLRDYFLNSECGMHRDVVAVDASFTPLSMANENWRRFKVLSTENRRAEWKSKELHGRFYRALTGPDVDLLASVNWLRFGDLFGETEGFVCAIADEVIMTNNYRKYILKDGTVDICRACRRPGESLRHIISGCSHLANGEYLHRHNLVARIIHQQLALSYGLVDFEVPYYKYLPAPVLENGRATLYWDRSIITDRTIVANKPDIVLIDRSKRQAVLVDITIPHDENLVKAEKDKVSKYLDLAHEVTAMWDVDSTIIVPIVVSANGLIAKSLDQHLKRLSLDGWVKGQIQKAVLLDTARIVRRFLSLSP

SEQ ID NO: 5942 - protein, 869 aa, Notocelia uddmanniana
MRFVNQAFAGTGIRPRDYMTCVTERIDFLKQKVYAWASRIRRYRERLDRYQQNRLFQSDQRKVYRKWDGTDHRVSDGQRPDATAMVNFWRSIWSVPVEHNEGAWMGVVERECESIEPMGSVTISPADVSCAIRTAPNWKSPGPDGLHNFWLKWFRCSHARLAAQFQQALELGSLPPPLTTGVTSLLYKSGSTTEAKNYRPITCLPTLYKLLTSILRAKINTHIVANNILAPAQNGCRVGSRGTKELLLIDMTICQRVRRNRGTLSTAWIDYKKAYDSVPHSWLRRILELYKVDAVLRSFLVACMRQWTTVLRQPGGGEGPSGPQDSIRIERGIFQGDSLSPLWFCLALNPLSTLLKDSGLGCQLRREGEVISHLLYMDDLKLFAPNKHDLLELLKTTEAFSSAIKMEFGVDKCAAMHVQRGKVVNSTNLQISETMDLRSLSEAETYKYLGMSQSLGIEGGDIKRAVKERFFCRLTKVLNSFLSGGNRVRAFNAWVMPLLTYSFGILRWTQTELDFLDRRVRVLLTAHRMLHPRSSVMRLYIPRKFGGRGFLNAKDLHNREVCSLRDYFLNSECGMHRDVVAVDASFTPLSMANENWRRLKVLSTEDRRAVWKSKELHGRFYKALTGPDVDLLASVNWLRFGDLFAETEGFVCAIADEVIMTNNYRKYILKDGTVDICRACRRPGESLRHIISGCGHLANGEYLHRHNLVAKIIHQQLALLYGLVDFEVPYYKYTPAPVLENGRATLYWDRSVITDRTIIANKPDIVLTDRLKRQAVLVDITIPHDENLVKAEKDKVSKYLDLAHEVTAMWDVDSTIIVPIVVSANGLIAKSLDQHLKRLSLDGWVKGQMQKAVLLDTVRIVRRFLSLSP

SEQ ID NO: 5943 - protein, 1111 aa, Notocelia uddmanniana
MNENCMRAYFGATEGETNLSAYRVRMLPLFQALEPTITVTAQRLSDQVRVIQRLKRLDDATLDRLRLEALSARTASALARDPPATSPAPVPTPDMAPGVPRVYPSVDEDCANQTVSTQANEQLRRALEEAITRYRSTPNSRPRLPRLPVNRRNLALMGALNDLLDPYLRASEDLIDTHSILYCGAIAACRVARVKFPDADRAPRTAGGVPAWQVRIERRINTFRTLIAKLICFRGGNDRPRVMRFVNQAFAGTGVRPRDYVTCVTERIDFLKQKVYAWASRIRRYRERVDRYQQNRLFQSDQRKVYRKWEGTDHRVCDGQRPDATTMGNFWRSIWSVPVEHTEGAWIGVVERDCESIEPMGSVTISPEDISCAIRTATNWKSPGPDGLHNFWLKWFRCSHERLATQFQQALVLGSLPHLLTTGVTSLLYKSGSTTEAKNYRPITCLPTLYKLLTSILRAKINTHIVANNILAPAQNGCRVGSRGTKELLLIDMTICQRVRWSRGALSAAWIDYKKAYDSVPHSWLRRILELYKVDAALRSFLSACMGQWTTVLRQPGGGDGSSGPQDSIRIERGIFQGDSLSPLWFCLALNPLSTLLKDSGLGCQLRRGGEVISHLLYMDDLKLFAPNRQDLLELLKTTEVFSSAIKMEFGVDKCAVMHVQRGKVVNSTNLQLSETMSLRSLSEAETYKYLGMSQSLGIEGEGIKQAVKERFFCRLTKVLNSFLSGGNRVRAFNAWVMPLLTYSFGILRWTQTELDALDRRVRVLLTAHRMLHPRSSVMRLYIPRKCGGRGFLNAKDLHNREVCSLRDYFLNSECGMHRDVVAVDASFTPLSMANENWRRFKVLSTEDRKAEWKSRELHGRFYKALTGPDVDLLASVNWLRFGDLFGETEGFVCAIADEVIMTNNYRKYILKDGTVHICRACRRPGESLRHIISGCGHLANGEYLHRHNLVARIIHQQLALSYGLVNFEVPYYKYLPAPVLENGRATLYWDRSIITDRTIVANKPDIVLIDRSKRQAVLVDITIPHDENLVKAEKDKVSKYLDLAHEVTAMWDVDSTIIVPIVVSANGLIAKSLDQHLKRLSLDGWVKGQIQKAVLLDTARIVRRFLSLSP

SEQ ID NO: 5944 - protein, 1207 aa, Crocallis elinguaria
MITRSRNKAGTASARQPPPPASSSPSSSSGDEYGTPLDTSASSDEDGPPSPPPPPPPARRGRPPLPARLGPVGHSVPRAAPATGGIVRRMRWTSDMNENCMRAYYGATEGGTNMSAYRDRMLPLFQTLEPSVAVSTQRLSDQVRAIQRLKLLDESVLDRLRLEALPIRATSASTRDLSVAPPVPAPLPAPSSVATRIDPVVDEDDCANISVSTQVNEQLRRALEDAILEYQYTPDSRPRLPRLPTNRRNLALMGALNVLLAPYLRASENLFDTHSIMYCGAIAVCRVARVKFPDADRAPRTAGNAPAWQVRIERRINTFRTLIAKLVCFSRGNNRPRVMRFVNQAFAGTGIRPQNYMAGVTERIDFLKQKIYAWVNRIRRYRERVDRYHQNRLFESDQRKVYRNWEGTDQRVSDGQMPDTNAMINFWRGIWSVPVEHTEGDWMRTVEQSCESIETMGSVTIDPIDVSCAIRTAQNWKSPGPDGLHNFWIKWIRCSHECLAVQFQEALELGSLPCFLTTGVTSLLHKSGSTTEAKNYRPITCLPTLYKLLTSILRAKINSHVVANNILAPAQNGCRVGSRGTKELLLIDTAICQQVRRNRGALSTAWIDYKKAYDSVPHSWLERILELYKIDTTLRSFLSTCMRQWTTVLRQPGSGNSPSGPENFIKIERGIFQGDSLSPLWFCLALNPLSTLLRDSRLGCKLRREGEIISHLLYMDDLKLLAPKSPDLMKLLKITEIFSSAIKMEFGVDKCAVMHVQRGKVVNSDNLQLSETMTLRSLSEAETYRYLGMSQSLGIAVGDIKQSVKERFFCRLTKVLNSLLSGGNKARAFNGWVMPLLIYSFGILKWTQTELDSLDRRVRQLLTYHRMLHPRSSVMRLYIPRKWGGRGFLNAKTLHNREVCSLREYFLNNECGMHRDVVAVDRNLTPLSLANENWRKPVVMTTEDRKDVWKGKELHGRFYRALTGSDVDLLASVNWLRFGDLFGETEGFVCAIMDEVIKTNNYRKYIMKDGTVDICRACRRPGESLRHIISGCSHLANGEYLHRHNLVARIIHQQIALQYGLVESEVPYYKYAPAPVLENGRALLYWDRSIITDRTIVANKPDIVLVDRSQRRAVLVDITVPHDENLVKAEKDKLSKYLDLAHEVTAMWNVDSTIIVPIVVSANGLVAKSLDQHLKRLSLDGWIKGRMQKAVLLDTARIVRRFLTLQP

SEQ ID NO: 5945 - protein, 955 aa, Crocallis elinguaria
MGALNVLLAPYLRASENLFDTHSIMYCGAIAVCRVARVKFPDADRAPRPAGSAPAWQVRIERRINTFRTLIAKLICFSRGNNRPRVMRFVNQAFAGTGIRPQNYMAGVTERIDFLKQKIYAWVNRIRRYRERVDRYHQNRLFESDQRKVYRNWEGTDQRVSDGQLPDTNAMINFWRGIWSVPVEHTEGDWMRTVEQSCESIETMGSVTIDPIDVSCAIRTAQNWKSPGPDGLHNFWIKWIRCSHECLAVQFQEALELGSLPRFLTTGVTSLLHKSGSTTEAKNYRPITCLPTLYKLLTSILRAKINSHVVANNILAPAQNGCRVGSRGTKELLLIDTAICQQVRRNKGALSIAWIDYKKAYDSVPHSWLERILELYKIDTTLRTFLSTCMRQWTTVLRQPGSGNSPSGPENFIKIERGIFQGDSLSPLWFCLALNPLSTLLRDSRLGCKLRREGEIISHLLYMDDLKLLAPKSPDLMKLLKITEIFSSAIKMEFGVDKCAVMHVQRGKVVNSDNLQLSETMTLRSLSEAETYRYLGMSQSLGITVGDIKQSVKERFFCRLTKVLNSLLSGGNKARAFNGWVMPLLIYSFGILKWTQTELDSLDRRVRQLLTYHRMLHPRSSVMRLYIPRKWGGRGFLNAKTLHNREVCSLREYFLNNECGMHRDVVAVDRNLTPLSLANENWHKPVVMTTEDRKEVWKGKELHGRFYRALTGSDVDLLASVNWLRFGDLFGETEGFVCAIMDEVIKTNNYRKYIMKDGTVDICRACRRPGESLRHIISGCSHLANGEYLHRHNLVARIIHQQIALQYGLVESEVPYYKYAPAPVLENGRALLYWDRSIITDRTIVANKPDIVLVDRSQRRAVLVDITVPHDENLVKAEKDKLSKYLDLAHEVTAMWNVDSTIIVPIVVSANGLVAKSLDQHLKRLSLDGWIKGRMQKAVLLDTARIVRRFLTLQP

SEQ ID NO: 5946 - protein, 1208 aa, Cydia pomonella
MITRSKARDQSTSLRNARPPPSPASSVSLQSSSGDEFATAPGTSESSDECGPPPPPPRPPARRGRPPLPARLGPAGHPAPPTALAAGGVVRRLRWSQSMNESVMRAYYGATEGGTQLFAYRSRILPLFQALEPTITVSEQRLSDQVRVIQRLKRLDDATLDRLRLEALSARVDSVRDLPATSPDPVPAPDLAPGAPRIDFSTDEGDFASQSVSTSANEQLRRTLEEAIMQYRTTTNSRPRLPRLPMNRRNLALVGALNALLEPHLRTSKDLDDTHSIMYCGAIAACRVARVKFPDAERAPRTAGGVPAWQARIERRISSFRTLIAKLTCFRGGNHRPRVMRFVNQAFAGTDIRPRDYMANVTERIDFLKQKVYAWANRIRRYRKRVDRFQQNRLFQSDQRKVYRKWEEANLRASDTRSPDATAMTDFWRSIWSVPVEHTEGGWMSVVERECESIEPMGAVTISPDDVSCAIRTAQNWKSPGPDGLHNFWLKWFRCSHSRLAAQFQQALELGSLPPSLTTGVTFLLYKSGSTTEAKNYRPITCLPTLYKLLTSILRSKINAHIVANNILASAQNGCRVGSRRTKELLLIDMTICQQIRRNRGALSAAWIDYKKAYDSVPHSWLGRVLELYKVDTALRAFLSACMRQWTTVLRQPGGGDDRPGPQDFIRIERGIFQGDSLSPLWFCLALNPLSTLLKDSGLGCRLRREGEVISHLLYMDDLKLFAPNSQDLLELLKTTEDFSSAINMEFGVDKCAVMHVQRGKVVNSTNLQLSETMSFRSISESETYKYLGMTQSLGIEDEGIRQSVKERFFSRLTKVLNSLLSGGNKVRAFNAWVMPLLIYSFGILRWTQTELDALDRRVRLMLTTHRMLHPRSSVMRLYIPRKCGGRGFLNAKDLHNREVCNLRNYFLNNECGMHRDVVAVDRNLTPLSLANENWRKPVVLSTADRKAAWESKVLHGRFYKALTGPDVDLLASVNWLRFGDFFGETEGFACAIADEVMMTNNYRKYILKDGTVDICRACRRPGESLRHIISGCSHLANGEYLHRHNLVARIIHQQLALLYGLVDREVPYYKYSPAPVLENGRATLYWDRSIITDRTIVANKPDIVIIDRSQRRAVLVDITIPHDENLVKAEKDKSSKYLDLAHEITAMWDVDSTIIVPIVVSTNGLIAKSLDQHLERLSLGGWIKGQMQKAVILDTARIVRRFLSLRP

SEQ ID NO: 5947 - protein, 1213 aa, Peribatodes rhomboidaria
MITRSRTRKQQTAETESTRPPPPPSSSSASSSSEEEFVTPPDTTDSSDEEAAPTPAPPPPPARRGRPPLPARLGPAGRSAPPTAPATGGVVCRMRWTRTINENCMRAYYGATEGGTNLTAYRVRMLSLFQVLEPTVTVSTQRLSDQVRAIHRCKLLDQSVLDRLCLEAIRARPTPASTRDQPVASSAPTWASVPASAATLATLADTDVDGDRTSVSVSSQVSEHLRRTLEDAISQYRYAPDSRPRLPRLPTHRRNMALMGALNVLLAPYLRASENLTDTHSILYCSAIAACRVARVKFPDTNRAPRHAGGVPAWQVRIERRISTFRTLIAKLLCFSRGNTRPRVMRFVTQAFAGTDIRPQYYLANVTERIDYLKQKVYAWANRIRRYRERVDRYWQNRLFQSDQRKVYRGWEGTEQCVIDGHRPDASAMIDFWRGIWSVPVEHTEGEWMRVVERECESIESMESILIDSVDVSCAIRTAQNWKSPGPDGLHNFWIKWIRSSHDRLATQFQEALELCSLPSFMTIGVTFLLHKSGSTTDPKNYRPITCLPTIYKLLTSILRNKINTHIVANNVLAPAQNGCRVGSRGTKELLLIDMAISQQVRRNRGALSVAWIDYKKAYDSVPHSWLERVLELYKIDITLKSFLSACMRQWTTVLRQPGSGEVSADPQDLIRIERGIFQGDSLRPLWFCLALNPLSTLLKDLGLGHRLRRGGEVISHLLYMDDLKLFAPKSQDLMELLKTTEVFSSAIKMEFGVDKCAVMHVQRGKVVNSPNLQLSETMTLRSLSEVETYKYLGMSESLGISVVDIKKSIKERFFCRLTKVLNSLLSGGNKMRAFNGWVMPLLIYSFGILRWTQTELDALDRRVRQLLTTHRMLHPRSSVMRLYIPRKWGGHGMLNAKNLHNREVYRLRSFFRNNDCGMHCDVVAVDKGLTSLSLANENWRQTSVLSTEDRKNVWKGKELHGRFYRALTGPDVDLLASVNWLCFGDLFGETEGFACAIADEVIKTNNYRKYTLKDGTVDICRACHRPGESLRHIISGCSHLANGEYLHRHNQVARIIHQQLALQYGLVESEVPYYKYAPASVLENGGALLYWDRSIITDRTIVANKPDIVLVDRSQRRAVLVDITIPHDENLVKAEKDKLSKYLDLAHEVTAMWDVDSTIIVPIVVTVNGLIAKSLDQHLKRLSLDGWIKGQIQKAVILDTCRIVRRFLTLQP

SEQ ID NO: 5948 - protein, 1209 aa, Pammene fasciana
MITRSRTKAASTNARPPSSPASSVSSPSSSGDEFATAPDTSESSDECGPPPPPPRPPARRGRPPLPARLGLAGHPVPPRAPAAGGIVRRMRWTPAMNENVMRAYYGATEGGTNLSAYRDRILPLFQALEPTIDTTAQRLSDQVRAIQRLKRLDDATLDRLHLEALSAHADSTSVRDPPATSPDPMPVPDLASGALRIDPSADEEYIASQSMSSTANEQLRRTLEEAITQYRSTNIPRPRLPRLPMNRRNLALMGALNDLLDPILRTSKDLDDTHSIMYCGAIAACRVARVKFPDAERAPRTAGGVPVWQVRIERRINSFRTLIAKLICFRGGNNRPRVMRFVHQAFAGTGIEPRDYMANVTERIDFLKQKVYAWASRIRRYRERVDRFRQNRLFQSDQRKIYRRWEEADPRVSDVRLPDATAMTDFWRSIWSAPVEHTEGEWMSVVERECESIEPMGAITINPDDVSCAIRTAQNWKSPGPDGLHNFWLKWFRCSHSRLATQFQQALELGSLPPSLTTGVTFLLYKSGSTTEAKNYRPITCLPTLYKLLTSILRAKINAHIVANNILASSQNGCRVGSRGTKELLLIDMTICQRVRRNRGALSAAWIDYKKAYDSVPHSWLERILELYKVDAALRSFLGACMRQWTTVLRQPGGGDDPPDPHDFIRIERGIFQGDSLSPLWFCLALNPLSTLLKDSGLGCRLRREGEVISHLLYMDDLKLFAPNNRDLMELLKTTEVFSSSIKMEFGVDKCAVMHVQRGKVVNSTNLQLSETMTFRSISESETYKYLGMSQSLGIEDAGIKQALKERFFGRLTKVLNSLLSGGNKVRAFNAWVMPLLTYTFGILRWTQTELDALDRRVRLLLTTHRMLHPRSSVMRLYIPRKCGGRGFLNAKNLHNREVYNLRNYFLNNECGMHRDVVAVDKSLTPLSLANENWRKPVVLSTEDRRAVWKSKELHGRFYGALTGPDVDLLASVNWLRFGDLFGETEGFACAIADEVIMTNNYRRYILKDGTVDICRACRRPGESLRHIISGCSHLANGEYLHRHNLVARIIHQQLALLYGLVDHEVPYYKYTPAPVLENGRATLYWDRSIITDRTIVANKPDIVIIDRSQRRAMLVDITVPCDVNLVKAEKDKSSKYLDLAHEVTAMWEVDSAIIVPIVVSANGLIAKSLDQHLERLSLRGCGWIKGQIQKAVILDTARIVRRFLSLRP

SEQ ID NO: 5949 - protein, 871 aa, Pammene fasciana
MRFVHQAFAGMDIEPRDYMANVTERIDFLKQKVYAWASRIRRYRERVDRFRQNRLFQSDQRKVYRRWEEADPRVSDVRLPDATAMTDFWRSIWSAPVEHTEGEWMSVVERECETIEPMGAITISPDDVSCAIRTAQNWKSPGPDGLHNFWLKWFRCSHSRLATQFQQALELGSLPPSLTTGVTFLLYKSGSTTEAKNYRPITCLPTLYKLLTSILRAKINAHMVANNILASAQNGCRVGSRGTKELLLIDMTICQRVRRNRGALSAAWIDYKKAYDSVPHSWLERILELYKIDAALRSFLGACMRQWTTVLRQPGGGDDPPGPQDFIRIERGIFQGDSLSPLWFCLALNPLSTLLKDSGLGCRLRRESEVISHLLYMDDLKLFAPNNRDLLELLKTTEVFSSSIKMEFGVDKCAVMHVQRGKVVNSTNLQLSETMTFRSISESETYKYLGMSQSLGIEDAGIKQALRERFFGRLTKVLNSLLSGGNKVRAFNAWVMPLLTYSFGILRWTQTELDALDRRVRQLLTTHRMLHPRSSVMRLYIPRKCGGRGFLNAKNLHNREVYNLRNYFLNNECGMHRDVVAIDKGLTPLSLANENWRKPVVLSTEDRKAVWKSKELHGRFYGALTGPDVDLLASVNWLRFGDLFGETEGFACAIADEVIMTNNYRRYILKDGTVDICRACRRPGESLRHIISGCSHLANGEYLHRHNLVARIIHQQLALLYGLVDHEVPYYKYTPAPVLENGRATLYWDRSIITDRTIVANKPDIVVIDRPQRRAMLVDITVPCDVNLVKAEKDKSSKYLDLAHEVTAMWEVDSAIIVPIVVSANGLIAKSLDQHLERLSLRGCGWIKGQIQKAVILDTARIVRRFLSLRP

SEQ ID NO: 5950 - protein, 1004 aa, Pammene fasciana
MGPSRGYTCSIRKKILKIGSRFTEIWSNIHTKKNIIMIKKKRRNLALMEALNDLLDPILRTSKDLDDTHSIMYCGAIAACRVARVKFPDAERAPRTAGGVPAWQVRIERRINSFRTLIAKLICFRGGNNRPRVMRFVHQAFAGTGIEPRDYMANVTERIDFLKQKVYAWASRIRRYRERVDRFRQNRLFQSGQRKVYRRWEEADPRVSDARLPDATAMTDFWRSIWSAPVEHTEGEWMSVVERECESIEPMGAITISPDDVSCAIRTAQNWKSPGPDGLHNFWLKWFRCSHSRLATQFQQALELGSLPPSLTTGVTFLLYKSGSTTEAKNYRPITCLPTLYKLLTSILRAKINAHIVANNILASSQNGCRVGSRGTKELLLIDMTICQRARRNRGALSAAWIDYKKAYDSVPHSWLERILELYKVDAALRSFLGACMRQWTTVLRQPGGGDDPPDPHDFIRIERGIFQGDSLSPLWFCLALNPLSTLLKDSGLGCRLRREGEVISHLLYMDDLKLFAPNNRDLMELLKTTEVFSSSIKMEFGVDKCSVMHVQRGKVVNSTNLQLSETMTFRSISESETYKYLGMSQSLGIEDAGIKQALKERFFGRLTKVLNSLLSGGNKVRAFNAWVMPLLTYSFGILRWTQTELDALDRRVRLLLTTHRMLHPRSSVMRLYIPRKCGGRGFLNAKNLHNREVYNLRNYFLNNECGMHRDVVAVDKSLTPLSLANENWRKPVVLSTEDRKAVWKSKELHGRFYGALTGPDVDLLASVNWLRFGDLFGETEGFACAIADEVIMTNNYRRYILKDGTVDICRACRRPGESLRHIISGCSHLANGEYLHRHNLVARIIHQQLALLYGLVDHEVPYYKYTPAPVLENGRATLYWDRSIITDRTIIANKPDIVIIDRSQRRAMLVDITVPCDVNLVKAEKDKSSKYLDLAHEVTAMWEVDSAIIVPIVVSANGLIAKSLDQHLERLSLRGCGWIKGQIQKVVILDTARIVRRFLSLRP

SEQ ID NO: 5951 - protein, 1212 aa, Pammene fasciana
MITRSKTRLQQASPPNARPPSSPASSVSSPSSSGDEFATAPDTSESSDECGPPPPPPRPPARRGRPPLPARLGLAGHPVPPRAPAAGGIVRRMRWTPSMNENVMRAYYGATEGGTNLCAYRDRMPPLFQALEPTINTTAQRLSDQVRVIQRLKRLDDATLDRLRLEALSARAASTSARDPPATSLDPMPASDLASGAPRIDPSADEEEIANQSVSSTANEQLRRTLEEAITQYRSTNITRPRLPRLPMNRRNLALMGALNDLLDPLLRTSKDLDDTHSIMYCGAIAACRVARVKFPDAERAPRTAGGVPAWQVRIERRINSFRTLIAKLICFRGGNNRPRVMRFVHQAFAGTDIEPRDYMANVTERIDFLKQKVYAWASRIRRYRERVDRFRQNRLFQSDQRKVYRRWEEADPRVSDVRLPDATAMTDFWRSIWSAPVEHTEGEWMSVVERECETIEPMGAITISPDDVSCAIRTAQNWKSPGPDGLHNFWLKWFRCSHSRLATQFQQALELGSLPPSLTTGVTFLLYKSGSTTEAKNYRPITCLPTLYKLLTSILRAKINAHMVANNILASAQNGCRVGSRGTKELLLIDMTICQRVRRNRGALSAAWIDYKKAYDSVPHSWLERILELYKIDAALRSFLGACMRQWTTVLRQPGGGDDPPGPQDFIRIERGIFQGDSLSPLWFCLALNPLSTLLKDSGLGCRLRREGEVISHLLYMDDLKLFAPNNRDLLELLKTTEVFSNSIKMEFGVDKCAVMHVQRGKVVNSTNLQLSETMTFRSISESETYKYLGMSQSLGIEDAGIKQALRERFFGRLTKVLNSLLSGGNKVRAFNAWVMPLLTYSFGILRWTQTELDALDRRVRLLLTTHRMLHPRSSVMRLYIPRKCGGRGFLNAKNLHNREVYNLRNYFLNNECEMHRDVVAIDKGLTPLSLANENWRKPVVLSTEDRKAVWKSKELHGRFYGALTGPDVNLLASVNWLRFGDLFGETEGFACAIADEVIMTNNYRRYILKDGTVDICRACRRPGESLRHIISGCSHLANGEYLHRHNLVARIIHQQLALLYGLVDHEVPYYKYTPAPVLENGRATLYWDRSIITDRTIVANKPDIVVIDRPQRRAMLVDITVPCDVNLVKAEKDKSSKYLDLAHEVTAMWEVDSAIIVPIVVSANGLIAKSLDQHLERLSLRGCGWIKGQIQKAVILDTARIVRRFLSLRP

SEQ ID NO: 5952 - protein, 1205 aa, Bembecia ichneumoniformis
MKLRKRKHEAEQSAHPPPLPVSSSPCSSAEEFLTADNKSTSSDDDGPTPLSPPRRPARRGRPPLPASLGPARPSASRPAPATGGVVRRMQWTHTMNENCMRAYYGATEGATNLTAYRARMLSLFQALEPAVTVTAQRLSDQVRAIQRCQLLEQSVLDRLRLDSLPARTTSAATQDLRAALPLPESTSIPTSAALLTDPVDQEICASTNVSTETKEQLRRALEEAISRYHTKPNDRPRLPRLPTHKQNIALMGALNSLLAPYIKASRDLTDTHSILYCGAIAACRVARVKFLNFDRATRDAEGVPAWQMRIERRISKFRTLIAKLISFSRGNTRPRVMHFVAQAFVGTNIKSKDYLTWATERIDYFKQKVYALANRVRRYKERVQRYRQNRLFQSDQRKVYRDWERTNQSVNVGHPPDPEVMLNFWHDIWSVSDEHTEGDWISIVEQACEPITAMEAITISPTDLSCAIRSTQNWKSPGPDGLHNFWIKMFQCSHECLAVQFQKALELGTLPIFLTTGTTFLLHKSGSTAEAKNYRPITCLPTIYKLLTSILRTKINSHILKNNILDTAQNGCKIGSRGTKELLLIDMTICQRVRRSSGALSVAWIDYKKAYDSVPHSWLRRILELYKIDTTLRSFLAMCMGQWITVLRQPGYRGSDAGLRDTIKIERGIFQGDSLSPLWFNLALNPLSTLLRNLKLGYRLRRGGEVISHLLYMDDLKLFAPKPKDLLELLKITQCFSNAIRMDFGVDKCAVMHVQKGKVVNSPNLQFSDEVSFKSLSEVETYKYLGMSQSLGISDKDIKQTVKTRFFGRLTKVLNSFLSGGNKVRAFNGWVMPLLTYSFGILRWTQTELDGLDRGVRRLLTAHRMLHPRSSIMRLYIPRKLGGRGFLNAKNLHNREVYSLREYFLNHGSGVHRDVVAIDKNFTPLSLANGNWRRLVVLSTEDRESVWKGKELHGRFYKALTGPDVDSLMSVNWLRFGDLFGETEGFVCAIADEVIKTNNYRKYILKDGTVDICRACHRPGETLRHIISGCAHLSNGEYLHRHNQVARIIHQRLAIRYGLIESEVPYYKYVPAPVLENGHATLYWDRSIITDRTIVANKPDIVVIDRSQRRTMLVDIAVPHDENLVKAEKEKLTKYIDLAHEVTAMWDVDSTIIVPIVVSANGLIAKSLDQHLKRLSLDGWIKGQIQKAVLLDTARIVRRFLTLQP

SEQ ID NO: 5953 - protein, 869 aa, Ennomos quercinarius
MRFVAQAFTGTGIRPQDYMACATERIDFLKQKVYAWASRIRRYRERVDRYQQNRLFQSDQRKVYRNWEGTSQRVVDGQLPDANAMNEFWRSIWSVPVEHTEGDWMRVVERVCEPIESMGSITIDPEDISCAIRTAQNWKSPGPDGLHNFWIKWIRCSYPCLAIQFQEALEAGSLPSFMTTGVTFLLHKSGSTTEAKNYRPITCLPTLYKLLTSILRTKINSHIVANNILAPAQNGCRVGSRGTKELLLIDTAICQQVRRNRGALSTAWIDYKKAYDSVPHSWLERVLELYKIDATLRFFLSACMRQWTTVLRQPGGGESVSDPQDFIRIERGIFQGDSLSPLWFCLALNPLSTLLGDSGLGYRLRRGSEIISHLLYMDDLKLFAPQRPQLIELLKITENFSNSINMEFGVDKCAVMHVHRGKVVNSTNLQLSETMTLRSLSESETYRYLGMSESLGISVGDVKRTVKERFFCRLTKVLNSLLSGGNKTRAFNGWVMPLLMYSFGILRWTQTELDALDRKVRQLLTSHRMLHPRSSVVRLYIPRKWGGRGFLNAKTLHNREVCSLRDYFLNNECGMHRDVVAVDKGLTPLSLANENWRKPVVLSTEDRRDVWKGKELHGRFYRALTGPDVDLHASVNWLRFGDLFGETEGFVCAIADEVIKTNNYRKYIMKDGTVDICRACRRPGESLRHIISGCSHLANGEYLHRHNLVARIIHQQLALQYGLVESEVPYYKYTPGPVLENGRALLYWDRSIITDRTIVANKPDIVLVDRSQRRAVLVDITIPHDENLVKAEKDKLSKYLDLAHEVTAMWNVDSTSIVPIVVSANGLIAKSLDQHLERLSLDGWIKGQIQKAVLLDTARIVRRFLTLQP

SEQ ID NO: 5954 - protein, 1209 aa, Cydia splendana
MITRSKTRSQASITTNARPPPSPVSSVSSQASSGDEFATAPDTSESSDECGPPPPPPRPPARRGRPPLPARLGPAGHHAPPTVPAAGGVVRRMRWSQTMNENVMRAYYGATEGGTDLCAYRVRMLPLFQALEPTIDVTAQRLSDQVRVIQRLKRLDDSTLDRLRLEALSTRAASTSVRDPPATSPDPVPAPDQAPEAPRVDLCADEEEFAQSVSSTANEQLRRTLDEAITQYRSTPNTRPRLPRLPMNRHNLALMGALNALLEPYLRTSKDLDDTHAIMYCGAIAACRVARVKFPDSERAPRTAGGAPAWQIRIERRISSFRTLIAKLICFRGGNNRPRVMRFVNQAFAGTDIRPRDYMANVTERIDFLKQKVYAWANRIRRYRERVDRFQQNRLFQSDQRKMYRRWEETNLRASDSRPPDATVMNDFWRSIWSVPVGHTEGSWMSVVERECESIEPMGAVTISPDDVSCAIRTAQNWKSPGPDGLHNFWLKWFRCSHSCLAAQFQQALELGSPPPSLTTGVTFLLYKSGSTTEAKNYRPITCLPTLYKLLTSILRAKINAHIVANNILASAQNGCRVGSRGTKELLLIDMTICQQIRRNRGALSAAWIDYKKAYDSVPHSWLERVLELYKVDTALRAFLSACMRQWTTVLRQPGGGDGSPGPQDFIRIERGIFQGDSLSPLWFCLALNPLSTLLKDLELGCRLRRGGEVISHLLYMDDLKLFAPNSQDLVELLKTTEVFSNAINMEFGVDKCAVMHVQRGKVVNSTNLQLSETMSFRSISESETYKYLGMSQSLGIEEEGIRRSVKERFFSRLTKVLNSLLSGGNKVRAFNAWVMPLLTYSFGILRWTQTELDALDRRVRQLLTTHRMLHPRSSVMRLYIPRKCGGRGFLNAKNLHNRELYNLRNYFLNNECGMHRDVVAADKGLTPLSLANENWRKPVVLSTEDRKAVWKDKQLHGRFYKALTGPDVDLLASVNWLRFGDLFGETEGFACAIADEVMMTNNYRKYILKDGTVDICRACRRPGESLRHIISGCSHLANGEYLHRHNLVARIIHQQLALLYGLVDREVPYYKYSPAPVLENGRATLYWDRSIITDRTIVANKPDIVLIDRSQRRTVLVDVTIPHDENLVKAEKDKSSKYLDLAHEITAMWDVDSTIIVPIVVSANGLIAKSLDQHLERLSLGGWIKGQMQKAVILDTARIVRRFLTLRP

SEQ ID NO: 5955 - protein, 1209 aa, Cydia splendana
MQTRSKTRAQLASPRNARPPPPSASSVSLQSSSGDEFATAPDTSESSDECGPPPPPPRPPARRGRPPLSARLGPAGHPAPPTAPAAGGVVRRMRWSQTMNENVMRAYYGATEGGTNLCAYRVRMLPLFQALEPTIDVTAQRLSDQVRVIQRQKRLDDSTLDRLRMEALSARAASASARDPPATSPDPVPAPDQAPGAPRVDLSADEEEFAQSVSSTANEQLRRTLDEAITQYRSTPNTRPRLPRLPMNRHNLALMGALNALLEPYLRTSKDLDDTHAIMYCEAIAACRVARVKLPDSERAPRTAGGAPAWQVRIERRISSFRTLIAKLICFRGGNNRPRVMRFVNQAFAGTDTRPRDYMANVTERIDFLKQKVYAWANRIRRYRERVDRFQQNRLFQSDQRKVYRKWEETNLHASDSQPPDATVMNDFWRSIWSVPVGHTEGSWMSVVVRECESIEPMGAVTISPDDVSCAIRTAQNWKSPGPDGLHNFWLKWFRCSHSCLAAQFQQALELGSLPPSLTTGVTFLLYKSGSTTEAKNYRPITCLPTLYKLLTSILRAKINAHIVANNILASAQNGCRVGSRGTKELLLIDMTICQQIRRTKGALSAAWIDYKKAYDSVPHSWLGRVLELYKVDAALRAFLSACMGQWTTVLRQPGGGDDRPGPQDFIRIERGIFQGDSLSPLWFCLALNPLSTLLKDLGLGCRLRREGEVISHLLYMDDLKLFAPNTQGLLELLKTTEDFSSAINMEFGIDKCAVMHVQRGRVVNSTNLQLSETMSFRSISESETYKYLGMSQSLGIEDEGIRRSVKERFFSRLTKVLNSLLSGGNKVRAFNAWVMPLLTYSFGILRWTQTELDALDRRVRSLLTTHRMLHPRSSVMRLYIPRKCGGRGFLNAKDFHNREVYNLRNYFLNNECGMHRDVVAVDRNLTPLSLANENWRKPVVLSTADRKAAWESKVLHGRFYKALTGPDVDLLASVNWLRFGDLFGETEGFACAIADEVMMTNNYRKYILKDGTVDICRACRRPGESLRHIISGCSHLANGEYLHRHNLVARIIHQQLALLYDLVDREVPYYKYLPAPVLENGRATLYWDRSIITDRTIVANKPDIVLIDRSQRRAVLADVTIPHDENLVKAEKDKSSKYLDLAHEITAMWDVDSTIIVPIVVSANGLIAKSLDQHLERLSLGGWIKGQMQKAVILDTARIVRRFLTLRP

SEQ ID NO: 5956 - protein, 1209 aa, Cydia splendana
MQTRSKTRAQLASPRNARPPPPSASSVSSQSSSDDEFATAPDTSESSDECGPPPPPSRPPARRGRPPLSARLGPAGHPAPPTAPAAGGVVRRMRWSQTINENVMRAYYGATEGGTNLCAYRVRMLPLFQALEPTIDVTAQRLSDQVRVIQRQKRLDDSTLDRLRLEALSARAASTSARDPPATSPDPVPAPDQAPGAPRVDLSADEEEFAQSVGSTANEQLRRTLDEAITRYRSTPDTRPRLPRLPMNRHNLALMGALNALLEPYLRTSKDLDDTHAIMYCGAIAACRVARVKFPDSERAPRTAGGAPAWQIRIERRISSFRTLIAKLICFRGGNNRPRVMRFVNQAFVGTDIRPRDYMANVTERIDFLKQKVYAWANRIRRYRDRVDRFQQNRLFQSDQRKMYRKWEETNLRASDSRPPDATVMNDFWRSIWSVPVGHTEGSWMSVVERECESIEPMGAVTISPDDVSCAIRKNQNWKSPGPDGLHNFWLKWFRCSHSYLAAQFQQALELGSLPPSLTTGVTFLLYKSGSTTEAKNYRPITCLPTLYKLLTSILRAKINAHIVANNILASAQNGCRVGSRGTKELLLIDMTICQQIRRTKGALSAAWIDYKKAYDSVPHSWLGRVLELYKVDAALRAFLSACMGQWTTVLRQPGGGDDRPGPQDFIRIERGIFQGDSLSPLWFCLALNPLNTLLKDLGLGCRLRREGEVISHLLYMDDLKLFAPNTQGLLELLKTTEVFSSAINMEFGVDKCAVMHVQRGKVVNSTNLQLSETMSFRSISESETYKYLGMSQSLGIEDEGIRRSVKERFFSRLTKVLNSLLSGGNKVRAFNAWVMPLLTYSFGILRWTQTELDALDRRVRSLLTTHRMLHPRSSVMRLYIPRKCGGRGFLNAKDLHNREVYNLRNYFLNNECGMHRDVVAVDRNLTPLSLANENWRKPVVLSTADRKAAWESKALHGRFYKALTGPDVDLLASVNWLRFGDLFGETEGFACAIADEVMMTNNYRKYILKDGTVDICRACRRPGESLRHIISGCSHLANGEYLHRHNLVARIIHQQLALLYGLVDREVPYYKYLPAPVLENGRATLYWDRSIITDRTIVANKPDIVLIDRSQRRAVLADVTIPHDENLVKAEKDKSSKYLDLAHEITAMWDVDSTIIVPIVVSANGLIAKSLDQHLERLSLGGWIKGQMQKAVILDTARIVRRFLTLRP

SEQ ID NO: 5957 - protein, 1213 aa, Cydia splendana
MKTMITRSQRRAAESTNNARPPPPPAPSSSSSTSSSGDEFATPPDTDGFSDEGGPPPPPPRPPARRGRPPLPARLGPAGHPAPPTAPATGGIVRRMRWTRTMNENVMRAYYGATEGGTQLSAYRSRILPLFQALEPTITVSEQRLSDQVRVIQRLKRLDDATLDRLRQEALSARADSTSVRDLPATSPDPVPAPDLAPAAPRVDFCTDEGDFASQNVSTTANEQLRRTLEEAITQYRATTNSRPRLPRLPMNRRNLALMGALNALLEPYLRTSKDLDDTHSIMYCGAIAACRVARVKFPDAERAPRIVGGVPAWQARIERRISSFRTLIAKLICFRGGNNRPRVMRFVNQAFAGTDIRPRDYMANVTERIDFLKQKVYAWANRIRRYRERVDRFQQNRLFQSDQRKVYRKWEETNLRTPDTQPPDATAMTEFWRSIWSVPVGHTEGSWMSVVERECESIEPMGAVTISPDDVSCAIRTAQNWKSPGPDGLHNFWLKWFRCSHSRLAAQFQQALELGSLPPSLTTGVTFLLYKSGSTTEAKNYRPITCLPTLYKLLTSILRAKINAHIVANNILASAQNGCRVGSRGTKELLLIDMTICQQIRRNKGALSAAWIDYKKAYDSVPHSWLGRVLELYKVDAALRAFLSTCMGQWTTVLRQPGGGDDRLGPQDFIRIERGIFQGDSLSPLWFCLALNPLSTLLKDLGLGCRLQREGEVISHLLYMDDLKLFAPNSQDLLELLKTTEVFSSAINMEFGVDKCAVMHVQRGRVVNSRNLQLSETMSFRSISESETYKYLGMSQSLGIEDEGIRRSVKERFFSRLTKVLNSLLSGGNKVRAFNAWVMPLLTYSFGILRWTQTELDALDRRVRSQLTTHRMLHPRSSVMRLYIPRKCGGRGFLNAKDLHNREVYNLRNYFLNNECGMHRDVVAVDRNLTPLSLANENWRKPVVLSTADRKAAWESKVLHGRFYKALTGPDVDLLASVNWLRFGDLFGETEGFACAIADEVMMTNNYRKYILKDGTVDICRACRRPGESLRHIISGCSHLANGEFLHRHNLVARIIHQQLALLYGLVDREVPYYKYLPAPVLENGRATLYWDRSIITDRTIVANKPDIVIIDRSQRRAVLVDITIPHDENLVKAEKDKSSKYLDLAHEITAMWDVDSTIIVPIVVSVNGLIAKSLDQHLERLLLGGWIKGQMQKAVILDTARIVRRFLSLRP

SEQ ID NO: 5958 - protein, 1208 aa, Cydia splendana
MITRSRAKAVTTSARPPPPPASSTSSSTSSSGDEFATAPDTDGSSDESGPPPPPPRPPARRGRPPLPARLGPAGHPAPPTAPATGGIVRRMRWTRDMNENVMRAYYGATEGGTQLSAYRSRILPLFQTLEPTITVSEQRLSDQVRVIQRLKRLDDATLDRLRQEALSARADSISVRDLPATSPDPVPAPDLAPGAPRVDFCTDEGDLVSQNVSTTANEQLRRTLEEVITQYRATTNSRPRLPRLPMNRRNLALMGALNALLEPHLRTSKDLDDTHSILYCGAIAACRVARVKFPDAERAPRTVGGVPAWQARIERRISSFRTLIAKLICFRGGNNRPRVMRFVNQAFAGTDIRPRDYMANVTERIDFLKQKVYAWANRIRRYRERVERFQQNRLFQSDQRKVYRKWEETNLRTPDTQPPDATAMTDFWRSIWSMPVGHTEGSWMSVIERECESIEPMGAVTISPDDVSCAIRTAQNWKSPGPDGLHNFWLKWFRCSHSCLAAQFQQALELGSLPPSLTTGVTFLLYKSGSTTEAKNYRPITCLPTLYKLLTSILGAKINAHIVANNILASAQNGCRVGSRGTKELLLIDMTICQQIRRTKGALSAAWIDYKKAYDSVPHSWLGRVLELYKVDAALRAFLSACMGQWTTVLRQPGGGDDQPGPQDFIRIERGIFQGDSPSPLWFCLALNPLSTLLKDLGLGCRLRREGEVISHLLYMDDLKLFAPNTQGLLELLKTTEVFSSAINMEFGVDKCAVMHVQRGRVVNSTNLQLSETMSFRSISESETYKYLGMSQSLGIEDEGIRRSVKERFFSRLTKVLNSLLSGGNKVRAFNAWVMPLLTYSFGILRWTQTELDALDRRVRSLLTTHRMLHPRSSVMRLYIPRKCGGRGFLNAKDLHNREVYNLRNYFLNNECGMHRDVVAVDRNLTPLSLANENWRKPVVLSTADRKAAWENKVLHGRFYKALTGPDVDLLASVNWLRFGDLFGETEGFACAIADEVMMTNNYRKYILKDGTVDICRACRRPGESLRHIISGCSHLANGEYLHRHNLVARIIHQQLALLYGLVDREVPYYKYLPAPVLENGRATLYWDRSIITDRTIVANKPDIVLIDRSQRRAVLADVTIPHDENLVKAEKDKSSKYLDLAHEITAMWDVDSTIIVPIVVSANGLIAKSLDQHLERLSLGGWIKGQMQKAVILDTARIVRRFLSLQP

SEQ ID NO: 5959 - protein, 1209 aa, Cydia splendana
MITRSKTRSQASITTNARPPPSPVSSVSSQASSGDEFATAPDTSESSDECGPPPPPPRPPARRGRPPLPARLGPAGHHAPPTVPAAGGVVRRMRWSQTMNENVMRAYYGATEGGTDLCAYRVRMLPLFQALEPTIDVTAQRLSDQVRVIQRLKRLDDSTLDRLRLEALSTRAASTSVRDPPATSPDPVPAPDQAPEAPRVDLCADEEEFAQSVSSTANEQLRRTLDEAITQYRSTPNTRPRLPRLPMNRHNLALMGALNALLEPYLRTSKDLDDTHAIMYCGAIAACRVARVKFPDSERAPRTAGGAPAWQIRIERRISSFRTLIAKLICFRGGNNRPRVMRFVNQAFAGTDIRPRDYMANITERIDFLKQKVYAWANRIRRYRERVDRFQQNRLFQSDQRKMYRKWEETNPRASDSQPPEATVMNDFWRSIWSVPVGHTEGSWMSVVERECESIEPMGAVTISPDDVSCAIRTAQNWKSPGPDGLHNFWLKWFRCSHSCLAAQFQQALELGSPPPSLTTGVTFLLYKSGSTTEAKNYRPITCLPTLYKLLTSILRAKINAHIVANNILASAQNGCRVGSRGTKELLLIDMTICQQIRRNRGALSAAWIDYKKAYDSVPHSWLERVLELYKVDTALRAFLSACMRQWTTVLRQPGGGDGSPGPQDFIRIERGIFQGDSLSPLWFCLALNPLSTLLKDLELGCRLRRGGEVISHLLYMDDLKLFAPNSQDLVELLKTTEVFSNAINMEFGVDKCAVMHVQRGKVVNSTNLQLSETMSFRSISESETYKYLGMSQSLGIEEEGIRRSVKERFFSRLTKVLNSLLSGGNKVRAFNAWVMPLLTYSFGILRWTQTELDALDRRVRQLLTTHRMLHPRSSVMRLYIPRKCGGRGFLNAKNLHNRELYNLRNYFLNNECGMHRDVVAADKGLTPLSLANENWRKPVVLSTEDRKAVWKDKQLHGRFYKALTGPDVDLLASVNWLRFGDLFGETEGFACAIADEVMMTNNYRKYILKDGTVDICRACRRPGESLRHIISGCSHLANGEYLHRHNLVARIIHQQLALLYGLVDREVPYYKYSPAPVLENGRATLYWDRSIITDRTIVANKPDIVLIDRSQRRTVLVDVTIPHDENLVKAEKDKSSKYLDLAHEITAMWDVDSTIIVPIVVSANGLIAKSLDQHLERLSLGGWIKGQMQKAVILDTARIVRRFLTLRP

SEQ ID NO: 5960 - protein, 963 aa, Cydia splendana
MNRHNLALMGALNALLEPYLRTSKDLDDTHAIMYCGAIAACRVARVKFPDSERAPRTAGGAPAWQIRIERRISSFRTLIAKLICFRGGNNRPRVMRFVNQAFAGTDIRPRDYMANITERIDFLKQKVYAWANRIRRYRERVDRFQQNRLFQSDQRKMYRKWEETNPRASDSQPPEATVMNDFWRSIWSVPVGHTEGSWMSVVERECESIEPMGAVTISPDDVSCAIRTAQNWKSPGPDGLHNFWLKWFRCSHSCLAAQFQQALELGSPPPSLTTGVTFLLYKSGSTTEAKNYRPITCLPTLYKLLTSILRAKINAHIVANNILASAQNGCRVGSRGTKELLLIDMTICQQIRRNRGALSAAWIDYKKAYDSVPHSWLERVLELYKVDTALRAFLSACMRQWTTVLRQPGGGDGSPGPQDFIRIERGIFQGDSLSPLWFCLALNPLSTLLKDLELGCRLRRGGEVISHLLYMDDLKLFAPNSQDLVELLKTTEVFSNAINMEFGVDKCAVMHVQRGKVVNSTNLQLSETMSFRSISESETYKYLGMSQSLGIEEEGIRRSVKERFFSRLTKVLNSLLSGGNKVRAFNAWVMPLLTYSFGILRWTQTELDALDRRVRQLLTTHRMLHPRSSVMRLYIPRKCGGRGFLNAKNLHNREVYNLRNYFLNNECGMHCDVVAADKGLTPLSLANENWRKPVVLSTEDRKAVWKDKQLHGRFYKALTGPDVDLLASVNWLRFGDLFGETEGFACAIADEVMMTNNYRKYILKDGTVDICRACRRPGESLRHIISGCSHLANGEYLHRHNLVARIIHQQLALLCGLVDREVPYYKYSPAPVLENGRATLYWDRSIITDRTIVANKPDIVLIDRSQRRTVLVDVTIPHDENLVKAEKDKSSKYLDLAHEITAMWDVDSTIIVPIVVSANGLIAKSLDQHLERLSLGGWIKGQMQKAVILDTARIVRRFLTLRP

SEQ ID NO: 5961 - protein, 1193 aa, Agriopis aurantiaria
MAELPVYLRIYIVVFEYHTTREASGSSSDTSGPGTPPPPPPARRGRPPLPARLGPVGHSATRPAPATGGVVRRMRWSRIMNEDCMRAYYRATEGGTNLSAYCARMLPLFQALQPTITVSAQRLSDQVRAIQRCNMLDQSVLDRLRLEEVRTRPTPASTRNPPVASSAPTLASVPASVGTLAALADTAVDEEDLASGVSDQVKEQLRGALEDAISQYRFTSDSRPRLPRLPTHRRNLALMGALNALLAPYLRASEDLVDTHSILYCGAIAACRVACVKFPDTNRAPRTAGGVPAWQVRIERRINTFRTLIAKLICFRRGNNRPRVMRFVTQAFAGTDIRPQHYLANVTERIDYLKQKVYAWANRIRRYRERVDRYWQNRLFQSDQRKVYRGWEETDQRVSDGQRPDANAMINFWRGIWSVPVNHTEGDWMRVVERECESIEPMGSILIDPVDVSCAIRMAQNWKSPGPDGLHNFWIKWIRCSHDRLATQFQEALELGSLPSFMTTGVTFLLHKSGSTTEAKNYRPITCLPTIYKLLTSILRNKINAHIVANNVLAHAQNGCRVGSRGTKELLLIDTAISQQVRRNRGALSAAWIDYKKAYDSVPHSWLERVLELYKIDTTLKSFLCACMRQWTTVLRQPGGGDGTSGPQDLIRIEQGIFQGDSFSPLWFCLALNPLSTLLRDSGLGYRLRRDGQVISHLLYMDDLKLFTPKRQDLVELLKITDVFSSAIRMEFGVDKCAVMHVQQGKVVNSPNLQLSEVMTLRSLSEAETYKYLGMSESLGISVENIKKSVKERFFCRLTKVLNSLLSGGNKVRAFNGWVMPLLIYSFGILRWTQTELDALDRRVRQLLTSHRMLHPRSSVMRLYIPRKWGGRGFLNAKNLHNREVCSLRDFFRNSESGMHRDVVAVDRGLTPLSLANENWRKPSVLSIEDRRDVWKGKELHGRFYRALTGPDVDLLSSVNWLRFGDLFGETEGFACAIADEVIKTNNYRKYIMKDGTVDICRACHRPGESLRHIISGCSHLANGEYLHRHNQVARIIHQQLALRYGLVESEVPYYKYAPAPVLENGRALLYWDRSIITDRTIVANKPDIVLVDRSQRRAVLVDITIPHDENLVKAEKDKLSKYLDLAHEVTAMWDVDSTIIVPIVVSVNGLIAKSLDQHLKRLSLDGWVKGQMQKAVILDTARIVRRFLTLQP

SEQ ID NO: 5962 - protein, 1211 aa, Agriopis aurantiaria
MITRAKTRAAESNARLPPPPASSSSPSTSSGEDEYHTTREASGSSSDTSGPGTPPPPPPARRGRPPLPAGLGPVGHSATRPAPATGGVVRRMRWSRIMNEDCMRAYYRATEGGTNLSAYCARMLPLFQALQPTITVSAQRLSDQVRAIQRCNMLDQSVLDRLRLEEVRTRPTPASTRNPPVASSAPTLASVPASVGTLAALADTAVDEEDLASGVSDQVKEQLRGALEDAISQYRFTSDSRPRLPRLPTHRRNLALMGALNALLAPYLRASEDLVDTHSILYCGAIAACRVARVKFPDTNRAPRTAGGVPAWQVRIERRINTFRTLIAKLICFRRGNNRPRVMRFVTQAFAGTDIRPQHYLANVTERIDYLKQKVYAWANRIRRYRERVDRYWQNRLFQSDQRKVYRGWEETDQRVSDGQRPDANAMINFWRGIWSVPVNHTEGDWMRVVERECESIEPMGSILIDPVDVSCAIRMAQNWKSPGPDGLHNFWIKWIRCSHDRLATQFQEALELGSLPSFMTTGVTFLLHKSGSTTEAKNYRPITCLPTIYKLLTSILRNKINAHIVANNVLAHAQNGCRVGSRGTKELLLIDTAISQQVRRNRGALSAAWIDYKKAYDSVPHSWLERVLELYKIDTTLKSFLCACMRQWTTVLRQPGGGDGTSGPQDLIRIERGIFQGDSFSPLWFCLALNPLSSLLRDSGLGYRLRRDGQVISHLLYMDDLKLFTPKRQDLVELLKITDVFSSAIRMEFGVDKCAVMHVQQGKVVNSPNLQLSEVMTLRSLSEAETYKYLGMSESLGISVENIKKSVKERFFCRLTKVLNSLLSGGNKVRAFNGWVMPLLIYSFGILRWTQTELDALDRRVRQLLTSHRMLHPRSSVMRLYIPRKWGGRGFLNAKNLHNREVCSLRDFFRNSESGMHRDVVAVDRGLTPLSLANENWRKPSVLSIEDRRDVWKGKELHGRFYRALTGPDVDLLSSVNWLRFGDLFGETEGFACAIADEVIKTNNYRKYIMKDGTVDICRACHRPGESLRHIISGCSHLANGEYLHRHNQVARIIHQQLALRYGLVESEVPYYKYAPAPVLENGRALLYWDRSIITDRTIVANKPDIVLVDRSQRRAVLVDITIPHDENLVKAEKDKLSKYLDLAHEVTAMWDVDSTIIVPIVVSVNGLIAKSLDQHLKRLSLDGWVKGQMQKAVILDTARIVRRFLTLQP

SEQ ID NO: 5963 - protein, 1212 aa, Agriopis aurantiaria
MITRSRTKQADTKSARLPSPPASSSSPSTSSGEDEYHTTREASGSSSDTSGPGTPPPPPPARRGRPPLPARLGPVGHSAARPAPATGGVVRRMRWSTIMNEDCMRAYYRATEGGTNLSAYCARMLPLFQALQPTITVSAQRLSDQVRAIHRCKLLDDSVLDRLRQEELRARPIPVSTRDPPVASSAPTLASVPASVVTLAALADPVVDEGDLASGVSDQVREQLRGALEDAISQYRFTPDSRPRLPRLSTHRRNLALMGALNALLAPYLRASEDLVDTHSILYCGAIAACRVARVKFPDTNRAPRTAGGVPAWQVRIERRISTFRTLIAKLVCFRRGNNRPRVMRFVTQAFAGTDIRPQHYLANVTERIDYLKQKVYAWANRIRRYRERVDRYWQNRLFQSDQRKVYRGWEETDQRVSDGQLPDASAMINFWRGIWSVPVEHTEGDWMRVVERECESIEPMGSILIDSIDVSCAIRTAQNWKSPGPDGLHNFWIKWIRCSHDRLATQFQEALELGSLPSFMTTGVTFLLHKSGSTTEAKNYRPITCLPTIYKLLTSILRNKINAHIVANNVLAHAQNGCRVGSRGTKELLLIDTAISQQVRRNKGALSAAWIDYKKAYDSVPHSWLERVLELYKIDTTLKSFLGACMRQWTTVLRQPGGGDGAFGPQDLLRIERGIFQGDSFSPLWFCLALNPLSTLLRDSGLGYRLRRDGQVISHLLYMDDLKLFTPKRQDLVELLKITEGFSSAIRMEFGVDKCAVMHVQRGKVVNSPNLQLSEVMTLRSLSEAETYKYLGMSESLGISVENIKKSVKERFFCRLTKVLNSLLSGGNKVRAFNGWVMPLLIYSFGILRWTQTELDALDRRVRQLLTSHRMLHPRSSVMRLYIPRKWGGRGFLNAKNLHNREVCSLRDFFRNSESGMHRDVVAVDRGLTALSLANENWRKPSVLSIEDRRDVWKGKELHGRFYRALTGPDVDLLASVNWLRFGDLFGETEGFACAIADEVIKTNNYRKYIMKDGTVDICRACHRPGESLRHIISGCSHLANGEYLHRHNLVARIIHQQLALRYSLVESEVPYYKYAPAPVLENGRALLYWDRSIITDRTIVANKPDIVLVDRSQRRAVLVDITIPHDENLVKAEKDKLSKYLDLAHEVTAMWDVDSTIIVPIVVSVNGLIAKSLDQHLKRLSLDGWVKGQMQKAVILDTARIVRRFLTLQP

SEQ ID NO: 5964 - protein, 1214 aa, Agriopis aurantiaria
MITRSKTSAAARLTNAQPPPPPASSSSPSSSSGEDEYHTTREASGSSSDTSGPGTPPPPPPARRGRPPLPARLGLVGHSATRPAPATGGVVRRMRWSPTMNENCMRAYYRATEGGTNLSAYCARMLPLFQDLEPTVTVSAQRLSDQVRAIHRCKLLDDSVLDRLRLEELRARPTPALMRDPPVASSAPTLASLPASVATLAAPADPVVDEGDLTSNSVSDQVREQLRGALEDAISQYRFAPDSRPRLPRLPTHRRNLALMGALNALLAPYLRASEDLVDTHSILYCGAIAACRVARVKFPDTNRAPRTAGGVPAWQVRIERRISTFRTLIAKLICFSRGNNRPRVMRFVTQAFAGTEIRPQHYLANVMERIDYLKQKVYAWVSRIRRYRERVNRYWQNRLFQSDQRKVYRGWEETDQRVSDGQLPDANAMINFWRGIWSVPVEHTEGDWMRVVERECESIEPMGSILIDSVDVSCAIRTAQNWKSPGPDGLHNFWIKWIRCSHDRLATQFQEALELGSLPSFMTTGVTFLLHKSGSTTEAKNYRPITCLPTIYKLLTSILRNKINAHIVANNVLAHAQNGCRVGSRGTKELLLIDTAISQQVRRNKGALSAAWIDYKKAYDSVPHSWLERVLELYKIDTTLKSFLGACMRQWTTVLRQPGGGDGTSGPQDLIRIERGIFQGDSFSPLWFCLALNPLSTLLRDSGLGYRLRRDGQVISHLLYMDDLKLFTPKRQDLVELLKITEVFSSAIRMEFGVDKCAVMHVQRGKVVNSPNLQLSEVMTLRSLSEAETYKYLGMSESLGISVENIKKSVKERFFCRLTKVLNSFLSGGNKVRAFNGWVMPLLIYSFGILRWTQTELDALDRRVRQLLTSHRMLHPRSSVMRLYIPRKWGGRGFLNAKNLHNREVCSLRDFFRNSESGMHRDVVAVDRGLTPLSLANENWRKPSVLSIEDRRDVWKGKELHGRFYRALTGPDVDLLSSVNWLRFGDLFGETEGFACAIADEVIKTNNYRKYIMKDGTVDICRACHRPGESLRHIISGCSHLANGEYLHRHNQVARIIHQQLALRYGLAESEVPYYKYAPAPVLENGSALLYWDRSIITDRTIVANKPDIVLVDRSQRRAVLVDITIPHDENLVKAEKDKLSKYLDLAHEVTAMWDVDSTIIVPIVVSVNGLIAKSLDQHLKRLSLDGWIKGQMQKAVILDTARIVRRFLTLQP

SEQ ID NO: 5965 - protein, 1117 aa, Hedya salicella
MRWSQANNENVMRAYYGATEGGTHLSAYRDRMLLLFQTFEPAIAASAQRLSDQVRAIQRRKLLDDATLDRLRLEVLAARAASTSSRNPPATSPVPAPALDLMPGAPRVDPDSDEGHCVSIVSTQANEQLRRTLEETIERYRFAPDSRPRLPRLPANKRNLALVGALNALLDPYLRASEDLADTHSIMYCGAIAACRVARVKFPDADRAPRTAGGVPAWQVRIERRISTFRTLIAKLICFRGGNNRPRVMRYVAQAFAGTDVSSCDYMACVTERIDFLKQKVYAWASRIRRYRERVDRFQQNRLFQSDQRKVYRKWEGTDQRVTDGRLPDPTAMSNFWRSIWSVPVEHTEGEWMNVVERECEPIEAMGAVTISPDDVSCAARTTQNWKSPGPDGLHNFWVKWFRCSHERLATQFQQALELGSLPSFLTTGVTFLLYKSGSTTEAKNYRPITCLPTLYKLLTSILRAKINTHIVANNVLAFSQNGCRVGSRGTKELLLIDTTICQQVRRSRGSLSAAWIDYKKAYDSVPHSWLERILELYKVDTALRSFLGACMRQWTTVLCQPGGRDARPAPQDFIRIKRGIFQGDSLSPLWFCLALNPLSTLLKDSGLGCRLRRGGEIISHLMYMDDLKLFAPKRPELVELLKVTDTFSSAIKMEFGVDKCAVMHVQRGKVVNSTNLELSETMSLRSLSETETYKYLGMSQALSIADGDIRQAVKERFFCRLTKVLNSLLSGGNKARAFNAWVMPLLTYSFGILRWTQTELDALDRRVRMLLTTHRMLHPRSSVMRLYIPRKCGGRGFLNAKDLHNREVCSLREYFLNNECGIHRDVVAVDKGLTPLSLANENWRRPTVLSTVDRKDVWKSKELHGRFYKALTGPDVDLLASVNWLRFGDLFGETEGFSCAIADEVIMTNNYRRYILKDGTVDICRACRRPGESLRHIMSGCSYLANGEYLHRHNQVARIIHQQLAVKYDLVGSEVPYYKYVPMPVLENGRATLYWDRSILMDRTIVANKPDIVLVDRSKRRAMLVDITIPHDENLVKAEKDKLSKYLDLAHEVTAMWDVDSTIIVPIVVSVNGLIAKSLDEHLKRLSLDGWIKGQIQKAVILDTARIVRRFLSVQP

SEQ ID NO: 5966 - protein, 1215 aa, Erannis defoliaria
MITRSKANIAAAEPNARPPSPPAPSSPSASSGDDEFLTPRESSATSSDSDVSGQRTPAPPPPVRRGRPPLPARLGPAGQPASRPALAAGGVVRRMRWSQINNENCMRAYYGATEGGTNLSAYRVRMLPLFQALEPTVTVSAQRLSDQVRAIQRLNLLDQSLLDRLRLEAQSARATPASTRDSHVASSAPTLASMPTSAATPATPADPVVDEGDCTSMSVSSQVSEQLRRALEDAICQYRFALNSRPRLPRLPTHRRNLALMGALNALLAPYLRASKDLTDTHSILYCGAIAACRVARVRFPDTNRAPRTVGDVPAWQVRIERRISTFRTFIAKLICFSRGNNRPRVMRFVTQAFSGTGLRPQQYMASVTERIDYLKQKVYAWANRIRRYRERVDRYWQNRLFQSDQRKVYRNWEGAAQRVNDGHLPDANAMTNFWRSIWSVPVEHTEGDWMRVVERECEAIEPMGPILIDPVDVSCAIRTAQNWKSPGPDGLHNFWIKWFRCSHDRLATQFQEALELGSLPSFMTTGITFLLHKSGSTTEPKNYRPITCLPTIYKLLTSILSTKINAHIIANNVLAPAQNGCRVGSRGTKELLLIDMAISQQVRRSKGALSAAWIDYKKAYDSVPHSWLERILELYQIDTTLKSFLGACMKQWTTVLRQPGGGNDSSDPQDLIRIERGIFQGDSLSPSWFCLALNPLSTLLKDSGLGYRLRRGSEVISHLLYMDDLKLFAPKHQDLLELLKTTQVFSSAIRMEFGVDKCAVMRVQRGKVVNSPDLQLSEIMTLRSLSEAETYKYLGMSESLGISVVDIKKSVKERFFCRLTKVLNSLLSGGNKARAFNGWVMPLLIYSFGILRWTQTELDALDRRVRQLLTAHRMLHPRSSVMRLYIPRKWGGRGFLNAKNLHNREVCSLRDYFLNNECGMHRDVVTVDKGLTPLSLANENWRRPSVLSTDDRKEVWKSKELHGRFYRALTGSDVDLLASVNWLRFGDLFGETEGFACAIADEVIKTNNYRKYIMKDGTVDICRACHRPGESLRHIISGCSHLANGEYLHRHNQVARIIHQQLALQYGLVESEVPYYKYAPAPVLENGRVLLYWDRSIITDRTIVANKPDIVMVDRSQRQAVLVDVTIPHDENLVKAEKDKLSKYLDLAFEITAMWDVDSTIIVPIVVSANGLIAKSLDQYLKRLSLGGWVKGQIQKAVVLDTARIVRRFLTLQP

SEQ ID NO: 5967 - protein, 1218 aa, Erannis defoliaria
MITRSKNKAKTSTAETTNARPPPLPAPSSPSASSGDDVFLTPRESSVSSSDSDVSGPRTPAPPPPARRGRPPLPARLGPAGLPASRPALAAGGVVRRMRWSQTNNENCMRAYYGATEGGTNLTAYRVRMLSLFQALEPTVTVSAQRLSDQVRAIQRLNLLDQSLLDRLHLEAQSARPTPASTRDLDVASSAPTLTSVPTSAATLATSTDPVLDEGDCTGMSVSTQVSEQLRRALEDAIGQYRFTLNSRPRLPRLPTHRRNLALMGALNALLAPYLRASEDLTDTHSILYCGAIAACRVARVRFPDTNRAPRTAGDVPAWQVRIERRISTFRTLIAKLICFSRGNNRPRVMRFVTQAFAETGIRPQQYMASVTERIDYLKQKVYAWASRIRRYRERVDRYRQNRLFQSDQRKVYRNWEGNEQRVSDGHLPDASAMTNFWRSIWSVPVEHTEGDWMRVVERECEFIEPMGSILIDPVDVSCAIRTAQNWKSPGPDGLHNFWIKWFRCSHDRLATQFQEALELGSLPSFMTTGVTFLLHKSGSTTEPKNYRPITCLPTIYKLLTSILSTKINTHIVANNVLAPAQNGCRVGSRGTKELFLIDMAISQQVRRNKGALSSAWIDYKKAYDSVPHSWLERILELYKIDTTLKSFLSACMRQWTTVLRQPGGGNDSSDPQDLIRIERGIFQGDSLSPSWFCLALNPLSTLLKDSGLGYRLRRGGEVISHLLYMDDLKLFAPKHQDLLELLKTTQVFSSAITMEFGVDKCAVMRVQRGKVVNSPDLQLSEIMTLRSLSEAETYKYLGMSESLGISVVDIKKSVKERFFCRLTKVLNSLLSGSNKARAFNGWVMPLLIYSFGILRWTQTELDALDRRVRQLLTAHRMLHPRSSVMRLYIPRKWGGRGFLNAKNLHNREVCSLRDYFLNNECGMHRDVVTVDKGLTPLSLANENWRRPSVLSTDDRKDVWKSKELHGRFYRALSGPDVDLLASVNWLRFGDLFGETEGFACAIADEVIKTNNYRKYIMKDGTVDICRACHRPGESLRHIISGCSHLANGEYLHRHNQVARIIHQQLALQYGLVESEVPYYKYAPAPVLENGRALLYWDRSIITDRTIVANKPDIVMVDRSQRRAVLVDVTIPHDENLLKAEKDKLSKYLDLAFEITAMWDVDSTIIVPIVVSANGLIAKSLDQYLKRLSLDGWVKGQIQKAVVLDTARIVRRFLTLQP

SEQ ID NO: 5968 - protein, 1206 aa, Erannis defoliaria
MITRSKANIAAAEPNARPPSPPAPSSPSASSGDDEFLTPRERPRPRTPAPPPPVRRGRPPLPARLGPAGLPASRPALAAGGVVRRMRWSQINNENCMRAYYGATEGGTNLSAYRVRMLPLFQALEPTVTVSAQRLSDQVRAIQRLNLLDQSLLDRLRLEAQSARATPASTRDSHVASSAPTLASMPTSAATLATPADPVVDEGDCTSMSVPSQVSEQLRRALEDAICQYRFALNSRPRLPRLPTHRRNLALMGALNALLTPYLRASKDLTDTHSILYCGAIAACRVARVRFPDTNRAPRTVGDVPAWQVRIERRISTFRTLIAKLICFSRGNNRPRVMRFVTQAFSGTGLRPQQYMASVTERIDYLKQKVYAWANRIRRYRERVDRYWQNRLFQSDQRKVYRNWEGAAQRVNDGHLPDANAMTNFWRSIWSVPVEHTEGDWMRVVERECEAIEPMGPILIDPVDVSCAIRTAQNWKSPGPDGLHNFWIKWFRCSHDRLATQFQEALELGSLPSFMTTGITFLLHKSGSTTEPKNYRPITCLPTIYKLLTSILSTKINAHIIANNVLAPAQNGCRVGSRGTKELLLIDMAISQQVRRSKGALSAAWIDYKKAYDSVPHSWLERILELYQIDTTLKSFLGACMRQWTTVLRQPGGGNDSSDPQDLIRIERGIFQGDSLSPSWFCLALNPLSTLLKDSGLGYRLRRGSEVISHLLYMDDLKLFAPKHQDLLELLKTTQVFSSAIRMEFGVDKCAVMRVQRGKVVNSPDLQLSEIMTLRSLSEAETYKYLGMSESLGISVVDIKKSVKERFFCRLTKVLNSLLSGGNKARAFNGWVMPLLIYSFGILRWTQTELDALDRRVRQLLTAHRMLHPRSSVMRLYIPRKWGGRGFLNAKNLHNREVCSLRDYFLNNECGMHRDVVTVDKGLTPLSLANENWRRPSVLSTDDRKEVWKSKELHGRFYRALTGSDVDLLASVNWLRFGDLFGETEGFACAIADEVIKTNNYRKYIMKDGTVDICRACHRPGESLRHIISGCSHLANGEYLHRHNQVARIIHQQLALQYGLVESEVPYYKYAPAPVLENGRVLLYWDRSIITDRTIVANKPDIVMVDRSQRQAVLVDVTIPHDENLVKAEKDKLSKYLDLAFEITAMWDVDSTIIVPIVVSANGLIAKSLDQYLKRLSLGGWVKGQIQKAVVLDTARIVRRFLTLQP

SEQ ID NO: 5969 - protein, 1215 aa, Biston betularia
MWTRSRTAAASGLHDAHIPSPPAPSTPSASSGDEEFATPLATSASSSSSDVSGPRTPAPPPPARRGRPPLPARLGPAGQSASRSALAAGGVVRRMRWSQTNNENCMRAYYGATEGGINLSAYRARMLPLFQALEPTVAVSTQRLSDQVRAIQRLQLLDQSVLDRLRLEALPARPTPVSTRDSPVASSAPTLVSVPTSMVTLATPTDPVVDVGECTSMGVCSQVSEHLRRTLEDAICQYRFAPDSRPRLPRLPTHRRNLALMGALNALLAPYLRASEDLTDTHSILYCGAIAACRVARVKFPDTNRAPRPAGGVPAWQLRIERRISTFRTLIAKLICFSRGNNRPRVMRFVTQAFAGTGIRPQHYLASVTERIDYLKQKVYAWANRIRRYRERADRYWQNRVFQSDQRKVYRDWEGTGQRVSDRQLPDTSVMTEFWRGIWSLPVEHTEGDWMRVVERECESIESMGSVLIDPVDVSCAIRTAQNWKSPGPDGLHNFWIKWIRCSHDRLATQFQEALELGSLPCLMTTGVTFLLHKTGSTTEAKNYRPITCLPTIYKLLTSILRTKINAHVVANNVLAPAQNGCRVGSRGTKELLLIDMTISQQVRRNKGALSTAWIDYKKAYDSVPHSWLERVLELYKIDTTLKSFLGACMRQWTTVLRQPGSGDGSSEPQDLIRIERGIFQGDSLSPLWFCLALNPLSTLLKESGLGHRLRRGGEVISHLLYMDDLKLFAPKRPDLMELLKTTQVFSNAIKMEFGVDKCAVMHVQRGEVVNCPDLQLSETMTFRSLSEAETYKYLGMSESLGIAVVDIKRSVKERFFCRLTKVLNSLLSGGNKVRAFNGWVMPLLIYSFGILRWTQTELDALDRRVRQQLTTHRMLHPRSSVMRLYIPRKLGGRGFLSAKNLHNREVCSLRDYFRDNECGMHRDVVAVDKGLTPLSLANENWRKPSVLSTEDRKEVWKSKQLHGRFYRVLTGPDVDMLASVNWLRFGDLFGETEGFACAIADEVIKTNNYRKYIMKDGTVDICRACHRPGESLRHIISGCSHLANGEYLHRHNQVARIIHQQLALQYGLVESEVPYYKYAPAPVLENGRALLYWDRSIITDRTIVANKPDIVVVDRAQRRAVLVDITIPHDENLVKAEKDKLSKYLDLAHEITAMWDVDSTIIVPIVVTVNGLIAKSLDQHLKRLSLDGWVKGQLQKAVILDTARIVRRFLTLQP

SEQ ID NO: 5970 - protein, 1207 aa, Blastobasis lacticolella
MITRSKRKNQTVNAQPPPTPAPVSSSPSSSNDEFTTASDTSESSDERGLSAAPPPPPARRGRPLPARLGPTGRPAPPMAPATGSVVRRMRWTQSINENVMRAYYGAAEGGTNLSAYRDRMLPLFQVLEPAIDVTAQRLSDQVRAIQRLKRLDDSVLDRLRLESLPVRAVPISTMSLPATSPPQVSPPSPAPRVPRTDATVGVEDCTNVSSVSTETNEYVRRTLEETIARYRFAPNSRPRLPRLPTNRRNLALMGAINVLLDSYIRASDNLVDTHSIMYCGAITACRVARVKFSDADRAPRVAGGAPAWQKRIERRINTFRTLIAKLICFKEGNNRPRVMRFVDQAFAGTGISSRDYMACATERIDFLKQKVCAWANRIRRYRERVDRFRLNRLFQSDQRKVYRKWEGTNQSGSDGSLPDASASNNFWRSIWSVPVEHSEGDWMNVVKRECEIIEPMAAVSICPEDVSCAIDTAQNWKCPGPDGLHNFWIKWFRCSHERLATQFQEALEHGSLPTLFTTGITFLLYKSGSTTEAKNYRPITCLPTLYKLLTSILRKKINNHIIENNILAMSQNGCRVGSRGTKELLLIDMTICQQVRRSRGSLSAAWIDYKKAYDSVPHSWLRRVLELYKINATLRSFLDACMRQWITVLSQPVGGIDHSPPQDFIRIERGIFQGDSLSPLWFCLALNPLSTLLKHSELGCRLRREGEIISHLLYMDDLKLFAPKRQDLMELLKITEIFSNAIRMEFGADKCAVMHVQRGKVANTTNLQLSETMSFRSLSEAETYKYLGMSQSLGIVDEGVKQAVKERFFCRLTKVLNSLLSGGNKVRSFNAWVMPLLTYSFGILRWTQTELDALDRRVRLLLTTHRMLHPRSSVMRLYIPRKCGGRGFLSAKTLHNREVCSLRDYFLNNECGMHRAVVAVDRGLTPLSLANENWRKPKVLSTIDRKDVWKSKELHGRFYRALTGPDVDLLASVNWLRFGDLFGETEGFVCAIADEVIMTNNYRRYILKDGTVDICRACRCPGESLRHITSGCGRLANGEYLHRHNLVARIIHQQLALQYGLVESEVPYYKYVPAPVLENGLATLYWDRSVITDRTIVANRPDIVLTDRSKRRAVLVDVTIPHDGNLVKAEKDKQCKYLDLAHEVTAMWDVDSTIIVPIVVSVNGLIAKSLDQHLKSLSLDGWVKGQIQKAVLLETARIVRRFLSLQP

SEQ ID NO: 5971 - protein, 1207 aa, Blastobasis lacticolella
MITRSKRKNQTMNAQPPPTPAPVSSSPSSSNDEFATASDTSESSDERGLSAAPPPPPARRGRPLPARLGPTGRPAPPMAPATGSVVRRMRWTQSINENVMRAYYGATEGGTNLSAYRDRMLPLFQVLEPAIDVTAQRLSDQVRAIQRLKRLDDSVLDRLRLESLPVRAVPILTMSLPATSPPQVSPPSPAPRVQRTDATVGVEDCTNVSSVSTETNEYVRRTLEETIARYRFAPNSRPRLPRLPTNRRNLALMGAINVLLDPYIRASDNLVDTHSIMYCGAITACRVARVKFSDADRAPRVAGGAPAWQKRIERRINTFRTLIAKLICFKEGNNRPRVMRFVDQAFAGTGISSRDYMACATERIDFLKQKVCAWANRIRRYRERVDRFRLNRLFQSDQRKVYRKWEGTNQSGSDGSLPDASASNIFWRSIWSVPVEHSEGDWMNVVKRECEIIEPMAAVSICPDDVSCAIDTAQNWKCPGPDGLHNFWIKWFRCSHERLATQFQEALEHGSLPTLFTTGITFLLYKSGSTTEAKNYRPITCLPTLYKLLTSILSKKINNHIIENNILAMSQSGCRVGSRGTKELLLIDMTICQQVRRSRGSLSAAWIDYKKAYDSVPHSWLRRVLELYKINATLRSFLDACMRQWITVLSQPVGGIDHSPPQDFIRIERGIFQGDSLSPLWFCLALNPLSTLLKHSELGCRLRREGEVISHLLYMDDLKLFAPKRQDLMELLKITEIFSNAIRMEFGADKCAVMHVQRGKVANTTNLQLSETMSFRSLSEAETYKYLGMSQSLGIVDEGVKQAVKERFFCRLTKVLNSLLSGGNKVRSFNAWVMPLVTYSFGILRWTQTELDALDRRVRLLLTTHRMLHPRSSVMRLYIPRKCGGRGFLSAKTLHNREVCSLRDYFLNNECGMHRAVVAVDRGLTPLSLANENWRKPKVLSTIDRKDVWKSKELHGRFYRALTGPDVDLLASVNWLRFGDLFGETQGFVCAIADEVIMTNNYRRYILKDGTVDICRACRCPGESLRHITSGCGRLANGEYLHRQNLVARIIHQQLALQYGLVESEVPYYKYVPAPVLENGLATLYWDRSVITDRTIVANRPDIVLTDRSKRRAVLVDVTIPHDGNLVKAEKDKQCKYLDLAHEVTAMWDVDSTIIVPIVVSVNGLIAKSLDQHLKSLSLDGWVKGQIQKAVLLETARIVRRFLSLQP

SEQ ID NO: 5972 - protein, 985 aa, Apotomis turbidana
MEEAIRRYRSAPDSRPRLPRLPMHKRNLALMGALDALLDPYLRASEDLADTHSIMSWGAIAACRVACVRFPDTDRAPRTAGGAPAWQVRIERRIGSFRTLIAKLICFRGGNNRPRVMRYVTQAFAGTGTRPCDYMACVTERIDYLKQKVYAWASRIRRYRERVDRFQQNRLFQSDQRKVYRKWEGTDQCVTDGQLPDPTAMINFWRSIWSVPVEHTEGEWMNVVRRECEPIENMGAVTISPDDVSCAVRTTQNWKSPGPDGLHNFWIKWFRSSHERLATQFQDALELGSLPSFMTTGATFLLYKSGSTTEAKNYRPITCLPSLYKLLTSILRTKINTHIVANNVLAFSQNGCRDGSRGTKELLLIDTTICQQVRRNRGSLSATWIDYKKAYDSVPHSWLERILELYKIDTALRSLLSSCMRQWTTVLCQPGVGDGPPGPQDLIRIERGIFQGDSLSPLWFCLALNPLSTLLKDSGLGCRLRRGGEVISHLLYMDDLKLYAPKRQDLVELLEVTETFSSAIKMEFGVDKCAVMHVQRGKVVNPANLQLSETMSLRSISEVETYKYLGMSQSLGIADGDIRQALKERFFCRLTKVLNSLLSGGNKARAFNAWVMPLLTYSFGILRWTQTELDALDTRVRQLLTTHRMRHPRSSVMRMYIPRKCGGRGFLNAKDLHNREVCSLREYFLNNECGIHRDVVAVDKGLTSLSLANENWRRPKVLSTDDRRAVWKSKELHGRFYKALTGPDVDLLASVNWLRFGDLFGETEGFVCAIADEVMMTNNYRRYILKDGTVDICRACRRPGESLRHIISGCSHLAHGEYLHRHNQAARIIHQQLALRYGLVGSEVPYYKYAPMPVLENGRATLYWDRSIITDRTIVANKPDIVLVDRSKCQAVLVDITIPHDENLVKAEKDKLSKYLDLAHEVTTMWDVDSTIIVPIVVSANGLIAKSLDKHLKRLSLDGWIKGQIQKAVLLDTARIVRRFLSLQP

SEQ ID NO: 5973 - protein, 869 aa, Apotomis turbidana
MHYVTQAFAGTGTRPCDYMACVTERIDYLKQKVYAWASRIRRYRERVDRLQQNRLFQSDQRKVYRKWEGTNQCVSDGQLPDSTAMINFWRSIWSVPVEHTEGEWMNVVRLECEPIEAMGAVTISPDDVRCAARTTQNWKSPGPDGLHNFWIKWFRSSHERLATQFQDALELGSLPSFMTTGVTFLLHKSGSTTEAKNYRPITCLPTLYKLLTSILRTKINSHIVANNVLAFSQNGCRVGSRGTKELLLIDTTICQQVRRDRGSLSTAWIDYKKAYDSVPHSWLERILELYKIDTALRSLLGACMRQWTTVFRQPGGGDGPPGPRDLIRIERGIFQGDSLSPLWFCLALNPLSTLLKDSGLGCRLRRGGEVISHLLYMDDLKLYAPKRQDLVELLEVTENFSSAIKMEFGVDKCAVMHVQRGKVVNSANLQLSETMTLRSISEVETYKYLGMSQSLGIADGDIRQALKERFFCRLTKVLNSLLSGGNKARAFNTWVMPLLTYSFGILRWTQTELDALDTRVRQLLTTHRMRHPRSSVMRMYIPRKCGGRGFLNAKDLHNREVCSLREYFLNIECGIHRDVVAVDKGLTSLSLANENWRRPKVLSTDDRRAVWKSKELHGRFYKALTGPDVDLLASVNWLRFGDLFGETEGFVCAIADEVMMTNNYRRYILKDGTVDICRACRRPGESLRHIISGCSHLANGEYLHRHNQVARIIHQQLALQYGLVGSEVPYYKYAPMPVLENGRATLYWDRSIITDRTIVANKPDIVLVDRSKRQAVLVDITIPHDENLVKAEKDKLSKYLDLAHEVTAMWDVDSTIIVPIVVSANGLIAKSLDKHLKRLSLDGWIKGQMQKAVLLDTARIVRRFLSLQP

SEQ ID NO: 5974 - protein, 880 aa, Apotomis turbidana
MFNNNNNRPRVMRYVTQAFAGTGTRPCDYMACVTERIDYLKQKVYAWASRIRRYRERVDRFQQNRLFQSDQRKVYRKWEGTNQCVSDGQLPDPTAMINFWRSIWSVPVEHTEGEWMNVVRRECEPIEAMGAVNISPDDVSCAARKAQNWKSPGPDGLHNFWIKWFRSSHERLATQFQDALELGSLPSFMTTGVTFLLHKSGSTTEAKNYRPITCLPTLYKLLTSILKTKINSHIVANNVLAFSQNGCRVGSRGTKELLLIDTTICQQVRRNRGSLSTAWIDYKKAYDSVPHSWLERILELYKIDTALRSLLGACMRQWTTVLRQPGGGDGPPGPRDLIRIERGIFQGDSLSPLWFCLALNPLSTLLKDSGLGCRLRRGGEVISHLLYMDDLKLYAPKRQDLVELLEVTENFSSAIKMEFGVDKCAVMHVQRGKVVNSANLQLSETMTLRSISEVETYKYLGMSQSLGIADGDIRQALKERFFCRLTKVLNSLLSGGNKARAFNTWVMPLLTYSFGILRWTQTELDALDTRVRQLLTTHRMRHPRSSVMRMYIPRKCGGRGFLNAKDLHNREVCSLREYFLKNECGIHRDVVAVDKGLTSLSLANENWRRPKVLSTDDRRAVWKSKELHGRFYKALTEPDVDLLASVNWLRFGDLFGETEGFVCAIADEVMMTNNYRRYILKDGTVDICRACRRPGESLRHIISGCSHLANGEYLHRHNQVARIIHQQLALQYGLVGSEVPYYKYAPMPVLENGRATLYWDRSIITDRTIVANKPDIVLVDRSKRQAVLVDITIPHDENLVKAEKDKLSKYLDLAHEVTAMWDVDSTIIVPIVVSANGLIAKSLDKHLKRLSLDGWIKGQIQKAVLLDTARIVRRFLSLQP

SEQ ID NO: 5975 - protein, 869 aa, Notocelia uddmanniana
MRFVNQAFAGTGVRPRDYMTCVTERIDFLKQKVYAWASRIRRYRERVDRYQLSRLFQSDQRKVYRKWEGTDHRVSDGRRPDATAMVNFWRSIWSVPVEHTEGAWMDVVKRECESIEPMGSVTVSPEDVSCAIRTAPNWKSPGPDGLHNFWLKWFRCSHARLAAQFQQALELGSLPPPLTTGVTSLLYKSGSTTEAKNYRPITCLPTLYKLLTSILRAKINTHIVANNILAPAQNGCRVGSRGTKELLLIDMTICQRVRRNRGTLSAAWIDYKKAYDSVPHSWLRRILELYKVDAVLRSFLVACMGQWTTVLRQPGGGEGPSGPQDSIRIERGIFQGDSLSPLWFCLALNPLSTLLKDSGVGCQLRREGEVISHLLYMDDLKLFAPNKHDLLELLKTTEVFSSAIKMEFGVDKCAVMHVQRGKVVNSTNLHISETIALRSLSEAETYKYLGMSQSLGIEGGDIKRAVRERFFCRLTKVLNSFLSGGNKVRAFNAWVMPLLTYSFGILRWTQTELDFLDRWVRVLLTAHRMLHPRSSVMRLYIPRKLGGRGFLNAKDLHNREVCSLRDYFLNSECGMHRDVVAADASFTPLSMANENWRRFKVLSTEDRRAVWKSKELHGRFYKALTGPDVDLLASVNWLRFGDLFGETEGFVCAIADEVIMTNNYRKYILKDGTVDICRACRRPGESLRHIISGCSHLANGEYLHRHNLVARIIHQQLALLYGLVDFEVPYYKYTPAPVLENGRATLYWDRSVITDRTIVANKPDIVLTDRLKRQAVLVDITIPHDENLVKAEKDKVCKYLDLAHEVTAMWDVDSTIIVPIVVSVNGLIAKSLDQHLKRLSLDGWVKGQIQKAVLLDTARIVRRFLSLSP

SEQ ID NO: 5976 - protein, 1206 aa, Notocelia uddmanniana
MITRTRSRAAQRARPPSPPAPSSSSPSSSGDEFATAPDTSESSCDERGPPSPPPRPPARRGRPPLPARLGPVGHSALPTAPAAGGVVRRMRWTQEMNENCMRAYFGATEGETNLSAYRVRMLPLFQALEPTITVTAQRLSDQVRVIQRLKRLDDATLDRLRLEALSARTASALARDPPATSPAPVPTPDMAPGVPRVDPSVDEDCANQTVSTQANEQLRRALEEAITRYRSTPNSRPRLPRLPVNRRNLALMGALNDLLDPYLRASEDLIDTHSILYCGAIAACRVARVKFPDADRAPRTAGGVPAWQVRIERRINTFRTLIAKLICFRGGNDRPRVMRFVNQAFAGTGVRPRDYVTCVTERIDFLKQKVYAWASRIRRYRERVDRYQQNRLFQSDQRKVYRKWEGTDHRVCDGQRPDATAMGNFWRSIWSVPVEHTEGAWIGVVERECESIEPMGSVTISPEDISCAIRTAPNWKSPGPDGLHNFWLKWFRCSHERLATQFQQALELGSLPHLLTTGVTSLLYKSGSTTEAKNYRPITCLPTLYKLLTSILRAKINTHIVANNILAPAQNGCRVGSRGTKELLLIDMTICQRVRRSRGALSAAWIDYKKAYDSVPHTWLRRILELYKVDAALRSFLSACMGQWTTVLRQPGGGDGSSGPQDSIRIERGIFQGDSLSPLWFCLALNPLSTLLKDSGLGCQLRRGGEVISHLLYMDDLKLFAPNRQDLLELLKTTEVFSSAIKMEFGVDKCAVMHVQRGKVVNSTNLQLSETMSLRSLSEAETYKYLGMSQSLGIEGEGIKQAVKERFFCRLTKVLNSFLSGGNRVRAFNAWVMPLLTYSFGILRWTQTELDALDRRVRVLLTAHRMLHPRSSVMRLYIPRKCGGRGFLNAKDLHHREVCSLRDYFLNSECGMHRDVVAVDASFTPLSMANENWRRFKVLSTEDRKAEWKSRELHGRFYKALTGPDVDLLASVNWLRFGDLFGETEGFVCAIADEVIMTNNYRKYILKDGTVDICRACRRPGESLRHIISGCGHLANGEYLHRHNLVARIIHQQLALSYGLVNLEVPYYKYLPAPVLENGRATLYWDRSIITDSTIVANKPDIVLIDRSKRQAVLVDITIPHDENLVKAEKDKVSKYLDLAHEVTAMWDVDSTIIVPIVVSANGLIAKSLDQHLKRISLDGWVKGQIQKAVLLDTARIVRRFLSLSP

SEQ ID NO: 5977 - protein, 955 aa, Notocelia uddmanniana
MGALNDLLDPYLRASEDLIDTHSILYCGAIAACRVARVKFPDADRAPRTAGGVPAWQVRIERRINTFRTLIAKLICFRGGNDRPRVMRFVNQAFAGTGVRPRDYVTCVTERIDFLKQKVYAWASRIRRYRERVDRYQQNRLFQSDQRKVYRKWEGTDHRVCDGQRPDATAMGNFWRSIWSVPVEHTEGAWIGVVERECESIEPMGSVTISPEDISCAIRTAPNWKSPGPDGLHNFWLKWFRCSHERLATQFQQALELGSLPHLLTTGVTSLLYKSGSTTEAKNYRPITCLPTLYKLLTSILRAKINTHIVANNILAPAQNGCRVGSRGTKELLLIDMTICQRVRRSRGALSAAWIDYKKAYDSVPHSWLRRILELYKVDAALRSFLSACMGQWTTVLRQPGGGDGSSGPQDSIRIERGIFQGDSLSPLWFCLALNPLSTLLKDSGLGCQLRRGGEVISHLLYMDDLKLFAPNRQDLLELLKTTEVFSSAIKMEFGVDKCAVMHVQRGKVVNSTNLQLSETMSLRSLSEAETYKYLGMSQSLGIEGEGIKQAVKERFFCRLTKVLNSFLSGGNKVRAFNAWVMPLLTYSFGILRWTQTELDALDRRVRVLLTTHRMLHPRSSVMRLYIPRKCGGRGFLNAKDLHNREVCSLRDYFLNSECGMHRDVVAVDASFTPLSMANENWRRFKVLSTEDRKAEWKSRELHGRFYKALTGPDVDLLASVNWLRFGDLFGETEGFVCAIADEVIMTNNYRKYILKDGTVDICRACRRPGESLRHIISGCGHLANGEYLHRHNLVARIIHQQLALSYGLVNFEVPYYKYLPAPVLENGRATLYWDRSIITDRTIVANKPDIVLIDRSKRQAVLVDITIPHDENLVKAEKDKVSKYLDLAHEVTAMWDVDSTIIVPIVVSANGLIAKSLDQHLKRLSLDGWVKGQIQKAVLLDTARIVRRFLSLSP

SEQ ID NO: 5978 - protein, 1206 aa, Notocelia uddmanniana
MITRTRSRAAQRARPPSPPAPSSSSPSSSGDEFATAPDTSESSCDERGPPSPPPRPPARRGRPPLPARLGPVGHSALPTAPAAGGVVRRMRWTQEMNENCMRAYFGATEGETNLSAYRVRMLPLFQALEPTITVTAQRLSDQVRVIQRLKRLDDATLDRLRLEALSARTASALARDPPATSPAPVPTPDMAPGVPRVDPSVDEDCANQTVSTQTNEQLRRALEEAITRYRSTPNSRPRLPRLPVNRRNLALMGALNDLLDPYLRASEDLIDTHSILYCGAIAACRVARVKFPDADRAPRTAGGVPAWQVRIERRINTFRTLIAKLICFRGGNDRPRVMRFVNQAFAGTGVRPRDYVTCVTERIDFLKQKVYAWASRIRRYRERVDRYQQNRLFQSDQRKVYRKWEGTDHRVCDGQRPDATAMGNFWRSIWSVPVEHTEGAWIGVVERECESIEPMGSVTISPEDISCAIRTAPNWKSPGPDGLHNFWLKWFRCSHERLATQFQQALELGSLPHLLTTGVTSLLYKSGSTTEAKNYRPITCLPTLYKLLTSILRAKINTHIVANNILAPAQNGCRVGSRGTKELLLIDMTICQRVRRSRGALSAAWIDYKKAYDSVPHSWLRRILELYKVDAALRSFLSACMGQWTTVLRQPGGGDGSSGPQDSIRIERGIFQGDSLSPLWFCLALNPLSTLLKDSGLGCQLRRGGEVISHLLYMDDLKLFAPNRQDLLELLKTTEVFSSAIKMEFGVDKCAVMHVQRGKVVNSTNLQLSETMSLRSLSEAETYKYLGMSQSLGIEGEGIKQAVKERFFCRLTKVLNSFLSGGNKVRAFNAWVMPLLTYSFGILRWTQTELDALDRRVRVLLTTHRMLHPRSSVMRLYIPRKCGGRGFLNAKDLHNREVCSLRDYFLNSECGMHRDVVAVDASFTPLSMANENWRRFKVLSTEDRKAEWKSRELHGRFYKALTGPDVDLLASVNWLRFGDLFGETEGFVCAIADEVIMTNNYRKYILKDGTVDICRACRRPGESLRHIISGCGHLANGEYLHRHNLVARIIHQQLALSYGLVNFEVPYYKYLPAPVLENGRATLYWDRSIITDRTIVANKPDIVLIDRSKRQAVLVDITIPHDENLVKAEKDKVSKYLDLAHEVTAMWDVDSTIIVPIVVSANGLIAKSLDQHLKRLSLDGWVKGQIQKAVLLDTARIVRRFLSLSP

SEQ ID NO: 5979 - protein, 1206 aa, Notocelia uddmanniana
MITRTRSRAAQRARPPSPPAPSSSSPSSSGDEFTTAPDTSESSCDERGPPSPPPRPPARRGRPPLPARLGPVGHSALPTAPAAGGVVRRMRWTQEMNENCMRAYFGATEGETNLSAYRVRMLPLFQALEPTITVTAQRLSDQVRVIQRLKRLDDATLDRLRLEALSARTASALARDPPATSPAPVPTPDMAPEVPRVDPSVDEDCANQTVSTQANEQLRRALEEAITRYRSTPNSRPRLPRLPVNRRNLALMGALNDLLDPYLRASEDLIDTHSILYCGAIAACRVARVKFPDADRAPRTAGGVPAWQVRIERRVNTFRTLIAKLICFRGGNDRPRVMRFVNQAFAGTGVRPRDYVTCVTERIDFLKQKVYVWASRIRRYRERVDRYQQNRLFQSDQRKVYRKWEGTDHRVCDGQRPDATAMGNFWRSIWSVPVEHTEGAWIGVVERECESIEPMGSVTISPEDISCAIRTAPKWKSPGPDGLHNFWLKWFRCSHERLATQFQQALELGSLPHLLTTGVTSLLYKSGSTTEAKNYRPITCLPTLYKLLTSILRAKINTHIVANNILAPAQNGCRVGSRGTKELLLIDMTICQRVRRSRGALSAAWIDYKKAYDSVPHSWLRRILELYKVDAALRSFLSACMGQWTTVLRQPGGGDGSSGPQDSIRIERGIFQGDSLSPLWFCLALNPLSTLLKDSGLGCQLRRGGEVISHLLYMDDLKLFAPNRQDLLELLKTTEVFSSAIKMEFGVHKCAVMHVQRGKVVNSTNLQLSETMSLRSLSEAETYKYLGMSQSLGIEGEGIKQAVKERFFCRLTKVLNSFLSGGNKVRAFNAWVMPLLTYSFGILRWTQTELDALDRRVRVLLTAHRMLHPRSSVMRLYIPRKCGGRGFLNAKDLHNREVCSLRDYFLNSECGMHRDVVAVDASFTPLSMANENWRRFKVLSTQDRKAEWKSRELHGRFYKALTGPDVDLLASVNWLRFGDLFGETEGFVCAIADEVIMTNNYRRYILKDGTVDICRSCRRPGESLRHIISGCGHLANGEYLHRHNLVARIIHQQLALSYGLVNFEVPYYKYLPAPVLENGRATLYWDRSIITDRTIVANKPDIVLIDRSKRQAVLVDITIPHDENLVKAEKDKVSKYLDLAHEVTAMWDVDSTIIVPIVVSANGLIAKSLDQHLKRLSLDGWVKGQIQKAVLLDTARIVRRFLSLSP

SEQ ID NO: 5980 - protein, 1207 aa, Crocallis elinguaria
MITRSRNKAGTASARQSPPPASSSPSSSSGDEYGTPLDTSASSDEDGPPSPPPPPPPARRGRPPLPARLGPAGHSVPRAAPATGGIVRRMRWTSDMNENCMRAYYGATEGGTNMSACRDRMLPLFQTLEPSVAVSAQRLSDQVRAIQRLKLLDESVLDRLRLEALPIRATSASTRDLSVAPLVLAPLPAPSSVATRIDPVVDEDDCANISVSTQVNEQLRRALEDAILDYQYTPDSRPRLPRLPTNRRNLALMGALNVLLAPYLRASENLFDTHSIMYCGAIAVCRVARVKFPDADRAPRTAGSAPAWQVRIERRINTFRTLIAKLVCFSRGNNRPRVMRFVNQAFAGTGIRPQNYMAGVTERIDFLKQKIYAWVNRIRRYRERVDRYHQNRLFESDQRKVYRNWEGTDQRVSDGQLPDTNAMINFWRGIWSVPVEHTEGDWMRTVEQSCESIETMGSVTIDPIDVSCAIRTAQNWKSPGPDGLHNFWIKWIRCSHECLAVQFQEALELGSLPCFLTTGVTSLLHKSGSTTEAKNYRPITCLPTLYKLLTSILRVKINSHVVANNILAPAQNGCRVGSRGTKELLLIDTAICQRVRRNKGALSAAWIDYKKAYDSVPHSWLERILELYKIDATLRSFLGMCMRQWTTVLRQPGSGNSPSGPENFIKIERGIFQGDSLSPLWFCLALNPLSTLLRDSRLGCQLRREGEIISHLLYMDDLKLFAPKRPDLMELLKITEIFSSAIKMEFGVDKCAVMHVQRGKVVNSDNLQLSETMTLRSLSEAETYKYLGMSQSLGIAVGVIKQSVKERFFCRLTKVLNSLLSGGNKARAFNGWVMPLLIYSFGILKWTQTELDSLDRRVRQLLTYHRMLHPRSSVMRLYIPRKWGGRGFLNAKTLHSREVCSLREYFLNNECGMHRDVVAVDRNLTPLSLANENWRKPVVMTTEDRKDVWKGKELHGRFYRALTGSDVDLLASVNWLRFGDLFGETEGFVCAIMDEVIKTNNYRKYIMKDGTVDICRACRRPGESLRHIISGCSHLANGEYLHRHNLVARIIHQQIALQYGLVESEVPYYKYAPAPVLENGRALLYWDRSVITDRTIVANKPDIVLVDRSQRRAVLVDITVPHDENLVKAEKDKLSKYLDLAHEVTAMWNVDSTIIVPIVVSANGLVAKSLDQHLKRLSLDGWIKGRMQKAVLLDTARIVRRFLTLQP

SEQ ID NO: 5981 - protein, 1207 aa, Crocallis elinguaria
MITRSRNKAGTASARQPPPPASSSPSSSSGDEYGTPLDTSASSDEDGPPSPPPPPPPARRGRPPLPARLGPVGHSVPRAAPATGGIVRRMRWTSDMNENCMRAYYGATEGGTNMSAYRDRMLPLFQTLEPSVAVSTQRLSDQVRAIQRLKLLDESVLDRLRLEALPIRATSASTRDLSVAPPVPAPLPAPSSVATRIDPVVDEDDCANISVSTQVNEQLRRALEDAILEYQYTPDSRPRLPRLPTNRRNLALMGALNVLLAPYLRASENLFDTHSIMYCGAIAVCRVARVKFPDADQAPRTAGNAPAWQVRIERRINTFRTLIAKLVCFSRGNNRPRVMRFVNQAFAGTGIRPQNYMAGVTERIDFLKQKIYAWVNRIRRYRERVDRYHQNRLFESDQRKVYRNWEGTDQRVSDGQMPDTNAMINFWRGIWSVPVEHTEGDWMRTVEQSCESIETMGSVTIDPIDVSCAIRTAQNWKSPGPDGLHNFWIKWIRCSHECLAVQFQEALELGSLPCFLTTGVTSLLHKSGSTTEAKNYRPITCLPTLYKLLTSILRAKINSHVVANNILAPAQNGCRVGSRGTKELLLIDTAICQQVRRNRGALSTAWIDYKKAYDSVPHSWLERILELYKIDTTLRSFLSTCMRQWTTVLRQPGSGNSPSGPENFIKIERGIFQGDSLSPLWFCLALNPLSTLLRDSRLGCKLRREGEIISHLLYMDDLKLLAPKSSDLMKLLKITEIFSSAIKMEFGVDKCAVMHVQRGKVVNSDNLQLSETMTLRSLSEAETYRYLGMSQSLGIAVGDIKQSVKERFFCRLTKVLNSLLSGGNKARAFNGWVMPLLIYSFGIIKWTQTELDSLDRRVRQLLTYHRMLHPRSSVMRLYIPRKWGGRGFLNAKTLHNREVCSLREYFLNNECGMHRDVVAVDRNLTPLSLANENWRKPVVMTTEDRKDVWKGKELHGRFYRALTGSDVDLLASVNWLRFGDLFGETEGFVCAIMDEVIKTNNYRKYIMKDGTVDICRACRRPGESLRHIISGCSHLANGEYLHRHNLVARIIHQQIALQYGLVESEVPYYKYAPAPVLENGRALLYWDRSIITDRTIVANKPDIVLVDRSQRRAVLVDITVPHDENLVKAEKDKLSKYLDLAHEVTAMWNVDSTIIVPIVVSANGLVAKSLDQHLKRLSLDGWIKGRMQKAVLLDTARIVRRFLTLQP

SEQ ID NO: 5982 - protein, 1207 aa, Crocallis elinguaria
MITRSRNKAGTASARQSPPPASSSPSSSSGDEYDTPLDTSASSDEDGPPSPPPPPPPARRGRPPLPARLGPAGHSVPRAAPATGGIVRRMRWTSDMNENCMRAYYGATEGGTNMSAYRDRMLPLFQTLEPSVAVSTQRLSDQVRAIQRLKLLDESVLDRLRLEALPIRATSASARDLSVAPPVPAPLPAPSSVATPIDPVVDEDDCANISVSTQVNEQLRRALEDAILEYQYTPDSRPRLPRLPTNRRNLALMGALNVLLAPYLRASENLFDTHSIMYCGAIAVCRVARVKFPDADRAPRPAGSAPAWQVRIERRINTFRTLIAKLICFSRGNNRPRVMRFVNQAFAGTGIRPQNYMAGVTERIDFLKQKIYAWVNRIRRYRERVDRYHQNRLFESDQRKVYRNWEGTDQRVSDGQLPDTNAMINFWRGIWSVPVEHTEGDWMRTVEQSCESIETMGSVTIDPIDVSCAIRTAQNWKSPGPDGLHNFWIKWIRCSHECLAVQFQEALELGSLPRFLTTGVTSLLHKSGSTTEAKNYRPITCLPTLYKLLTSILRAKINSHVVANNILAPAQNGCRVGSRGTKELLLIDTAICQQVRRNKGALSTAWIDYKKAYDSVPHSWLERILELYKIDTTLRTFLSTCMRQWTTVLRQPGSGNSPSGPENFIKIERGIFQGDSLSPLWFCLALNPLSTLLRDSRLGCKLRREGEIISHLLYMDDLKLLAPKSPDLMKLLKITEIFSSAIKMEFGVDKCAVMHVQRGKVVNSDNLQLSETMTLRSLSETETYRYLGMSQSLGITVGDIKQSVKERFFCRLTKVLNSLLSGGNKARAFNGWVMPLLIYSFGILKWTQTELDSLDRRVRQLLTYHRMLHPRSSVMRLYIPRKWGGRGFLNAKTLHNREVCSLREYFLNNECGMHRDVVAVDRNLTPLSLANENWHKPVVMTTEDRKEVWKGKELHGRFYRALTGSDVDLLASVNWLRFGDLFGETEGFVCAIMDEVIKTNNYRKYIMKDGTVDICRACRRPGESLRHIISGCSHLANGEYLHRHNLVARIIHQQIAFQYGLVESEVPYYKYAPAPVLENGRALLYWDRSIITDRTIVANKPDIVLVDRSQRRAVLVDITVPHDENLVKAEKDKLSKYLDLAHEVTAMWNVDSTIIVPIVVSANGLVAKSLDQHLKRLSLDGWIKGRMQKAVLLDTARIVRRFLTLQP

SEQ ID NO: 5983 - protein, 924 aa, Peribatodes rhomboidaria
MSRCTRVKFPDTSRAPRPAGGVPAWQVRIERRISTFRTLIAKLLCFSRGNTRPRVMRFVTQAFAGTDIRPQYYLANVTERIDYLKQKVYAWANRIRRYRERVDRYWQNRLFQSDQRKVYRGWEGTEQCVIDGHRPNASAMIDFWRGIWSVPVEHTEGEWMRIVERECESIESMESILIDSVDVSCAIRTAQNWKSPGPDGLHNFWIKWIRCSHDRLAIQFQEALELCSLPSFMTTGVTFLLHKSGSTTDPKNYRPITCLPTIYKLLTSILRNKINTHIVANNVLAPAQNGCRVGSRGTKELLLIDMAISQQVRRNKGALSVAWIDYKKAYDSVPHSWLERILELYKIDITLKSFLGACMRQWTTVLRQPGGGEVSAGPQDLIRIERGIFQGDSLSPLWFCLALNPLSTLLKNLGLGHRLRRGGEVISHLLYMDDLKLFAPKRQDLMELLKTTEVFSSAIKMEFGVDKCAVMHVQRGKVVNSPNLQLSETMTLRSLSEVETYKYLGMSESLGISVVDIKKSIKERFFCRLTKVLNSLLSGGNKMRAFNGWVMPLLIYSFGILRWTQTELDALDRRVRQLLTTHRMLHPRSSVMRLYIPRKWGGRGMLNAKNLHNREVYRLRSFFRNNDCGMHCDVVAVDKGLTPLSLANENWRQPSVLSTEDRKNVWKCKELHGRFYRALTGPDVDLLASVNWLRFGDLFGETEGFACAIADEVIKTNNYRKYILKDGTVDICRACHRPGESLRHIISGCSHLANGEYLHRHNQVARIIHQQLALQYGLVESEVPYYKYAPASVLENGRALLYWDRSIITDRTIVANKPDIVLVDRSQRRAVLVDITIPHDENLVKAEQDKLSKYLDLAHEVTAMWDVDSTIIVPIVVTVNGLIAKSLDQHLKRLSLDGWIKGQIQKAVILDTCRIVRRFLTLQP

SEQ ID NO: 5984 - protein, 1228 aa, Peribatodes rhomboidaria
MSNNQNTKNLEIKLWKMITRSRTRKAADTTSTRPPPSPSSSSEGPSSEEDEYATPLDTTGSSDEEAAPTPAPPPPPARRGRPPLPARLGPAGRSAPPTAPATGGVVCRMRWTQTMNENCMRAYYGATEGGTNLTAYRVRMLSLFQVLEPTVTVSTQRLSDQVRAIHRCKLLDQSVLDRLCLEAIRARPTPASTRDQPVASSAPTRASVPALAATLATMADTDVDGDRTSASVSSQVSEHLRRTLEDAIFQYRFAPDSRPRLPRLPTHRHNMALMGALNVLLAPYLRASENLTDTHSILYCGAIAACRVARVKFPDTSRAPRPAGGVPAWQVRIERRISTFRTLIAKLLCFSRGNTRPRVMRFVTQAFAGTDIRPQYYLANVTERIDYLKQKVYAWANRIRRYRERVDRYWQNRLFQSDQRKVYRGWEGTEQCVIDGHRPDASAMIDFWRGIWSVPVEHTEGEWMRIVERECESIESMESILIDSVDVSCAIRTAQNWKSPGPDGLHNFWIKWIRCSHDRLAMQFQEALELGSLPSFMTTGVTFLLHKSGSTTDPKNYRPITCLPTIYKLLTSILRNKINTHIVANNVLAPAQNGCRVGSRGTKELLLIDMAISQQVRRNRGALSVAWIDYKKAYDSVPHSWLERILELYKIDITLKSFLSACMRQWTTVLRQPGGGEVSADPQDLIRIERGIFQGDSLSPLWFCLALNPLSTLLKDLGLGHRLRRRGEVISHLLYMDDLKLLAPKRQDLMELLKTTEVFSSAIKMEFGVDKCAVMHVQRGKVVNSPNLQLSETMTLRSLSEVETYKYLGMSESLGISVVDIKKSIKERFFCRLTKVLNSLLSGGNKVRAFNGWVMPLLIYSFGILRWTQTELDALDRRVRQLLTTHRMLHPRSSVMRLYIPRKWGGRGMLNAKNLHNREVYRLRSFFRNNDCGMHSDVVAVDKGLTPLSLANENWRQPSVLSTEDRKNVWKGKELHGRFYRALIGPDVDLLASVNWLRFGDLFGETEGFACAIADEVIKTNNYRKYILKDGTVDICRACHRPGESLRHIISGCSHLANGEYLHRYNQVARIIHQQLALQYGLVESEVPYYKYAPASVLENGRALLYWDRSIITDRTIVANKPDIVLVDRSQRRAVLVDITIPHDENLVKAEKDKLSKYLDLAHEVTAMWDVDSTIIVPIVVTVNGLIAKSLDQHLKRLSLDGWIKGQIQSAVILDTCRIVRRFLTLQP

SEQ ID NO: 5985 - protein, 1212 aa, Pammene fasciana
MITRSKSRQQQASPPNARPPSSPASSVSSPSSSGDEFATAPDTSESSDECGPPPPPPRPPARRGRPPLPARLGLAGHPAPPRAPAAGGIVRRMRWTQTMNENVMRAYYGATEGGTNLCAYRVRLLPLFQALEPTTNVTAQRLSDQVRVIQRDKRLDDSTLDRLRLEALSAHAASTSARDPPATAPDPMPAPDLASGAPRVDPSADEEEIATQSVSSTANEQLRRTLEEAITQYRSTNIPRPRLPRLPMNRRNLALMGALNDLLDPFLRTSKDLDDTHSIMYCGAIAACRVARVKFPDAERAPRTAGGVPAWQVRIERRINSFRTLIAKLICFRGGNNRPRVMRFVHQAFAGTDIEPRDYMANVTERIDFLKQKVYAWASRIRRYRERVDRFRQNRLFQSDQRKVYRRWEEADPRVSDVRLPDATAMSDFWRSIWSAPVEHTEGEWMSVVERECETIEPMGAITISPDDVSCAIRTAQNWKSPGPDGLHNFWLKWFRCSHSRLATQFQQALELGSLPPSLTTGVTFLLYKSGSTTEAKNYRPITCLPTLYKLLTSILRAKINAHMVANNILASAQNGCRVGSRGTKELLLIDMTICQRVRRNRGALSAAWIDYKKAYDSVPHSWLERILELYKIDAALRSFLGACMRQWTTVLRQPGAGDDPPGRQDFIRIERGIFQGDSLSPLWFCLALNPLSTLLKDSGLGCRLRREGEVISHLLYMDDLKLFAPNNRDLLELLKTTEVFSSSIKMEFGVDKCAVMHVQRGKVVNSTNLQLSETMTFRSISESETYKYLGMSQSLGIEDAGIKQALRERFFGRLTKVLNSLLSGGNKVRAFNAWVMPLLTYSFGILRWTQTELDALDRRVRQLLTTHRMLHPRSSVMRLYIPRKCGGRGFLNAKNLHNREVYNLRNYFLNNECGMHRDVVAIDKGLTPLSLANENWRKPVVLSTEDRKAVWKSKELHGRFYGALTGPDVDLLASVNWLRFGDLFGETEGFACAIADEVIMTNNYRRYILKDGTVDICRACRRPGESLRHIISGCSHLANGEYLHRHNLVARIIHQQLALLYGLVDHEVPYYKYTPAPVLENGRATLYWDRSIITDRTIVANKPDIVVIDRPQRRAMLVDITVPCDVNLVKAEKDKSSKYLDLAHEVTAMWEVDSAIIVPIVVSANGLIAKSLDQYLERLSLRGCGWIKGQIQKAVILDTARIVRRFLSLRP

SEQ ID NO: 5986 - protein, 1210 aa, Pammene fasciana
MITRAQTKAAQQQRARPPPSPTPSSSSPSSSGDEYATAPDANISESSSDERGSSPSPPPPPARRGKRPLPARLGPAGQPAPPTAPAAGGPVRRMRWTPSINENVMRAYFGATVGGTQLSAYRSKMLPLFQALEPTITVSEQRLSDQVRVIQRLKRLDDATLDRLRLEALSAHAASASTRDPPATSPDPMPAPGRASGAPRVDPSVDEEFTCQSVSTSANEQLRRALEEAITQYRSTNNSRPRLPRLPMNRRNLAIIGALNDLLDPLVRTSKDLDDTHSIMYCGAIAACRVARVKFPDAERAPRTAGGVPAWQVRIERRINSFRTLIAKLICFRGGNDRPRVMRFVNQAFAGTGIEPRDYMANITERIDFLKQKVYAWANRIRRYRKRVERFQQNRLFQSDQRKVYRRWEETDPRVSDAQLPDATAMTDFWRSIWSVPVEHTEGEWMSVVERECESIEPMGATTISPDDVSCAIRTAQNWKSPGPDGLHNFWLKWFRCSHSRLATQFQQALELGSLPPSLTTGVTFLLYKSGSTTEAKNYRPITCLPTLYKLLTSILRAKINAHIVANNILASAQNGCRVGSRGTKELLLIDMTICQRVRRNRGALAAAWIDYKKAYDSVPHSWLERILELYKVDATLRSFLGACMRQWTTVLRQPGGGDDPLGPQDSIRIKRGIFQGDSLSPLWFCLALNPLSTLLKDSGLGCQLRREGEAISHLLYMDDLKLFAPNNRDLMELLETTEVFSSSIKMEFGVDKCAVMHVQRGKVVNSTNLQLSETMTFRSISESETYKYLGMSQSLGIEDAGIKQALRERFFGRLTKVLSSLLSGGNKVRAFNAWVMPLLTYSFGILRWTQTELDALDRRVRLLLTTHRMLHPRSSVMRLYIPRKCGGRGFLNAKNLHNREVYSLRNYFLNNECGMHRDVVAVDKGLTPLSLANENWRKPVVLSTEDRKMVWKSKELHGRFYKALTGPDVDLLASVNWLRFGDLFGETEGFACAIADEVIMTNNYRRYILKDGTVDICRACRRPGESLRHIISGCSHLANGEYLHRHNLVARIIHQQLALQYGLVNREVPYYMYLPAPVLENGRATLYWDRSIITDRTIVANKPDVVLIDRSQRRAVLVDVAIPHDENLVKAEKDKSSKYLDLAHEITAMWDVDSTIIVPVIVSANGLIAKSLDQHLERLSLGGWIKGQMQKAVVMDTARIVRRFLSLRP

SEQ ID NO: 5987 - protein, 1210 aa, Pammene fasciana
MITRSKARAATTHARPPSPLASSSSPSTSSSSDDFETAPDTDESSDESGPPPPPPQPPARRGRPPLPARLGPTGHPVPPRAPAAGGIVRRMRWTCSMNENVMRAYYGATEGGTNLCAYRARILPLFQALEPTIDTTTQRLSDQVRVIQRLKRLDDATLDRLRLEALSARAASTSARDPPATSPDPVPAPDLASGAPRIDPSADEEYIASQSVSSTANEQLRRTLEEAITQYRSTNIPRPRLPRLPMNRRNLALMGALNDLLDPILRTSKDLDDTHSIMYCGAIAACRVARIKFPDAERAPRTAGGVPAWQVRIERRINSFRTLIAKLICFRGGNNRPRVMRFVHQAFAGTDIEPRDYMANITERIDFLRQKVYAWASRIRRYRERVDRFRQNRLFQSDQRKVYRRWEEADPRVSDVRLPDATAMTDFWRSIWSAPVEHTEGEWMNVVERECESIEPMGAITISPDDVSCAIRTSQNWKSPGPDGLHNFWLKWFRCSHSRLATQFQHALELGSLPPSLTTGVTFLLYKSGSTTEAKNYRPITCLPTLYKLLTSILRAKINAHMVANNILASAQNGCRVGSRGTKELLLIDMTICQRVRRNRGALSAAWIDYKKAYDSVPHSWLERILELYKVDAALRSFLGACMRQWTIVLRQPGGGDDPPGPQDFIRIERGIFQGDSLSPLWFCLALNPLSTLLKDSGLGCRLRREGEVISHLLYMDDLKLFAPNNRDLLELLKTTEVFSSSIKMEFGVDKCAVMHVQRGKVVNSTNLQLSETMTFRSISESETYKYLGMSQSLGIEDVGIKQALKERFFGRLTKVLNSLLSGGNKVRAFNAWVMPLLTYSFGILRWTQTELDALDRRVRLLLTTHRMLHPRSSVMRLYIPRKCGGRGFLNAKNLHNREVYNLRNYFLNNECGMHRDVVTVDKNLTPLSLANENWRKPVVLSTEDRKAVWKSKELHGRFYGALTGPDVDLLASVNWLRFGDLFGETEGFACAIADEVIMTNNYRRYILKDGTVDICRACRRPGESLRHIISGCSHLANGEYLHRHNLVARIIHQQLALLYGLVAHEVPYYKYIPAPVLENDRATLYWDRSIITDRTIVANKPDIVVIDRPQRRAMLVDITVPCDVNLVKAEKDKSSKYLDLAHEVTAMWEVDSAIIVPIVVSANGLIAKSLDQHLERLSLRGCGWIKGQIQKAVILDTARIVRRFLTLRP

SEQ ID NO: 5988 - protein, 1166 aa, Aeromachus stigmata
MNLRPRRRRADPHARPPSPPAPSSSSSSDSSGNEFATAPETSESSDDGRGPSAAPPPPPVRRGRPPLPARLGPTEPYAPRLAPATGGVVRRMRWSSTNNENCMRAYYGATEGETNMTAYRVRMLALFQALEPTITVSAQRLSDQVRVIKRNKRLDDSVLERLRLEALPERTVPVVTHGRPSTPRILSTSDVIPGLTQIDPVVNDDDSANISVSTQTHEQLRRALKEAIDRYRYTPGSRPHLPRLPTNKHNIALMIALDNLLVSYFETSENLVDTHSILYCGAITACRVARVRFPDPDRAARPATDTPTWQVRIEQRISRCRTIIAKLFCFRNGNNRPRVMRFVNQAFAGTGIRPCDYLSCVTERIDFLKQKVYAWAGRIRRYKERVDRFRINRLFQNDQRKVYRKWEGIDQSVTNESLPDTAAMTNFWRSIWSVPVEHTESGWIDVVERKCESIEPMETVNISREDVSCAVYRTHNWKSPGPDGLHNFWIKWFRSSHKRLATQFQYALESGSLPIFLTTGITFLLYKSGSTTEAKNYRPITCLPTLYKLLTSILRAKINTHINANNIMSASQNGCTVGSRGTKELLLIDMTICQHIRRNGGALSAAWIDYKKAYDSVPHSWLRRVLELYKINATLRSFLDTCMRQWTTVLRQPGSRNDSSDPADGIRIERGIFQGDSLSPLWFCLALNPLSTLLRETGLGCRLRRGGEIISHLLYMDDLKLFAPNQPDLIELLKITEVFSCSIGMEFGVDKCAVMHVQRGKVVNSTNLQLSESITLKSLSETETYKYLGMSQSLGIVDGDVKQAVKERFFWRLTKVLNSLLSGGNKVRAFNAWVMPLFTYSFGILRWTQTELDTLDRKVRQLLTMHRMLHPRSSVMRLYIPRKNGGRGFLNAKNLHNREVCSLRDYFLNSEGGLHRDIVAVDKNLTPLSLAKENWRKPTVLSTRDRKEVWKSKELHGRFYRALTGPDVDQLASVNWLRFGDLFGETEGFVCAIADEVMMTNNYRRYILRDGTADICRACRRPGESLRHIVSGCSHLANGEYLHRHNLVAKIIHQQLAIQYDLVESEVPYYKYTPAPVLENGRATLYWDRSVITDRTIVTNRPDIVLTDRLKRQAVLVDITIPHDENLVKAEKDKLSKYLDLAHEVTALWDVDSTIIVPIVVSVNGL

SEQ ID NO: 5989 - protein, 1206 aa, Bembecia ichneumoniformis
MILRKRTRNTAEQSARPPPLPVSSSPCSSADEFLTADDKSTSSDEDGSTPPSPPRRPARRGRPPLPASLGPVRPSASRPAPATGGVVRRMRWTHTMNENCMRAYYGATEGATNLTAYRARMLSLFQALEPAVTVTAQRLSDQVRAIQRCQLLEQSALDRLRLDSLPARTTSAATQHLRAALPLSESASIPTSAALLTDPVDQEFCASTNVSTETKEQLRRALEEAISRYHTKPNDRPRLPRLPMHKQNIALMGALNTLLAPYIKASRDLTDTHSILYCGAIAACRVARVKFLNFDRATRDAGDVPAWQVRIERRISKFRTLIAKLIAFSKGNTRPRVMRFVAQAFVGTNIKSKDYLTWATERIDYFKQKVYALANRVRRYKERVERYQQNRVFQSDQRKVYRQWEGTVNRVDAGQLPDADAMTNFWRGIWSVSDGHTEGDWINIVKQTCEPIEPMGAVTISPADVSCAIRTVQNWKSPGPDGLHNFWIKWFRCSHECLAMQFQKALDLGALPSLFTTGITFLLHKSGSTTEAKNYRPITCLPTLYKLLTSILRSKINSHIVANNILAPAQNGCKIGSRGTKELLLIDMTICQRVRRSGGALSVAWIDYQKAYDSVPHSWLRRILELYKIDTTLRSFLAMCMGQWITGLCQPGYRGGAADLRDMIKIERGIFQGDSLSPLWFSLALNPLSTLLRNLKLGYRLRRGGEVISHLLYMDDLKLFAPKPKDLLELLKITQCFSNAIRMDFGVDKCAVMHVQKGKVVNSPNLQLSNEMSFRSLSEVETYKYLGMSQSLGISDKDIKQTVGTRFFGRLIKVLNSFLSGGNKVRAFNGWVMPLLTYSFGILRWTQTELDGLDRRVRRLLTAHRMLHPRSSVMRLYIPRKLGGRGFLNAKNLHNREVYSLREYFLNHESGVHRDVVAIDKNYTPLSLANGNWRRLVVLSAEDRKNVWKGKELHGRFYKALTGPDVDSLMSVNWLRFGDLFGETEGFVCAIADEVIKTNNYRKYILKDGTVDICRACHRPGETLRHIISGCAHLANGEYLHRHNQVARIIHQRLALRYDLIESEVPYYKYVPAPVLENGHATLYWDRSIITDRTIVANKPDIVVIDRSQRRTMLVDIAVPHDENLVKAEKEKLTKYIDLAHEVTAMWDVDSTIIVPIVVSANGLIAKSLDQHLKRLSLDGWVKGQIQKAVLLDTARIVRRFLTLQP

SEQ ID NO: 5990 - protein, 1213 aa, Cydia splendana
MKTMITRSQRRAAESTNNARPPPPPAPSSSSSTSSSGDEFATPPDTDGFSDEGGPPPPPPRPPARRGRPPLPARLGPAGHPAPPTAPATGGIVRRMRWTRTMNENVMRAYYGATEGGTQLSAYRSRILPLFQALEPTITVSEQRLSDQVRVIQRLKRLDDATLDRLRQEALSARADSTSVRDLPATSPDPVPAPDLAPAAPRVDFCTDEGDFTSQNVSTTANEQLRRTLEEAITQYRATTNSRPRLPRLPMNRRNLALMGALNALLEPYLRTSKDLDDTHSIMYCGAIAACRVARVKFPDAERAPRIVGGVPAWQARIERRISSFRTLIAKLICFRGGNNRPRVMRFVNQAFAGTDIRPRDYMANVTERIDFLKQKVYAWANRIRRYRERVDRFQQNRLFQSDQRKVYRKWEETNLRTPDTRPPDATAMTDFWRSIWSVPVGHTEGSWMSVVERECESIEPMGAVTISPDDVSCAIRTAQNWKSPGPDGLHNFWLKWFRCSHSRLAAQFQQALELGSLPPSLTTGVTFLLYKSGSTTEAKNYRPITCLPTLYKLLTSILRAKINAHIVANNILASAQNGCRVGSRGTKELLLIDMTICQQIRRNKGALSAAWIDYKKAYDSVPHSWLGRVLELYKVDAALRAFLSTCMGQWTTVLRQPGGGDDRLGPQDFIRIERGIFQGDSLSPLWFCLALNPLSTLLKDLGLGCRLQREGEVISHLLYMDDLKLFAPNSQDLLELLKTTEVFSSAINMEFGVDKCAVMHVQRGRVVNSRNLQLSETMSFRSISESETYKYLGMSQSLGIEDEGIRRSVKERFFSRLTKVLNSLLSGGNKVRAFNAWVMPLLTYSFGILRWTQTELDALDRRVRSLLTTHRMLHPRSSVMRLYIPRKCGGRGFLNAKDLHNREVYNLRNYFLNNECGMHRDVVAVDRNLTPLSLANENWRKPVVLSTADRKAAWESKVLHGRFYKALTGPDVDLLASVNWLRFGDLFGETEGFACAIADEVMMTNNYRKYILKDGTVDICRACRRPGESLRHIISGCSHLANGEYLHRHNLVARIIHQQLALLYGLVDREVPYYKYLPAPVLENGRATLYWDRSIITDRTIVANKPDIVIIDRSQRRAVLVDITIPHDENLVKAEKDKSSKYLDLAHEITAMWDVDSTIIVPIVVSVNGLIAKSLDQHLERLSLGGWIKGQMQKAVILDTARIVRRFLSLRP

SEQ ID NO: 5991 - protein, 1210 aa, Cydia splendana
MITRSQRRAAELTNNARPPPPPAPPSSSSTTSSGDEFATAPDTDGSSDESGPPPPPPRPPARRGRPPLPARLGPAGHPAPPTAPAAGGIVRRMRWTRNMNENVMRAYYGATEGGTQLSAYRSRILPLFQALEPTINVSEQRLSDQVRVIQRLKRLDDATLDRLRQEALSARADSTSVRDLPATSPDPVPAPDLAPGAPRVDFYTDEGDFASQNVNTTANEQLRRTLEEAITQYRVTTNSRPRLPRLPMNRRNLALMGALNALLEPHLRTSKDLDDTHSIMYCGAIAACRVARVKFPDTERAPRTVGGVPAWQARIERRIGSFRTLIAKLICFRGGNNRPRVMRFVNQAFAGTDIRPRDYMANVTERIDFLKQKVYAWANRIRRYRERVDRFQQNRLFQSDQRKVYRKWEEANLRAPDTQPPDATAMTDFWRSIWSVPVGHTEGGWMSVVERECESIEPMGAVTISPDDVSCAIRTAQNWKSPGPDGLHNFWLKWFRCSHSRLAVQFQQALELGSLPPSLTTGVTFLLYKSGSTTEAKNYRPITCLPTLYKLLTSILRAKINAHIVANNILASAQNGCRVGSRGTKELLLIDMTICQQIRRNKRALSAAWIDYKKAYDSVPHSWLGRVLELYKVDAALRAFLSACMRQWTTVLRQPGGGGDRSGPQDFIRIERGIFQGDSLSPLWFCLALNPLSTLLKDLGLGCRLRREGEVISHLLYMDDLKLFAPNSQDLLELLKTTEVFSSAIHMEFGVDKCAVMHVQRGRVVNSTNLQLSETMSFRSISESETYKYLGMSQSLGIEDEGIRRSVKERFFSRLTKVLNSLLSGGNKVRAFNAWVMPLLTYSFGILRWTQTELDALDRRVRSLLTAHRMLHPRSSVMRLYIPRKCGGRGFLNAKDLHNHEVYNLRNYFLNNECGMHRDVVAVDRNLTPLSLANENWRKPVVLSTADRKAAWESKVLHGRFYKALTGPDVDLLASVNWLRFGDLFGETEGFACAIADEVMMTNNYRKYILKDGTVDICRACRRPGESLRHIISGCSHLANGEYLHRHNLVARIIHQQLALLYDLVDREVPYYKYLPAPVLENGRATLYWDRSIITDRTIVANKPDIVIIDRSQRRAVLVDITIPHDENLVKAEKDKSSKYLDLAHEITAMWDVDSTIIVPIVVSVNGLIAKSLDQHLERLSLGGWIKGQMQKAVILDTARIVRRFLSLQP

SEQ ID NO: 5992 - protein, 963 aa, Cydia splendana
MNRHNLALMGALNALLEPYLRTSKDLDDTHAIMYCGAIAACRVARVKFPDSERAPRTAGGAPAWQIRIERRISSFRTLIAKLICFRGGNNRPRVMRFVNQAFAGTDIRPRDYMANITERIDFLKQKVYAWANRIRRYRERVDRFQQNRLFQSDQRKMYRKWEETNPRASDSQPPEATVMNDFWRSIWSVPVGHTEGSWMSVVERECESIEPMGAVTISPDDVSCAIRTAQNWKSPGPDGLHNFWLKWFRCSHSCLAAQFQQALELGSPPPSLTTGVTFLLYKSGSTTEAKNYRPITCLPTLYKLLTSILRAKINAHIVANNILASAQNGCRVGSRGTKELLLIDMTICQQIRRNRGALSAAWIDYKKAYDSVPHSWLERVLELYKVDTALRAFLNACMRQWTTVLRQPGGGDGSPGPQDFIRIERGIFQGDSLSPLWFCLALNPLSTLLKDLELGCRLRRGGEVISHLLYMDDLKLFAPNSQDLVELLKTTEVFSNAINMEFGVDKCAVMHVQRGKVVNSTNLQLSETMSFRSISESETYKYLGMSQSLGIEEEGIRRSVKERFFSRLTKVLNSLLSGGNKVRAFNAWVMPLLTYSFGILRWTQTELDALDRRVRQLLTTHRMLHPRSSVMRLYIPRKCGGRGFLNAKNLHNREVYNLRNYFLNNECGMHCDVVAADKGLTPLSLANENWRKPVVLSTEDRKAVWKDKQLHGRFYKALTGPDVDLLASVNWLRFGDLFGETEGFACAIADEVMMTNNYRKYILKDGTVDICRACRRPGESLRHIISGCSHLANGEYLHRHNLVARIIHQQLALLYGLVDREVPYYKYSPAPVLENGRATLYWDRSIITDRTIVANKPDIVLIDRSQRRTVLVDVTIPHDENLVKAEKDKSSKYLDLAHEITAMWDVDSTIIVPIVVSANGLIAKSLDQHLERLSLGGWIKGQMQKAVILDTARIVRRFLTLRP

SEQ ID NO: 5993 - protein, 1208 aa, Cydia splendana
MITRSRAKAVTTSARPPPPPASSTSSSTSSSGDEFATAPDTDGSSDESGPPPPPPRPPARRGRPPLPARLGPAGHPAPPTAPATGGIVRRMRWTRDMNENVMRAYYGATEGGTQLSAYRSRILPLFQTLEPTITVSEQRLSDQVRVIQRLKRLDDATLDRLRQEALSARADSISVRELPATSPDPVLAPDLAPGAPRVDFCTDEGDFVSQNVSTTANEQLRRTLEEVITQYRATTNSRPRLPRLPMNRRNLALMGALNALLEPHLRTITDLDDTHSILYCGAIAACRVARVKFPDAERAPRTVAGVPAWQARIERRISSFRTLIAKLICFRGGNNRPRVMRFVNQAFAGTDIRPRDYMANVTERIDFLKQKVYAWANRIRRYRERVDRFQQNRLFQSDQRKVYRKWEETNLRTPDTQPPDATAMTDFWRSIWSMPVGHTEGGWMSVVERECEFIEPMGAVTISPDDVSCAIRTAQNWKSPGPDGLHNFWLKWFRCSHLRLAAQFQQALELGSLPPSLTTGVTYLLYKSGSTTEAKNYRPITCLPTLYKLLTSILRAKINAHIVANNILASAQNGCRVGSRGTKELLLIDMTICQQIRRNKGALSAAWIDYKKAYDSVPHSWLGRVLELYKVDAALRAFLSACMRQWTTVLRQPGGGDDPPDPQDFIRIERGIFQGDSLSPLWFCLALNPLSTLLKDLGLGCRLRREGEIISHLLYMDDLKLFAPNSQDLSELLKTTEGFSSAINMEFGVDKCAVMHVQRGRVVNSTNLQLSETMSFRSISESETYKYLGMSQSLGIEDEGIRRSVKERFFSRLTKVLNSLLSGGNKVRAFNAWVMPLLTYSFGILRWTQTELDALDRRVRSLLTTHRMLHPRSSVMRLYIPRKCGGRGFLNAKDLHNREVYNLRNYFLNNECGMHRDVVAVDRNLTPLSLANENWRKPVVLSTADRKAAWESKVLHGRFYKALTGPDVDLLASVNWLRFGDLFGETEGFACAIADEVMMTNNYRKYILKDGTVDICRACRRPGESLRHIISGCSHLANGEYLHRHNLVARIIHQQLALLYGLVDREVPYYKYLPAPVLENGRATLYWDRSIITDRTIVANKPDIVIIDRSQRRAVLVDITIPHDENLVKAEKDKSSKYLDLAHEITAMWDVDSTIIVPIVVSVNGLIAKSLDQHLERLSLGGWIKGQMQKAVILDTARIVRRFLSLQP

SEQ ID NO: 5994 - protein, 1208 aa, Cydia splendana
MITRSKARSQASTTANARPPPSPVSSVSSQSSGDEFATAPDTSESSDECGPPPPPSRPPARRGRPPLPARLGPAGHLAPPTAPAAGGVVRRMRWSQTMNENVMRAYYGATEGGTDLCAYRVRMLPLFQALEPTIDVTAQRLSDQVRVIQRLKRLDDSTLDRLRLEALSARAASTSVRDPPATSPDPVPAPDQAPEAPRVDLCADEEEFAQSVSSTANEQLRRTLDEAITQYRSTPNTRPRLPRLPMNRHNLALMGALNALLEPYLRTSKDLDDTHAIMYCGAIAACRVARVKFPDSERAPRTAGGAPAWQIRIERRISSFRTLIAKLICFRGGNNRPRVMRFVNQAFAGTDIRPRDYMANITERIDFLKQKVYAWANRIRRYRERVDRFQQNRLFQSDQRKMYRKWEETNPRASDSQPPDATVMNDFWRSIWSVPVGHTEGSWMSVVERECESIEPMGAVTISPDDVSCAIRTAQNWKSPGPDGLHNFWLKWFRCSHSCLAAQFQQALELGSPPPSLTTGVTFLLYKSGSTTEAKNYRPITCLPTLYKLLTSILRAKINAHIVANNILASAQNGCRVGSRGTKELLLIDMTICQQIRRNRGALSAAWIDYKKAYDSVPHSWLERILELYKVDTALRAFLSACMRQWTTVLRQPGGGDESPGPQDFIRIERGIFQGDSLSPLWFCLALNPLSTLLKDLELGCRLRRGGEVISHLLYMDDLKLFAPNSQDLVELLKTTEVFSNAINMEFGVDKCAVMHVQRGKVVNSTNLQLSETMSFRSISESETYKYLGMSQSLGIEEEGIRRSVKERFFSRLTKVLNSLLSGGNKVRAFNAWVMPLLTYSFGILRWTQTELDALDRRVRSLLTTHRMLHPRSSVMRLYIPRKCGGRGFLNAKDLHNREVYNLRNYFLNNECGMHRDVVAVDRNLTPLSLANENWRKPVVLSTADRKAAWESKVLHGRFYKALTGPDVDLLASVNWLRFGDLFGETEGFACAIADEVMMTNNYRKYILKDGTVDICRACRRPGESLRHIISGCSHLADGEYLHRHNLVARIIHQQLALLYGLVDREVPYYKYSPAPVLENGRATLYWDRSIITDRTIVANKPDIVLIDRSQRRTVLVDVTIPHDENLVKAEKDKSSKYLDLAHEVTAMWDVDSTIIVPIVVSANGLIAKSLDQHLERLSLGGWIKGQMQKAVILDTARIVRRFLTLRP

SEQ ID NO: 5995 - protein, 1213 aa, Cydia splendana
MQRMITRSQRRAAESTNNARPPPPPAPSSSSSTSSSGDEFATAPDTDGSSDEGGPPPPPPRPPARRGRPPLPARLGPAGHPAPPTAPAAGGIVRRMRWTRDMNENVMRAYYGATEGGTQLSAYRSRILPLFQALEPTITVSEQRLSDQVRVIQRLKRLDDATLDRLRQEALSARADSTSVRDLPATSPDPVPAPDLAPAAPRVDFCTDEGDFASQNVSTTANEQLRRTLEEAITQYRATTNSRPRLPRLPMNRRNLALMGALNALLEPHLRTSKDLDDTHSIMYCGAIAACRVARVKFPDAERAPRTAGGVPAWQVRIERRISSFRTLIAKLICFREGNNRPRVMRFVNQAFAGTDIRPRDYMANVTERIDFLKQKVYAWANRIRRYRERVDRFQQNRLFQSDQRKVYRKWEETNLRTPDTQPPDVTAMTDFWRSIWSVPVGHTEGSWMSVVERECESIEPMGAVTISPDDVSCAIRTAQNWKSPGPDGLHNFWLKWFRCSHSRLAAQFQQALELGSLPPSLTTGVTFLLYKSGSTTEAKNYRPITCLPTLYKLLTSILRAKINAHIIANNILASAQNGCRVGSRGTKELLLIDMTICQQIRRNKGALSAAWIDYKKAYDSVPHSWLGRVLELYKVDAALRAFLSACMRQWTTVLRQPGGGDDRAGPQDFIRIKRGIFQGDSLSPLWFCLALNPLSTLLKDLGLGCRLRREGVVISHLLYMDDLKLFAPNSQDLLELLKTTEVFSSAIHMEFGVDKCAVMHVQRGKVVNSTNLQLSETMSFRSISESETYKYLGMSQSLGIEDEGIRRSVKERFFSRLTKVLNSLLSGGNKVRAFNAWVMPLLTYSFGILRWTQTELDALDRRVRSLLTTHRMLHPRSSVMRLYIPRKCGGRGFLNAKDLHNREVYNLRNYFLNNECGMHRDVVAVDRNLTPLSLANENWRKPVVLSTADRKAAWESKVLHGRFYKALTGPDVDLLASVNWLRFGDLFGETEGFACAIADEVMMTNNYRKYILKDGTVDICRACRRPGESLRHIISGCSHLANGEYLHRHNLVARIIHQQLALLYGLVDREVPYYKYLPAPVLENGHATLYWDRSIITDRTIVANKPDIVIIDRSQRRAVLVDITIPHDENLVKAEKDKSSKYLDLAHEITAMWDVDLTIIVPIVVSVNGLIAKSLDQHLERLSLGGWIKGQMQKAVILDTARIVRRFLSLQP

SEQ ID NO: 5996 - protein, 1208 aa, Cydia splendana
MITRSRAKAVTTSARPPPPPASSTSSSTSSSGDEFATAPDTDGSSDESGPPPPPPRPPARRGRPPLPARLGPAGHPAPPTAPATGGIVRRMRWTRDMNENVMRAYYGATEGGTQLSAYRSRILPLFQTLEPTITVSEQRLSDQVRVIQRLKRLDDATLDRLRQEALSARADSISVRDLPATSPDPVPAPDLAPGAPRVDFCTDEGDFVSQNVSTTANEQLRRTLEEVITQYRATTNSRPRLPRLPMNRRNLALMGALNALLEPHLRTSKDLDDTHSILYCGAIAACRVARVKFPDAERAPRTVGGVPAWQARIERRISSFRTLIAKLICFRGGNNRPRVMRFVNQAFAGTDIRPRDYMANVTERIDFLKQKVYAWANRIRRYRERVDRFQQNRLFQSDQRKVYRKWEETNLRTPDTQPPDATAMTDFWRSIWSMPVGHTEGVWMSVVERECEFIEPMGAVTISPDDVSCAIRTAQNWKSPGLDGLHNFWLKWFRCSHSRLAAQFQQALELGSLPPSLTTGVTYLLYKSGSTTEAKNYRPITCLPTLYKLLTSILKAKINAHIVANNILASAQNGCRVGSRGTKELLLIDMTICQQIRRNRGALSAAWIDYKKAYDSVPHSWLGRVLELYKVDAALRAFLSACMRQWTTVLRQPGGGDDPPDPQDFIRIERGIFQGDSLSPLWFCLALNPLSTLLKDLGLGCRLRREGEIISHLLYMDDLKLFAPNSQDLSELLKTTEGFSSAINMEFGVDKCAVMHVQRGRVVNSTNLQLSETMSFRSISESETYKYLGMSQSLGIEDEGIRRSVKERFFSRLTKVLNSLLSGGNKVRAFNAWVMPLLTYSFGILRWTQTELDALDRRVRSLLTTHRMLHPRSSVMRLYIPRKCGGRGFLNAKDLHNREVYNLRNYFLNNECGMHRDVVAVDRNLTPLSLANENWRKPVVLSTADRKAAWESKVLHGRFYKALTGPDVDLLASVNWLRFGDLFGETEGFACAIADEVMMTNNYRKYILKDGTVDICRACRRPGESLRHIISGCSHLANGEYLHRHNLVARIIHQQLALLYGLVDREVPYYKYLPAPVLENGRATLYWDRSIITDRTIVANKPDIVIIDRSQRRAVLVDITIPHDENLVKAEKDKSSKYLDLAHEITAMWDVDSTIIVPIVVSVNGLIAKSLDQHLERLSLGGWIKGQMQKAVILDTARIVRRFLSLQP

SEQ ID NO: 5997 - protein, 963 aa, Cydia splendana
MNRRNLALMGALNALLEPHLRTSKDLDDTHSIMYCGAIAACRVARVKFPDTERAPRTVGGVPAWQARIERRIGSFRTLIAKLICFRGGNNRPRVMRFVNQAFAGTDIRPRDYMANVTERIDFLKQKVYAWANRIRRYRERVDRFQQNRLFQSDQRKVYRKWEEANLRAPDTQPPDATAMTDFWRSIWSVPVGHTEGGWMSVVERECESIEPMGAVTISPDDVSCAIRTAQNWKSPGPDGLHNFWLKWFRCSHSRLAVQFQQALELGSLPPSLTTGVTFLLYKSGSTTEAKNYRPITCLPTLYKLLTSILRAKINAHIVANNILASAQNGCRVGSRGTKELLLIDMTICQQIRRNKRALSAAWIDYKKAYDSVPHSWLGRVLELYKVDAALRAFLSACMRQWTTVLRQPGGGGDRSGPQDFIRIERGIFQGDSLSPLWICLALNPLSTLLKDLGLGCRLRREGEVISHLLYMDDLKLFAPNSQDLLELLKTTEVFSSAIHMEFGVDKCAVMHVQRGRVVNSTNLQLSETMSFRSISESETYKYLGMSQSLGIEDEGIRRSVKERFFSRLTKVLNSLLSGGNKVRAFNAWVMPLLTYSFGILRWTQTELDALDRRVRSLLTAHRMLHPRSSVMRLYIPRKCGGRGFLNAKDLHNHEVYNLRNYFLNNECGMHRDVVAVDRNLTPLSLANENWRKPVVLSTADRKAAWESKVLHGRFYKALTGPDVDLLASVNWLRFGDLFGETEGFACAIADEVMMTNNYRKYILKDGTVDICRACRRPGESLRHIISGCSHLANGEYLHRHNLVARIIHQQLALLYDLVDREVPYYKYLPAPVLENGRATLYWDRSIITDRTIVANKPDIVIIDRSQRRAVLVDITIPHDENLVKAEKDKSSKYLDLAHEITAMWDVDSTIIVPIVVSVNGLIAKSLDQHLERLSLGGWIKGQMQKAVILDTARIVRRFLSLQP

SEQ ID NO: 5998 - protein, 1209 aa, Cydia splendana
MQTRSKTRAQLASPRNARPPPPSASSVSSQSSSSDEFATAPDTSESSDECGPPPPPSRPPARRGRPPLSARLGPAGHPAPPTAPAAGGVVRRMRWSQTINENVMRAYYGATEGGTNLCAYRVRMLPLFQALEPTIDVTAQRLSDQVRVIQRQKRLDDSTLDRLRLEALSARAASTSARDPPATSPDPVPAPDQAPGAPRVDLSADEEEFAQSVGSTANEQLRRTLDEAITRYRSTPDTRPRLPRLPMNRHNLALMGALNALLEPYLRTSKDLDDTHAIMYCGAIAACRVARVKFPDSERAPRTAGGAPAWQIRIERRISSFRTLIAKLICFRGGNNRPRVMRFVNQAFVGTDIRPRDYMANVTERIDFLKQKVYAWANRIRRYRERVDRFQQNRLFQSDQRMMYRKWEETNLRASDSRPPDATVMNDFWRSIWSVPVGHTEGSWMSVVERECESIEPMGAVTISPDDVSCAIRTAQNWKSPGPDGLHNFWLKWFRCSHSYLAAQFQQALELGSLPPSLTTGVTFLLYKSGSTTEAKNYRPITCLPTLYKLLTSILRAKINAHIVANNILASAQNGCRVGSRGTKELLLIDMTICQQIRRTKGALSAAWIDYKKAYDSVPHSWLGRVLELYKVDAALRAFLSACMGQWTTVLRQPGGGDDRPGPQDFIRIERGIFQGDSLSPLWFCLALNPLSTLLKDLGLGCRLRREGEVISHLLYMDDLKLFAPNTQGLLELLKTTEVFSSAINMEFGVDKCAVMHVQRGKVVNSTNLQLSETMSFRSISESETYKYLGMSQSLGIEDEGIRRSVKERFFSRLTKVLNSLLSGGNKVRAFNAWVMPLLTYSFGILRWTQTELDALDRRVRSLLTTHRMLHPRSSVMRLYIPRKCGGRGFLNAKDLHNREVYNLRNYFLNNECGMHRDVVAVDRNLTPLSLANENWRKPVVLSTADRKAAWESKALHGRFYKALTGPDVDLLASVNWLRFGDLFGETEGFACAIADEVMMTNNYRKYILKDGTVDICRACRRPGESLRHIISGCSHLANGEYLHRHNLVARIIHQQLALLYGLVDREVPYYKYLPAPVLENGRATLYWDRSIITDRTIVANKPDIVLIDRSQRRAVLADVTIPHDENLVKAEKDKSSKYLDLAHEITAMWDVDSTIIVPIVVSANGLIAKSLDQHLERLSLGGWIKGQMQKAVILDTARIVRRFLTLRP

SEQ ID NO: 5999 - protein, 1212 aa, Agriopis aurantiaria
MITRSRTKQADTKSARLSSPPASSSFPSTSSGEDEYHTTREASGSSSDTSGPGTPPPPPPVRRGRPPLPARLGLVGHSAARPAPATGGVVRRMRWSTIMNEDCMRAYYRATEGGTNLSAYCARMLPLFQALQPTITVSAQRLSDQVRAIHRCKLLDDSVLDRLRQEELRARPIPVSTRDPPVASSAPTLASVPASVVTLAALADPVVDEGDLASGVSDQVREQLRGALEDVISQYRFTPDSRPRLPRLSTHRRNLALMGALNALLAPYLRASEDLVDTHSILYCGAIAACRVARVKFPDTNRAPRTAGGVPAWQVRIERRISTFRTLIAKLVCFRRGNNRPRVMRFVTQAFAGTDIRPQHYLANVTERIDYLKQKVYAWANRIRRYRERVDRYWQNRLFQSDQRKVYRGWEETDQRVSDGQLPDASAMINFWRGIWSVPVEHTEGDWMRVVERECESIEPMGSILIDSIDVSCAIRTAQNWKSPGPDGLHNFWIKWIRCSHDRLATQFQEALELGSLPSFMTTGVTFLLHKSGSTTEAKNYRPITCLPTIYKLLTSILRNKINAHIVANNVLAHAQNGCRVGSRGTKELLLIDTAISQQVRRNKGALSAAWIDYKKAYDSVPHSWLERVLELYKIDTTLKSFLGACMRQWTTVLRQPGGGDGAFGPQDLLRIERGIFQGDSFSQLWFCLALNPLSTLLRDSGLGYRLRRDGQVISHLLYMDDLKLFTPKRQDLVELLKITEVFSSAIRMEFGVDKCAVMHVQRGKVANSPNLQLSEVMTLRSLSEAETYKYLGMSESLGISVENIKKSVKERFFCRLTKVLNSLLSGGNKVRAFNGWVMPLLIYSFGILRWTQTELDALDRRVRQLLTSHRMLHPRSSVMRLYIPRKWGGRGFLNAKNLHNREVCSLRDFFRNNESGMHRDVVAVDRGLTALSLANENWRKPSVLSIEDRRDVWRGKELHGRFYRALTGPDVDLLASVNWLRFGDLFGETKGFACAIADEVIKTNNYRKYIMKDGTVDICRACHRPGESLRHIISGCSHLANGEYLHRHNLVARIIHQQLALRYSLVESEVPYYKYAPAPVLENGRTLLYWDRSIITDRTIVANKPDIVLVDRSQRRAVLVDITIPHDENLVKAEKDKLSKYLDLAHEVTAMWDVDSTIIVPIVVSVNGLIAKSLDQHLKRLSLDGWVKGQMQKAVILDTARIVRRFLTLQP

SEQ ID NO: 6000 - protein, 1211 aa, Agriopis aurantiaria
MITRAKTRAAESNARLPPPPASSSSPSTSSGEDEYHTTREASGSSSDTSGPGTPPPPPPARRGRPPLPARLGPVGHSATRPAPATGGVVRRMRWSRIMNEDCMRAYYRATEGGTNLSAYCARMLPLFQALQPTITVSAQRLSDQVRAIQRCNMLDQSVLDRLRLEEVRTRPTPASTRNPPVASSAPTLASVPASVGTLVALADTAVDEEDLASGVSDQVKEQLRGALEDAISQYRFTSDSRPRLPRLPTHRRNLALMGALNALLAPYLRASEDLVDTHSILYCGAIAACRVARVKFPDTNRAPRTAGGVPAWQVRIERRINTFRTLIAKLICFRRGNNRPRVMRFVTQAFAGTDIRPQHYLANVTERIDYLKQKVYAWANRIRRYRERVDRYWQNRLFQSDQRKVYRGWEETDQRVSDGQRPNANAMINFWRGIWSVPVNHTEGDWMRVVERECEFIEPMGSILIDPVDVSCAIRMAQNWKSPGPDGLHNFWIKWIRCSHDRLATQFQEALELGSLPSFMTTGVTFLLHKSGSTTEAKNYRPITCLPTIYKLLTSILRNKINAHIVANNVLAHAQNGCRVGSRGTKELLLIDTAISQQVRRNRGALSAAWIDYKKAYDSVPHSWLERVLELYKIDTTLKSFLCACMRQWTTVLRQPGGGDGTSGPQDLIRIERGIFQGDSFSPLWFCLALNPLSSLLRDSGLGYRLRRDGQVISHLLYMDDLKLFTPKRQDLVELLKITDVFSSAIKMEFGVDKCAVMHVQQGKVVNSPNLQLSEVMTLRSLSEAETYKYLGMSESLGISVENIKKSVKERFFCRLTKVLNSLLSGGNKVRAFNGWVMPLLIYSFGILRWTQTELDALDRRVRQLLTSHRMLHPRSSVMRLYIPRKWGGRGFLNAKNLHNREVCSLRDFFRNSESGMHRDVVAVDRGLTPLSLANENWRKPSVLSIEDRRDVWKGKELHGRFYRALTGPDVDLLSSVNWLRFGDLFGETEGFACAIADEVIKTNNYRKYIMKDGTVDICRACHRPGESLRHIISGCSHLANGEYLHRHNQVARIIHQQLALRYGLVESEVPYYKYAPAPVLENGRALLYWDRSIITDRTIVANKPDIVLVDRSQRRAVLVDITIPHDENLVKAEKDKLSKYLDLAHEVTAMWDVDSTIIVPIVVSVNGLIAKSLDQHLKRLSLDGWVKGQMQKAVILDTARIVRRFLTLQP

SEQ ID NO: 6001 - protein, 1208 aa, Ennomos fuscantarius
MILRSKTKTADNKCARLPPLPVSSSPSSSSGDEYATPPDTTASSDDDGLPSPPPPPPPARRGRPPLPARLGPVGQPAPRPAPATGGVVRRMRWTQTMNENCMRAYYGATEGGSSLTAYRDRMLSLFQELEPSISVSAQRLSDQVRAIHRCKLLDQSALDRLRLETLPIPATSPSPRVLSAALPDPGPIVGPPLVTPLGGPVIDGEESVSDSVSTQVNEQLRSALEDAILRYRSTPTSRPRLPRLPTNRRNLVLMGALNTLLGPYLRTSEDLVDTHSILYCGAIAVCRVARVKFPDTDRAPRPADGAPAWQVRIEKRITTFRTLIAKLVCFSRGNHRPRVMRFVTQAFAGTGIRPQDYMACVTERIDFLKQKVYAWASRIRRYRERVDRYQMNRLFQSDQRKVYRDWEGTGQRVVDGQLPDANVMNEFWRSIWSVPVDHSEGDWIRVVKHVCEPIESMGSITIDPEDISCAIRTAQNWKSPGPDGLHNFWIKWIRCSYPCLAIQFQEALEAGSLPKFMTTGITFLLHKSGSTMEAKNYRPITCLPTLYKLLTSILRTKINSHITANNILASAQNGCRVGSRGTKELLLIDTAICQQVRRNRGALSTAWIDYKKAYDSVPHSWLKRVLELYKINATLRSFLSACMGQWTTVLRPPGGGDSVSDPQNFIRIERGIFQGDSLSPLWFCLALNPLSTLLGDSGLGYRLRRGGEIISHLLYMDDLKLFAPQRPQLMKLLKITENFSNSIKMEFGVDKCAVMHVHGGKVVNSTNLQLSETMTLRSLSESETYKYLGMSESLGISVGDVKQSVKERFFCRLTKVLNSLLSGGNKARAFNAWVMPLLMYSFGILRWTQTELDALDRKVRQVLTSHRMLHPRSSVMRLYIPRKWGGRGFLNAKNLHNREMYSLREYFLSNECGMHRDVVAVDKGLTPLSLANENWRKPVVLSTDDRRDVWKGKELHGRFYRALTGPDVDLHASVNWLRFGDLFGETEGFVCAIADEVIKTNNYRKYIMKDGTVDICRACRRPGESLRHIISGCSHLANGEYLHRHNLVARIIHQQLALQYGLVESEVPYYKYTSGPVLENGRALLYWDRSIITDRTIVANKPDIVLIDRSQRRAVLVDIAIPHDENLVKAEKDKLSKYLDLAHEVTAMWSVDSTSIVPIVVSANGLIAKSLDQHLERLSLDGWIKGQIQKAVLLDTARIVRRFLTLEP

SEQ ID NO: 6002 - protein, 1022 aa, Erannis defoliaria
MPTSVATLATPADPVVDEGDDTGMSVTTQVSEQLRRALEDAISQYRFALNSRPRLPRLPTHRRNLALMGALNALLAPYLRASEDLTDTHSILYCGAVAACRVARVKFPDSNRAPRTAGDVPAWQARIERRISTFRTLIAKLICFSRGNNRPRVMRFVTQAFAGTGIRPQQYMASVTERIDYLKQKVYAWASRIRRYRERVDRYWQNRVFQSDQRKVYRNWEGAEQRVSDGHLPDANAMTNFWRGIWSVPVEHTEGDWMRVVERECESIEPMGSILIDPVDVSCAIRTAQNWKSPGPDGLHNFWIKWFRCSHDRLATQFQEALELGSLPSFMTTGVTFLLHKSGSTTEPKNYRPITCLPTIYKLLTSILSTKINTHIVANNVLAPAQNGCRVGSRGTKELLLIDMAISQQVRRNKGALSAAWIDYKKAYDSVPHSWLERILELYKIDTTLKSFLSACMRQWTTVLRQPGGGNDSFDPQDLIRIERGIFQGDSLSPSWFCLALNPLSTLLKDSGLGYRLRRGGEVISHLLYMDDLKLFAPKHQDLLELLKTTQVFSSAIRMEFGVDKCAVMRVQRGKVVNSPDLQLSEIMTLRSLSEAETYKYLGMSESLGISVVDIKKSVKERFFCRLAKVLNSLLSGGNKARAFNGWVMPLLIYSFGILRWTQTELDALDRRVRQLLTAHRMLHPRSSVMRLYIPRKWGGRGFLNAKNLHNREVCSLRDYFLNNECGMHRDVVTVDKGLTPLSLANENWRRPSVLSTDDRKDVWKSKELHGRFYRALSGPDVDLLASVNWLRFGDLFGETEGFACAIADEVIKTNNYRKYIMKDGTVDICRACHRPGESLRHIISGCSHLANGEYLHRHNQVARIIHQQLALQYGLLESEVPYYKYAPAPVLENGRALLYWDRSIITDRTIVANKPDIVMVDRSQRRAVLVDVTIPHDENLVKAEKDKLSKYLDLAFEITAMWDVDSTIIVPIVVSANGLIAKSLDQYLKRLSLDGWVKGQIQKAVVLDTARIVRRFLTLQP

SEQ ID NO: 6003 - protein, 1215 aa, Erannis defoliaria
MITRSKSTQAGNDNNARPPPPPAPSSPSASSGDDEFHTPRESSASSSGSDVSGPRTPAPRPPARRGRPPLPARLGPAGQPASRPALAAGGVVRRMRWSQINNENCMRAYYGATEGGINLSAYRVRMLPLFQALEPTVTVSAQRLSDQVRAIQRLNLLDQSLLDRLRLEAHSARPTPASTRDSHVASSAPTLASVPTSAATLATPADPVVDEGDCTSMIVSSQVSEQLRRTLEDAIGQYRFALNSRPRLPRLPTHRRNLALMGALNALLAPYLRASEDLTDTHSILYCGAIAACRVARVKFPDTNRAPRPAGDVPAWQLRIERRISTFRTLIAKLICFSRGNNRPRVMRFVTQAFAGTGIRPQQYMANVTERIDYLKQKVYAWANRIRRYRERVDRYWQNRLFQSDQRKVYRNWEGNEQRVSDGQLPDASAMTNFWRGIWSVPVEHTEGDWMRVVERECESIEPMGSILIDPVDVSCAIRTAQNWKSPGPDGLHNFWIKWFRCSHDRLATQFQEALELGSLPSFMTTGVTFLLHKSGSTTEPKNYRPITCLPTIYKLLTSILSTKINAHIVANNVLAPAQNGCRVGSRGTKELLLIDMAISQQVRRNKGALSAAWIDYKKAYDSVPHSWLERILELYQIDTTLKSFLGACMRQWTTVLRQPGGGNGSSDSQDLIRIERGIFQGDSLSPSWFCLALNPLSTLLKDSGLGYRLRRGGEVISHLLYMDDLKLFAPKHQDLLELLKTTQVFSSAISMEFGVDKCAVMRVQRGKVVNSPDLQLSEIMTLRSLSEAETYKYLGMSESLGISVVDIKKSVKERFFCRLTKVLNSLLSGGNKARAFNGWVMPLLIYSFGILRWTQTELDALDRRVRQLLTAHRMLHPRSSVMRLYIPRKWGGRGFLNAKNLHNREVCSLRDYFLNNECGMHRDVVTVDKGLTPLSLANENWRTPSVLSTDDRKEVWKSKELHGRFYRVLSGPDVDLLASVNWLRFGDLFGETEGFACAIADEVIKTNNYRKYIMKDGTVDICRACHRPGESLRHIISGCSHLANGEYLHRHNQVARIIHQQLALQYGLVESEVPYYKYAPAPVLENGRALLYWDRSIITDRTIVANKPDIVMVDRSQRRAVLVDVTIPHDENLVKAEKDKLSKYLDLAFEITAMWDVDSTIIVPIVVSANGLIAKSLDQYLKRLSLDGWVKGQIQKAVVLDTARIVRRFLTLQP

SEQ ID NO: 6004 - protein, 1197 aa, Biston betularia
MWTRSRTAAASGLHDAHIPSPPAPSTPSASSGDEEFATPLATSASSSSSDVSGPRTPAPPPPARRGRPPLPARLGPAGQSASRSALAAGGVVRRMRWSQTNNENCMRAYYGATEGGINLSAYRVRMLPLFQALEPTVAVSTQRLSDQVRAIQRLQLLDQSVLDRLRLEALPARPTPVSTRDSPVASSAPTLVSVPTSMATLATPTDPVVDVGECTSMAVCSQVSEHLRRTLEDAICQYRFAPDSRPRLPRLPTHRRNLALMGALNALLAPYLRASEDLTDTHSILYCGAIAACRVARVKFPDTNRAPRPAGGVPAWQLRIERRISTFRTLIAKLICFSRGNNRPRVMRFVTQAFAGTGIRPQHYLASVTERIDYLKQKVYAWANRIRRYRERADRYWQNRVFQSDQRKVYRDWEGTGQRVSDRQLPDTSVMTEFWRGIWSLPVEHTEGDWMRVVERECESIESMGSVLIDPVDVSCAIRTAQNWKSPGPDGLHNFWIKWIRCSHDRLATQFQEALELGSLPCFMTTGVTFLLHKTGSTTEAKNYRPITCLPTIYKLLTSILRTKINAHVVANNVLAPAQNGCRVGSRGTKELLLIDMTISQQVRRNKGALSTAWIDYKKAYDSVPHSWLERVLELYKIDTTLKSFLGACMRQWTTVLRQPGSGDGSSEPQDLIRIERGIFQGDSLSPLWFCLALNPLSTLLKESELGHRLRRGGEVISHLLYMDDLKLFAPKRPDLMELLKTTQVFSNAIKMEFGVDKCAVMHVQRGEVVNCPDLQLSETMTFRSLSEAETYKYLGMSESLGIAVVDIKRSVKERFFCRLTKVLNSFLSGGNKVRAFNGWVMPLLIYSFGILRWTQTELDALDRRVRQQLTTHRMLHPRSSVMRLYIPRKLGGRGFLSAKNLHNREVCSLRDYFRDNECGMHRDVVAVDKGLTPLSLANENWRKPSVLSTEDRKEVWKSKQLHGRFYRVLTGPDVDMLASVNWLRFGDLFGETEGFACAIADEVIKTNNYRKYIMKDGTVDICRACHRPGESLQHIISGCSHLANGEYLHRHNQVARIIHQQLALQYGLVESEVPYYKYAPAPVLENGRALLYWDRSIITDRTIVANKPDIVVVDRAQRRAVLVDITIPHDENLVKAEKDKLSKYLDLAHEITAMWDVDSTIIVPIVVTVNGLIAKSLDQHLKRLSLDGWVKGQLQK

SEQ ID NO: 6005 - protein, 1215 aa, Biston betularia
MWTRSRTAAASGLHDAHIPSPPAPSTPSASSGDEEFATPLATSASSSSSDVSGPRTPAPPPPARRGRPPLPARLGPAGQSASRSALAAGGVVRRMRWSQTNNENCMRAYYGATEGGINLSAYRVRMLPLFQALEPTVAVSTQRLSDQVRAIQRLQLLDQSVLDRLRLEALPARPTPVSTRDSPVASSAPTLVSVPTSMATLATPTDPVVDVGECTSMGVCSQVSEHLRRTLEDAICQYRFAPDSRPRLPRLPTHRRNLALMGALNALLAPYLRASEDLTDTHSILYCGAIAACRVARVKFPDTNRAPRPAGGVPAWQLRIERRISTFRTLIAKLICFSRGNNRPRVMRFVTQAFAGTGIRPQHYLASVTERIDYLKQKVYAWANRIRRYRERADRYWQNRVFQSDQRKVYRDWEGTGQRVSDRQLPDTSDMTEFWRGIWSLPVEHTEGDWMRVVERECESIESMGSVLIDPVDVSCAIRTAQNWKSPGPDGLHNFWIKWIRCSHDRLATQFQEALELGSLPCFMTTGVTFLLHKTGSTTEAKNYRPITCLPTIYKLLTSILRTKINAHVVANNVLAPAQNGCRVGSRGTKELLLIDMTISQQVRRNKGALSTAWIDYKKAYDSVPHSWLERVLELYKIDTTLKSFLGACMRQWTTVLRQPGSGDGSSEPQDLIRIERGIFQGDSLSPLWFCLALNPLSTLLKESGLGHRLRRGGEVISHLLYMDDLKLFAPKRPDLMELLKTTQVFSNAIKMEFGVDKCAVMHVQRGEVVNCPDLQLSETMTFRSLSEAETYKYLGMSESLGIAVVDIKRSVKERFFCRLTKVLNSFLSGGNKVRAFNGWVMPLLIYSFGILRWTQTELDALDRRVRQQLTTHRMLHPRSSVMRLYIPRKLGGRGFLSAKNLHNREVCSLRDYFRDNECGMHRDVVAVDKSLTPLSLANENWRKPSVLSTEDRKEVWKSKQLHGRFYRVLTGPDVDMLASVNWLRFGDLFGETEGFACAIADEVIKTNNYRKYIMKDGTVDICRACHRPGESLRHIISGCSHLANGEYLHRHNQVARIIHQQLALQYGLVKSEVPYYKYAPAPVLENGRALLYWDRSIITDRTIVANKPDIVVVDRAQRRAVLVDITIPHDENLVKAEKDKLSKYLDLAHEITAMWDVDSTIIVPIVVTVNGLIAKSLDQHLKRLSLDGWVKGQLQKAVILDTARIVRRFLTLQP

SEQ ID NO: 6006 - protein, 1215 aa, Biston betularia
MWTRSRTAAASGLHDAHIPSPPAPSTPSASSGDEEFATPLATSASSSSSDVSGPRTPAPPPPARRGRPPLPARLGPAGQSASRSALAAGGVVRRMRWSQTNNENCMRAYYGATEGGINLSAYRVRMLPLFQALEPTVAVSTQRLSDQVRAIQRLQLLDQSVLDRLRLEALPARPTPVSTRDSPVASSAPTLVSVPTSMATLATPTDPVVDVGECTSMGVCSQVSEHLRRTLEDAICQYRFAPDSRPRLPRLPTHRRNLALMGALNALLAPYLRASEDLTDTHSILYCGAIAACRVARVKFPDTNRAPRPAGGVPAWQLRIERRISTFRTLIAKLICFSRGNNRPRVMRFVTQAFAGTGIRPQHYLASVTERIDYLKQKVYAWANRIRRYRERADRYWQNRVFQSDQRKVYRDWEGTGQRVSDRQLPDTSVMTEFWRGIWSLPVEHTEGDWMRVVERECESIESMGSVLIDPVDVSCAIRTAQNWKSPGPDGLHNFWIKWIRCSHDRLATQFQEALELGSLPCFMTTGVTFLLHKTGSTTEAKNYRPITCLPTIYKLLTSILRTKINAHVVANSVLAPAQNGCRVGSRGTKELLLIDMTISQQVRRNKGALSTAWIDYKKAYDSVPHSWLERVLELYKIDTTLKSFLGACMRQWTTVLRQPGSGDGSSEPQDLIRIERGIFQGDSLSPLWFCLALNPLSTLLKESGLGHRLRRGGEVISHLLYMDDLKLFAPKRPDLMELLKTTQVFSNAIKMEFGVDKCAVMHVQRGEVVNCPDLQLSETMTFRSLSEAETYKYLGMSESLGIAVVDIKRSVKERFFCRLTKVLNSFLSGGNKVRAFNGWVMPLLIYSFGILRWTQTELDALDRRVRQQLTTHRMLHPRSSVMRLYIPRKLGGRGFLSTKNLHNREVCSLRDYFRDNECGMHRDVVAVDKGLTPLSLANENWRKPSVLSTEDRKEVWKSKQLHGRFYRVLTGPDVDMLASVNWLRFGDLFGETEGFACAIADEVIKTNNYRKYIMKDGTVDICRACHRPGESLRHIISGCSHLANGEYLHRHNQVARIIHQQLALQYGLVESEMPYYKYAPAPVLENGRALLYWDRSIITDRTIVANKPDIVVVDRAQRRAVLVDITIPHDENLVKAEKDKLSKYLDLAHEITAMWDVDSTIIVPIVVTVNGLIAKSLDQHLKRLSLDGWVKGQLQKAVILDTARIVRRFLTLQP

SEQ ID NO: 6007 - protein, 1215 aa, Biston betularia
MWTRSRTAAASGLHDAHIPSPPAPSTPSASSGDEEFATPLATSASSSSSDVSGPRTPAPPPPARRGRPPLPARLGPAGQSASRSALAAGGVVRRMRWSQTNNENCMRAYYGATEGGINLSAYRVRMLPLFQALEPTVVVSTQRLSDQVRAIQRLQLLDQSVLDRLRLEALPARPTPVSTRVSPVASSAPTLVSVPTSMATLATPTDPVVDVGECTSMAVCSQVSEHLRRTLEDAICQYRFAPDSRPRLPRLPTHRRNLALMGALNALLAPYLRASEDLTDTHSILYCGAIAACRVARVKFPDTNRAPRPAGGVPAWQLRIERRISTFRTLIAKLICFSRGNNRPRVMRFVTQAFAGTGIRPQHYLASVTERIDYLKQKVYAWANRIRRYRERADRYWQNRVFQSDQRKVYRDWEGTGQRVSDRQLPDTSVMTEFWRGIWSLPVEHTEGDWMRVVERECESIESMGSVLIDPVDVSCAIRTAQNWKSPGPDGLHNFWIKWIRCSHDRLATQFQEALELGSLPCFMTTGVTFLLHKTGSTTEAKNYRPITCLPTIYKLLTSILRTKINAHVVANNVLAPAQNGCRVGSRGTKELLLIDMTISQQVRRNKGALSTAWIDYKKAYDSVPHSWLERVLELYKIDTTLKSFLGACMRQWTTVLRQPGSGDGSSEPQDLIRIERGIFQGDSLSPLWFCLALNPLSTLLKESGLGHRLRRGGEVISHLLYMDDLKLFAPKRPDLMELLKTTQVFSNAIKMEFGVDKCAVMHVQLGEVVNCPDLQLSETMTFRSLSEAETYKYLGMSESLGIAVVDIKRSLKERFFCRLTKVLNSFLSGGNKVRAFNGWVMPLLIYSFGILRWTQTELDALDRRVRQQLTTHRMLHPRSSVMRLYIPRKLGGRGFLSAKNLHNREVCSLRDYFRDNECGMHRDVVAVDKGLTPLSLANENWRKPSVLSTEDRKEVWKSKQLHGRFYRVLTGPDVDMLASVNWLRFGDLFGETEGFACAIADEVIKTNNYRKYIMKDGTVDICRACHRPGESLRHIISGCSHLANGEYLHRHNQVARIIHQQLALQYGLVESEVPYYKYAPAPVLENGRALLYWDRSIITDRTIVANKPDIVVVDRAQRRAVLVDITIPHDENLVKAEKDKLSKYLDLAHEITAMWDVDSTIIVPIVVTVNGLIAKSLDQHLERLSLDGWVKGQLQKAVILDTARIVRRFLTLQP

SEQ ID NO: 6008 - protein, 1206 aa, Notocelia uddmanniana
MITRTRSRAAQRARPPSPPAPSSSSPSSSGDEFATAPDTSESSCDERGPPSPPPRPPARRGRPPLPARLGPVGHSALPTAPAAGGVVRRMRWTQEMNENCMRAYFGATEGETNLSAYRVRMLPLFQALEPTITVTAQRLSDQVRVIQRLKRLDDATLDRLRLEALSARTASALARDPPATSPAPVPTPDMAPGVPRVDPSVDEDCANQTVSTQTNEQLRRALEEAITRYRSTPNSRPRLPRLPVNRRNLALMGALNDLLDPYLRASEDLIDTHSILYCGAIAACRVARVKFPDADRAPRTAGGVPAWQVRIERRINTFRTLIAKLICFRGGNDRPRVMRFVNQAFAGTGVRPRDYVTCVTERIDFLKQKVYAWASRIRRYRERVDRYQQNRLFQSDQRKVYRKWEGTDHRVCDGQRPDATAMGNFWRSIWSAPVEHTEGAWIGVVERECESIEPMGSVTISPEDISCAIRTAPNWKSPGTDGLHNFWLKWFRCSHERLATQFQQALELGSLPHLLTTGVTSLLYKSGSTTEAKNYRPITCLPTLYKLLTSILRAKINTHIVANNILAPAQNGCRVGSRGTKELLLIDMTICQRVRRSRGALSAAWIDYKKAYDSVPHSWLRRILELYKVDAALRSFLSACMGQWTTVLRQPGGGDGSSGPQDSIRIERGIFQGDSLSPLWFCLALNPLSTLLKDSGLGCQLRRGGEVISHLLYMDDLKLFAPNRQDLLELLKTTEVFSSAIKMEFGVDKCAVMHVQRGKVVNSTNLQISETMSLRSLSEAETYKYLGMSQSLGIEGEGIKQAVKERFFCRLTKVLNSFLSGGNKVRAFNAWVMPLLTYSFGILRWTQTELDALDRRVRVLLTTHRMLHPRSSVMRLYIPRKCGGRGFLNAKDLHNREVCSLRDYFLNSECGMHRDVVAVDASFTPLSMANENWRRFKVLSTEDRRAEWKSRELHGRFYKALTGPDVDLLASVNWLRFGDLFGETEGFVCAIADEVIMTNNYRKYILKDGTVDICRACRRPGESLRHIISGCGHLANGEYLHRHNLVARIIHQQLALSYGLVNFEVPYYKYLPAPVLENGRATLYWDRSIITDRTIVANKPDIVLIDRSKRQAVLVDITIPHDENLVKAEKDKVSKYLDLAHEVTAMWDVDSTIIVPIVISANGLIAKSLDQHLKRVSLDGWVKGQIQKAVLLDTARIVRRFLSLSP

SEQ ID NO: 6009 - protein, 1206 aa, Notocelia uddmanniana
MITRTRSRAAQRARPPSPPAPSSSSPSSSGDEFATAPDTSESSCDERGPPSPPPRPPARRGRPPLPARLGPVGHSALPTAPAAGGVVRRMRWTQEMNENCMRAYFGATERETNLSAYRVRMLPLFQALEPTITVTAQRLSDQVRVIQRLKRLDDATLDRLRLEALSARTASALARDPPATSPAPVPTPDMAPGVPRVDPSVDEDCANQTVSTQANEQLRRALEEAITRYRSTPNSRPRLPRLPVNRRNLALMGALNDLLDPYLRASEDLIDTHSILYCGAIAACRVARVKFPDADRAPRTAGGVPAWQVRIERRINTFRTLIAKLICFRGGNDRPRVMRFVNQAFAGTGVRPRDYVTCVTERIDFLKQKVYAWASRIRRYRERVDRYQQNRLFQSDQRKVYRKWEGTDHRVCDGQRPDATAMGNFWRSIWSVPVEHTEGAWIGVVERECESIEPMGSVTISPEDISCAIRTAPNWKSPGPDGLHNFWLKWFRCSHERLATQFQQALELGSLPHLLTTGVTSLLYKSGSTTEAKNYRPITCLPTLYKLLTSILRAKINTHIVANNILAPAQNGCRAGSRGTKELLLIDMTICQRVRRCRGALSAAWIDYKKAYDSVPHSWLRRILELYKVDAALRSFLSACMGQWTTVLRQPGGGDGSSGPQDSIRIERGIFQGDSLSPLWFCLALNPLSTLLKDSGLGCQLRRGGEVISHLLYMDDLKLFAPNRQDLLELLKTTEVFSSAIKKEFGVDKCAVMHVQRGKVVNSTNLQLSETMSLRSLSEAETYKYLGMSQSLGIESEGIKQAVKERFFCRLTKVLNSFLSGGNRVRAFNAWVVPLLTYSFGILRWTQTELDALDRRVRVLLTAHRMLHPRSSVMRLYIPRKCGGRAFLNAKDLHNREVCSLRDYFLNSECGMHRDVVAVDASFTPLSMANENWRRFKVLSTEDRKAEWKSRELHGRFYKALTGPDVDLLASVNWLRFGDLFGETEGFVCAIADEVIMTNNYRKYILKDGTVDICRACRRPGESLRHIISGCGHLANGEYLHRHNLVARIIHQQLALSYGLVNFEVPYYKYLPAPVLENGRATLYWDRSIITDRTIVANKPDIVLIDRSKRQAVLVDITIPHDEDLMKAEKDKVSKYLDLAHEVTAMWDVDSTIIVPIVVSANGLIAKSLDQHLKRLSLDGWVKGQIQKAVLLDTARIVRRFLSLSP

SEQ ID NO: 6010 - protein, 1206 aa, Notocelia uddmanniana
MNTRLRSRAEQRARLPSPPAPSSSSPSSSDDEFATAPDSSESSSDERGPSPPPPQTSARRGRRPLPARLGPTGHSAPPTAPAAGGVVRRMRWTQEMNENCMRAYFGATEGETNLSAYRVRMLPLFQALEPTITVSAQRLSDQVRVIQRNKRLDDLTLDRLRLEALSARAAPTSARDLPATSPAPVPAPNTAPRAPRVDPSADGDCADQSVSTQAHEQLTRALDEAITRYRSTPNSRPRLPRLPVNRRNLALMGALNDLLDPYLRASDDLIDTHSIMYCGAIAACRVARVKFPDADRATRTAGGVPAWQVRIERRINTFRTLIAKLICFRGGNNRPRVMRFVNQAFAGTGVRPRDYMACVTERIDFLKQKVYAWASRIRRYRERVDRYQQNRLFQSDQRKVYRKWEGTDHRVCDGQRPDATAMVNFWRSIWSVPVEHTEGAWIGVVERDCESIEPMGSVTISPEDVSCAIRTAPNWKSPGPDGLHNFWLKWFRCSHERLATQFQQALELGSLPPPLTTGVTSLLYKSGSTTEAKNYRPITCLPTLYKLLTSILRAKINTHVVTNNILAPAQNGCRVGSRGTKELLLIDMTICQRVRRNRGTLSTSWIDYKKAYDSVPHSWLRRILELYKVDAALRSFLSACMGQWTTVLRQPGGGDGPSGPQDSIRIERGIFQGDSLSPLWFCLALNPLSTLLQDSGLGCQLRRGGEVISHLLYMDDLKLFAPNRQDLLELLKTTEVFSSAIKMEFGVDKCAVMHVQRGKVVNSTNLQLSETMSLRSLSEAETYKYLGMSQALGIEGEGIKQAVKERFFCRLTKVLNSFLLGGNKARAFNAWVMPLLTYSFGILRWTQTELDALDRRVRVLLTAHRMLHPRSSVMRLYIPRKCGGRGFLNAKDLHNREVCSLRDYFLNSECGMHRDVVAVDASFTPLSMANENWRRFKVLSAEDRKAEWKSKELHGRFYRALTGPDVDLLASVNWLRFGDLFGETEGFVCAIADEVIMTNNYRKYILKDGTVDICRACRRPGESLRHIISGCSHLANGEYLHRHNLVARIIHQQLALSYGLVDFEVPYYKYLPAPVLENGRATLYWDRSIITDRTIVANKPDIVLIDRSKCQAVLVDITIPHDENLVKAEKDKVSKYLDLAHEVTAMWDVDSTIIVPIVVSANGLIAKSLDQHLKRLSLDGWVKGQIQKAVLLDTARIVRRFLSLSP

SEQ ID NO: 6011 - protein, 1208 aa, Notocelia uddmanniana
MITRSKARLDKKASNPQSARPPPSPASSSSASSSEEFATAPDTSSSSSSDECGPPPPPPRPPARRGRPPLPARLGPAGHPAPPTAPATGGIVRRMQWSQSINENCMRAYYGATDGGTNLSAYRDRMLPLFRALEPAISVSAQRLSDQVRVIQRLKRLDDATLDRLRLEALSARAASASARNPSATLPAPVPALDTAPGADPSADEGCANQSVSSQAYEQLRRALEEAITQYRSTPNSRPRLPRLPVNRRNLALMGALNDLLVPYLGASEDLIDTHSIMYCGAIAACRVARVKFPDADRAPRTAGSVPTWQVRIERRVDTYRTLIAKLICFRGGNSRPRVMRFVNQAFAGTGIRPRDYMTCVTERIDFLKQKVYAWASRIRRYRERLDRYQQNRLFQSDQRKVYRKWDGTDHRVSDGQRPDATAMVNFWRSIWSVPVEHNEGAWMGVVERECQSIEPMGSVTISPADVSCAIRTAPNWKSPGPDGLHNFWLKWFRCSHARLAAQFQQALELGSLPPPLTTGVTSLLYKSGITTEAKNYRPITCLPTLYKLLTSILRAKINTHIVANNILAPAQNGCRVGSRGTKELLLIDMTICQRVRRNRGTLSTAWIDYKKAYDSVPHSWLRRILELYKVDAVLRSFLVACMGQWTTVLRQPGGGEGPSGPQDSIRIERGIFQGDSLSPLWFCLALNPLSTLLKDSGLGCQLRREGEVISHLLYMDDLKLFAPNKHDLLELLKTTEAFSSAIKMEFGVDKCAAMHVQRGKVVNSTNLQISETMDLRSLSEAETYKYLGMSQSLGIEGGDIKRAVKERFFCRLTKVLNSFLSGGNRVRAFNAWVMPLLTYSFGILRWTQTELDFLDRRVRVLLTAHRMLHPRSSVMRLYIPRKFGGRGFLNAKDLHNREVCSLRDYFLNSECGMHRDVVAVDASFTPLSMANENWRRLKVLSTEDRRAVWKSKELHGRFYKALTGPDVDLLASVNWLRFGDLFAETEGFVCAIADEVIMTNNYRKYILKDGTVDICRACRRPGESLRHIISGCGHLANGEYLHRHNLVAKIIHQQLALLYGLVDFEVPYYKYTPAPVLENGRATLYWDRSVITDRTIIANKPDIVLTDRLKRQAVLVDITIPHDENLVKAEKGKVSKYLDLAHEVTAMWDVDSTIIVPIVVSANGLIAKSLDQHLKRLSLDGWVKGQMQKAVLLDTARIVRRFLSLSP

SEQ ID NO: 6012 - protein, 1206 aa, Notocelia uddmanniana
MITRTRSRAAQRARPPSPPAPSSSSPSSSGDEFATAPDTSESSCDERGPPSPPPRPPARRGRPPLPARLGPVGHSALATAPAAGGVVRRMRWTQEMNENCMRAYFGATEGETNLSAYRVRMLPLFQALEPTITVTAQRLSDQVRVIQRLKRLDDATLDRLRLEALSARTASALARDPPATSPAPVPTPDMAPGVPRVDPSVDEDCANQTVSTQTNEQLRRALEEAITRYRSTPNSRPRLPRLPVNRRNLALMGALNDLLDPYLRASEDLIDTHSILYCGAIAACRVARVKFPDADRAPRTAGGIPAWQVRIERRINTFRTLIAKLICFRGGNDRPRVMRFVNQAFAGTGVRPRDYVTCVTERIDFLKQKVYAWASRIRRYRERVDRYQQNRLFQSDQRKVYRKWEGTDHRVCDGQRPDATAMGNFWRSIWSVPVEHTEGAWIGVVERECESIEPMGSVTISPEDISCAIRTAPNWKSPGPDGLHNFWLKWFRCSYERLATQFQQALELGSLPHLLTTGVTSLLYKSGSTTEAKNYRPITCLPTLYKLLTSILRAKINTHIVANNILAPAQNGCRVGSRGTKELLLIDMTICQRVRRSRGALSAAWIDYKKAYDSVPHSWLRRILELYKVDAALRSFLSACMGQWTTVLRQPGGGDGSSGPQDSIRIERGIFQGDSLSPLWFCLALNPLSTLLKDSGLGCQLRRGGEVISHLLYMDDLKLFAPNRQDLLELLKTTEVFSSAIKMEFGVDKCAVMHVQRGKVVNSTNLQLSETMSLRSLSEAETYKYLGMSQSLGIEGEGIKQAVKERFFCRLTKVLNSFLSGGNKVRAFNTWVMPLLTYSFGILRWTQTELDALDRRVRVLLTTHRMLHPRSSVMRLYIPRKCGGRGFLNAKDLHNREVCSLRDYFLNSECGMHRDVVAVDASFTPLSMANENWRRFKVLSTEDRKAEWKSRELHGRFYKALTGPDVDLLASVNWLRFGDLFGETEGFVCAIADEVIMTNNYRKYILKDGTVDICRACRRPGESLRHIISGCGHLANGEYLHRHNLVARIIHQQLALSYGLVNFEVPYYKYLPAPVLENGRATLYWDRSIITDRTIVANKPDIVLIDRSKRQAVLVDITIPHDENLVKAEKDKVSKYLDLAHEVTAMWDVDSTIIVPIVVSANGLIAKSLDQHLKRLSLDGWVKGQIQKAVLLDTARIVRRFLSLSP

SEQ ID NO: 6013 - protein, 1207 aa, Crocallis elinguaria
MITRSRNKAGTASARQPPPPASSSPSSSSGDEYGTPLDTSASSDEDGLPSPPPPPPPARRGRPPLPARLGPVGHSVPRAAPATGGIVRRMRWTSDMNENCMRAYYGATEGGTNMSAYRDRMLPLFQTLEPSVAVSTQRLSDQVRAIQRLKLLDESVLDRLRLEALPIRATSASTRDLSVAPPVPAPLPAPSSVATRIDPVVNEDDCANISVSTQVNEQLRRALEDAILEYQYTPDSRPRLPRLPTNRRNLALMGALNVLLAPYLRASENLFDTHSIMYCGAIAVCRVARVKFPDADRAPRTAGNAPAWQVRIERRINTFRTLIAKLVCFSRGNNRPRVMRFVNQAFAGTGIRPQNYMAGVTERIDFLKQKIYAWVNRIRRYRERVDRYHQNRLFESDQRKVYRNWEGTDQRVSDGQMPDTNAMINFWRGIWSVPVEHTEGDWMRTVEQSCESIETMGSITIDPIDVSCAIRTAQNWKSPGPDGLHNFWIKWIRCSHECLAVQFQEALELGSLPCFLTTGVTSLLHKSGSTTEAKNYRPITCLPTLYKLLTSILRAKINSHVVANNILAPAQNGCRVGSRGTKELLLIDTAICQQVRRNRGALSTAWIDYKKAYDSVPHSWLERILELYKIDTTLRSFLSTCMRQWTTVLRQPGSGNSPSGPENFIKIERGIFQGDSLSPLWFCLALNPLSTLLRDSRLGCKLRREGEIISHLLYMDDLKLLAPKSPDLMKLLKITEIFSSAIKMEFGVDKCAVMHVQRGKVVNSDNLQLSETMTLRSLSEAETYRYLGMSQSLGIAVGDIKQSVKERFFCRLTKVLNSLLSGGNKARAFNGWVMPLLIYSFGILKWTQTELDSLDRRVRQLLTYHRMLHPRSSVMRLYIPRKWGGRGFLNAKTLHNREVCSLREYFLNNECGMHRDVVAVDRNLTPLSLANENWRKPVVMTTEDRKDVWKGKELHGRFYRALTGSDVDLLASVNWLRFGDLFGETEGFVCAIMDEVIKTNNYRKYIMKDGTVDICRACRRPGESLRHIISGCSHLANGEYLHRHNLVARIIHQQIALQYGLVESEVPYYKYAPAPVLENGRALLYWDRSIITDRTIVANKPDIVLVDRSQRRAVLVDITVPHDENLVKAEKDKLSKYLDLAHEVTAMWNVDSTIIVPIVVSANGLVAKSLDQHLKRLSLDGWIKGRMQKAVLLDTARIVRRFLTLQP

SEQ ID NO: 6014 - protein, 1207 aa, Crocallis elinguaria
MITRSRNKAGTASARQPPPPASSSPSSSSGVEYGTPLDTSASSDEDGLPSPPPPPPPARRGRPPLPARLGPVGHSVPRAAPATGGIVRRMRWTSDMNENCMRAYYGATEGGTNMSAYRDRMLPLFQTLEPSVAVSTQRLSDQVRAIQRLKLLDESVLDRLRLEALPIRATSASTRDLSVAPPVPAPLPAPSSVATRIDPVVDEDDCANISVSTQVNEQLRRALEDAILEYQYTPDSRPRLPRLPTNRRNLALMGALNVLLAPYLRASENLFDTHSIMYCGAIAVCRVARVKFPDADRAPRTAGNAPAWQVRIERRINTFRTLIAKLVCFSRGNNRPRVMRFVNQAFAGTGIRPQNYMAGVTERIDFLKQKIYAWVNRIRRYRERVDRYHQNRLFESDQRKVYRNWEGTDQRVSDGQMPDTNAMINFWRGIWSVPVEHTEGDWMRTVEQSCESIETMGSVTIDPIDVSCAIRTAQNWKSPGPDGLHNFWIKWIRCSHECLAVQFQEALELGSLPCFLTTGVTSLLHKSGSTTEAKNYRPITCLPTLYKLLTSILRAKINSHVVANNILAPAQNGCRVGSRGTKELLLIDTAICQQVRRNRGALSTAWIDYKKAYDSVPHSWLERILELYKIDTTLRSFLSTCMRQWTTVLRQPGSGNSPSGPENFIKIERGIFQGDSLSPLWFCLALNPLSTLLRDSRLGCKLRREGEIISHLLYMDDLKLLAPKSPDLMKLLKITEIFSSAIKMEFGVDKCAVMHVQRGKVVNSDNLQLSETMTLRSLSEAETYRYLGMSQSLGIAVGDIKQSVKERFFCRLTKVLNSLLSGGNKARAFNGWVMPLLIYSFGILKWTQTELDSLDRRVRQLLTYHRMLHPRSSVMRLYIPRKWGGRGFLNAKTLHNREVCSLREYFLNNECGMHRDVVAVDRNLTPLSLANENWRKPVVMTTEDRKDVWKGKELHGRFYRALTGSDVDLLASVNWLRFGDLFGETEGFVCAIMDEVIKTNNYRKYIMKDGTVDICRACRRPGESLRHIISGCSHLANGEYLHRHNLVARIIHQQIALQYGLVESEVPYYKYAPAPVLENGRALLYWDRSIITDRTIVANKPDIVLVDRSQRRAVLVDITVPHDENLVKAEKDKLSKYLDLAHEVTAMWNVDSTIIVPIVVSANGLVAKSLDQHLKRLSLDGWIKGRMQKAVLLDTARIVRRFLTLQP

SEQ ID NO: 6015 - protein, 1212 aa, Pammene fasciana
MITRSKTRLQQASPPNARPPSSPASSVSSPSSSGDEFATAPDTSESSDERGPPPPPPRPPARRGRPPLPARLGLAGHPVPPRAPAAGGIVRRMRWTPSMNENVMRAYYGATEGGTNLCAYRDRMLPLFQALEPTINTTAQRLSDQVRVIQRLKRLDDATLDRLRLEALSARAASTSARDPPAMSLDPMPASDLASGAPRIDPSADEEEIANQSVSSTANEQLRRTLEEAITQYRSTNITRPRLPRLPMNRRNLALMGALNDLLNPLLRTSKDLDDTHSIMYCGAIAACRVARVKFPDAERAPRTAGGVPAWQVRIERRINSFRTLIAKLICFRGGNNRPRVMRFVHQAFAGTDIEPRDYMANVTERIDFLKQKVYAWASRIRRYRERVDRFRQNRLFQSDQRKVYRRWEEADPRVSDVRLPDATAMTDFWRSIWSAPVEHTEGEWMSVVERECETIEPMGAITISPDDVSCAIRTAQNWKSPGPDGLHNFWLKWFRCSHSRLATQFQQALELGSLPPSLTTGVTFLLYKSGSTTEAKNYRPITCLPTLYKLLTSILRAKINAHMVANNILASAQNGCRVGSRGTKELLLIDMTICQRVRRNRGALSAAWIDYKKAYDSVPHSWLERILELYKIDAALRSFLGACMRQWTTVLRQPGGGDVPPGPQDFIRIERGIFQGDSLSPLWFCLALNPLSTLLKDSGLGCRLRREGEVISHLLYMDDLKLFAPNNRDLLELLKTTEVFSNSIKMEFGVDKCAVMHVQRGKVVNSTNLQLSETMTFRSISESETYKYLGMSQSLGIEDAGIKQALRERFFGRLTKVLNSLLSGGNKVRAFNAWVMPLLTYSFGILRWTQTELDALDRRVRLLLTTHRMLHPRSSVMRLYIPRKCGGRGFLNAKNLHNREVYNLRNYFLNNECEMHRDVVAIDKGLTPLSLANENWRKPVVLSTEDRKAVWKSKELHGRFYGALTGPDVDLLASVNWLRFGDLFGETEGFACAIADEVIMTNNYRRYILKDGTVDICRACRRPGESLRHIISGCSHLANGEYLHRHNLVARIIHQQLALLYGLVDHEVPYYKYTPAPVLENGRATLYWDRSIITDRTIVANKPDIVVIDRPQRRAMLVDITVPCDVNLVKAEKDKSSKYLDLAHEVTAMWEVDSAIIVPIVVSANGLIAKSLDQHLERLSLRGCGWIKGQIQKAVILDTARIVRRFLSLRP

SEQ ID NO: 6016 - protein, 1213 aa, Pammene fasciana
MITRSKARQAQADTTNARPPPSPTPSDSSPSSSSDEAFATAADTSESSYECGLPSPPPRPPARRGRPPLPARLGLAGHPVPPKAPAAGGIVRRMRWTQKMNENCMRAYYGATEGGTNLCAYRVRLLPLFRALEPTINVTAQRLSDQVRVIQRDKRLDDSTLDRLRLEALSARAASTSARDPPATLPDPIPAPDLASGAPRVDPSADEEEIATQTVSSTANEQLRRTLEEAITQYRSTNIPRPRLPRLPMNRRNLALMGALNDLLDPILRTSKDLDDTHSIMYCGAIAACRVARVKFPDAERAPRTAGGVPAWQVRIERRINSFRTLIAKLICFRGGNNRPRVMRCVHQAFAGTGIEPRDYMANVTERIDFLKQKVYAWASRIRRYRERVDRFRQNRLFQSDQRKVYRRWEEADPRVSDARLPDATAMTDFWRSIWSAPVEHTEGEWMSVVERECESIEPMGAITISPDDVSCAIRTAQNWKSPGPDGLHNFWLKWFRCSHSRLATQFQQALELGSLPPSLTTGVTFLLYKSGSTTEAKNYRPITCLPTLYKLLTSILRAKINAHIVANNILASSQNGCRVGSRGTKELLLIDMTICQRARRNRGALSAAWIDYKKAYDSVPHSWLERILELYKVDAALRSFLGACMRQWTTVLRQPGGGDDPPDPHDFIRIERGIFQGDSLSPLWFCLALNPLSTLLKDSGLGCRLRREGEVISHLLYMDDLKLFAPNNRDLMELLKTTEVFSSSIKMEFGVDKCAVMHVQRGKVVNSTNLQLSETMTFRSISESETYKYLGMSQSLGIEDAGIKQALKERFFGRLTKVLNSLLSGGNRVRAFNAWVMPLLTYSFGILRWTQTELDALDRRVRLLLTTHRMLHPRSSVMRLYIPRKCGGRGFLNAKNLHNREVYNLRNYFLNNECGMHRDVVAVDKSLTPLSLANENWRKPVVLSTEDRKAVWKSKELHGRFYGALTGPDVDLLASVNWLRFGDLFGETEGFACAIADEVIMTNNYRRYILKDGTVDICRACRRPGESLRHIISGCSHLANGEYLHRHNLVARIIHQQLALLYGLVDHEVPYYKYTPAPVLENGRATLYWDRSIITDRTIVANKPDIVIIDRSQRRAMLVDITVPCDVNLVKAEKDKSSKYLDLAHEVTAMWEVDSAIIVPIVVSANGLIAKSLDQHLERLSLRGCGWIKGQIQKAVILDTARIVRRFLSLRP

SEQ ID NO: 6017 - protein, 1211 aa, Pammene fasciana
MITRSQARAATTHARPPPSPASSCSSSTSSSGDKFETAPDTDGSSDDYGPPPPPPRRPPARRGRPPLPARLGLAGYPAPPRAPAAGGIVRRMRWTPSMNENVMRAYYGATEGGTNLSAYRDRMLPLFQALEPTIDTTAQRLSDQVRVIQRLKRLDDVILDRLRLEALSVRAATTSARDPPATSPDPMPAPDLASGVPRVDPSADEVDIANQSVSSTANEQLRRTLEEAITQFRSTNITRPRIPRLPMNRRNLALMGALNDLLAPFLRTSKDLDDTHSIMYYGAIAACRVARVKFPDAERAPRTAGGVPAWQVRIERRINSFRTLIAKLICFRGGNNRPRVMRFVHQAFAGTGIEPRDYMANVIERIDFLKQKVYAWASRIRRYRERVDRFRQNRLFQSDQRKVYRRWEKADPRVSDERLPDAIAMADFWRSIWSAPVEHTEGEWMSVVERECESIEPMGAITISPDDVSCAIRTAQNWKSPGPDGLHNFWLKWFRCSHSRLATQFQQALELGSLPPSLTTGVTFLLYKSGSTMEAKNYRPITCLPTLYKLLTSILRAKINAHMVANNILASAQNGCRVGSRGTKELLLIDMTICQRARRNRGALSAAWIDYKKAYDSVPHSWLERILELYKVDAALRSFLGACMRQWTTVLRQPGGGDDPPGPQDFIRIERGIFQGDSLSPLWFCLALNPLSTLLKDSGLGCRLRREGEVISHLLYMDDLKLFAANNRDLLELLKTTEVFSNSIQMEFGVDKCAVMHVQRGKVVNSTNLQLSETMTFRSISESETYKYLGMSQSLGIEDAGIKQALRERFFGRLTKVLNSLLSGGNKVRAFNAWVMPLLTYSFGILRWTQTELDALDRRVRLMLTTHRMLHPRSSVMRLYIPRKCGGRGFLNAKNLHNREVYNLRNYFLNNECGMHRDVVAIDKGLTPLSLANENWRKPVVLSTEDRKAVWKSKELHGRFYGALTGPDVDLLASVNWLRFGDLFGETEGFACAIADEVIMTNNYRRYILKDGTVDICRACRRPGESLRHIISGCSHLANGEYLHRHNLVARIIHQQLALLYGLVAHEVPYYKYIPAPVLENDRATLYWDRSIITDRTIVANKPDIVVIDRPQRRAMLVDITVPCDVNLVKAEKDKSSKYLDLAHEVTAMWEVDSAIIVPIVVSANGLIAKSLDQHLERLSLRGCGWIKGQIQRAVILDTARIVRRFLTLRP

SEQ ID NO: 6018 - protein, 1210 aa, Pammene fasciana
MITRSKARAATTHARPPSPLASSSSPSTSSSSDDFETAPDTDESSDESGPPPPPPQPPARRGRPPLPARLGPTGHPVPPRAPAAGGIVRRMRWTCSMNENVMRAYYGATEGGTNLCAYRARILPLFQALEPTIDTTTQRLSDQVRVIQRLKRLDDATLDRLRLEALSARAASTSARDPPAASPDPMPAPDLASGAPRIDPSADEEYIASQSVSSTANEQLRRTLEEAITQYRSTNIPRPRLPRLPLNRRNLALMGALNDLLDPILRTSKDLDDTHSIMYCGAIAACRVARIKFPDAERAPRTAGGVPAWQVRIERRINSFRTLIAKLICFRGGNNRPRVMRFVYQAFAGTDIEPRDYMANITERIDFLRQKVYAWASRIRRYRERVDRFRQNRLFQSDQRKVYRRWEEADPRVSDVRLPDATAMTDFWRSIWSAPVEHTEGEWMNVVERECESIEPMGAITISPDDVSCAIRTSQNWKSPGPDGLHNFWLKWFRCSHSRLATQFQHALELGSLPPSLTTGVTFLLYKSGSTTEAKNYRPITCLPTLYKLLTSILRAKINAHMVANNILASAQNGCRVGSRGTKELLLIDMTICQRVRRNRGALSAAWIDYKKAYDSVPHSWLERILELYKVDAALRSFLGACMRQWTTVLRQPGGGDDPPGPQDFIRIERGIFQGDSLSPLWFCLALNPLSTLLKDSGLGCRLRREGEVISHLLYMDDLKLFAPNNRDLLELLKTTEVFSSSIKMEFGVDKCAVMHVERGKVVNSTNLQLSETMTFRSISESETYKYLGMSQSLGIEDVGIKQALKERFFGRLTKVLNSLLSGGNKVRAFNAWVMPLLTYSFGILRWTQTELDALDRRVRLLLTTHRMLHPRSSVMRLYIPRKCGGRGFLNAKNLHNREVYNLRNYFLNNECGMHRDVVTVDKNLTPLSLANENWRKPVVLSTEDRKAVWKSKELHGRFYGALTGPDVDLLASVNWLRFGDLFGETEGFACAIADEVIMTNNYRRYILKDGTVDICRACRRPGESLRHIISGCSHLANGEYLHRHNLVARIIHQQLALLYGLVAHEVPYYKYTPAPVLENGRATLYWDRSIITDRTIVANKPDIVVIDRPQRRAMLVDITVPCDVNLVKAEKDKSSKYLDLAHEVTAMWEVDSAIIVPIVVSANGLIAKSLDQHLERLSLRGCGWIKGQIQKAVILDTARIVRRFLSLRP

SEQ ID NO: 6019 - protein, 1212 aa, Pammene fasciana
MITRSKTRLQQASPPNARPTSSPASSVSSPSSSGDEFATAPDTSESSDERGPPPPPPRPPARRGRPPLPARLGLAGHPVPPRAPAAGGIVRRMRWTPSMNENVMRAYYGATEGGTNLCAYRDRMLPLFQALEPTIDTTAQRLSDQVRVIQRLKRLDDATLDRLRLEALSARAASTSAWDPPATSLDPMPASDLASGAPRIDPSADEEEIANQSVSSTANEQLRRTLEEAITQYRSTNITRPRLPRLPMNRRNLALMGALNDLLDPLLRTSKDLDDTHSIMYCGAIAACRVARVKFPDAERAPRTAGGVPAWQVRIERRINSFRTLIAKLICFRGGNNRPRVMRFVHQAFAGMDIEPRDYMANVTERIDFLKQKVYAWASRIRRYRERVDRFRQNRLFQSDQRKVYRRWEEADPRVSDVRLPDATAMTDFWRSIWSAPVEHTEGEWMSVVERECESIEPMGAITISPDDVSCAIRTAQDWKSPGPDGLHNFWLKWFRCSHSRLATQFQQALELGSLPPSLTTGVTFLLYKSGSTTEAKNYRPITCLPTLYKLLTSILRAKINAHMVANNILASAQNGCRVGSRGTKELLLIDMTICQRVRRNRGALSAAWIDYKKAYDSVPHSWLERILELYKIDAALRSFLGACMRQWTTVLRQPGGGDDPPGPQDFIRIERGIFQGDSLSPLWFCLALNPLSTLLKDSGLGCRLRREGEVISHLLYMDDLKLFAPNNRDLLELLKTTEVFSNSIKMEFGVDKCAVMHVQRGKVVNSTNLQLSETMTFRSISESETYKYLGMSQSLGIEDAGIKQALRERFFGRLTIVLNSLLSGGNKVRAFNAWVMPLLTYSFGILRWTQTELDALDRRVRLLLTTHRMLHPRSSVMRLYIPRKCGGRGFLNAKNLHNREVYNLRNYFLNNECGMHRDVVAIDKGLTPLSLANENWRKPVVLSTEDRKAVWKSKELHGRFYGALRGPDVDLLASVNWLRFGDLFGETEGFACAIADEVIMTNNYRRYILKDGTVDICRACRRPGESLRHIISGCSHLANGEYLHRHNLVARIIHQQLALLYGLVDHEVPYYKYTPAPVLENGRATLYWDRSIITDRTIVANKPDIVIIDRSQRRAMLVDITVPCDVYLVKAEKDKSSKYLDLAHEVTAMWEVDSAIIVPIVVSANGLIAKSLDQHLERLSLRGCGWIKGQIQKAVILDTARIVRRFLSLRP

SEQ ID NO: 6020 - protein, 1118 aa, Ennomos quercinarius
MRWTQTINENCMRAYYGATEGGSSLTAYRDRMLSLFQNLEPSVSVSAQRLSDQVRAIHRCKLLDQSTLDRLRLETLSIRTTSPSPRVLPAALPDLGPVMGPPPVTPRGDPAIDGEESVSDSVSTQANEQLRSALEDAILRYRSTPTSRPRLPRLPTNRRNLVLMGALNTLLAPYLRTSEDLVDTHSILYCGAIAACRVARVKFPDTDRAPRPADGAPAWQVRIEKRITTFRTLIAKLVCFSRGNHRPRVVRFVTQAFAGTGIRPQDYMACVTERIDFLKQKVYAWASRIRRYRERVDRYQQNRLFQSDQRKVYRNWEGTGQRVVDGQLPDANAMNEFWRNIWSVPVEHTEGDWMRVVERVCEPIESMGSITIDPEDISCAIRTAQNWKSPGPDGLHNFWIKWIRCSYPCLAIQFQEALEAGSLPSFMTTGVTFLLHKSGSTTEAKNYRPITCLPTLYKLLTSILRTKINSHIVANNILAPAQNGCRVGSRGTKELLLIDTAICQQVRRNRGALSTAWIDYKKAYDSVPHLWLERILELYKIDATLRSFLSACMRQWTTVLRQPGGGESVSDPQDFIRIERGIFQGDSLSPLWFCLALNPLSTLLGDSGLGYRLRRGGEIISHLLYMDDLKLFAPQRPQLIELLKITENFSNSINMEFGVDKCAVMHVHRGKVVNSTNLQLSETMTLRSLSESEAYRYLGMSKSLGISVGDVKRTVKERFFCRLTKVLNSLLSGGNKTRAFNGWVMPLLMYSFGILRWTQTELDALDRKVRQLLTSHRMLHPRSSVMRLYIPRKWGGRGFLNAKTLHNREVCSLRDYFLNNECGMHRDVVAVDKGLTPLSLANENWRKPVVLSTEDRRDVWKGKELHGRFYRALTGPDVDLHASVNWLRFGDLFGETEGFVCAIADEVIKTNNYRKYIMKDGAVDICRACRRPGESLRHIISGCSHLANGEYLHRHNLVARIIHQQLALQYGLVESEVPYYKYTPGPVLENGRALLYWDRSIITDRTIVANKPDIVLVDRSQRRAVLVDITIPHDENLVKAEKDKLSKYLDLAHEVTAMWNVDSTSIVPIVVSANGLIAKSLDQHLKRLSLDGWIKGQIQKAVLLDTARIVRRFLTLQP

SEQ ID NO: 6021 - protein, 1118 aa, Cydia splendana
MRWTRDMNENVMRAYYGATEGGTQLSAYRSRILPLFQTLEPTITVSEQRLSDQVRVIQRLKRLDDATLDRLRQEALSAREDSISVRDLPATSPDPVPAPDLAPGAPRVDFCTDEGDLVSQNVSTTANEQLRRTLEEVITQYRATTNSRPRLPRLPMNRRNLALMGALNALLEPHLRTSKDLDDTHSILYCGAIAACRVARVKFPDAERAPRTVGGVPAWQARIERRISSFRTLIAKLICFRGGNNRPRVMRFVNQAFAGTDIRPRDYMANVTERIDFLKQKVYAWANRIRRYRERVERFQQNRLFQSDQRKVYRKWEETNLRTPDTQPPDATAMTDFWRSIWSMPVGHTEGSWMSVIERECESIEPMGAVTISPDDVSCAIRTAQNWKSPGPDGLHNFWLKWFRCSHSCLAAQFQQALELGSLPPSLTTGVTFLLYKSGSTTEAKNYRPITCLPTLYKLLTSILRAKINAHIVANNILASAQNGCRVGSRGTKELLLIDMTICQQIRRTKGALSAAWIDYKKAYDSVPHSWLGRVLELYKVDAALRAFLSACMGQWTTVLRQPGGGDDQPGPQDFIRIERGIFQGDSLSPLWFCLALNPLSTLLKDLGLGCRLRREGEVISHLLYMDDLKLFAPNTQGLLELLKTTEVFSSAINMEFGVDKCAVMHVQRGRVVNSTNLQLSETMSFRSISESETYKYLGMSQSLGIEDEGIRRSVKERFFSRLTKVLNSLLSGGNKVRAFNAWVMPLLTYSFGILRWTQTELDALDRRVRSLLTTHRMLHPRSSVMRLYIPRKCGGRGFLNAKDLHNREVYNLRNYFLNNECGMHRDVVAVDRNLTPLSLANENWRKPVVLSTADRKAAWENKVLHGRFYKALTGPDVDLLASVNWLRFGDLFGETEGFACAIADEVMMTNNYRKYILKDGTVDICRACRRPGESLRHIISGCSHLANGEYLHRHNLVARIIHQQLALLYGLVDREVPYYKYLPAPVLENGRATLYWDRSIITDRTIVANKPDIVLIDRSQRRAVLADVTIPHDENLVKAEKDKSSKYLDLAHEITDMWDVDSTIIVPIVVSANGLIAKSLDQHLERLSLGGWIKGQMQKAVILDTARIVRRFLSLQP

SEQ ID NO: 6022 - protein, 955 aa, Cydia splendana
MGALNALLEPYLRTSKDLDDTHAIMYCGAIAACRVARVKFPDSERAPRTAGGAPAWQIRIERRISSFRTLIAKLICFRGGNNRPRVMRFVNQAFAGTDIRPRDYMANITERIDFLKRKVYAWANRIRRYRERVDRFQQNRLFQSDQRKMYRKWEETNPRASDSQPPEATVMNDFWRSIWSVPVGHTEGSWMSVVERECESIEPMGAVTISPDDVSCAIRTAQNWKSPGPDGLHNFWLKWFRCSHSCLAAQFQQALELGSPPPSLTTGVTFLLYKSGSTTEAKNYRPITCLPTLYKLLTSILRAKINAHIVANNILASAQNGCRVGSRGTKELLLIDMTICQQIRRNRGALSAAWIDYKKAYDSVPHSWLERVLELYKVDTALRAFLSACMRQWTTVLRQPGGGDGSPGPQDFIRIERGIFQGDSLSPLWFCLALNPLSTLLKDLELGCRLRRGGEVISHLLYMDDLKLFSPNSQDLVELLKTTEVFSNAINMEFGVDKCAVMHVQRGKVVNSTNLQLSETMSFRSISESETYKYLGMSQSLGIEEEGIRRSVKERFFSRLTKVLNSLLSGGNKVRAFNAWVMPLLTYSFGILRWTQTELDALDRRVRQLLTTHRMLHPRSSVMRLYIPRKCGGRGFLNAKNLHNRELYNLRNYFLNNECGMHRDVVAADKGLTPLSLANENWRKPVVLSTEDRKAVWKDKQLHGRFYKALTGPDVDLLASVNWLRFGDLFGETEGFACAIADEVMMTNNYRKYILKDGTVDICRACRRPGESLRHIISGCSHLANGEYLHRHNLVARIIHQQLALLYGLVDREVPYYKYSPAPVLENGRATLYWDRSIITDRTIVANKPDIVLIDRSQRRTVLVDVTIPHDENLVKAEKDKSSKYLDLAHEITAMWDVDSTIIVPIVVSANGLIAKSLDQHLERLSLGGWIKGQMQKAVILDTARIVRRFLTLRP

SEQ ID NO: 6023 - protein, 1209 aa, Cydia splendana
MITRSKTRSQASITTNARPPPSPVSSVYSQASSGDEFATAPDTSESSDECGPPPPPPRPPARRGRPPLPARLGPAGHHAPPTVPAAGGVVRRMRWSQTMNENVMRAYYGATEGGTDLCAYRVRMLPLFQALEPTIDVTAQRLSDQVRVIQRLKRLDDSTLDRLRLEALSTRAASTSVRDPPATSPDTVPAPDQAPEAPRVDLCADEEEFAQSVSSTANEQLRRTLDEAITQYRSTPNTRPRLPRLPMNRHNLALMGALNALLEPYLRTSKNLDDTHAIMYCGAIAACRVARVKFPDSERAPRTAGGAPAWQIRIERRISSFRTLIAKLICFRGGNNRPRVMRFVNQAFAGTDIRPRDYMANITERIDFLKQKVYAWANRIRRYRERVDRFQQNRLFQSDQRKMYRKWEETNPRASDSQPPEATVMNDFWRSIWSVPVGHTEGSWMSVVERECESIEPMGAVTISPDDVSCAIRTAQNWKSPGPDGLHNFWLKWFRCSHSCLAAQFQQALELGSPPPSLTTGVTFLLYKSGSTTEAKNYRPITCLPTLYKLLTSILRAKINAHIVANNILASAQNGCRVGSRGTKELLLIDMTICQQIRRNRGALSAAWIDYKKAYDSVPHSWLERVLELYKVDTALRAFLSACMRQWTTVLRQPGGGDGSPGPQDFIRIERGIFQGDSLSPLWFCLALNPLSTLLKDLELGCRLRRGGEVISHLLYMDDLKLFAPNSQDLVELLKTTEVFSNAINMEFGVDKCAVMHVQRGKVVNSTNLQLSETMSFRSISESETYKYLGMSQSLGIEEEGIRRSVKERFFSRLTKVLNSLLSGGNKVRAFNAWVMPLLTYSFGILRWTQTELDALDRRVRQLLTTHRMLHPRSSVMRLYIPRKCGGRGFLNAKNLHNREVYNLRNYFLNNECGMHCDVVAADKGLTPLSLANENWRKPVVLSTEDRKAVWKDKQLHGRFFKALTGPDVDLLASVNWLRFGDLFGETEGFACAIADEVMMTNNYRKYILKDGTVDICRACRRPGESLRHIISGCSHLANGEYLHRHNLVARIIHQQLALLYGLVDREVPYYKYSPAPVLENGRATLYWDRSIITDRTIVANKPDIVLIDRSQRRTVLVDVTIPHDENLVKAEKDKSSKYLDLAHEITAMCDVDSTIIVPIVVSANGLIAKSLDQHLERLSLGGWIKGQMQKAVILDTARIVRRFLTLRP

SEQ ID NO: 6024 - protein, 1209 aa, Cydia splendana
MITRSKTRSQASITTNARPPPSPVSSVSSQASSGDEFATAPDTSESSDECGPPPPPPRPPARRGRPPLPARLGPAGHHAPPTVPAAGGVVRRMRWSQTMNENVMRAYYGATEGGTDLCAYRVRMLPLFQALEPTIDVTAQRLSDQVRVIQRLKRLDDSTLDRLRLEALSTRAASTSVRDPPATSPDPVPAPDQAPEAPRVDLCTDEEEFAQSVSSTANEQLRRTLDEAITQYRSTPNTRPRLPRLPMNRHNLALMGALNALLEPYLRTSKDLDDTHAIMYCGAIAACRVARVKFPDSERAPRTAGGAPAWQIRIERRISSFRTLIAKLICFRGGNNRPRVMRFVNQAFAGTDIRPRDYMANITERIDFLKQKVYAWANRIRRYRERVDRFQQNRLFQSDQRKMYRKWEETNPRASDSQPPEATVMNDFWRSIWSVPVGHTEGSWMSVVERECESIEPMGAVTISPDDVSCAIRTAQNWKSPGPDGLHNFWLKWFRCSHSCLAAQFQQALELGSPPPSLTTGVTFLLYKSGSTTEAKNYRPITCLPTLYKLLTSILRAKINAHIVANNILASAQNGCRVGSRGTKELLLIDMTICQQIRRNRGALSAAWIDYKKAYDSVPHSWLERVLELYKVDTALRAFLSACMRQWTTVLRQPGGGDGSPGPQDFIRIERGIFQGDSLSPLWFCLALNPLSTLLKDLELGCRLRRGGEVISHLLYMDDLKLFAPNSQDLVELLKTTEVFSNAINMEFGVDKCAVMHVQRGKVVNSTNLQLSETMSFRSISESETYKYLGMSQSLGIEEEGIRRSVKERFFSRLTKVLNSLLSGGNKVRAFNAWVMPLLTYSFGILRWTQTELDALDRRVRQLLTTHRMLHPRSSVMRLYIPRKCGGRGFLNAKNLHNRELYNLRNYFLNNECGMHRDVVAADKGLTPLSLANENWRKPVVLSTEDRKAVWKDKQLHGRFYKALTGPDVDLLASVNWLRFGDLFGETEGFACAIADEVMMTNNYRKYILKDGTVDICRACRRPGESLRHIISGCSHLANGEYLHRHNLVARIIHQQLALLYGLVDREVPYYKYSPAPVLENGRATLYWDRSIITDRTIVANKPDIVLIDRSQRRTVLVDVTIPHDENLVKAEKDKSSKYLDLAHEITAMWDVDSTIIVPIVVSANGLIAKSLDQHLERLSLGGWIKGQMQKAVILDTARIVRRFLTLRP

SEQ ID NO: 6025 - protein, 1210 aa, Cydia splendana
MITRSQRRAAESTNNARPPPPPAPSSSSSTSSSGDEFATAPDTDGSSDEGGPPPPPPRPPARRGRPPLPARLGPAGHPAPPTAPAAGGIVRRMRWTRDMNENVMRAYYGATEGGTQLSAYRSRILPLFQALEPTITVSEQRLSDQVRVIQRLKRLDDATLDRLRQEALSARADSTSVRDLPATSPDPVPAPDLAPAAPRVDFCTDEGDFASQNVSTTANEQLRRTLEEAITQYRATTNSRPRLPRLPMNRRNLALMGALNALLEPHLRTSKDLDDTHSIMYCGAIAACRVARVKFPDAERAPRTAGGVPAWQVRIERRISSFRTLIAKLICFREGNNRPRVMRFVNQAFAGTDIRPRDYMANVTERIDFLKQKVYAWANRIRRYRERVDRFQQNRLFQSDQRKVYRKWEETNLRTPDTQPPDVTAMTDFWRSIWSVPVGHTEGSWMSVVERECESIEPMGAVTISPDDVSCAIRTAKNWKSPGPDGLHNFWLKWFRCSHSRLAAQFQQALELGSLPPSLTTGVTFLLYKSGSTTEAKNYRPITCLPTLYKLLTSILRVKINAHIIANNILASAQNGCRVGSRGTKELLLIDMTICQQIRRNKGALSAAWIDYKKAYDSVPHSWLGRVLELYKVDAALRAFLSACMRQWTTVLRQPGGGDDRPGPQDFIRIKRGIFQGDSLSPLWFCLALNPLSTLLKDLGLGCRLRREGVVISHLLYMDDLKLFAPNSQDLLELLKTTEVFSSAIHMEFGVDKCAVMHVQRGKVVNSTNLQLSETMSFRSISESETYKYLGMSQSLGIEDEGIRRSVKERFFSRLTKVLNSLLSGGNKVRAFNAWVMPLLTYSFGILRWTQTELDALDRRVRSLLTTHRMLHPRSSVMRLYIPRKCGGRGFLNAKDLHNREVYNLRNYFLNNECGMHRDVVAVDRNLTPLSLANENWRKPVVLSTADRKAAWESKVLHGRFYKALTGPDVDLLASVNWLRFGDLFGETEGFACAIADEVMMTNNYRKYILKDGTVDICRACRRPGESLRHIISGCSHLANGEYLHRHNLVARIIHQQLALLYGLVDREVPYYKYLPAPVLENGHATLYWDRSIITDRTIVANKPDIVIIDRSQRRAVLVDITIPHDENLVKAEKDKSSKYLDLAHEITAMWDVDSTIIVPIVVSVNGLIAKSLDQHLERLSLGGWIKGQMQKAVILDTARIVRRFLSLQP

SEQ ID NO: 6026 - protein, 1208 aa, Cydia splendana
MITRSKARSQASTTANARPPPSPVSSVSSQSSGDEFATAPDTSESSDECGPPPPPPRPPARRGRPPLPARLGPAGHLAPPTAPAAGGVVRRMRWSQTMNENVMRAYYGATEGGTDLCAYRVRMLPLFQTLEPTIDVTAQRLSDQVRVIQRLKRLDDSTLDRLRLEALSARAASTSVRDPPATSPDPVPAPDQAPEAPRVDLCADEEEFAQSVSSTANEQLRRTLDEAITQYRSTPNTRPRLPRLPMNRHNLALMGALNALLEPYLRTSKDLDDTHAIMYCGAIAACRVARVKFPDSERAPRTAGGAPAWQIRIERRISSFRTLIAKLICFRGGNNRPRVMRFVNQAFAGTDIRPRDYMANITERIDFLKQKVYAWANRIRRYRERVDRFQQNRLFQSDQRKMYRKWEETNPRASDSQPPDATVMNDFWRSIWSVPVGHTEGSWMSVVERECESIEPMGAVTISPDDVSCAIRTAQNWKSPGPDGLHNFWLKWFRCSHSCLAAQFQQALELGFPPPSLTTGVTFLLYKSGSTTEAKNYRPITCLPTLYKLLTSILRAKINAHIVANNILASAQNGCRVGSRGTKELLLIDMTICQQIRRNRGALSAAWIDYKKAYDSVPHSWLERVLELYKVDTALRAFLSACMRQWTTVLRQPGGGDESPGPQDFIRIERGIFQGDSLSPLWFCLALNPLSTLLKDLELGCRLRRGGEVISHLLYMDDLKLFAPNSQDLVDLLKTTEVFSNAINMEFGVDKCAVMHVQRGKVVNSTNLQLSETMSFRSISESETYKYLGMSQSLGIEEEGIRRSVKERFFSRLTKVLNSLLSGGNKVRAFNAWVMPLLTYSFGILRWTQTELDALDRRVRSLLTTHRMLHPRSSVMRLYIPRKCGGRGFLNAKDLHNREVYNLRNYFLSNECGMHRDVVAVDRNLTPLSLANENWRKPVVLSTADRKAAWESKVLHGRFYKALTGPDVDLLASVNWLRFGDLFGETEGFACAIADEVMMTNNYRKYILKDGTVDICRACRRPGESLRHIISGCSHLANGEYLHRHNLVARIIHQQLALLYGLVDREVPYYKYSPAPVLENGRATLYWDRSIITDRTIVANKPDIVLIDRSQRRTVLVDVTIPHDENLVKAEKDKSSKYLDLAHEITAMWDVDSTIIVPIVVSANGLIAKSLDQHLERLSLGGWIKGQMQKAVILDTARIVRRFLTLRP

SEQ ID NO: 6027 - protein, 1118 aa, Cydia splendana
MRWTRNMNENVMRAYYGATEGGTQLSAYRSRILPLFQALEPTINVSEQRLSDQVRVIQRLKRLDDATLDRLRQEALSARADSTSVRDLPATSPDPVPAPDLAPGAPRVDFYTDEGDFASQNVNTTANEQLRRTLEEAITQYRVTTNSRPRLPRLPMNRRNLALMGALNALLEPHLRTSKDLDDTHSIMYCGAIAACRVARVKFPDTERAPRTVGGVPAWQARIERRIGSFRTLLAKLICFRGGNNRPRVMRFVNQAFAGTDIRPRDYMANVTERIDFLKQKVYAWANRIRRYRERVDRFQQNRLFQSDQRKVYRKWEEANLRAPDTQPPDATAMTDFWRSIWSVPVGHTEGGWMSVVERECESIEPMGAVTISPDDVSCAIRTAQNWKSPGPDGLHNFWLKWFRCSHSRLAVQFQQALELGSLPPSLTTGVTFLLYKSGSTTEAKNYRPITCLPTLYKLLTSILRAKINAHIVANNILASAQNGCRVGSRGTKELLLIDMTICQQIRRNKRALSAAWIDYKKAYDSVPHSWLGRVLELYKVDAALRAFLSACMRQWTTVLRQPGGGGDRSGPQDFIRIERGIFQGDSLSPLWFCLALNPLSTLLKDLGLGCRLRREGEVISHLLYMDDLKLFAPNSQDLLELLKTTEVFSSAIHMEFGVDKCAVMHVQRGRVVNSTNLQLSETMSFRSISESETYKYLGMSQSLGIEDEGIRRSVKERFFSRLTKVLNSLLSGGNKVRAFHAWVMPLLTYSFGILRWTQTELDALDRRVRSLLTAHRMLHPRSSVMRLYIPRKCGGRGFLNAKDLHNHEVYNLRNYFLNNECGMRRDVVAVDRNLTPLSLANENWRKPVVLSTADRRAAWESKVLHGRFYKALTGPDVDLLASVNWLRFGDLFGETEGFACAIADEVMMTNNYRKYILKDGTVDICRACRRPGESLRHIISGCSHLANGEYLHRHNLVARIIHQQLALLYDLVDREVPYYKYLPAPVLENGRATLYWDRSIITDRTIVANKPAILIIDRSQRRAVLVDITIPHDENLVKAEKDKSSKYLDLAHEITAMWDVDSTIIVPIVVSVNGLIAKSLDQHLERLSLGGWIKGQMQKAVILDTARIVRRFLSLQP

SEQ ID NO: 6028 - protein, 1097 aa, Agriopis aurantiaria
MSAYCARMLPLFQDLEPTVTVSAQRLSDQVRAIHRCKLLDDSVLDRLRLEELRARPTPALMRDPPVASSAPTLASLPASVATLAAPADPVVDEGDLTSNSVSDQVREQLRGALEDAISQYRFAPDSRPRLPRLPTHRRNLALMGALNALLAPYLRASEDLVDTHSILYCGAIAACRVARVKFPDTNRAPRTAGGVPAWQVRIERRISTFRTLIAKLICFSRGNNRPRVMRFVTQAFAGTEIRPQHYLANVMERIDYLKQKVYAWVSRIRRYRERVNRYWQNRLFQSDQRKVYRGWEETDQRVSDGQLPDANAMINFWRGIWSVPVEHTEGDWMRVVERECESIEPMGSILIDSVDVSCAIRTAQNWKSPGPDGLHNFWIKWIRCSHDRLATQFQEALELGSLPSFMTTGVTFLLHKSGSTTEAKNYRPITCLPTIYKLLTSILRNKINAHIVANNVLAHAQNGCRVGSRGTKELLLIDTAISQQVRRNKGALSAAWIDYKKAYDSVPHSWLERVLELYKIDTTLKSFLGACMRQWTTVLRQPGGGDGTSGPQDLIRIERGIFQGDSFSPLWFCLALNPLSTLLRDSGLGYRLRRDGQVISHLLYMDDLKLFTPKRQDLVELLKITEVFSSAIRMEFGVDKCAVMHVQRGKVVNSPNLQLSEVMTLRSLSEAETYKYLGMSESLGISVENIKKSVKERFFCRLTKVLNSFLSGGNKVRAFNGWVMPLLIYSFGILRWTQTELDALDRRVRQLLTSHRMLHPRSSVMRLYIPRKWGGRGFLNAKNLHNREVCSLRDFFRNSESGMHRDVVAVDRGLTPLSLVNENWRKPSVLSIEDRRDVWKGKELHGRFYRALTGPDVDLLSSVNWLRFGDLFGETEGFACAIADEVIKTNNYRKYIMKDGTVDICRACHRPGESLRHIISGCSHLANGEYLHRHNQVARIIHQQLALRYGLAESEVPYYKYAPAPVLENGRALLYWDRSIITDRTIVANKPDIVLVDRSQRRAVLVDITIPHDENLVKAEKDKLSKYLDLAHEVTAMWDVDSTIIVPIVVSVNGLIAKSLDQHLKRLSLDGWIKGQMQKAVILDTARIVRRFLTLQP

SEQ ID NO: 6029 - protein, 1215 aa, Hedya salicella
MQRYFTRSQNTRKISTAATPTHARPTPPPASSCSPSASSDDFATAPDTSESSDDECGPPPPPPRPPARRGRPPLPARLGPSGHSAPPTAPATGGIVRRMRWSQANNENVMRAYYGATEGGTHLSAYRDRMLLLFQTFEPAIAASAQRLSDQVRAIQRRKLLDDATLDRLRLEVLAARAASTSSRNPPATSPVPAPALDLMPGAPRVDPDSDEGHCVSIVSTQANEQLRRTLEETIERYRFAPDSRPRLPRLPANKRNLALVGALNALLDPYLRASEDLADTHSIMYCGAIAACRVARVKFPDADRAPRTAGGVPAWQVRIERRISTFRTVIAKLICFRGGNNRPRVMRYVAQAFAGTDVSSCDYMACVTERIDFLKQKVYAWASRIRRYRERVDRFQQNRLFQSDQRKVYRKWEGTDQRVTDGRLPDPTAMSNFWRNIWSVPVEHTEGEWMNVVERECEPIEAMGAVTISPDDVSCAARTTQNWKSPGPDGLHNFWVKWFRCSHERLATQFQQALELGSLPSFLTTGVTFLLYKSGSTTEAKNYRPITCLPTLYKLLTSILRAKINTHIVANNVLAFSQNGCRVGSRGTKELLLIDTTICQQVRRSRGSLSAAWIDYKKAYDSVPHSWLERILELYKVDTALRSFLGACMRQWTTVLCQPGGRDARPAPQDFIRIKRGIFQGDSLSPLWFCLALNPLSTLLKDSGLGCRLRRGGEIISHLMYMDDLKLFAPKRPELVELLKVTDTFSSAIKMEFGVDKCAVMHVQRGKVVNSTNLELSETMSLRSLSETETYKYLGMSQALSIADGDIRQAVKERFFCRLTKVLNSLLSGGNKARAFNAWVMPLLTYSFGILRWTQTELDALDRRVRMLLTTHRMLHPRSSVMRLYIPRKCGGRGFLNAKDLHNREVCSLREYFLNNECGIHRDVVAVDKGLTPLSLANENWRRPTVLSTVDRKDVWKSKELHGRFYKALTGPDVDLLASVNWLRFGDLFGETEGFSCAIADEVIMTNNYRRYILKDGTVDICRACRRPGESLRHIMSGCSYLANGEYLHRHNQVARIIHQQLAVKYDLVGSEVPYYKYVPMPVLENGRATLYWDRSILTDRTIVANKPDIVLVDRSKRRAMLVDITIPHDENLVKAEKDKLSKYLDLAHEVTAMWDVDSTIIVPIVVSVNGLIAKSLDEHLKRLSLDGWIKGQIQKAVILDTARIVRRFLSVQP

SEQ ID NO: 6030 - protein, 1196 aa, Hedya salicella
MQTRSKTRLADTSARPPPSPASASSAASPSSDEYATAPDESSESSDERGPPPPPPRPPARRGRPPLPARLGPAGHSAPPTAPATGGIVRRMRWSQANNENVMRAYYGATEGGTHLSAYRDRMLLLFQTFEPDIAASAQRLSDQVRAIQRRKLLDDATLDRLRLEVLAARAASTSSRNPRATSPVPAPALDLMPGAPRVDPDSDEEHCASSVSTQANEQLRRTLEETIERYRFAPDSRPRLPRLPANKRNLALVRSSEDLADTHSIMYCGAIAACRVARVKFPDADRAPRTAGGVPAWQVRIERRISTFRTLIAKLICFRGGNNRPRVMRYVAQAFAGTDISSCDYMACVTERIDFLKQKVYAWASRIRRYRERVDRFQQNGLFQSDQRKVYRKWEGTDQRVTDGRLPDPTAMSNFWRSIWSVPVEHTEGEWMNVVERECEPIEAMGAVTISPDDVSCAARTTQNWKSPGPDGLHNFWVKWFRCSHERLATQFQQALELGSLPSFLTTGVTFLLYKSGSTTEAKNYRPITCLPTLYKLLTSILRAKINTHIVANNVLAFSQNGCRVGSRGTKELLLIDTTICQQVRRSRGSLSAAWIDYKKAYDSVPHSWLERILELYKVDTALRSFLGACMRQWTTVPCQPGGRDARPAPQDSIRIKRGIFQGDSLSPLWFCLALNPLSTLLKDSGLGCRLRRGGEIISHLIYMDDLKLFAPKRPELVELLKVTDTFSSAIKMEFDVDKCAVMHVQRGKVVNSTNLELSETMSLRSLSETETYKYLGMSQALSIADGDIRQTVKERFFCRLTKVLNSLLSGGNKARAFNAWVMPLLTYSFGILRWTQTELDALDRRVRMLLTTHRMLHPRSSVMRLYIPRKCGGRGFLNAKDLHNREVCSLREYFLNNECGIHRDVVAVDKGLTPLSLANENWRRPTVLSTVDRKDVWKSKELHGRFYKALTGPDVDLLASVNWLRFGDLFGETEGFSCAIADEVIMTNNYRRYILKDGTVDICRACRRPGESLRHIMSGCSHLANGEYLHRHNQVARIIHQQLAVKYDLVGSEVPYYKYVPMPVLENGRATLYWDRSILTDRTIVANKPDIVLVDRSKRRAMLVAITIPHDENLVKAEKDKLSKYLDLAHEVTAMWDLDSTIIVPIVVSVNGLIAKSLDEHLKRLSLDGWIKGQIQKAVILDTARIVRRFLSVQP

SEQ ID NO: 6031 - protein, 1213 aa, Erannis defoliaria
MITRSKKRNAAVQHARPTPPPVPSSSPSSSSPSEEEFHTCGTSSSSEDVSGPRTLTAPIPVRRGRPPLPARLGPAGQPASRPALAAGGVVRRMRWSQTNNENCMRAYYGATEGGTNLTAYRVRMLSLFQTLEPTVTVSAQRISDQVRAIQRLNLLDQPLLDRLRLEVQSARPTPASTRDLDVASSAPTLASVPTSAATLATSADPVLDEGDCTGMSVSTQVSEQLRRALEDAIGQYRFALNSRPRLPRLPTHRRNLALMGALNALLAPYLRASEDLTDTHSILYCGAIAACRVARVKFPDTNRAPRPAGDVPAWQLRIERRISTFRTLIAKLICFSRGNNRPRVMRFVTQAFAGTGIRPQQYMASVTERIDYLKQKVYAWANRIRRYRERVDRYWQNRLFQSDQRKVYRNWEGTEQRVSDGQLPDASAMTNFWRGIWSVPVEHTEGDWMRVVERECESIEPMGSILIDPVDVSCAIRTAQNWKSPGPDGLHNFWIKWFRCSHDRLATQFQEALELGSLPSFMTTGVTFLLHKSGSTTEPKNYRPITCLPTIYKLLTSILSTKINAHIVANNVLAPAQNGCRVGSRGTKELLLIDMAISQQVRRNKGALSAAWIDYKKAYDSVPHSWLERILELYQIDTTLKSFLGACMRQWTTVLRQPGGGNGSSDSQDLIRIERGIFQGDSLSPSWFCLALNPLSTLLKDSGLGYRLRRGGEVISHLLYMDDLKLFAPKHQDLLELLKTTQVFSSAIRMEFGVDKCAVMRVQRGKVVNSPDLQLSEIMTLRSLSEAETYKYLGMSESLGISVVDIKKSVKERFFCRLTKVLNSLLSGGNKARAFNGWVMPLLIYSFGILRWTQTELDALDRRVRQLLTGHRMPHPRSSVMRLYIPRKWGGRGFLNAKNLHNREVCSLRDYFVNNECGMHRDVVTVDKGLTPLSLANENWRTPSVLSTDDRKKVWKSKELHGRFYRVLSGPDVDLLASVNWLRFGDLFGETEGFACAIADEVIKTNNYRKYIMKDGTVDICRACHRPGESLRHIISGCSHLANGEYLHRHNQVARIIHQQLALQYGLVESEVPYYKYAPAPVLENGRALLYWDRSIITDRTIVANKPDIVMVDRSQRRAVLVDVTIPHDENLVKAEKDKLSKYLDLAFEITAMWDVDSTIIVPIVVSANGLIAKSLDQYLKRLSLDGWVKGQIQKAVVLDTARIVRRFLTLQP

SEQ ID NO: 6032 - protein, 1090 aa, Erannis defoliaria
MLSLFQTLEPTVTVSAQRISDQVRAIQRLNLLDQPLLDRLRLEVQSARPTPASTRDLDVASSAPTLASVPTSAATLATSADPVLDEGDCTGMSVSTQVSEQLRRALEDAIGQYRFALNSRPRLPRLPTHRRNLALMGALNALLAPYLRASEDLTDTHSILYCGAIAACRVARVKFPDTNRAPRPAGDVPAWQLRIERRISTFRTLIAKLICFSRGNNRPRVMRFVTQAFAGTGIRPQQYMASVTERIDYLKQKVYAWANRIRRYRERVDRYWQNRLFQSDQRKVYRNWEGTEQRVSDGQLPDASAMTNFWRGIWSVPVEHTEGDWMRVVERECESIEPMGSILIDPVDVSCAIRTAQNWKSPGPDGLHNFWIKWFRCSHDRLATQFQEALELGSLPSFMTTGVTFLLHKSGSTTEPKNYRPITCLPTIYKLLTSILSTKINAHIVANNVLAPAQNGCRVGSRGTKELLLIDMAISQQVRRNKGALSAAWIDYKKAYDSVPHSWLERILELYQIDTTLKSFLGACMRQWTTVLRQPGGGNGSSDSQDLIRIERGIFQGDSLSPSWFCLALNPLSTLLKDSGLGYRLRRGGEVISHLLYMDDLKLFAPKHQDLLELLKTTQVFSSAIRMEFGVDKCAVMRVQRGKVVNSPDLQLSEIMTLRSLSEAETYKYLGMSESLGISVVDIKKSVKERFFCRLTKVLNSLLSGGNKARAFNGWVMPLLIYSFGILRWTQTELDALDRRVRQLLTGHRMLHPRSSVMRLYIPRKWGGRGFLNAKNLHNREVCSLRDYFVNNECGMHRDVVTVDKGLTPLSLANENWRTPSVLSTDDRKKVWKSKELHGRFYRVLSGPDVDLLASVNWLRFGDLFGETEGFACAIADEVIKTNNYRKYIMKDGTVDICRACHRPGESLRHIISGCSHLANGEYLHRHNQVARIIHQQLALQYGLVESEVPYYKYAPAPVLENGRALLYWDRSIITDRTIVANKPDIVMVDRSQRRAVLVDVTIPHDENLVKAEKDKLSKYLDLAFEITAMWDVDSTIIVPIVVSANGLIAKSLDQYLKRLSLDGWVKGQIQKAVVLDTARIVRRFLTLQP

SEQ ID NO: 6033 - protein, 1177 aa, Erannis defoliaria
MITRSKAIRNAAEQHSARPPSPPAPSSPSASSGEDVFVTPRESSASSSDSDVSGPRTPAPPPPARRGRPPLPARLGPAGLPASRPALAAGGVVRRMRWSQTNNENCMRAYYGATEVGTNLTAYRVRMLSLFQALEPTPVSTRDSHVASSAPTLASMPTSVATLATPADPVVDEGDGTGMSVTTQVSEQLRRALEDAISQYRFALNSRPRLPRLPTHRRNLALMGALNALLAPYLRASEDLTDTHSILYCGAVAACRVARVKFPDSNRAPRTAGDVPAWQARIEWRISTFRTLIAKLICFSRGNNRPRVMRFVTQAFAGTGIRPQQYMASVTERIDYLKQKVYAWASRIRRYRERVDRYWQNRVFQSDQRKVYRNWEGAKQRVSDGHLPDANAMTNFWRGIWSVPVEHTEGDWMRVVERECESIEPMGSILIDPVDVSCAIRTAQNWKSPGPDGLHNFWIRWFRCSHDRLATQFQEALELGSLPSFMTTGVTFLLHKSGSTTEPKNYRPITCLPTIYKLLTSILSTKINTHIVANNVLAPAQNGFRVGSRGTKELLLIDMAISQQVRRNKGALSAAWIDYKKAYDSVPHSWLERILELYKIDTTLKSFLSACMRQWTTVLRQPGGGNDSFDPQDLIRIERGIFQGDSLSPSWFCLALNPLSTLLKDSGLGYRLRRGGEVISHLLYMDDLKLFAPKHQDLLELLKTTQVFSSAIRMEFGVDKCAVMRVQRGKVVNSPDLQLSEIMTLRSLSEAETYKYLGMSESLGISVVDIKKSVKERYFCRLTKVLNSLLSGGNKARAFNGWVMPLLIYSFGILRWTQTELDALDRRVRQLLTAHRMLHPRSSVMRLYIPRKWGGRGFLNAKNLHNREVCSLRDYFLNNECGMHRDVVTVDKGLTPLSLANENWRRPSVLSTDDRKDVWKSKELHGRFYRALSGPDVDLLASVNWLRFGDLFGETEGFACAIADEVIKTNNYRKYIMKDGTVDICRACHRPGESLRHIISGCSHLANGEYLHRHNQVARIIHQQLALQYGLVESEVPYYKYAPAPVLENGRALLYWDRSIITDRTIVANKPDIVMVDRSQRRAVLVDVTIPHDENLVKAEKDKLSKYLDLAFEITAMWDVDSTIIVPIVVSANGLIAKSLDQYLKRLSLDGWVKGQIQKAVVLDTARIVRRFLTLQP

SEQ ID NO: 6034 - protein, 1215 aa, Erannis defoliaria
MITRSQSRRNTAERNARPPSPPAPSSPSASSGDDVFLTPRESSVSSSNSDVSGPRTPAPPPPARRGRPPLPARLGPAGLPASRPALAAGGVVRRMRWSQTNNENCMRAYYGATEGGTNLSAYRVRMLPLFQALEPTVTVSAQRLSDQVRAIQRLNLLDQSLLDRLRLEAQSARPTPASTRDLDVASSAPTLALVPTSAATLVTSADPVVDEGDCTGMSVSTQVSEQLRRALEDAIGQYRFTPNSRPRLPRLPTHRRNLALMGALNALLAPYLRASEDLTDTHSILYCGAIAACRVARVKFPDTNRAPRPAGDVPAWQLRIERRISTFRTLIAKLICFSRGNNRPRVMRFVTQAFAGTGIRPQQYMANVTERIDYLKQKVYAWANRIRRYRERVDRYWQNRLFQSDQRKVYRNWEGNEQRVSDGQLPDASAMTNFWRGIWSVPVEHTEGDWMRVVERECESIEPMGSILIDPVDVSCAIRTAQNWKSPGPDGLHNFWIKWFRCSHDRLATQFQEALELGSLPSFMTTGVTFLLHKSGSTTEPKNYRPITCLPTIYKLLTSILSTKINAHIVANNVLTPAQNGCRVGSRGTKELLLIDMAISQQVRRNKGALSAAWIDYKKAYDSVPHSWLERILELYQIDATLKSFLGACMRQWTTVLRQPGGGNGSSDSQDLIRIERGIFQGDSLSPSWFCLALNPLSTLLKDSGLGYRLRRGGEVISHLLYMDDLKLFAPKHQDLLELLKTTQVFSSAISMEFGVDKCAVMRVQRGKVVNSPDLQLSEIMTLRSLSEAETYKYLGMSESLGISVVDIKKSVKERFFCRLTKVLNSLLSGGNKARAFNGWVMPLLIYSFGILRWTQTELDALDRRVRQLLTAHRMLHPRSSVMRLYIPRKWGGRGFLNAKNLHNREVCSLRDYFLNNECGMHRDVVTVDKGLTPLSLANENWRTPSVLSTDDRKEVWKSKELHGRFYRVLSGPDVDLLASVNWLRFGDLFGETEGFACAIADEVIKTNNYRKYIMKDGTVDICRACHRPGESLRHIISGCSHLANGEYLHRHNQVARIIHQQLALQYGLVESEVPYYKYAPAPVLENGRALLYWDRSIITDRTIVANKPDIVMVDRSQRRAVLVDVTIPHDENLVKAEKDKLSKYLDLAFEITAMWDVDSTIIVPIVVSANGLIAKSLDQYLKRLSLDGWVKGQIQKAVVLDTARIVRRFLTLQP

SEQ ID NO: 6035 - protein, 1218 aa, Erannis defoliaria
MITRSKNKAKTSTAETTNARPPPLPAPSSPSASSGDDVFLTPRESSVSSSDSDVSGPRTPAPPPPARRGRPPLPARLGPAGQPASRPALAAGGVVRRMRWSQTNNENCMRAYYGATEGGTNLTAYRVRMLSLFQALEPTVTVSAQRLSDQVRAIQRLNLLDQSLLDRLHLEAQSARPTPASTRDLDVASSAPTLTSVPTSAATLATSTDPVLDEGDCTGMSVSTQVSEQLRRALEDAIGQYRFTLNSRPRLPRLPTHRRNLALMGALNALLAPYLRASEDLTDTHSILYCGAIAACRVARVRFPDTNRAPRTAGDVPAWQVRIERRISTFRTLIAKLICFSRGNNRPRVMRFVTQAFAETGIRPQQYMASVTERIDYLKQKVYAWASRIRRYRERVDRYRQNRLFQSDQRKVYRNWEGNEQRVSDGHLPDASAMTNFWRSIWSVPVEHTEGDWMRVVERECEFIEPMGSILIDPVDVSCAIRTAQNWKSPGPDGLHNFWIKWFRCSHDRLATQFQEALELGSLPSFMTTGVTFLLHKSGSTTEPKNYRPITCLPTIYKLLTSILSTKINTHIVANNVLAPAQNGCRVGSRGTKELLLIDMAISQQVRRNKGALSAAWIDYKKAYDSVPHSWLERILELYKIDTTLKSFLSACMRQWTTVLRQPGGGNDSSDPQDLIRIERGIFQGDSLSPSWFCLALNPLSTLLKDSGLGYRLRRGGEVISHLLYMDDLKLFAPKHQDLLELLKTTQVFSSAIRMEFGVDKCVVMRVQRGKVVNSPDLQLSEIMTLRSLSEAETYKYLGMSESLGISVVDIKKSVKERFFCRLTKVLNSLLSGGNKARAFNGWVMPLLIYSFGILRWTQTELDALDRRVRQLLTAHRMLHPRSSVMRLYIPRKWGGRGFLNAKNLHNREVCSLRDYFLNNECGMHRDVVTVDKGLTPLSLANENWRRPSVLSTDDRKDVWKSKELHGRFYRALSGPDVDLLASVNWLRFGDLFGETEGFACAIADEVIKTNNYRKYIMKDGTVDICRACHRPGESLRHIISGCSHLANGEYLHRHNQVARIIHQQLALQYGLVESEVPYYKYAPAPVLENGRALLYWDRSIITDRTIVANKPDIVMVDRSQRRAVLVDVTIPHDENLLKAEKDKLSKYLDLAFEITAMWDVDSTIIVPIVVSANGLIAKSLDQYLKRLSLDGWVKGQIQKAVVLDTARIVRRFLTLQP

SEQ ID NO: 6036 - protein, 1215 aa, Biston betularia
MWTRSRTAAASGLHDAHIPSPPAPSTPSASSGDEEFATPLATSASSSSSDVSGPRTPAPPPPARRGRPPLPARLGPAGQSASRSALAAGGVVRRMRWSQTNNENCMRAYYGATEGGINLSAYRVRMLPLFQALEPTVAVSTQRLSDQVRAIQRLQLLDQSVLDRLRLEALPARPTPVSTRDSPVASSAPTLVSVPTSMATLATPTDPVVDVGECTSMGVCSQVSEHLRRTLEDAICQYRFAPDSRPRLPRLPTHRRNLALMGALNALLAPYLRASEDLTDTHSILYCGAIAACRVARVKFPDTNRAPRPAGGVPAWQLRIERRISTFRTLIAKLICFSRGNNRPRVMRFVTQAFAGTGIRPQHYLASVTERIDYLKQKVYAWANRIRRYRERADRYWQNRVFQSDQRKVYRDWEGTGQRVSDRQLPDTSVMTEFWRGIWSLPVEHTEGDWMRVVERECESIESMGSVLIDPVDVSCAIRTAQNWKSPGPDGLHNFWIKWIRCSHDRLATQFQEALELGSLPCFMTTGVTFLLHKTGSTTEAKNYRPITCLPTIYKLLTSILRTKINAHVVANNVLAPAQNGCRVGSRGTKELLLIDMTISQQVRRNKGALSTAWIDYKKAYDSVPHSWLERVLELYKIDTTLKSFLGACMRQWTTVLRQPGSGDGSSEPQDLIRIERGIFQGDSLSPLWFCLALNPLSTLLKESGLGHRLRRGGEVISHLLYMDDLKLFAPKRPDLIELLKTTQVFSNAIKMEFGVDKCAVMHVQRGEVVNCPDLQLSETMTFRSLSEAETYKYLGMSESLGIAVVDIKRSVKERFFCRLTKVLNSFLSGGNKVRAFNGWVMPLLIYSFGILRWTQTELDALDRRVRQQLTTHRMLHPRSSVMRLYIPRKLGGRGFLSTKNLHNREVCSLRDYFRDNECGMHRDVVAVDKGLTPLSLANENWRKPSVLSTEDRKEVWKSKQLHGRFYRVLTGPDVDMLASVNWLRFGDLFGETEGFACAIADEVIKTNNYRKYIMKDGTVDICRACHRPGESLRHIISGCSHLANGEYLHRHNQVARIIHQQLALQYGLVESEVPYYKYAPAPVLENGRALLYWDRSIITDRTIVANKPDIVVVDRAQRRAVLVDITIPHDENLVKAEKDKLSKYLDLAHEITAMWDVDSTIIVPIVVTVNGLIAKSLDQHLKRLSLDGWVKGQLQKAVILDTARIVRRFLTLQP

SEQ ID NO: 6037 - protein, 1215 aa, Biston betularia
MWTRSRTAAASGLHDAHIPSPPAPSTPSASSGDEEFATPLATSASSSSSDVSGPRTPAPPPPARRGRPPLPARLGPAGQSASRSALAAGGVVRRMRWSQTNNENCMRAYYGATEGGINLSAYRVRMLPLFQALEPTVAVSTQRLSDQVRAIQRLQLLDQSVLDRLRLEALPARPTPVSTRDSPVASSAPTLVSVPTSMATLATPTDPVVDVGECTSMGVCSQVSEHLRRTLEDAICQYRFAPDSRPRLPRLPTHRRNLALMGALNALLAPYLRASEDLNDTHSILYCGAIAACRVARVKFPDTNRAPRPAGGVPAWQLRIERRISTFRTLIAKLICFSRGNNRPRVMRFVTQAFAGTGIRPQHYLASVTERIDYLKQKVYAWANRIRRYRERADRYWQNRVFQSDQRKVYRDWEGTGQRVSDRQLPDTSVMTEFWRGIWSLPVEHTEGDWMRVIERECESIESMGSVLIDPVDVSCAIRTAQNWKSPGPDGLHNFWIKWIRCSHDRLATQFQEALELGSLPCFMTTGVTFLLHKTGSTTEAKNYRPITCLPTIYKLLTSILRTKINAHVVANNVLAPAQNGCRVGSRGTKELLLIDMTISQQVRRNKGALSTAWIDYKKAYDSVPHSWLERVLELYKIDTTLKSFLGACMRQWTTVLRQPGSGDGSSEPQDLIRIERGIFQGDSLSPLWFCLALNPLSTLLKESGLGHRLRRGGEVISHLLYMDDLKLFAPKRPDLMELLKTTQVFSNAIKMEFGVDKCAVMHVQRGEVVNCPDLQLSETMTFRSLSEAETYKYLGMSESLGIAVVDIKRSVKERFFCRLTKVLNSFLSGGNKVRAFNGWVMPLLIYSFGILRWTQTELDALDRRVRQQLTTHRMLHPRSSVMRLYIPRKLGGRGFLSTKNLHNREVCSLRDYFRDNECGMHRDVVAVDKGLTPLSLANENWRKPSVLSTEDRKEVWKSKQLHGRFYRVLTGPDVDMLASVNWLRFGDLFGETEGFACAIADEVIKTNNYRKYIMKDGTVDICRACHRPGESLRHIISGCSHLANGEYLHRHNQVARIIHQQLALQYGLVESEVPYYKYAPAPVLENGRALLYWDRSIITDRTIVANKPDIVVVDRAQRRAVLVDITIPHDENLVKAEKDKLSKYLDLAHEITAMWDVDSTIIVPIVVTVNGLIAKSLDQHLKRLSLDGWVKGQLQKAVILDTARIVRRFLTLQP

SEQ ID NO: 6038 - protein, 1215 aa, Biston betularia
MWTRSRTAAASGLHDAHIPSPPAPSTPSASSGDEEFATPLATSASSSSSDVSGPRIPAPPPPARRGRPPLPARLGPAGQSASRSAYAAGGVVRRMRWSQTNNENCMRAYYGATEGGINLSAYRVRMLPLFQALEPTVAVSTQRLSDQVRAIQRLQLLDQSVLDRLRLEALPARPTPVSTRDSPVASSAPTLVSVPTSMVTLATPTDPVVDVGECTSMGVCSQVSEHLRRTLEDAICQYRFAPDSRPRLPRLPTHRRNLALMGALNALLAPYLRASEDLTDTHSILYCGAIAACRVARVKFPDTNRAPRPAGGVPAWQLRIERRISTFRTLIAKLICFSRGNNRPRVMRFVTQAFAGTGIRPQHYLASVTERIDYLKQKVYAWANRIRRYRERADRYWQNRVFQSDQRKVYRDWEGTGQRVSDRQLPDTSVMTEFWRGIWSLPVEHTEGDWMRVVERECESIESMGSVLIDPVDVSCAIRTAQNWKSPGPDGLHNFWIKWIRCSHDRLATQFQEALELGSLPCFMTTGVTFLLHKTGSTTEAKNYRPITCLPTIYKLLTSILRTKINAHVVANNVLAHAQNGCRVGSRGTKELLLIDMTISQQVRRNKGALSTAWIDYKKAYDSVPHSWLERVLELYKIDTTLKSFLGACMRQWTTVLRQPGSGDGSSEPQDLIRIERGIFQGDSLSPLWFCLALNPLSTLLKESGLGHRLRRGGEVISHLLYMDDLKLFAPKRPDLMELLKTTQVFSNAIKMEFGVDKCAVMHVQLGEVVNCPDLQLSETMTFRSLSEAETYKYLGMSESLGIAVVDIKRSVKERFFCRLTKVLNSFLSGGNKVRAFNGWVMPLLIYSFGILRWTQTELDALDRRVRQQLTTHRMLHPRSSVMRLYIPRKLGGRGFLSAKNLHNREVCSLRDYFRDNECGMHRDVVAVDKGLTPLSLANENWRKPSVLSTEDRKEVWKSKQLHGRFYRVLTGPDVDMLASVNWLRFGDLFGETEGFACAIADEVIKTNNYRKYIMKDGTVDICRACHRPGESLRHIISGCSHLANGEYLHRHNQVARIIHQQLALQYGLVESEVPYYKYAPAPVLENGRALLYWDRSIITDRTIVANKPDIVVVDRAQRRAVLVDITIPHDENLVKAEKDKLSKYLDLAHEITAMWDVDSTIIVPIVVTVNGLIAKSLDQHLERLSLDGWVKGQLQKAVILDTARIVRRFLTLQP

SEQ ID NO: 6039 - protein, 1215 aa, Biston betularia
MWTRSRTAAASGLHDAHIPSPPAPSTPSASSGDEEFATPLATSASSSSSDVSGPRTPAPPPPARRGRPPLPARLGPAGQSASRLALAAGGVVRRMRWSQTNNENCMRAYYGATEGGINLSAYRVRMLPLFQALEPTVAVSTQRLSDQVRAIQRLQLLDQSVLDRLRLEALPARPTPVSTRDSPVASSAPTLVSVPTSMATLATPTDPVVDVGECTSMGVCSQVSEHLRRTLEDAICQYRFAPDSRPRLPRLPTHRRNLALMGALNALLAPYLRASEDLTDTHSILYCGAIAACRVARVKFPDTNRAPRPAGGVPAWQLRIERRISTFRTLIAKLICFSRGNNRPRVMRFVTQAFAGTGIRPQHYLASVTERIDYLKQKVYAWANRIRRYRERADRYWQNRVFQSDQRKVYRDWEGTGQRVSDRQLPDTSVMTEFWRGIWSLPVEHTEGDWMRVVERECESIESMGSVLIDPVDVSCAIRTAQNWKSPGPDGLHNFWIKWIRCSHDRLATQFQEALELGSLPCFMTTGVTFLLHKTGSTTEAKNYRPITCLPTIYKLLTSILRTKINAHVVANNVLAPAQNGCRVGSRGTKELLLIDMTISQQVRRNKGALSTAWIDYKKAYDSVPHSWLERVLELYKIDTTLKSFLGACMRQWTTVLRQPGSGDGSSEPQDLIRIERGIFQGDSLSPLWFCLALNPLSTLLKESGLGHRLRRGGEVISHLLYMDDLKLFAPKRPDLMELLKTTQVFSNAIKMEFGVDKCAVMHVQRGEVVNCPDLQLSETMTFRSLSEAETYKYLGMSESLGIAVVDIKRSVKERFFCRLTKVLNSFLSGGNKVRAFNGWVMPLLIYSFGILRWTQTELDALDRRVRQQLTTHRMLHPRSSVMRLYIPRKLGGRGFLSTKNLHNREVCSLRDYFRDNECGMHRDVVAVDKGLTPLSLANENWRKPSVLSTEDRKEVWKSKQLHGRFYRVLTGPDVDMLASVNWLRFGDLFGETEGFACAIADEVIKTNNYRKYIMKDGTVDICRACHRPGESLRHIISGCSHLANGEYLHRHNQVARIIHQQLALQYGLVESEVPYYKYAPAPVLENGRALLYWDRSIITDRTIVANKPDIVVVDRAQRRAVLVDITIPHDENLVKAEKDKLSKYLDLAHEITAMWDVDSTIIVPIVVTVNGLIAKSLDQHLKRLSLDGWVKGQLQKAVILDTARIVRRFLTLQP

SEQ ID NO: 6040 - protein, 1215 aa, Biston betularia
MWTRSRTAAASGLHDAHIPSPPAPSTPSASSGDEEFATPLATSASSSSSDVSGPRTPAPPPPARRGRPPLPARLGPAGQSASRSALAAGGVVRRMRWSQTNNENCMRAYYGATEGGINLSAYRVRMLPLFQALEPTVAVSTQRLSDQVRAIQRLQLLDQSVLDRLRLEALPARPTPVSTRDSPVASSAPTLVSVPTSMATLATPTDPVVDVGECTSMAVCSQVSEHLRRTLEDAICQYRFAPDSRPRLPRLLTHRRNLALMGALNALLAPYLRASEDLTDTHSILYCGAIAACRVARVKFPDTNRAPRPAGGVPAWQLRIERRISTFRTLIAKLICFSRGNNRPRVMRFVTQAFAGTDIRPQHYLASVTERIDYLKQKVYAWANRIRRYRERADRYWQNRVFQSDQRKVYRDWEGTGQRVSDRQLPDTSVMTEFWRGIWALPVEHTEGDWMRVVERECESVESMGSVLIDPVDVSCAIRTAQNWKSPGPDGLHNFWIKWIRCSHDRLATQFQEALELGSLPCFMTTGVTFLLHKTGSTTEAKNYRPITCLPTIYKLLTSILRTKINAHVVANNVLAPAQNGCRVGSRGTKELLLIDMTISQQVRRNKGALSTAWIDYKKAYDSVPHSWLERVLELYKIDTTLKSFLGACMRQWTTVLRRPGSGDGSSEPQDLIRIERGIFQGDSLSPLWFCLALNPLSTLLKESGLGHRFRRGGEVISHLLYMDDLKLFAPKRPDLMELLKTTQVFSNAIKMEFGVDKCAVMHVQRGEVVNCPDLQLSETMTFRSLSEAETYKYLGMSESLGIAVVDIKRSVKERFFCRLTKVLNSFLSGGNKVRAFNGWVMPLLIYSFGILRWTQTELDALDRRVRQQLTTHRMLHPRSSVMRLYIPRKLGGRGFLSAKNLHNREVCSLRDYFRDNECGMHRDVVAVDKGLTPLSLANENWRKPSVLSTEDRKEVWKSKQLHGRFYRVLTGPDVDMLASVNWLRFGDLFGETEGFACAIADEVIKTNNYRKYIMKDGTVDICRACHRPGESLRHIISGCSHLANGEYLHRHNQVARIIHQQLALQYGLVESEVPYYKYAPAPVLENGRALLYWDRSIITDRTIVANKPDIVVVDRAQRRAVLVDITIPHDENLVKAEKDKLSKYLDLAHEITAMWDVDSTIIVPIVVTVNGLIAKSLDQHLKRLSLDGWVKGQLQKAVILDTARIVRRFLTLQP

SEQ ID NO: 6041 - protein, 1202 aa, Anthocharis cardamines
MLTRNRARGQLQRSARPTPSSASSSSGSTSSSADYIMPPTSLTSSDEERQRPSPSRPRSSRRGRRPPPACLGSSGQQAPSAAPAAGGLVRRMRWTIQLNESVMRAYYGATEGGINLTGYRSRMLPLFQALEPATNVGAQRLSDQVRVILRNKLLNESVLERLRAEVTISQPPVIMLPVPADVLPQGDVSVDVVACGGDESDQVTSQDKEHMRIILRDTIEQYRFVPALDRPSIPHLPMHRRNMAVVGVLDGFLQPYFANSQNLADTHSLLYCGAVAVCRVARLKFQDRERVSRASGVPVWQSRIECRISVARTLIAKLICFRGGNTRPRIMRFVSQAFVGTNIRPENYMEWVTERIDFLKQKVYAWANRIRRYRARAERYNVNRVFQINQRKVYRSWEKSDQGGVGGRFPDASVMSSFWRGIWSSPVNHTEGTWIGTVDRACESIQPMENVVISPHDIDCAIRSAQNWKCPGPDGLHNFWLKWFRSAHTTLAVQLQDAIDCGSLPTFITTGRTFLLHKSGCTTDPKNYRPITCLPTIYKLLTSILTTKIYMHIEANNILAQAQNGCRPGSRGTKELLLIDMTISQQVRRARRNLSVAWIDYKKAYDSVPHSWLVRVLELYKVNTTLKFFLESCMRHWCTVLCWPGNGDVSFDPTNLVRIERGIFQGDSLSPLWFCLALNPLSILLKDSGLGYRLRREGEIISHLLYMDDLKLFTLQKPDLVRLLKVANDFSRSIGMEFGVEKCAIMHVERGRVVNSQDLQLSQEITLKSLSQAETYRYLGMSESLGIANADIKQVVKDRFFGRLTKVLNSLLSGGNKVRAFNAWVLPVLVYSFGILRWTQTELDAVDVRVRRQLTLHRMHHPRSSVMRLYIPRKCGGRGFLNAKNQHNREICNLRQYFMASAGRMQRDVVAVDKGLTPLSLANQNWRMPPVLNTADREDIWKSKELHGRFYRALHGSDVDLLSSVSWLRFGDLFGETEGFVCAITDEVMMTNNYRKYILRDGTIDICRACHRPGESLRHIISGCSHLANGEYLHRHNQVAKILHQQLALSYGLAGTEVPYYKYTPLPVLENGRATLYWDRSIITDRFIAANKPDIVLIDRVARRALLVDVTVPHDENLVKAEKDKLSKYLDLAHEISSMWDVDSTIIVPIVISAHGLIAKSFDQHLKKLSLGCWVKGQMQKAVLLDTARIVRRFLSLPPPHR

SEQ ID NO: 6042 - protein, 1130 aa, Blastobasis lacticolella
MAPATGGVVRRMRWTQSINENVMRAYYGATEGGTNLSAYRDRMLPLFQVLEPAIDVTAQRLSDQVRAIQRLKRLDDSVLDRLRLESLPVRAVPISTMSLPATSPPQVSPPSPAPRVPRTDATVGVEDCTNVSSVSTETNEYVRRTLEETIARYRFAPNSRPRLPRLPTNRRNLALMGAINVLLDSYIRASDNLVDTHSILYCGAITACRVARAKFSDADRAPRVAGGAPAWQKRIERRINTFRTLMAKLICFKEGNNRPRVMRFVDQAFAGTGISSRDYMACATERIDFLKQKVCAWANRIRRYRERVDRFRLNRLFQSEQRKVYRKWEGTNQSGSDGSLPDASASNNFWRSIWSVPVEHSEGDWMNVVKRECEIIEPMAAVSICPEDVSCAIDTAQNWKCPGPDGLHNFWIKWFRCSHERLATQFQEALEHGSLPTLFTTGITFLLYKSGSTTEAKDYRPITCLPTLYKLLTSILRKKINNHIIENNILAMSQNGCRVGSRGTKELLLIDMTICQQVRRSRGSLSAAWIDYKKAYDSVPHSWLRRVLELYKINATLRSFLDACMRQWITVLSQPVGGIDHSPPQDFIRIERGIFQGDSLSPLWFCLALNPLSTLLKHSELGCRLRREGEVISHLLYMDDLKLFAPKRQDLMELLKITEIFSNAIRMEFGADKCAVMHVQRGKVANTTNLQLSETMSFRSLSEAETYKYLGMSQSLGIVDEGVKQAVKERFFCRLTKVLNSLLSGGNKVRSFNAWVMPLLTYSFGILRWTQTELDALDRRVRLLLTTHRMLHPRSSVMRLYIPRKCGGRGFLSAKTLHNREVCSLRDYFLNNECGMHRAVVAVDRGLTPLSLANENWRKPKVLSTIDRKDVWKSKELHGRFYRALTGPDVDLLASVNWLRFGDLFGETEGFVCAIADEVIMTNNYRRYILKDGTVDICRACRCPGESLRHITSGCGRLANGEYLHRHNLVARIIHQQLALQYGLVESEVPYYKYVPAPVLENGLATLYWDRSVITDRTIVANRPDIVLTDRSKRRAVLVDVTIPHDGNLVKAEKDKQCKYLDLAHEVTAMWDVDSTIIVPIVVSVNGLIAKSLDQHLKSLSLDGWVKGQIQKAVLLETARIVRRFLSLQP

SEQ ID NO: 6043 - protein, 869 aa, Apotomis turbidana
MRYVTQAFAGTGIRPCDYMACVTERIDYLKQKVYAWANRIRRYRERVDRFQQNRLFQSDQRKVYRKWEGTDQCVTDGQLPDPTAMINFWRSIWSVPVEHTEGEWMNVVRRECEPIENMGAVTISPDDVSCAVRTTQNWKSPGPDGLHNFWIKWFRSSHERLATQFQDALELGSLPSFMTTGATFLLYKSGSTTEAKNYRPITCLPTLYKLLTSILRTKINTHIVANNVLAFSQNGCRVGSRGTKELLLIDTTICQQVRRNRGSLSATWIDYKRAYDSVPHSWLERILELYKIDTALRSLLSSCMRQWTTVLRQPGVGDGPPGPQDLIRIERGIFQGDSLSPLWFCLALNPLSTLLKDSGLGCRLRRGGEVISHLLYMDDLKLYAPKRQDLVELLEVTETFSSAIKMEFGVDKCAVMHVQRGKVVNSANLQLSETMSLRSISEVETYKYLGMSQSLGIADGDIRQALKERFFCRLTKVLNSLLSGGNKARAFNAWVMPLLTYSFGILRWTQTELDALDTRVRQLLTTHRMRHPRSSVMRMYIPRKCGGRGFLNAKDLHNREVCSLREYFLNNECGIHRDVVAVDKGLTSLSLANENWRRPKVLSTDDRKAVWKSKELHGRFYKALTGPDVDLLASVNWLRFGDLFGETEGFVCAIADEVMMTNNYRRYILKDGTVDICRACRRPGESLRHIISGCSHLANGEYLHRHNQVARIIHQQLALRYGLVGSEVPYYKYAPMPVLENGRATLYWDRSIITDRTIVANKPDIVLVDRSKRQAVLVDITIPHDENLVKAEKDKLSKYLDLAHEVTAIWDVDSTIIVPIVVSANGLIAKSLDKHLKRLSLDGWIKGQIQKAVLLDTARIVRRFLSLQP

SEQ ID NO: 6044 - protein, 1207 aa, Apotomis turbidana
MITRSRRKKAEQTNARPPPPPASSSSSPSSSGDEFATAADTSESSDERGPPPPPPRPAARRGRPPLPARLGPTGQPAPTTAPATGGIVRRMRWTRVMNENCMRAYYGATEGGTNLSAYRDRMLPLFQAFDPTIAVSAQRLSDQVRFIQRRKLLNDATLDRLRLEVLAARAASVPARDPPAMSPVPEPAPNLVPGVPLTDPETDVEDYASSVSTQANEQLRRALEEAIRRYRSAPDSRPRLPRLPMHKRNLALMGALDALLEPYLRASKDLADTHSIMYCGAIAACRVARVRFPDTDRAPRTAGGVPAWQVRIERRISSFRTLIAKLICFRGGNNRPRVMRYVTQAFAGTGTRPCDYMACVTERIDYLKQKVYAWASRIRRYRERVDRFQQNRLFQSDQRKVYRKWEGADQCVSDGQLPDPTAMINFWRSMWSVPVEHTEGEWMNVVRRECEPIEAMGAVIISPDDVSCATRTTQNWKSPGPDGLHNFWIKWFRSSHERLATQFQDALELGSLPSFMTTGVTFLLHKSGSTTEAKNYRPITCLPTLYKLLTSILRTKINTHIVANNVLAFSQNGCRVGSRGTKELLLIDTTICQQVRRNRGSLSTAWIDYKKAYDSVPHSWLERILELYKIDTALRSLLGACMRQWTTVLRQPGGGYGPPGPQDLIRIERGIFQGDSLSPLWFCLALNPLSTLLKDSGLGCRLRRGGEVISHLLYMDDLKLYAPKRQDLVELLEVTEAFSSAIKMEFGVDKCAVMHVQRGKVVNSANLQLSETMSLRSISEVETYKYLGMSQSLGIADGDIRQALKERFFCRLTKVLNSLLSGGNKARAFNAWVMPLLTYSFGILKWTQTELDALDTRVRQLLTTHRMRHPRSSVMRLYIPRKCGGRGYLNAKDLHNREVCSLREYFLNNECGIHRDVVAVDKGLTSLSLANENWRRPKVLSTDDRRAVWKSKELHGRFCKALTGPDVDLLASVNWLRFGDLFGETEGFVCAIADEVMMTNNYRRYILKDGTVDICRACRRPGESLRHIISGCSHLANGEYLHRHNQVARIIHQQLALRYGLVGSEVPYYKYAPMPVLENGRATLYWDRSIITDRTIVANKPDIVLVDRSKRQAVLVDITIPHDENLVKAEKDKLSKYLDLAHEVTAMWDVDSTVIVPIVVSANGLIAKSLDKHLKRLSLDGWIKGQIQKAVLLDTARIVRRFLSLQP

SEQ ID NO: 6045 - protein, 1130 aa, Apotomis turbidana
MRWTRVMNENCMRAYYGATEGGTNLSAYRDRMLPLFQTFDPTIAVSAQRLSDQVRFIQRRKLLDDATLDRLRLEVLAARAASVPTRDPPAMSPVPAPAPNLVPGVPLTDPEADVEDYASSVSTQANEQLRRALEEAIRRYRSAPDSRPRLPRLPMHKRNVALMGALDALLDPYLRASEDLADTHSIMYCGAIAACRVDRVRFPDTDRSPRTAGGVPAWQVRIERRISSFRTLIAKLICFRGDNNRPRVMRYVTQAFAGTGTRPCDYMACITERIDYLKQKVYAWASRIRRYRERVDRFQQNRLFQSDQRKVYRKWEGTDQCVSDGQLPDPTAMINFWRSIWSVPVEHTEGEWMNVVRRECEPIEAMGAVTISPDDVSCATRTTQNWKSPGPDGLHNFWIKWFRSSHERLATQFQDALDLGSLPSFMTTGVTFLLHKSGSTTEAKNYRPITCLPTLYKLLTSILKTKINTHIVANNVLAFSQNGCRVGSRGTKELLLIDTTICQQVRRNRGSLSTAWIDYKKAYDSVPHSWLERILELYKIDTALRSLLGACMRQWTTVLRQPGGGDSPPGPQDLIRIERGIFQGDSLSPLWFCLALNPLSTLLKDSGLGCRLRRGGEVISHLLYMDDLKLYAPKRQDLVELLEVTEAFSSAIKMEFGVDKCAVMHVQRGKVVNSANLQLSETMSLRSISEVETYKYLGMSQSLGIADGDIRQALKERFFCRLTKVLNSLLSGGNKARAFNAWVMPLLTYSFGILRWTQTELDALDTRVRQLLTTHRMRHPRSSVMRMYIPRKCGGRGFLNAKDLHNREVCSLREYFLNNECGIHRDVVAVDKGLTSLSLANENWRRPKVLSTDDRRAVWKSKELHGRFYKALTGPDVDLLASVNWLRFGDLFGETEGFVCAIADEVMMTNNYRRYILKDGTVDICRACRRPGESLRHIISGCSHLANGEYLHRHNQVARIIHQQLALRYGLVGSEVPYYKYAPMPVLENGRATLYWDRSIITDRTIVANKPDIVLVDRSKRQAVLVDITIPHDENLVKAEKDKLSKYLDLAHEVTAMWDVDSTIIVPIVVSANGLIAKSLDKHLKRARWLDQGPDTEGGTPGHGAHCQEVPLSAALTTGSLGPAPLPAAP

SEQ ID NO: 6046 - protein, 1207 aa, Apotomis turbidana
MITRSRRKKAEQTNARPPPPPASSSSSPSSSGDEFATAADTSESSDERGPPPPPPQPPARRGRPQLPARLGSTGQPAPTTAPATGGVVRRMRWTRVMNENCMRAYYGATEGGINLSAYRDRMLPLFQVFDPTIAVSAQRLSDQVRFIQRRKLLDDATLDRLRLEVLAARAASVPARDPPATSPVPAPAPNLVPGVPLTDPEADVEDYASSVSTQANEQLRRALEEAIGRYRSAPEPRPRLPRLPIHKRNLALMGALDALLDPYLRASEDLADTHSIMYCGAIAACRVARVRFPDTDRAPRTARGVPAWQVRIERRISSFRTLIAKLICFRGGNNRPRVMRYVTQAFAGTGTRPCDYMACVTERIDYLKQKVYAWASRIRRYRERVDRFQQNRLFQSDQRKVYRKWEGADQCVSDGQLPDPTAMINFWRSIWSVPVEHTEGEWMNVVRRECEPIEAMGAVTISPDDVRCAARTIQNWKSPGPDGLHNFWIKWFRSSHERLATQFQDALELGSLPSFMTTGVTFLLHKSGSTTEAKNYRPITCLPTLYKLLTSILRTKINTHIVVNNVLAFSQNGCRVGSRGTKELLLIDTTICQQVRRNRGSLSTAWIDYKKAYDSVPHSWLERILELYKIDTALRSLLGACMRQWTTVLRQPGGGDGPPGPQDLIRIERGIFQGDSLSPLWFCLALNPLSTLLKDSGLGCRLRRGGEVISHLLYMDDLKLYAPKRQDLVELLEVTEAFSSAIKMEFGVDKCAVMHVQRGKVVNSANLQLSETMSLRSISEVETYKYLGMSQSLGIADGDIRQALKERFFCRLTKVLNSLLSGGNKARAFNAWVMPLLTYSFGILRWTQTELDALDTRVRQLLTTHRMRHPRSSVMRMYIPRKCGGRGFLNAKDLHNREVCSLREYFLNNECGIHRDVVAVDKGLTSLSLANENWRRPKVLSTDDRRAVWKSKELHGRFYKALTGPDVDLLASVNWLRFGDLFGETEGFVCAIADEVMMTNNYRRYILKDGTVDICRACRRPGESLRHIISGCSHLANGEYLHRHNQVARIIHQQLALRYGLVGSEVPYYKYAPMPVLENGRATLYWDRSIITDRTIVANKPDIVLVDRSKRQAVLVDITIPHDENLVKAEKDKLSKYLDLAHEVTAMWDVDSTSIVPIVVSANGLIAKSLDKHLKRLSLDGWIKGQIQKAVLLDTARIVRRFLSLQP

SEQ ID NO: 6047 - protein, 1114 aa, Notocelia uddmanniana
MQWSQSINENCMRAYYGATDGGTNLSAYRDRMLPLFRALEPAISVSAQRLSDQVRVIQRLKRLDDATLDRLRLEALSARAASASARNPSATLPAPVPALDTAPGADPSADEGCANQSVSSQAYEQLRRALEEAITQYRSTPNSRPRLPRLPVNRRNLALMGALNDLLVPYLGASEDLIDTHSIMYCGAIAACRVARVKFPDADRAPRTAGSVPTWQVRIERRVDTYRTLIAKLICFRGGNSRPRVMRFVNQAFAGTGIRPRDYMTCVTERIDFLKQKVYAWVSRIRRYRERLDRYQQSRLFQSDQRKVYRKWDGTDHRVSDGQRPDATAMVNFWRSIWSVPVEHNEGAWMGVVERECESIEPMGSVTISPADVSCAIRTAPNWKSPGPDGLHNFWLKWFRCSHARLAAQFQQALELGSLPPPLTTGVTSLLYKSGSTTEAKNYRPITCLPTLYKLLTSILRAKINTHIVANNILAPAQNGCRVGSRGTKELLLIDMTICQRVRRNRGTLSTAWIDYKKAYDSVPHSWLRRILELYKVDAVLRSFLVACMGQWTTVLRQPGGGEGPSGPQDSIRIERGIFQGDSLSPLWFCLALNPLSTLLKDSGLGCQLRREGEVISHLLYMDDLKLFAPNKHDLLELLKTTEAFSSAIKMEFGVDKCAAMHVQRGKVVNSTNLQISETMDLRSLSEAETYKYLGMSQSLGIEGGDIKRAVKERFFCRLTKVLNSFLSGGNRVRAFNAWVMPLLTYSFGILRWTQTELDLLDRRVRVLLTAHRMLHPRSSVMRLYIPRKFGGRGFLNAKDLHNREVCSLRDYFLNSECGMHRDVVAVDASFTPLSMANENWRRLKVLSTEDRRAVWKSKELHGRFYKALTGPDVDLLASVNWLRFGDLFAETEGFVCAIADEVIMTNNYRRYILKDGTVDICRACRRPGESLRHIISGCGHLANGEYLHRHNLVAKIIHQQLALLYGLVDFEVPYYKYTPAPVLENGRATLYWDRSVITDRTIIANKPDIVLTDRLKRQAVLVDITIPHDENLVKAEKDKVSKYLDLAHEVTAMWDVDSTIIVPIVVSANGLIAKSLDQHLKRLSLDGWVKGQMQKAVLLDTARIVRRFLSLSP

SEQ ID NO: 6048 - protein, 1211 aa, Notocelia uddmanniana
MITRSKARLKKQTSNPKSARPPPSPVSSSSASSSEEFATAPDTSSSSSSDECGPPPPPPRPPARRGRPPLPARLGPAGHPAPPTAPATGGIVRRMQWSQSINENCMRAYYGATDGGTNLSAYRVRMLTLFRALEPAISVSAQRLSDQVRVIQRLKRLDDATLDRLRLEALSARAASVSARDPLATLPAPMPAPDTATGAPRVDLSTDGDCANQSVSTQADGQLRRALEEAITRYRSTTSSRPRLPRLPVNRRNLALMGALNDLLVPYLRASEDLIDTHSIMYCGAIAACRVARVKFPDADRAPRTAGSVPTWQVRIERRIDTYRTLIAKLICFRGGNSRPRVMRFVNQAFAGTGVRPRDYMTCVTERIDFLKQKVYAWASRIRRYRERVDRYQLNRLFQSDQRKVYRKWEGTDIRVSDGQRPDATAMVNFWRSIWSVPVEHNEGAWIDVVKRECESIEPMGSVTVSPEDVSCAIRTAPNWKSPGPDGLHNFWLKWFRCSHARLAAQFQQALELGSLPSPLTTGVTSLLYKSGSTTEAKNYRPITCLPTLYKLLTSILRAKINTHIVANNILAPAQNGCRVGSRGTKELLLIDMTICQRVRRNRGTLSAAWIDYKKAYDSVPHSWLRRILELYKVDAVLRSFLVACMGQWTTVLRQPEGGEGPSGPQDSIRIERGIFQGDSLSPLWFCLALNPLSTLLKDSGLGCQLRREGEVISHLLYMDDLKLFAPNKHDLLELLKTTEVFSSAIKMEFGVDKCAVMHVQRGKVVNSTNLHISETIALRSLSEAETYKYLGMSQSLGIEGGDIKRAVRERFFCRLTKVLNSFLSGGNKVRAFNAWVMPLLTYSFGILRWTQTELDFLDRRVRVLLTAHRMLHPRSSVMRLYIPRKLGGRGFLNAKDLHNREVCSLRDYFLNSECGMHRDVVAADASFTPLSMANENWRRFKVLSTDDRRAVWKSKELHGRFYKALTGPDVDLLASVNWLRFGDLFGETEGFVCAIADEVIMTNNYRKYILKDGTVDICRACRRPGESLRHIISGCSHLANGEYLHRHNLVARIIHQQLALLYGLVDSEVPYYKYTPAPVLENGRATLYWDRSVITDRTIVANKPDIVLTDRLKRQAVLVDITIPHDENLVKAEKDKVSKYLDLAHEVTAMWDVDSTIIVPIVVSVNGLIAKSLDQHLKRLSLDGWVKGQIQKAVLLDTARIVRRFLSLSP

SEQ ID NO: 6049 - protein, 928 aa, Notocelia uddmanniana
MYIAACRVARVKFPDADRAPRPAGSVPTWQVRIERRVDTYRTLIAKLICFRGGNSRPRVMRFVNQAFAGTGVRPRDYMDCVTERIDFLKQKVYAWASRIRRYRERLDRYQQNRLFQSDQRKVYRKWDGTDHRVSDGQRPDAAAMVNFWRSIWSVPVEHTEGPWIGAVERECESIEPMGSVTISPEDVSCAIRMAPNWKSPGPDGLHNFWLKWFRCSHARLAAQFQQALELGSLPPPLTTGVTSLLYKSGSTTEAKNYRPITCLPTLYKLLTSILRAKINAHIVANNILAPAQNGCRVGSRGTKELLLIDMTICQQVRRNRGALSAAWIDYRKAYDSVPHSWLGRILELYKVDAALRSFLCACMRQWTTVLRQPGGGDGPSVPQDSIRIERGIFQGDSLSPLWFCLALNPLSTLLKDSGLGCQLRRGGEVISHLLYMDDLKLFAPNTHNLLELLKTTEVFSSAIKMEFGVDKCAVMHVQRGKIVNSTNLQLSETTSLRSLSEADTYKYLGMSQSLGIEGGGIKRVLRERFFCRLTKVLNSFLSGGNKVRAFNAWVMPLLTYSFGILRWTQTELDLLDRRVRVLLTTNRMLHPRSSVMRLYIPRKLGGRGFLNAKDLHNREVCSLRDYFLNSECGMHRDVVAVDTLLTPLSMANENWRRLKVLSTEDRRAVWKSKELHGRFYKALTGPDVDLLASVNWLRFGDLFGETEGFVCAIADEVIMTNNYRKYILKDGTVDICRACRRPGESLRHIISGCSHLANGEYLHRHNLVARIIHQQLALLYGLVGFEVPYYKYTPAPVLENGRATLYWDRSVITDRTIVANKPDIVLTDRLKRQAILVDIIIPHDENLVKAEKDKSSKYLDLAHEVTAMWDVDSTIIVPIVVSANGLIAKSLDQHLKRLSLDGWVKGQIQKAVLLDTARIVRRFLSLSP

SEQ ID NO: 6050 - protein, 1167 aa, Notocelia uddmanniana
MPDPIVHTNFHNNNNNKRLGPAGHPAPPTAPATGGIVRRMQWSQSINENCMRAYYGATDGGTNLSAYRDRMLPLFRALEPAISVSAQRLSDQVRVIQRLKRLDDATLDRLRLEALSARAASASARNPSATLPAPVPALDTAPGADPSADEGCANQSVSSQAYEQLRRALEEAITQYRSTPNSRPRLPRLPVNRRNLALMGALNDLLVPYLGASEDLIDTHSIMYCGAIAACRVARVKFPDADRAPRTAGSVPTWQVRIERRVDTYRTLIAKLICFRGGNSRPRVMRFVNQAFAGTGIRPRDYMTCVTERIDFLKQKVYAWASRIRHYRERLDRYQQNRLFQSDQRKVYRKWDGTDHRVSDGQRPDATAMVNFWRSIWSVPVEHNEGAWMGVVERECESIEPMGSVTISPADVSCAIRTAPNWKSPGPDGLHNFWLKWFRCSHARLAAQFQQALELGSLPPPLTTGVTSLLYKSGSTTEAKNYRPITCLPTLYKLLTSILRAKINTHIVANNILAPAQNGCRVGSRGTKELLLIDMTICQRVRRNRGTLSTAWIDYKKAYDSVPHSWLRRILELYKVDAVLRSFLVACMGQWTTVLRQPGGGEGPSGPQDSIRIERGIFQGDSLSPLWFCLALNPLSTLLKDSGLGCQLRREGEVISHLLYMDDLKLFAPNKHDLLELLKTTEAFSSAIKMEFGVDKCAAMHVQRGKVVNSTNLQISETMDLRSLSEAETYKYLGMSQSLGIEGGDIKRAVKERFFCRLTKVLNSFLSGGNRVRAFNAWVMPLLTYSFGILRWTQTELDFLDRRVRVLLTAHRMLHPRSSVMRLYIPRKFGGRGFLNAKDLHNREVCSLRDYFLNSECGMHRDVVAVDASFTPLSMANENWRRLKVLSTEDRRAVWKSKELHGRFYKALTGPDVDLLASVNWLRFGDLFAETEGFVCAIADEVIMTNNYRRYILKDGTVDICRACRRPGESLRHIISGCGHLANGEYLHRHNLVAKIIHQQLALLYGLVDFEVPYYKYTPAPVLENGRATLYWDRSVITDRTIIANKPDIVLTDRLKRQAVLVDITIPHDENLVKAEKDKVSKYLDLAHEVTAMWDVDSTIIVPIVVSANGLIAKSLDQHLKRLARWLGQGSDAEGGTLGHGADSQEVPLSVALTTGSLGPASLPAAL

SEQ ID NO: 6051 - protein, 1206 aa, Notocelia uddmanniana
MNTRLRSRAEQRARLPSPPAPSSSSPSSSDDEFATAPDSSESSSDERGPSPPPPQTSARRGRRPLPARLGPTGHSAPPTAPAAGGVVRRMRWTQEMNENCMRAYFGATEGETNLSAYRVRMLPLFQALEPTITVSAQRLSDQVRVIQRNKRLDDLTLDRLRLEALSARAAPTSARDLPATSPAPVPAPNTAPRAPRVDPSADGDCADQSVSTQAHEQLRRALDEAITRYRSTPNSRPRLPRLPVNRRNLALMGALNDLLDPYLRASDDLIDTHSIMYCGAIAACRVARVKFPDADRATRTAGGVPAWQVRIERRINTFRTLIAKLICFRGGNNRPRVMRFVNQAFAGTGVRPRDYMACVTERIDFLKQKVYAWASRIRRYRERVDRYQQNRLFQSDQRKVYRKWEGTDHRVCDGQRPDATAMVNFWRSIWSVPVEHTEGAWIGVVERNCESIEPMGSVTISPEDVSCAIRTAPNWKSPGPDGLHNFWLKWFRCSHERLATQFQQALELGSLPPPLTTGVTSLLYKSGSTTEAKNYRPITCLPTLYKLLTSILRAKINTHIVTNNILAPAQNGCRVGSRGTKELLLIDMTICQRVRRNRGTLSASWIDYKKAYDSVPHSWLRRILELYKVDAALRSFLSACMGQWTTVLRQPGGGDGPSGPQDSIRIERGIFQGDSLSPLWFCLALNPLSTLLQDSGLGCQLRRGGEVISHLLYMDDLKLFAPNRQDLLELLKTTEVFSSAIKMEFGVDKCAVMHVQRGKVVNSTNLQLSETMSLRSLSEAETYKYLGMSQALGIEGEGIKQAVKERFFCRLTKVLNSFLSGGNKARAFNAWVMPLLTYSFGILRWTQTELDALDRRVRVLLTAHRMLHPRSSFMRLYIPRKCGGRGFLNAKDLHNREVCSLRDYFLNGECGMHRDVVAVDASFTPLSMANENWRRFKVLSTEDRKAEWKSKELHGRFYRALTGPDVDLLASVNWLRFGDLFGETEGFVCAIADEVIMTNNYRKYILKDGTVDICRACRRPGESLRHIISGCSHLANGEYLHRHNLVARIIHQQLALSYGLVDFEVPYYKYLPAPVLENGRATLYWDRSIITDRTIVANKPDIVLIDRSKRQAVLVDITIPHDENLVKAEKDKVSKYLDLAHEVTAMWDVDSTIIVPMVVSANGLIAKSLDQHLKRLSLDGWVKGQIQKAVLLDTARIVRRFLSLSP

SEQ ID NO: 6052 - protein, 1117 aa, Notocelia uddmanniana
MRWTQEMNENCMRAYFGATEGETNLSAYRVRMLPLFQALEPTITVSAQCLSDQVRVIQRNKRLDDLTLDRLRLEALSARAAPTSARDLPATSPAPVPAPNTAPRAPRVDPSADGDCADQSVSTQAHEQLRRALDEVITRYRSTPNSRPRLPRLPVNRRNLALMGALNDLLDPYLRASDDLIDTHSIMYCGAIAACRVARVKFPDADRATRTAGGVPAWQVRIERRINTFRTLIAKLICFRGGNNRPRVMRFVNQAFAGTGVRPRDYMVCVTERIDFLKQKVYAWASRIRRYRERVDRYQQNRLFQSDQRKVYRKWEGTDHRVCDGQRPDATAMVNFWRSIWSVPVEHTEGAWIGVVERDCESIEPMGSVTISPEDVSCAIRTAPNWKSPGPDGLHNFWLKWFRCSHERLATQFQQALVLGSLPPPLTTGVTSLLYKSGSTTEAKNYRPITCLPTLYKLLTSILRAKINTHIVTNNILAPAQNGCRVGSRGTKELLLIDMTICQRVRRNGGTLSASWIDYKRAYDSVPHSWLRRILELYKVDAALRSFLSACMGQWTTVLRQPGGGDGPSGPQDSIRIERGIFQGDSLSPLWFCLALNPLSTLLQDSGLGCQLRRGGEVISHLLYMDDLKLFAPNRQDLLELLKTTEVFSSAIKMEFGVDKCAVMHVQRGKVVNSTNLQLSETMSLRSLSEAETYKYLGMSQALGIEGEGIKQAVKERFFCRLTKVLNSFLSGGNKARAFNAWVMPLLTYSFGILRWTQTELDALDRRVRVLLTAHRMLHPRSSVMRLYIPRKCGGRGFLNAKDLHNREVCSLRDYFLNSECGMHRDVVAVDASFTPLSMANENWRRFKVLSAEDRKAEWKSKELHGRFYRALTGPDVDLLASVNWLRFGDLFGETEGFVCAIADEVIMTNNYRKYILKDGTVDICRACRRPGESLRHIISGCSHLANGEYLHRHNLVARIIHQQLALSYGLVDFEVPYYKYLPAPVLENGRATLYWDRSIITDRTIVANKPDIVLIDRSKRQAVLVDITIPHDENLVKAEKDKVSKYLDLAHEVTAMWDVDSTIIVPIVVSANGLIAKSLDQHLKRLSLDGWVKGQIQKAVLLDTARIVRRFLSLSP

SEQ ID NO: 6053 - protein, 1210 aa, Boloria selene
MITRSQARKTAVHTSNARPTPPPVSSFSSPSSSGDEFATAPDTSESSDDERGTPPPPPRTPARRGRPPLPARLGPTGQPAPTMAPATGGVVRRMRWTQVMNENCMRAYYGATEGGINLSAYRDRMLPLFLAFDPTIAVSAQRLSDQVRFIQRRKLLDDATLDRLRLEVLAARAASTPALGPPAASPAPVPTPNLVPGVPLADHGAGEEECASGVNTQANEQLRRALEEAIGRYRSTPESRPRIPRLPMHKRNLALMGAMDALLDPYLRASEDLTDTHSIMYCGAIAVCRAARVRFPDTDRAPRTTGGVPAWQIRIERRISSFRTLIAKLICFREGNSRPRVMRYVTQAFAGTGTRPCDYMACVTERIDYLKQKVCAWASRIRRYRVRVDRFQQNRLFQSDQRKVYRRWEGTNQCVGDGQLPDPSAMTNFWRSIWSVPVEHTEGEWMNVVGRECESIETMGAVTISPDDVGCAARATQNWKSPGPDGLHNFWIKWFRSSHERLAAQFQHALELGSLPSFMTTGVTFLLHKSGSTTEAKNYRPITCLPTLYKLLMSILRTKINTHIIANNVLAFSQNGCRVGSRGTKELLLIDTTICQQVWRNRGSLSAAWIDYKKAYDSVPHSWLERVLVLYKIDTTLRSLLGACMRRWTTVLYQPGGGDGLPGPQDLIRIKRGIFQGDSLSPLWFCLALNPLSTLLKDSGLGCRLRRGGEVISHLLYMDDLKLYASKRQDLVELLEVTETFSSAIKMEFGVDKCAIMHVQRGKVVNSANLQLSDIISLRSISEVETYKYLGMSQSLGIADGDIRQALRQRFFCRLTKVLNSLLSGGNKARAFNAWVMPLLTYSFGILRWTQTELDALDTRVRQLLTAYRMRHPRSSVMRLYIPRKCGGRGFLNAKDLHNREVCSFSEYFLNNECGIHRDVVAVDKGLTSLSLANENWRRPKVLSTDDRRTVWKCKELHGRFYKALMGPDVDLLASVNWLRFGDLFGETEGFVCAIADEVMMTNNYRRYILRDGTVDICRACRRPGESLRHIISGCSHLANGEYLHRHNQVARIIHQQLALRYGLVGSEVPYYKYAPLPVLENGRATLYWDRSIITDRTIVANKPDIVLVDRSKRQAMLVDIAIPHDENLVKAEKDKLSKYLDLVHEVTAVWDVDSTIIVPLVVSANGLIAKSLDKHLKRLSLDGWIKGQMQKAVLLDTARIVRRFLSLQP

SEQ ID NO: 6054 - protein, 1196 aa, Ostrinia furnacalis
MILRARPPPPPVLSSSSSPRSSSGEEFVTPPNTSASSDEGGPTTPPPPPRPARRGRPPLPARLGSARQPASRTAPATGGVVRRMRWTQTMNENCMRAYYGATEGGTVLTAYRDRILPLFQNLEPTITVSAQRLSDQVRAIQRCKLLDQSVLDRLRLEAMPARTTPLLTSEPPASSSPTVSSSTPQAARVDSGGEEEGLPSSVSNQVSERLRRALEDTIGQYRFTSDSRPRLPRLPTHRRNLALMGALNALLIPYMRTSTNLFDTHSILYCGAIAVCRVAGVQFPDSDRATRPAGMAPAWQIRIERRINAFRTLIAKLICFRRGNNRPRVMRFVAQAFAGTGVLPQDYMTCVTERIDYLKQKVYAWANRIRRYKERVNRYWQNRVFQSDQRRVYRGWEGSDQRVSNGQLPDVNTMIDFWRGIWSMPVEHTEGDWMRVIERECESIESMGSIVIDPEDVSSAISTAQNWKSPGPDGLHNFWIKWIRCSHDRLATQFQEALELGSLPAFMTTGVTTLLYKSGSTMDPKNYRPITCLPTIYKLLTSILTTKINTHIVANNILAPAQNGCKVGSRGTKELLLIDMTISQQVRRSRKALSAAWIDYKKAYDSVPHSWLERILELYKVDATLRSFLRSCMGQWTTVLRQPGGGERSPDPLNFIRIERGIFQGDSLSPLWFCLALNPLSTLLKDSGLGYRLRRGGEVISHLLYMDDLKLFAPKRQDLVKLLKTTQVFSNAIRMEFGVDKCAVLHVERGKVVNSPNLQLSETMTLKSLSETETYKYLGMSESLGISVDDIKKSVKERFCSRLTKVLNSLLSGGNKARAFNGWVMPLLIYSFGILRWTQTELDALDRKVRQQLTQHRMLHPRSSVMRLYIPRKWGGRGFLNAKNLHNREVCSLRDYFLTNECGMHRDVVAVDKGLTPLSLANENWRKPKVLSVADRKDVWKSKELHGRFYRALTGPDVDLLASVNWLRFGDLFGETEGFACAIADEVMMTNNYRKYILKDGTVDICRACHRPGESLRHIISGCSHLANGEYLHRHNLVARIIHQQLALQYGLLESESPYYQYQPVPVLENGHALLYWDRSIITDRTIVCNKPDIVVVDRSQRRAVLVDITIPHDENLVKAEKEKQSKYLDLAHEVTAMWDVDSTIIVPIVVSANGLIAKSFDQHLKKLSLDGWLKGQIQKAVILSTARIVRRFLSL

SEQ ID NO: 6055 - protein, 1208 aa, Crocallis elinguaria
MITRSRTKKAGTASARKTPPPASSSPSSSSGVEYGTPLDTSASSDEDGPPSPPPPPPPARRGRPPLPARLGPAGHSVPRAAPATGGIVRRMRWTSDMNENCMRAYYGATEGGTNMSAYRDRMLPLFQTLEPSVAVSTQRLSDQVRAIQRLKLLDESVLDRLRLEALPIRATSASARDLSVAPPVPAPLPAPSSVATPIDPVVDEDDCANISVSTQVNEQLRRALEDAILEYQYTPDSRPRLPRLPTNRRNLALMGALNVLLAPYLRASENLFDTHSIMYCGAIAVCRVARVKFPDADRAPRPAGSAPAWQVRIERRINTFRTLIAKLICFSRGNNRPRVMRFVNQAFAGTGIRPQNYMAGVTERIDFLKQKIYVWVNRIRRYRERVDRYHQNRLFESDQRKVYRNWEGTDQRVSDGQLPDTNAMINFWRGIWSVPVEHTEGDWMRTVEQSCESIETMGSVTIDPIDVSCAIRTAQNWKSPGPDGLHNFWIKWIRCSHECLAVQFQEALELGSLPRFLTTGVTSLLHKSGSTTEAKNYRPITCLPTLYKLLTSILRAKINSHVVANNILAPAQNGCRVGSRGTKELLLIDTAICQQVRRNKGALSTAWIDYKKAYDSVPHSWLERILELYKIDTTLRTFLSTCMRQWTTVLRQPGSGNSPSGPENFIKIERGIFQGDSLSPLWFCLALNPLSTLLRDSRLGCKLRREGEIISHLLYMDDLKLLAPKSPDLMKLLKITEIFSSAIKMEFGVDKCAVMHVQRGKVVNSDNLQLSETMTLRSLSEAETYRYLGMSQSLGITVGDIKQSVKERFFCRLTKVLNSLLSGGNKARAFNGWVMPLLIYSFGILKWTQTELDSLDRRVRQLLTYHRMLHPRSSVMRLYIPRKWGGRGFLNAKTLHNREVCSLREYFLNNECGMHRDVVAVDRNLTPLSLANENWHKPVVMTTEDRKEVWKGKELHGRFYRALTGSDVDLLASVNWLRFGDLFGETEGFVCAIMDEVIKTNNYRKYIMKDGTVDICRACRRPGESLRHIISGCSHLANGEYLHRHNLVARIIHQQIAFQYGLVESEVPYYKYAPAPVLENGRALLYWDRSIITDRTIVANKPDIVLVDRSQRRAVLVDITVPHDENLVKAEKDKLSKYLDLAHEVTAMWNVDSTIIVPIVVSANGLVAKSLDQHLKRLSLDGWIKGRMQKAVLLDTARIVRRFLTLQP

SEQ ID NO: 6056 - protein, 1207 aa, Crocallis elinguaria
MITRSRNKAGTASARQSPPPASSSPSSSSGDEYGTPLDTSASSDEDGPPSPPPPPPPARRGRPPLPARLGPAGHSVPRAAPATGGIVRRMRWTSDMNENCMRAYYGATEGGTNMSAYRDRMLPLFQTLEPSVAVSTQRLSDQVRAIQRLKLLDESVLDRLRLEALPIRATSASARDLSVAPPVPAPLPAPSSVATPIDPVVDEDDCANISVSTQVNEQLRRALEDAILEYQYTPDSRPRLPRLPTNRRNLALMGALNVLLAPYLRASENLFDTHSIMYCGAIAVCRVARVKFPDADRAPRPAGSAPAWQVRIERRINTFRTLIAKLICFSRGNNRPRVMRFVNQAFAGTGIRPQNYMAGVTERIDFLKQKIYAWVNRIRRYRERVDRYHQNRLFESDQRKVYRNWEGTDQRVSDGQLPDTNAMINFWRGIWSVPVEHTEGDWMRTVEQSCESIETMGSVTIDPIDVSCAIRTAQNWKSPGPDGLHNFWIKWIRCSHECLAVQFQEALELGSLPRFLTTGVTSLLHKSGSTTEAKNYRPITCLPTLYKLLTSILRAKINSHVVANNILAPAQNGCRVGSRGTKELLLIDTAICQQVRRNKGALSTAWIDYKKAYDSVPHSWLERILELYKIDTTLRTFLSTCMRQWTTVLRQPGSGNSPSGPENFIKIERGIFQGDSLSPLWFCLALNPLSTLLRDSRLGCKLRREGEIISHLLYMDDLKLLAPKSPDLMKLLKITEIFSSAIKMEFGVDKCAVMHVQRGKVVNSDNLQLSETMTLRSLSEAETYRYLGMSQSLGIMVGDIKQSVKERFFCRLTKVLNSLLSGGNKARAFNGWVMPLLIYSFGILKWTQTELDSLDRRVRQLLTYHRMLHPRSSVMRLYIPRKWGGRGFLNAKTLHNREVCSLREYFLNNECGMHRDVVAVDRNLTPLSLANENWHKPVVMTTEDRKEVWKGKELHGRFYRALTGSDVDLLASVNWLRFGDLFGETEGFVCAIMDEVIKTNNYRKYIMKDGTVDICRACRRPGESLRHIISGCSHLANGEYLHRHNLVARIIHQQIAFQYGLVESEVPYYKYAPAPVLENGRALLYWDRSIITDRTIVANKPDIVLVDRSQRRAVLVDITVPHDENLVKAEKDKLSKYLDLAHEVTAMWNVDSTIIVPIVVSANGLVAKSLDQHLKRLSLDGWIKGRMQKAVLLDTARIVRRFLTLQP

SEQ ID NO: 6057 - protein, 1208 aa, Crocallis elinguaria
MITRSRTKKAGTASARKTPPPASSSPSSSSGVEYGTPLDTSASSDEDEPPSPPPPPPPARRGRPPLPARLGPAGHSVPRAAPATGGIVRRMRWTSDMNENCMRAYYGATEGGTNMSAYRDRMLPLFQTLEPSVAVSTQRLSDQVRAIQRLKLLDESVLDRLRLEALPIRATSASARDLSVAPPVPAPLPAPSSVATRIDPVVDEDDCANISVSTQVNEQLRRALEDAILEYQYTPDSRPRLPRLPTNRRNLALMGALNVLLAPYLRASENLFDTHSIMYCGAIAVCRVARVKFPDADRAPRPAGSAPAWQVRIERRINTFRTLIAKLICFSRGNNRPRVMRFVNQAFAGTGIRPQNYMAGVTERIDFLKQKIYAWVNRIRRYRERVDRYHQNRLFESDQRKVYRNWEGTDQRVSDGQLPDTNAMINFWRGIWSVPVEHTEGDWMRTVEQSCESIETMGSVTIDPIDVSCAIRTAQNWKSPGPDGLHNFWIKWIRCSHECLAVQFQEALELGSLPRFLTTGVTSLLHKSGSTTEAKNYRPITCLPTLYKLLTSILRAKINSHVVANNILAPAQNGCRVGSRGTKELLLIDTAICQQVRRNKGALSTAWIDYKKAYDSVPHSWLERILELYKIDTTLRTFLSTCMRQWTTVLRQPGSGNSPSGPENFIKIERGIFQGDSLSPLWFCLALNPLSTLLRDSRLGCKLRREGEIISHLLYMDDLKLLAPKSPDLMKLLKITEIFSSAIKMEFGVDKCAVMHVQRGKVVNSDNLQLSETMTLRSLSEAETYRYLGMSQSLGITVGDIKQSVKERFFCRLTKVLNSLLSGGNKARAFNGWVMPLLIYSFGILKWTQTELDSLDRRVRQLLTYHRMLHPRSSVMRLYIPRKWGGRGFLNAKTLHNREVCSLREYFLNNECGMHRDVVAVDRNLTPLSLANENWHKPVVMTTEDRKEVWKGKELHGRFYRALTGSDVDLLASVNWLRFGDLFGETEGFVCAIMDEVIKTNNYRKYIMKDGTVDICRACRRPGESLRHIISGCSHLANGEYLHRHNLVARIIHQQIALQYGLVESEVPYYKYAPAPVLENGRALLYWDRSIITDRTIVANKPDIVLVDRSQRRAVLVDITVPHDENLVKAEKDKLSKYLDLAHEVTAMWNVDSTIIVPIVVSANGLVAKSLDQHLKRLSLDGWIKGRMQKAVLLDTARIVRRFLTLQP

SEQ ID NO: 6058 - protein, 1210 aa, Cydia pomonella
MITRSKTRGQLASLQNARPPPSPASSVSSQPSSGDEFATAPDTSESSDECGPPPPPPRPPARRGRPPLPARLGPAGHPAPPTAPAAGGVVRRMRWSQAMNENVMRAYYGATEGGTQLSAYRSRILPLFQALEPTIIVSEQRLSDQVRVIQRLKRLDDATLDRLRQEALSARADSSLVRDLPAMSPDPMPAPDLASGAPRVDFSTDEGDFANQNVSTSANEQLRRTLEEVITQYRSTPNTRPRLPRLPMNKRNLALMGALNALLEPYLRTSKDLDDTHAIMYCGAIAACRVARVKFPDAERAPRTAGGAPAWQIRIERRINSFRTLIAKLICFRGGNHRPRVMRFVNQAFAGTGIEPRDYIANLTERIDFLKQKVYAWANRIRRYRKRVDRFQQNRLFQSDQRKVYRKWEETNLRASDTRSPDATAMTDFWRSIWSVPVGHTEGGWMSVVERECESIEPMGAITISPDDVSCAIRTAQNWKSPGPDGLHNFWLKWFRCSHSRLAAQFQQALELGSLPPSLTTGVTFLLYKSGSTTEAKNYRPITCLPTLYKLLTSILRSKINAHIVANNILASAQNGCRVGSRGTKELLLIDMTICQQIRRNKGALSAAWIDYKKAYDSVPHSWLGRVLELYKVDTALRAFLSACMRQWTTVLRQPGGGMTALARRIFIRIERGIFQGDSLSPLWFCLALNPLSTLLKDSGLGCRLRREGEVISHLLYMDDLKLFAPNSQDLLELLKTTELFSSAINMEFGVDKCAVMHVQRGKVVNSTNLQLSEAMSFRSISESETYKYLGMSQSLGIEDEGIRQSVKERFFSRLTKVLNSLLSGGNKVRSFNAWVMPLLTYSFGILRWTQTELDALDRRVRLLLTTHRMLHPRSSIMRLYIPRKCGGRGFLNAKDLHNREVCNLRNYFLNNECGMHRDVVAVDRNLTPLSLANENWRKPVVLSTADRRTAWESKVLHGRFYKALTGSDVDLLASVNWLRFGDLFGETEGFACAIADEVMMTNNYRKYILKDGTVDICRACRRPGESLRHIISGCSHLANGEYLHRHNLVARIIHQQLALLYGLVDREVPYYKYSPAPVLENGRATLYWDRSIITDRTIVANKPDIVIIDRSQRRAALVDITIPHDENLVKAEKDKSSKYLDLAHEITAMWDVDSTIIVPIVVSANGLIAKSLEQHLERLSLGGWIKGQMQKAVILSTARIVRRFLSLQP

SEQ ID NO: 6059 - protein, 1212 aa, Peribatodes rhomboidaria
MITRSKTKKEADTPSTRPPPPPSSSSECPSSEEDEYATPLDTTDTSNEEAAPTPAPPPPPARRGRPPLPARLGPAGRSAPPTAPATGGVVCRMRWTRTINENCMRAYYGATEGGTNLTAYRVRMLSLFQVLEPTVTVSAQRLSDQVRAIHRCKLLDQSVLDRLCLEAIRARPTPASTRDRPVASSAPTWASVPASAATLATLADTDVDGDRTSVSVSSQVSEHLRRTLEDAISQYRYAPDSRPRLPRLPTHRRNMALMGALNVLLAPYLRASENLTDTHSILYCGAIAACRVARVKFPDTSRAPRPAGGVPAWQVRIERRISTFRTLIAKLLCFSRGNSRPRVMRFVTQAFAGTDIRPQYYLANVTERIDYLKQKVYAWANRIRRYRERVDRYWQNRLFQSDQRKVYRGWEGTEQCAIDGHRPDASAMIDFWRGIWSVPVEHTEGEWMRIVERECESIESMESILIDSVDVSCAIRTAQNWKSPGPDGLHNFWIKWIRCSHDRLAIQFQEALELCSLPSFMTIGVTFLLHKSGSTTGPKNYRPITCLPTIYKLLTSILRNKINTHIVANNVLAPAQNGCRVGSRGTKELLLIDMAISQQVRRSKGALSVAWIDYKKAYDSVPHSWLERILELYKIDITLKSFLSACMRQWTTVLRQPGGGEVSADPQDLIRIERGIFQGDSLSPLWFCLALNPLSTLLKDLGLGHRLRRGGEVISHLLYMDDLKLFAPKRQDLMELLKTTEVFSSAIKMEFGVDKCAVMHVQRGKVVNSPNLQLSETMTLRSLSEVETYKYLGMSESLGISVVDIKKSIKERFFCRLTKVLNSLLSGGNRMRAFNGWVMPLLIYSFGILRWTQTELDALDRRVRQLLTTHRMLHPRSSVMRLYIPRKWGGRGMLNAKNLHNREVYRLRSFFRNNDCGMHCDVVAVDKGLTPLSLANENWRQPSVLSTEDRKNVWKGKELHGRFYRALTGPDVDLLASVNWLRFGDLFGETEGFACAIADEVIKTNNYRKYILKDGTVDICRACHRPGESLRHIISGCSHLANGEYLHRHNQVARIIHQQLALQYGLVESEVPYYKYAPASVLENGRALLYWDRSIITDRTIVANKPDIVLVDRSQRRAVLVDITIPHDENLVKAEKDKLSKYLDLAHEVTAMWDVDSTIIVPIVVTVNGLIAKSLDQHLKRLSLDGWIKGQIQKAVILDTCRIVRRFLTLQP

SEQ ID NO: 6060 - protein, 1212 aa, Pammene fasciana
MITRSKSRQQQASPPNARPPSSPASSVSSPSSSGDEFATAPDTSESSDECGPPPPPPRPPARRGRPPLPARLGLAGHPAPPRAPAAGGIVRRMRWTQTMNENVMRAYYGATEGGTNLCAYRVRLLPLFQALEPTTNVTAQRLSDQVRVIQRDKRLDDSTLDRLRLEALSAHAASTSARDPPATAPDPMPAPDLASGAPRVDPSADEEEIATQSVSSTANEQLRRTLEEAITQYRSTNIPRPRLPRLPMNRRNLALMGALNDLLDPFLRTSKDLDDTHSIMYCGAISACRVARVKFPDAERAPRTAGGVPAWQVRIERRINSFRTLIAKLICFRGGNNRPRVMRFVHQAFAGTDIEPRDYMANVTERIDFLKQKVYAWASRIRRYRERVDRFRQNRLFQSDQRKVYRRWEEADPRVSDVRLPDATAMSDFWRSIWSAPVEHTEGEWMSVVERECETIEPMGAITISPDDVSCAIRTAQNWKSPGPDGLHNFWLKWFRCSHSRLATQFQQALELGSLPPSLTTGVTFLLYKSGSTTEAKNYRPITCLPTLYKLLTSILRAKINAHMVANNILASAQNGCRVGSRGTKELLLIDMTICQRVRRNRGALSAAWIDYKKAYDSVPHSWLERILELYKIDAALRSFLGACMRQWTTVLRQPGGGDDPPGPQDFIRIERGIFQGDSLSPLWFCLALNPLSTLLKDSGLGCRLRREGEVISHLLYMDDLKLFAPNNRDLLELLKTTEVFSSSIKMEFGVDKCAVMHVQRGKVVNSTNLQLSETMTFRSISESETYKYLGMSQSLGIEDAGIKQALRERFFGRLTKVLNSLLSGGNKVRAFNAWVMPLLTYSFGILRWTQTELDALDRRVRQLLTTHRMLHPRSSVMRLYIPRKCGGRGFLNAKNLHNREVYNLRNYFLNNECGMHRDVVAIDKGLTPLSLANENWRKPVVLSTEDRKAVWKSKELHGRFYGALTGPDVDLLASVNWLRFGDLFGETEGFACAIADEVIMTNNYRRYILKDGTVDICRACRRPGESLRHIISGCSHLANGEYLHRHNLVARIIHQQLALLYGLVDHEVPYYKYTPAPVLENGRATLYWDRSIITDRTIVANKPDIVVIDRPQRRAMLVDITVPCDVNLVKAEKDKSSKYLDLAHEVTAMWEVDSAIIVPIVVSANGLIAKSLDQYLERLSLRGCGWIKGQIQKAVILDTARIVRRFLSLRP

SEQ ID NO: 6061 - protein, 1209 aa, Pammene fasciana
MITRSRTKAASTNARPPSSPASSVSSPSSSGDEFATAPDTSESSDECGPPPPPPRPPARRGRPPLPARLGLAGHPVPPRAPAAGGIVRRMRWTPAMNENVMRAYYGATEGGTSLSAYRDRILPLFQALEPTIDTTTQRLSDQVRAIQRLKRLDDATLDRLRLEALSAHADSTSVRDPPATSPDPMPVPDLASGAPRIDPSADEEYIASQSMSSTANEQLRRTLEEAITQYRSTNIPRPRLPRLPMNRRNLALMGALNDLLDPILRTSKDLDDTHSIMYCGAIAACRVARVKFPDAERAPRTAGGVPVWQVRIERRINSFRTLIAKLICFRGGNNRPRVMRFVHQAFAGTGIEPRDYMANVTERIDFLKQKVYAWASRIRRYRERVDRFRQNRLFQSDQRKVYRRWEEADPCVSDVRLPDATAMTDFWRSIWSAPVEHTEGEWMSVVERECESIEPMGAITISPDDVSCAIRTAQNWKSPGPDGLHNFWLKWFRCSHSRLATQFQQALELGSLPPSLTTGVTFLLYKSGSTTEAKNYRPITCLPTLYKLLTSILRAKINAHIVANNILASSQNGCRVGSRGTKELLLIDMTICQRVRRNRGALSAAWIDYKKAYDSVPHSWLERILELYKVDATLRSFLGACMRQWTTVLRQPGGGDDPPDPHDFIRIERGIFQGDSLSPLWFCLALNPLSTLLKDSGLGCRLRREGEVISHLLYMDDLKLFAPNNRDLMELLKTTEVFSSSIKMEFGVDKCAVMHVQRGKVVNSTNLQLSETMTFRSISESETYKYLGMSQSLGIEDAGIKQALKERFFGRLTKVLNSLLSGGNKVRAFNAWVMPLLTYSFGILRWTQTELDALDRRVRLLLTTHRMLHPRSSVMRLYIPRKSGGRGFLNAKNLHNREVYNLRNYFLNNECGMHRDVVAVDKSLTPLSLANENWRKPVVLSTEDRKAVWKSKELHGRFYGALTGPDVDLLASVNWLRFGDLFGETEGFACAIADEVIMTNNYRRYILKDGTVDICRACRRPGESLRHIISGCSHLANGEYLHRHNLVARIIHQQLALLYGLVDHEVPYYKYTPAPVLENGRATLYWDRSIITDRTIVANKPDIVIIDRSQRRAMLVDITVPCDVNLVKAEKDKSSKYLDLAHEVTAMWEVDSAIIVPIVVSANGLIAKSLDQHLERLSLRGCGWIKGQIQKAVILDTARIVRRFLSLRP

SEQ ID NO: 6062 - protein, 1209 aa, Pammene fasciana
MITRSRTKAASTNARPPSSPASSVSSPSSSGDEFATAPDTSESSDECGPPPPPPRPPARRGRPPLPARLGLAGHPVPPRAPAAGGIVRRMRWTPAMNENVMRAYYGATEGGTNLSAYRDRILPLFQALEPTIDTTAQRLSDQVRAIQRLKRLDDATLDRLRLEALSARADSTSVRDPPATSPDPMPVPDLASGAPRIDPSADEEYIASQSMSSTANEQLRRTLEEAITQYRSTNIPRPRLPRLPMNRRNLALMGALNDLLDPILRTSKDLDDTHSIMYCGAIAACRVARVKFPDAERAPRTAGGVPVWQVRIERRINSFRTLIAKLICFRGGNNRPRVMRFVHQAFAGTGIEPRDYMANVTERIDFLKQKVYAWASRIRRYRERVDRFRQNRLFQSDQRKVYRRWEEADPRVSDARLPDATAMTDFWRSIWSALVEHTEGEWMSVVERECESIEPMGAITISPDDVSCAIRTAQNWKSPGPDGLHNFWLKWFRCSHSRLATQFQQALELGSLPPSLTTGVTFLLYKSGSTTEAKNYRPITCLPTLYKLLTSILRAKINAHIVANNILASSQNGCRVGSRGTKELLLIDMTICQRVRRNRGALSAAWIDYKKAYDSVPHSWLERILELYKVDAALRSFLGACMRQWTTVLRQPGGGDDPPDPHDFIRIERGIFQGDSLSPLWFCLALNPLSTLLKDSGLGCRLRREGEVISHLLYMDDLKLFALNNRDLMELLKTTEVFSSSIKMEFGVDKCAVMHVQRGKVVNSTNLQLSETMTFRSISESETYKYLGMSQSLGIEDAGIKQALKERFFGRLTKVLNSLLSGGNKVRAFNAWVMPLLTYSFGILRWTQTELDALDRRVRLLLTTHRMLHPRSSVMRLYIPRKCGGRGFLNAKNLHNREVYNLRNYFLNNECGMHRDVEAVDKSLTPLSLANENWRKPVVLSTEDRKAVWKSKELHGRFYGALTGPDVDLLASVNWLRFGDLFGETEGFACAIADEVIMTNNYRRYILKDGTVDICRACRRPGESLRHIISGCSHLANGEYLHRHNLVARIIHQQLALLYGLVDHEVPYYKYTPAPVLENGRATLYWDRSIITDRTIVANKPDIVIIDRSQRRAMLVDITVPCDVNLVKAEKDKSSKYLDLAHEVTAMWEVDSAIIVPIVVSANGLIAKSLDQHLERLSLRGCGWIKGQIQKAVILDTARIVRRFLSLRP

SEQ ID NO: 6063 - protein, 1213 aa, Pammene fasciana
MITRSKARQAQADTTNARPPPSPTPSDSSPSSSSDEAFATAADTSESSDECGLPSPPPRPPARRGRPPLPARLGLAGHPVPPKAPAAGGIVRRMRWTQKMNENCMRAYYGATEGGTNLCAYRVRLLPLFRALEPTINVTAQRLSDQVRVIERDKRLDDSTLDRLRLEALSARAASTSARDPPATLPDPIPAPDLASGAPRVDPSANEEEIATQTVSSTANEQLRRTLEEAITQYRSTNIPRPRLPRLPMNRRNLALMGALNDLLDPILRTSKDLDDTHSIMYCGAIAACRVARVKFPDAERAPRTAGGVPAWQVRIERRINSFRTLIAKLICFRGGNNRPRVMRFVHQVFAGTGIEPRDYMANVTERIDFLKQKVYAWASRIRRYRERVDRFRQNRLFQSDQRKVYRRWEEADPRVSDARLPDATAMTDFWRSIWSAPVEHTEGEWMSVVERECESIEPMGAITISPDDVSCAIRTAQNWKSPGPDGLHNFWLKWFRCSHSRLATQFQQALELGSLPPSLTTGVTFLLYKSGSTTEAKNYRPITCLPTLYKLLTSILRAKINAHIVANNILASSQNGCRVGSRGTKELLLIDMTICQRARRNRGALSAAWIDYKKAYDSVPHSWLERILELYKVDAALRSFLGACMRQWTTVLRQPGGGDDPPDPHDFIRIERGIFQGDSLSPLWFCLALNPLSTLLKDSGLGCRLRREGEVISHLLYMDDLKLFAPNNRDLMELLKTTEVFSSSIKMEFGVDKCAVMHVQRGKVVNSTNLQLSETMTFRSISESETYKYLGMSQSLGIEDAGIKQALKERFFGRLTKVLNSLLSGGNNVRAFNAWVMPLLTYSFGILRWTQTELDALDRRVRLLLTTHRMLHPRSSVMRLYIPRKCGGRGFLNAKNLHNREVYNLRNYFLNNECGMHRDVVAVDKSLTPLSLANENWRKPVVLSTEDRKAVWKSKELHGRFYGALTGPDVDLLASVNWLRFGDLFGETEGFACAIADEVIMTNNYRRYILKDGTVDICRACRRPGESLRHIISGCSHLANGEYLHRHNLVARIIHQQLALLYGLVDHEVPYYKYTPAPVLENGRATLYWDRSIITDRTIVANKPDIVIIDRSQRRAMLVDITVPCDVNLVKAEKDKSSKYLDLAHEVTAMWEVDSAIIVPIVVSANGLIAKSLDQHLERLSLRGCGWIKGQIQKAVILDTARIVRRFLSLWP

SEQ ID NO: 6064 - protein, 1207 aa, Ennomos quercinarius
MITRSRKKQAEQSARLPPPPAPSSPSSSSGDEYGTPPDTTASSDEDGPPSPPPPPPPARRGRPPLPARLGPAGQPAPRPAPATGGIVRRMRWTQSMNENCMRAYYGAIEGGSNLTAYRDRMLSLFQDLEPAVAVSAQRLSDQVRAIQRCKMLDQPTLDRLRLEALPIPATSPSPRVLPAALPDQGPIMGPPPVTPRGDPAIDGEVSVSDSVSTQANEQLRSALEDAILRYRSTSTSRPRLPRLPMNRRNLVLMGALNALLAPYLRTSEDLVDTHSILYCGAIAACRVARVKFPDTDRAPRPADGAPAWQVRIEKRITTFRTLIAKLVCFSRGNHRPRVMRFVAQAFTGTGIRPQDYMACVTERIDFLKQKVYAWASRIRRYRERVDRYQQNRLFQSDQRKVYRNWEGTSQRVVDGQLPDANAMNEFWRSIWSVPVEHTEGDWMRVIERVCEPIESMGSITIDPEDISCAIRTAQNWKSPGPDGLHNFWIKWIRCSYPCLAIQFQEALEAGSLPSFMTTGVTFLLHKSGSTTEAKNYRPITCLPTLYKLLTSILRTKINSHIVANNILAPAQNGCRVGSRGTKELLLIDTAICQQVRRNRGALSTAWIDYKKAYDSVPHSWLERVLELYKIDATLRSFLSACMRQWTTVLRQPGGGESVSDPQDFIRIERGIFQGDSLSPLWFCLALNPLSTLLGDSGLGYRLRRGSEIISHLLYMDDLKLFAPQRPQLIELLKITENFSNSINMEFGVDKCAVMHVHRGKVVNSTNLQLSETMTLRSLSESETYRYLGMSESLGISVGDVKRTVKERFFCRLTKVLNSLLSGGNKTRAFNGWVMPLLMYSFGILRWTQTELDALDRKVRQLLTSHRMLHSRSSVMRLYIPRKWGGRGFLNAKTLHNREVCSLRDYFLNNECGMHRDVVAVDKGLTPLSLASENWRKPVVLSTEDRRDVWKGKELHGRFYRALTGPDVDLHASVNWLRFGDLFGETEGFVCAIADEVIKTNNYRKYIMKDGTVDICRACRRPGESLRHIISGCSHLANGEYLHRHNLVARIIHQQLALQYGLVESEVPYYKYTPGPVLENGRALLYWDRSIITDRTIVANKPDIVLVDRSQRRAVLVDITIPHDENLVKAEKDKLSKYLDLAHEVTAMWNVDSTSIVPIVVSANGLIAKSLDQHLERLSLDGWIKGQIQKAVLLDTARIVRRFLTLQP

SEQ ID NO: 6065 - protein, 1209 aa, Cydia splendana
MQTRSKTRAQLASPRNARPPPPSASSVSSQSSSGDEFATAPDTSESSDECGPPPPPSRPPARRGRPPLSARLGPAGHPAPPTAPAAGGVVRRMRWSQTINENVMRAYYGATEGGTNLCAYRVRMLPLFQALEPTIDVTAQRLSDQVRVIQRQKRLDDSTLDRLRLEALSARAASTSARDPPATSPDPVPAPDQAPGAPRVDLSADEEEFAQSVGSTANEQLRRTLDEAITRYRSTPDTRPRLPRLPMNRHNLALMGALNALLEPYLRTSKDLDDTHAIMYCGAIAACRVARVKFPDSERAPRTAGGAPAWQIRIERRISSFRTLIAKLICFRGGNNRPRVMRFVNQAFVGTDIRPRDYMANVTERIDFLKQKVYAWANRIRRYRERVDRFQQNRLFQSDQRKMYRKWEETNLRASDSRPPDATVMNDFWRSIWSVPVGHTEGSWMSVVERECESIEPMGAVTISPDDVSCAIRTAQNWKSPGPDGLHNFWLKWFRCSHSYLAAQFQQTLELGSLPPSLTTGVTFLLYKSGSTTEAKNYRPITCLPTLYKLLTSILRAKINAHIVANNILASAQNGCRVGSRGTKELLLIDMTICQQIQRTKGALSAAWIDYKKAYDSVPHSWLGRVLELYKVDAALRAFLSACMGQWTTVLRQPGGGDDRPGPQDFIRIERGIFQGDSLSPLWFCLALNPLSTLLKDLGLGCRLRREGEVISHLLYMDDLKLFAPNTQGLLELLKTTEVFSSAINMEFGVDKCAVMHVQRGKVVNSTNLQLSETMSFRSISESETYKYLGMSQSLGIEDEGIRRSVKERFFSRLTKVLNSLLSGGNKVRAFNAWVMPLLTYSFGILRWTQTELDALDRRVRSLLTTHRMLHPRSSVMRLYIPRKCGGRGFLNAKDLHNREVYNLRNYFLNNECGMHRDVVAVDRNLTPLSLAKENWRKPVVLSTADRKAAWESKALHGRFYKALTGPDVDLLASVNWLRFGDLFGETEGFACAIADEVMMTNNYRKYILKDGTVDICRACRRPGESLRHIISGCSHLANGEYLHRHNLVARIIHQQLALLYGLVDREVPYYKYLPAPVLENGRATLYWDRSIITDRTIVANKPDIVLIDRSQRRAVLADVTIPHDENLVKAEKDKSSKYLDLAHEITAMWDVDSTIIVPIVVSANGLIAKSLDQHLERLSLGGWIKGQMQKAVILDTARIVRRFLTLRP

SEQ ID NO: 6066 - protein, 1107 aa, Cydia splendana
MRAYYGATEGGTQLSAYRSRILPLFQALEPTITVSEQRLSDQVRVIQRLKRLDDATLDRLRKEALSARADPTSVRDLPVTSPDPVPAPDLAPGAPRVDFSTDEGNFASQNVSTTANEQLRRTLEEAITQYRATTNSRPRLPRLPMNRRNLALMGALNALLEPHLRTSKDLDDTHSIMYCGAIAACRVARVKFPDAERAPRTVGGVPAWQARIEQRISSFRTLIAKLICFRGGNNRPRVMRFVNQAFAGTDIRPRDYMANVTERIDFLKQKVYAWANRIRRYRERVDRFQQNRLFQGDQRKVYRKWEETNLRTPDTQPPDVTAMTDFWRSIWSVPVGHTEGGWMSVVERECESIEPMGAVTISPDDVSCAIRTAQNWKSPGPDGLHNFWLKWFRCSHSCLAAQFQQALELGSLPPSLTTGVTFLLYKSGSTTEAKNYRPITCLPTLYKLLTSILRAKINAHIVANNILASAQNGCRVGSRGTKELLLIDMTICQQIRRNKGALSAAWIDYKKAYDSVPHSWLGRVLELYKVDAALRAFLSACMRQWTTVLRQPGGRDDRPGPQDFIRIERGIFQGDSLSPLWFCLALNPLSTLLKDLGLGCRLRREGEVISHLLYMDDLKLFAPNSQDLLELLKTTEVFSSAIHMEFGVDKCAVMHVQRGRVVNSTNLQLSETMSFRSISESETYKYLGMSQSLGIEDEGIRRSVKERFFSRLTKVLNSLLSGGNKVRAFNAWVMPLLTYSFGILRWTQTELDALDRRVRSLLTAHRMLHPRSSVMRLYIPRKCGGRGFLNAKDLHNHEVYNLRNYFLNNECGMHRDVVAVDRNLTPLSLANENWRKPVVLSTADRKAAWESKVLHGRFYKALTGPDVDLLASVNWLRFGDLFGETEGFACAIADEVMMTNNYRKYILKDGTVDICRACRRPGESLRHIISGCSHLANGEYLHRHNLVARIIHQQLALLYDLVDREVPYYKYLPAPVLENGRATLYWDRSIITDRTIVANKPDIVIIDRSQRRAVLVDITIPHDENLVKAEKDKSSKYLDLAHEITAMWDVDSTIIVPIVVSVNGLIAKSLDQHLERLSLGGWIKGQMQKAVILDTARIVRRFLSLQP

SEQ ID NO: 6067 - protein, 1208 aa, Cydia splendana
MITRSKARSQASTTANARPPPSPVSSVSSQSSGDEFATAPDTSESSDECGPPPPPPRPPARRGRPPLPARLGPAGHLAPPTAPAAGGVVRRMRWSQTMNENVMRAYYGATEGGTDLCAYRVRMLPLFQALEPTIDVTAQRLSDQVRVIQRLKRLDDSTLDRLRLEALSARAASTSVRDPPATSPDPVPAPDQAPEAPRVDLCADEEEFAQSVSSTANEQLRRTLDEAITQYRSTPNTRPRLPRLPMNRHNLALMGALNALLEPYLRTSKDLDDTHAIMYCGAIAACRVARVKFPDSERAPRTAGGAPAWQIRIERRISSFRTLIAKLICFRGGNNRPRVMRFVNQAFAGTDIRPRDYMANITERIDFLKQKVYAWANRIRRYRERVDRFQQNRLFQSDQRKMYRKWEETNPRASDSQPPDATVMNDFWRSIWSVPVGHTEGSWMSVVERECESIEPMGAVTISPDDVSCAIRTAQNWKSPGPDGLHNFWLKWFRCSHSCLAAQFQQALELGSLPPSLTTGVTFLLYKSGSTTEAKNYRPITCLPTLYKLLTSILRAKINAHIVANNILASAQNGCRVGSRGTKELLLIDMTICQQIRRNRGALSAAWIDYKKAYDSVPHSWLERILELYKVDTALRAFLSACMRQWTTVLRQPGGGDESPGPQDFIRIERGIFQGDSLSPLWFCLALNPLSTLLKDLELGCRLRRGGEVISHLLYMDDLKLFAPNSQDLVELLKTTEVFSNAINMEFGVDKCAVMHVQRGKVVNSTNLQLSETMSFRSISESETYKYLGMSQSLGIEEEGIRRSVKERFFSRLTKVLNSLLSGGNKVRAFNAWVMPLLTYSFGILRWTQTELDALDRRVRSLLTTHRMLHPRSSVMRLYIPRKCGGRGFLNAKDLHNREVYNLRNYFLNNECGMHRDVVAVDRNLTPLSLANENWRKPVVLSTADRKAAWESKVLHGRFYKALTGPDVDLLASVNWLRFGDLFGETEGFACAIADEVMMTNNYRKYILKDGTVDICRACRRPGESLRHIISGCSRLANGEYLHRHNLVARIIHQQLALLYGLVDREVPYYKYSPAPVLENGRATLYWDRSIITDRTIVANKPDIVLIDRSQRRTVLVDVTIPHDENLVKAEKDKSSKYLDLAHEITAMWDVDSTIIVPIVVSANGLIAKSLDQHLERLSLGGWIKGQMQKAVILDTARIVRRFLTLRP

SEQ ID NO: 6068 - protein, 856 aa, Cydia splendana
MVPRYGTDIQIIIIIIKQKVYAWANRIRRYRERVDRFQQNRLFQSDQRKMYRKWEETNPRASDSQPPDATVMNDFWRSIWSVPVGHTEGSWMSVVERECESIEPIGAVTISPDDVSCAIRTAQNWKSPGPDGLHNFWLKWFRFSHSCLAAQFQQALELGSPPPSLTTGVTFLLYKSGSTTEAKNYRPITCLPTLYKLLTSILRAKINAHIVANNILASAQNGCRVGSRGTKELLLIDMTICQQIRRNRGALSAAWIDYKKAYDSVPHSWLERVLELYKVDTALRAFLSACMRQWTTVLRQPGGGDESPGPQDFIRIERGIFQGDSVSPLWFCLALNPLSTLLKDLELGCRFRRGGEVISHLLYMDDLKLFAPNSQDLVELLKTTEVFSNAINMEFGVDKCAVMHVQRGKVVNSTNLQLSETMSFRSISESETYKYLGMSQSLGIEEEGIRRSVKERFFSRLTKVLNSLLSGGNKVRAFNAWVMPLLTYSFGILRWTQTELDALDRRVRSLLTTHRMLHPRSSVMRLYIPRKCGGRGFLNAKDLHNREVYNLRNYFLNNECGMHRDVVAVDRNLTPLSLANENWRKPVVLSTADRKAAWESKVLHGRFYKALTGPDVDLLASVNWLRFGDLFGETEGFACAIADEVMMTNNYRKYILKDGTVDICRACRRPGESLRHIISGCSHLANGEYLHRHNLVARIIHQQLALLYGLVDREVPYYKYSPAPVLENGRATLYWDRSIITDRTIVANKPDIVLIDRSQRRTVLVDVTIPHDENLVKAEKDKSSKYLDLAHEITAMWDVDSTIIVPIVVSANGLIAKSLDQHLERLSLGGWIKGQMQKAVILDTARIVRRFLTLRP

SEQ ID NO: 6069 - protein, 1209 aa, Cydia splendana
MQTRSKTRAQLASPRNARPPPPSASSVSSQSSSGDEFATAPDTSESSDECGPPPPPSRPPARRGRPPLSARLGPAGHPAPPTAPAAGGVVRRMRWSQTINENVMRAYYGATEGGTNLCAYRVRMLPLFQALEPTIDVTAQRLSDQVRVIQRQKRLDDSTLDRLRLEALSARAASTSARDPPATSPDPVPAPDQAPGAPRVDLSADEEEFAQSVGSTANEQLRRTLDEAITRYRSTPDTRPRLPRLPMNRHNLALMGALNALLEPYLRTSKDLDDTHAVMYCGAIAACRVARVKFPDSERAPRTAGGAPAWQIRIERRISSFRTLIAKLICFRGGNNRPRVMRFVNQAFVGTDIRPRDYMANVTERIDFLKQKVYAWANRIRRYRERVDRFQQNRLFQSDQRKMYRKWEETNLRASDSRPPDATVMNDFWRSIWSVPVGHTEGSWMSVVERECESIEPMGAVTISPDDVSCAIRTAQNWKSPGPDGLHNFWLKWFRCSHSYLAAQFQQALELGSLPPSLTTGVTFLLYKSGSTTEAKNYRPITCLPTLYKLLTSILRAKINAHIVANNILASAQNGCRVGSRGTKELLLIDMTICQQIRRTKGALSAAWIDYKKAYDSVPHSWLGRVLELYKVDAALRAFLSACMGQWTTVLRQPGGGDDRPGPQDFIRIERGIFQGDSLSPLWFCLALNPLSNLLKDLGLGCRLRREGEVISHLLYMDDLKLFAPNTQGLLELLKTTEVFSSAINMEFGVDKCAVMHVQRGKVVNSTNLQLSETMSFRSISESETYKYLGMSQSLGIEDEGIRRSVKERFFSRLTKVLNSLLSGGNKVRAFNAWVMPLLTYSFGILRWTQTELDALDRRVRSLLTTHRMLHPRSSVMRLYIPRKCGGRGFLNAKDLHNREVYNLRNYFLNNECGMHRDVVAVDRNLTPLSLANENWRKAVVLSTADRKAAWESKALHGRFYKALTGPDVDLLASVNWLRFGDLFGETEGFACAIADEVMMTNNYRKYILKDGTVDICRACRRPGESLRHIISGCSHLANGEYLHRHNLVARIIHQQLALLYGLVDREVPYYKYLPAPVLENGRATLYWDRSIITDRTIVANKPDIVLIDRSQRRAVLADVTIPHDENLVKAEKDKSSKYLDLAHEITAMWDVDSTIIVPIVVSANGLIAKSLDQHLERLSLGGWIKGQMQKAVILDTARIVRRFLTLRP

SEQ ID NO: 6070 - protein, 1209 aa, Cydia splendana
MQTRSKTRAQLASPRNARPPPPSASSVSSQSSSGDEFATAPDTSESSDECGPPPPPSRPPARRGRPPLSARLGPAGHPAPPTAPAAGGVVRRMRWSQTINENVMRAYYGATEGGTNLCAYRVRMLPLFQALEPTIDVTAQRLSDQVRVIQRQKRLDDSTLDRLRLEALSARAASTSARDPPATSPDPVPAPDQAPGAPRVDLSADEEEFAQSGGSTANEQLRRTLDEAITRYRSTPDTRPRLPRLPMNRHNLALMGALNALLEPYLRTSKDLDDTHAIMYCGAIAACRVARVKFPDSERAPRTAGGAPAWQIRIERRISSFRTLIAKLICFRGGNNRPRVMRFVNQAFVGTDIRPRDYMANVTERIDFLKQKVYAWANRIRRYRERVDRFQQNRLFQSDQRKMYRKWEETNLRASDSRPPDATVMNDFWRSIWSVPVGHTEGSWMSVVERECESIEPMGAVTISPDDVSCAIRTAQNWKSPGPDGLHNFWLKWFRCSHSYLAAQFQQALELGSLPPSLTTGVTFLLYKSGSTTEAKNYRPITCLPTLYKLLTSILRAKINAHIVANNILASAQNGCRVGSRGTKELLLIDMTICQQIRRTKGALSAAWIDYKKAYDSVPHSWLGRVLELYKVDAALRAFLSACMGQWTTVLRQPGGGDDRPGPQDFIRIERGIFQGDSLSPLWFCLALNPLSTLLKDLGLGCRLRREGEVISHLLYMDDLKLFAPNTQGLLELLKTTEVFSSAINMEFGVDKCAVMHVQRGKVVNSTNLQLSETMSFRSISESGTYKYLGMSQSLGIEDEGIRRSVKERFFSRLTKVLNSLLSGGNKVRAFNAWVMPLLTYSFGILRWTQTELDALDRRVRSLLTTHRMLHPRSSVMRLYIPRKCGGRGFLNAKDLHNREVYNLRNYFLNNECGMHRDVVAVDRNLTPLSLANENWRKPVVLSTADRKAAWESKALHGRFYKALTGPDVDLLASVNWLRFGDLFGETEGFACAIADEVMMTNNYRKYILKDGTVDICRACRRPGESLRHIISGCSHLANGEYLHRHNLVARIIHQQLALLYGLVDREVPYYKYLPAPVLENGRATLYWDRSIITDRTIVANKPDIVLIDRSQRRAVLADVTIPHDENLVKAEKDKSSKYLDLAHEITAMWDVDSTIIVPIVVSANGLIAKSLDQHLERLSLGGWIKGQMQKAVILDTARIVRRFLTLRP

SEQ ID NO: 6071 - protein, 1213 aa, Cydia splendana
MQRMITRSQRRAAESTNNARPPPPPAPSSSSSTSSSGDEFATAPDTDGSSDEGGPPPPPPRPPARRGRPPLPARLGPAGHPAPPTAPAAGGIVRRMRWTRDMNENVMRAYYGATEGGTQLSAYRSRILPLFQALEPTITVSEQRLSDQVRVIQRLKRLDDATLDRLRQEALSARADSTSVRDLPATSPDPVPAPDLAPAAPRVDFCTDEGDFASQNVSTTANEQLRRTLEEAITQYRATTNSRPRLPRLPMNRRNLALMGALNALLEPHLRTSKDLDDTHSIMYCGAIAACRVARVKFPDAERAPRTAGGVPAWQVRIERRISSFRTLIAKLICFREGNNRPRVMRFVNQAFAGTDIRPRDYMANVTERIDFLKQKVYAWANRIRRYRERVDRFQQNRLFQSDQRKVYRKWEETNLRTPDTQPPDVTAMTDFWRSIWSVPVGHTEGGWMSVVERECESIEPMGAVTISPDDVSCAIRTAQNWKSPGPDGLHNFWLKWFRCSHSRLAAQFQQALELGSLPPSLTTGVTFLLYKSGSTTEAKNYRPITCLPTLYKLLTSILRVKINAHIIANNILASDQNGCRVGSRGTKELLLIDMTICQQIRRHKGALSAAWIDYKKAYDSVPHSWLGRVLELYKVDAALRAFLSACMRQWTTVLRQPGGGDDRPGPQDFIRIKRGIFQGDSLSPLWFCLALNPLSTLLKDLGLGCRLRREGVVISHLLYMDDLKLFAPNSQDLLELLKTTEVFSSAIHMEFGVDKCAVMHVQRGKVVNSTNLQLSETMSFRSISESETYKYLGMSQSLGIEDEGIRRSVKERFFSRLTKVLNSLLSGGNKVRAFNAWVMPLLTYSFGILRWTQTELDALDRRVRSLLTTHRMLHPRSSVMRLYIPRKCGGRGFLNAKDLHNREVYNLRNYFLNNECGMHRDVVAVDRNLTPLSLANENWRKPVVLSTADRKAAWESKVLHGRFCKALTGPDVDLLASVNWLRFGDLFGETEGFACAIADEVMMTNNYRKYILKDGTVDICRACRRPGESLRHIISGCSHLANGEYLHRHNLVARIIHQQLALLYGLVDREVPYYKYLPAPVLENGHATLYWDRSIITDRTIVANKPDIVIIDRSQRRAVLVDITIPHDENLVKAEKDKSSKYLDLAHEITAMWDVDSTMIVPIVVSVNGLIAKSLDQHLERLSLGGWIKGQMQKAVILDTARIVRRFLSLQP

SEQ ID NO: 6072 - protein, 1208 aa, Cydia splendana
MITRSKTRSQASITTNARPPPSPVSSVSSQSSGDEFATAPDTSESSDECGPPPPPPRPPARRGRPPLPARLGPAGHLAPPTAPAAGGVVRRMRWSQTMNENVMRAYYGATEGGTDLCAYRVRMLPLFQALEPTIDVTAQRLSDQVRVIQRLKRLDDSTLDRLRLEALSARAASTSVRDPPATSPDPVPAPDQAPEAPRVDLCADEEEFAQSVSSTANEQLRRTLDEAITQYRSTPNTRPRLPRLPMNRHNLALMGALNALLEPYLRTSKDLDDTHAIMYCGAIAACRVARVKFPDSERAPRTAGGAPAWQIRIERRISSFRTLIAKLICFRGGNNRPRVMRFVNQAFAGTDIRPRDYMANITERIDFLKQKVYAWANRIRRYRERVDRFQQNRLFQSDQRKMYRKWEETNPRASDSQPPDATVMNDFWRSIWSVPVGHTEGSWMSVVERECESIEPMGAVTISPDDVSCAIRTAQNWKSPGPDGLHNFWLKWFRCSHSCLAAQFQQALELGSPPPSLTTGVTFLLYKSGSTTEAKNYRPITCLPTLYKLLTSILRAKINAHIVANNILASAQNGCRVGSRGTKELLLIDMTICQQIRRNRGALSAAWIDYKKAYDSVPHSWLERVLELYKVDTALRVFLSACMRQWTTVLRQPGGGDESPGPQDFIRIERGIFQGDSLSPLWFCLALNPLSTLLKDLELGCRLRRGGEVISHLLYMDDLKLFAPNSQDLVDLLKTTEVFSNAINMEFGVDKCAVMHVQRGKVVNSTNLQLSETMSFRSISESETYKYLGMSQSLGIEEEGIRRSVKERFFSRLTKVLNSLLSGGNKVRAFNAWVMPLLTYSFGILRWTQTELDALDRRVRSLLTTHRMLHPRSSVMRLYIPRKCGGRGFLNAKDLHNREVYNLRNYFLNNECGMHRDVVAVDRNLTPLSLANENWRKPVVLSTADRKAAWESKVLHGRFYKALTGPDVDLLASVNWLRFGDLFGETEGFACAIADEVMMTNNYRKYILKDGTVDICRACRRPGESLRHIISGCSHLANGEYLHRHNLVARIIHQQLALLYGLVDREVPYYKYSPAPVLENGRATLYWDRSIITDRTIVANKPDIVLIDRSQRRTVLVDVTIPHDENLVKAEKDKSSKYLDLAHEITAMWDVDSTIIVPIVVSANGLIAKSLDQHLERLSLGGWIKGQMQKAVILDTARIVRRFLTLRP

SEQ ID NO: 6073 - protein, 1208 aa, Cydia splendana
MITRSRAKAVTTSARPPPPPASSTSSSTSSSGDEFATAPDTDGSSDESGPPPPPPRPPARRGRPPLPARLGPAGHPAPPTAPATGGIVRRMRWTRDMNENVMRAYYGATEGGTQLSAYRSRILPLFQALEPTITVSEQRLSDQVRVIQRLKRLDDATLDRLRQEALSARADSTSVRDLPATSPDPVPAPDLAPGAPRVDFCTDEGDFASQNVSTTANEQLRRTLEEAITQYRATTNSRPRLPRLPMNRRNLALMGALNALLEPHLRTSKDLDDTHSIMYCGAIAACRVARVKFPDAERAPRTVGGVPAWQARIERRISSFRTLIAKLICFRGGNNRPRVMRFVNQAFAGTDIRPRDYMANVTERIDFLKQKVYAWANRIRRYRERVDRFQQNRLFQSDQRKVYRKWEETNLRTPDTQPPDATAMTDFWRSIWSVPVGHTEGSWMSVVERECESIEPMGAVTISPDDVSCAIRTAQNWKSPGPDGLHNFWLKWFRCSHSCLAAQFQQALELGSLPPSLTTGVTFLLYKSGSTTEAKNYRPITCLPTLYKLLTSILRAKINAHIVANNILASAQNGCRVGSRGTKELLLIDMTICQQVRRNKGALSAAWIDYKKAYDSVPHSWLGRVLELYKVDAALRVFLSACMRQWTTVLRQPGGGDDRPGPQDFIRIERGIFQGDSLSPLWFCLALNPLSTLLKDLGLGCRLRREGEVISHLLYMDDLKLFAPNSQDLLELLKITDVFSSAINMEFGVDKCAVMYVQRGRVVNSRNLQLSETMSFRSISESETYKYLGMSQSLGIEDEGIRRSVKERFFSRLTKVLNSLLSGGNKVRAFNAWVMPLLTYSFGILRWTQTELDALDRRVRSLLTAHRMLHPRSSVMRLYIPRKCGGRGFLNAKDLHNREVYNLRNYFLNNECGMHRDVVAVDRNLTPLSLANENWRKPVVLSTADRKAAWESKVLHGRFYKALTGPDVDLLASVNWLRFGDLFGETEGFACAIADEVMMTNNYRKYILKDGTVDICRACRRPGESLRHIISGCSHLANGEYLHRHNLVARIIHQQLALLYGLVDREVPYYKYLPAPVLENGRAMLYWDRSIITDRTIVANKPDIVIIDRSQRRAVLVDITIPHDENLVKAEKDKSSKYLDLAHEITAMWDVDLTIIVPIVVSVNGLIAKSLDQHLERLSLGGWIKGQMQKAVILDTARIVRRFLSLRP

SEQ ID NO: 6074 - protein, 1211 aa, Agriopis aurantiaria
MITRSKTKTAALRSAHPRPLATPSTSASSSSEDGDYLTSRDTSASSDGSGPSTPPPPLRPARRGRPALPARLGHVELPAPLSAPATGGVRRMRWTPVINENCMRAYYRATEGGTNLSAYRVRMLPLFQALEPTVTVSAQRLSDQVRAIQRCNLLDQSVLDRLRLEEVRTRPTPPSTRNPPVASSAPTLASRPASVVTLATLADPVVDEGDLASGVSDQVREQLRGALEDAISQYRFTPVSRPRLPRLPTHRRNLALMGALNALLAPYLRASKDLVDTHSILYCGAIAACRVARVKFPDTNRAPRTVGRVPAWQVRIERRISTFRTLIAKLICFRRGNNRPRVMRFVTQAFAGTDIRPQHYLANVTERIDYLKQKVYAWANRIRRYRERVDRYWQNRLFQSDQRKVYRGWEETEQRVSDGQLPDASAMINFWRGIWSVPVEHTEGDWMRVVERECESIEPMGSILIDSVDVSCAIRTAQNWKSPGPDGLHNFWIKWIRCSHDRLATQFQEALELGSLPSFMTTGVTFLLHKSGSTTEAKNYRPITCLPTIYRLLTSILRNKINAHIVANNVLAHAQNGCRVGSRGTKELLLIDTAISQQVRRNRGALSAAWIDYKKAYDSVPHSWLERVLELYKIDTTLKSFLGACMRQWTTVLRQPGSGDGASGPQDLLRIERGIFQGDSFSPLWFCLALNPLSTLLRDSGLGYRLRRDGQVISHLLYMDDLKLFTPKRQDLMELLKITEVFSSAIKMEFGVDKCAVMHVQRGKVVNSPNLQLSETMTLRSLSEVETYKYLGMSESLGISVEDIKKSVKERFFCRLTKVLNSFLSGGNKVRAFNGWVMPLLIYSFGILRWTQTELDALDRKVRQLLTSHRMLHPRSSVMRLYIPRKWGGRGFLNAKNLHNREVCSLRDFFRNSESGMHRDVVAVDSGLTPLSLANENWRKPSVLSIEDRRDVWKGKELHGRFYRALTGPDVDLLSSVNWLRFGDLFGETEGFACAIADEVIKTNNYRKYIMKDGTVDICRACHRPGESLRHIISGCSHLANGEYLHRHNQVARIIHQQLALRYGLVESEVPYYKYAPAPVLENGRALLYWDRSIITDRTIVANKPDIVLVDRSQRQAVLVDITIPHDENLVKAEKDKLSKYLDLAHEVTAMWDVDSTIIVPIVVSVNGLIAKSLDQHLKRLSLDGWVKGQMQKAVILDTARIVRRFLTLQP

SEQ ID NO: 6075 - protein, 1214 aa, Agriopis aurantiaria
MITRSKTSAAARLTNAQPPPPPASSSSPSSSSGEDEYHTTREASGSSSDTSGPGTPPPPPPARRGRPPLPARLGLVGHSATRPAPATGGVVRRMRWSPTMNENCMRAYYRATEGGTNLSAYCARMLPLFQDLEPTVTVSAQRLSDQVRAIHRCKLLDDSVLDRLRLEELRARPTPALMRDPPVASSAPTLASLPASVATLAAPADPVVDEGDLTSNSVSDQVREQLRGALEDAISQYRFAPDSRPRLPRLPTHRRNLALMGALNALLAPYLRASEDLVDTHSILYCGAIAACRVARVKFPDTNRAPRTAGGVPAWQVRIERRISTFRTLIAKLICFSRGNNRPRVMRFVTQAFAGTEIRPQHYLANVMERIDYLKQKVYAWVSRIRRYRERVNRYWQNRLFQSDQRKVYRGWEETDQRVSDGQLPDANAMINFWRGIWSVPVEHTEGDWMRVVERECESIEPMGSILIDSVDVSCAIRMAQNWKSPGPDGLHNFWIKWIRCSHDRLATQFQEALELGSLPSFMTTGVTFLLHKSGSTTEAKNYRPITCLPTIYKLLTSILRNKINAHIVANNVLAHAQNGCRVGSRGTKELLLIDTAISQQVRRNKGALSAAWIDYKKAYDSVPHSWLERVLELYKIDTTLKSFLGACMRQWTTVLRQPGGGDGTSGPQDLIRIERGIFQGDSFSPLWFCLALNPLSTLLRDSGLGYRLQRDGQVISHLLYMDDLKLFTPKRQDLVELLKITDVFSSAIRMEFGVDKCAVMHVQRGKVVNSPNLQLSEVMTLRSLSEAETYKYLGMSESLGISVENIKKSVKERFFCRLTKVLNSLLSGGNKVRAFNGWVMPLLIYSFGILRWTQTELDALDRRVRQLLTSHRMLHPRSSVMRLYIPRKWGGRGFLNAKNLHNREVCSLRDFFRNSESGMHRDVVAVDRGLTPLSLANENWRKPSVLSIEDRRDVWKGKELHGRFYRALTGPDVDLLSSVNWLRFGDLFGETEGFACAIADEVIKTNNYRKYIMKDGTVDICRACHRPGESLRHIISGCSHLANGEYLHRHNQVARIIHQQLALRYGLAESEVPYYKYAPAPVLENGRALLYWDRSIITDRTIVANKPDIVLVDRSQRRAVLVDITIPHDENLVKAEKDKLSKYLDLAHEVTAMWDVDSTIIVPIVVSLNGLIAKSLDQHLKRLSLDGWIKGQMQKAVILDTARIVRRFLTLQP

SEQ ID NO: 6076 - protein, 1212 aa, Agriopis aurantiaria
MITRSRTKQADTKSARLPSPPASSSSPSTSSGEDEYHTTREASGSSSDTSGPGTPPPPPPARRGRPPLPARLGLVGHSATRPAPATGGVVRRMRWSTIMNEDCMRAYYRATEGGTNLSAYCARMLPLFQALQPTITVSAQRLSDQVRAIHRCKLLDDSVLDRLRQEELRARPIPVSTRDLPVASSAPTLASVPASVVTLAASADPVVDEGDLASGVSDQVREQLRGALEDAISQYRFTPDSRPRLPRLSTHRRNLALMGALNALLAPYLRASEDLVDTHSILYCGAIAACRVARVKFPDTNRAPRTAGGVPAWQVRIERRISTFRTLIAKLVCFRRGNNRPRVMRFVTQAFAGTDIRPQQYLANVTERIDYLKQKVYAWANRIRRYRERVDRYWQNRLFQSDQRKVYRGWEETDQRVSDGQLPDASAMINFWRGIWSVPVEHTEGDWMRVVERECESIEPMESILIDSIDVSCAIRTAQNWKSPGPDGLHNFWIKWIRCSHDRLATQFQEALELGSLPSFMTTGVTFLLHKSGSTTEAKNYRPITCLPTIYKLLTSILRNKINAHIVANNVLAHAQNGCRVGSRGTKELLLIDTAMSQQVRRNKGALSAAWIDYKKAYDSVPHSWLERVLELYKIDTTLKSFLGACMRQWTTVLRQPGGGDGAFDPQDLLRIERGIFQGDSFSPLWFCLALNPLSTLLRDSGLGYRLRKDGQVISHLLYMDDLKLFTPKRQDLVELLKITEVFSSAIRMEFGVDKCAVMHVQRGKVVNSPNLQLSEVMTLRSLSEAETYKYLGMSESLGISVENIKKSVKERFFCRLTKVLNSLLSGGNKVRAFNGWVMPLLIYSFGILRWTQTELDALDRRVRQLLTSHRMLHPRSSVMRLYIPRKWGGRGFLNAKNLHNREVCSLRDFFRNSESGMHRDVVAVDRGLTALSLANENWRKPSVLSIEDRRDVWKGKELHGRFYRALTGPDVDLLASVNWLRFGDLFGETEGFACAIADEVIKTNNYRKYIMKDGTVDICRACHRPGESLRHIISGCSHLANGEYLHRHNLVARIIHQQLALRYSLVESEVPYYKYAPAPVLENGRALLYWDRSIITDRTIVANKPDIVLVDRSQRRAVLVDITIPHDENLVKAEKDKLSKYLDLAHEVTAMWDVDSTIIVPIVVSVNGLIAKSLDQHLKRLSLDGWVKGQMQKAVILDTARIVRRFLTLQP

SEQ ID NO: 6077 - protein, 1182 aa, Ennomos fuscantarius
MILRSKTKTADNKCARLPPLPVSSSPSSSSGDEYATPPDTTASSDDDGLPSPPPPPPPPRRGRPPLPARLGPAGQPAPRPAPATGGVVRRMRWTQTMNENCMRAYYGATEGGSSLTAYRDRMLSLFQELEPSISVSAQRLSDQVRAIHRCKLLDQSALDRLRLETLPIPATSPSPRVLSTALPDPGPIVGPPLVTPLGGPVIDGEESVSDSVSTQVNEQLRSALEDAILRYRSTPTSRPRLPRLPTNRRNLVLMGALNTLLGPYLRTSEDLVDTHSILYCGAIAVCRVARVKFPDTDRAPRSADGAPAWQVRIEKRITTFRTLIAKLVCFSRGNHRPRVMRFVTQAFAGTGIRPQNYMACVTERIDFLKQKVYAWASRIRRYRERVDRYQMNRLFQSDQRKVYRDWEGTGQRVVDGQLPDANVMNEFWRSIWSVPVDHSEGDWIRVVKHVCEPIESMGSITIDLEDISCAIRTAQNWKSPGPDGLHNFWIKWIPCSYPCLATQFQEALEAGSLPKFMTTGITFLLHKSGSTTEAKNYRPITCLPTLYKLLTSILRTKINSHITANNILAPAQNGCRVGSRGTKELLLIDTAICQQVRRNRGALSTAWIDYKKAYDSVPHSWLKRVLELYKINATLRSFLSACMGQWTTVLRQPGGGDSVSDPQNFIRIERGIFQGHSLSPLWFCLALNPLSTLLGDSGLGYRLRRGGEIISHLLYMDDLKLFAPQRPQLMKLLKITENFSNSIKMEFGVDKCAVMHVHGGKVVNSTNLQLSETMTLRSLSESETYKYLGMSESLGISVGDVKQSVKERFFCRLTKVLNSLLSGGNKARAFNAWVMPLLMYSFGILGWTQTELDALDRKVRQVLTSHRMLHPRSSVMRLYIPRKWGGRGFLNAKNLHNREMYSLREYFLSNECGMHRDVVAVDKGLTPLSLANENWRKPVVLSTDDRRDVWKGKELHGRFYRALTGPDVDLHASVNWLRFGDLFGETEGFVCAIADEVIKTNNYRKYIMKDGTVDICRACRRPGESLRHIISGCSHLANGEYLHRHNLVARIIHQQLALQYGLVESEVPYYKYTPGPVLENGRALLYWDRSIITDRTIVANKPDIVLIDRSQRRAVLVDIAIPHDENLVKAEKDKLSKYLDLAHEVTAMWSVDSTNIVPIVVSANGLIAKSLDQHLERLSLDG

SEQ ID NO: 6078 - protein, 931 aa, Hedya salicella
MYCGAIAACRVARVKFPDADRAPRTAGGVPAWQVRIERRISTFSTLIAKLICFRGGNNRPRVMRYVAQAFAGTDVSSCDYMACVTERIDFLKQKVYAWASRIRRYRERVDRFQQNRLFQSDQRKVYRKWEGTDQRVTDGRLPDPTAMSNFWRSIWSVPVEHTEGEWMNVVERECEPIEAMGAVTISPDDVSCAARTTQNWKSPGPDGLHNFWVKWFRCSHERLATQFQQALELGSLPSFLTTGVTFLLYKSGSTTEAKNYRPITCLPTLYKLLTSILRAKINTHIVANNVLAFPQNGCRVGSRGTKELLLIDTTICQQVRRSTGSLSAAWIDYKKAYDSVPHSWLERILELYKVDTALRSFLGACMRQWTTVLCQPGGRDARPAPQDFIRIKRGIFQGDSLSPLWFCLALNPLSTLLKDSGLGCRLRRGGEIISHLMYMDDLKLFPPKRPELVELLKVTDTFSSAIKMEFGVDKCAVMHVQRGKVVNSTNLELSETMSLRSLSETETYKYLGMSQALSIADGDIRQAVKERFFCRLTKELNSLLSGGNKARAFNAWVMPLLTYSFGILRWTQTELDALDRRVRMLLTTHRMLHPRSSVMRLYIPRKCGGRGFLNAKDLHNREVCSLREYFLNNECGIHRDVVAVDKGLTPLSLANENWRRPTVLSTVDRKDVWKSKELHGRFYKALTGPDVDLLASVNWLRFGDLFGETEGFSCAIADEVIMTNNYRRYILKDGTVDICRACRRPGESLRHIMSGCSHLANGEYLHRHNQVARIIHQQLAVKYDLVGSEVPYYKYVPMPVLENGRATLYWDRSILTDRTIVANKPDIVLVDRSKRRAMLVDITIPHDENLVKAEKDKLSKYLDLAHEVTAMWDVDSTIIVPIVVSVNGLIAKSLDEHLKRLSLDGWIKGQIQKAVILDTARIVRRFLSVQP

SEQ ID NO: 6079 - protein, 1215 aa, Erannis defoliaria
MITRSQSRRNTAERNARPPSPPAPSSPSASSGDDVFLTPRESSVSSSNSDVSGPRTPAPPPPARRGRPPLPARLGPAGLPASRPALAAGGVVRRMRWSQTNNENCMRAYYGATEGGTNLSAYRVRMLPLFQALEPTVTVSAQRLSDQVRAIQRLNLLDQSLLDRLRLEAQSARPTPASTRDLDVASSASTLALVPTSAATLVTSADPVVDEGDCTGMSVSTQVSEQLRRALEDAIGQYRFTPNSRPRLPRLPTHRRNLALMGALNALLAPYLRASEDLTDTHSILYCGAIAACRVARVKFPDTNRAPRPAGDVPAWQLRIERRISTFRTLIAKLICFSRGNNRPRVMRFVTQAFAGTGIRPQQYMANVTERIDYLKQKVYAWANRIRRYRERVDRYWQNRLFQSDQRKVYRNWEGNEQRVSDGQLPDASAMTNFWRGIWSVPVEHTEGDWMRVVERECESIEPMGSILIDPVDVSCAIRTAQNWKSPGPDGLHNFWIKWFRCSHDRLATQFQEALELGSLPSFMTTGVTFLLHKSGSTTEPKNYRPITCLPTIYKLLTSILSTKINAHIVANNVLAPAQNGCRVGSRGTKELLLIDMAISQQVRRNKGALSAAWIDYKKAYDSVPHSWLERILELYQIDATLKSFLGACMRQWTTVLRQPGGGNGSSDSQDLIRIERGIFQGDSLSPSWFCLALNPLSILLKDSGLGYRLRRGGEVISHLLYMDDLKLFAPKHQDLLELLKTTQVFSSAISMEFGVDKCAVMRVQRGKVVNSPDLQLSEIMTLRSLSEAETYKYLGMSESLGISVVDIKKSVKERFFCRLTKVLNSLLSGGNKARAFNGWVMPLLIYSFGILRWTQTELDALDRRVRQLLTAHRMLHPRSSVMRLYIPRKWGGRGFLNAKNLHNREVCSLRDYFLNNECGMHRDVVTVDKGLTPLSLANENWRTPSVLSTDDRKEVWKSKELHGRFYRVLSGPDVDLLASVNWLRFGDLFGETEGFACAIADEVIKTNNYRKYIMKDGTVDICRACHRPGESLRHIISGCSHLANGEYLHRHNQVARIIHQQLALQYGLVESEVPYYKYAPAPVLENGRALLYWDRSIITDRTIVANKPDIVMVDRSQRRAVLVDVTIPHDENLVKAEKDKLSKYLDLAFEITAMWDVDSTIIVPIVVSANGLIAKSLDQYLKRLSLDGWVKGQIQKAVVLDTARIVRRFLTLQP

SEQ ID NO: 6080 - protein, 1215 aa, Erannis defoliaria
MITRSKANIAAAEPNARQPSPPAPSSPSASSGDDEFLTPRESSATSSDSDVSGQRTPAPPPPVRRGRPPLPARLGPAGLSASRPALAAGGVVRRMRWSQINNENCMRAYYGATEGGTNLSAYRVRMLPLFQALEPTVTVSAQRLSDQVRAIQRLNLLDQSLLDRLRLEAQSARATPASTRDSHVASSAPTLASMPTSAATLATPADPVVDEGDCTSMSVSSQVSEQLRRALEDAICQYRFALNSRPRLPRLPTHRRNLALMGALNALLAPYLRASKDLTDTHSILYCGAIAACRVARVRFPDTNRAPRTVGDVPAWQVRIERRISTFRTFIAKLICFSRGNNRPRVMRFVTQAFSGTGLRPQQYMASVTERIDYLKQKVYAWANRIRRYRERVDRYWQNRLFQSDQRKVYRNWEGAAQRVNDGHLPDANAMTNFWRSIWSVPVEHTEDDWMRVVERECEAIEPMGPILIDPVDVSCAIRTAQNWKSPGPDGLHNFWIKWFRCSHDRLATQFQEALELGSLPSFMTTGITFLLHKSGSTTEPKNYRPITCLPTIYKLLTSILSTKINAHIIANNVLAPAQNGCRVGSRGTKELLLIDMSISQQVRRSKGALSAAWIDYKKAYDSVPHSWLERILELYQIDTTLKSFLGACMRQWTTVLRQPGGGNDSSDPQDLIRIERGIFQGDSLSPSWFCLALNPLSTLLKDSGLGYRLRRGSEVISHLLYMDDLKLFAPKHQDLLELLKTTQVFSSAIRMEFGVDKCAVMRVQRGKVVNSPDLQLSEIMTLRSLSEAETYKYLGMSESLGISVVDIKKSVKERFFCRLTKVLNSLLSGGNKARAFNGWVMPLLIYSFGILRWTQTELDALDRRVRQLLTAHRMLHPRSSVMRLYIPRKWGSRGFLNAKNLHNREVCSLRDYFLNNECGMHRDVVTVDKGLTPLSLANENWRRPSVLSTDDRKEVWKSKELHGRFYRALTGSDVDLLASVNWLRFGDLFGETEGFACAIADEVIKTNNYWKYIMKDGTVDICRACHRPGESLRHIISGCSHLANGEYLHRHNQVARIIHQQLALQYGLVESEVPYYKYAPAPVLENGRVLLYWDRSIITDRTIVANKPDIVMVDRSQRQAVLVDVTIPHDENLVKAEKDKLSKYLDLAFEITAMWDVDSTIIVPIVVSANGLIAKSLDQYLKRLSLGGWVKGQIQKAVVLDTARIVRRFLTLQP

SEQ ID NO: 6081 - protein, 1218 aa, Erannis defoliaria
MITRSKNKAKTSTAETTNARPPPLPAPSSPSASSGDDVFLTPRESSVSSSDSDVSGPRTPAPPPPARRGRPPLPARLGPAGLPASRPALAAGGVVRRMRWSQTNNENCMRAYYGATEGGTNLSAYRVRMLPLFQALEPTVTVSAQRLSDQVRAIQRLNLLDQSLLDRLRLEAQSARPTPASTRDLDVASSAPTLALVPTSAATLVTSADPVVDEGDCTGMSVSTQVSEQLRRALEDAIGQYRFTPNSRPRLPRLPTHRRNLALMGALNALLAPYLRASEDLTDTHSILYCGAIAACRVARVKFPDTNRAPRPAGDVPAWQLRIERRISTFRTLIAKLICFSRGNNRPRVMRFVTQAFAGTGIRPQQYMANVTERIDYLKQKVYAWANRIRRYRERVDRYWQNRLFQSDQRKVYRNWEGNEQRVSDGQLPDARAMTNFWRGIWSVPVEHTEGDWMRVVERECESIEPMGSILIDPVDVSCAIRTAQNWKSPGPDGLHNFWIKWFRCSHDRLATQFQEALELGSLPSFMTTGVTFLLHKSGSTTEPKNYRPITCLPTIYKLLTSILSTKINAHIVANNVLAPAQNGCRVGSRGTKELLLIDMAISQQVRRNKGALSAAWIDYKKAYDSVPHSWLERILELYQIDATLKSFLGACMRQWTTVLRQPGGGNGSSDSQDLIRIERGIFQGDSLSPSWFCLALNPLSTLLKDSGLGYRLRRGGEVISHLLYMDDLKLFAPKHQDLLELLKTTQVFSSAISMEFGVDKCAVMRVQRGKVVNSPDLQLSEIMTLRSLSEAETYKYLGMSESLGISVVDIKKSVKERFFCRLTKVLNSLLSGGNKARAFNGWVMPLLIYSFGILRWTQTELDALDRRVRQLLTAHRMLHPRSSVMRLYIPRKWGGRGFLNAKNLHNREVCSLRDYFLNNECGMHRDVVTVDKGLTPLSLANENWRTPSVLSTDDRKEVWKSKELHGRFYRVLSGPDVDLLASVNWLRFGDLFGETEGFACAIADEVIKTNNYRKYIMKDGTVDICRACHRPGESLRHIISGCSHLANGEYLHRHNQVARIIHQQLALQYGLVESEVPYYKYAPAPVLENGRALLYWDRSIITDRTIVANKPDIVMVDRSQRRAVLVDVTIPHDENLVKAEKDKLSKYLDLAFEITAMWDVDSTIIVPIVVSANGLIAKSLDQYLKRLSLDGWVKGQIQKAVVLDTARIVRRFLTLQP

SEQ ID NO: 6082 - protein, 1216 aa, Erannis defoliaria
MITRSKAIRNAAEQHSARPPSPPAPSSPSASSGEDVFVTPRESSASSSDSDVSGPRTPAPPPPARRGRLPLPARLGPAGLPASRPALAAGGVVRRMRWSQTNNENCMRAYYRATEVGTNLTAYRVRMLSLFQALEPTVTVSAQRLSDQVRAIQRLNLLDQSLLDRLRLEAQSARSTPVSTRDSHVASSAPTLASMPTSVATLATPADPVVDEGDGTGMSVTTQVSEQLRRALEDAISQYRFALNSRPRLPRLPTHRRNLALMGALNALLAPYLRASEDLTDTHSILYCGAVAACRVARVKFPDSNRAPRTAGDVPAWQARIERRISTFRTLIAKLICFSRGNNRPRVMRFVTQAFAGTGIRPQQYMASVTERIDYLKQKVYAWASRIRRYRERVDRYWQNRVFQSDQRKVYRDWEGAEQRVSDGHLPDANAMTNFWRGIWSVPVEHTEGDWMRVVERECESIEPMGSILIDPVDVSCAIRTAQNWKSPGPDGLHNFWIKWFRCSHDRLATQFQEALELGSLPSFMTTGVTFLLHKSGSTTEPKNYRPITCLPTIYKLLTSILSTKINTHIVANNVLAPAQNGCRVGSRGTKELLLIDMAISQQVRRNKGALSAAWIDYKKAYDSVPHSWLERILELYKIDTTLKSFLSACMRQWTTVLRQPGGGNDSSDPQDLIRIERGIFQGDSLSSSWFCLALNPLSTLLKDSGLGYRLRRGGEVISHLLYMDDLKLFAPKHQDLLELLKTTQVFSSAIRMEFGVDKCAVMRVQRGKVVNSPDLQLSEIMTLRSLSEAETYKYLGMSESLGISVVDIKKSVKERFFCRLTKVLNSLLSGGNKARAFNGWVMPLLIYSFGILRWTQTELDALDRRVRQLLTAHRMLHPRSSVMRLYIPRKWGGRGFLNAKNLHNREVCSLRDYFLNNECGMHRDVVTVDKGLTPLSLANENWRRPSVLSTDDRKDVWKSKELHGRFYRALSGPDVDLLASVNWLRFGDLFGETEGFACAIADEVIKTNNYRKYIMKDGTVDICRACHRSGESLRHIISGCSHLANGEYLHRHNQVARIIHQQLALQYGLVESEVPYYKYAPAPVLENGRALLYWDRSIITDRTIVANKPDIVMVDRSQRRAVLVDVTIPHDENLVKAEKDKLSKYLDLAFEITAMWDVDSTIIVPIVVSANGLIAKSLDQYLKRLSLDGWVKGQIQKAVVLDTARIVRRFLTLQP

SEQ ID NO: 6083 - protein, 955 aa, Biston betularia
MGALNALLAPYLRASEDLTDTHSILYCGAIAACRVARVKFPDTNRAPRPAGGVPAWQLRIERRISTFRTLIAKLICFSRGNNRPRVMRFVTQAFAGTGIRPQHYLASVTERIDYLKQKVYAWANRIRRYRERADRYWQNRVFQSDQRKVYRDWEGTGQRVSDRQLPDTSVMTEFWRGIWSLPVEHTEGDWMRVVERECESIESMGSVLIDPVDVSCAIRTAQNWKSPGPDGLHNFWIKWIRCSHDRLATQFQEALELGSLPCFMTTGVTFLLHKTGSTTEAKNYRPITCLPTIYKLLTSILRTKINAHVVANNVLAPAQNGCRVGSRGTKELLLIDMTISQQVRRNKGALSTAWIDYKKAYDSVPHSWLERVLELYKIDTTLKSFLGACMRQWTTVLRQPGSGDGSSEPQDLIRIERGIFQGDSLSPLWFCLALNPLSTLLKESGLGHRLQRGGEVISHLLYMDDLKLFAPKRPDLMELVKTTQVFSNAIKMEFGVDKCAVMHVQLGEVVNCPDLQLSEIMTFRSLSEAETYKYLGMSESLGIAVVDIKRSVKERFFCRLTKVLNSFLSGGNKVRAFNGWVMPLLIYSFGILRWTQTELDALDRRVRQQLTTHRMLHPRSSVMRLYIPRKLGGRGFLSAKNLHNREVCSLRDYFRDNECGMHRDVVAVDKGLTPLSLANENWRKPSVLSTEDRKEVWKSKQLHGRFYRVLTGPDVDMLASVNWLRFGDLFGETEGFACAIADEVIKTNNYRKYIMKDGTVDICRACHRPGESLRHIISGCSHLANGEYLHRHNQVARIIHQQLALQYGLVESEVPYYKYAPAPVLENGRALLYWDRSIITDRTIVANKPDIVVVDRAQRRAVLVDITIPHDENLVKAEKDKLSKYLDLAHEITAMWDVDSTIIVPIVVTVNGLIAKSLDQHLERLSLDGWVKGQLQKAVILDTARIVRRFLTLQP

SEQ ID NO: 6084 - protein, 1215 aa, Biston betularia
MWTRSRTAAASGLHDAHIPSPPAPSTPSASSGDEEFATPLATSASSSSSDVSGPRTPAPPPPARRGRPPLPARLGPAGQSASRSALAAGGVVRRMRWSQTNNENCMRAYYGATEGGINLSAYRVRMLPLFQALEPTVAVSTQRLSDQVRAIQRLQLLDQSVLDRLRLEALPARPTPVSTRDSPVASSAPTLVSVPTSMATLATPTDPVVDVGECTSMAVCSQVSEHLRRTLEDAICQYRFAPDSRPRLPRLPTHRRNLALMGALNALLAPYLRASEDLTDTHSILYCGAIAACRVARVKFPDTNRAPRPAGGVPAWQLRIERRISTFRTLIAKLICFSRGNNRPRVMRFVTQAFAGTDIRPQHYLASVTERIDYLKQKVYAWANLIRRYRERADRYWQNRVFQSDQRKVYRDWEGTGQRVSDRQLPDTSVMTEFWRGIWSLPVEHTEGDWMRVVERECESIESMGSVLIDPVDVSCAIRTAQNWKSPGPDGLHNFWIKWIRCSHDRLATQFQEALELGSLPCFMTTGVTFLLHKTGSTTEAKNYRPITCLPTIYKLLTSILRTKINAHVVANNVLAPAQNGCRVGSRGTKELLLIDMTISQQVRRNKGALSTAWIDYKKAYDSVPHSWLERVLELYKIDTTLKSFLGACMRQWTTVLRQPGSGNGSSEPQDLIRIERGIFQGDSLSPLWFCLALNPLSTLLKESGLGHRLRRGGEVISHLLYMDDLKLFAPKRPDLMELLKTTQVFSNAIKMEFGVDKCAVMHVQRGEVVNCPDLQLSETMTFRSLSEAETYKYLGMSESLGIAVVDIKRSVKERFFCRLTKVLNSFLSGGNKVRAFNGWVMPLLIYSFGILRWTQTELDALDRRVRQQLTTHRMLHPRSSVMRLYIPRKLGGRGFLSAKNLHNREVCSLRDYFRDNECGMHRDVVAVDKGLTPLSLANENWRKPSVLSTEDRKEVWKSKQLHGRFYRVLTGPDVDMLASVNWLRFGDLFGETEGFACAIADEVIKTNNYRKYIMKDGTVDICRACHRPGESLRHIISGCSHLANGEYLHRHNQVARIIHQQLALQYGLVESEVPYYKYAPAPVLENGRALLYWDRSIITDRTIVANKPDIVVVDRAQRRAVLVDITIPHDENLVKAEKDKLSKYLDLAHEITAMWDVDSTIIVPIVVTVNGLIAKSLDQHLKRLSLDGWVKGQLQKAVILDTARIVRRFLTLQP

SEQ ID NO: 6085 - protein, 869 aa, Biston betularia
MRFVTQAFAGTGIRPQHYLASVTERIDYLKQKVYAWANRIRRYRERADRYWQNRVFQSDQRKVYRDWEGTGQRVSDRQLPDTSVMTEFWRGIWSLPVEHTEGDWMRVVERECESIESMGSVLIDPVDVSCAIRTAQNWKSPGPDGLHNFWIKWIRCSHDRLATQFQEALELGSLPCFMTTGVTFLLHKTGSTTEAKNYRPITCLPTIYKLLTSILRTKINAHVVANNVLAPAQNGCRVGSRGTKELLLIDMTISQQVRRNKGALSTAWIDYKKAYDSVPHSWLERVLELYKIDTTLKSFLGACMRQWTTVLRQPGSGDGSSEPQDLIRIERGIFQGDSLSPLWFCLALNPLSTLLKESGLGHRLRRGGEVISHLLYMDDLKLFAPKRPDLMELLKTTQVFSNAIKMEFGVDKCAVMHVQRGEVVNCPDLQLSETMTFRSLSEAETYKYLGMSESLGIAVVDIKRSVKERFFCRLTKVLNSFLSGGNKVRAFNGWVMPLLIYSFGILRWTQTELDALDRRVRQQLTTHRMLHPRSSVMRLYIPRKLGGRGFLSTKNLHNREVCSLRDYFRDNECGMHRDVVAVDKGLTPLSLANENWRKPSVLSTEDRKEVWKSKQLHGRFYRVLTGPDVDMLASVNWLRFGDLFGETEGFACAIADEVIKTNNYRKYIMKDGTVDICRACHRPGESLRHIISGCSHLANGEYLHRHNQVARIIHQQLALQYGLVESEVPYYKYAPAPVLENGRALLYWDRSIITDRTIVANKPDIVVVDRAQRRAVLVDITIPHDENLVKAEKDKLSKYLDLAHEITAMWDVDSTIIVPIVVTVNGLIAKSLDQHLKRLSLDGWVKGQLQKAVILDTARIVRRFLTLQP

SEQ ID NO: 6086 - protein, 1215 aa, Biston betularia
MWTRSRTAAASGLHDAHIPSPPAPSTPSASSGDEEFATPLATSASSSSSDVSGPRTPAPPPPARRGRPPLPARLGPAGQSASRSALAAGGVVRRMRWSQTNNENCMRAYYGATEGGINLSAYRVRMLPLFQALEPTVAVSTQRLSDQVRAIQRLQLLDQSVLDRLRLEALPARPTPVSTRDSPVASSAPTLVSVPTSMATLATPTDPVVDVGECTSMGVCSQVSEHLRRTLEDAICQYRFAPDSRPRLPRLPTHRRNLALMGALNALLAPYLQASEDLTDTHSILYCGAIAACRVARVKFPDTNRAPRPAGGVPAWQLRIERRISTFRTLIAKLICFSRGNNRPRVMRFVTQAFAGTGIRPQHYLASVTERIDYLKQKVYAWANRIRRYRERADRYWQNRVFQSDQRKVYRDWEGTGQRVSDRQLPDTSVMTEFWRGIWSLPVEHTEGDWMRVVERECESIESMGSVLIDPVDVSCAIRTAQNWKSPGPDGLHNFWIKWIRCSHDRLATQFQEALELGSLPCFMTTGVTFLLHKTGSTTEAKNYRPITCLPTIYKLLTSILRTKINAHVVANNVLAPAQNGCRVGSRGTKELLLIDMTISQQVRRNKGALSTAWIDYKKAYDSVPHSWLERVLELYKIDTTLKSFLGACMRQWTTVLRQPGSGDGSSEPQDLIRIERGIFQGDSLSPLWFCLALNPLSTLLKESGLGHRLRRGGEVISHLLYMDDLKLFAPKRPDLMELLKTTQVFSNAIKMEFGVDKCAVMHVQRGEVVNCPDLQLSETMTFRSLSEAETYKYLGMSESLGIAVVDIKRSVKERFFCRLTKVLNSFLSGGNKVRAFNGWVMPLLIYSFGILRWTQTELDALDRRVRQQLTTHRMLHPRSSVMRLYIPRKLGGRGFLSTKNLHNREVCSLRDYFRDNECGMHRDVVAVDKGLTPLSLANENWRKPSVLSTEDRKEVWKSKQLHGRFYRVLTGPDVDMLASVNWLRFGDLFGETEGFACAIADEVIKTNNYRKYIMKDGTVDICRACHRPGESLRHIISGCSHLANGEYLHRHNQVARIIHQQLALQYGLVESEVPYYKYAPAPVLENGRALLYWDRSIITDRTIVANKPDIVVVDRAQRRAVLVDITIPHDENLVKAEKDKLSKYLDLAHEITAMWDVDSTIIVPIVVTVNGLIAKSLDQHLKRLSLDGWVKGQLQKAVILDTARIVRRFLTLQP

SEQ ID NO: 6087 - protein, 1215 aa, Biston betularia
MWTRSRTAAASGLHDAHIPSPPAPSTPSASSGDEEFATPLATSASSSSSDVSGPRTPAPPPPARRGRPPLPARLGPAGQSASRSALAAGGVVRRMRWSQTNNENCMRAYYGATEGGINLSAYRARMLPLFQALEPTVAVSTQRLSDQVRAIQRLQLLDQSVLDRLRLEALPARPTPVSTRDSPVASSAPTLVSVPTSMVTLATPTDPVVDAGECTSMGVCSQVSEHLRRTLEDAICQYRFAPDSRPRLPRLPTHRRNLALMGALNALLAPYLRASEDLTDTHSILYCGAIAACRVARVKFPDTNRAPRPAGNVPAWQLRIERRISTFRTLIAKLICFSRGNNRPRVMRFVTQAFAGTGIRPQHYLASVTERIDYLKQKVYAWANRIRRYRERADRYWQNRVFQSDQRKVYRDWEGTGQRVSDRQLPDTSVMTEFWRGIWSLPVEHTEGDWMRVVERECESIESMGSVLIDPVDVSCAIRTAQNWKSPGPDGLHNFWIKWIRCSHDRLATQFQEALELGSLPCFMTTGVTFLLHKTGSTTEAKNYRPITCLPTIYKLLTSILRTKINAHVVANNVLAPAQNGCRVGSRGTKELLLIDMTISQQVRRNKGALSTAWIDYKKAYDSVPHSWLERVLELYKIDTTLKSFLGACMRQWTTVLRQPGSGDGSSEPQDLIRIERGIFQGDSLSPLWFCLALNPLSTLLKESGLGHRLRRGGEVISHLLYMDDLKLFAPKRPDLMELLKTTQVFSNAIKMEFGVDKCAVMHVQRGEVVNCPDLQLSETMTFRSLSEAETYKYLGMSESLGIAVVDIKRSVKERFFCRLTKVLNSLLSGGNKVRAFNGWVMPLLIYSFGILRWTQTELDALDRRVRQQLTTHRMLHPRSSVMRLYIPRKLGGRGFLSAKNLHNREVCSLRDYFRDNECGMHRDVVAVDKGLTPLSLANENWRKPSVLSTEDRKEVWKSKQLHGRFYRVLTGPDVDMLASVNWLRFGDLFGETEGFACAIADEVIKTNNYRKYIMKDGTVDICRACHRPGESLRHIISGCSHLANGEYLHRHNQVARIIHQQLALQYGLVESEVPYYKYAPAPVLENGRALLYWDRSIITDRTIVANKPDIVVVDRAQRRAVLVDITIPHDENLVKAEKDKLSKYLDLAHEITAMWDVDSTIIVPIVVTVNGLIAKSLDQHLKRLSLDGWVKGQLQKAVILDTARIVRRFLTLQP

SEQ ID NO: 6088 - protein, 1214 aa, Biston betularia
MWTRSRTAAASGLHDAHIPSPPAPSTPSASSGDEEFATPLATSASSSSSDVSGPRTPAPPPPARRGRPPLPARLGPAGQSASRSALAAGGVVRRMRWSQTNNENCMRAYYGATEGGINLSAYRVRMLPLFQALEPTVAVSTQRLSDQVRAIQRLQLLDQSVLDRLRLEALPARPTPVSTRDSPVASSAPTLVSVPTSMATLATPTDPVVDVGECTSMGVCSQVSEHLRRTLEDAICQYRFAPDSRPRLPRLPTHRRNLALMGALNALLAPYLRASEDLTDTHSILYCGAIAACRVARVKFPDTNRAPRPAGGVPAWQLRIERRISTFRTLIAKLICFSRGNNRPRVMRFVTQAFAGTGIRPQHYLASVTERIDYLKQKVYAWANRIRRYRERADRYWQNRVFQSDQRKVYRDWEGTGQRVSDRQLPDTSVMTEFWRGIWSLPVEHTEGDWMRVVERECESIESMGSVLIDPVDVSCAIRTAQNWKSPGPDGLHNFWIKWIRCSHDRLATQFQEALELGSLPCFMTTGVTFLLHKTGSTTEAKNYRPITCLPTYKLLTSILRTKINAHVVANNVLAPAQNGCRVGSRGTKELLLIDMTISQQVRRNKGALSTAWIDYKKAYDSVPHSWLERVLELYKIDTTLKSFLGACMRQWTTVLRQPGSGDGSSEPQDLIRIERGIFQGDSLSPLWFCLALNPLSTLLKESGLGHRLRRGGEVISHLLYMDDLKLFAPKRPDLMELLKTTQVFSNAIKMEFGVDKCAVMHVQRGEVVNCPDLQLSETMTFRSLSEAETYKYLGMSESLGIAVVDIKRSVKERFFCRLTKVLNSFLSGGNKVRAFNGWVMPLLIYSFGILRWTQTELDALDRRVRQQLTTHRMLHPRSSVMRLYIPRKLGGRGFLSAKNLHNREVCSLRDYFRDNECGMHRDVVAVDKGLTPLSLANENWRKPSVLSTEDRKEVWKSKQLHGRFYRVLTGPDVDMLASVNWLRFGDLFGETEGFACAIADEVIKTNNYRKYIMKDGTVDICRACHRPGESLRHIISGCSHLANGEYLHRHNQVARIIHQQLALQYGLVESEVPYYKYAPAPVLENGRALLYWDRSIITDRTIVANKPDIVVVDRAQRRAVLVDITIPHDENLVKAEKDKLSKYLDLAHEITAMWDVDSTIIVPIVVTVNGLIAKSLDQHLKRLSLDGWVKGQLQKAVILDTARIVRRFLTLQP

SEQ ID NO: 6089 - protein, 1207 aa, Blastobasis lacticolella
MITRSKRKNQTVNAQPPPTPAPVSSSPLSSNDEFTTASDTSESSDERGLSAAPPPPPARRGRPLPARLGPTGRPAPPMAPATGSAVRRMRWTQSINENVMRAYYGATEGGTNLSAYRDRMLPLFQVLEPAIDVTAQRLSDQVRAIQRLKRLDDSVLDRLRLESLPVRAVPISTMSLPATSPPQVSPPSPAPRVPRTDATIGVEDCTNVSSISTETNEYVRRTLEETIARYRFAPNSRPRLPRLPTNRRNLALMGAINVLLDPYIRASDNLVDTHSIMYCGAITACRVARVKFSDADRAPRVAGGAPAWQKRIERRINTFRTLIAKLICFKEGNNRPRVMRFVDQAFAGTGISSRDYMACATERIDFLKQKVCAWANRIRRYRERVDRFRLNRLFQSDQRKVYRKWEGTNQSGSDGSLPDASASNNFWRSIWSVPVEHSEGDWMNVVKRECEIIEPMAAVSICPDDVSCAIDTAQNWKCPGPDGLHNFWIKWFRCSHERLATQFQEALEHGSLPTLFTTGITFLLYKSGSTTEAKNYRPITCLPTLYKLLTSILRKKINNHIIENNILAMSQNGCRVGSRGTKELLLIDMTICQQVRRSRGSLSAAWIDYKKAYDSVPHSWLRRVLELYKINATLRSFLDACMRQWITVLSQPVGGIDHSPPQDFIRIERGIFQGDSLSPLWFCLALNPLSTLLKHSELGCRLRREGEVISHLLYMDDLKLFAPKRQDLMELLKITEIFSNAIRMEFGADKCAVMHVQRGKVANTTNLQLSETMSFKSLSEAETYKYLGMSQSLGIVDEGVKQAVKERFFCRLTKVLNSLLSGGNKVRSFNAWVMPLVTYSFGILRWTQTELDALDRRVRLLLTTHRMLHPRSSVMRLYIPRKCGGRGFLSAKTLHNREVCSLRDYFLNNECGMHRAVVAVDRGLTPLSLANENWRKPKVLSTIDRKDVWKSKELHGRFYRALTGPDVDLLASVNWLRFGDLFGETEGFVCAIADEVIMTNNYRRYILKDGTVDICRACRCPGESLRHITSGCGRLANGEYLHRHNLVARIIHQQLALQYGLVESEVPYYKYVPAPVLENGLATLYWDRSVITDRTIVANRPDIVLTDRSKRRAVLVDVTIPHDGNLVKAEKDKQCKYLDLAHEVTAMWDVDTTIIVPIVVSVNGLIAKSLDQHLKSLSLDGWVKGQIQKAVLLETARIVRRFLSLQP

SEQ ID NO: 6090 - protein, 1206 aa, Notocelia uddmanniana
MITRTRSRAAQRARPPSPPAPSSSSPSSSGDEFATAPDTSESSCDERGPPSPPPRPPARRGRPPLPARLGPVGHSALPTAPAAGGAVRRMRWTQEMNENCMRAYFGATEGETNLSAYRVRMLPLFQALEPTITVTAQRLSDQVRVIQRLKRLDDATLDRLRLEALSARTASALARDPPATSPAPVPTPDMAPGVPRVGPSVDEDCANQTVSTQANEQLRRALEEAITRYRSTPNSRPRLPRLPVNRRNLALMGALNDLLDPYLRASEDLIDTHSILYCGAIAACRVARVKFPDADRAPRTAGGVPAWQVRIERRINTFRTLIAKLICFRGGNDRPRVMRFVNQAFAGTGVRPRDYVTCVTERIDFLKQKVYAWASRIRRYRERVDRYQQNRLFQSDQRKVYRKWEGTDHRVCDGQRPDATAMGNFWRSIWSVPVEHTEGAWIGVVERECESIEPMGSVTISPEDISCAIRTAPNWKSPGPDGLHNFWLKWFRCSHERLATQFQQALELGSLPHLLTTGVTSLLYKSGSTTEAKNYRPITCLPTLYKLLTSILRAKINTHIVANNILAPAQNGCRAGSRGTKELLLIDMTICQRVRRSRGALSAAWIDYKKAYDSVPHSWLRRILELYKVDAALRSFLSAYMRQWTTVLRQPGGGDGSSGPQDSIRIERGIFQGDSLSPLWFCLALNPLSTLLKDSGLGCQLRRGGEVISHLLYMDDLKLFAPNRQDLLELLKTTEVFSSAIKMEFGVDKCAVMHVQRGKVVNSTNLQLSETMSLRSLSEAETYKYLGMSQSLGIEGEGIKQAVKERFFCRLTKVLNSFLSGGNKVRAFNAWVMPLLTYSFGILRWTQTELDALDRRVRVLLTAHRMLHPRSSVMRLYIPRKCGGRGFLNAKDLHNREVCSLRDYFLNSECGMHRDVVAVDASFTPLSMANENWRRFKVLSTEDRKAEWKSRELHGRFYKALTGPDVDLLASVNWLRFGDLFGETEGFVCAIADEVIMTNNYRKYILKDGTVDICRACRRPGESLRHIISGCGHLANGEYLHRHNLVARIIHQQLALSYGLVNFEVPYYKYLPAPVLENGRATLYWDRSIITDRTIVANKPDIVLIDRSKRQAVLVDITIPHDENLVKAEKDKVSKYLDLAHEVTAMWDVDSTIIVPIVVSANGLIAKSLDQHLKRLPLDGWVKGQIQKAILLDTARIVRRFLSLSP

SEQ ID NO: 6091 - protein, 1206 aa, Notocelia uddmanniana
MNTRLRSRAEQRARLPSPPAPSSSSPSSSDDEFATAPDSSESSSDERGPSPPPPQTSARRGRRPLPARLGPTGHSAPPTAPAAGGVVRRMRWTQEMNENCMRAYFGATEGETNLSAYRVRMLPLFQALEPTITVSAQRLSDQVRVIQRNKRLDDLTLDRLRLEALSARAAPTSARDLPATSPAPVPAPNTAPRAPRVDPSADGDCADQSVSTQAHEQLRRALDEAITRYRSTPNSRPRLPRLPVNRRNLALMGALNDLLDPYLRASDDLIDTHSIMYCGAIAACRVARVKFPDADRATRTAGGVPAWQVRIERRINTFRTLIAKLICFRGGNNRPRVMRFVNQAFAGTGVRPRDYMACVTERIDFLKQKVYAWASRIRRYRERVDRYQQNRLFQSDQRKVYRKWEGTDHRVCDGQRPDATAMVNFWRSIWSVPVEHTEGAWIGVVERDCESIEPMGSVTISPEDVSCAIRTAPNWKSPGPDGLHNFWLKWFRCSHERLATQFQQALELGSLPPPLTTGVTSLLYKSGSTTEAKNYRPITCLPTLYKLLTSILRAKINTHVVTNNILAPAQNGCRVGSRGTKELLLIDMTICQRVRRNRGTLSTSWIDYKKAYDSVPHSWLRRILELYKVDAALRSFLSACMGQWTTVLRQPGGGDGPSGPQDSIRIERGIFQGDSLSPLWFCLALNPLSTLLQDSGLGCQLRRGGEVISHLLYMDDLKLFAPNRQDLLELLKTTEVFSSAIKMEFGVDKCAVMHVQRGKVVNSTNLQLSETMSLRSLSEAETYKYLGMSQALGIEGEGIKQAVKERFFCRLTKVLNSFLLGGNKARAFNAWVMPLLTYSFGILRWTQTELDALDRRVRVLLTAHRMLHPRSSVMRLYIPRKCGGRGFLNAKDLHNRGVCSLRDYFLNSECGMHRDVVAVDASFTPLSMANENWRRFKVLSAEDRKAEWKSKELHGRFYRALTGPDVDLLASVNWLRFGDLFGETEGFVCAIADEVIMTNNYRKYILKDGTVDICRACRRPGESLRHIISGCSHLANGEYLHRHNLVARIIHQQLALSYGLVDFEVPYYKYLPAPVLENGRATLYWDRSIITDRTIVANKPDIVLIDRSKRQAVLVDITIPHDENLVKAEKDKVSKYLDLAHEVTAMWDVDSTIIVPIVVSANVLIAKSLDQHLKRLSLDGWVKGQIQKAVLLDTARIVRRFLSLSP

SEQ ID NO: 6092 - protein, 1210 aa, Boloria selene
MITRSQARKTAVHTSNARPTPPPVSSFSSPSSSGDEFATAPDTSESSDDERGTPPPPPRTPARRGRPPLPARLGPTGQPAPTMAPATGGVVRRMRWTQVMNENCMRAYYGATEGGINLSAYRDRMLPLFLAFDPTIAVSAQRLSDQVRFIQRRKLLDDATLDRLRLEVLAARAASTPALGPPAASPAPVPTPNLVPGVPLADHGAGEEECASGVNTQANEQLRRALEEAIGRYRSTPESRPRIPRLPMHKRNLALMGAMDALLDPYLRASEDLTDTHSIMYCGAIAVCRAARVRFPDTDRAPRTTGGVPAWQIRIERRISSFRTLIAKLICFREGNSRPRVMRYVTQAFAGTGTRPCDYMACVTERIDYLKQKVCAWAGRIRRYRVRVDRFQQNRLFQSDQRKVYRRWEGTNQCVGDGQLPDPSAMTNFWRSIWSVPVEHTEGEWMNVVGRECESIETMGAVTISPDDVGCAARATQNWKSPGPDGLHNFWIKWFRSSHERLAAQFQHALELGSLPSFMTTGVTFLLHKSGSTTEAKNYRPITCLPTLYKLLMSILRTKINTHIIANNVLAFSQNGCRVGSRGTKELLLIDTTICQQVRRNRGSLSAAWIDYKKAYDSVPHSWLERVLVLYKIDTTLTSLLGACMRRWTTVLYQPGGGDGLPGPQDLIRIKRGIFQGDSLSPLWFCLALNPLSTLLKDSGLGCRLRRGGEVISHLLYMDDLKLYASKRQDLVELLEVTETFSSAIKMEFGVDKCAIMHVQRGKVVNSANLQLSDIISLRSISEVETYKYLGMSQSLGIADGDIRQALRQRFFCRLTKVLNSLLSGGNKARAFNAWVMPLLTYSFGILRWTQTELDALDTRVRQLLTAYRMRHPRSSVMRLYIPRKCGGRGFLNAKDLHNREVCSLREYFLNNECGIHRDVVAVDKGLTSLSLANENWRRPKVLSTDDRRTVWKCKELHGRFYKALTGPDVDLLASVNWLRFGDLFGETEGFVCAIADEVMMTNNYRRYILRDGTVDICRACRRPGESLRHIISGCSHLANGEYLHRHNQVARIIHQQLALRYGLVGSEVPYYKYAPLPVLENGRATLYWDRSIITDRTIVANKPDIVLVDRSKRQAMLVDIAIPHDENLVKAEKDKLSKYLDLAHEVTAMWDVDSTIIVPLVVSANGLIAKSLDKHLKRLSLDGWIKGRMQKAVLLDTARIVRRFLSLQP

SEQ ID NO: 6093 - protein, 1207 aa, Crocallis elinguaria
MITRSRNKAGTASARQPPPPASSSPSSSSGDEYGTPLDTNASSDEDGPPSPPPPPPPARRGRPPLPARLGPVGHSVPRAAPATGGIVRRMRWTSVMNENCMRAYYGATEGGTNMSAYRDRMLPLFQTLEPSVAVSTQRLSDQVRAIQRLKLLDVSVLDRLRLEALPIRATSASTRDLSVAPPVPAPLPAPSSVATRIDPVVDEDDCANISVSTQVNEQLRRALEDAILEYQYTPDSRPRLPRLPTNRRNLALMGALNVLLAPYLRASENLFDTHSIMYCGAIAVCRVARVKFPDADRAPRTAGSAPAWQVRIERRINTFRTLIAKLVCFSRGNNRPRVMRFVNQAFAGTGIRPQNYMAGVTERIDFLKQKIYAWVNRIRRYRERVDRYHQNRLFESDQRKVYRNWEGTDQRVSDGQMPDTNAMINFWRGIWSVPVEHTEGDWMRTVEQSCESIETMGSVTIDPIDVSCAIRTAQNWKSPGPDGLHNFWIKWIRCSHECLAVQFQEALELGSLPCFLTTGVTSLLHKSGSTTEAKNYRPITCLPTLYKLLTSILRAKINSHVVANNILAPAQNGCRVGSRGTKELLLIDTAICQQVRRNKGALSTAWIDYKKAYDSVPHSWLERILELYKIDTTLRSFLSTCMRQWTTVLRQPGSGNSPSGPENFIKIERGIFQGDSLSPLWFCLALNPLSTLLRDSRLGCKLRREGEIISHLLYMDDLKLLAPKSPDLMKLLKITEIFSSAIKMEFGVDKCAVMHVQRGKVVNSDNLQLSETMTLRSLSEAETYRYLGMSQSLGIAVGDIKQSVKERFFCRLTKVLNSLLSGGNKARAFNGWVMPLLIYSFGILKWTQTELDSLDRRVRQLLTYHRMLHPRSSVMRLYIPRKWGGRGFLNAKTLHNREVCSLREYFLNNECGMHRDVVAVDRNLTPLSLANENWRKPVVMTTEDRKDVWKGKELHGRFYRALTGSDVDLLASVNWLRFGDLFGETEGFVCAIMDEVIKTNNYRKYIMKDGTVDICRACRRPGESLRHIISGCSHLANGEYLHRHNLVARIIHQQIALQYGLVESEVPYYKYAPAPVLENGRALLYWDRSIITDRTIVANKPDIVLVDRSQRRAVLVDITVPHDENLVKAEKDKLSKYLDLAHEVTAMWNVDSTIIVPIVVSANGLVAKSLDQHLKRLSLDGWIKGRMQKAVLLDTARIVRRFLTLQP

SEQ ID NO: 6094 - protein, 997 aa, Cydia pomonella
MSTPANEQLRRTLDEAIKQYRSTTHSRPRLPRLPMNRRNLALVGALNALLEPHIRTSKDLDDTHSIMYCGAIAACRVARVKFPDAERAPRTVGGVPAWQARIERRITSFRTLIAKLTCFRGGNNRPRVMRFVYQAFAGTDIRPRDYMANVTERIDFLKQKVYAWANRIRRYRERVDRFQQNRLFQSDQRKVYRRWEETDPHVSDVRLPDATAMTDFWRSIWSVPVEHTEGEWINVVERECENIEPMGAITISPDDVSCAIRTVQNWKSPGPDGLHNFWLKWFRCSHSRLATQFQQALELGSLPPSLTTGVTFLLYKSGSTTEAKNYRPITCLPTLYKLLTSILRAKINAHIVANNILATAQNGCRVGSRGTKELLLIDMTICQQIRRNKRALSAAWIDYKKAYDSVPHSWLGRVLELYKVDTALRAFLSACMRQWTTVLRQPGGGDDHPGPQDFIRIERGIFQGDSLSPLWFCLALNPLSTLLKDSGLGCRLRREGEVVSHLLYMDDLKLFAPNSQDLLELLKTTEVFSSAINMEFGVDKCAVMHVQRGKVVNSTNLQLSEAMAFRSISESETYKYLGMSQSLGVEDEGIRQSVKERFFSRLTKVLNSLLSGGNKVRAFNAWVMPLLTYSFGILRWTQTELDALDRRVRLLLTTHRMLHPRSSVMRLYIPRKCGGRGFLNAKDLHNREVCNLRNYFLNNECGMHRDVVAVDRNLTPLSLANENWRKPVVLSTADRKAAWESKVLHGRFYKALTGPDVDLLASVNWLRFGDLFGETEGFACAIADEVMMTNNYRKYILKDGTVDICRACRRPGESLRHIISGCSHLANGEYLHRHNLVARIIHQQLALLYGLVDREVPYYKYSPAPVLENGRATLYWDRSIITDRTIVANKPDIVIIDRSQRRAVLVDITIPHDENLVKAEKDKSSKYLDLAHEITAMWDVDSTIIVPIVVSANGLIAKSLDQHLERLSLGGWIKGQMQKAVILDTARIVRRFLSLRP

SEQ ID NO: 6095 - protein, 1209 aa, Pammene fasciana
MITRSRTKAASTNARPPSSPASSVSSPSSSGDEFATAPDTSESSDECGPPPPPPRPPARRGRPPLPARLGLAGHPVPPRAPAAGGIVRRMRWTPAMNENVMRAYYGATEGGTNLSAYRDRILPLFQALEPTIDTTAQRLSDQVRAIQRLKRLDDATLDRLRLEALSAHADSTSVRDPPATSPDPMPVPDLASGAPRIDPSADEEYIASQSMSSTANEQLRRTLEEAITQYRSTNIPRPRLPRLPMNRRNLALMGALNDLLDPILRTSKDLDDTHSIMYCGPIAACRVARVKFPDAERAPRTAGGVPVWQVRIERRINSFRTLIAKLICFRGGNNRPRVMRFVHQAFAGTGIEPRDYMANVTERIDFLKQKVYAWASRIRRYRERVDRFRQNRLFQSDQRKVYRRWDEADPRVSDVRLPDATAMTDFWRSIWSAPVEHTEGEWMSVVERECESIEPMGAITISPDDVSCAIRTAQNWKSPGPDGLHNFWLKWFRCSHSRLATQFQQALELGSLPPSLTTGVTFLLYKSGSTTEAKNYRPITCLPTLYKLLTSILRAKINAHIVANNILASSQNGCRVGSRGTKELLLIDMTICQRVRRNRGALSAAWIDYKKAYDSVPHSWLERILELYKVDAALRSFLGACMRQWTTVLRQPGGGDDPPDPHDFIRIERGIFQGDSLSPLWFCLALNPLSTLLKDSGLGCRLRREGEVISHLLYMDDLKLFAPNNRDLMELLKTTEVFSSSIKMEFGVDKCAVMHVQRGKVVNSTNLQLSETMTFRSISESETYKYLGMSQSLGIEDAGIKQALKERFFGRLTKVLNSLLSGGNKVRAFNAWVMPLLTYSFGILRWTQTELDALDRRVRLLLTTHRMLHPRSSVMRLYIPRKCGGRGFLNAKNLHNREVYNLRNYFLNNECGMHRDVVAVDKSLTPLSLANENWRKPVVLSTEDRKAVWKSKELHGRFYGALAGPDVDLLASVNWLRFGDLFGETEGFACAIADEVIMTNNYRRYILKDGTVDICRACRRPGESLRHIISGCSHLANGEYLHRHNLVARIIHQQLALLYGLVDHEVPYYKYTPAPVLENGRATLYWDRSIITDRTIVANKPDIVIIDRSQRRAMLVDITVPCDVNLVKAEKDKSSKYLDLAHEVTAMWEVDSAIIVPIVVSANGLIAKSLDQHLERLSLRGCGWIKGQIQKAVILDTARIVRRFLSLRP

SEQ ID NO: 6096 - protein, 1212 aa, Pammene fasciana
MITRSKARQAQADTTNARPPPSPTPSDSSPSSSSDEAFATAADTSESSDECGLSSPSPRPPARRGRPPLPARLGLAGHPVPPKAPAAGGIVRRMRWTQKMNENCMRAYYGATEGGTNLCAYRVRLLPLFRALEPTINVTAQRLSDQVRVIQRDKRLDDSTLDRLRLEALSARAASTSARDPPATLPDPIPAPDLASGAPRVDPSADEEEIATQTVSSTANEQLRRTLEEAITQYRSTNIPRPRLPRLPMNRRNLALMGALNDLLDPILRTSKDLDDTHSIMYCGAIAACRVARVKFPDAERAPRTAGGVPAWQVRIERRINSFRTLIAKLICFRGGNNRPRVMRFVHQAFAGTGIEPRDYMANVTERIDFLKQKVYAWASRIRRYRERVDRFRQNRLFQSDQRKVYRRWEEADPRVSDARLPDATAMTDFWRSIWSAPVEHTEGEWMSVVERECESIEPMGAITISPDDVSCAIRTAQNWKSPGPDGLHNFWLKWFRCSHSRLATQFQQALELGSLPPSLTTGVTFLLYKSGSTTEAKNYRPITCLPTLYKLLTSILRAKINAHIVANNILASSQNGCRVGSRGTKELLLIDMTICQRARRNRGALSAAWIDYKKAYDSVPHSWLERILELYKVDAALRSFLGACMRQWTTVLRQPGGGDDPPDPHDFIRIERGIFQGDSLSPLWFCLALNPLSTLLKDSGLGCRLRREGEVISHLLYMDDLKLFAPYNRDLMELLKTTEVFSSSIKMEFGVDKCAVMHVQRGKVVNSTNLQLSETMTFRSISESETYKYLGMSQSLGIEDAGIKQALKERFFGRLTKVLNSLLSGGNKVRAFNAWVMPLLTYSFGILRWTQTELDALDRRVRLLLTTHRMLHPRSSVMRLYIPRKCGGRGFLNAKNLHNREVYNLRNYFLNNECGMHRDVVAVDKSLTPLSLANENWRKPVVLSTVDRKAVWKSKELHGRFYGALTGPDVDLLASVNWLRFGDLFGETEGFACAIADEVIMTNNYRRYILKDGTVDICRACRRPGESLRHIISGCSHLANGEYLHRHNLVARIIHQQLALLYGLVDHEVPYYKYTPAPVLENGRATLYWDRSIITDRTIVANKPDIVIIDRSQRRAMLVDITVPCDVNLVKAEKDKSSKYLDLAHEVTAMWEVDSAIIVPIVVSANGLIAKSLDHLERLSLRGCGWIKGQIQKAVILDTARIVRRFLSLRP

SEQ ID NO: 6097 - protein, 1077 aa, Pammene fasciana
MRWTPSMNENVMRAYYGATEGGTNLSAYRDRMLPLFQALEPTIDTTAQRLSDQVRVIQRLKRLDDVTLDRLRLEALSVRAATISARDPPATSPDPMPAPDLASGVPRVDPSADEVDIANQSVSSTANEQLRRTLEEAITQYRSTNITRPRIPRLPMNRRNLALMGALNDLLAPFLRTSKDLDDTHSIMYCGAIAACRVARVKFPDAERAPRTAGGVPAWQVRIERRINSFRTLIAKLICFRGGNNRPRVMRFVHQAFAGTGIEPRDYMANVIERIDFLKQKVYAWASRIRRYRERVDRFRQNRLFQSDQRKVYRRWEKADPRVSDERLPDATAMADFWRSIWSAPVEHTEGEWMSVVERECESIEPMGAITISPDDVSCAIRTAQNWKSPGPDGLHNFWLKWFRCSHSRLATQFQQALELGSLPPSLTTGVTFLLYKSGSTMEAKNYRPITCLPTLYKLLTSILRAKINAHMVANNILASAQNGCRVGSRGTKELLLIDMTICQRARRNRGALSAAWIDYKKAYDSVPHSWLERILELYKVDAALRSFLGACMRQWTTVLRQPGGGDDPPGPQDFIRIERGIFQGDSLSPLWFCLALNPLSTLLKDSGLGCRLRREGEVISHLLYMDDLKLFAPNNRDLLELLKTTEVFSNSIQMEFGVDKCAVMHVQRGKVVNSTNLQLSETMTFRSISESETYKYLGMSQSLGIEDAGIKQALRERFFGRLTKVLNSLLSGGNKVRAFNAWVMPLLTYSFGILRWTQTELDALDRRVRLMLTTHRMLHPRSSVMRLYIPRKCGGRGFLNAKNLHNREVYNLRNYFLNNECGMHRDVVAIDKGLTPLSLANENWRKPVVLSTEDRKAVWKSKELHGRFYGALTGPDVDLLASVNWLRFGDLFGETEGFACAIADEVIMTNNYRRYILKDGTVDICRACRRPGESLRHIISGCSHLANGEYLHRHNLVARIIHQQLALLYGLVAHEVPYYKYIPAPVLENDRATLYWDRSIITDRTIVANKPDIVVIDRPQRRAMLVDITVPCDVNLVKAEKDKSSKYSQRQRYVTPLGVKLELSFDTRIGIYHTVI

SEQ ID NO: 6098 - protein, 869 aa, Bembecia ichneumoniformis
MRFVAQAFVGTNIKSKDYLTWATERIDYFKQKVYALAKVVRRYKERVQRYQQNRLFQSDQRKVYRDWERTNQSVNVGHPPDPEVMLNFWHDIWSVSDEHTEGDWISIVEQACEPITAMEAITISPTDLSCAIRSTQNWKSPGPDGLHNFWIKMFQCSHECLAVQFQKALELGTLPTFLTTGTTFLLHKSGSTAEAKNYRPITCLPTIYKLLTSILRTKINSHILKNNILDTAQNGCKIGSRGAKELLLIDMTICQRVRRSSGALSVAWIDYKKAYDSVPHSWLRRILELYKIDTSLRSFLAMCMGQWITVLRQPGYRGSDAGLRDTIKIERGIFQGDSLSPLWFSLALNPLSTLLRNLKLGYRLRRGGEVISHLLYMDDLKLFAPKPKDLLELLKITQCFSNAIRMDFGVDKCAVMHVQKGKVVNSPNLQLSDEVSFKSLSEVETYKYLGMSQSLGISDKDIKQTVKTRFFGRLTKVLNSFLSGGNKVRAFNGWVMPLLTYSFGILRWTQTELDGLDRGVRRLLTAHRMLHPRSSIMRLYIPRKLGGRGFLNAKNLHNREVYSLREYFLNHGSGVHRDVVAIDKNFTPLSLANGNWRRLVVLSTEDRESVWKGKELHGRFYKALTGPDVDSLMSVNWLRFGDLFGETEGFVCAIADEVIKTNNYRKYILKDGTVDICRACHRPGETLRHIISGCAHLSNGEYLHRHNQVARIIHQRLAIRYGLIESEVPYYKYVPAPVLENGHATLYWDRSIITDRTIVANKPDIVVIDRSQRRTMLVDIAVPHDVNLVKAEKEKLTKYIDLAHEVTAMWDVDSTIIVPIVVSANGLIAKSLDQHLKRLSLDGWIKGQIQKAVLLDTARIVRRFLTLQP

SEQ ID NO: 6099 - protein, 955 aa, Bembecia ichneumoniformis
MGALNTLLAPYIKASRDLTDTHSILYCGAIAACRVARVKFLNFDRATRDAEGVPAWQMRIERRISKFRTLIAKLISFSRGNTRPRVMRFVAQAFVGTNIKSKDYLTWATERIDYFKQKVYALANRVRRYKERVQRYRQNRLFQSDQRKVYRDWERTNQSVNVGHPPDPEVMLNFWHDIWSVSDEHTEGDWISIVEQACEPITAMEAITISPTDLSCAIRSTQNWKSPGPDGLHNFWIKMFQCSHECLAVQFQKALELGTLPTFLTTGTTFLLHKSGSTAEAKNYRPITCLPTIYKLLTSILRTKINSHILKNNILDTAQNGCKIGSRGTKELLLIDMTICQRVRRSSGALSVAWIDYKKAYDSVPHSWLRRILELYKIDTTLRSFLAMCMGQWITVLRQPGYRGSDAGLRDTIKIERGIFQGDSLSPLWFSLALNPLSTLLRNLKLGYRLRRGGEVISHLLYMDDLKLFAPKPKDLLELLKITQCFSNAIRMDFGVDKCAVMHVQKGKVVNSPNLQLSDEVSFKSLSEVEPYKYLGMSQSLGISDKDIKQTVKTRFFGRLTKVLNSFLSGGNKVRAFNGWVMPLLTYSFGILRWTQTELDGLDRGVRRLLTAHRMLHPRSSIMRLYIPRKLGGRGFLNAKNLHNREVYSLREYFLNHGSGVHRDVVAIDKNFTPLSLANGNWRRLVVLSTEDRESVWKGKELHGRFYKALTGPDVDSLMSVNWLRFGDFFGETEGFVCAIADEVIKTNNYRKYILKDGTVDICRACHRPEETLRHIISGCAHLSNGEYLHRHNQVARIIHQRLAIRYGLIESEVPYYKYVPAPVLENGHATLYWDRSIITDRTIVANKPDIVVIDRSQRRTMLVDIAVPHDENLVKAEKEKLTKYIDLAHEVTAMWDVDSTIIVPIVVSANGLIAKSLDQHLKRLSLDGWIKGQIQKAVLLDTARIVRRFLTLQP

SEQ ID NO: 6100 - protein, 1213 aa, Cydia splendana
MQRMITRSQRRAAESTNNARPPPPPAPSSSSSTSSSGDEFATAPDTDGSSDEGGPPPPPPRPPARRGRPPLPARLGPAGHPAPPTAPAAGGIVRRMRWTRDMNENVMRAYYGATEGGTQLSAYRSRILPLFQALEPTITVSEQRLSDQVRVIQRLKRLDDATLDRLRQEALSARADSTSVRDLPATSPDPVPAPDLAPAAPRVDFCTDEGDFASQNVSTTANEQLRRTLEEAITQYRATTNSRPRLPRLPMNRRNLALMGALNALLDPHLRTSKDLDDTHSIMYCGAIAACRVARVKFPDAERAPRTAGGVPAWQVRIERRISSFRTLIAKLICFREGNNRPRVMRFVNQAFAGTDIRPRDYMANVTERIDFLKQKVYAWANRIRRYRERVDRFQQNRLFQSDQRKVYRKWEETNLRTPDTQPPDVTAMTDFWRSIWSVPVGHTEGGWMSVVERECESIEPMGAVTISPDDVSCAIRTAQNWKSPGPDGLHNFWLKWFRCSHSRLAAQFQQALELGSLPPSLTTGVTFLLYKSGSTTEAKNYRPITCLPTLYKLLTSILRAKINAHIIANNILASAQNGCRVGSRGTKELLLIDMTICQQIRRNKGALSAAWIDYKKAYDSVPHSWLGRVLELYKVDAALRAFLSACMRQWTTVLRQPGGGDDRPGPQDFIRIKRGIFQGDSLSPLWFCLALNPLSTLLKDLGLGCRLRREGVVISHLLYMDDLKLFAPNSQDLLELLKTTDVFSSAIHMEFGVDKCAVMHVQRGKVVNSTNLQLSETMSFRSISESETYKYLGMSQSLGIEDEGIRRSVKERFFSRLTKVLNSLLSGGNKVRAFNAWVMPLLTYSFGILRWTQTELDALDRRVRSLLTTHRMLHPRSSVMRLYIPRKCGGRGFLNAKDLHNREVYNLRNYFLNNECGMHRDVVAVDRNLTPLSLANENWRKPVVLSTADRRAAWESKVLHGRFYKALTGPDVDLLASVNWLRFGDLFGETEGFACAIADEVMMTNNYRKYILKDGTVDICRACRRPGESLRHIISGCSHLANGEYLHRHNLVARIIHQQLALLYGLVDREVPYYKYLPAPVLENGHATLYWDRSIITDRTIVANKPDIVIIDRSQRRAVLVDITIPHDENLVKAEKDKSSKYLDLAHEITAMWDVDSTIIVPIVVSVNGLIAKSLDQHLERLSLGGWIKGQMQKAVILDTARIVRRFLSLQP

SEQ ID NO: 6101 - protein, 1209 aa, Cydia splendana
MQTRSKTRAQLASPRNARPPPPSASSVSSQSSSGDEFATAPDTSESSDECGPPPPPSRPPARRGRPPLSARLGPAGHPAPPTAPAAGGVVRRMRWSQTINENVMRAYYGATEGGTNLCAYRVRMLPLFQALEPTIDVTAQRLSDQVRVIQRQKRLDDSTLDRLRLEALSARAASTSARDPPATSPDPVPAPDQAPGALRVDLSADEEEFAQSVGSTAHEQLRRTLDEAITRYRSTPDTRPRLPRLPMNRHNLALMGALNALLEPYLRTSKDLDDTHAIMYCGAIAACRVARVKFPDSERAPRTAGGAPAWQIRIERRISSFRTLIAKLICFRGGNNRPRVMRFVNQAFVGTDIRPRDYMANVTERIDFLKQKVYAWANRIRRYRERVDRFQQNRLFQSDQRKMYRKWEETNLRASDSRPPDATVMNDFWRSIWSVPVGHTEGSWMSVVERECESIEPMGAVTISPDDVSCAIRTAQNWKSPGPDGLHNFRLKWFRCSHSYLAAQFQQALELGSLPPSLTTGVTFLLYKSGSTTEAKNYRPITCLPTLYKLLTSILRAKINAHIVANNILASAQNGCRVGSRGTKELLLIDMTICQQIRRTKGALSAAWIDYKKAYDSVPHSWLGRVLELYKVDAALRAFLSACMGQWTTVLRQPGGGDDRPGPQDFIRIERGIFQGDSLSPLWFCLALNPLSTLLKDLGLGCRLRREGEVISHLLYMDDLKLFAPNTQGLLELLKTTEVFSSAINMDFGVDKCAVMHVQRGKVVNSTNLQLSETMSFRSISESETYKYLGMSQSLGIEDEGIRRSVKERFFSRLTKVLNSLLSGGNKVRAFNAWVMPLLTYSFGILRWTQTELDALDRRVRSLLTTHRMLHPRSSVMRLYIPRKCGGRGFLNAKDLHNREVYNLRNYFLNNECGMHRDVVAVDRNLTPLSLANENWRKPVVLSTADRKAAWESKALHGRFYKALTGPDVDLLASVNWLRFGDLFGETEGFACAIADEVMMTNNYRKYILKDGTVDICRACRRPGESLRHIISGCSHLANGEYLHRHNLVARIIHQQLALLYCLVDREVPYYKYLPAPVLENGRATLYWDRSIITDRTIVANKPDIVLIDRSQRRAVLADVTIPHDENLVKAEKDKSSKYLDLAHEITAMWDVDSTIIVPIVVSANGLIAKSLDQHLERLSLGGWIKGQMQKAVILDTARIVRRFLTLRP

SEQ ID NO: 6102 - protein, 963 aa, Cydia splendana
MNRRNLALMGALNALLEPYLRTSKDLDDTHSIMYCGAIAACRVARIKFPDAERAPRTAGGVPAWQARIERRISSFRTLIAKLICFRGGNNRPRVMRFVNQAFAGTDIRPRDYMANVTERIDFLKQKVYAWANRIRRYRERVDRFQQNRLFQSDQRKVYRRWEETNLRTPDTQPPDATAMTNFWRSIWSVPVGHTEGSWMSVVERECESIEPMGAVTISPDDVSCAIRTAQNWKSPGPDGLHNFWLKWFRCSHSRLAAQFQQALELGSLPPSLTTGVTFLLYKSGSTTEAKNYRPITCLPTLYKLLTSILRAKINAHIVANNILASAQNGCRVGSRGAKELLLIDMTICQQIWRNRGALSAAWIDYKKAYDSVPHSWLGRVLELYKVDAALRAFLSACMRQWTTVLRQPGGRDDRPGPQDSIRIERGIFQGDSLSPLWFCLALNPLSTLLKDLGLGCRLRREGEVISHLLYMDDLKLFAPNSQDLLELLKTTEVFSSAIHMEFGVDKCAVMHVQRGRVVNSTNLQLSETMSFRSISESETYKYLGMSQSLGIEDEGIRRSVKERFFSRLTKVLNSLLSGGNKVRAFNAWVMPLLTYSFGILRWTQTELDALDRRVRSLLTTHRMLHPRSSVMRLYIPRKCGGRGFLNAKDLHNREVYNLRNYFLNNECGMHRDVVAVDRNLTPLSLANENWRKPVVLSTADRKAAWESKVLHGRFYKALTGPDVDLLASVNWLRFGDLFGETEGFACAIADEVMMTNNYRKYILKDGTVDICRAYRRPGESLRHIISGCSHLANGEYLHRHNLVARIIHQQLALLYGLVDREVPYYKYLPAPVLENNHATLYWDRSIITDRTIVANKPDIVIIDRSQRRAVLVDITIPHDEKLVKAEKDKSSKYLDLAHEITAMWDVDSTIIVPIVVSVNGLIAKSLDQHLERLSLGGWIKGQMQKAVILDTARIVRRFLSLQP

SEQ ID NO: 6103 - protein, 869 aa, Cydia splendana
MRFVNQAFAGTDIRPRDYMANVTERIDFLKQKVYAWANRIRRYRERVDRFQQNRLFQSDQRKVYRKWEEANLRAPDTQPPDATAMTDFWRSIWSVPVGHTEGGWMSVVERECESIEPMGAVTISPDDVSCAIRTAQNWKSPGPDGLHNFWLKWFRCSHSRLAVQFQQALELGSLPPSLTTGVTFLLYKSGSTTEAKNYRPITCLPTLYKLLTSILRAKINAHIVANNILASAQNGCRVGSRGTKELLLIDMTICQQIRRNKRALSAAWIDYKKAYDSVPHSWLGRVLELYKVDAALRAFLSACMRQWTTVLRQPGGGGDRSGPQDFIRIERGIFQGDSLSPLWFCLALNPLSTLLKDLGLGCRLRREGEVISHLLYMDDLKLFAPNSQDLLELLKTTEVFSSAIHMEFGVDKCAVMHVQRGRVVNSTNLQLSETMSFRSISESETYKYLGMSQSLGIEDEGIRRSVKERFFSRLTKVLNSLLSGGNKVRAFNAWVMPLLTYSFGILRWTQTELDALDRRVRSLLTAHRMLHPRSSVMRLYIPRKCGGRGFLNAKDLHNHEVYNLRNYFLNNECGMHRDVVAVDRNLTPLSLANENWRKPVVLSTADRRAAWESKVLHGRFYKALTGPDVDLLASVNWLRFGDLFGETEGFACAIADEVMMTNNYRKYILKDGTVDICRACRRPGESLRHIISGCSHLANGEYLHRHNLVARIIHQQLALLYDLVDREVPYYKYLPAPVLENGRATLYWDRSIITDRTIVANKPDIVIIDRSQRRAVLVDITIPHDENLVKAEKDKSSKYLDLAHEITAMWDVDSTIIVPIVVSVNGLIAKSLDQHLERLSLGGWIKGQMQKAVILDTARIVRRFLSLQP

SEQ ID NO: 6104 - protein, 869 aa, Cydia splendana
MRFVNQAFAGTDIGPRDYMANVTERIDFLKQKVYAWANRIRRYRERVDRFQQNRLFQSDQRKVYRRWEEANLRTPDTQPPDATATTDFWRSIWSVPAGHTEGSWMSVVEHECESIEPMGAVIISPDDVSCAIRTAQNWKSPGPDGLHNFWLKWFRCSHSRLAAQFQQALELGSLPSSLTTGVTFLLYKSGSTTEAKNYRPITCLPTLYKLLTSILRAKINAHIVANNILASAQNGCRVGSRGTKELLLIDMTICQQIRRNRGALSAAWIDYKKAYDSVPHSWLGRVLELYKVDAALRAFLSTCMRQWTTVLRQPGGGDDRPGPQDFIRIERGIFQGDSLSPLWFCLALNPLSTLLKDLGLGCRLQREGEVISHLLYMDDLKLFAPNSQDLLELLKTTEVFSNAINMEFGIDKCAVMHVQRGRVVNSTNLQLSETMSFRSISESETYKYLGMSQSLGIEDEGIRRSVKERFFSRLTKVLNSLLSGGNKVRAFNAWVMPLLTYSFGILRWTQTELDALDRRVRSLFTTHRMLHPRSSVMRLYIPRKCGGRGFLNAKDLHNREVYNLRNYFLNNECGMHRDVVAVDRNLTPLSLANENWRKPVVLSTADRKAAWESKVLHGRFYKALTGPDVDLLASVNWLRFGDLFGETEGFACAIADKVMMTNNYRKYILKDGTVDICRACRRPGESLRHIISGCSHLANGEYLHRHNLVARIIHQQLALLYGLVDREVPYYKYLPAPVLENGRATLYWDRSIITDRTIVANKPDIVIIDRSQRRAVLVDITIPHDENLVKAEKDKSSKYLDLAHEITAMWDVDSTIIVPIVVSVNGLIAKSLDQHLERLSLGGWIKGQMQKAVILDTARIVRRFLSLQP

SEQ ID NO: 6105 - protein, 1210 aa, Cydia splendana
MITRSQRRAAELTNNARPPPPPAPSSSSSTTSSGDEFATAPDTDGSSDESGPPPPPPRPPARRGRPPLPARLGPAGHPAPPTAPAAGGIVRRMRWTRNMNENVMRAYYGATEGGTQLSAYRSRILPLFQALEPTITVSEQRLSDQVRVIQRLKRLDDATLDRLRQEALSARADSTSVRDLPATSPDPVPAPDLAPGAPRVDFYTDEGDFASQNVSTTANEQLRRTLEEAITQYRVTTNSRPRLPRLPMNRRNLALMGALNALLEPHLRTSKDLDDTHSIMYCGAIAACRVARVKFPDTERAPRTVGGVPAWQARIERRIGSFRTLIAKLICFRGGNNRPRVMRFVNQAFAGTDIRPRDYMANVTERIDFLKQKVYAWANRIRRYRERVDRFQQNRLFQSDQRKVYRKWEEANLRAPDTQPPDATAMTDFWRSIWSVPVGHTEGGWMSVVERECESIEPMGAVTISPDDVSCAIRTAQNWKSPGPDGLHNFWLKWFRCSHSRLAVQFQQALELGSLPPSLTTGVTFLLYKSGSTTEAKNYRPITCLPTIYKLLTSILRAKINAHIVANNILASAQNGCRVGSRGTKELLLIDMTICQQIRRNKGALSAAWIDYKKAYDSVPHSWLGRVLELYKVDAALRAFLSACMRQWTTVLRQPGGGDDRSGPQDFIRIERGIFQGDSLSPLWFCLALNPLSTLLKDLGLGCRLRREGEVISHLLYMDDLKLFAPNSQDLLELLKTTEVFSSAIHMEFGVDKCAVMHVQRGRVVNSTNLQLSETMSFRSISESETYKYLGMSQSLGIDDEGIRRSVKERFFSRLTKVLNSLLSGGNKVRAFNAWVMPLLTYSFGILRWTQTELDALDRRVRSLLTAHRMLHPRSSVMRLYIPRKCGGRGFLNAKDLHNHEVYNLRNYFLNNECGMHRDVVAVDRNLTPLSLANENWRKPVVLSTADRKAAWESKVLHGRFYKALTGPDVDLLASVTWLRFGDLFGETEGFACAIADEVMMTNNYRKYILKDGTVDICRACRRPGESLRHIISGCSHLANGEYLHRHNLVARIIHQQLALLYDLVDREVPYYKYLPAPVLENGRATLYWDRSIITDRTIVANKPDIVIIDRSQRRAVLVDITIPHDENLVKAEKDKSSKYLDLAHEITAMWDVDSTIIVPIVVSVNGLIAKSLDQHLERLSLGGWIKGQMQKAVILDTARIVRRFLSLQP

SEQ ID NO: 6106 - protein, 1133 aa, Cydia splendana
MTHSKNKFYTNNKHKISYKKHKNKNNMRAYYGATEGGTQLSAYRSRILPLFQALEPTITVSEQRLSDQVRVIQRLKRLDDATLDRLRQEALSARADSTSVRDLPATSPDPVPAPDLAPAAPRVDFCTDEGDFASQNVSTIANEQLRRTLEEAITQYRATTNSRPRLPRLPMNRRNLALMGALNALLEPHLRTSKDLDDTHSIMYCGAIAACRVARVKFPDAERAPRTAGGVPAWQVRIERRISSFRTLIAKLICFREGNNRPRVMRFVNQAFAGTDIRPRDYMANVTERIDFLKQKVYAWANRIRRYRERVDRFQQNRLFQSDQRKVYRKWEETNLRTPDTQPPDVTAMTDFWRSIWSVPVGHTEGSWMSVVERECESIEPMGAVTISPDDVSCAIRTAQNWKSPGPDGLHNFWLKWFRCSHSRLAAQFQQALELGSLPPSLTTGVTFLLYKSGSTTEAKNYRPITCLPTLYKLLTSILRAKINAHIIANNILAFAQNGCRVGSRGTKELLLIDMTICQQIRRNKGALSAAWIDYKKAYDSVPHSWLGRVLELYKVDAALRAFLSACMRQWTTVLRQPGGGDDRPGPQDFIRIKRGIFQGDSLSPLWFCLALNPLSTLLKDLGLGCRLRREGVVISHLLYMDDLKLFAPNSQDLLELLKTTEVFSSAIHMEFGVDKCAVMHVQRGKVVNSTNLQLSETMSFRSISESETYKYLGMSQSLGIEDEGIRRSVKERFFSRLTKVLNSLLSGGNKVRAFNAWVMPLLTYSFGILRWTQTELDALDRRVRLLLTTHRMLHPRSSVMRLYIPRKCGGRGFLNAKDLHNREVYNLRNYFLNNECGMHRDVVAVDRNLTPLSLANENWRKPVVLSTADRKAAWESKVLHGRFYKALTGPDVDLLASVNWLRFGDLFGETEGFACAIADEVMMTNNYRKYILKDGTVDICRACRRPGESLRHIISGCSHLANGEYLHRHNLVARIIHQQLALLYGLVDREVPYYKYLPAPVLENGHATLYWDRSIITDRTIVANKPDIVIIDRSQRRAVLVDITIPHDENLVKAEKDKSSKYLDLAHEITAMWDVDSTIIVPIVVSVNGLIAKSLDQHLERLSLGGWIKGQMQKAVILDTARIVRRFLSLQP

SEQ ID NO: 6107 - protein, 1213 aa, Cydia splendana
MQRMITRSQRRAAESTNNARPPPPPAPSSSSSTSSSGDEFATAPDTDGSSDEGGPPPPPPRPPARRGRPPLPARLGPAGHPAPPTAPAAGGIVRRMRWTRDMNENVMRAYYGATEGGTQLSAYRSRILPLFQALEPTITVSEQRLSDQVRVIQRLKRLDDATLDRLRQEALSARADSTSVRDLPATSPDPVPAPDLAPAAPRVDFCTDEGDFASQNVSTTANEQLRRTLEEAITQYRATTNSRPRLPRLPMNRRNLALMGALNALLEPHLRTSKDLDDTHSIMYCGAIAACRVARVKFPDAERAPRTAGGVPAWQVRIERRISSFRTLIAKLICFREGNNRPRVMRFVNQAFAGTDIRPRDYMANVTERIDFLKQKVYAWANRIRRYRERVDRFQQNRLFQSDQRKVYRKWEETNLRTPDTQPPDVTAMTDFWRSIWSVPVGHTEGSWMSVVERECESIEPMGAVTISPDDVSCAIRTAQNWKSPGPDGLHNFWLKWFRCSHSRLAAQFQQALELGSLPPSLTTGVTFLLYKSGSTTEAKNYRPITCLPTLYKLLTSILRAKINAHIIANNILAFAQNGCRVGSRGTKELLLIDMTICQQIRRNKGALSAAWIDYKKAYDSVPHSWLGRVLELYKVDAALRAFLSACMRQWTTVLRQPGGGDDRPGPQDFIRIKRGIFQGDSLSPLWFCLALNPLSTLLKDLGLGCRLRREGVVISHLLYMDDLKLFAPNSQDLLELLKTTEVFSSAIHMEFGVDKCAVMHVQRGKVVNSTNLQLSETMSFRSISESETYKYLGMSQSLGIEDEGIRRSVKERFFSRLTKVLNSLLSGGNKVRAFNAWVMPLLTYSFGILRWTQTELDALDRRVRSLLTTHRMLHPRSSVMRLYIPRKCGGRGFLNAKDLHNREVYNLRNYFLNNECGMHRDVVAVDRNLTPLSLANENWRKPVVLSTADRKAAWESKVLHGRFYKALTGPDVDLLASVNWLRFGDLFGETEGFACAIADEVMMTNNYRKYILKDGTVDICRACRRPGESLRHIISGCSHLANGEYLHRHNLVARIIHQQLALLYGLVDREVPYYKYLPAPVLENGHATLYWDRSIITDRTIVANKPDIVIIDRSQRRAVLVDITIPHDENLVKAEKDKSSKYLDLAHEITAMWDVDSTIIVPIVVSVNGLIAKSLDQHLERLSLGGWIKGQMQKAVILDTARIVRRFLSLQP

SEQ ID NO: 6108 - protein, 1056 aa, Cydia splendana
MTRHLIGFAWRLSLLAQLLPRRGIRPPRRRIRCRHPTPDQAPGAPRVDLSADEEEFAQSVGSTANEQLRRTLDEAITRYRSTPDTRPRLPRLPMNRHNLALMGALNALLEPYLRTSKDLDDTHAIMYCGAIAACRVARVKFPDSERAPRTAGGAPAWQIRIERRISSFRTLIAKLICFRGGNNRPRVMRFVNQAFVGTDIRPRDYMANVTERIDFLKQKVYAWANRIRRYRERVDRFQQNRLFQSDQRKMYRKWEETNLRASDSRPPDATVMNDFWRSIWSVPVGHTEGSWMSVVERECESIEPMGAVTISPDDVSCAIRTAQNWKSPGPDGLHNFWLKWFRCSHSYLAAQFQQALELGSLPPSLTTGVTFLLYKSGSTTEAKNYRPITCLPTLYKLLTSILRAKINAHIVANNILASAQNGCRVGSRGTKELLLIDMTICQQIRRTRGALSAAWIDYKKAYDSVPHSWLGRVLELYKVDAALRAFLSACMGQWTTVLRQPGGGDDRPGPQDFIRIERGIFQGDSLSPLWFCLALNPLSTLLKDLGLGCRLRREGEVISHLLYMDDLKLFAPNTQGLLELLKTTEVFSSAINMEFGVDKCAVMHVQRGKVVNSTNLQLSETMSFRSISESETYKYLGMSQSLGIEDEGIRRSVKERFFSRLTKVLNSLLSGGNKVRAFNAWVMPLLTYSFGILRWTQTELDALDRRVRSLLTTHRMLHPRSSVMRLYIPRKCGGRGFLNAKDLHNREVYNLRNYFLNNECGMHRDVVAVDRNLTPLSLANENWRKPVVLSTADRKAAWESKALHGRFYKALTGPDVDLLASVNWLRFGDLFGETEGFACAIADEVMMTNNYRKYILKDGTVDICRACRRPGESLRHIISGCSHLANGEYLHRHNLVARIIHQQLALLYGLVDREVPYYKYLPAPVLENGRATLYWDRSIITDRTIVANKPDIVLIDRSQRRAVLADVTIPHDENLVKAEKDKSSKYLDLAHEITAMWDVDSTIIVPIVVSANGLIAKSLDQHLERLSLGGWIKGQMQKAVILDTARIVRRFLTLRP

SEQ ID NO: 6109 - protein, 1168 aa, Agriopis aurantiaria
MITRSKTSAAARLTNAQPPPPPASSSSPSSSSGEDEYHTTREASGSSSDTSGPGTPPPPPPARRGRPPLPARLGLVGHSATRPAPATGGVVRRMRWSPTMNENCMRAYYRATEGGTNLSAYCARMLPLFQDLEPTVTVSAQRLSDQVRAIHRCKLLDDSVLDRLRLEELRARPTPALMRDPPVASSAPTLASLPASVATLAAPTDPVVDEGDLTSNSVSDQVREQLRGALEDAISQYRFAPDSRPRLPRLPTHRRNLALMGALNALLAPYLRASEDLVDTHSILYCSAIAACRVARVKFPDTNRAPRTAGGVPAWQVRIERRISTFRTLIAKLICFSRGNNRPRVMRFVTQAFVGTEIRPQHYLANIMERIDYLKQKVYAWVSRIRQYRERVNRYWQNRLFQSDQRKVYRGWEETDQRVSDEQLPDANAMIHFWRGIWSVPVEHTEGDWMRVVERECESIEPMGSILIDSVDVSCAIRTAQNWKSPGPDGLHNFWIKWIRCSHDRLATQFQEALELGSLPSFMTTGVTFLLHKSGSTMEAKNYRPITCLPTIYKLLTSILRNKINAHIVANNVLAHAQNGCRVGSRGTKELLLIDTAISQQVRRNKGALSAAWIDYKKAYDSVPHSWLERVLELYKIDTTLKSFLGACMRQWTTVLRQPGGGDGTSGPQDLIRIERGIFQGDSFSPLWFCLALNPLSTLLRDSGLGYRLRRDGQVISHLLYMDDLKLFTPKRQDLVELLKITEVFSSAIRMEFGVDKCAVMHVQRGKVVNSPNLQLSEVMTLRSLSEAETYKYLGMSESLGISVENIKKSVKERFFCRLTKVLNSLLSGGNKVRAFNGWVMPLLIYSFGILRWTQTELDALDRRVRQLLTSHRMLHPRSSVMRLYIPRKWGGRGFLNAKNLHNREVCSLRDFFRNSESGMHRDVVAVDRGLTPLSLANENWRKPSVLSIEDRRDVWKGKELHGRFYRALTGPDVDLLSSVNWLRFGDLFGETEGFACAIADEVIKTNNYRKYIMKDGTVDICRACHRPGESLRHIISDCSHLANGEYLHRHNQVARIIHQQLALRYGLVESEVPYYKYAPAPVLENGRALLYWDRSIITDRTIVANKPDIVLVDRSQRRAVLVDITIPHDENLVKAEKDKLSKYLDLAHEVTAMWDVDSTIIVPVNKQ

SEQ ID NO: 6110 - protein, 1211 aa, Agriopis aurantiaria
MITRSKTKTAALRSAHPRPLATPSTSASSSSEDGDYLTSRDTSASSDGSGPSTPPPPLRPARRGRPALPARLGHVELPAPLSAPATGGVRRMRWTPVINENCMRAYYRATEGGTNLSAYRVRMLPLFQALEPTVTVSAQRLSDQVRAIQRCNLLDQSVLDRLRLEEVRTRPTPPSTRNPPVASSAPTLASRPASVVTLATLADPVVDEGDLVSGVSDQVREQLRGALEDAISQYRFTPVSRPRLPRLPTHRRNLALMGALNALLAPYLRASKDLVDTHSILYCGAIAACRVARVKFPDTNRAPRTVGRVPAWQVRIERRISTFRTLIAKLICFRRGNNRPRVMRFVTQAFAGTDIRPQHYLANVTERIDYLKQKVYAWANRIRRYRERVDRYWQNRLFQSDQRKVYRGWEETEQRVSDGQLPDASAMINFWRGIWSVPVEHTEGDWMRVVERECESIEPMGSILIDSVDVSCAIRTAQNWKSPGPDGLHNFWIKWIRCSHDRLATQFQEALELGSLPSFMTTGVTFLLHKSGSTTEAKNYRPITCLPTIYKLLTSILRNKINAHIVANNVLAHAQNGCRVGSRGTKELLLIDTAISQQVRRNRGALSAAWIDYKKAYDSVPHSWLERVLELYKINTTLKSFLGACMRQWTTVLRQPGSGDGASGPQDLLRIERGIFQGDSFSPLWFCLALNPLSTLLRDSGLGYRLRRDGQVISHLLYMDDLKLFTPKRQDLMELLKITEVFSSAIKMEFGVDKCAVMHVQRGKVVNSPNLQLSETMTLRSLSEVETYKYLGMSESLGISVEDIKKSVKERFFCRLTKVLNSFLSGGNKVRAFNGWVMPLLIYSFGILRWTQTELDALDRRVRQLLTSHRMLHPRSSVMRLYIPRKWGGRGFLNAKNLHNREVCSLRDFFRNSESGMHRDVVAVDRGLTPLSLANENWRKPSVLSIEDRRDVWKGKELHGRFYRALTGPDVDLLSSVNWLRFGDLFGETEGFACAIADEVIKTNNYRKYIMKDGTVDICRACHRPGESLRHIISGCSHLANGEYLHRHNQVARIIHQQLALRYGLVESEVPYYKYAPAPVLENGRALLYWDRSIITDRTIVANKPDIVLVDRSQRRAVLVDITIPHDENLVKAEKDKLSKYLDLAHEVTAMWNVDSTIIVPIVVSVNGLIAKSLDQHLKRLSLDGWVKGQMQKAVILDTARIVRRFLTLQP

SEQ ID NO: 6111 - protein, 1212 aa, Agriopis aurantiaria
MITRSRTKQADTKSARLPPPPASSSSPSTSSGEDEYHTTREASGSSSDTSGPGTPPPPPPARRGRPPLPARLGLVGHSATRPVPATGGVVRRMRWSTIMNEDCMRAYYRATEGGTNLSAYCARMLPLFQALQPTITVSAQRLSDQVRAIHRCKLLDDSVLDRLRQEELRARPIPVSTRDPPVASSAPTLASLPASVVTLAALADPVVDEGDLASGVSDQVREQLRGALEDAISQYRFTPDSRPRLPRLPTHRRNLALMGALNALLAPYLRASEDLVDTHSILYCGAIAACRVARVKFPDTNRAPRTAGGVPAWQVRIERRINTFRTLIAKLVCFRRGNNRPRVMRFVTQAFAGTDIRPQHYLANVTERIDYLKQKVYAWANRIRRYRERVDRYWQNRLFQSDQRKVYRGWEETDQRVSDGRLPDASAMINFWRGIWSVPVEHTEGDWMRVVERECESIEPMGSILIDSVDVSCAIRTAQNWKSPGPDGLHNFWIKWVRCSHDRLASQFQKALELGSLPSFMTTGVTFLLHKSGSTTEAKNYRPITCLPTIYKLLTSILRNKINAHIVANNVLAHAQNGCRVGSRGTKELLLIDTAISQQVRRNRGALSAAWIDYKKAYDSVPHSWLERVLELYKIDTTLKSFLGACMRQWTTVLRQPGGGNGTSGPQDLLRIERGIFQGDSFSPLWFCLALNPLSTLLRDSGLGYRLRGDGQVISHLLYMDDLKLFTPKRQDLVELLKITDVFSSAIRMEFGVDKCAVMHVQRGKVVNSPNLQLSEVMTLRSLSEAETYKYLGMSESLGISVENIKKSVKERFFCRLTKVLNSLLSGGNKVRAFNGWVMPLLIYSFGILRWTQTELDALDRRVRQLLTSHRMLHPRSSVMRLYIPRKWGGRGFLNAKNLHNREVCSLRDFFRNSESGMHRDVVAVDRGLTPLSLANENWRKPSVLSIEDRRDVWKGKELHGRFYRALTGPDVDLLSSVNWLRFGDLFGETEGFACAIADEVIKTNNYRKYIMKDGTVDICRACHRPGESLRHIISGCSHLANGEYLHRHNQVARIIHQQLALRYGLVESEVPYYKYSPAPVLENGRALLYWDRSIITDRTIVANKPDIVLVDRSQRRAVLVDITIPHDENLVKAEKDKLSKYLDLAHEVTAMWDVDSTIIVPIVVSVNGLIAKSLDQHLKRLSLDGWVKGQMQKAVILDTARIVRRFLTLQP

SEQ ID NO: 6112 - protein, 1215 aa, Hedya salicella
MQRYFTRSQNTRKISTAATPTHARLTPPPASSCSPSASSDDFATAPDTSESSDDECGPPPPPPRPPARRGRPPLPARLGPAGQSAPPTAPATGGIVRRMRWSQANNENVMRAYYGATEGGTHLSAYRDRMLLLFQTFEPAIAASAQRLSDQVRDIQRRKLLDDATLDRLRLEVLAARAASTSSRNPPATSPVPAPALDLMPGAPRVDPDSDEGHCVSIVSTQANEQLRRTLEETIERYRFAPDSRPRLPRLPANKRNLALVGALNALLDPYLRASEDLADTHSIMNCGAIAACRVARVKFPDADRAQRTAGGVPAWQVRIERRISTFRTLIAKLICFRGGNNRPRVMRYVAQAFAGTDVSSCDYMACVTERIDFLKQKVYAWASRIRRYRERVDRFQQNRLFQSDQRKVYRKWEGTDQRVTDGRLPDPTAMSNFWRSIWSVPVEHTEGEWMNVVERECEPIEAMGAVTISPDDVSCAARTTQNWKSPGPDGLHNFWVKWFRCSHERLATQFQQALELGSLPSFLTTGVTFLLYKSGSTTEAKNYRPITCLPTLYKLLTSILRAKINTHIVANNVLAFSQNGCRVGSRGTKELLLIDTTICQQVRRSRGSLSAAWIDYKKAYDSVPHSWLERILELYKVDTALRSFLGACMRQWTTVLCQPGGRDARPAPQDFIRIKRGIFQGDSLSPLWFCLALNPLSTLLKDSGLGCRLRRGGEIISHLMYMDDLKLFAPKRPELVELLKVTDTFSSAIKMEFGVDKCAVMHVQRGKVVNSTNLELSETMSLRSLSETETYKYLGMSQALSIADGDIRQAVKERFFCRLTKVLNSLLSGGNKARAFNAWVMPLLTYSFGILRWTQTELDALDRRVRMLLTTHRMLHPRSSVMRLYIPRKCGGRGFLNAKDLHNREVCSLREYFLNNECGIHRDVVAVDKGLTPLSLANENWRRPTVLSTVDRKDVWKSKELHGRFYKALTGPDVDLLASVNWLRFGDLFGETEGFSCAITDEVIMTNNYRRYILKDGTVDICRACRRPGESLRHIMSGCSYLANGEYLHRHNQVARIIHQQLAVKYDLVGSEVPYYKYVPMPVLENGRATLYWDRSILTDRTIVANKPDIVLVDRSKRRAMLVDITIPHDENLVKAEKDKLSKYLDLAHEVTAMWDVDSTIIVPIVVSVNGLIAKSLDEHLKRLSLDGWIKGQIQKAVILDTARIVRRFLSVQP

SEQ ID NO: 6113 - protein, 1215 aa, Erannis defoliaria
MITRSQSRRNTAERNARPPSPPAPSSPSASSGDDVFLTPRESSVSSSNSDVSGPRTPAPPPPARRGRPPLPARLGPAGLPASRPALAAGGVVRRMRWSQTNNENCMRAYYGATEGGTNLSAYRVRMLPLFQALEPTVTVSAQRLSDQVRAIQRLNLLDQSLLDRLRLEAQSARPTPASTRDLDVASSAPTLALVPTSAATLVTSADPVVDEGDCTGMSVSTQMSEQLRRALEDAIGQYRFTPNSRPRLPRLPTHRRNLALMGALNALLAPYLRASEDLTDTHSILYCGAIAACRVARVKFPDTNRAPRPAGDVPAWQLRIERRISTFRTLIAKLICFSRGNNRPRVMRFVTQAFAGTGIRPQQYMANVTERIDYLKQKVYAWANRIRRYRERVDRYWQNRLFQSDQRKVYRNWEGNEQRVSDGQLPDASAMTNFWRGIWSVPVEHTEGDWMRVVERECESIEPMGSILIDPVDVSCAIRTAQNWKSPGPDGLHNFWIKWFRCSHDRLATQFQEALELGSLPSFMTTGVTFLLHKSGSTTEPKNYRPITCLPTIYKLLTSILSTKINAHIVANNVLAPAQNGCRVGSRGTKELLLIDMAISQQVRRNKGALSAAWIDYKKAYDSVPHSWLERILELYQIDATLKSFLGACMRQWTTVLRQPGGGNGSSDSQDLIRIERGIFQGDSLSPSWFCLALNPLSTLLKDSGLGYRLRRGGEVISHLLYMDDLKLFAPKHQDLLELLKTTQVFSSAISMEFGVDKCAVMRVQRGKVVNSPDLQLSEIMTLRSLSEAETYKYLGMSESLGISVVDIKKSVKERFFCRLTKVLNSLLSGGNKARAFNGWVMPLLIYSFGILRWTQTELDALDRRVRQLLTAHRMLHPRSSVMRLYIPRKWGGRGFLNAKNLHNREVCSLRDYFLNNECGMHRDVVTVDKGLTPLSLANENWRTPSVLSTDDRKEVWKSKELHGRFYRVLSGPDVDLLASVNWLRFGDLFGETEGFACAIADEVIKTNNYRKYIMKDGTVDICRACHRPGESLRHIISGCSHLANGEYLHRHNQVARIIHQQLALQYGLVESEVPYYKYAPAPVLENGRALLYWDRSIITDRTIVANKPDIVMVDRSQRRAVLVDVTIPHDENLVKAEKDKLSKYLDLAFEITAMWDVDSTIIVPIVVSANGLIAKSLDQYLKRLSLDGWVKGQIQKAVVLDTARIVRRFLTLQP

SEQ ID NO: 6114 - protein, 1213 aa, Erannis defoliaria
MITRSKKRNAAVQHARPTPPPVPSSSPSSSSPSEEEFHTCGTSSSSEDVSGPRTPTPPIPVRRGRPPLPARLGPAGQPASRPALAAGGVVRRMRWSQTNNENCMRAYYGATEGGTNLTAYRVRMLSLFQTLEPTVTVSAQRISDQVRAIQRLNLLDQPLLDRLRLEVQSARPTPASTRDLDVASSAPTLASVPTSAATLATSADPVLDEGDCTGMSVSTQVSEQLRRALEDAIGQYRFALNSRPRLPRLPTHRRNLALMGALNALLAPYLRASEDLTDTHSILYCGAIAACRGARVKFPDTNRAPRPAGDVPAWQLRIERRISTFRTLIAKLICFSRGNNRPRVMRFVTQAFAGTGIRPQQYMASVTERIDYLKQKVYAWANRIRRYRERVDRYWQNRLFQSDQRKVYRNWEGTEQRVSDGQLPDASAMTNFWRGIWSVPVEHTEGDWMRVVERECESIQPMGSILIDPVDVSCAIRTAQNWKSPGPDGLHNFWIKWFRCSHDRLATQFQEALELGSLPSFMTTGVTFLLHKSGSTTEPKNYRPITCLPTIYKLLTSILSTKINAHIVANNVLAPAQNGCRVGSRGTKELLLIDMAISQQVRRNKGALSAAWIDYKKAYDSVPHSWLERILELYQIDTTVKSFLGACMRQWSTVLRQPGGGNGSSDSQDLIRIERGIFQGDSLSPSWFCLALNPLSTLLKDSGLGYRLRRGGEIISHLLYMDDLKLFAPKHQDLLELLKTTQVFSSAIRMEFGVDKCAVMRVQRGKVVNSPDLQLSEIMTLRSLSEAETYKYLGMSESLGISVVDIKKSVKERFFCRLTKVLNSLLSGGNKARAFNGWVMPLLIYSFGILRWTQTELDALDRRVRQLLTAHRMLHPRSSVMRLYIPRKWAGRGFLNAKNLHNREVCSLRDYFLNNECGMHRDVVTVDKGLTPLSLANENWRRPSVISTDDRKEVWKSKELHGRFYRALTGPDVDLLASVNWLRFGDLFGETEGFACAIADEVIKTNNYRKYIMKDGTVDICRACHRPGESLRHIISGCSHLANGEYLHRHNQVARIIHQQLALQYGLVESEVPYYKYAPAPVLENGRALLYWDRSIITDRTIVANKPDIVMVDRSQRRAVLVDVTIPHDENLVKAEKDKLSKYLDLAFEITAMWDVDSTIIVPIVVSANGLIAKSLDQYLKRLSLDGWVKGQIQKAVVLDTARIVRRFLTLQP

SEQ ID NO: 6115 - protein, 1215 aa, Erannis defoliaria
MITRSKANIAAAEPNARPPSPPAPSSPSASSGDDEFLTPRESSATSSDSDVSGPRTPAPPPPVRRGRPPLPARLGPAGLPASRPALAAGGVVRRMRWSQINNENCMRAYYGATEGGTNLSAYRVRMLPLFQALEPTVTVSAQRLSDQVRAIQRLNLLDQSLLDRLRLEAQSARATPASTRDSHVASSAPTLASMPTSAATLATPADPVVDEGDCTSMSVSSQVSEQLRRALEDAICQYRFALNFRPRLPRLPTHRRNLALMGALNALLAPYLRASKDLTDTHSILYCGAIAACRVARVRFPDTNRAPRTVGDVPAWQVRIERRISTFRTLIAKLICFSRGNNRPRVMRFVTQAFSGTGLRPQQYMASVTERIDYLKQKVYAWANRIRRYRERVDRYWQNRLFQSDQRKVYRNWEGAAQRVNDGHLPDANAMTNFWRSIWSVPVEHTEGDWMRVVERECEAIEPMGPILIDPVDVSCAIRTAQNWKSPGPDGLHNFWIKWFRCSHNRLATQFQEALELGSLPSFMTTGITFLLHKSGSTTEPKNYRPITCLPTIYKLLTSILSTKINAHIIANNVLAPAQNGCRVGSRGTKELLLIDMAISQQVRRSKGALSAAWIDYKKAYDSVPHSWLERILELYQIDTTLKSFLSACMRQWTTVLRQPGGGNDSSDPQDLIRIERGIFQGDSLSPSWFCLALNPLSTLLKDSGLGYRLRRGSEVISHLLYMDDLKLFAPKHQDLLELLKTTQVFSSAIRMEFGVDKCAVMRVQRGKVVNSPDLQLSEIMTLRSLSEAETYKYLGMSESLGISVVDIKKSVKERFFCRLTKVLNSLLSGGNKARAFNGWVMPLLIYSFGILRWTQTELDALDRRVRQLLTAHRMLHPRSSVMRLYIPRKWGGRGFLNAKNLHNREVCSLRDYFLNNECGMHRDVVTVDKGLTPLSLANENWRRPSVLSTDDRKEVWKSKELHGRFYRALTGSDVDLLASVNWLRFGDLFGETEGFACAIADEVIKTNNYRKYIMKDGTVDICRACHRPGESLRHIISGCSHLANGEYLHRHNQVARIIHQQLALQYGLVESEVPYYKYAPAPVLENGRVLLYWDRSIITDRTIVANKPDIVMVDRSQRQAVLVDVTIPHDENLVKAEKDKLSKYLDLAFEITAMWDVDSTIIVPIVVSANGLIAKSLDQYLKRLSLDGWVKGQIQKAVVLDTARIVRRFLTLQP

SEQ ID NO: 6116 - protein, 1215 aa, Biston betularia
MWTRSRTAAASGLHDAHIPSPPAPSTPSASSGDEEFATPLATSASSSSSDVSGPRTPAPPPPARRGRPPLPARLGPAGQSASRSALAAGGVVRRMRWSQTNNENCMRAYYGATEGGINLSAYRARMLPLFQALEPTVAVSTQRLSDQVRAIQRLQLLDQSVLDRLRLEALPARPTPVSTRDSPVASSAPTLVSVPTSMVTLATPTDPVVDAGECTSMGVCSQVSEHLRRTLEDAICQYRFAPDSRPRLPRLPTHRRNLALMGALNALLAPYLRASEDLTDTHSILYCGAIAACRVARVKFPDTNRAPRPAGNVPAWQLRIERRISTFRTLIAKLICFSRGNNRPRVMRFVTQAFAGTGIRPQHYLASVTERIDYLKQKVYAWANRIRRYRERADRYWQNRVFQSDQRKVYRDWEGTGQRVSDRQLPDTSVMTEFWRGIWSLPVEHTEGDWMRVVERECESIESMGSVLIDPVDVSCAIRTAQNWKSPGPDGLHNFWIKWIRCSHDRLATQFQEALELGSLPCFMTTGVTFLLHKTGSTTEAKNYRPITCLPTIYKLLTSILRTKINAHVVANNVLAPAQNGCRVGSRGTKELLLIDMTISQQVRRNKGALSTAWIDYKKAYDSVPHSWLERVLELYKIDTTLKSFLGACMRQWTTVLRQPGSGDGSSEPQDLIRIERGIFQGDSLSPLWFCLALNPLSTLLKESGLGHRLRRGGEVISHLLYMDDLKLFAPKRPDLMELLKTTQVFSNAIKMEFGVDKCAVMHVQRGEVVNCPDLQLSETMTFRSLSEAETYKYLGMSESLGIAVVDIKRSVKERFFCRLTKVLNSLLSGGNKVRAFNGWVMPLLIYSFGILRWTQTELDALDRRVRQQLTTHRMLHPRSSVMRLYIPRKLGGRGFLSAKNLHNREVCSLRDYFRDNECGMHRDVVAVDKGLTPLSLANENWRKPSVLSTEDRKEVWKSKQLHGRFYRVLTGPDVDMLASVNWLRFGDLFGETEGFACAIADEVIKTNNYRKYIMKDGTVDICRACHRPGESLRHIISGCSHLANGEYLHRHNQVARIIHQQLALQYGLVESEVPYYKYAPAPVLENGRALLYWDRSIITDRTIVANKPDIVVVDRAQRRAVLVDITIPHDENLVKAEKDKLSKYLDLAHEITAMWDVDSTIIVPIVVSVNGLIAKSLDQHLKRLSLDGWVKGQLQKAVILDTARIVRRFLTLQP

SEQ ID NO: 6117 - protein, 1215 aa, Biston betularia
MWTRSRTAAASGLHDAHIPSPPAPSTPSASSGDEEFATPLATSASSSSSDVSGPRTPAPPPPARRGRPPLPARLGPAGQSASRSALAAGGVVRRMRWSQTNNENCMRAYYGATEGGINLSAYRVRMLPLFQALEPTVAVSTQRLSDQVRAIQRLQLLDQSVLDRLRLEALPARPTPVSTRDSPVASSAPTLVSVPTSMATLATPTDPVVDVGECTSMAVCSQVSEHLRRTLEGAICQYRFAPDSRPRLPRLPTHRRNLALMGALNALLAPYLRASEDLTDTHSILYCGAIAACRVARVKFPDTNRAPRPAGGVPAWQLRIEWRISTFRTLIAKLICFSRGNNRPRVMRFVTQAFAGTDIRPQHYLASVTERIDYLKQKVYAWANRIRRYRERADRYWQNRVFQSDQRKVYRDWEGTGQRVSDRQLPDTSVMTEFWRGIWSLPVEHTEGDWMRVVERECESIESMGSVLIDPVDVSCAIRTAQNWKSPGPDGLHNFWIKWIRCSHDRLATQFQEALELGSLPCFMTTGVTFLLHKTGSTTEAKNYRPITCLPTIYKLLTSILRTKINAHVVANNVLAPAQNGCRVGSRGTKELLLIDMTISQQVRRNKGALSTAWIDYKKAYDSVPHSWLERVLELYKIDTTLKSFLGACMRQWTTVLRQPGSGDGSSEPQDLIRIERGIFQGDSLSPLWFCLALNPLSTLLKESGLGHRLRRGGEVISHLLYMDDLKLFAPKRPDLMELLKTTQVFSNAIKMEFGVDKCAVMHVQRGEVVNCPDLQLSETMTFRSLSEAETYKYLGMSESLGIAVVDIKRSVKERFFCRLTKVLNSFLSGGNKVRAFNGWVMPLLIYSFGILRWTQTELDALDRRVRQQLTTHRMLHPRSSVMILYIPRKLGGRGFLSAKNLHNREVCSLRDYFRDNECGMHRDVVAVDKGLTPLSLANENWRKPSVLSTEDRKEVWKSKQLHGRFYRVLTGPDVDMLASVNWLRFGDLFGETEGFACAIADEVIKTNNYRKYIMKDGTVDICRACHRPGESLRHIISGCSHLANGEYLHRHNQVARIIHQQLALQYGLVESEVPYYKYAPAPVLENGRALLYWDRSIITDRTIVANKPDIVVVDRAQRRAVLVDITIPHDENLVKAEKDKLSKYLDLAHEITAMWDVDSTIIVPIVVTVNGLIAKSLDQHLKRLSLDGWVKGQLQKAVILDTARIVRRFLTLQP

SEQ ID NO: 6118 - protein, 1215 aa, Biston betularia
MWTRSRTAAASGLHDAHIPSPPAPSTPSASSGDEEFATPLATSASSSSSDVSGPRTPAPPPPARRGRPPLPARLGPAGQSASRSALAAGGVVRRMRWSQTNNENCMRAYYGATEGGINLSAYRVRMLPLFQALEPTVAVSTQRLSDQVRAIQRLQLLDQSVLDRLRLEALPARPTPVSTRDSPVASSAPTLVSVPTSMATLATPTDPVVDVGECTSMGVCSQVSEHLRRTLEDAICQYRFAPDSRPRLPRLPTHRRNLALMGALNALLAPYLRASEDLTDTHSILYCGAIAACRVARVKFPDTNRAPRPAGGVPAWQLRIERRISTFRTLIAKLICFSRGNNRPRVMRFVTQAFAGTGIRPQHYLASVTERIDYLKQKVYAWANRIRRYRERADRYWQNRVFQSDQRKVYRDWEGTGQRVSDRQLPDTSVMTEFWRGIWSLPVEHTEGDWMRVVERECESIESMGSVLIDPVDVSCAIRTAQNWKSPGPDGLHNFWIKWIRCSHDRLATQFQEALELGSLPCFMTTGVTFLLHKTGSTTEAKNYRPITCLPTIYKLLTSILRTKINAHVVANNVLAPAQNGCRVGSRGTKELLLIDMTISQQVRRNKGALSTAWIDYKKAYDSVPHSWLERVLELYKIDTTLKSFLGACMRQWTTVLRQPGSGDGSSEPQDLIRIERGIFQGDSLSPLWFCLALNPLSTLLKESGLGHRLRRGGEVISHLLYMDDLKLFAPKRPDLMELLKTTQVFSNAIKMEFGVDKCAVMHVQRGEVVNCPDLQLSETMTFRSLSEVETYKYLGMSESLGIAVVDIKRSVKECFFCRLTKVLNSLLSGGNKVRAFNGWVMPLLIYSFGILRWTQTELDALDRKVRQQLTTHRMLHPRSSVMRLYIPRKLGGRGFLSAKNLHNREVCSLRDYFRDNECGMHRDVVAVDKGLTPLSLANENWRKPTVLSTEDRKEVWKSKQLHGRFYRVLTGPDVDMLASVNWLRFGDLFGETEGFACAIADEVIKTNNYRKYIMKDGTVDICRACHRPGESLRHIISGCSHLANGEYLHRHNQVARIIHQQLALQYGLVESEVPYYKYAPAPVLENGRALLYWDRSIITDRTIVANKPDIVVVDRAQRRAVLIDITIPHDENLVKAEKDKLSKYLDLAHEITAMWDVDSTIIVPIVVTVNGLIAKSLDQHLKRLSLDGWVKGQLQKAVILDTARIVRRFLTLQP

SEQ ID NO: 6119 - protein, 955 aa, Notocelia uddmanniana
MGALNDLLVPYLGASEDLIDTHSIMYCGAIAACRVARVKFPDADRAPRTAGSVPTWQVRIERRVDTYRTLIAKLICFRGGNSRPRVMRFVNQAFAGTGIRPRDYMTCVTERIDFLKQKVYAWASRIRRYRERLDRYQQNRLFQSDQRKVYRKWDGTDHRVSDGQRPDATAMVNFWRSIWSVPVEHNEGAWMGVVERECESIEPMGSVTISPADVSCAIRTAPNWKSPGPDGLHNFWLKWFRCSHARLAAQFQQALELGSLPPPLTTGVTSLLYKSGSTTEAKNYRPITCLPTLYKLLTSILRAKINTHIVANNILAPAQNGCRVGSRGTKELLLIDMTICQRVRRNRGTLSTAWIDYRKAYDSVPHSWLRRILELYKVDAVLRSFLVACMGQWTTVLRQPGGGEGPSGPQDSIRIERGIFQGDSLSPLWFCLALNPLSTLLKVSGLGCQLRREGEVISHLLYMDDLKLFAPNKHDLLELLKTTEAFSSAIKMEFGVDKCAAMHVQRGKVVNSTNLQISETMDLRSLSEAETYKYLGMSQSLGIEGGDIKRAVKERFFCRLTKVLNSFLSGGNRVRAFNAWVMPLLTYSFGILRWTQTELDFLDRRVRVLLTAHRMLHPRSSVMRLYIPRKFGGRGFLNAKDLHNREVCSLRDYFLNSECGMHRDVVAVDASFTPLSMANENWRRLKVLSTEDRRAVWKSKELHGRFYKALTGPDVDLLASVNWLRFGDLFAETEGFVCAIADEVIMTNNYRKYILKDGTVDICRACRRPGESLRHIISSCGHLANGEYLHRHNLVAKIIHQQLALLYGLVDFEVPYYKYTPAPVLENGRATLYWDRSVITDRTIIANKPDIVLTDRLKRQAVLVDITIPHDENLVKAEKDKVSKYLDLAHEVTAMWDVDSTIIVPIVVSANGLIAKSLDQHLKRLSLDGWVKGQMQKAVLLDTARIVRRFLSLSP

SEQ ID NO: 6120 - protein, 955 aa, Notocelia uddmanniana
MGALNDLLDPYLRASDDLIDTHSIMYCGAIAACRVARVKFPDADRATRTAGGVPAWQVRIEWRINTFRTFIAKLICFRGGNNRPRVMRFVNQAFAGTGVRPRDYMACVTERIDFLKQKVYAWASRIRRYRERVDRYQQNRLFQSDQRKVYRKWEGTDHRVCDGQRPDATAMVNFWRSIWSVPVEHTEGAWIGVVERDCESIEPMGSVTISPEDVSCAIRTAPNWKSPGPDGLHNFWLKWFRCSHERLATQFQQALELGSLPPPLTTGVTSLLYKSGSTTEAKNYRPITCLPTLYKLLTSILRAKINTHIVTNNILAPAQNGCRVGSRGTKELLLIDMTICQRVRRNRGTLSASWIDYKKAYDSVPHSWLRRILELYKVDAALRSFLSACMGQWTTVLRQPGGGDGPSGPQDSIRIERGIFQGDSLSPLWFCLALNPLSTLLQDSGLGCQLQRGGEVISHLLYMDDLKLFAPNRQDLLELLKTTEVFSSAIKMEFGVDKCAVMHVQRGKVVNSTNLQLSETMSLRSLSEAETYKYLGMSQALGIEGEGIKQAVRERFFCRLTKVLNSFLSGGNKARAFNAWVMPLLTYSFGILRWTQTELDALDRRVRVLLTAHRMLHPRSSVMRLYIPRKCGGRGFLNAKDLHNREVCSLRDYFLNSECGMHRDVVAVDASFTPLSMANENWRRFKVLSTEDRKAEWKSKELHGRFYRALTGPDVDLLASVNWLRFGDLFGETEGFVCAIADEVIMTNNYRKYILKDGTVDICRACRRPGESLRHIISGCSHLANGEYLHRHNLVARIIHQQLALSCGLVDFEVPYYKYLPAPVLENGRATLYWDRSIITDRTIVANKPDIVLIDRSKRQAVLVDITIPHDENLVKAEKDKVSKYLDLAHEVTAMWDVDSTIIVPIVVSANGLIAKSLDQHLKRLSLDGWVKGQIQKAVLLDTARIVRRFLSLSP

SEQ ID NO: 6121 - protein, 1206 aa, Notocelia uddmanniana
MITRTRSRAAQRARPPSPPAPSSSSPSSSGDEFATAPDTSESSCDERGPPSPPPRPPARRGRPPLPARLGPVGHSALPTAPAAGGVVRRMRWTQEMNENCMRAYFGATEGETNLSAYRVRMLPLFQGLEPTITVTAQRLSDQVRVIQRLKRLDDATLDRLRLEALSARTASALARDPPATSPAPVPTPDMAPGVPRVDPSVDEDCANQTVSTQANEQLRRALEEAITRYRSTPNSRPRLPRLPVNRRNLALMGALNDLLDPYLRASEDLIDTHSILYCGAIAACRVARVKFPDADRAPRTAGGVPAWQVRIERRINTFRTLIAKLICFRGGNDRPRVMRFVNQAFAGTGVRPRDYVTCVTERIDFLKQKVYAWASRIRRYRERVDRYQQNRLFQSDQRKVYRKWEGTDHRVCDGQRPDATAMGNFWRSIWSVPVEHTEGAWIGVVERECESIEPMGSVTISPEDISCAIRTAPNWKSPGPDGLHNFWLKWFRCSHERLATQFQQALVLGSLPHLLTTGVTSLLYKSGSTTEAKNYRPITCLPTLYKLLTSILRAKINTHIVANNILAPAQNGCRVGSRGTKELLLIDMTICQRVRRSRGALSAAWIDYKKAYDSVPHSWLRRILELYKVDAALRSFISACMGQWTTVLRQPGGGDGSSGPQDSIRIERGIFQGDSLSPLWFCLALNPLSTLLKDSGLGCQLRRGGEVISHLLYMDDLKLFAPNRQDLLELLKTTEVFSSAIKMEFGVDKCAVMHVQRGKVVNSTNLQLSETMSLRSLSEAETYKYLGMSQSLGIEGEGIKQAVKERFFCRLTKVLNSFLSGGNKVRAFNAWVMPLLTYSFGILRWTQTELDALDRRVRVLLTAHRMLHPRSSVMRLYIPRKCGGRGFLNAKDLHNREVCSLRDYFLNSECGMHRDVVAVDASFTPLSMANENWRRFKVLSTEDRKAEWKSRELHGRFYKALTGPDVDLLASVNWLRFGDLFGETEGFVCAIADEVIMTNNYRKYILKDGTVDICRACRRPGESLRHIISGCGHLANGEYLHRHNLVARIIHQQLALSYGLVNFEVPYYKYLPAPVLENGRATLYWDRSIITDRTIVANKPDIVLIDRSKRQAVLVDITIPHDENLVKAEKDKVSKYLDLAHEVTAMWDVDSTIIVPIVVSANGLIAKSLDQHLKRLSLDGWVKGQIQKAVLLDTARIVRRFLSLSP

SEQ ID NO: 6122 - protein, 887 aa, Notocelia uddmanniana
MTDPSSRLTKFRLTLEEYDFDVEYIKGSENVTADALSRIVMTSDELKSLNSSFVGVRTHSMTRASNITNGALDSGTTPLEPGQPKVVDIMKESDGDTELIICSSKDFRDMSLTEESKGTANNNNNVERECESIEPMGSVTISPADVSCAIRTAPNWKSPGPDGLHNFWLKWFRCSHARLAAQFQQALELGSLPPPLTTGVTSLLYKSGSTTEAKNYRPITCLPTLYKLLTSILRAKINTHIVANNILAPAQNGCSVGSRGTKELLLIDMTICQRVRRNRGTLSAAWIDYKKAYDSVPHSWLKRILELYKVDAVLRSFLVACMGQWTTVLRQPGGGEGPSGPQDSIRIERGIFQGDSLSPLLFCLALNPLSTLLKDSGLGCQLRREGEVISHLLYMDDLKLFAPNKHDLLKLLKTTEAFSSAIKMEFGVDKCAAMHVQRGKVVNSTNLQISETMDLRSLSEAETYKYLGMSQSLGIEGGDIKRAVKERFFCRLTKVLNSFLSGGNRVRAFNAWVMPLLTYSFGILRWTQTELDFLDRRVRVLLTAHRMLHPRSSVMRLYIPRKFGGRGFLNAKDLHNREVCSLRDYFLNSECGMHRDVVAVDASFTPLSMANENWRRLKVLSTEDRRAVWKSKELHGRFYKALTGPDVDLLASVNWLRFGDLFAETEGFVCAIADEVIMTNNYRKYILKDGTVDICRACRRPGESLRHIISGCGHLANGEYLHRHNLVAKIIHQQLALLYGLVDFEVPYYKYTPAPVLENGRATLYWDRSVITDRTIIANKPDIVLTDRLKRQAVLVDITIPHDENLVKAEKDKVSKYLDLAHEVTAMWDVDSTIIVPIVVSANGLIAKSLDQHLKRLSLDGWVKGQMQKAVLLDTARIVRRFLSLSP

SEQ ID NO: 6123 - protein, 1206 aa, Notocelia uddmanniana
MITRTRSRAAQRARPPSPPAPSSSSPSSSGDEFATAPDTSESSCDERGPPSPPPRPPARRGRPPLPARLGPVGHSALPTAPAAGGVVRRMRWTQEMNENCMRAYFGATEGETNLSAYRVRMLPLFQALEPTITVTAQRLSDQVRVIQRLKRLDDATLDRLRLEALSARTASALARDPPATSPAPVPTPDMAPGVPRVDPSVDEDCANQTVSTQTNEQLRRALEEAITRYRSTPNSRPRLPRLPVNRRNLALMGALNDLLDPYLRASEDLIDTHSILYCGAIAACRVARVKFPDADRAPRTAGGVPAWQVRIERRINTFRTLIAKLICFRGGNDRPRVMRFVNQAFAGTGVRPRDYVTCVTERIDFLKQKVYAWASRIRRYRERVDRYQQNRLFQSDQRKVYRKWEGTDHRVCDGQRPDATAMGNFWRSIWSVPVEHTEGAWIGVVERECESIEPMGSVTISPEDISCAIRTAPNWKSPGPDGLHNFWLKWFRCSYERLATQFQQALELGSLPHLLTTGVTSLLYKSGSTTEAKNYRPITCLPTLYKLLTSILRAKINTHIVANNILAPAQNGCRVGSRGTKELLLIDMTICQRVRRSRGALSAAWIDYKKAYDSVPHSWLRRILELYKVDAALRSFLSACMGQWTTVLRQPGGGDGSSGPQDSIRIERGIFQGDSLSPLWFCLALNPLSTLLKDSGLGCQLRREGEVISHLLYMDDLKLFAPNRQDLLELLKTTEVFSSAIKMEFGVDKCAVMHVQRGKVVNSTNLQLSETMSLRSLSEAETYKYLGMSQSLGIEGEGIKQAVKERFFCRLTKVLNSFLSGGNKVRAFNAWVMPLLTYSFGILRWTQTELDALDRRVRVLLTTHRMLHPRSSVMRLYIPRKCGGRGFLNAKDLHNREVCSLRDYFLNSECGMHRDVVAVDASFTPLSMANENWRRFKVLSTEDRKAEWKSRELHGRFYKALTGPDVDLLASVNWLRFGDLFGETEGFVCAIADEVIMTNNYRKYILKDGTVDICRACRRPGESLRHIISGCGHLANGEYLHRHNLVARIIHQQLALSYGLVNFEVPYYKYLPAPVLENGRATLYWDRSIITDRTIVANKPDIVLIDRSKRQAVLVDITIPHDENLVKAEKDKVSKYLDLAHEVTAMWDVDSTIIVPIVVSANGLIAKSLDQHLKRLSLDGWVKGQIQKAVLLDTARIVRRFLSLSP

SEQ ID NO: 6124 - protein, 1198 aa, Ostrinia furnacalis
MILRARPPPPPPQVLSSSSSSCSSSGEEFVTPPATGASSGEDGPTTPPPPPRPARRGRPPLPARLGSARQPASRTAPATGGVVRRMRWTQTMNENCMRAYYGATEGGTVLTAYRDRILPLFQNLEPTITVSAQRLSDQVRAIQRCRLLDQSVLDRLRLEAMPARTTPLLMSESPAPASPTVSPSTPQAAGVASDVDERDLPSSVSNQVSERLRRALEDAIGQHRFTSDSRPRLPRLPTHRRNLALMGALNALLIPYMQTSANLFDTHSILYCGAIAVCRVAGVQFPDSDRAARPAGMTPAWQIRIERRINAFRTLIAKLICFRRGNNRPRVMRFVAQAFAGTGVLPQDYMTCVTERIDYLKQKVYAWANRIRRYKERVNRYWQNRVFQSDQRKVYRRWEGADQRVSDGQLPDVNTMIDFWRGIWSMPVEHTEGDWMRVIERECESIESMGSIVIDPEDVSSAISTAQNWKSPGPDGLHNFWIKWIRCSHDRLATQFQEALELGSLPAFMTTGVTTLLYKSGSTMDPKNYRPITCLPTIYKLLTSILTTKINTHIVANNILAPAQNGCKVGSRGTKELLLIDMTISQQVRRSRKALSAAWIDYKKAYDSVPHSWLERILELYKVDATLRSFLSSCMGQWTTVLRQPGGSERSPDPLNFIRIERGIFQGDSLSPLWFCLALNPLSTLLKDSGLGYRLRRGGEVISHLLYMDDLKLFAPKRQDLVKLLKTTQVFSNAIRMEFGVDKCAVLHVERGKVVNSPNLQLSETMTLKSLSETETYKYLGMSESLGISVEDIKKSVKERFCSRLTKVLNSLLSGGNKVRAFNGWVMPLLIYSFGILRWTQTELDALDRKVRQQLTQHRMLHPRSSVMRLYIPRKWGGRGFLNAKNLHNREVCSLRDYFLANECGMHRDVVAVDKGLTPLSLANENWRKPKVLSVADRKDVWKSKELHGRFYRALTGPDVDLLASVNWLRFGDLFGETEGFACAIADEVMMTNNYRKYILKDGTVDICRACHRPGESLRHIISGCSHLANGEYLHRHNLVARIIHQQLALQYDLLESETPYYRYQPVPVLENGHALLYWDRSIITDRTIVCNKPDIVVVDRSQRRAMLVDITIPHDENLVKAEKEKQSKYLDLAHEVTAMWDVDSTIIVPIVVSANGLIAKSFDQHLKKLSLDGWLKGQMQKAVILSTARIVRRFLSL

SEQ ID NO: 6125 - protein, 1207 aa, Crocallis elinguaria
MITRSRNKAGTASARQPPPPASSSPSSSSGVEYGTPLDTSASSDEDGPPSPPPPPPPARRGRPPLPARLGPAGHSVPRAAPATGGIVRRMRWTSDMNENCMRAYYGATEGGTNMSAYRDRMLPLFQTLEPSVAVSTQRLSDQVRAIQRLKLLDESVLDRLRLEALPIRATSASTRDLSVAPPVPAPLPAPSSVATRIDPVVDEDDCANISVSTQVNEQLRRALEDAILEYQYTPDSRPRLPRLPTNRRNLALMGALNVLLAPYLRASENLFDTHSIMYCGAIAVCCVARVKFPDADRAPRTAGNAPAWQVRIERRINTFRTLIAKLVCFSRGNNRPRVMRFVNQAFAGTGIRPQNYMAGVTERIDFLKQKIYAWVNRIRRYRERVDRYHQNRLFESDQRKVYRNWEGTDQRVSDGQMPDTNAMINFWRGIWSVPVEHTEGDWMRTVEQSCESIETMGSVTIDTIDVSCAIRTAQNWKSPGPDGLHNFWIKWIRCSHECLAVQFQEALELGSLPCFLTTGVTSLLHKSGSTTEAKNYRPITCLPTLYKLLTSILRAKINSHVVANNILAPAQNGCRVGSRGTKELLLIDTAICQQVRRNKGALSTAWIDYKKAYDSVPHSWLERILELYKIDTTLRSFLSTCMRQWTTVFRQPGSGNSPSGPENFIKIERGIFQGDSLSPLWFCLALNPLSTLLRDSRLGCKLRREGEIISHLLYMDDLKLLAPKSPDLMKLLKITEIFSSAIKMEFGVDKCAVMHVQRGKVVNSDNLQLSETMTLRSLSEAETYRYLGMSQSLGIAVGDIKQSVKERFFCRLTKVLNSLLSGGNKARAFNGWVMPLLIYSFGILKWTQTELDSLDRRVRQLLTYHRMLHPRSSVMRLYIPRKWGGRGFLNAKTLHNREVCSLREYFLNNECGMHRDVVAVDRNLTPLSLANENWRKPMVMTTEDRKDVWKGKELHGRFYRALTGSDVDLLASVNWLRFGDLFGETEGFVCAIMDEVIKTNNYRKYIMKDGTVDICRACRRPGESLRHIISGCSHLANGEYLHRHNLVARIIHQQIALQYGLVESEVPYYKYAPAPVLENGRALLYWDRSIITDRTIVANKPDIVLVDRSQRRAVLVDITVPHDENLVKAEKDKLSKYLDLAHEVTAMWNVDSTIIVPIVVSANGLVAKSLDQHLKRLSLDGWIKGRMQKAVLLDTARIVRRFLTLQP

SEQ ID NO: 6126 - protein, 1207 aa, Crocallis elinguaria
MITRSRNKAGTASARQSPPPASSSPSSSSGDEYGTPLDTSASSDEDGPPSPPPPPPPARRGRPPLPARLGPAGHSVPRAAPATGGIVRRMRWTSVMNENCMRAYYGATEGGTNMSAYRDRMLPLFQTLEPSVAVSTQRLSDQVRAIQRLKLLDESVLDRLRLEALPIRATSASTRDLSVAPPVPAPLPAPSSVATRINPVIDEDDCANISVSTQVNEQLRRALEDAILDYQYTPDSRPRLPRLPTNRRNLALMGALNVLLAPYLRASENLFDTHSIMYCGAIAVCRVARVKFPDADRAPRTAGSAPAWQVRIERRINTFRTLIAKLVCFSRGNNRPRVMRFVNQAFAGTGIRPQNYMAGVTERIDFLKQKIYAWVNRIRRYRERVDRYHQNRLFESDQRKVYRNWEGTDQRVSDGQLPDTNAMINFWRGIWSVPVEHTEGDWMRTVEQSCESIETMGSVTIDPIDVSCAIRTAQNWKSPGPDGLHNFWIKWIRCSHECLAVQFQEALELGSLPCFLTTGVTSLLHKSGSTTEAKNYRPITCLPTLYKLLTSILRVKINSHVVANNILAPAQNGCRVGSRGTKELLLIDTAICQRVRRNKGALSAAWIDYKKAYDSVPHSWLERILELYKIDATLRSFLSMCMRQWTTVLRQPGSGNSPSGPENFIKIERGIFQGDSLSPLWFCLALNPLSTLLRDSRLGCQLRREGEIISHLLYMDDLKLFAPKRPDLMELLKITEIFSSAIKMEFGVDKCAVMHVQRGKVVNSDNLQLSETMTLRSLSEAETYKYLGMSQSLGIAVGDIKQSVKERFFCRLTKVLNSLLSGGNKARAFNGWVMPLLIYSFGILKWTQTELDSLDRRVRQLLTYHRMLHPRSSVMRLYIPRKWGGRGFLNAKTLHNREVCSLREYFLNNECGMHRDVVAVDRNLTPLSLANENWRKPVVMTTEDRKDVWKGKELHGRFYRALTGSDVDLLASVNWLRFGDLFGETEGFVCAIMDEVIKTNNYRKYIMKDGTVDICRACRRPGESLRHIISGCSHLANGEYLHRHNLVARIIHQQIALQYGLVESEVPYYKYAPAPVLENGRALLYWDRSIITDRTIVANKPDIVLVDRSQRRAVLVDITVPHDENLVKAEKDKLSKYLDLAHEVTAMWNVDSTIIVPIVVSANGLVAKSLDQHLKRLSLDGWIKGRMQKAVLLDTARIVRRFLTLQP

SEQ ID NO: 6127 - protein, 871 aa, Pammene fasciana
MRFVYQAFAGTDIEPRDYMANVTERIDFLRQKVYAWASRIRRYRERVDRFRQNRLFQSDQRKVYRRWEEADPRVSDVRLPDATAMSDFWRSIWSAPVEHTEGEWMSVVERECETIEPMGAITISPDDVSCAIRTAQNWKSPGPDGLHNFWLKWFRCSHSRLATQFQQALELGCLPPSLTTGVTFLLYKSGSTTEAKNYRPITCLPTLYKLLTSILRAKINAHMVANNILASAQNGCRVGSRGTKELLLIDMTICQRVRRNRGALSAAWIDYKKAYDSVPHSWLERILELYKIDAALRSFLGTCMRQWTTVLRQPGGGDDSPGPQDFIRIERGIFQGDSLSPLWFCLALNPLSTLLKDSGLGCRLRREGEVISHLLYMDDLKLFAPNNRDLLELLKTTEVFSSSIKMEFGVDKCAVMHVQRGKVVNSTNLQLSETMTFRSISESETYKYLGMSQSLGIEDAGIKQALRERFFGRLTKVLNSLLSGGNKVRAFNAWVMPLLTYSFGILRWTQTELDALDRRVRQLLTTHRMLHPRSSVMRLYIPRKCGGRGFLNAKNLHNREVYNLRNYFLNNECGMHRDVVAIDKGLTPLSLANENWRKPVVLSTEDRKAVWKSKELHGRFYGALTGPDVDLLASVNWLRFGDLFGETEGFACAIADEVIMTNNYRRYILKDGTVDICRACRRPGESLRHIISGCSHLANGEYLHRHNLVARIIHQQLALLYGLVDHEVPYYKYTPAPVLENGRATLYWDRSIITDRTIVANKPDIVVIDRPQRRAMLVDITVPCDVNLVKAEKDKSSKYLDLAHEVTAMWEVDSAIIVPIVVSANGLIAKSLDQHLERLSLRGCGWIKGQIQKAVILDTARIVRRFLSLRP

SEQ ID NO: 6128 - protein, 1212 aa, Pammene fasciana
MITRSKSRQQQASPPNARPPSSPASSVSSPSSSGDEFATAPDTSESSDECGPPPPPPRPPARRGRPPLPARLGLAGQPAPPRAPAAGGIVRRMRWTQTMNENVMRAYYGATEGGTNLCAYRVRLLPLFQALEPTTNVTAQRLSDQVRVIQRDKRLDDLTLDRLRLEALSAHAASTSARDPPATAPDPMPAPDLASGAPRVDPSADEEEIATQSVSSTANEQLRRTLEEAITQYRSTNIPRPRLPRLPMNKRNLALMGALNDLLDPFLRTSKDLDDTHSIMYCGAIAACRVARVKFPDAERAPRTAGGVPAWQVRIERRINSFRTLIAKLICFRGGNNRPRVMRFVHQAFAGMDIEPRDYMANVTERIDFLKQKVYAWASRIRRYRERVDRFRQNRLFQSDQRKVYRRWEEADPRVSDVRLPDATAMTDFWRSIWSAPVEHTEGEWMNVVERECESIEPMGAITISPDDVSCAIRTSQNWKSPGPDGLHNFWLKWFRCSHSRLATQFQHALELGSLPPSLTTGVTFLLYKSGSTTEAKNYRPITCLPTLYKLLTSILRAKINAHMVANNILASAQNGCRVGSRGTKELLLIDMTICQRVRRNRGALSAAWIDYKKAYDSVPHSWLERILELYKVDAALRSFLGACMRQWTTVLRQPGGGDDPPRPQDFIRIERGIFQGDSLSPLWFCLALNPLSTLLKDSGLGCRLRREGEVISHLLYMDDLKLFAPNNRDLLELLKTTEVFSSSIKMEFGVDKCAVMHVQRGKVVNSTNLQLSETMTFRSISESETYKYLGMSQSLGIEDVGIKQALKERFFGRLTKVLNSLLSGGNKVRAFNAWVMPLLTYSFGILRWTQTELDALDRRVRLLLTTHRILHPRSSVMRLYIPRKCGGRGFLNAKNLHNREVYNLRNYFLNNECGMHRDVVTVDKNLTPLSLANENWRKPVVLSTEDRKAVWKSKELHGRFYGALTGPDVDLLASVNWLRFGDLFGETEGFACAIADEVIMTNNYRRYILKDGTVDICRACRRPGESLRHIISGCSHLANGEYLHRHNLVARIIHQQLALLYGLVAHEVPYYKYIPAPVLENDRATLYWDRSIITDRTIVANKPDIVVIDRPQRRAMLVDITVPCDVNLVKAEKDKSSKYLDLAHEVTAMWEVDSAIIVPIVVSANGLIAKSLDQHLERLSLRGCGWIKGQIQKAVILDTARIVRRFLTLRP

SEQ ID NO: 6129 - protein, 1205 aa, Bembecia ichneumoniformis
MLLRKRKDRAEQSARPPPLPVSSSPCSSADEFLTADDKSTSSDDDGPTPPSPPRRPARRGRPPLPASLGPARPSASRPAPATGGVVRRMRWTHTMNENCMRAYYGATEGATNLTAYRARMLSLFQALEPAVTVTAQRLSDQVRAIQRCQLLEQSVLDRLRLDSLPARTTSAATQDLRAALPLPESASIPISAALLTDPVDQENCASTNVSTETKEQLRRALEEAISRYHTKPNDRPRLPRLPMHKQNIALMGALNTLLAPYIKASRDLTDTHSILYCGAIAACRVARVKFLNFDRATRDAEDVPAWQVRIEGRISKFRTLIAKLISFCRGNTRPRVMRFVAQAFVGTNIKSKDYLTWATERIDYFKQKVYALANRVRRYKERVHRYRQNRLFQSDQRKVYRDWERTNQSVNVGHPPDPEVMLKFWRDIWSVSDEHTEGDWISIVEQACESITTMKAINISPTDVSCAIRSTQNWKSPGPDGLHNFWIKMIQCSHECLAMQFQKALELGTLPNFLTTGITFLLHKSGSTTEAKNYRPITCLPTIYKLLTSILRTKINSHILENNILDTAQNGCKIGSRGTKELLLIDMTICQRVRRNSGALSVAWIDYQKAYDSVPHSWLRRILELYKIDTTLRSFLAMCMGQWITVLRQPGYRGSDAGLRDTIKIERGIFQGDSLSPLWFSLALNPLSTLLRNLKLGYRLRRGGEVISHLLYMDDLKLFAPKPKDLLELLKITQCFSNAIRMDFGVDKCAVMHVQKGKVVNSPNLQLSDEMSFKSLSEVETYKYLGMSQSLGISDKDIKQTVKTRFFGRLTKVLNSFLSGGNKVRAFNGWVMPLLTYSFGILRWTQTELDGLDRRVRQLLTAHRMLHPRSSVMRLYIPRKLGGRGFLNAKNLHNREVYSLREYFLNHGSGVHRDVVAIDKNFTPLSLANGNWRRLVVLSTEDRKSVWKGKELHGRFYKALTGPEVDSLMSVNWLRFGDLFGETEGFVCAIADEVIKTNNYRKYILKDGTVDICRACHRPGETLRHIISGCAHLSNGEYLHRHNQVARIIHQQLAIRYGLIESEVPYYKYVPAPVLENGHATLYWDRSIITDRTIVANKPDIVVIDRSQRRTMLVDIAVPHDENLVKAEKEKLTKYIDLAHEVTAMWDVDSTIIVPIVISANGLIAKSLDQHLKRLSLDGWIKGQIQKAVLLDTARIVRRFLTLQP

SEQ ID NO: 6130 - protein, 955 aa, Ennomos quercinarius
MGALNTLLAPYLRTSEDLVDTHSILYCGAIAACRVARVKFPDTDRTPRPADGAPAWQVRIERRITTFRTLIAKLVCFSRGNHRPRFMRFVTQAFAGTGIRPQDYMACVTERIDFLKQKVYAWASRIRRYRERVDRYQQNRLFQSDQRKVYRNWEGTGQRVVDGQLPDANAMSEFWRSIWSVPVEHTEGDWMRVVERVCEPIESMGSITIDPEDISCAIRTAQNWKSPGPDGLHNFWIKWIRCSYPCLAIQFQEALEAGSLPRFMTTGVTFLLHKSGSTTEAKNYRPITCLPTLYKLLTSILRTKINSHIVANNILAPAQNGCRVGSRGTKELLLIDTAICQQVRRNRGALSTAWIDYKKAYDSVPHSWLERVLELYKIDATLRSFLSTCMRQWITVLRQPGGGESVSDPQDFIRIERGIFQGDSLSPLWFCLALNPLSTLLGDSGLGYRLRRGGEIISHLLYMDDLKLFAPQRPQLIELLKITENFSNSIKMEFGVDKCAVMHVHRGKVVNSTNLQLSETMTLRSLSESETYRYLGMSESLDISVGDVKQSVKERFFCRLTKVLNSLLSGGNKTRAFNGWVMPLLMYSFGILRWTQTELDALDRKVRQLLTSHRMLHPRSSVMRLYIPRKWGGRGFLNAKTLHNREMCSLREYFLNNEYGMHRDVVAVDKGLTPLSLANEYWRKPVVLSTEDRRDVWKGKELHGRFYRALTGPDVDLHASVNWLRFGDLFGETEGFVCAIADEVIKTNNYRKYIMKDGTIDICRACRRPGESLRHIISGCSHLANGEYLHRHNLVARIIHQQLALQYGLVESEVPYYKYTPGPVLENGRALLYWDRSIITDRTIVANKPDIVLVDRSQRRAVLVDITIPHDENLVKAEKDKLSKYLDLAHEVTAMWNVDSTSIVPIVVSANGLIAKSLDQHLERLSLDGWIKGQIQKAVLLDTARIVRRFLTLQP

SEQ ID NO: 6131 - protein, 1117 aa, Cydia splendana
MRWSQTMNENVMRAYYGATEGGTDLCAYRVRMLPLFQALEPTIDVTAQRLSDQVRVIQRLKRLDDSTLDRLRLEALSTRAASTSVRDPPATSPDPVPAPDQAPEAPRVDLCADEEEFAQSVSSTANEQLRRTLDEAITQYRSTPNTRPRLPRLPMNRHNLALMGALNALLEPYLRTSKDLDDTHAIMYCGAIAACRVARVKFPDSERAPRTAGGAPAWQIRIERRISSFRTLIAKLICFRGGNNRPRVMRFVNQAFAGTDIRPRDYMANITERIDFLKQKVYAWANRIRRYRERVDRFQQNRLFQSDQRKMYRKWEETNPRASDSQPPEATVMNDFWRSIWSVPVGHTEGSWMSVVERECESIEPMGAVTISPDDVSCAIRTAQNWKSPGPDGLHNFWLKWFRCSHSCLAAQFQQALELGSPPPSLTTGVTFLLYKSGSTTEAKNFRPITCLPTLYKLLTSILRAKINAHIVANNILASVQNGCRVGSRGTKELLLIDMTICQQIRRNRGALSAAWIDYKKAYDSVPHSWLERVLELYKVDTALRAFLSACMRQWTTVLRQPGGGDGSPGPQDFIRIERGIFQGDSLSPLWFCLALNPLSTLLKDLELGCRLRRGGEVISHLLYMDDLKLFAPNSQDLVELLKTTEVFSNAINMEFGVDKCAVMHVQRGKVVNSTNLQLSETMSFRSISESETYKYLGMSQSLGIEEEGIRRSVKERFFSRLTKVLNSLLSGGNKVRAFNAWVMPLLTYSFGILRWTQTELDALDRRVRSLLTTHRMLHPRSSVMRLYIPRKCGGRGFLNAKDLHNREVYNLRNYFLNNECGMHRDVVAVDRNLTPLSLANENWRKPVVLSTEDRKAVWKDKQLHGRFYKALTGPDVDLLASVNWLRFGDLFGETEGFACAIADEVMMTNNYRKYILKDGTVDICRACRRPGESLRHIISGCSHLANGEYLHRHNLVARIIHQQLALLYGLVDREVPYYKYSPAPVLENGRATLYWDRSIITDRTIVANKPDIMLIDRSQRRTVLVDVTIPHDENLVKAEKDKSSKYLDLAHEITAMWDVDSTIIVPIVVSANGLIAKSLDQHLERLSLGGWIKGQMQKAVILDTARIVRRFLTLRP

SEQ ID NO: 6132 - protein, 1018 aa, Cydia splendana
MAPAAPRVDFCTDEGDFASQNVSTTANEQLRRTLEEAITQYRATTNSRPRLPRLPMNRRNLALMGALNALLEPYLRTSKDLDDTHSIMYCGAIAACRVARVKFPDAERAPRIVGGVPAWQARIERRISSFRTLIAKLICFRGGNNRPRVMRFVNQAFAGTDIRPRDYMANVTERIDFLKQKVYAWANRIRRYRERVDRFQQNRLFQSDQRKVYRKWEETNLRTPDTRPPDATAMTDFWRSIWSVPVGHTEGSWMSVVERECESIEPMGAVTISPDDVSCAIRTAQNWKSPGPDGLHNFWLKWFRCSHSRLAAQFQQALEVGSLPPSLTTGVTFLLYKSGSTTEAKNYRPITCLPTLYKLLTSILRAKINAHIVANNILASAQNGCRVGSRGTKELLLIDMTICQQIRRNKGALSAAWIDYKKAYDSVPHSWLGRVLELYKVDAALRAFLSTCMGQWTTVLRQPGGGDDRLGPQDFIRIERGIFQGDSLSPLWFCLALNPLSTLLKDLGLGCRLQREGEVISHLLYMDDLKLFAPNSQDLLELLKTTEVFSSAINMEFGVDKCAVMHVQRGRVVNSRNLQLSETMSFRSISESETYKYLGMSQSLGIEDEGIRRSLKERFFSRLTKVLNSLLSGGNKVRAFNAWVMPLLTYSFGILRWTQTELDALDRRVRSLLTTHRMLHPRSSVMRLYIPRKCGGRGFLNAKDLHNREVYNLRNYFLNNECGMHRDVVGVDRNLTPLSLANENWRKPVVLSTADRKAAWESKVLHGRFYKALTGPDVDLLASVNWLRFGDLFGETEGFACAIADEVMMTNNYRKYILKDGTVDICRACRRPGESLRHIISGCSHLANGEYLHRHNLVARIIHQQLALLYGLVDREVPYYKYLPAPVLENGRATLYWDRSIITDRTIVANKPDIVIIDRSQRRAVLVDITIPHDENLVKAEKDKSSKYLDLAHEITAMWDVDSTIIVPIVVSVNGLIAKSLDQHLERLSLGGWIKGQMQKAVILDTARIVRRFLSLRP

SEQ ID NO: 6133 - protein, 1209 aa, Cydia splendana
MQTRSKTRAQLASPRNARPPPPSASSVSSQSSSGDEFATAPDTSESSDECGPPPPPSRPPARRGRPPLSARLGPAGHPAPPTAPAAGGVVRRMRWSQTINENVMRAYYGATEGGTNLCAYRVRMLPLFQALEPTIDVTAQRLSDQVRVIQRQKRLDDSKLDRLRLEALSARAASTSARDPPATSPDPVPAPDQAPGAPRVDLSADEEEFAQSVGSTANEQLRRTLDEAITRYRSTPDTRPRLPRLPMNRHNLALMGALNALLEPYLRTSKDLDDTHAIMYCGAIAACRVARVKFPDSERAPRTAGGAPAWQIRIERRISSFRTLIAKLICFRGGNNRPRVMRFVNQAFVGTDIRPRDYMANVTERIDFLKQKVYAWANRIRRYRERVDRFQQNRLFQSDQRKMYRRWEETNLRASDSRPPDATVMNDFWRSIWSVPVGHTEGSWMSVVERECESIEPMGAVTISPDDVSCAIRTAQNWKSPGPDGLHNFWLKWFRCSHCYLAAQFQQALELGSLPPSLTTGVTFLLYKSGSTTEAKNYRPITCLPTLYKLLTSILRAKINAHVVANNILASAQNGCRVGSRGTKELLLIDMTICQQIRRTKGALSAAWIDYKKAYDSVPHSWLGRVLELYKVDAALRAFLSACMGQWTTVLRQPGGGDDRPGPQDFIRIERGIFQGDSLSPLWFCLALNPLSTLLKDLGLGCRLRREGEVISHLLYMDDLKLFAPNTQGLLELLKTTEVFSSAINMEFGVDKCAVMHVQRGKVVNSTNPQLSETMSFRSISESETYKYLGMSQSLGIEDEGIRRSVKERFFSRLTKVLNSLLSGGNKVRAFNAWVMPLLTYSFGILRWTQTELDALDRRVRSLLTTHRMLHPRSSVMRLYIPRKCGGRGFLNAKDLHNREVYNLRNYFLNNECGMHRDVVAVDRNLTPLSLANENWRKPVVLSTADRKAAWESKALHGRFYKALTGPDVDLLASVNWLRFGDLFGETEGFACAIADEVMMTNNYRKYILKDGTVDICRACRRPGESLRHIISGCSHLANGEYLHRHNLVARIIHQQLALLYGLVDREVPYYKYLPAPVLENGRATLYWDRSIITDRTIVANKPDIVLIDRSQRRAVLADVTIPHDENLVKAEKDKSSKYLDLAHEITAMWDVDSTIIVPIVVSANGLIAKSLDQHLERLSLGGWIKGQMQKAVILDTARIVRRFLTLRP

SEQ ID NO: 6134 - protein, 1118 aa, Cydia splendana
MRWTRTMNENVMRAYYGATEGGTQLSAYRSRILPLFQALEPTITVSEQRLSDQVRVIQRLKRLDDATLDRLRQEALSARADSTSVRDLPATSPDPVPAPDLAPAAPRVDFCTDEGDFASQNVSTTANEQLRRTLEEAITQYRATTNSRPRLPRLPMNRRNLALMGALNALLEPYLRTSKDLDDTHSIMYCGAIAACRVARVKFPDAERAPRIVGGVPAWQARIERRISSFRTLIAKLICFRGGNNRPRVMRFVNQAFAGTDIRPRDYMANVTERIDFLKQKVYAWANRIRRYRERVDRFQQNRLFQSDQRKVYRKWEETNLRTPDTQPPDATAMTDFWRSIWSVPVGHTEGCWMSVVERECESIEPMGAVTISPDDVSCAIRTAQNWKSPGPDGLHNFWLKWFRCSHSRLAAQFQQALELGSLPPSLTTGVTFLLYKSGSTTEAKNYRPITCLPTLYKLLTSILRAKINAHIVANNILASALNGCRVGSRGTKELLLIDMTICQQIRRNKGALSAAWIDYKKAYDSVPHSWLGRVLELYKVDAALRAFLSTCMGQWTTVLRQPGGGDDRLGPQDFIRIERGIFQGDSLSPLWFCLALNPLSTLLKDLGLGCRLQREGEVISHLLYMDDLKLFAPNSQDLLELLKTTEVFSSAINMEFGVDKCAVMHVQRGRVVNSRNLQLSETMSFRSISESETYKYLGMSQSLGIEDEGIRRSVKERFFSRLTKVLNSLLSRGNKVRAFNAWVMPLLTYSFGILRWTQTELDALDRRVRSLLTTHRMLHPRSSVMRLYIPRKCGGRGFLNAKDLHNREVYNLRNYFLNNECGMHRDVVAVDRNLTPLSLANENWRKPVVLSTADRKTAWESKVLHGRFYKALTGPDVDLLASVNWLRFGDLFGETEGFACAIADEVMMTNNYRKYILKDGTVDICRACRRPGESLRHIISGCSHLANGEYLHRHNLVARIIHQQLALLYGLVDREVPYYKYLPAPVLENGRATLYWDRSIITDRTIVANKPDIVIIDRSQRRAVLVDITIPHDENHVKAEKDKSSKYLDLAHEITAMWDVDSTIIVPIVVSVNGLIAKSLDQHLERLSLGGWIKGQMQKAVILDTARIVRRFLSLRP

SEQ ID NO: 6135 - protein, 1215 aa, Cydia splendana
MKTMITRSQRRAAESTNNARPPPPPAPSSSSSTSSSGDEFATPPDTDGFSDEGGPPPPPPRPPARRGRPPLPARLGPAGNPAPPTAPATGGILVVRRMRWTRTMNENVMRAYYGATEGGTQLSAYRSRILPLFQALEPTITVSEQRLSDQVRVIQRLKRLDDATLDRLRQEALSARADSTSVRDLPATSPDPVPAPDLAPAAPRVDFCTDEGDFASQNVSTTANEQLRRTLEEAITQYRATTNSRPRLPRLPMNRRNLALMGALNALLEPYLRTSKDLDDTHSIMYCGAIAACRVARVKFPDAERAPRIVGGVPAWQARIERRISSFRTLIAKLICFRGGNNRPRVMRFVNQAFAGTDIRPRDYMANVTERIDFLKQKVYAWANRIRRYRERVDRFQQNRLFQSDQRKVYRKWEETNLRTPNTRPPDATAMTDFWRSIWSVPVGHTEGSWMSVVERECESIEPMGAVTISPDDVSCAIRTAQNWKSPGPDGLHNFWLKWFRCSHSRLAAQFQQALEVGSLPPSLTTGVTFLLYKSGSTTEAKNYRPITCLPTLYKLLTSILRAKINAHIVANNILASAQNGCRVGSRGTKELLLIDMTICQQIRRNKGALSAAWIDYKKAYDSVPHSWLGRVLELYKVDAALRAFLSTCMGQWTTVLRQPGGEDDRLGPQDFIRIERGIFQGDSLSSLWFCLALNPLSTLLKDLGLGCRLQRDGEVISHLLYMDDLKLFAPNSQDLLELLKTTEVFSSAINMEFGVDKCAVMHVQRGRVVNSRNLQLSETMSFRSISESETYKYLGMSQSLGIEDEGIRRSVKERFFSRLTKVLNSLLSGGNKVRAFNAWVMPLLTYSFGILRWTQTELDALDRRVRSLLTTHRMLHPRSSVMRLYIPRKCGGRGFLNAKDLHNREVYNLRNYFLNNECGMHRDVVAVDRNLTPLSLANENWRKPVVLSTADRKAAWESKVLHGRFYKALTGPDVDLLASVNWLRFGDLFGETEGFACAIADEVMMTNNYRKYILKDGTVDICRACRRPGESLRHIISGCSHLANGEYLHRHNLVARIIHQQLALLYGLVDREVPYYKYLPAPVLENGRATLYWDRSVITDRTIVANKPDIVIIDRSQRRAVLIDITIPHDENLVKAEKDKSSKYLDLAHEITAMWDVDSTIIVPIVVSVNGLIAKSLDQHLERLSLGGWIKGQMQKAVILDTARIVRRFLSLRP

SEQ ID NO: 6136 - protein, 1208 aa, Cydia splendana
MITRSKARSQASTTANARPPPSPVSSVSSQSSGDEFATAPDTSESSDECGPPPPPPRPPARRGRPPLPARLGPAGHLAPPTAPAAGGVVRRMRWSQTMNENVMRAYYGATEGGTDLCAYRVRMLPLFQALEPTIDVTAQRLSDQVRVIQRLKRLDDSTLDRLRLEALSARATSTSVRDPPATSPDPVPAPDQAPQAPRVDLCADEEEFAQSVSSTANEQLRRTLDEAITQYRSTPNTRPRLPRLPMNRHNLALMGALNALLEPYLRTSKDLDDTHAIMYCGAIAACRVARVKFPDSERAPRTAGGAPAWQIRIERRISSFRTLIAKLICFRGGNNRPRVMRFVNQAFAGTDIRPRDYMANITERIDFLKQKVYAWANRIRRYRERVDRFQQNRLFQSDQRKMYRKWEETNPRASDSQPPDATVMNDFWRSIWSVPVGHTEGSWMSVVERECESIEPMGAVTISPDDVSCAIRTAQNWKSPGPDGLHNFWLKWFRCSHSCLAAQFQQALELGSPPPSLTTGVTFLLYKSGSTTEAKNYRPITCLPTLYKLLTSILRAKINAHIVANNILASAQNGCRVGSRGTKELLLIDMTICQQIRRNRGALSAAWIDYKKAYDSVPHSWLERILELYKVDTALRAFLSACMRQWTTVLRQPGGGDESPGPQDFIRIERGIFQGDSLSPLWFCLALNPLSTLLKDLELGCRLRRGGEVISHLLYMDDLKLFAPNSQDLVELLKTTEVFSNAINMEFGVDKCAVMHVQRGKVVNSTNLQLSETMSFRSISESETYKYLGMSQSLGIEEEGIRRSVKERFFSRLTKVLNSLLSGGNKVRAFNAWVMPLLTYSFGILRWTQTELDALDRRVRSLLTTHRMLHPRSSVMRLYIPRKCGGRGFLNAKDLHNREVYNLRNYFLNNECGMHRDVVAVDRNLTPLSLANENWRKPVVLSTADRKAAWESKVLHGRFYKALTGPDVDLLASVNWLRFGDLFGETEGFACAIADEVMMTNNYRKYILKDGTVDICRACRRPGESLRHIISGCSHLANGEYLHRHNLVARIIHQQLALLYGLVDREVPYYKYSPAPVLENGRATLYWDRSIITDRTIVANKPDIVLIDRSQRRTVLVDVTIPHDENLVKAEKDKSSKYLDLAHEITAMWDVDSTIIVPIVVSANGLIAKSLDQHLERLSLGGWIKGQMQKAVILDTARIVRRFLTLRP

SEQ ID NO: 6137 - protein, 1213 aa, Cydia splendana
MKTMITRSQRRAAESTNNARPPPPPAPSSSSSTSSSGDEFATPPDTDGFSDEGGPPPPPPRPPARRGRPPLPARLGPAGHPAPPTAPATGGIVRRMRWTRTMNENVMRAYYGATEGGTQLSAYRSRILPLFQALEPTITVSEQRLSDQVRVIQRLKRLDDATLDRLRQEALSARADSTSVRDLPATSPDPVPAPDLAPAAPRVDFCTDEGDFANQNVSTTANEQLRRTLEEAITQYRATTNSRPRLPRLPMNRRNLALMGALNALLEPYLRTSKDLDDTHSFMYCGAIAACRVARVKFPDAERAPRIVGGVPAWQARIERRISSFRTLIAKLICFRGGNNRPRVMRFVNQAFAGTDIRPRDYMANVTERIDFLKQKVYAWANRIRRYRERVDRFQQNRLFQSDQRKVYRKWEETNLRTPDTQPPDATAMTEFWRSIWSVPVGHTEGSWMSVVERECESIEPMGAVTISPDDVSCAIRTAQNWKSPGPDGLHNFWLKWFRCSHSRLAAQFQQALELGSLPPSLTTGVTFLLYKSGSTTEAKNYRPITCLPTLYKLLTSILRAKINAHIVANNILASAQNGCRVGSRGTKELLLIDMTICQQIRRNKGALSAAWIDYKKAYDSVPHSWLGRVLELYKVDAALRAFLSTCMGQWTTVLRQPGGGDDRLGPQDFIRIERGIFQGDSLSPLWFCLALNPLSTLLKDLGLGCRLQREGEVISHLLYMDDLKLFAPNSQDLLELLKTTEVFSSAINMEFGVDKCAVMHVQRGRVVNSRNLQLSETMSFRSISESETYKYLGMSQSLGIEDEGIRRSVKERFFSRLTKVLNSLLSGGNKVRAFNAWVMPLLTYSFGILRWTQTELDALDRRVRSLLTTHRMLHPRSSVMRLYIPRKCGGRGFLNAKDLHNREVYNLRNYFLNNECGMHRDVVAVDRNLTLLSLANENWRKPVVLSTADRKAAWESKVLHGRFYKALTGPDVDLLASVNWLRFGDLFGETEGFACAIADEVMMTNNYRKYILKDGTVDICRACRRPGESLRHIISGCSHLANGEYLHRHNLVARIIHQQLALLYGLVDREVPYYKYLPAPVLENGRATLYWDRSIITDRTIVANKPDIVIIDRSQRRAVLVDITIPHDENLVKAEKDKSSKYLDLAHEITAMWDVDSTIIVPIVVSVNGLIAKSLDQHLERLSLGGWIKGQMQKAVILDTARIVRRFLSLRP

SEQ ID NO: 6138 - protein, 963 aa, Cydia splendana
MNRRNLALMGALNALLEPHLRTSKDLDDTHSILYCGAIAACRVARVKFPDAERAPRTVGGVPAWQARIERRISSFRTLIAKLICFRGGNNRPRVMRFVNQAFAGTDIRPRDYMANVTERIDFLKQKVYAWANRIRRYRERVERFQQNRLFQSDQRKVYRKWEETNLRTPDTQPPDATAMTDFWRSIWSMPVGHTEGSWMSVIERECESIEPMGAVTISPDDVSCAIRTAQNWKSPGPDGLHNFWLKWFRCSHSCLAAQFQQALELGSLPPSLTTGVTFLLYKSGSTTEAKNYRPITCLPTLYKLLTSILRAKINAHIVANNILASAQNGCTVGSRGTKELLLIDMTICQQIRRTKGALSAAWIDYKKAYDSVPHSWLGRVLELYKVDAALRAFLSACMGQWTTVLRQPGGGDDQPGPQDFIRIERGIFQGDSLSPLWFCLALNPLSTLLKDLGLGCRLRREGEVISHLLYMDDLKLFAPNTQGLLELLKTTEVFSSAINMEFGVDKCAVMHVQRGRVVNSTNLQLSETMSFRSISESETYKYLGMSQSLGIEDEGIRRSVKERFFSRLTKVLNSLLSGGNKVRAFNAWVMPLLTYSFGILRWTQTELDALDRRVRSLLTTHRMLHPRSSVMRLYIPRKCGGRGFLNAKDLHNREVYNLRNYFLNNECGMHRDVVAVDRNLTPLSLANENWRKPVVLSTADRKAAWENKVLHGRFYKALTGPDVDLLASVNWLRFGDLFGETEGFACAIADEVMMTNNYRKYILKDGTVDICRACRRPGESLRHIISGCSHLANGEYLHRHNLVARIIHQQLALLYGLVDREVPYYKYLPAPVLENGRATLYWDRSIITDRTIVANKPDIVLIDRSQRRVVLADVTIPHDENLVKAEKDKSSKYLDLAHEITAMWDVDSTIIVPIVVSANGLIAKSLDQHLERLSLGGWIKGQMQKAVILDTARIVRRFLSLQP

SEQ ID NO: 6139 - protein, 1117 aa, Cydia splendana
MQWSQTMNENVMRSYYGATEGGTNLCAYRVRMLPLFQALEPTIDVTAQRLSDQVRVIQRQKRLDDSTLDRLRMEALSARAASTSARDPPATSPDPVPAPDQAPGAPRVDLSADEEEFAQSVSSTANEQLRRTLDEAITQYRSTPNTRPRLPRLPMNRHNLALMGALNALLEPYLRTSKDLDDTHAIMYCGATAACRVARVKFPDSERAPRTAGGAPAWQVRIERRISSFRTLIAKLICFRGGNNRPRVMRFVNQAFAGTDTRPRDYMANVTERIDFLKQKVYAWANRIRRYRERVDRFQQNRLFQSDQRKMYRKWEETNLRASDSQPPDATVMNDFWRSIWSVPVGHTEGSWMSVVERECESIEPMGAVTISPDDVSCAIRTAQNWKSPGPDGLHNFWLKWFRCSHSCLAAQFQQALELGSLPPSLTTGVTFLLYKSGSTTEAKNYRPITCLPTLYKLLTSILRAKINAHIVANNILASAQNGCRVGSRGTKELLLIDMTICQQIRRTKGALSAAWIDYKKAYDSVPHSWLGRVLELYKVDAALRAFLSACMGQWTTVLRQPGDGDDRPGPQDFIRIERGIFQGDSLSPLWFCLALNPLSTLLKDLGLGCRLRREGEVISHLLYMDDLKLFAPNTQGLLELLKTTEDFSSAINMEFGVDKCAVMHVQRGRVVNSTNLQLSETMSFRSISESETYKYLGMSQSLGIEDEGIRRSVKERFFSRLTKVLNSLLSGGNKVRAFNAWVMPLLTYSFGILRWTQTELDALDRRVRSLLTTHRMLHPRSSVMRLYIPRKCGGRGFLNAKDLHNREVYNLRNYFLNNECGMHRDVVAVDRNLTPLSLANENWRKPVVLSTADRKAAWESKVLHGRFYKALTGPDVDLLASVNWLRFGDLFGETEGFACAIADEVMMTNNYRKYILKDGTVDICRACRRPGESLRHIISGCSHLANGEYLHRHNLVARIIHQQLALLYGLVDREVPYYKYLPAPVLENGRATLYWDRSIITDRTIVANKPDIVLIDRSQRRAVLADVTIPHDENLVKAEKDKSSKYLDLAHEITAMWDVDSTIIVPIVVSANGLIAKSLDQHLERLSLGGWIKGQMQKAVILDTARIVRRFLTLRP

SEQ ID NO: 6140 - protein, 1059 aa, Agriopis aurantiaria
MLDQSVLDRLRLEEVRTRPTPASTRNPPVASSAPTLASVPASVGTLAALADTAVDEEDLASGVSDQVKEQLRGALEDAISQYRFTSDSRPRLPRFPTHRRNLALMGALNALLAPYLRASEDLVDTHSILYCGAIAACRVARVKFPDTNRAPRTAGGVPAWQVRIERRINTFRTLIAKLICFRRGNNRPRVMRFVTQAFAGTDIRPQHYLANVTERIDYLKQKVYAWANRIRRYRERVDRYWQNRLFQSDQRKVYRGWEETDQRVSDGQRPDANAMINFWRGIWSVPVNHTEGDWMRVVERECESIEPMGSILIDPVDVSCAIRMAQNWKSPGPDGLHNFWIKWIRCSHDRLATQFQEALELGSLPSFMTTGVTFLLHKSGSTTEAKNYRPITCLPTIYKLLTSILRNKINAHIVANNVLAHAQNGCRVGSRGTKELLLIDTAISQQVRRNRGALSAAWIDYKKAYDSVPHSWLERVLELYKIDTTLKSFLCACMRQWTTVLRQPGGGDGTSGPQDLIRIERGIFQGDSFSPLWFCLALNPLSSLLRDSGLGYRLRRDGQVISHLLYMDDLKLFTPKRQDLVELLKITDVFSSAIRMEFGVDKCAVMHVQQGKVVNSPNLQLSEVMTLRSLSEAETYKYLGMSESLGISVENIKKSVKERFFCRLTKVLNSLLSGGNKVRAFNGWVMPLLIYSFGILRWTQTELDALDRRVRQLLTSHRMLHPRSSVMRLYIPRKWGGRGFLNAKNLHNREVCSLRDFFRNSESGMHRDVVAVDRGLTPLSLANENWRKPSVLSIEDRRDVWKGKELHGRFYRALTGPDVDLLSSVNWLRFGDLFGETEGFACAIADEVIKTNNYRKYIMKDGTVDICRACHRPGESLRHIISGCSHLANGEYLHRHNQVARIIHQQLALRYGLVESEVPYYKYAPAPVLENGRALLYWDRSIITDRTIVANKPDIVLVDRSQRRAVLVDITIPHDENLVKAEKDKLSKYLDLAHEVTAMWDVDSTIIVPIVVSVNGLIAKSLDQHLKRLSLDGWVKGQMQKAVILDTARIVRRFLTLQP

SEQ ID NO: 6141 - protein, 1147 aa, Agriopis aurantiaria
MGSLTVFVFCLVNKGTCPFDQNKINSFYFAQRLALVNIKIIIITIEGGTNLSAYCARMLPLFQDLEPTVTVSAQRLSDQVRAIHRCKLLDDSVLDRLRLEELRARPTPALMRDPPVASSAPTLASLPASVATLAAPADPVVDEGDLTSNSVSDQVREQLRGALEDAISQYRFAPDSRPRLPRLPTHRRNLALMGALNALLAPYLRASEDLVDTHSILYCGAIAACRVARVKFPDTNRAPRTAGGVPAWQVRIERRISTFRTLIAKLICFSRGNNRPRVMRFVTQAFAGTEIRPQHYLANVMERIDYLKQKVYAWVSRIRRYRERVNRYWQNRLFQSDQRKVYRGWEETDQRVSDGQLPDANAMINFWRGIWSVPVEHTEGDWMRVVERECESIEPMGSILIDSVDVSCAIRTAQNWKSPGPDGLHNFWIKWIRCSHDRLATQFQEALELGSLPSFMTTGVTFLLHKSGSTTEAKNYRPITCLPTIYKLLTSILRNKINAHIVANNVLAHAQNGCRVGSRGTKELLLIDTAISQQVRRNKGALSAAWIDYKKAYDSVPHSWLERVLELYKIDTTLKSFLGACMRQWTTVLRQPGGGDGTSGPQDLIRIERGIFQGDSFSPLWFCLALNPLSTLLRDSGLGYRLRRDGQVISHLLYMDDLKLFTPKRQDLVELLKITEVFSSAIRMEFGVDKCAVMHVQRGKVVNSPNLQLSEVMTLRSLSEAETYKYLGMSESLGISVENIKKSVKERFFCRLTKVLNSLLSGGNKVRAFNGWVMPLLIYSFGILRWTQTELDALDRRVRQLLTSHRMLHPRSSVMRLYIPRKWGGRGFLNAKNLHNREVCSLRDFFRNSESGMHRDVVAVDRGLTPLSLANENWRKPSVLSIEDRRDVWKGKELHGRFYRALTGPDVDLLSSVNWLRFGDLFGETEGFACAIADEVIKTNNYRKYIMKDGTVDICRACHRPGESLRHIISGCSHLANGEYLHRHNQVARIIHQQLALRYGLAESEVPYYKYAPAPVLENGRALLYWDRSIITDRTIVANKPDIVLVDRSQRRAVLVDITIPHDENLVKAEKDKLSKYLDLAHEVTAMWDVDSTIIVPIVVSVNGLIAKSLDQHLKRLSLDGWIKGQMQKAVILDTARIVRRFLTLQP

SEQ ID NO: 6142 - protein, 1207 aa, Hedya salicella
MQTRSKTRLADTSARPPPSPASASSAASPSSDEYATAPDESSESSDERGPPPPPPRPPARRGRPPLPARLGPAGHSAPPTAPATGGIVRRMRWSQANNENVMRAYYGAIEGGTHLSAYRDRMLLLFQTFEPAIAASAQRLSDQVRAIQRRKLLDDATLDRLRLEVLAARAASTSSRNPPATSPVPAPALDLMPGAPRVDPDSDEQHCASSVSTQANEQLRRTLEETIERYRFAPDSRPRLPRLPANKRNLALVGALNALLDPYLRASEDLADTHSIMYCGAIAACRVARVKFPDADRAPRTAGDVPAWQVRIERRISTFRTLIAKLICFRGGNNRPRVMRYVAQAFAGTDVSSCDYMACVTERIDFLKQKVYAWASRIRRYKERVDRFQQNRLFQSDQRKVYRKWEGTDQRVTDGWLPDPTAMSNFWRSIWSVPVEHTEGEWMNVVERECEPIEAMGAVTISPDDVSCAARTTQNWKSPGPDGLHNFWVKWFRCSHNRLATQFQQALELGSLPSFLTTGVTFLLYKSGSTTEAKNYRPITCLPTLYKLLTSILRAKINTHIVANNVLAFSQNGCRVGSRGTKELLLIDTTICQQVRRSRGSLSAAWIDYKKAYDSVPHSWLERILELYKVDTALRSFLGACMRQWTTVLCQPGGRDARPAPQDFIRIKRGIFQGDSLSPLWFCLALNPLSTLLKDSELGCRLRRGGEIISHLMYMDDLKLFAPKRPELVELLKVTDTFSSAIKMEFGVDKCAVMHVQRGKVVNSTNLELSETMSLRSLSETETYKYLGMSQALSIADGDIRQAVKERFFCRLTKVLNSLLSGGNKARAFNAWVMPLLTYSFGILRWTQTELDALDRRVRMLLTTHRMLHPRSSVMRLYIPRKCGGRGFLNAKDLHNREVCSLREYFLNNECGIHRDVVAVDKGLTPLSLANENWRRPTVLSTVDRKDVWKSKELHGRFYKTLTGPDVDLLASVNWLRFGDLFGETEGFSCAIADEVIMTNNYRRYILKDGTVDICRACRRPGESLRHIMSGCSHLANGEYLHRHNQVARIIHQQLAVKYDLVGSEVPYYKYVPMPVLENGRATLYWDRSILTDRTIVANKPDIVLVDRSKRRAMLVDITIPHDENLVKAEKDKLSKYLDLAHEVTAMWNVDSTIIVPIVVSVNGLIAKSLDEHLKRLSLDGWIKGQIQKAVILDTARIVRRFLSVQP

SEQ ID NO: 6143 - protein, 1213 aa, Erannis defoliaria
MITRSKKRNAAVQHARPTPPPVPSSSPSSSSPSEEEFHTCGTSSSSEDVSGPRTLTPPIPVRRGRPPLPARLGPAGQPASRPALAAGGVVRRMRWSQTNNENCMRAYYGATEGGTNLTAYRVRMLSLFQTLEPTVTVSAQRISDQVRAIQRLNLLDQPLLDRLRLEVQSARPTPASTRDLDVASSAPTLASVPTSAATLATSADPVLDEGDCTGMSVSTQVSEQLRRALEDAIGQYRFALNSRPRLPRLPTHRRNLALMGALNALLAPYLRASEDLTDTHSILYCGAIAACRVARVKFPDTNRAPRPAGDVPAWQLRIERRISTFRTLIAKLICFSRGNNRPRVMRFMTQAFAGTGIRPQQYMASVTERIDYLKQKVYAWANRIRRYRERVDRYWQNRLFQSDQRKVYRNWEGTEQRVSDGQLPDASAMTNFWRGIWSVPVEHTEGDWMRVVERECESIEPMGSILIDPVDVSCAIRTAQNWKSPGPDGLHNFWIKWFRCSHDRLATQFQEALELGSLPSFMTTGVTFLLHKSGSTTEPKNYRPITCLPTIYKLLTSILSTKINAHIVANNVLAPAQNGCRVGSRGTKELLLIDMAISQQVRRNKGALSAAWIDYKKAYDSVPHSWLERILELYQIDTTLKSFLGACMRQWTTVLRQPGGGNGSSDSQDLIRIERGIFQRDSLSPSWFCLALNPLSTLLKDSGLGYRLRRGGEVISHLLYMDDLKLFAPKHQDLLELLKTTQVFSSAIRMEFGVDKCAVMRVQRGKVVNSPDLQLSEIMTLRSLSEAETYKYLGMSESLGISVVEIKKSVKERFFCRLTKVLNSLLSGGNKARAFNGWVMPLLIYSFGILRWTQTELDALDRRVRQLLTAHRMLHPRSSVMRLYIPRKWAGRGFLNAKNLHNREVCSLRDYFLNNECGMHRDVVTVDKGLTPLSLANENWRRPSVISTDDRKEVWKSKELHGRFYRALTGPDVDLLASANWLRFGDLFGETEGFACAIADEVIKTNNYRKYIMKDGTVDICRACHRPGESLRHIISGCSHLANGEYLHRHNQVARIIHQQLALQYGLVESEVPYYKYAPAPVLENGRALLYWDRSIITDRTIVANKPDIVMVDRSQRRAVLVDVTIPHDENLVKAEKDKLSKYLDLAFEITAMWDVDSTIIVPIVVSANGLIAKSLDQYLKRLSLDGWVKGQIQRAMVLDTARIVRRFLTLQP

SEQ ID NO: 6144 - protein, 1018 aa, Biston betularia
MATLATPTDPVVDVGECTSMGVCSQVSEHLRRTLEDAICQYRFAPDSRPRLPRLPTHRRNLALMGALNALLAPYLRASEDLTDTHSILYCGAIAACRVARVKFPDTNRAPRPAGGVPAWQLRIERRISTFRTLIAKLICFSRGNNRPRVMRFVTQAFAGTGIRPQHYLASVTERIDYLKQKVYAWANRIRRYRERADRYWQNRVFQSDQRKVYRDWEGTGQRVSDRQLPDTSVMTEFWRGIWSLPVEHTEGDWMRVVERECESIESMGSVLIDPVDVSCAIRTAQNWKSPGPDGLHNFWIKWIRCSHDRLATQFQEALELGSLPCFMTTGVTFLLHKTGSTTEAKNYRPITCLPTIYKLLTSILRTKINAHVVANNVLAPAQNGCRVGSRGTKELLLIDMTISQQVRRNKGALSTAWIDYKKAYDSVPHSWLERVLELYKIDTTLKSFLGACMRQWTTVLRRPGSGDGSSEPQDLIRIERGIFQGDSLSPLWFCLALNPLSTLLKESGLGHRLRRGGEVISHLLYMDDLKLFAPKRPDLMELLKTTQVFSNAIKMEFGVDKCAVMHVQRGEVVNCPDLQLSETMTFRSLSEAETYKYLGMSESLGIAVVDIKRSVKERFFCRLTKVLNSFLSGGNKVRAFNGWVIPLLIYSFGILRWTQTELDALDRRVRQQLTTHRMLHPRSSVMRLYIPRKLGGRGFLSTKNLHNREVCSLRDYVRDNECGMHRDVVAVDKGLTPLSLANENWRKPSVLSTEDRKEVWKSKQLHGRFYRVLTGPDVDMLASVNWLRFGDLFGETEGFACAIADEVIKTNNYRKYIMKDGTVDICRACHRPGESLRHIISGCSHLANGEYLHRHNQVARIIHQQLALQYGLVESEVPYYKYAPAPVLENGRALLYWDRSIITDRTIVANKPDIVVVDRAQRRAVLVDITIPHDENLVKAEKDKLSKYLDLAHEITAMWDVDSTIIVPIVVTVNGLIAKSLDQHLKRLSLDGWVKGQLQKAVILDTARIVRRFLTLQP

SEQ ID NO: 6145 - protein, 1215 aa, Biston betularia
MWTRSRTAAASGLHDAHIPSPPAPSTPSASSGDEEFATPLATSASSSSSDVSGPRTPVPPPPARRGRPPLPARLGPAGQSASRSALAAGGVVRRMRWSQTNNENCMRAYYGATEGGINLSAYRVRMLPLFQALEPTVAVSTQRLSDQVRAIQRLQLLDQSVLDRLRLEALPARPTPVSTRDSPVASSAPTLVSVPTSMATLATPTDPVVDVGECTSMAVCSQVSEHLRRTLEDAICQYRFAPDSRPRLPRLPTHRRNLALMGALNALLAPYLRASEDLTDTHSILYCGAIAACRVARVKFPDTNRAPRPAGGVPAWQLRIERRISTFRTLIAKLICFSRGNNRPRVMRFVTQAFAGTDIRPQHYLASVTERIDYLKQKVYAWANRIRRYRERADRYWQNRVFQSDQRKVYRDWEGTGQRVSDRQLPDTSVMTEFWRGIWSLPVEHTEGDWMRVVERECESIESMGSVLIDPVDVSCAIRTAQNWKSPGPDGLHNFWIKWIRCSHDRLATQFQEALELGSLPCFMTTGVTFLLHKTGSTTEAKNYRPITCLPTIYKLLTSILRTKINAHVVANNVLAPAQNGCRVGSRGTKELLLIDMTISQQVRRNKGALSTAWIDYKKAYDSVPHSWLERVLELYKIDTTLKSFLGACMRQWTTVLRQPGSGDGSSEPQDLIRIERGIFQGDSLSPLWFCLALNPLSTLLKESGLGHRLRRGGEVISHLLYMDDLKLFAPKRPDLMELLKTTQVFSNAIKMEFGVDKCAVMHVQRGEVVNCPDLQLSETMTFRSLSEAETYKYLGMSESLGIAVVDIKRSVKERFFCRLTKVLNSFLSGGNKVRAFNGWVMPLLIYSFGILRWTQTELDALDRRVRQQLTTHRMLHPRSSVMRLYIPRKLGGRGFLSAKNLHNREVCSLRDYFRDNECGMHRDVVAVDKGLTPLSLANENWRKPSVLSTEDRKEVWKSKQLHGRFYRVLTGPDVDMLASVNWLRFGDLFGETEGFACAIADEVIKTNNYRKYIMKDGTVDICRACHRPGESLRHIISSCSHLANGEYLHRHNQVARIIHQQLALQYGLVESEVPYYKYAPAPVLENGRALLYWDRSIITDRTIVANKPDIVVVDRAQRRAVLVDITIPHDENLVKAEKDKLSKYLDLAHEITAMWDVDSTIIVPIVVTVNGLIAKSLDQHLKRLSLDGWVKGQLQKAVILDTARIVRRFLTLQP

SEQ ID NO: 6146 - protein, 1215 aa, Biston betularia
MWTRSRTAAASGLHDAHIPSPPAPSTPSASSGDEEFATPLATSASSSSSDVSGPRTPAPPPPARRGRPPLPARLGPAGQSASRSALAAGGVVRRMRWSQTNNENCMRAYYGATEGGINLSAYRVRMLPLFQALEPTVAVSTQRLSDQVRAIQRLQLLDQSVLDRLRLEALPARPTPVSTRDSPVASSAPTLVSVPTSMATLATPTDPVVDVGECTSMGVCSQVSEHLRRTLEDAICQYRFAPDSRPRLPRLPTHRRNLALMGALNALLAPYLRASEDLTDTHSILYCGAIAACRVARVKFPDTNRAPRPAGGVPAWQLRIERRISTFRTLIAKLICFSRGNNRPRVMRFVTQAFAGTGIRPQHYLASVTERIDYLKQKVYAWANRIRRYRERADRYWQNRVFQSDQRKVYRDWEGTGQRVSDRQLPDTSVMIEFWRGIWSLPVEHTEGDWMRVVERECESIESMGSVLIDPVDVSCAIRTAQNWKSPGPDGLHNFWIKWIRCSHDRLATQFQEALELGSLPCFMTTGVTFLLHKTGSTTEAKNYRPITCLPTIYKLLTSILRTKINAHVVANNVLAPAQNGCRVGSRGTKELLLIDMTISQQVRRNKGALSTAWIDYKKAYDSVPHSWLERVLELYKIDTTLKSFLGACMRQWTTVLRQPGSGDGSSEPQDLIRIERGIFQGDSLSPLWFCLALNPLSTLLKESGLGHRLRRGGEVISHLLYMDDLKLFAPKRPDLMELLKTTQVFSNAIRMEFGVDKCAVMHVQRGEVVNCPDLQLSETMTFRSLSEAETYKYLGMSESLGIAVVDIKRSVKERFFCRLTKVLNSFLSGGNKVRAFNGWVMPLLIYSFGILRWTQTELDALDRRVRQQLTTHRMLHPRSSVMRLYIPRKLGGRGFLSTKNLHNREVCSLRDYFRDNECGMHRDVVAVDKGLTPLSLANENWRKPSVLSTEDRKEVWKSKQLHGRFYRVLTGPDVDMLASVNWLRFGDLFGETEGFACAIADEVIKTNNYRKYIMKDGTVDICRACHRPGESLRHIISGCSHLANGEYLHRHNQVARIIHQQLALQYGLVESEVPYYKYAPAPVLENGRALLYWDRSIITDRTIVANKPDIVVVDRAQRRAVLVDITIPHDENLVKAEKDKLSKYLDLAHEITAMWDVDSTIIVPIVVTVNGLIAKSLDQHLKRLSLDGWVKGQLQKAVILDTARIVRRFLTLQP

SEQ ID NO: 6147 - protein, 1211 aa, Apotomis turbidana
MITRRQARRNTAAHTQNARPTPPPVSSSSSPSSSGDEFATAPDTSESSDDVRGPPPPPPRPPARRGRPPLPACLGPTGQSAPTTAPATGGVVRRMRWTQVMNENCMRAYYGATEGGINLSAYRDRMLPLFLAFDPTITVSAQRLSDQVRFIQRRKLLDDATLDRLRLEVLAARAASTPARDAPATSPVPAPAPNLVPGVRQTDPEADGEDDASSVSTQANEQLRRALEEAIERYRSTPESRPRLPRLPMHKRNLALMGALDALLDPYLRTSEDLADTHSIMYCGAIAACRVARVRFPDTDRAPRTAGGVPAWQVRIERRISSFRTFIAKLICFRGGNNRPRVMRYVTQAFAGTGTRPCDYMACVTERIDYLKQKVYAWASRIRRYRERVDRFQQNRLFQSDQRKVYRKWEGTNQCVSDGQLPDPTAMINFWRSIWSVPVEHTEGEWMNVVRLECEPIEAMGAVTISPDDVRCAARTTQNWKSPGPDGLHNFWIKWFRSSHERLATQFQDALELGSLPSFMTTGVTFLLHKSGSTTEAKNYRPITCLPTLYKLLTSILRTKINSHIVANNVLAFSQNGCRVGSRGTKELLLIDTTICQQVRRNRGSLSTAWIDYKKAYDSVPHSWLERILELYKIDTALRSLLGACMRQWTTVLRQPGGGDGPPGPRDLIRIERGIFQGDSLSPLWFCLALNPLSTLLKDSGLGCRLRRGGEVISHLLYMDDLKLYAPKRQDLVELLEVTENFSSAIKMEFGVDKCAVMHVQRGKVVNSANLQLSETMTLRSISEVETYKYLGMSQSLGIADGDIRQALKERFFCRLTKVLNSLLSGGNKARAFNTWVMPLLIYSFGILRWTQTELDALDTRVRQLLTTHRMRHPRSSVMRMYIPRKCGGRGFLNAKDLHNREVCSLREYFLNNECGIHRDVVAVDKGLTSLSLANENWRRPKVLSTDDRRAVWKSKELHGRFYKALTGPDVDLLASVNWLRFGDLFGETEGFVCAIADEVMMTNNYRRYILKDGTVDICRACRRPGESLRHIISGCSHLANGEYLHRHNQVARIIHQQLALQYGLVGSEVPYYKYAPMPVLENGRATLYWDRSIITDRTIVANKPDIVLVDRSKRQAVLVDITIPHDENLVNAEKDKLSKYLDLAHEVTAMWDVDSTIIVPIVVSANGLIAKSLDKHLKRLSLDGWIKGQIQKAVLLDTARIVRRFLSLQP

SEQ ID NO: 6148 - protein, 1111 aa, Notocelia uddmanniana
MNENCIRAYYGATDGGTNLSAYRVRMLPLFQALEPAISVSAQRLSDQVRVIQRLKRLDDATLDRLRMEALSARAASASARNPPATLPAPVPAPDMATGAPRVDSSADEDCANQSVSTHAHELLRRALEEAITQYRSTPNSRPRLPRLPVNRRNLALMGALNDLLVPYFGASADLIDTHSIMYCGAIAACRVARVKFPDADRAPRTTGSVPTWQVRIERRVDTYRTLIAKLICFRGGNNRPRVMRFVNQAFAGTGVKPRDYMACVTERIDFLKQKVYAWASRIRRYRERLDRYQQNRLFQSDQRKVYRKWDGTDHRVSDGQRPHATAMVNFWRSICSVPVEHTEGAWMDVAKPECESIEPMGSVTVSPEDVSCAIRTAPNWKSPGPDGLHNFWLKWFRCSHARLAAQFQQALEIGSLPPPLTTGVTSLLYKSGSTTEAKNYRPITCLPTLYKLLTSILRAKINTHIVANNILAPAQNGCRVGSRGTKELLLIDMTICQRVRRNRGTLSAAWIDYKKAYDSVPHSWLKRILELYKVDAVLRSFLVACMGQWTTVLRQPGGGEGPSGPQDSIRIERGIFQGDSLSPLWFCLALNPLSTLLKDSGLGCQLRREGEVISHLLYMDDLKLFAPNKHDLLELLKTTEVFSSAIKMEFGVDKCAVMHVQRGKVVNSTNLHITETMALRSLSEAETYKYLGMSQSLGIEGGDNKRAVKERFFCRLTKVLNSFLSGGNKVRAFNAWVMPLLTYSFGILRWTQTELDFLDRRVRVLLTAHRMLHPRSSVMRLYIPRKLGGRGFLNAKDLHNREVYSLRDYFLNSECGMHRDVVAVDASFTPLSMANENWRRFKVLSTEDRRAVWKSKELHGRFYKALAGPDVDLLASVNWLRFGDLFGETEGFVCAIADEVIMTNNYRKYILKDGTVDICRACRRPGESLRHIISGCSHLANGEYLHRHNLVARIIHQQLALLYGLVDFEVPYYKYTPAPVLENGRATLYWDRSVITDRTIVANKPDIVLTDRLKRQAVLVDVTIPHDENLVKAEKDKVSKYLDLAHEVTAMWDVDSTIIIPIVVSVNGLIAKSLDQHLKRLSLDGWVKGQIQKAVLLDTARIVRRFLSLSP

SEQ ID NO: 6149 - protein, 1208 aa, Notocelia uddmanniana
MITRSKARLEKKASNPQSARPPPSPVSSSSASSSEEFATAPDTSSSSSSDECGPPPPPPRPPARRGRPPLPACLGPAGHPAPPTAPATGGIVRRMQWSQSINENCMRAYYGATDGGTNLSAYRDRMLPLFRALEPAISVSAQRLSDQVRVIQRLKRLDDATLDRLRLEALSARAASASARNPSATLPAPVPALDTAPGADPSADEGCANQSVSSQAYEQLRRALEEAITQYRSTPNSRPRLPRLPVNRRNLALMGALNDLLVPYLGASEDLIDTHSIMYCGAIAACRVARVKFPDADRAPRTAGGVPTWQVRIERRVDTYRTLIAKLICFRGGNSRPRVMRFVNQAFAGTGIRPRDYMPCVTERIDFLKQKVYAWASRIRRYRERLDRYQQNRLFQSDQRKVYRKWDGTDHRVSDGQRPDATAMVNFWRSIWSVPVEHNEGAWMGVVERECESIEPMGSVTISPADVSCAIRTAPNWKSPGPDGLHNFWLKWFRCSHARLAAQFQQALELGSLPPPLTTGVTSLLYKSGSTTEAKNYRPITCLPTLYKLLTSILRAKINTHIVANNILAPAQNGCRVGSRGTKELLLIDMTICQRVRRNRGTLSTAWIDYKKAYDSVPHSWLRRILELYKVDAVLRSFLVACMGQWTTVLRQPGGGEGPSGPQDSIRIERGIFQGDSLSPLWFCLALNPLSTLLKDSGLGCQLRGEGEVISHLLYMDDLKLFAPNKHDLLELLKTTEAFSSAIKMEFGVDKCAAMHVQRGKVVNSTNLQISETMDLRSLSEAETYKYLGMSQSLGIEGGDIKRAVKERFFCRLTKVLNSFLSGGNRVPAFNAWVMPLLTYSFGILRWTQTELDFLDRRVRVLLTAHRMLHPRSSVMRLYIPRKFGGRGFLNAKDLHNREVCSLRDYFLNSECGMHRDVVAVDASFTPLSMANENWRRLKVLSTEDRRAVWKSKELHGRFYKALTGPDVDLLASVNWLRFGDLFAETEGFVCAIADEVIMTNNYRKYILKDGTVDICRACRRPGESLRHIISGCGHLANGEYLHRHNLVAKIIHQQLALLYGLVDFEVPYYKYTPAPVLENGRATLYWDRSVITDRNIIANKPDIVLTDRLKRQAVLVDITIPHDENLVKAEKDKVSKYLDLAHEVTAMWDVDSTIIVPIVVSANGLIAKSFDQHLKRLSLDGWVKGQVQKAVLLDTARIVRRFLSLSP

SEQ ID NO: 6150 - protein, 1210 aa, Notocelia uddmanniana
MITRSQTRRVQASQQSARPSPSPASSSSASASSEEEFATAPDTSSSSSDECGPPPPPPRPPARRGRPPLPARLGPAGHPVPHTAPATGGVVRRMQWSPSMNENCMRAYYGATDGGTNLSAYRVRMLPLFQALEPAISVSAQRLSDQVRVIQRLKRLDDATLDRLRLEALSARAASVSARNPPATLPAPVPAPDTAPGASRVDASAGGDCADQSVSTQAHEQLRRALDEAITRYRSTPNSRPRLPRLPVNRRNLALMGALNDLLDPYLRASDDLIDTHSIMYCGAIAACRVARVKFPDADRATRTAGGVPAWQVRIERRINTFRTLIAKLICFRGGNNRPRVMRFVNQAFAGTGVRPRDYMACVTERIDFLKQKVYAWASRIRRYRERVDRYQQNRLFQSDQRKVYRKWEGTDHRVCDDQRPDATAMVNFWRSIWSVPVEHTEGAWIGVVERDCESIEPMGSVTISPEDVSCAIRTAPNWKSPGPDGLHNFWLKWFRCSHERLATQFQQALELGSLPPPLTTGVTSLLYKSGSTTEAKNYRPITCLPTLYKLLTSILRAKINTHIVTNNILAPAQNGCRVGSRGTKELLLIDMTICQRVRRNRGTLSASWIDYKKAYDSVPHSWLRRILELYKVDAALRSFLSACMGQWTTVLRQPGGGDGPSGPQDSIRIERGIFQGDSLSPLWFCLALNPLSTLLRDSGLGCQLRRGGEVISHLLYMDDLKLFAPNRQDLLELLKTTEVFSSAIKMEFGVDKCAVMHVQRGKVVNSTNLQLSETMSLRSLSEAETYKYLGMSQALGIEGEGIKQAVKERFFCRLTKVLNSFLSGGNKARAFNAWVMPLLTYSFGILRWTQTELDALDRRVRVLLTAHRMLHPRSSVMRLYIPRKCGGRGFLNAKDLHNREVCSLRDYFLNSECGMHRDVVAVDASFTPLSMANENWRRFKVLSTEDRKAEWKSKELHGRFYRALTGPDVDLLASVNWLRFGDLFGETEGFVCAIADEVIMTNNYRKYILKDGTVDICRACRRPGESLRHIISGCGHLANGEYLHRHNLVARIIHQQLALSYGLVDFEVPYYKYLPAPVLENGRATLYWDRSIITDRTIVANKPDIVLIDRSKRQAVLVDITIPHDENLVKAEKDKVSKYLDLAHEVTAMWDVDSTIIVPIVVSANGLIAKSLDQHLKRLSLDGWVKGQIQKAVLLDTARIVRRFLSLSP

SEQ ID NO: 6151 - protein, 924 aa, Notocelia uddmanniana
MNMNKIDVLIFTRLFDFSTILNNNNNVRIERRVDTYRTLIAKLICFRGGNSRPRVMRFVNQAFAGTGIRPRDYMTCVTERIDFLKQKVYAWASRIRRYRERLDRYQQNRLFQSDQRKVYRKWDGTDHRVSDGQRPDATAMVNFWRSIWSVPVEHNEGAWMGVVERECESIEPMGSVTISPADVSCAIRTAPNWKSPGPDGLHNFWLKWFRCSHARLAAQFQQALELGSLPPPLTTGVTSLLYKSGSTTEAKNYRPITCLPTLYKLLTSILRAKINTHIVANNIFAPAQNGCRVGSRGTKELLLIDMTICQRVRRNRGTLSTAWIDYKKAYDSVPHSWLRRILELYKVDAVLRSFLVACMGQWTTVLRQPGGGEGPSGPQDSIRIERGIFQGDSLSPLWFCLALNPLSTLLKDSGLGCQLRREGEVISHLLYMDDLKLFAPNKHDLLELLKTTEAFSSAIKMEFGVDKCAVMHVQRGKVVNSTNLQISETMDLRSLSEAETYKYLGMSQSLGIEGGDIKRAVKERFFCRLTKVLNSFLSGGNRVRAFNAWVMPLLTYSFGILRWTQTELDFLDRRVRVLLTAHRMLHPRSSVMRLYIPRKFGGRGFLNAKDLHNREVCSLRDYFLNSECGMHRDVVAVDASFTPLSMANENWRRLKVLSTEDRRAVWKSKELHGRFYKALTGPNVDLLASVNWLRFGDLFAETEGFVCAIADEVIMTNNYRRYILKDGTVDICRACRRPGESLRHIISGCGHLANGEYLHRHNLVAKIIHQQLALLYGLVDFEVPYYKYTPAPVLENGRATLYWDRSVITDRTIIANKPDIVLTDRLKRQAVLVDITIPHDENLVKAEKDKVSKYLDLAHEVTAMWDVDSTIIVPIVVSANGLIAKSLDQHLKRLSLDGWVKGQMQKAVLLDTARIVRRFLSLSP

SEQ ID NO: 6152 - protein, 1206 aa, Notocelia uddmanniana
MITRSKARLEKKASNPQSARPPPSPASSSSASSSEEFATAPDTSSSSSSDECGPPPPRPPARRGRPPLPARLGPAGHPAPPTAPATGGIVRRMQWSQSINENCMRAYYGATDGGTNLSAYRDRMLPLFRALEPAISVSAQRLSDQVRVIQRLKRLDDATLDRLRLEALSARAASASARNPSATLPAPVPALDTAPGADPSADEGCANQSVSSQAYEQLRRALEEAITQYRSTPNSRPRLPRLPVNRRNLALMGALNDLLVPYLGASEDLIDTHSIMYCGAIAACRVARVKFPDADRAPRTAGSVPTWQVRIERRVDTYRTLIAKLICFRGGNSRPRVMRFVNQAFAGTGIRPSDYMTCVTERIDFLKQKVYAWASRIRRYRERLDRYQQNRLFQSDQRKVYRKWDGTDHRVSDGQRPDATAMVNFWRSIWSVPVEHNEGAWMGVVERECQSIEPMGSVTISPADVSCAIRTAPNWKSPGPDGLHNFWLKWFRCSHARLAAQFQQALELGSLPPPLTTGVTSLLYKSGSTTEAKNYRPITCLPTLYKLLTSILRAKINTHIVANNILAPAQNGCRVGSRGTKELLLIDMTICQRVRRNRGTLSTAWIDYKKAYDSVPHSWLRRILELYKVDAVLRSFLVACMGQWTTVLRQPGGGEGPSGPQDSIRIERGIFQGDSLSPLWFCLALNPLSTLLKDSGLGCQLRREGEVISHLLYMDDLKLFAPNKHDLLELLKTTEAFSSAIKMEFGVDKCAAMHVQRGKVVNSTNLQISETMDLRSLSEAETYKYLGMSQSLGIEGGDIKRAVKERFFCRLTKVLNSFLSGGNRVRAFNAWVMPLLTYSFGILRWTQTELDFLDRRVRVLLTAHRMLHPRSSVMRLYIPRKFGGRGFLNAKDLHNREVCSLRDYFLNSECGMHRDVVAVDASFTPLSMANENWRRLKVLSTEDRRAVWKSKELHGRFYKALTGPDVDLLASVNWLRFGDLFAETEGFVCAIADEVIMTNNYRKYILKDGTVDICRACRRPGESLRHIISGCGHLANGEYLHRHNLVAKIIHQQLALLYGLVDFEVPYYKYTPAPVLENGRATLYWDRSVITDRTIIANKPDIVLTDRLKRQAVLVDITIPHDENLVKAEKDKVSKYLDLAHEVTAMWDVDSTIIVPIVVSANGLIAKSLDQHLKRLSLDGWVKGQMQKAVLLDTARIVRRFLSLSP

SEQ ID NO: 6153 - protein, 1206 aa, Notocelia uddmanniana
MNTRLRSRAEQRARLPSPPAPSSSSPSSSDDEFATAPDSSESSSDERGPSPPPPQTSARRGRRPLPARLGPTGHSAPPTAPAAGGVVRRMRWTQEMNENCMRAYFGATEGETNLSAYRVRMLPLFQALEPTITVSAQRLSDQVRVIQRNKRLDDLTLDRLRLEALSARAAPTSARDLPATSPAPVPAPNTAPRAPRVDPSADGDCADQSVSTQAHEQLRRALDEAITRYRSTPNSRPRLPRLPVNRRNLALMGALNDLLDPYLRASDDLIDTHSIMYCGAIAACRVARVKFPDADRASRTAGGVPAWQVRIERRINTFRTLIAKLICFRGGNNRPRVMRFVNQAFAGTGVRPRDYMACVTERIDFLKQKVYAWASRIRRYRERVDRYQQNRLFQSDQRKVYRKWEGTDHRVCDGQRPDATAMVNFWRSIWSVPVEHTEGAWIGVVERDCESIEPMGSVTISPEDVSCAIRTAPNWKSPGPDGLHNFWLKWFRCSHERLATQFQQALVLGSLPPPLTTGVTSLLYKSGSTTEAKNYRPITCLPTLYKLLTSILRAKINTHIVTNNILAPAQNGCRVGSRGTKELLLIDMTICQRVRRNRGTLSASWIDYKKAYDSVPHSWLRRILELYKVDAALRSFLSACMGQWTTVLRQPGGGDGPSGPQDSIRIERGIFQGDSLSPLWFCLALNPLSTLLQDSGLGCQLRRGGEVISHLLYMDDLKLFAPNRQDLLELLKTTEVFSSAIKMEFGVDKCAVMHVQRGKVVNSTNLQLSETMSLRSLSEAETYKYLGMSQALGIEGEGIKQAVKERFFCRLTKVLNSFLSGGNKARAFNAWVMPLLTYSFGILRWTQTELDALDRRVRVLLTAHRMLHPRSSVMRLYIPRKCGGRGFLNAKDLHNREVCSLRDYFLNSECGMHRDVVAVDASFTPLSMANENWRRFKVLSAEDRKAEWKSKELHGRFYRALTGPDVDLLASVNWLRFGDLFGETEGFVCAIADEVIMTNNYRKYILKDGTVDICRACRRPGESLRHIISGCSHLANGEYLHRHNLVARIIHQQLALSYGLVDFEVPYYKYLPAPVLENGRATLYWDRSIITDRTIVANKPDIVLIDRSKRQAVLVDITIPHDENLVKAEKDKVSKYLDLAHEVTAMWDVDSTIIVPIVVSANGLIAKSLDQHLKRLSLDGWVKGQIQKAVLLDTARIVRRFLSLSP

SEQ ID NO: 6154 - protein, 1206 aa, Notocelia uddmanniana
MNTRLRSRAEQRARLPSPPAPSSSSPSSSDDEFSTAPDSSESSSDERGPSPPPPQTSARRGRRPLPARLGPTGHSAPPTAPAAGGVVRRMRWTQEMNENCMRAYFGATEGETNLSAYRVRMLPLFQALEPTITVSAQRLSDQVRVIQRNKRLDDLTLDRLRLEALSARAAPTSARDLPATSPAPVPAPNTAPRAPRVDPSANGDCADQSVSTQAHEQLRRALDEAITRYRSTPNSRPRLPRLPVNRRNLALMGALNDLLDPYLRASDDLIDTHSIMYCGAIAACRVARVKFPDADRATRTAGGVPAWQVRIERRINTFRTLIAKLICFRGGNNRPRVMRFVNQAFAGTGVRPRDYMACVTERIDFLKQKVYAWASRIRRYRERVDRYQQNRLFQSDQRKVYRKWEGTDHRVCDGQRPDATAMVNFWRSIWSVPVEHTEGAWIGVVERDCESIEPMGSVTISPEDISCAIRTAPNWKSPGPDGLHNFWLKWFRCSHERLATQFQQALELGSLPPPLTTGVTSLLYKSGSTTEAKNYRPITCLPTLYKLLTSILRAKINTHIVTNNILAPAQNGCRVGSRGTKELLLIDMTICQRVRRNRGTLSASWIDYKKAYDSVPHSWLRRILELYKVDAALRSFLSACMGQRTTVLRQPGGGDGPSGPQDSIRIERGIFQGDSLSPLWFCLALNPLSTLLQDSGLGCQLRRGGEVISHLLYMDDLKLFAPNRQDLLELLKTTEVFSSAIKMEFGVDKCAVMHVQRGKVVNSTNLQLSETMSLRSLSEAETYKYLGMSQALGIEGEGIKQAVKERFFCRLTKVLNSFLSGGNKARAFNAWVMPLLTYSFGILRWTQTELDALDRRVRVLLTAHRMLHPRSSVMRLYIPRKCGGRGFLNAKDLHNREVCSLRDYFLNSECGMHRDVVAVDASFTPLSMANENWRRFKVLSAEDRRAEWKSKELHGRFYRARTGPDVDLLASVNWLRFGDLFGETEGFICAIADEVIMTNNYRKYILKDGTVDICRACRRPGESLRHIISGCSHLANGEYLHRHNLVARIIHQQLALSYGLVDLEVPYYKYLPAPVLENGRATLYWDRSIITDRTIVANKPDIVLIDRSKRQAVLVDITIPHDENLVKAEKDKVSKYLDLAHEVTAMWDVDSTIIVPIVVSANGLIAKSLDQHLKRLSLDGWVKGQIQKAVLLDTARIVRRFLSLSP

SEQ ID NO: 6155 - protein, 1210 aa, Boloria selene
MITRSQARKTAVHTSNARPTPPPVSSFSSPSSSGDEFATAPDTSESSDDERGTPPPPPRTPARRGRPPLPARLGPTGQPAPTMAPATGGVVRRMRWTQVMNENCMRAYYGATEGGINLSAYRDRMLPLFLAFDPTIAVSAQRLSDQVRFIQRRKLLDDATLDRLRLEVLAARAAFTPALGPPATSPAPVPTPNLVPGVPLADHGAGEEECASGVNTQANEQLRRALEEAIGRYRSTPESRPRIPRLPMHKRNLALMGAMDALLDPYLRASEDLTDTHSIMYCGAIAVCRAARVRFPDTDRAPRTTAGVPAWQIRIERRVGSFRTLIAKLICFREGNSRPRVMRYVTQAFAGTGTRPCDYMACVTERIDYLKQKVCAWASRIRRYRVRVDRFQQNRLFQSDQRKVYRRWEGTNQCVGDGQLPDPSAMTNFWRSIWSVPVEHTEGEWMNVVGRECESIETMGAVTISPDDVGCAARATQNWKSPGPDGLHNFWIKWFRSSHERLAAQFQHALELGSLPSFMTTGVTFLLHKSGSTTEAKNYRPITCLPTLYKLLMSILRTKINTHIIANNVLAFSQNGCRVGSRGTKELLLIDTTICQQVRRNRGSLSAAWIDYKKAYDSVPHSWLERVLVLYKIDTTLRSLLGACMRRWTTVLYQPGGGDGLPGPQDLIRIKRGIFQGDSLSPLWFCLALNPLSTLLKDSGLGCRLRRGGEVISHLLYMDDLKLYASKRQDLVELLEVTETFSSAIKMEFGVDKCAIMHVQRGKVVNSANLQLSDIISLRSISEVETYKYLGMSQSLGIADGDIRQALRQRFFCRLTKVLNSLLSGGNKARAFSAWVMPLLTYSFGILRWTQTELDALDTRVRQLLTAYRMRHPRSSVMRLYIPRKCGGRGFLNAKDLHNREVCSLREYFLNNECGIHRDVVAVDKGLTSLSLANENWRRPKVLSTDDRRTVWKCKELHGRFYKALTGPDVDLLASVNWLRFGDLFGETEGFVCAIADEVMMTNNYRRYILRDGTVDICRACRRPGESLRHIISGCSHLANGEYLHRHNQVARIIHQQHALRYGLVGSEVPYYKYAPLPVLENGRATLYWDRSIITDRTIVANKPDIVLVDRSKRQAMLVNIAIPHDENLVKAEKDKLSKYLDLAHEVTAMWDVDSTIIVPLVVSANGLIAKSLDKHLKRLSLDGWIKGQMQKAVLLDTARIVRRFLSLQP

SEQ ID NO: 6156 - protein, 1212 aa, Idaea aversata
MITRQKVKNATTGTARLHAQPPARQPVTSHESSDEEVYYTPPDTRGSASSSESGLSSPTPPPPPARRRGRPPSARLGPAGHSVPRPALATDGVVRRMRWSQTMNENCMRAYYRATKGGTFMTTYRDRMLPLFQALEPTVSVSAQRLSDQVRAIQRCKLLDDSTLDRLRTEALPIGMTSDSQRDPPAPPSLTPNQVSLAVMSRVDLVAEEDDSANMSVSTQCNEHLRRTLEDAIQLYRSPASSRPRLPRLPTHRRNLALVGALDDLLAPYLGACEDLIDTHSILYCGAITACRVARVRFPDPDRAPRPPSYVPAWQVRIERRIDTFRTLIAKLICFRGGNTRPRVMRFVNQAFAGTGIRPQQYMSCVTERIDFLKQKIYAWAKRIRRYRERVDRYQLNSMFQSDQRKVYRSWEKPSQRVIDEQRPDSRTMINFWRDIWSVPVDHTEGDWMRVVSDACEPIETMEAISITPLDVKCAIRTAQNWKSPGPDGLHNFWLKWFRSSHVRLATQFQEALELGSLPSFLTTGVTFLLHKSGSTTEAKNYRPITCLPTIYKLLTSILTVKINSHIVANNILAPAQNGCRVGSRGTKELLLIDMAVCQQVRRNRRNISTAWIDYKKAYDSVPHSWLRRVLELYKIDTTLRNFLDSCMRQWITVLCQPGGVDTLSEPEDYIRIERGIFQGDSLSPLWFCLALNPLSTLLKNSGLGYRLRREGEVISHLLYMDDLKLFATKKPELVALLEITHNFSSAINMEFGIDKCAVLHVQRGKVVNSSDLQLSETISLRSLSEGEPYKYLGMAEALAIDGDVKQSVKERFFGRLTKVLNSLLSGGNKVRAFNGWVMPLLIYTFGILRWTQTELDALDRRVRSQLTVHRMLHPRSSVMRLYIPRKSGGRGFLNAKTLHNREVCSLREYFLGSESGMHCDVVAVDNNLTPLSLAKENWRKPSILSVEDRKDIWKSKELHGRFYRALTDPDVDFLASVNWLRFGDLFGETEGFVCAIADEVMMTNNYRKYILKDGTVDICRACHRPGESLRHIISGCSHLANGEYLHRHNLVARIIHQQLALKYGLVDQEVPYYQYAPAPVLENGRAMLYWDRSIITDRTIVANKPDIVIVDRSERRAILVDITVPHDVNLVKAEKDKETKYLDLAHEITAMWDVDSTSIVPIVVSANGLIAKSLDQHLKRLSLDGWVKGQIQKAVILDTARIVRRFLSLRL

SEQ ID NO: 6157 - protein, 1092 aa, Idaea aversata
MTTYRDRMLPLFQTLEPTVSVSAQRLSDQVRAIQRCKLLDDSTLDRLRTEALPIDMTSDSRRDPPALSSLTPNQVSLASMSRVDLGAEDDDFANMSVSTRCNEHLRRTLEDAIQLYRSPASSRPRLPRLPTHRRNLALVGALDDLLAPYLGASEDLIDTHSILYCGAITACRVARVRFPDPDRAPRPPSYVPAWQVRIERRIDTFRTLIAKLICFRGGNTRPRVMRFVNQAFAGTGIRPQQYMSCVTERIDFLKQKIYAWAKRIRRYRERVDRYQLNRMFQSDQRKVYRSWEKPSQRVIDGQRPDSRTMINFWRDIWSVPVDHTEGDWMRVVSDACEPIETMEAISITPLDVKCAIRTAQNWKSPGPDGLHNFWLKWFRSSHVRLATQFQEALQLGSLPSFLTTGVTFLLHKSGSTTEAKNYRPITCLPTIYKLLTSILTVKINSHIVANNILAPAQNGCRVGSRGTKELLLIDMAVCQQVRRNRRNISTAWIDYKKAYDSVPHSWLRRVLELYKIDTTLRNFLDSCMRQWITVLCQPGGVDTLSEPEDYIRIERGIFQGDSLSPLWFCLALNPLSTLLKNSGLGYRLRREGEIISHLLYMDDLKLFATKKPELVALLEITHNFSSAINMEFGIDKCAVLHVQQGKVVNSSDLQLSETISLRSLSEGETYKYLGMAEALAIDGDVKQSVKERFFGRLTKVLNSLLSGGNKVRAFNGWVMPLLIYTFGILRWTQTELDALDRRVRSQLTVHRMLHPRSSVMRLYIPRKSGGRGFLNAKTLHNREVCSLREYFLGSESGMHCDVVAVDNNLTPLSLAKENWRKPSILSVEDRKDIWKSKELHGRFYRALTDPDVDFLASVNWLRFGDLFGETEGFVCAIADEVMMTNNYRKYILKDGTVDICRACHRPGESLRHIISGCSHLANGEYLHRHNLVARIIHQQLALKYGLVDQEVPYYQYAPAPVLENGRAMLYWDRSIITDRTIVANKPDIVIVDRSERRAILVDITVPHDVNLVKAEKDKETKYLDLAHEITAMWDVDSTSIVPIVVSANGLIAKSLDQHLKRLSLDGWVKGQIQKAVVLDTARIVRRFLSLQP

SEQ ID NO: 6158 - protein, 1211 aa, Idaea aversata
MITRSKNTNKKTAHTERARPPARQPVTSHESSDEEVYFTPPDTRGSASSSESGLSSPTPPPPPARRRGRPPSARLGPAGHSVPRPAPATDGVVRRMRWSQTMNENCMRAYYRATKGGTFMTTYRDRMLPLFQTLEPTVSVSAQRLSDQVRPIQRCKLLDDSTLDRLRTEALPIDMTSDSRRDPPAPSSLTPNQVSLASMSRVDLGAEDDDFANMSVSTQCNEHLRRTLEDAIQLYRSPASSRPRLPRLPTHRRNLALVGALDDLLAPYLGASEDLIDTHSILYCGAITACRVARVRFPDPDRAPRPPSYVPAWQVRIERRIDTFRTLIAKLICFRGGNTRPRVMRFVNQAFAGTGIRPQQYMSCVTERIDFLKQKIYAWAKRIRRYRERVDRYQLNRMFQSDQRKVYRSWEKPSQRVIDEQRPDSRTMINFWRDIWSVPVDHTEGDWMRVVSDACEPIETMEAISITPLDVKCAIRTAQNWKSPGPDGLHNFWLKWFRSSHVRLATQFQEALQLGSLPSFLTTGVTFLLHKSGSTTEAKNYRPITCLPTIYKLLTSILTVKINSHIVANNILAPAQNGCRVGSRGTKELLLIDMAVCKQVRRNRRNISTAWIDYKKAYDSVPHSWLRRVLELYKIDTTLRNFLDSCMRQWITVLCQPGGVDTLSEPEDYIRIERGIFQGDSLSPLWFCLALNPLSTLLKNSGLGYRLRREGEIISHLLYMDDLKLFATKKPELVALLEITHNFSSAINMEFGIDKCAVLHVQRGKVVNSSDLQLSETISLRSLSEGETYKYLGMAEALAIDGDVKQSVKERFFGRLTKVLNSLLSGGNKVRAFNGWVMPLLIYTFGILRWTQTELDALDRRVRSQLTVHRMLHPRSSVMRLYIPRKSGGRGFLNAKTLHNREVCSLREYFLGSESGMHCDVVAVDNNLTPLSLAKENWRKPSILSVEDRKDIWKSKELHGRFYRALTDPDVDFLASVNWLRFGDLFGETEGFVCAIADEVMMTNNYRKYILKDGTVDICRACHRPGESLRHIISGCSHLANGEYLHRHNLVARIIHQQLALKYGLVDQEVPYYQYAPAPVLENGRAMLYWDRSIITDRTIVANKPDIVIVDRSERRAILVDITVPHDVNLVKAEKDKETKYLDLAHEITAMWDVDSTSIVPIVVSANGLIAKSLDQHLKRLSLDGWVKGQIQKAVVLDTARIVRRFLSLQP

SEQ ID NO: 6159 - protein, 1211 aa, Idaea aversata
MITRSKNTNKKTAHTERARPPARQPVTSHESSDEEVYFTPPDTRGSASSSESGLSSPTPPPPPARRRGRPPSARLGPAGHSVPRPAPATDGVVRRMRWSQTMNENCMRAYYRATKGGTFMTTYRDRMLPLFQTLEPTVSVSAQRLSDQVRAIQRCKLLDDSTLDRLRTEALPIDMTSDSRRDPPAPSSLTPNQVSLATMSRVDLGAEDDDFANMSVSTQCNEHLRRTLEDAIQLYRSPASSRPRLPRLPTHRRNLALVGALDDLLAPYLGASEDLIDTHSILYCGAITACRVARVRFPDPDRAPRPPSYVPAWQVRIERRIDTFRTLIAKLICFRGGNTRPRVMRFVNQAFAGTGIRPQQYMSCVTERIDFLKQKIYAWAKRIRRYRERVDRYQLNRMFQSDQRKVYRSWEKPSQRVIDEQRSDSRTMINFWRDIWSVPVDHTEGDWMRVVSDACEPIETMEAISITPLDVKCAIRTAQNWKSPGPDGLHNFWLKWFRSSHVRLATQFQEALQLGSLPSFLTTGVTFLLHRSGSTTEAKNYRPITCLPTIYKLLTSILTVKINSHIVANNILAPAQNGCRVGSRGTKELLLIDMAVCQQVRRNRRNISTAWIDYKKAYDSVPHSWLRRVLELYKIDTTLRNFLDSCMRQWITVLCQPGGVDTLSEPEDYIRIERGIFQGDSLSPLWFCLALNPLSTLLKNSGLGYRLRREGEIISHLLYMDDLKLFATKKPELVALLEITHNFSSAINMEFGIDKCAVLHVQRGKVVNSSDLQLSETISLRSLSEGETYKYLGMAEALAIDGDVKQSVKERFFGRLTKVLNSLLSGGNKVRAFNGWVMPLLIYTFGILRWTQTELDALDRRVRSQLTVHRMLHPRSSVMRLYIPRKSGGRGFLNAKTLHNREVCSLREYFLGSESGMHCDVVAVDNNLTPLSLAKENWRKPSILSVEDRKDIWKSKELHGRFYRALTDPDVDFLASVNWLRFGDLFGETEGFVCAIADEVMMTNNYRKYILKDGTVDICRACHRPGESLRHIISGCSHLANGEYLHRHNLVARIIHQQLALKYGLVDQEVPYYQYAPAPVLENGRAMLYWDRSIITDRTIVANKPDIVIVDRSERRAILVDITVPHDVNLVKAEKDKETKYLDLAHEITAMWDVDSTSIVPIVVSANGLIAKSLDQHLKRLSLDGWVKGQIQKAVVLDTARIVRRFLSLQP

SEQ ID NO: 6160 - protein, 1212 aa, Idaea aversata
MITRQKVKNATTGTARLHAQPPARQPVTSHESSDEEVYYTPPDTRGSASSSESGLSSPTPPPPPARRRGRPPSARLGPAGHSVPRPALATDGVVRRMRWSQTMNENCMRAYYRATKGGTFMTTYRDRMLPLFQALEPTVSVSAQRLSDQVRAIQRCKLLDDSTLDRLRTEALPIGMTSDSQRDPPAPPSLTPNQVSLAVMSRVDLVAEEDDSANMSVSTQCNEHLRRTLEDAIQLYRSPASSRPRLPRLPTHRRNLALVGALDDLLAPYLGASEDLIDTHSILYCGAITACRVARVRFPDPDRAPRPPSYVPAWQVRIERRIDTFRTLIAKLICFRGGNTRPRVMRFVNQAFAGTGIRPQQYMSCVTERIDFLKQKIYAWAKRIRRYRERVDRYQLNSMFQSDQRKVYRSWEKPSQRVIDEQRPDSRTMINFWRDIWSVPVDHTEGDWMCVVSDACEPIETMEAISITPLDVKCAIRTAQNWKSPGPDGLHNFWLKWFRSSHVRLATQFQEALELGSLPSFLTTGVTFLLHKSGSTTEAKNYRPITCLPTIYKLLTSILTVKINSHIIANNILAPAQNGCRVGSRGTKERLLIDMAVCQQVRRNRRNISTAWIDYKKAYDSVPHSWLRRVLELYKIDTTLRNFLDSCMRQWITVLCQPGGVDTLSEPEDYIRIERGIFQGDSLSPLWFCLALNPLSTLLKNSGLGYRLRREGEVISHLLYMDDLKLFATKKPELVALLEITHNFSSAINMEFGIDKCAVLHVQRGKVVNSSDLQLSETISLRSLSEGETYKYLGMAEALAIDGDVKQSVKERFFGRLTKVLNSLLSGGNKVRAFNGWVMPLLIYTFGILRWTQTELDALDRRVRSQLTVHRMLHPRSSVMRLYIPRKSGGRGFLNAKTLHNREVCSLREYFLGSESGMHCDVVAVDNNLTPLSLAKENWRKPSILSVEDRKDIWKSKELHGRFYRALTDPDVDFLASVNWLRFGDLFGETEGFVCAIADEVMMTNNYRKYILKDGTVDICRACHRPGESLRHIISGCSHLANGEYLHRHNLVARIIHQQLALKYGLVDQEVPYYQYAPAPVLENGRAMLYWDRSIITDRTIVANKPDIVIVDRSERRAILVDITVPHDVNLVKAEKDKETKYLDLAHEITAMWDVDSTSIVPIVVSANGLIAKSLDQHLKRLSLDGWVKGQIQKAVILDTARIVRRFLSLRL

SEQ ID NO: 6161 - protein, 1212 aa, Idaea aversata
MITRQKVKNATTGTARLHAQPPARQPVTSHESSDEEVYYTPPDTRGSASSSESGLSSPTPPPPPARRRGRPPSARLGPAGHSVPRPALATDGVVRRMRWSQTMNENCMRAYYRATKGGTFMTTYRDRMLPLFQALEPTVSVSAQRLSDQVRAIQRCKLLDDSTLDRLRTEALPIGMTSDSQRDPPAPPSLTPNQVSLAVMSRVDLVAEEDDSANMSVSTQCNEHLRRTLEDAIQLYRSPASSRPRLPRLPTHRRNLALVGALDDLLAPYLGASEDLIDTHSILYCGAITACRVARVRFPDPDRAPRPPSYVPAWQVRIERRIDTFRTLIAKLICFRGGNTRPRVMRFVNQAFAGTGIRPQQYMSCVTERIDFLKQKIYAWAKRIRRYRERVDRYQLNRMFQSDQRKVYRSWEKPSQRVIDEQRPDSRTMINFWRDIWSVSVDHTEGDWMRVVSDACEPIETMEAISITPLDVKCAIRTAQNWKSPGPDGLHNFWLKWFRSSHVRLATQFQEALQLGSLPSFLTTGVTFLLHKSGSTTEAKNYRPITCLPTIYKLLTSILTVKMNSHIVANNILAPAQNGCRVGSRGTKELLLIDMAVCQQVRRNRRNISTAWIDYKKAYDSVPHSWLGRVLELYKIDTTLRNFLDSCMRQWITVLCQPGGVDTLSEPEDYIRIERGIFQGDSLSPLWFCLALNPLSTLLKNSGLGYRLRREGEIISHLLYMDDLKLFATKKPELVALLEITHNFSSAINMEFGIDKCAVLHVQRGKVVNSSDLQLSETISLRSLSEGETYKYLGMAEALAIDGDVKQSVKERFFGRLTKVLNSLLSGGNKVRAFNGWVMPLLIYTFGILRWTQTELDALDRRVRSQLTVHRMLHPRSSVMRLYIPRKSGGRGFLNAKTLHNREVCSLREYFLGSESGMHCDVVAVDNNLTPLSLAKENWRKPSILSVEDRKDIWKSKELHGRFYRALTDPDVDFLASVNWLRFGDLFGETEGFVCAIADEVMMTNNYRKYILKDGTVDICRACHRPGESLRHIISGCSHLANGEYLHRHNLVARIIHQQLALKYGLVDQEVPYYQYAPAPVLENGRAMLYWDRSIITDRTIVANKPDIVIVDRSERRAILVDITVPHDVNLVKAEKDKETKYLDLAHEITAMWDVDSTSIVPIVVSANGLIAKSLDQHLKRLSLDGWVKGQIQKAVVLDTARIVRRFLSLQP

SEQ ID NO: 6162 - protein, 1167 aa, Idaea aversata
MITRSKNTNKKTAYTERARPPARQPVTSHESSDEEVYFTPPDTRGSASSSESGLSSPTPPPPSARRRGRPPSARLGPAGHSVPRPAPATDGVVRRMRWSQTMNENCMRAYYRATKGGTFMTTYRDRMLPLFQTLEPTVSVSAQRLSDQVRAIQRCKLLDDSTLDRLRTEALPIDMTSDSRRDPPAPSSLTPNQVSLASMSRVDLGAEDDDFANMSVSTQCNEHLRRTLEDAIQLYRSPASSRPRLPRLPTHRRNLALVGALDDLLAPYLRASEDLIDSHSILYCGAITACRVARVRFPDPDRAPRPPSYVPAWQVRIERRIDTFRTLIAKLICFRGGNTRPRVMRFVNQAFAGTGIRPQQYMSCVTERIDFLKQKIYAWAKRIRRYRERVDRYQLNRMFQSDQRKVYRSWEKPSQRVIDEQRPDSRTMINFWRDIWSVPVDHTEGDWMRVVSDACEPIETMEAISITPLDVKCAIRTAQNWKSPGPDGLHNFWLKWFRSSHVRLATQFQEALQLGSLPSFLTTGVTFLLHKSGSTTEAKNYRPITCLPTIYKLLTSILTVKINSHIVANNILAPAQNGCRVGSRGTKELLLIDMAVCQQVRRNRRNISTAWIDYKKAYDSVPHSWLRRVLELYKIDTTLRNFLDSCMRQWITVLCQPGGVDTLSEPEDYIRIERGIFQGDSLSPLWFCLALNPLSTLLKNSGLGYRLRREGEIISHLLYMDDLKLFATKKPELVALLEITHNFSSAINMEFGIDKCAVLHVQRGKVVNSSDLQLSETISLRSLSEGETYKYLGMAEALAIDGDIKQSVKERFFGRLTKVLNSLLSGGNKVRAFNGWVMPLLIYTFGILRWTQTEVDALDRRVRSQLTVHRMLHPRSSVMRLYIPRKSGGRGFLNAKTLHNREVCSLREYFLGSESGMHCDVVAVDNNLTPLSLAKENWRKPSILSVEDRKDIWKSKELHGRFYRALTDPDVDFLASVNWLRFGDLFGETEGFVCAIADEVMMTNNYRKYILKDGTVDICRVCHRPGESLRHIISGCSHLANGEYLHRHNLVARIIHQQLALKYGLVDQEVPYYQYAPAPVLENGRAMLYWDRSIITDRTIVANKPDIVIVDRSERRAILVDITVPHDVNLVKAEKDKETKYLDLAHEITAMWDVDSTSIVPIVVLTR

SEQ ID NO: 6163 - protein, 1212 aa, Idaea aversata
MITRQKVKNATTGTARLHAQPPARQPVTSHESSDEEVYYTPPDTRGSASSSESGLSSPTPPPPPARRRGRPPSARLGPAGHSVPRPALATDGVVRRMRWSQTMNENCMRAYYRATKGGTFMTTYRDRMLPLFQALEPTVSVSAQRLSDQVRAIQRCKLLDDSTLDRLRTEALPIGMTSDSQRDPPAPPSLTPNQVSLAVMSRVDLVAEEDDSANMSVSTQCNEHLRRTLEDAIQLYRSPASSRPRLPRLPTHRRNLALVGALDDLLAPYLGASEDLIDTHSILYCGAITACRVARVRFPDPDRAPRPPSYVPAWQVRIERRIDTFRTLIAKLICFRGGNTRPRVMRFVNQAFAGTGIRPQQYMSCVTERIDFLKQKIYAWAKRIRRYRERVDRYQLNRMFQSDQRKVYRSWEKPSQRVIDEQRPDSRTMINFWRDIWSVSVDHTEGDWMRVVSDACEPIETMEAISITPLDVKCAIRTAQNWKSPGPDGLHNFWLKWFRSSHVRLATQFQEALQLGSLPSFLTTGVTFLLHKSGSTTEAKNYRPITCLPTIYKLLTSILTVKMNSHIVANNILAPAQNGCRVGSRGTKELLLIDMAVCQQVRRNRRNISTAWIDYKKAYDSVPHSWLRRVLELYKIDTTLRNFLDSCMRQWITVLCQPGGVDTLSEPEDYIRIERGIFQGDSLSPLWFCLALNPLSTLLKNSGLGYRLRREGEIISHLLYMDDLKLFATKKPELVALLEITHNFSSAINMEFGIDKCAVLHVQRGKVVNSSDLQLSETISLRSLSEGETYKYLGMAEALAIDGDVKQSVKERFFGRLTKVLNSLLSGGNKVRAFNGWVMPLLIYTFGILRWTQTELDALDRRVRSQLTVHRMLHPRSSVMRLYIPRKSGGRGFLNAKTLHNREVCSLREYFLGSESGMHCDVVAVDNNLTPLSLAKENWRKPSILSVEDRKDIWKSKELHGRFYRALTDPDVDFLASVNWLRFGDLFGETEGFVCAIADEVMMTNNYRKYILKDGTVDICRACHRPGESLRHIISGCSHLANGEYLHRHNLVARIIHQQLALKYGLVDQEVPYYQYAPAPVLENGRAMLYWDRSIITDRTIVANKPDIVIVDRSERRAILVDITVPHDVNLVKAEKDKETKYLDLAHEITAMWDVDSTSIVPIVVSANGLIAKSLDQHLKRLSLDGWVKGQIQKAVVLDTARIVRRFLSLQL

SEQ ID NO: 6164 - protein, 1212 aa, Idaea aversata
MITRQKVKNATTGTARLHAQPPARQPVTSHESSDEEVYYTPPDTRGSASSSESGLSSPTPPPPPARRRGRPPSARLGPAGHSVPRPALATDGVVRRMRWSQTMNENCMRAYYRATKGGTFMTTYRDRMLPLFQALEPTVSVSAQRLSDQVRAIQRCKLLDDSTLDRLRTEALPIGMTSDSQRDPPAPPSLTPNQVSLAVMSRVDLVAEEDDSANMSVSTQCNEHLRRTLEDAIQLYRSPASSRPRLPRLPTHRRNLALVGALDDLLAPYLGASEDLIDTHSILYCGAITACRVARVRFPDPDRAPRPPSYVPAWQVRIERRIDTFRTLIAKLICFRGGNTRPRVMRFVNQAFAGTGIRPQQYMSCVTERIDFLKQKIYAWAKRIRRYRERVDRYQLNRMFQSDQRKVYRSWEKPSQRVIDEQRPDSRTMINFWRDIWSVSVDHTEGDWMRVVSDACEPIETMEAISITPLDVKCAIRTAQNWKSPGPDGLHNFWLKWFRSSHVRLATQFQEALQLGSLPSFLTTGVTFLLHKSGSTTEAKNYRPITCLPTIYKLLTSILTVKMNSHIVANNILAPAQNGCRVGSRGTKELLLIDMAVCQQVRRNRRNISTAWIDYKKAYDSVPHSWLRRVLELYKIDTTLRNFLDSCMRQWITVLCQPGGVDTLSEPEDYIRIERGIFQGDSLSPLWFCLALNPLSTLLKNSGLGYRLRREGEIISHLLYMDDLKLFATKKPELVALLEITHNFSSAINMEFGIDKCAVLHVQRGKVVNSSDLQLSETISLRSLSEGETYKYLGMAEALAIDGDVKQSVKERFFGRLTKVLNSLLSGGNKVRAFNGWVMPLLIYTFGILRWTQTELDALDRRVRSQLTVHRMLHPRSSVMRLYIPRKSGGRGFLNAKTLHNREVCSLREYFLGSESGMHCDVVAVDNNLTPLSLAKENWRKPSILSVEDRKDIWKSKELHGRFYRALTDPDVDFLASVNWLRFGDLFGETEGFVCAIADEVMMTNNYRKYILKDGTVDICRACHRPGESLRHIISGCSHLANGEYLHRHNLVARIIHQQLALKYGLVDQEVPYYQYAPAPVLENGRAMLYWDRSIITDRTIVANKPDIVIVDRSERRAILVDITVPHDVNLVKAEKDKETKYLDLAHEITAMWDVDSTSIVPIVVSANGLIAKSLDQHLKRLSLDGWVKGQIQKAVVLDTARIVRRFLSLQP

SEQ ID NO: 6165 - protein, 1212 aa, Idaea aversata
MITRQKVKNATTGTARLHAQPPARQPVTSHESSDEEVYYTPPDTRGSASSSESGLSSPTPPPPPARRRGRPPSARLGPAGHSVPRPALATDGVVRRMRWSQTMNENCMRAYYRATKGGTFITTYRDRMLPLFQALEPTVSVSAQRLSDQVRAIQRCKLLDDSTLDRLRTEALPIGMTSDSQRDPPAPPSLTPNQVSLAVMSRVDLVAEEDDSANMSVSTQCNEHLRRTLEDAIQLYRSPASSRPRLPRLPTHRRNLALVGALDDLLAPYLGASEDLNDTHSILYCGAITACRVARVRFPDPDRAPRPPSYVPAWQVRIERRIDTFRTLIAKLICFRGGNTRPRVMRFVNQAFAGTGIRPQQYMSCVTERIDFLKQKIYAWAKRIRRYRERVDRYQLNSMFQSDQRKVYRSWEKPSQRVIDEQRPDSRTMINFWRDIWSVPVDHTEGDWMRVVSDACEPIETMEAISITPLDVKCAIRTAQNWKSPGPDGLHNFWLKWFRSSHVRLATQFQEALELGSLPSFLTTGVTFLLHKSGSTTEAKNYRPITCLPTIYKLLTSILTVKINSHIVANNILAPAQNGCRVGSRGTKELLLIDMAVCQQVRRNRRNISTAWIDYKKAYDSVPHSWLRRVLELYKIDTTLRNFLDSCMRQWITVLCQPGGVDTLSEPEDYIRIERGIFQGDSLSPLWFCLALNPLSTLLKNTGLGYRLRREGEVISHLLYMDDLKLFATKKPELVALLEITHNFSSAINMEFGIDKCAVLHVQRGKVVNSSDLQLSETISLRSLSEGETYKYLGMAEALAIDGDVKQSVKDRFFGRLTKVLNSLLSGGNKVRAFNGWVMPLLIYTFGILRWTQTELDALDRRVRSQLTVHRMLHPRSSVMRLYIPRKSGGRGFLNAKTLHNREVCSLREYFLGSESGMHCDVVAVDNNLTPLSLAKENWRKPSILSVEDRKDIWKSKELHGRFYRALTDPDVDFLGSVNWLRFGDLFGETEGFVCAIADEVMMTNNYRKYILKDGTVDICRACHRPGESLRHIISGCSHLANGEYLHRHNLVARIIHQQLALKYGLVDQEVPYYQYAPAPVLENGRAMLYWDRSIITDRTIVANKPDIVIVDRSERRAILVDITVPHDVNLVKAEKDKETKYLDLAHEITAMWDVDSTSIVPIVVSANGLIAKSLDQHLKRLSLDGWVKGQIQKAVILDTARIVRRFLSLRL

SEQ ID NO: 6166 - protein, 1212 aa, Idaea aversata
MITRQKVKNATTGTARLHAQPPARQPVTSHESSDEEVYYTPPDTRGSASSSESGLSSPTPPPPPARRRGRPPSARLGPAGHSVPRPALATDGVVRRMRWSQTMNENCMRAYYRATKGGTFMTTYRDRMLPLFQALEPTVSVSAQRLSDQVRAIQRCKLLDDSTLDRLRTEALPIGMTSDSQRDPPAPPSLTPNQVSLAVMSRVDLVAEEDDSANMSVSTQCNEHLRRTLEDAIQLYRSPASSRPRLPRLPTHRRNLALVGALDDLLAPYLGASEDLIDTHSILYCGAITACRVARVRFPDPDRAPRPPSYVPAWQVRIERRIDTFRTLIAKLICFRGGNTRPRVMRFVNQAFAGTGIRPQQYMSCVTERIDFLKQKIYAWAKRIRRYRERVDRYQLNRMFQSDQRKVYRSWEKPSQRVIDEQRPDSRTMINFWRDIWSVSVDHTEGDWMRVVSDACEPIETMEAISITPLDVKCAIRTAQNWKSPGPDGLHNFWLKWFRSSHVRLATQFQEALQLGSLPSFLTTGVTFLLHKSGSTTEAKNYRPITCLPTIYKLLTSILTVKMNSHIVANNILAPAQNGCRVGSRGTKELLLIDMAVCQQVRRNRRNISTAWIDYKKAYDSVPHSWLRRVLELYKIDTTLRNFLDSCMRQWITVLCQPGGVDTLSEPEDYIRIERGIFQGDSLSPLWFCLALNPLSTLLKNSGLGYRLRREGEIISHLLYMDDLKLFATKKPELVALLEITHNFSSAINMEFGIDKCAVLHVQRGKVVNSSDLQLSETISLRSLSEGETYKYLGMAEALAIDGDVKQSVKERFFGRLTKVLNSLLSGGNKVRAFNGWVMPLLIYTFGTLRWTQTELDALDRRVRSQLTVHRMLHPRSSVMRLYIPRKSGGRGFLNAKTLHNREVCSLREYFLGSESGMHCDVVAVDNNLTPLSLAKENWRKPSILSVEDRKDIWKSKELHGRFYRALTDPDVDFLASVNWLRFGDLFGETEGFVCAIADEVMMTNNYRKYILKDGTVDICRACHRPGESLRHIISGCSHLANGEYLHRHNLVARIIHQQLALKYGLVDQEVPYYQYAPAPVLENGRAMLYWDRSIITDRTIVANKPDIVIVDRSERRAILVDITVPHDVNLVKAEKDKETKYLDLAHEITAMWDVDSTSIVPIVVSANGLIAKSLDQHLKRLSLDGWVKGQIQKAVVLDTARIVRRFLSLQP

SEQ ID NO: 6167 - protein, 1037 aa, Idaea aversata
MTSDSQRDPPAPPSLTPNQVSLAVMSRVDLVAEEDDSANMSVSTQCNEHLRRTLEDAIQLYRSPASSRPRLPRLPTHRRNLALVGALDDLLAPYLGASEDLIDTHSILYCGAITACRVARVRFPDPDRAPRPPSYVPAWQVRIERRIDTFRTLIAKLICFRGGNTRPRVMRFVNQAFAGTGIRPQQYMSCVTERIDFLKQKIYAWAKRIRRYRERVDRYQLNSMFQSDQRKVYRSWEKPSQRVIDEQRPDSRTMINFWRDIWSVPVDHTEGDWMRVVSDACEPIETMEAISITPLDVKCAIRTAQNWKSPGPDGLHNFWLKWFRSSHVRLATQFQEALELGSLPSFLTTGVTFLLHKSGSTTEAKNYRPITCLPTIYKLLTSILTVKINSHIVANNILAPAQNGCRVGSRGTKELLLIDMAVCQQVRRNRRNISTAWIDYKKAYDSVPHSWLRRVLELYKIDTTLRNFLDSCMRQWITVLCQPGGVDTLSEPEDYIRIERGIFQGDSLSPLWFCLALNPLSTLLKNSGLGYRLRREGEVISHLLYMDDLKLFATKKPELVALLEITHNFSSAINMEFGIDKCAVLHVQRGKVVNSSDLQLSETISLRSLSEGETYKYLGMAEALAIDGDVKQSVKERFFGRLTKVLNSLLSGGNKVRAFNGWVMPLLIYTFGILRWTQTELDALDRRVRSQLTVHRMLHPRSSVMRLYIPRKSGGRGFLNAKTLHNREVCSLREYFLGSKSGMHCDVVAVDNNLTPLSLAKENWRKPSILSVEDRKDIWKRKELHGRFYRALTDPDVDFLASVNWLRFGDLFGETEGFVCAIADEVMMTNNYRKYILKDGTVDICRACHRPGESLRHIISGCSHLANGEYLHRHNLVARIIHQQLALKYGLVDQEVPYYQYAPAPVLENGRAMLYWDRSIITDRTIVANKPDIVIVDRSERRAILVDITVPHDVNLVKAEKDKETKYLDLAHEITAMWDVDSTSIVPIVVSANGLIAKSLDQHLKRLSLDGWVKGQIQKAVILDTARIVRRFLSLQP

SEQ ID NO: 6168 - protein, 1212 aa, Idaea aversata
MITRQKVKNATTGTARLHAQPPARQPVTSHESSDEEVYYTPPDTRGSASSSESGLSSPTPPPPPARRRGRPPSARLGPAGHSVPRPALATDGVVRRMRWSQTMNENCMRAYYRATKGGTFMTTYRDRMLPLFQALEPTVSVSAQRLSDQVRAIQRCKLLDDSTLDRLRTEALPIGMTSDSQRDPPAPPSLTPNQVSLAVMSRVDLVAEEDDSANMSVSTQCNEHLRRTLEDAIQLYRSPASSRPRLPRLPTHRRNLALVGALDDLLAPYLGASEDLIDTHSILYCGAITACRVARVRFPDPDRAPRPPSYVPAWQVRIERRIDTFRTLIAKLICFRGGNTRPRVMRFVNQAFAGTGIRPQQYMSCVTERIDFLKQKIYAWAKRIRRYRERVDRYQLNSMFQSDQRKVYRSWEKPSQRVIDEQRPDSRTMINFWRDIWSVPVDHTEGDWMRVVSDACEPIETMEAISITPLDVKCAIRTAQNWKSPGPDGLHNFWLKWFRSSHVRLATQFQEALELGSLPSFLTTGVTFLLHKSGSTTEAKNYRPITCLPTIYKLLTSILTVKINSHIVANNILAPAQNGCRVGSRGTKELLLIDMAVCQQVRRNRRNISTAWIDYKKAYDSVPHSWLRRVLELYKIDTTLRNFLDSCMRQWITVLCQPGGVDTLSEPEDYIRIERGIFQGDSLSPLWFCLALNPLSTLLKNSGLGYRLRREGEVISHLLYMDDLKLFATKKPELVALLEITHNFSSAINMEFGIDKCAVLHVQRGKVVNSSDLQLSETISLRSLSEGETYKYLGMAEALAIDGDVKQSVKERFFGRLTKVLNSLLSGGNKVRAFNGWVMPLLIYTFGILRWTQTELDALDRRVRSQLTVHRMLHPRSSVMRLYIPRKSGGRGFLNAKTLHNREVCSLREYFLGSESGMHCDVVAVDNNLTPLSLAKENWRKPSILSVEDRKDIWKSKELHGRFYRALTDPDVDFLASVNWLRFGDLFGETEGFVCAIADEVMMTNNYRKYILKDGTVDICRACHRPGESLRHIISGCSHLANGEYLHRHNLVARIIHQQLALKYGLVDQEVPYYQYAPAPVLENGRAMLYWDRSIITDRTIVANKPDIVIVDRSERRAILVDITVPHDVNLVKAEKDKETKYLDLAHEITAMWDVDSTSIVPIVVSANGLIAKSLDQHLKRLSLDGWVKGQIQKAVILDTARIVRRFLSLRL

SEQ ID NO: 6169 - protein, 1212 aa, Idaea aversata
MITRQKVKNATTGTARLHAQPPARQPVTSHESSDEEVYYTPPDTRGSASSSESGLSSPTPPPPPARRRGRPPSARLGPAGHSVPRPALATDGVVRRMRWSQTMNENCMRAYYRATKGGTFITTYRDRMLPLFQALEPTVSVSAQRLSDQVRAIQRCKLLDDSTLDRLRTEALPIGMTSDSQRDPPAPPSLTPNQVSLAVMSQVDLVAEEDDSANMSVSTQCNEHLRRTLEDAIQLYRSPASSRPRLPRLPTHRRNLALVGALDDLLAPYLGASEDLIDTHSILYCGAITACRVARVRFPDPDRAPRPPSYVPAWQVRIERRIDTFRTLIAKLICFRGGNTRPRVMRFVNQAFAGTGIRPQQYMSCVTERIDFLKQKIYAWAKRIRRYRERVDRYQLNSMFQSDQRKVYRSWEKPSQRVIDEQRPDSRTMINFWRDIWSVPVDHTEGDWMRVVSDACEPIETMEAISITPLDVKCAIRTAQNWKSPGPDGLHNFWLKWFRSSHVRLATQFQEALELGSLPNFLTTGVTFLLHKSGSTTEAKNYRPITCLPTIYKLLTSILTVKINSHIVANNILAPAQNGCRVGSRGTKELLLIDMAVCQQVRRNRRNISTAWIDYKKAYDSVPHSWLRRVLELYKIDTTLRNFLDSCMRQWITVLCQPGGVDTLSEPEDYIRIERGIFQGDSLSPLWFCLALNPLSTLLKNSGLGYRLRREGEVISHLLYMDDLKLFATKKPELVALLEITHNFSSAINMEFGIDKCAVLHVQRGKVVNSSDLQLSEKISLRSLSEGETYKYLGMAEALAIDGDVKQSVKERFFGRLTKVLNSLLSGGNKVRAFNGWVMPLLIYTFGILRWTQTELDALDRRVRSQLTVHRMLHPRSSVMRLYIPRKSGGRGFLNAKTLHNREVCSLREYFLGSESGMHCDVVAVDNNLTPLSLAKENWRKPSILSVEDRKDIWKSKELHGRFYRALTDPDVDFLASVNWLRFGDLFGETEGFVCAIADEVMMTNNYRKYILKDGTVDICRACHRPGESLRHIISGCSHLANGEYLHRHNLVARIIHQQLALKYGLVDQEVPYYQYAPAPVLENGRAMLYWDRSIITDRTIVANKPDIVIVDRSERRAILVDITVSHDVNLVKAEKDKETKYLDLAHEITAMWDVDSTSIVPIVVSANGLIAKSLDQHLKRLSLDGWVKGQIQKAVILDTARIVRRFLSLRL

SEQ ID NO: 6170 - protein, 1211 aa, Idaea aversata
MITRSKNTNKKTAHTERARPPARQPVTSHESSDEEVYFTPPDTRGSASSSESGLSSPTPPPPPARRRGRPPSARLGPAGHSVPRPAPATDGVVRRMRWSQTMNENCMRAYYRATKGGTFMTTYRDRMLPLFQTLEPTVSVSAQRLSDQVRAIQRCKLLDDSTLDRLRTEALPIDMTSDSRRDPPAPLSLTPNQVSLASMSRVDLGAEDDDFANMSVSTQCNEHLRRTLEDAIQLYRSPASSRPRLPRLPTHRRNLALVGALDDLLAPYLGASEDLIDTHSILYCGAITACRVARVRFPDPDRAPRPPSYVPAWQVRIERRIDTFRTLIAKLICFRGGNTRPRVMRFVNQAFAGTGIRPQQYMSCVTERIDFLKQKIYAWAKRIRRYRERVDRYQLNRMFQSDQRKVYRSWEKPSQRVIDEQRPDSRTMINFWRDIWSVPVDHTEGDWMRVVSDACEPIETMEAISITPLDVKCAIRTAQNWKSPGPDGLHNFWLKWFRSSHVRLATQFQEALQLGSLPSFLTTGVTFLLHKSGSTTEAKNYRPITCLPTIYKLLTSILTVKINMHIVANNILAPAQNGCRVGSRGTKELLLIDMAVCQQVRRNRRNISTAWIDYKKAFDSVPHSWLRRVLELYKIDTTLRNFLDSCMRQWITVLCQPGGVDTLSEPEDYIRIERGIFQGDSLSPLWFCLALNPLSTLLKNSGLGYRLRREGEIISHLLYMDDLKLFATKKPELVALLEITHNFSSAINMEFGIDKCAVLHVQRGKVVNSSDLQLSETISLRSLSEGETYKYLGMAEALAIDGDVKQSVKERFFGRLTKVLNSLLSGGNKVRAFNGWVMPLLIYTFGILRWTQTELDALDRRVRSQLTVHRMLHPRSSVMRLYIPRKSGGRGFLNAKTLHNREVCSLREYFLGSESGMHCDVVAVDNNLTPLSLAKENWRKPSILSVEDRKDIWKSKELHGRFYRALTDPDVDFLASVNWLRFGDLFGETEGFVCAIADEVMMTNNYRKYILKDGTVDICRACHRPGESLRHIISGCSHLANGEYLHRHNLVARIIHQQLALKYGLVDQEVPYYQYAPAPVLENGRAMLYWDRSIITDRTIVANKPDIVIVDRSERRAILVDITVPHDVNLVKAEKDKETKYLDLAHEITAMWDVDSTSIVPIVVSANGLIAKSLDQHLKRLSLDGWVKGQIQKAVVLDTARIVRRFLSLQP

SEQ ID NO: 6171 - protein, 1126 aa, Idaea aversata
MKSTDGVVRRMRWSQTMNENCMRAYYRATKGGTFMTTYRDRMLPLFQTLEPTVSVSAQRLSDQVRAIQRCKLLDDSTLDRLRTEALPIDMTSDSRRDPPAPSSLTPNQVSLASMSRVDLGAEDDDFANMSVSTQCNEHLRRTLEDAIQLYRSPASSRPRLPRLPTHRRNLALVGALDDLLAPYLGASEDLIDTHSILYCGAITACRVARVRFPDPDRAPRPPSYVPAWQVRIERRIDTFRTLIAKLICFRGGNTRPRVMRFVNQAFAGTGIRPQQYMSCVKERIDFLKQKIYAWAKRIRRYRERVDRYQLNRMFQSDQRKVYRSWEKPSQRVIDEQRPDSRTMINFWRDIWSVPVDHTEGDWMRVVSDACEPIETMEAISITPLDVKCAIRTAQNWKSPGPDGLHNFWLKWFRSSHVRLATQFQEALQLGSLPSFLTTGVTFLLHKSGSTTEAKNYRPITCLPTIYKLLTSILTVKINSHIVANNILAPAQNGCRVGSRGTKELLLIDMAVCQQVRRNRRNISTAWIDYKKAYDSVPHSWLRRVLELYKIDTTLRNFLDSCMRQWITVLCQPGGVDTLSEPEDYIRIERGIFQGDSLSPLWFCLALNPLSTLLKNSGLGYRLRREGEIISHLLYMDDLKLFATKKPELVALLEITHNFSSAINMEFGIDKCAVLHVQRGKVVNSSDLQLSETISLRSLSEGETYKYLGMAEALAIDGDVKQSVKERFFGRLTKVLNSLLSGGNKVRAFNGWVMPLLIYTFGILRWTQTELDALDRRVRSQLTVHRMLHPRSSVMRLYIPRKSGGRGFLNAKTLHNREVCSLREYFLGSESGMHCDVVAVDNNLTPLSLAKENWRKPSILSVEDRKDIWKSKELHGRFYRALTDPDVDFLASVNWLRFGDLFGETEGFVCAIADEVMMTNNYRKYILKDGTVDICRACHRPGESLRHIISGCSHLANGEYLHRHNLVARIIHQQLALKYGLVDQEVPYYQYAPAPVLENGRAMLYWDLSIITDRTIVANKPDIVIVDRSERRAILVDITVPHDVNLVKAEKDKETKYLDLAHEITAMWDVDSTSIVPIVVSANGLIAKSLDQHLKRLSLDGWVKGQIQKAVVLDTARIVRRFLSLQP

SEQ ID NO: 6172 - protein, 1211 aa, Idaea aversata
MITRSKNTNKKTAHTERARPPARQPVTSHESSDEEVYFTPPDTRGSASSSESGLSSPTPPPPPARRRGRPPSARLGPAGHSVPRPAPATDGVVRRMRWSQTMNENCMRAYYRATKGGTFMTTYRDRMLPLFQTLEPTVSVSAQRLSDQVRATQRCKLLDDSTLDRLRTEALPIDMTSDSRRDPPAPSSLTPNQVSLASMSRVDLGTEDDDFANMSVSTQCNEHLRRTLEDAIQLYRSPASSRPRLPRLPTHRRNLALVGALDDLLAPYLGASEDLIDTHSILYCGAITACRVARVRFPDPDRAPRPPSYVPAWQVRIERRIDTFRTLIAKLICFRGGNTRPRVMRFVNQAFAGTGIRPQQYMSCVKERIDFLKQKIYAWAKRIRRYRERVDRYQLNRMFQSDQRKVYRSWEKPSQRVIDEQRPDSRTMINFWRDIWSVPVDHTEGDWMRVVSDACEPIETMEAISITPLDVKCAIRTAQNWKSPGPDGLHNFWLKWFRSSHVRLATQFQEALQLGSLPSFLTTGVTFLLHKSGSTTEAKNYRPITCLPTIYKLLTSILTVKINSHIVANNILAPAQNGCRVGSRGTKELLLIDMAVCQQVRRNRRNISTAWIDYKKAYDSVPHSWLRRVLELYKIDTTLRNFLDSCMRRWITVLCQPGGVDTLSEPEDYIRIERGIFQGDSLSPLWFCLALNPLSTLLKNSGLGYRLRREGEIISHLLYMDDLKLFATKKPELVALLEITHNFSSAINMEFGIDKCAVLHVQRGKVVNSSDLQLSETISLRSLSEGETYKYLGMAEALAIDGDVKQSVKERFFGRLTKVLNSLLSGGNKVRAFNGWVMPLLIYTFGILRWTQTELDALDRRVRSQLTVHRMLHPRSSVMRLYIPRKSGGRGFLNAKTLHNREVCSLREYFLGSESGMHCDVVAVDNNLTPLSLAKENWRKPSILSVEDRKDIWKSKELHGRFYRALTDPDVDFLASVNWLRFGDLFGETEGFVCAIADEVMMTNNYRKYILKDGTVDICRACHRPGESLRHIISGCSHLANGEYLHRHNLVARIIHQQLALKYGLVDQEVPYYQYAPAPVLENGRAMLYWDRSIITDRTIVANKPDIVIVDRSERRAILVDITVPHDVNLVKAEKDKETKYLDLAHEITAMWDVDSTSIVPIVVSANGLIAKSLDQHLKRLSLDGWVKGQIQKAVVLDTARIVRRFLSLQP

SEQ ID NO: 6173 - protein, 1211 aa, Idaea aversata
MITRSKNTNKKTAHTERARPPARQPVTSHESSDEEVYFTPPDTRGSASSSESGLSSPTPPPPPARRRGRPPSARLGPAGHSVPRPAPATDGVVRRMRWSQTMNENCMRAYYRATKGGTFMTKYRDRMLPLFQTLEPTVSVSAQRLSDQVRAIQRCKLLDDSTLDRLRTEALPIDMTSDSRRDPPAPSSLTPNQVSLASMSRVDLGAEDDDFANMSVSTQCNEHLRRTLEDAIQLYRSPASSRPRLPRLPTHRRNLALVGALDDLLAPYLGASEDLIDTHSILYCGAITACRVARVRFPDPDRAPRPPSYVPAWQVRIERRIDTFRTLIAKLICFRGGNTRPRVMRFVNQAFAGTGIRPQQYMSCVTERIDFLKQKIYAWAKRIRRYRERVDRYQLNRMFQSDQRKVYRSWEKPSQRVIDEQRPDSRTMINFWRDIWSVPVDHTEGDWMRVVSDACEPIETMEAISITPLDVKCAIRTAQNWKSPGPDGLHNFWLKWFRSSHVRLATQFQEALQLGSLPSFLTTGVTFLLHKSGSTTEAKNYRPITCLPTIYKLLTSILTVKINMHIVANNILAPAQNGCRVGSRGTKELLLIDMTVCQQVRRNRRNISTAWIDYKKAYDSVPHSWLRRVLELYKIDTTLRNFLDSCMRQWITVLCQPGGVDTLSEPEDYIRIERGIFQGDSLSPLWFCLALNPLSTLLKNSGLGYRLRREGEIISHLLYMDDLKLFATKKPELVALLEITHNFSSAINMEFGIDKCAVLHVQRGKVVNSSDLQLSETISLRSLSEGETYKYLGMAEALAIDGDVKQSVKERFFGRLTKVLNSLLSGGNKVRAFNGWVMPLLIYTSGILRWTQTELDAVDRRVRSQLTVHRMLHPRSSVMRLYIPRKSGGRGFLNAKTLHNRQVCSLREYFLGSESGMHCDVVAVDNNLTPLSLAKENWRKPSILSVEDRKDIWKSKELHGRFYRALTDPDVDFLASVNWLRFGDLFGETEGFVCAIADEVMMTNNYRKYILKDGTVDICRACHRPGESLRHIISGCSHLANGEYLHRHNLVARIIHQQLALKYGLVDQEVPYYQYAPAPVLENGRAMLYWDRSIITDRTIVANKPDIVIVDRSERRAILVDITVPHDVNLVKAEKDKETKYLDLAHEITAMWDVDSTSIVPIVVSANGLIAKSLDQHLKRLSLDGWVKGQIQKAVVLDTARIVRRFLSLQP

SEQ ID NO: 6174 - protein, 1211 aa, Idaea aversata
MITRSKNTNKKTAHTERARPPARQPVTSHESSDEEVYFTPPDTRGSASSSESGLSSPTPPPPPARRRGRPPSARLGPAGHSVPRPAPATDGVVRRMRWSQTMNENCMRAYYRATKGGTFMTTYRDRMLPLFQTLEPTVSVSAQRLSDQVRAIQRCKLLDDSTLDRLRTEALPIDMTSDSRRDPPAPLSLTSNQVSLASMSRVDLGAEDDDFANMSVSTQCNEHLRRTLEDAIQLYRSPASSRPRLPRLPTHRRNLALVGALDDLLAPYLGASEDLIDTHSILYCGAITACRVARVRFPDPDRAPRPPSYVPAWQVRIERRIDTFRTLIAKLICFRGGNTRPRVMRFVNQAFAGTGIRPQQYMSCVTERIDFLKQKIYAWAKRIRRYRERVDRYQLNRMFQSDQRKVYRSWEKPSQRVIDEQRPDSRTMINFWRDIWSVPVDHTEGDWMRVVSDACEPIETMEAISITPLDVKCAIRTAQNWKSPGPDGLHNFWLKWFRSSHVRLATQFQEALQLGSLPSFLTTGVTFLLHKSGSTTEAKNYRPITCLPTIYKLLTSILTVKINMHIVANNILAPAQNGCRVGSRGTKELLLIDMAVCQQVRRNRRNISTDWIDYKKAYDSVPHSWLRRVLELYKIDTTLRNFLDSCMRQWITVLCQPGGVDTLSEPEDYIRIERGIFQGDSLSPLWFCLALNPLSTLLKNSGLGYRLRREGEIISHLLYMDDLKLFATKKPELVALLEITHNFSSAINMEFGIDKCAVLHVQRGKVVNSSDLQLSETISLRSLSEGETYKYLGMAEALAIDGDVKQSVKERFFGRLTKVLNSLLSGGNKVRAFNGWVMPLLIYTFGILRWTQTELDALDRRVRSQLTVHRMLHPRSSVMRLYIPRKSGGRGFLNAKTLHNREVCSLREYFLGSESGMHCDVVAVDNNLTPLSLAKENWRKPSILSVEDRKDIWKSKELHGRFYRALTDPDVDFLASVNWLRFGDLFGETEGFVCAIADEVMMTNNYRKYILKDGTVDICRACHRPGESLRHIISGCSHLANGEYLHRHNLVARIIHQQLALKYGLVDQEVPYYQYAPAPVLENGRAMLYWDRSIITDRTIVANKPDIVIVDRSERRAILVDITVPHDVNLVKAEKDKETKYLDLAHEITAMWDVDSTSIVPIVVSANGLIAKSLDQHLKRLSLDGWVKGQIQKAVVLDTARIVRRFLSLQP

SEQ ID NO: 6175 - protein, 868 aa, Idaea aversata
MRFVNQAFAGTGIRPQQYMSCVTERIDFLKQKIYAWAKRIRRYRERVDRYQLNRMFQSDQRKVYRSWEKPSQRVIDEQRPDSRTMINFWRDIWSVPVDHTEGDWMRVVSDACEPIETMEAISITPLDVKCAIRTAQNWKSPGPDGLHNFWLKWFRSSHVRLATQFQEALQLGSLPSFLTTGVTFLLHKSGSTTEAKNYRPITCLPTIYKLLTSILTVKINMHIVANNILAPAQNGCRVGSRGTKELLLIDMAVCQQVRRNRRNISTAWIDYKKAYDSVPHSWLRRVLELYKIDTTLRNFLDSCMRQWITVLCQPGGVDTLSEPEDYIRIERGIFQGDSLSPLWFCLALNPLSTLLKNSGLGYRLRREGEIISHLLYMDDLKLFATKKPELVALLEITHNFSSAINMEFGIDKCAVLHVQRGKVVNSSDLQLSETISLRSLSEGETYKYLGMAEALAIDGDVKQSVKERFFGRLTKVLNSLLSGGNKVRAFNGWVMPLLIYTFGILRWTQTELDALDQRVRSQLTVHRMLHPRSSVMRLYIPRKSGGRGFLNAKTLHNREVCSLREYFLGSESGMHCDVVAVDNNLTPLSLAKENWRKPSILSVEDRKDIWKSKELHGRFYRALTDPDVDFLASVNWLRFGDLFGETEGFVCAIADEVMMTNNYRKYILKDGTVDICRACHRPGESLRHIISGCSHLANGEYLHRHNLVARIIHQQLALKYGLVDQEVPYYQYAPSPVLENGRAMLYWDRSIITDRTIVANKPDIVIVDRSERRAILVDITVPHDVNLVKAEKDKETKYLDLAHEITAMWDVDSTSIVPIVVSANGLIAKSLDQHLKRLSLDGWVKGQIQKAVVLDTARIVRRFLSLQP

SEQ ID NO: 6176 - protein, 968 aa, Idaea aversata
MQKLGLIIINKLVLVGALDDLLAPYLGASEDLIDTHSILYCGAITACRVARVRFPDPDRAPRPPSYVPAWQVRIERRIDTFRTLIAKLICFRGGNTRPRVMRFVNQAFAGTGIRPQQYMSCVTERIDFLKQKIYAWAKRIRRYRERVDRYQLNRMFQSDQRKVYRSWEKPSQRVIDEQRPDSRTMINFWRDIWSVPVDHTEGDWMRVVSDACEPIETMEAISITPLDVKCAIRTAQNWKSPGPDGLHNFWLKWFRSSHVRLATQFQEALQLGSLPSFLTTGVTFLLHKSGSTTEAKNYRPITCLPTIYKLLTSILTVKINSHIVANNILAPAQNGCRVGSRGTKELLLIDMAVCQQVRRNRRNISTAWIDYKKAYDSVPHSWLRRVLELYKIDTTLRNFLDSCMRQWITVLCQPGGVDTLSEPEDYIRIERGIFQGDSLSPLWFCLALNPLSTLLKNSGLGYRLRREGEIISHLLYMDDLKLFATKKPELVALLEITHNFSSAINMEFGIDKCAVLHVQRGKVVNSSDLQLSETISLRSLSEGETYKYLGMAEALAIDGDVKQSVKERFFGRLTKVLNSLLSGGNKVRAFNGWVMPLLIYTFGILRWTQTELDALDRRVRSQLTVHRMLHPRSSVMRLYIPRKSGGRGFLNAKTLHNREVCSLREYFLGSESGMHCDVVAVDNNLTPLSLAKENWRKPSILSVEDRKDIWKSKELHGRFYRALTDPDVDFLASVNWLRFGDLFGETEGFVCAIADEVMMTNNYRKYILKDGTVDICRACHRPGESLRHIISGCSHLANGEYLHRHNLVARIIHQQLALKYGLVDQEVPYYQYAPAPVLENGRAMLYWDRSIITDRTIVANKPDIVIVDRSERRAILVDITVPHDVNLVKAEKDKETKYLDLAHEITAMWDVDSTSIVPIVVSANGLIAKSLDQHLKRLSLDGWVKGQIQKAVVLDTARIVRRFLSLQP

SEQ ID NO: 6177 - protein, 1212 aa, Idaea aversata
MITRQKVKNATTGTARLHAQPPARQPVTSHESSDEEVYYTPPDTRGSASSSESGLSSPTPPPPPARRRGRPPSARLGPAGHSVPRPALATDGVVRRMRWSQTMNENCMRAYYRATKGGTFMTTYRDRMLPLFQALEPTVSVSAQRLSDQVRAIQRCKLLDDSTLDRLRTEALPIGMTSDSQRDPPAPPSLTPNQVSLAVMSRVDLVAEEDDSANMSVSTQCNEHLRRTLEDAIQLYRSPASSRPRLPRLPTHRRNLALVGALDDLLAPYLGASEDLIDTHSILYCGAITACRVARVRFPDPDRAPRPPSYVPAWQVRIERRIDTFRTLIAKLICFRGGNTRPRVMRFVNQAFAGTGIRPQQYMSCVTERIDFLKQKIYAWAKRIRRYRERVDRYQLNRMFQSDQRKVYRSWEKPSQRVIDEQRPDSRTMINFWRDIWSVPVDHTEGDWMRVVSDACEPIETMEAISITPLDVKCAIRTAQNWKSPGPDGLHNFWLKWFRSSHVRLATQFQEALQLGSLPSFLTTGVTFLLHKSGSTTEAKNYRPITCLPTIYKLLTSILTVKMNSHIVANNILAPAQNGCRVGSRGTKELLLIDMAVCQQVRRNRRNISTAWIDYKKAYDSVPHSWLRRVLELYKIDTTLRNFLDSCMRQWITVLCQPGGVDTLSEPEDYIRIERGIFQGDSLSPLWFCLALNPLSTLLKNSGLGYRLRREGEIISHLLYMDDLKLFATKKPELVALLEITHNFSSAINMEFGIDKCAVLHVQRGKVVNSSDLQLSETISLRSLSEGETYKYLGMAEALAIDGDVKQSVKERFFGRLTKVLNSLLSGGNKVRAFNGWVMPLLIYTFGILRWTQTELDALDRRVRSQLTVHRMLHPRSSVMRLYIPRKSGGRGFLNAKTLHNREVCSLREYFLGSESGMHCDVVAVDNNLTPLSLAKENWRKPSILSVEDRKDIWKSKELHGRFYRALTDPDVDFLASVNWLRFGDLFGETEGFVCAIADEVMMTNNYRKYILKDGTVDICRACHRPGESLRHIISGCSHLANGEYLHRHNLVARIIHQQLALKYGLVDQEVPYYQYAPAPVLENGRAMLYWDRSIITDRTIVANKPDIVIVDRSERRAILVDITVPHDVNLVKAEKDKETKYLDLAHEITAMWDVDSTSIVPIVVSANGLIAKSLDQHLKRLSLDGWVKGQIQKAVVLDTARIVRRFLSLQP

SEQ ID NO: 6178 - protein, 868 aa, Idaea aversata
MRFVNQAFAGTGIRPQQYMSCITERIDFLKQKIYAWAKRIRRYRERVDRYQLNRMFQSDQRKVYRSWEKPSQRVIDEQRPDSRTMINFWRDIWSVPVDHTEGDWMRVVSDACEPIETMEAISITPLDVKCAIRTAQNWKSPGPDGLHNFWLKWFRSSHVRLATQFQEALQLGFLPSFLTTGVTFLLHKSGSTTEAKNYRPITCLPTIYKLLTSILTVKINSHIVANNILAPAQNGCRVGSRGTKELLLIDMAVCQQVRRNRRNISTAWIDYKKAYDSVPHSWLRRVLELYKIDTTLRNFLDSCMRQWITVLCQPGGVDTLSEPEDYIRIERGIFQGDSLSPLWFCLALNPLSTLLKNSGLGYRLRREGEIISHLLYMDDLKLFATKKPELVALLEITHNFSSAINMEFGIDKCAVLHVQRGKVVNSSDLQLSETISLRSLSEGETYKYLGMAEALAIDGDVKQSVKERFFGRLTKVLNSLLSGGNKVRAFNGWVMPLLIYTFGILRWTQTELDALDRRVRSQLTVHRMLHPRSSVMRLYIPRKSGGRGFLNAKTLHNREVCSLREYFLGSESGMHCDVVAVDNNLTPLSLAKENWRKPSILSVEDRKDIWKSKELHGRFYRALTDPDVDFLASVNWLRFGDLFGETEGFVCAIADEVMMTNNYRKYILKDGTVDICRACHRPGESLRHIISGCSHLANGEYLHRHNLVARIIHQQLALKYGLVDQEVPYYQYAPAPVLENGRAMLYWDRSIITDRTIVANKPDIVIVDRSERRAILVDITVPHDVNLVKAEKDKETKYLDLAHEITAMWDVDSTSIVPIVVSANGLIAKSLDQHLKRLSLDGWVKGQIQKAVVLDTARIVRRFLSLQP

SEQ ID NO: 6179 - protein, 1211 aa, Idaea aversata
MITRSKNTNKKTAHTEHARPPARQPVTSHESSDEEVYFTPPDTRGSASSSESGLSSPTPPPPPARRRGRPPSARLGPAGHSVPRPAPATDGVVRRMRWSQTMNENCMRAYYRATKGGTFMTTYRDRMLPLFQTLEPTVSVSAQRLSDQVRAIQRCKLLDDSTLDRLRTEALPIDMTSDSRRDPPAPSSLTPNQVSLASMSRVDLGAEDDDFANMSVSTQCNEHLRRTLEDAIQLYRSPASSRPRLPRLPTHRRNLALVGALDDLLAPYLGASEDLIDTHSILYCGAITACRVARVRFPDPDRAPRPPSYVPAWQVRIERRIDTFRTLIAKLICFRGGNTRPRVMRFVNQAFAGTGIRPQQYMSCVTERIDFLKQKIYAWAKRIRRYRERVDRYQLNCMFQSDQRKVYRSWEKPSQRVIDEQRPDSRTMIKFWRDIWSVPVDHTEGDWMRVVSDACEPIETMEAISITPLDVKCAIRTAQNWKSPGPDGLHNFWLKWFRSSHVRLATQFQEALQLGSLPSFLTTGVTFLLHKSGSTTEAKNYRPITCLPTIYKLLTSILTVKINSHIVANNILAPAQNGCRVGSRGTKELLLIDMAVCQQVRRNRRNISTAWIDYKKAYDSVPHSWLRGVLELYKIDTTLRNFLDSCMRQWITVLCQPGGVDTLSEPEDYIRIERGIFQGDSLSPLWFCLALNPLSTLLKNSGLGYRLRREGEIISHLLYMDDLKLFATKKPELVALLEITHNFSSAINMEFGIDKCAVLHVQQGKVVNSSDLQLSETISLRSLSEGETYKYLGMAEALAIDGDVKQSVKERFFGRLTKVLNSLLSGGNKVRAFNGWVMPLLIYTFGILRWTQTELDALDRRVRSQLTAHRMLHPRSSVMRLYIPRKSGGRGFLNAKTLHNREVCSLREYFLGSESGMHCDVVAVDNNLTPLSLAKENWRKPSILSVEDRKDIWKSKELHGRFYRALTDPDVDFLASVNWLRFGDLFGETEGFVCAIADEVMMTNNYRKYILKDGTVDICRACHRPGESLRHIISGCSHLANGEYLHRHNLVARIIHQQLALKYGLVDQEVPYYQYAPAPVLENGRAMLYWDRSIITDRTIVANKPDIVIVDRSERRAILVDITVPHDVNLVKAEKDKETKYLDLAHEITAMWDVDSTSIVPIVVSANGLIAKSLDQHLKRLSLDGWVKGQIQKAVVLDTARIVRRFLSLQP

SEQ ID NO: 6180 - protein, 1211 aa, Idaea aversata
MITRSKNTNKKTAHTERARPPARQPVTSHESSDEEVYFTPPDTRGSASSSESGLSSPTPPPPPARRRGRPPSARLGPAGHSVPRPAPATDGVVRRMRWSQTMNENCMRAYYRATKGGTFMTTYRDRMLPLFQTLEPTVSVSAQRLSDQVRAIQRCKLLDDSTLDRLRTEALPIDMTSDSRRDPPAPSSLTPNQVSLASMFRVCLGAEDDDFANMSVSTQCNEHLRRTLEDAIQLYRSPASSRPRLPRLPTHRRNLALVGALDDLLAPYLGASEDLIDTHSILYCGAITACRVARVRFPDPDRAPRPPSYVPAWQVRIERRIDTFRTLIAKLICFRGGNTRPRVMRFVNQAFAGTGIRPQQYMSCVTERIDFLKQKIYAWAKRIRRYRERVDRYQLNRMFQSDQRKVYRSWEKPSQRVIVEQRPDSRTMINFWRDIWSVPVDHTEGDWMRVVSDACEPIETMEAISITPLDVKCAIRTAQNWKSPGPDGLHNFWLKWFRSSHVRLATQFQEALELGSLPSFLTTGVTFLLHKSGSTTEAKNYRPITCLPTIYKLLTSILTVKINSHIVANNILAPAQNGCRVGSRGTKELLLIDMAVCQQVRRNRRNISTAWIDYKKAYDSVPHSWLRRVLELYKIDTTLRNFLDSCMRQWITVLCQPGGVDTLSEPEDYIRIERGIFQGDSLSPLWFCLALNPLSTLLKNSGLGYRLRREGEIISHLLYMDDLKLFATKKPELVALLEITHNFSSAINMEFGIDKCAVLRVQRGKVVNSSDLQLSETISLRSLSEGETYKYLGMAEALAIDGDVKQSVKERFFGRLTKVLNSLLSGGNKVRAFNGWVMPLLIYTFGILRWTQTELDALDRRVRSQLTVHRMLHPRSSVMRLYIPRKSGGRDFLNAKTLHNREVCSLREYFFGSESGMHCDVVAVDNNLTPLSLAKENWRKPSILSVEDRKDIWKSKELHGRFYRALTDPDVDFLASVNWLRFGDLFGETEGFVCAIADEVMMTNNYRKYILKDGTVDICRACHRPGESLRHIISGCSHLANGEYLHRHNLVARIIHQQLALKYGLVDQEVPYYQYAPAPVLENGRAMLYWDRSIITDRTIVANKPDIVIVDRSERRAILVDITVPHDVNLVKAEKDKETKYLDLAHEITAMWDVDSTSIVPIVVSANGLIAKSLDQHLKRLSLDGWVKGQIQKAVVLDTARIVRRFLSLQP

SEQ ID NO: 6181 - protein, 1037 aa, Idaea aversata
MTSDSRRDPPAPLSLTPNQVSLASMSRVDLGAEDDDFANMSVSTQCNEHLRRTLEDAIQLYRSPASSRPRLPRLPTHRRNLALVGALDDLLAPYLGASEDLIDTHSILYCGAITACRVARVRFPDPDRAPRPPSYVPAWQVRIERRIDTFRTLIAKLICFRGGNTRPRVMRFVNKAFAGTGIRPQQYMSCVTERIDFLKQKIYAWAKRIRRYRERVDRYQLNRMFQSDQRKVYRSWEKPSQRVIDEQRPDSRTMINFWRDIWSVPVDHTEGDWMRVVSDACEPIETMEAISITPLDVKCAIRTAQNWKSPGPDGLHNFWLKWFRSSHVRLATQFQEALQLGSLPSFLTTGVTFLLHKSGSTTEAKNYRPITCLPTIYKLLTSILTVKINMHIVANNILAPAQNGCRVGSRGTKELLLIDMAVCQQVRRNRRNISTAWIDYKKAYDSVPHSWLRRVLELYKIDTTLRNFLDSCMRQWITVLCQPGGVDTLSEPEDYIRIERGIFQGDSLSPLWFCLALNPLSTLLKNSGLGYRLRREGEIISHLLYMDDLKLFATKKPELVALLEITHNFSSAINMEFGIDKCAVLHVQRGKVVNSSDLQLSETISLRSLSEGETYKYLGMAEALAIDGDVKQSVKERFFGRLTKVLNSLLSGGNKVRAFNGWVMPLLIYTFGILRWTQTELDALDRRVRSQLTVHRMLHPRSSVMRLYIPRKSGGRGFLNAKTLHNREVCSLREYFLGSESGMHCDVVAVDNNLTPLSLAKENWRKPSILSVEDRKDIWKSKELHGRFYRALTDPDVDFLASVNWLRFGDLFGETEGFVCAIADEVMMTNNYRKYILKDGTVDICRACHRPGESLRHIISGCSHLANGEYLHRHNLVARIIHQQLALKYGLVDQEVPYYQYAPAPVLENGRAMLYWDRSIITDRTIVANKPDIVIVDRSERRAILVDITVPHDVNLVKAEKDKETKYLDLAHEITAMWDVDSTSIVPIVVSANGLIAKSLDQHLKRLSLDGWVKGQIQKAVVLDTARIVRRFLSLQP

SEQ ID NO: 6182 - protein, 867 aa, Odontoptilum angulatum
MRYVTQAFAGTGVRPTDYMSCVTERIDYLKQKVSAWANRVRRYKERINRYHQNRLFQSDQKKVYRSWEESTTGVCNGQIPNMNEMSTFWKSIWSVPVAHVSGEWMSIVERSCELLQPMTAVTIEIDDITDAVRRTHNWKSPGPDGLHNFWLKWLRSSHARLAAQFQEAIESRSLPSFMTTGVTFLLHKSDSTTDPKNFRPITCLPTMYKLLTSILTSKLNKHLYANNILDPAQNGCRVGSRGTKELLLIDMAINQQVRRNRKGLSTAWIDYKKAYDSVPHTWLQRVLELYKVDTVLSSFLVSCMRQWTTALCLPGSGRNLCISEPIRIVRGIFQGDSLSPLWFCLALNPLSTLLRDLKLGYRLRRGGETICHLLYMDDLKLFASNKPDLLSLLDVTHTFSSDIKMEFGVDKCAVAHVQKGKVVQSDYLQLSETISLRSLSETETYKYLGMPEGLGILDRDVKQLVIERFFGRLTKVLKSLLSGGNKVRAFNSWVMPVLLYTFGILRWTQTELDTLDLRVRKLLTTYRMHHPRSSVMRLYIPRKCGGRGFLNAKNLHNREVYNLREYFLHVECEMHRDVVSVDNGLTPLSLGKENWHKPVVLSTQDRLNVWKSKELHGRFYQVLYGPDIDTLASVSWLRFGDLFGETEGFVCAITDEVVKTNNYRKYIMRDGTVDICRACHRPGESIRHIISGCSHLANGEYLHRHNQVAKIIHQQLALRYGLVGFEVPYYKYTPEPVLENSHAKLYWDRSVITDRTIVANKPDIVLVDRLERRAFLVDITVPCDVNLVKAEKEKMSKYIDLAHEVTDMWDVDSTTIVPIVVSVNGLIAKSLDDETLYNPGLRAEFRRQQFWGRHALCGDSSLCRPDH

SEQ ID NO: 6183 - protein, 966 aa, Zopyrion sandace
MRNTLPLQNTMALVMALDCMLDPYLLSCQDLADTHSVLYCAAMAASRVARVRFPETDRDIRPNATPAWQDRIERRVSAARAIIGKLICFRSGNNRPRVMRYVTQAFAGTGVRTSDYMSCVTERIDYLKQKVCAWANRLRRYKERVNRYHQNRLFQSDQKKVYRSWEESTTGLSDGQVPNMNEMSTFWKSIWSVPVTHASGEWMSIVERSCELLQPMTAVTIEIDDITDAVRRTHNWKSPGPDGLHNFWLKWLRSSHARLAAQFQDAIESQSLPSFMTTGITFLLHKSGSTTDPKNFRPITCLPTLYKLLTSILTSKLNKHFYANNILDPAQNGCRVGSRGTKELLLIDMAINQQVRRNRRGLSTAWIDYKKAYDSVPHTWLQRVLELYKVDTVLSSFLVSCMRQWTTALCLPGGGRSLYISEPIRIERGIFQGDSLSPLWFCLALNPLSTLLRDLKLGYRLRRGGETICHLLYMDDLKLFASNKPDLLSLLDVTHTFSSDIRMEFGVDKCAVVHVQRGKVVQNDYLQLSETISLRSLSETETYKYLGMPEGLGILDRDVKQLVMERFLGRLTKVLKSLLSGGNKVRAFNSWVMPVLMYTFGILRWTQTELDTLDLRVRKLLTTYRMHHPRSSVMRLYIPRKFGGRGFLNAKNLHNREVYNLREYFLHVECAMHRDVVSVDNGLTPLSLGKENWHKPMVLSTQDRLDVWKSKELHGRFYQVLYGPDVDTLASVSWLRYGDLFGETEGFACAIADEVVKTNNYRKYIMRDGTVDICRACHRPGESIRHIISGCSHLANGEYLHRHNQVAKIIHQQLALRYGLVGFEVPYYKYTPEPVLENSHAKLYWDRSVITDRTIVANKPDIVLVDRLERRAFLVDITVPCDVNLVKAEKEKMSKYIDLAHEVTDMWDVDSTTIVPIVVSVNGLIAKSLDQHLKRLALQPWVKGRIQKAAVLGTARIVRRFLTLSP

SEQ ID NO: 6184 - protein, 866 aa, Hedya salicella
MRYVAQAFAGTAVRPRDYMACVTERIDFLKQKVYAWASRIRRYRERVDRFQQNRLFQSDQRKVYRKWEGTDQRVTDGRLPDPTAMNNFWRSIWSVPVEHTEGEWMNVVERECEPIETMGAVTISPDDVSCAARTTQNWKSPGPDGLHNFWVKWFRCSHERLATQFQQALELGSLPSFLTTGVTFLLYKSGSTTEAKNYRPITCLPTLYKLLTSILRAKINTHIVANNVLAFSQNGCRVGSRGTKELLLIDTTICQQVRRNRGTLSAAWIDYKKAYDSVPHSWLGRVLELYKIDTVLRSFIGSCMRQWTTVLRQPGGRDGPPDPQDFIRIKRGIFQGDSLSPLWFCLALNPLSTLLKDSGLGCRLRRGGEIISHLLYMDDLKLFAPKRPELVELLKVTETFSSAIKMEFGVDKCAIMHVQRGKVVNSTNLQLSETMSLKSLSEVETYKYLGMSQSLSIADGDIKQAVRERFFCRLTKVLNSLLSGGNRARAFNAWVMPLLTYSFGILRWTQTELDAMDRRVRMLLTTHRMLHPRSSVMRLYILRKCGGRGFLNAKDLHNREVCSLREYFLNNECGIHRDVVAVDKGLTSLSLANENWRRPTVLSTVDRKDVWRSKELHGRFYKALTGPDVDLLASVNWLRFGDLFGETEGFACAITDEVIMTNNYRKYILKDGTVDICRACRRPGESLRHIISGCSHLANSEYLHRHNQVARIIHQQLAVKYGLEVPYYKYAPMPVLENGRATLYWDRSIITDRTIVANKPDIVLVDRSKRRAILIDITIPHDENLVKAEKDKLSKNLDLAHEVTAMWDVDSTIIVPIVVSANGLIAKSLNEHLKRLSLDGWVKGQIQKAVILDTARIVRRFLSVQP

SEQ ID NO: 6185 - protein, 1208 aa, Erannis defoliaria
MITRSKKRNAAVQYARPTPPPVPSSSPSSSSPSEEEFHTCGTSSSSEDVSGPRTLTPPIPVRRGRPPLPARLGPAGQPASRPALAAGGVVRRMRWSQTNNENCMRAYYGATEGGTNLTAYRVRMLSLFQTLEPTVTVSTQRISDQVRAIQRLNLLDQPLLDRLRLEVQSARPTPASTRDLDVASSAPTLASVPTSAATLATSANPVLDEGDCTGMSVSTQVSEQLRRALEDAIGQYRFALNSRPRLPRLPTHRRNLALMGALNALLAPYLRASEDLTDTHSILYWGAIAACRVARVKFPDTNRAPRPAGYVPAWQLRIERRISTFRTLIAKLICFSRGNNRPRVMRFVTQAFAGTGIRPQQYMASVTERIDYLKQKVYAWANRIRRYRERVDRYWQNRLFQSDQRKVYRNWEGTEQRVSDGQLPDASAMTNFWRGIWSVPVEHTEGDWMRVVERECESIEPMGSILIDPVDVSCAIRTAQNWKSPGPDGLHNFWIKWFRCSHDRLATQFQEALELGSLPSFMTTGVTFLLHKSGSTTEPKNYRPITCLPTIYKLLTSILSTKINAHIVANNVLAPAQNGCRVGSRGTKELLLIDMAISQQVRRNKGALSAAWIDYKKAYDSVPHSWLERILELYQIDTTLKSFLGACMRQWTTVLRQPGGGNGSSDSQDLIRIERGIFQGDSLSPSWFCLALNPLSTLLKDSGLGYRLRRGGEVISHLLYMDDLKLFAPKHQDLLELLKTSAIGMEFGVDKCAVMRVQRGKVVNSPDLQLSEIMTLRSLSEAETYKYLGMSESLGISVVDIKKSVKERFFCRLTKVLNSILSGGNKARAFNGWVMPLLIYSFGILRWTQTELDALDRRVRQLLTAHRMLHPRSSVMRLYIPRKWAGRGFLNAKNLHNREVCSLRDYFLNNECGMHRDVVTVDKGLTPLSLANENWRRPSVISTDDRKEVWKSKELHGRFYRALTGPDVDLLASANWLRFGDLFGETEGFACAIADEVIKTNNYRKYIMKDGTVDICRACHRPGESLRHIISGCSHLANGEYLHRHNQVARIIHQQLALQYGLVESEVPYYKYAPAPVLENGRALLYWDRSIITDRTIVANKPDIVMVDRSQRRAVLVDVTIPHDENLVKAEKDKLSKYLDLAFEITAMWDVDSTIIVPIVVSANGLIAKSLDQYLKRLSLDGWVKGQIQKAVVLDTARIVRRFLTLQP

SEQ ID NO: 6186 - protein, 953 aa, Notocelia uddmanniana
MGGLNDLLVPYLGASEDLIDTHSIMYCGAIAACRVARVKFPDADRAPRPAGSVPTWQVRIERRVDTYRTLIAKLICFRGGNSCPRVMRFVTQAFAGTGVRPRDYMDCVTERIDFLKQKVYAWASRIRRYRERLDRYQQNRLFQSDQRKVYRKWDGTDHRVSDGQRPDATAMVNFWRSIWSVPVEHTEGPWIGAVERECESIEPMGSVTISPEDVSCAIRTAPNWKSPGPDGLHNFWLKWFRCSHARLAAQFQQALELGSLPPPLTTGVTSLLYKSGSTTEAKNYRPITCLPTLYKLLTSILRAKINAHIVANNILAPAQNGCRVGSRGTKELLLIDMTICQQVRRNRGTLSVAWIDYRKAYDSVPHSWLGRILELYKVDAALRSFLRACMRQWTTVLRQPGGGDGPSVPQDSIRIERGIFQGDSLSPLWFCLALNPLSTLLKDSGLGCQLRRGGEVISHLLYMDDLKLFAPNTHDLLELLKTTEVFSSAIKMEFGVDKCAVIHVQRGKIVNSTNLQLSETTSLRSLSEAYKYLGMSQSLGIEGEGIKRVLRERFFCRLTKVLNSFLSGGNKVRAFNAWVMPLLTYSFGILRWTQTELDLLDRRVRVLLTTNRMLHPRSSVMRLYIPRKLGGRGFLNVGISQHNLHNREVCSLRDYFLNSECGMHRDVVAVDTLFTPLSMANENWRRLKVLSTEDRRAVWKSKELHGRFYKVLTGPDVDLLASVNWLRFGETEGFVCAIADEVIMTNNYRKYILKDGTVDICRACRRPGESLRHIISGCSHLANGEYLHRHNLVARIIHQQLALLYGLVGFEVPYYKYTPAPVLENGRATLYWDRSVITDRTIVANKPDIVLTDRLKRQAILVDITIPHDENLVKAEKDKSSKYLDLAHEVTAMWDVDSTIIVPIVVSANGLIAKSLDQHLKRLSLDGWVKGQIQKAVLLDTARIVRRFLSLSP

SEQ ID NO: 6187 - protein, 1202 aa, Spodoptera litura
MLTRRAAAALRAQTHLPSPTSSPSSAPPPSVPVPDEEVPLTDAGASSSSDEYFSPPTTPPPSRRRRGGRRPSSRLGPRSPLASGGVPAPGGNVSRMKWTRSINENVMRAYFGATVGGSNLTAYRVRLLAMFQVLEPTINVSAQRLSDQVRVIQRNRMLDDIVLDRLRSEVLRSRVIIPLSQNVQQGQVDVDSVDTPNDDRTTEVSTHKCSEELRRALEDAIQEYRFVSPSLRPHLPRLPMHKKNRALMCALDAELSNYFDTSEDLLDTHSILYCGAIAACRVAHVKLIKKDNNVTRQKLAVPAWQCRIERRIDEARTLIAKLVCFREGNTRPRVMRFVRRAFSGTDIRPQDYVSHITERVDFLKQKIYAWANRIRRYKKRVKRYTQNRTFQRDQRWVYRTWEQKEQTRTDACLPNVDAMNSFWRSIWSAPVSHIEGDWIEEVEGKCELIPEMEPIFITSEDVSKAANPLANWKAPGPDGLHNFWIRWFISSHSCLASQFQSALESGSLPQFFTTGLTHLLHKSGSTTEPKNYRPITCLPTIYKLLTSILRAKLNKHIEDNNIMSASQNGCRNGSRGTKELLLIDMSICQQVRRSHKNLSTCWIDYKKAYDSVPHTWLMRVLELYKVDTALRTFLLSCMRQWRTVLRYPGCGQICGNDEPIRIERGIFQGDSLSPLWFCLALNPLSTLLEGSGLGYRLRRGGQIISHLLYMDDLKLFAPNNLHLMRLLNVTETFSNAIRMEFGVDKCAVLHVKRGEIVESDGTQNSDSTSFRPLSSTETYKYLGMSEALGIDVTVMKQSLRERFFGRLKKVLNSLLSGGNKVRAYNGWVMPVLMYSFGILKWTQTELDTLDRKVRSLLTEHRMHHPRSSIMRLYIPRKCGGRGFLNAKTLHNSEVCSLRKYFLKMDVGMHRDVVAVDKGLTPLSLANENWREPIILSTNDRRNVWQSKELHGRYYRALHGPNTDFLASVSWLRFSNLFGETEGFVCAIMDEVMMTNNYRKYIIKDGTVDICRACHHPGESIRHIISGCSHLANGEYLHRHNLVARIIHQQLALKYKLVESEVPYYKYLPDPVLENGDVTLYWDRTIITDRTIVANKPDIVVIDRPSRRTMIVDITIPHDENLVKAEKDKASKYLDLAHEIVDMWDVDSAVIVPIVVSANGLIAKSLDQHLSRLALDGWVKGLMQKAVLLDTARIVRKFLSLEP

SEQ ID NO: 6188 - protein, 1202 aa, Spodoptera litura
MLTRRAAAALRAQTHLPSPTSSPSSAPPPSVPVPDEEVPLTDAGASSSSDEYFSPPTTPPPSRRRRGGRRPSSRLGPRSPLASGGVPAPGGNVSRMKWTRSINENVMRAYFGATEGGSNLTAYRVRMLAMFQVLEPTINVSAQRLSDQVRVIQRNRMLDDIVLDRLRSEVLRSRVIIPLSQNVQQGQVDVDSVDTPNDDRTTEVSTHKCSEELRRALEDAIQEYRFVSPSLRPHLPRLPMHKKNRALMCALDSELSNYFDTSEDLLDTHSILYCGAIAACRVAHVKLIKKDNNVTRQKLAVPAWQCRIERRIDEARTLIAKLVCFREGNTRPRVMRFVRRAFSGTDIRPQDYVSHITERVDFLKQKIYAWANRIRRYKKRVKRYTQNRTFQRDQRWVYRTWEQKEQTRTDACLPNVDAMNSFWRSIWSAPVSHIEGDWIEEVEGKCELIPEMEPIFITSEDVSKAANPLANWKAPGPDGLHNFWIRWFISSHSCLASQFQSALESGSLPQFFTTGLTHLLHKSGSTTEPKNYRPITCLPTIYKLLTSILRAKLNKHIEDNNIMSASQNGCRNGSRGTKELLLIDMSICQQVRRSHKNLSTCWIDYKKAYDSVPHTWLMRVLELYKVDTALRTFLLSCMRQWRTVLRYPGCGQICGNDEPIRIERGIFQGDSLSPLWFCLALNPLSTLLEGSGLGYRLRRGGQIISHLLYMDDLKLFAPNNLHLMRLLNVTETFSNAIRMEFGVDKCAVLHVKRGEIVESDGTQNSDSTSFRPLSSTETYKYLGMSEALGIDVTVMKQSLRERFFGRLKKVLNSLLSGGNKVRAYNGWVMPVLMYSFGILKWTQTELDTLDRKVRSLLTEHRMHHPRSSIMRLYIPRKCGGRGFLNAKTLHNSEVCSLRKYFLKMDVGMHRDVVAVDKGLTPLSLANENWREPIILSTNDRRNVWQSKELHGRYYRALHGPNTDFLASVSWLRFSNLFGETEGFVCAIMDEVMMTNNYRKYIIKDGTVDICRACHHPGESIRHIISGCSHLANGEYLHRHNLVARIIHQQLALKYKLVESEVPYYKYLPDPVLENGDVTLYWDRTIITDRTIVANKPDIVVIDRPSRRTMIVDITIPHDENLVKAEKDKASKYLDLAHEIVDMWDVDSAVIVPIVVSANGLIAKSLDQHLSRLALDGWVKGLMQKAVLLDTARIVRKFLSLEP

SEQ ID NO: 6189 - protein, 1105 aa, Spodoptera litura
MTRSINENVMRAYFGATEGGSNLTAYRVRMLAMFQVLEPTINVSAQRLSDQVRVIQRNRMLDDIVLDRLRSEVLRSRVIIPLSQNVQQGQVDVDSVDTPNDDRTTEVSTHKCSEELRRALEDAIQEYRFVSPSLRPHLPRLPMHKKNRALMCALDAELSNYFDTSEDLLDTHSILYCGAIAACRVAHVKLIKKDNNVTRQKLAVPAWQCRIERRIDEARTLIAKLVCFREGNTRPRVMRFVRRAFSGTDIRPQDYVSHITERVDFLKQKIYAWANRIRRYKKRVKRYTQNRTFQRDQRWVYRTWEQKEQTRTDACLPNVDAMNSFWRSIWSAPVSHIEGDWIEEVEGKCELIPEMEPIFITSEDVSKAANPLANWKAPGPDGLHNFWIRWFISSHSCLASQFQSALESGSLPQFFTTGLTHLLHKSGSTTEPKNYRPITCLPTIYKLLTSILRAKLNKHIEDNNIMSASQNGCRNGSRGTKELLLIDMSICQQVRRSHKNLSTCWIDYKKAYDSVPHTWLMRVLELYKVDTALRTFLLSCMRQWRTVLRYPGCGQICGNDEPIRIERGIFQGDSLSPLWFCLALNPLSTLLEGSGLGYRLRRGGQIISHLLYMDDLKLFAPNNLHLMRLLNVTETFSNAIRMEFGVDKCAVLHVKRGEIVESDGTQNSDSTSFRPLSSTETYKYLGMSEALGIDVTVMKQSLRERFFGRLKKVLNSLLSGGNKVRAYNGWVMPVLMYSFGILKWTQTELDTLDRKVRSLLTEHRMHHPRSSIMRLYIPRKCGGRGFLNAKTLHNSEVCSLRKYFLKMDVGMHRDVVAVDKGLTPLSLANENWREPIILSTNDRRNVWQSKELHGRYYRALHGPNTDFLASVSWLRFSNLFGETEGFVCAIMDEVMMTNNYRKYIIKDGTVDICRACHHPGESIRHIISGCSHLANGEYLHRHNLVARIIHQQLALKYKLVESEVPYYKYLPDPVLENGDVTLYWDRTIITDRTIVANKPDIVVIDRPSRRTMIVDITIPHDENLVKAEKDKASKYLDLAHEIVDMWDVDSAVIVPIVVSANGLIAKSLDQHLSRLALDGWVKGLMQKAVLLDTARIVRKFLSLEP

SEQ ID NO: 6190 - protein, 1107 aa, Spodoptera litura
MKWTRSINENVMRAYFGATEGGSNLTAYRVRMLAMFQVLEPTINVSAQRLSDQVRVIQRNRMLDDIALDRLRSEVLRSRVIIPLSQNVQQGQMDVDSVDTPNDDRTTEVSTHKCSEELRRALEDAIQEYRFVSPSLRPHLPRLPMHKKNRALMSALDSELSNYFDTSEDLIDTHSILYCGAIAACRVAHVKLIEKDNNVTRQKLAVPAWQCRIERRIDEARTLIAKLVCFREGNTRPRVMRFVRRAFSGTDIRPQDYVSHITERVDFLKQKIYAWANRIRRYKKRVKRYTQNRTFQRDQRWVYRTWEQKEQTRTDACLPNVDAMNSFWRSIWSAPVSHIEGDWIEEVEGKCELIPEMEPIFITSEDVSKAANPLANWKAPGPDGLHNFWIRWFISSHSCLASQFQSALESGSLPQFFTTGLTHLLHKSGSTTEPKNYRPITCLPTIYKLLTSILRAKLNKHIEDNNIMSASQNGCRNGSRGTKELLLIDMSICQQVRRSHKNLSTCWIDYKKAYDSVPHTWLMRVLELYKVDTALRTFLMSCMRQWRTVLRYPGCGQICGNDEPIRIERGIFQGDSLSPLWFCLALNPLSTLLEGSGLGYRLRRGGQIISHLLYMDDLKLFAPNNLHLMRLLNVTETFSNAIRMEFGVDKCAVLHVKRGEIVESDGTQNSDSTSFRPLSSTETYKYLGMSEALGIDVTVMKQSLRERFFGRLKKVLNSLLSGGNKVRAYNGWVMPVLMYSFGILKWTQTELDTLDRKVRSLLTEHRMHHPRSSIMRLYIPRKCGGRGFLNAKTLHNSEVCSLRKYFLKMDVGMHRDVVAVDKGLTPLSLANENWREPIILSTNDRRNVWQSKELHGRYYRALHGPNTDFLASVSWLRFSNLFGETEGFVCAIMDEVMMTNNYRKYIIKDGTVDICRACHHPGESIRHIISGCSHLANGEYLHRHNLVARIIHQQLALKYKLVESEVPYYKYLPDPVLENGDVTLYWDRTIITDRTIVANKPDIVVIDRPSRRTMIVDITIPHDENLVKAEKDKASKYLDLAHEIVDMWDVDSAVIVPIVVSANGLIAKSLDQHLSRLALDGWVKGLMQKAVLLDTARIVRKFLSLEP

SEQ ID NO: 6191 - protein, 1221 aa, Amphipyra berbera
MNKRIIIIKYDKMLTRSRTKTQDTRTRPRSSASSLSSASQPPDSSIESDVTPAAAVASSSSDEFYSPPTSPPPPPPPPPPRRGRRGRGRPPACMGPRGPPASDRVPAPGGSVQRMRWTQSMNENCMRAYFGATEGGTNLTAYRDRMLSLFQVLEPAVNVSAQRLSDQVRVIQRDHRLTDAALDRLRSEIQSNRIISPQTQTAAQPQAPSVVMPSPIHADEESDDRVTNVSTQCNERLRSALELAIQEYRFTPPNLKPSIPRLPMNQKNKALMCALDSLLSSYFDNSESLEDTHSILYCAAVAACRVAHVKFDNIDRATRPKPVAPAWQCRIERRINEARALIGKLICFREGNTRPGVMRSVRRAFSGTEINPRDYMSCVTERIDFLKQKVYTWANRIRRYKRRVERYTQNRMFHSDERWVYRTWERPDQCVSDTHLPDSDAMNTFWRNIWSVPVTHTEGDWMQEVQRACEPIEEMGDVTIVPQDVSCAVRPMPNWKSPGPDGLHNFWLKWLRSSHARLASQFQSSLESGSLPEFLTTGVTHLLHKSGSTAEPKNYRPITCLPTVYKLLTSILRAKINSHIINNSIMSASQNGCRNGSRGTKELLLIDMAISQQVRRYRKDLSTCWIDYKKAFDSVPHTWLTRVLELYKVNTTLCAFLTSCMGQWRTVLHYPGCRQIQERGEPIRIERGIFQGDSLSPLWFCLALNPLSTLLEGSGLGYRLRRDGQVISHLLYMDDLKLFAPNNLQLVKLLKVTETFSNSIRMEFGVDKCAVMHVKRGGIMESVGSQLSDSIHLRSLSSTETYKYLGMSEALGINEQSLRERFYGRLKKVLKSLLSGGNKVRAFNGWVMPVLMYSFGILKWTQTELDALDRRVRTLLTAYRMHHPRSSVMRLYIPRKCGGRGFLNAKTLHNREVCSLREYFLQADVGMHRDVVAVDKRFTPLSLAKENWRKPVVLDTNGRREVWQSKELHGRFYRALHGPDVDFLASVAWLRFGDLFGETEGFVCAIMDEVMMTNNYRKYIVKDGTVDICRACHYPGESIRHIISGCSRLANGEYLHRHNLVARIIHQQLALKYNLVDAEVPYYKYVPDPVLENGHITLYWDRSIITDRTIVANKPDIVVIDRSERLTMIVHITVPHDENLVKAEKDKEIKYQDLAHEVVDMWEIDSAVIVPIVVTANGLIAKSLDQHLKRLSLGSWVKGLIQKAVLLDTARIGRKFLSLRS

SEQ ID NO: 6192 - protein, 1196 aa, Bembecia ichneumoniformis
MELRSKTAGRSARPTPLLVSSSPCSSAEEFLTADNKSTSSDDNGPTSPSPPRRPTRRGRPPLPASLGPARPSTSRPAPATGGVVRRMRWTHTMNENCMRAYYGATEGATNLTAYRARMLSLFQALEPAVTVTAQRLSDQVRAIQRCQLLDQSALDRLRLDSLPVRTTTAPSQVLPIAASTTEYPPLINSADGEEDCANELVSTEVNEQLRSTLEETILRYRFTSELKPRLPRLPANRRSFALMGAVNALLSPYIQDSKDLTDTHSILYCGAIAVCRVANIRFLNTREIPKDNARTPTWQVRIEKRIGTFRTLIAKLLCFKNGNKRPRVMRFVAQAFVGTNIRPKDYMACVTERVDFLKQKIYAWANRIRRYKERVNRFRQNRLFQSDQRKVYRQWEGTDNRVDAGQLPDADAMTNFWRGIWSVSDEHTEGDWINIVKQTCESIEPMGAITISPDDVSCAIRTAQNWKSPGPDGLHNFWIKWFRCSHECLAMQFQRALDIGALPSLFTTGITFLLHKSGSTAETKNYRPITCLPTLYKLLTSILRSKINSHIVANNVLAPTQNGCRVGSRGTKELLLIDMTICQNVRRNRGALSTAWIDYKKAYDSVPHSWLRRILELYKINPTLRSFLSTCMGQWTTVLHQPGSLRSVSGPQDKISIKRGIFQGDSLSPLWFCLALNPLSTLLKDSTLGYRLQREGEVISHLLYMDDLKLFASKRQDLVELLKITEIFSNSIKMEFGVDKCAVMHVQRGKVVNSSNLQLTEVTFESLSETETYKYLGMSQSLGIVDRDIKQMVKERFCSRLTKVLKSLLSGGNKVRAFNSWVMPLLTYSFGILRWTQTELDALDRRVRQLLTTHRMLHPRSSVMRLYIPRKLGGRGFLNAKNLHNREICSLREYFLNTECGIHHDVVTVDKNLTPLCLSKENWRKPIILSAEDRREVWKSKELHGRFYRALTGPDVDPLASINWLRFGDLFGETEGFVCAIADEVIKTRNYRKYILKDGTADICRACHRPGESLRHIISGCSHLANGEYLHRHNQVARIIHQQLALRYHLVESVVPYYQYVPAPVLANGHATLYWDRSIITDRTIVANKPDIVIIDRSQRRAILVDIAVPHDENLVKAEKEKLTKYIDLAHEVTAMWDVDATIVVPIVISANGLIAKSLDQHLKRLSLDGWIKGQIQKAVLLDTARIVRRFLTLQP

SEQ ID NO: 6193 - protein, 1196 aa, Bembecia ichneumoniformis
MELRSKTAGRSARPTPLLVSSSPCSSAEEFLTADNKSTSSDDNGPTSLSPPRRPTRRGRPPLPASLGPARPSTSRPAPATGGVVRRMRWTHTMNENCMRAYYGATEGATNLTAYRARMLSLFRALEPAVTVTAQRLSDQVRAIQRCQLLDQSALDRLRLDSLPVRTTTAPSQVLPIAASTTEYPPLINSADGEEDCANELVSTEVNEQLRSTLEETILRYRFTSELKPRLPRLPANRRSFALMGAVNALLSPYIQDSKDLTDTHSILYCGAIAVCRVANIRFLNTREIPKDNARTPTWQVRIEKRIGTFRTLIAKLLCFKNGNKRPRVMRFVAQAFVGTNIRPKDYMACVTERVDFLKQKIYAWANRIRRYKERVNRFRQNRLFQSDQRKVYRQWEGTDNRVDAGKLPDADAMTNFWRGIWSVSDEHTEGDWINIVKQTCESIEPMGAITISPDDVSCAIRTAQNWKSPGPDGLHNFWIKWFRCSHECLAMQFQRALDIGALPSLFTTGITFLLHKSGSTAETKNYRPITCLPTLYKLLTSILRSKINSHIVANNVLAPTQNGCRVGSRGTKELLLIDMTICQNVRRNRGALSTAWIDYKKAYDSVPHSWLRRILELYKINPTLRSFLSTCMGQWTTVLHQPGSLQSVSGPQDKISIKRGIFQGDSLSPLWFCLALNPLSTLLKDSTLGYRLRREGEVISHLLYMDDLKLFASKRQDLVELLKITEIFSNSIKMEFGVDKCAVMHVQRGKVVNSSNLQLTEVTFKSLSETETYKYLGMSQSLGIVDRDIKQMVKERFCSRLTKVLKSLLSGGNKVRAFNSWVMPLLTYSFGILRWTQTELDALDRRVRQLLTTHRMLHPRSSVMRLYIPRKLGGRGFLNAKNLHNREICSLREYFLNTECGIHHDVVTVDKNLTPLCLSKENWRKPIILSAEDRREVWKSKELHGRFYRALTGPDVDPLASINWLRFGDLFGETEGFVCAIADEVIKTRNYRKYILKDGTADICRACHRPGESLRHIISGCSHLANGEYLHRHNQVARIIHQQLALRYHLVESVVPYYQYVPAPVLANGHATLYWDRSIITDRTIVANKPDIVIIDRSQRRAILVDIAVPHDENLVKAEKEKLTKYIDLAHEVTAMWDVDATIVVPIVVSANGLIAKSLDQHLKRLSLDGWIKGQIQKAVLLDTARIVRRFLTLQP

SEQ ID NO: 6194 - protein, 1202 aa, Bembecia ichneumoniformis
MILRKRRRNTAEQSARPPPLPVSSSPCSSADEFLTADDKSTSSDDDGPTPPSPPRRPARRGRPPLPASLGPARPSSSRPAPATGGVVRRMRWTHTMNENCMRAYYGATEGATNLTAYRARMLSLFQSLEPAVTVTAQRLSDQVRAIQRCQLLDQSALDRLRLDSLPVRATTAPSQVLPRAASTAEPTAHPPLINPADGEEDCANELVSTQVNEQLRRTLEETILRYRSTSELKPRLPRLPANRRSFALMGAVNALLSPYIQDSKDLTDTHSILYCGAIAVCRVAHIRFLNTTEIPKGDAHTPTWQVRIEKRIGTFRTLIAKLLCFKNGNKRPRVMRFVAQAFVGTDIRPKDYMACVTEHIDFLKQKIYAWANRIRRYKERVDRFHQNRLFQSDQRKVYRHWEGTDNRVDAGQLPDADAMTNFWRGIWSVSDEHTEGDWINIVRQTCESIEPMGAITISPDDVSCAIRTAKNWKSPGPDGLHNFWIKWFRCSHECLAMQFQRALDIGALPSLFTTGITFLLHKSGSTAETKNYRPITCLPTLYKLLTSILRSKINSHIVANNILAPAQNGCRVGSRGTKELLLIDMTICQNVRRNRGALSTAWIDYKKAYDSVPHSWLRRILELYKINPTLRSFLSTCMGQWTTVLHQPGSLQSVSGPQDKISIKRGIFQGDSLSPLWFCLALNPLSTLLKDSTLGYRLRREGEVISHLMYMDDLKLFASKRQDLVELLKITEIFSNSIKMEFGADKCAIMHVQRGKVVNSSNLQLTEVTFKSLSETETYKYLGMSQSLGIVDKDIKQMVKERFCSRLTKVLKSLLSGGNKVRAFNSWVMPLLTYSFGILRWTQTELDALDRRVRQLLTTHRMLHPRSSVMRLYIPRKLGGRGFLNAKNLHNREICSLREYFLNTECGIHHDVVTVDKNLTPLCLSKENWRKPIILSTEDRREVWKSKELHGRFYRALTGPDVDPLASINWLRFGDLFGETEGFVCAIADEVIKTRNYRKYILKDGTADICRACHRPGESLRHIISGCSHLANGEYLHRHNQVARIIHQQLALRYHLVESVVPYYQYVPAPVLENGHATLYWDRSIITDRTIVANKPDIVIIDRSQRQTMLVDIAVPHDENLVKAEKEKLTKYIDLAHEVTAMWDVDSTIIVPIVVSANGLIAKSLDQHLKRLSLDGWIKGQIQKAVLLDTARIVRRFLTLQP

SEQ ID NO: 6195 - protein, 1202 aa, Bembecia ichneumoniformis
MILRKRRRNTAEQSARPPPLPVSSSPCSSADEFLTADDKSTSSDDDGPTPPSPPRRPERRGRPPLPASLGPARPSASRPAPATGGVVRRMRWTHTMNENCMRAYYGATEGATNLTAYRARMLSLFQSLEPAVTVTAQRLSDQVRAIQQCQLLDQSALDRLRLDSLPVRATTAPSQVLPRAASTAEPTAHPPLINPADGEEDCANELVSTQVNEQLRRTLEETILRYRSTSELKPRLPRLPANRRSFALMGAVNALLSPYIQDSKDLTDTHSILYCGAIAVCRVAHIRFLNTTEIPKGDAHTPTWQVRIEKRIGTFRTLIAKLLCFKNGNKRPRVMRFVAQAFVGTDIRPKDYMACVTERIDFLKQKIYAWANRIRRYKERVDRFHQNRLFQSDQRKVYRHWEGTDNRVGAGQLPDADAMTNFWRGIWSVSDEHTEGDWINIVGQTCESIEPMGAITISPDDVSCAIRTAKNWKSPGPDGLHNFWIKWFRCSHECLAMQFQRALDIGALPSLFTTGITFLLHKSGSTAETKNYRPITCLPTLYKLLTSILRSKINSHIVANNILAPAQNGCRVGSRGTKELLLIDMTICQNVRRNRGALSTAWIDYKKAYDSVPHSWLRRILELYKINPTLRSFLSTCMGQWTTVLHQPGSLQSVSGPQDKISIKRGIFQGDSLSPLWFCLALNPLSTLLKDSTLGYRLRREGEVISHLLYMDDLKLFASKRQDLVELLKITEIFSNSIKMEFGVDKCAIMHVQRGKVVNSSNLQLTEVTFKSLSETETYKYLGMSQSLGIVDRDIKQMVKERFCSRLTKVLKSLLSGGNKVRAFNSWVMPLLTYSFGILRWTQTELDALDRRVRQLLTTHRMLHPRSSVMRLYIPRKLGGRGFLNAKNLHNREICSLREYFLNTECGIHHDVVTVDKNLTPLCLSKENWRKPIILSTEDRREVWKSKELHGRFYRALTGPDVDPLASINWLRFGDLFGETEGFVCAIADEVIKTRNYRKYILKDGTADICRACHRPGESLRHIISGCSHLANGEYLHRHNQVARIIHQQLALRYHLVESVVPYYQYVPSPVLENGHATLYWDRSIITDRTIVANKPDIVIIDRSQRQTMLVDIAVPHDENLVKAEKEKLTKYIDLAHEVTAMWDVDSTIIVPIVVSANGLIAKSLDQHLKRLSLDGWIKGQIQKAVLLDTARIVRRFLTLQP

SEQ ID NO: 6196 - protein, 1196 aa, Bembecia ichneumoniformis
MELRSKTAGRSARPTPLLVSSSPCSSAEEFLTADNKSTSSDDNGPTSPSPPRRPTRRGRPPLPASLGPARPSTSRPAPATGGVVRRMRWTHTMNENCMRAYYGATEGATNLTAYRARMLSLFQALEPAVTVTAQRLSDQVRAIQRCQLLDQSALDRLRLDSLPVRTTTAPSQVLPIAASTTEYPPLINSADGEEDCANELVSTEVNEQLRSTLEETILRYRFTSELKPRLPRLPANRRSFALMGAVNALLSPYIQDSKDLTDTHSILYCGAIAVCRVANIRFLNTREIPKDNARTPTWQVRIEKRIGTFRTLIAKLLCFKNGNKRPRVMRFVAQAFVGTNIRPKDYMACVTERVDFLKQKIYAWANRIRRYKERVNRFRQNRLFQSDQRKVYRQWEGTDNRVDAGQLPDADAMTNFWRGIWSVSDEHTEGDWINIVKQTCESIEPMGAITISPDDVSCAIRTAQNWKSPGPDGLHNFWIKWFRCSHECLAMQFQRALDIGALPSLFTTGITFLLHKSGSTAETKNYRPITCLPTLYKLLTSILRSKINSHIVANNVLAPTQNGCRVGSRGTKELLLIDMTICQNVRRNRGALSTAWIDYKKAYDSVPHSWLRRILELYKINPTLRSFLSTCMGQWTTVLHQPGSLRSVSGPQDKISIKRGIFQGDSLSPLWFCLALNPLSTLLKDSTLGYRLQREGEVISHLLYMDDLKLFASKRQDLVELLKITEIFSNSIKMEFGVDKCAVMHVQRGKVVNSSNLQLTEVTFKSLSETETYKYLGMSQSLGIVDRDIKQMVKERFCSRLTKVLKSLLSGGNKVRAFNSWVMPLLTYSFGILRWTQTELDALDRRVRQLLTTHRMLHPRSSVMRLYIPRKLGGRGFLNAKNLHNREICSLREYFLNTECGIHHDVVTVDKNLTPLCLSKENWRKPIILSTEDRREVWKSKELHGRFYRALTGPDVDPLASINWLRFGDLFGETEGFVCAIADEVIKTRNYRKYILKDGTADICRACHRPGESLRHIISGCSHLANGEYLHRHNQVARIIHQQLALRYHLVESVVPYYQYVPAPVLANGHATLYWDRSIITDRTIVANKPDIVIIDRSQRRAILVDIAVPHDENLVKAEKEKLTKYIDLAHEVTAMWDVDATIVVPIVVSANGLIAKSLDQHLKRLSLDGWIKGQIQKAVLLGTARIVRRFLTLQP

SEQ ID NO: 6197 - protein, 1202 aa, Bembecia ichneumoniformis
MILRKRRRNTAEQSARPPPLPVSSSPCSSADEFLTADDKSTSSEDDGPTPPSPPRRPARRGRPPLPASLGPARPSASRPAPATGGVVRRMRWTHTMNENCMRAYYGATEGATNLTAYRARMLSLFQSLEPAVTVTAQRLSDQVRAIQRCQLLDQSTLDRLRLDSLPVRATTAPSQVLPSAASTAEPTAHPPLINPADGEEDCANELVSTQVNEQLRRTLEETILRYRSTSELKPRLPRLPANRRSFALMGAVNALLSPYIQDSKDLTDTHSILYCGAIAVCRVAHIRFLNTTEIPKGDAHTPTWQVRIEKRIGTFRTLIAKLLCFKNGNKRPRVMRFVAQAFVGTDIRPKDYMACVTERIDFLKQKIYAWANRIRRYKERVDRFHQNRLFQSDQRKVYRHWEGTDNRVDAGQLPDADAMTNFWRGIWSVSDEHTEGDWINIVRQTCESIEPMGAITISPDDVSCAIRTAKNWKSPGPDGLHNFWIKWFRCSHECLAMQFQRALDIGALPSLFTTGITFLLHKSGSTAETKNYRPITCLPTLYKLLTSILRSKINSHIVANNILAPAQNGCRVGSRGTKELLLIDMTICQNVRRNRGALSTAWIDYKKAYDSVPHSWLRRILELYKINPTLRSFLSTCMGQWTTVLHQPGSLQSVSGPQDKISIKRGIFQGDSLSPLWFCLALNPLSTLLKDSTLGYRLRREGEVISHLLYMDDLKLFASKRQDLVELLKITEIFSNSIKMEFGVDKCAIMHVQRGKVVNSSNLQLTEVTFKSLSETETYKYLGMSQSLGIVDKDIKQMVKERFCSRLTKVLKSLLSGGNKVRAFNSWVMPLLTYSFGILRWTQTELDALDRRVRQLLTTHRMLHPRSSVMRLYIPRKLGGRGFLNAKNLHNREICSLREYFLNTECGIHHDVVTVDKNLTPLCLSKENWRKPIILSTEDRREVWKSKELHGRFYRALTGPDVDPLASINWLRFGDLFGETEGFVCAIADEVIKTRNYRKYILKDGTADICRACHRPGESLRHIISGCSHLANGEYLHRHNQVARIIHQQLALRYHLVESVVPYYQYVPAPVLENGHATLYWDRSIITDRTIVANKPDIVIIDRSQRQTMLVDIAVPHDENLVKAEKEKLTKYIDLAHEVTAMWDVDSTIIVPIVVSANGLIAKSLDQHLKRLSLDGWIKGQIQKAVLLDTARIVRRFLTLQP

SEQ ID NO: 6198 - protein, 1200 aa, Bembecia ichneumoniformis
MILRKRRRNTAEQSARPPPLPVSSSPCSSADEFLTADDKSTSSDDDGPTPPSPPRRPARRGRPPLPASLGPARPSASRPAPATGGVVRRMRWTHTMNENCMRAYYGATEGATNLTAYRARMLSLFQSLEPAVTVTAQRLSDQVRAIQRCQLLDQSALDRLRLHSLPVRATTAPSQVLPRAASTAEPTAHPPLINPADGEEDCANELVSTQVNEQLRRTLEETILRYRSTSELKPRLPRLPANRRSFALMGAVNALLSPYIQDSKDLTDTHSILYCGAIAVCRVAHIRFLNTTEIPKGDAHTPTWQVRIEKRIGTFRTLIAKLLCFKNGNKRPRVMRFVAQAFVGTDIRPKDYMACVTERIDFLKQKIYAWANRIRRYKERVDRFHQNRLFQSDQRKVYRHWEGTDNRVGAGQLPDADAMTNFWRGIWSVSDEHTEGDWINIVGQTCESIEPMGAITISPDDVSCAIRTAKNWKSPGPDGLHNFWIKWFRCSHECLAMQFQRALDIGALPSLFTTGITFLLHKSGSTAETKNYRPITCLPTLYKLLTSILRSKINSHIVANNILAPAQNGCRVGSRGTKELLLIDMTICQNVRRNRGALSTAWIDYKKAYDSVPHSWLRRILELYKINPTLRSFLSTCMGQWTTVLHQPGSLQSVSGPQDKISIKRGIFQGDSLSPLWFCLALNPLSTLLKDSTLGYRLRREGEVISHLLYMDDLKLFASKRQDLVELLKITEIFSNSIKMEFGVDKCAIMHVQRGKVVNSSNLQLTEVTFKSLSETETYKYLGMSQSLGIVDRDIKQMVKERFCSRLTKVLKSFLSGGNKVRAFNSWVMPLLTYSFGILRWTQTELDALDRRVRQLLTTHRMLHPRSSVMRLYIPRKLGGRGFLNAKNLHNREICSLREYFLNTECGIHHDVVTVDKNLTPLCLSKQNWRKPIILSTEDRREVWKSKELHGRFYRALTGPDVDPLASINWLRFGDLFGETEGFVCAIADEVIKTRNYRKYILKDGTADICRACHRPGESLRHIISGCSRLANGEYLHRHNQVARIIHQQLALRYHLVESVVPYYQYVPAPVLENGHATLYWDRSIITDRTIVANKPDIVIIDRSQRQTMLVDIAVPHDENLVKAEKEKLTKYIDLAHEVTAMWDVDSTIIVPIVVSANGLIAKSLDQHLKRLSLDGWIKGQIQKAVLLDTARIVRRFLTL

SEQ ID NO: 6199 - protein, 954 aa, Bembecia ichneumoniformis
MGAVNALLSPYIQDSKDLTDTHSILYCGAIAVCRVAHIRFLNTTEIPKDNARTPTWQVRIEKRIGTFRTLIAKLLCFKNGNKRPRVMRFVAQAFVGTNIRPKDYMACVTERVDFLKQKIYAWANRIRRYKERVDRFRQNRLFQSDQRKVYRQWEGTDNRVDAGQLPDADAMTNFWRGIWSVSDEHTEGDWINIVKQTCESIEPMGAITISPDDVSCAIRTAQNWKSPGPDGLHNFWIKWFRCSHECLAMQFQRALDIGALPSLFTTGITFLLHKSGSTAETKNYRPITCLPTLYKLLTSILRSKINSHIVANNVLAPAQNGCRVGSRGTKELLLIDMTICQNVRRNRGALSTAWIDYKKAYDSVPHSWLRRILELYKINPTLRSFLSTCMGQWTTVLHQPGSLQSVSGPQDKISIKRGIFQGDSLSPLWFCLALNPLSTLLRDSTLGYRLQREGEVISHLLYMDDLKLFAPKRQDLVELLKITEIFSNSIKMEFGVDKCAVMHVQRGKVVNSSNLQLTEVTFKSLSETETYKYLGMSQSLSIVDRDIKQMVKERFCSRLTKVLKSLLSGGNKVRAFNSWVMPLLTYSFGILRWTQTELDALDRRVRQLLTTHRMLHPRSSVMRLYIPRKLGGRGFLNAKNLHNREICSLREYFLNTECGIHHDVVTVDKNLTPLCLSKENWRKPIILSAEDRREIWKRKELHGRFYRALTGPDVDPLASINWLRFGDLFGETEGFVCAIADEVIKTRNYRKYILKDGTADICRACHRPGESLRHIISGCSHLANGEYLHRHNQVARIIHQQLALRYHLVESVVPYYQYVPAPVLANGHATLYWDRSIITDRTIVANKPDIVIIDRSQRRAILVDIAVPHDENLVKAEKEKLTKYIDLAHEVTAMWDVDATIIVPIVVSANGLIAKSLDQHLKRLSLDGWVKGQIQKAVLLDTARIVRRFLTLQP

SEQ ID NO: 6200 - protein, 1202 aa, Bembecia ichneumoniformis
MILRKRRRNTAEQSARPPPLPVSSSPCSSADEFLTADDKSTSSDDDGPTPPSPPRRPARRGRPPLPASLGPARPSASRPAPATGGVVRRMRWTHTMNENCMRAYYGATEGATNLTAYRARMLSLFQSLEPAVTVTAQRLSDQVRAIQRCQLLDQSTLDRLRLDSLPVRATTAPSQVLPRAASTAEPTAHPPLINPADGEEDCANELVSTQVNEQLRRTLEETILRYRSTSELKPRLPRLPANRRSFALMGAVNALLSPYIQDSKDLTDTHSILYCGAIAVCRVAHIRFLNTTEIPKGDAHTPTWQVRIEKRIGTFRTLIAKLLCFKNGNKRPRVMRFVAQAFVGTDIRPKDYMACVTERIDFLKQKIYAWANRIRRYKERVDRFHQNRLFQSDQRKVYRHWEGTDNRVDAGQLPDADAMTNFWRGIWSVSDEHTEGDWINIVRQTCESIEPMGAITISPDDVSCAIRTAKNWKSPGPDGLHNFWIKWFRCSHECLAMQFQRALDIGALPSLFTTGITFLLHKSGSTAETKNYRPITCLPTLYKLLTSILRSKINSHIVANNILAPAQNGCRVGSRGTKELLLIDMTICQNVRRNRGALSTAWIDYKKAYDSVPHSWLRRILELYKINPTLRSFLSTCMGQWTTVLHQPGSLQSVSGPQDKISIKRGIFQGDSLSPLWFCLALNPLSTLLKDSTLGYRLRREGEVISHLLYMDDLKLFASKRQDLVELLKITEIFSNSIKMEFGVDKCAIMHVQRGKVVNSSNLQLTEVTFKSLSETETYKYLGMSQSLGIVDKDIKQMVKERFCSRLTKVLKSLLSGGNKVRAFNSWVMPLLTYSFGILRWTQTELDALDRRVRQLLTTHRMLHPRSSVMRLYIPRKLGGRGFLNAKNLHNREICSLREYFLNTECGIHHDVVTVDKNLTPLCLSKENWRKPIILSTEDRREVWKSKELHGRFYRALTGPDVDPLASINWLRFGDLFGETEGFVCAIADEVIKTRNYRKYILKDGTADICRACHRPGESLRHIISGCSHLANGEYLHRHNQVARIIHQQLALRYHLVESVVPYYQYVPAPVLENGHATLYWDRSIITDRTIVANKPDIVIIDRSQRQTMLVDIAVPHDENLVKAEKEKLTKYIDLAHEVTAMWDVDSTIIVPIVVSANGLIAKSLDQHLKRLSLDGWIKGQIQKAVLLDTARIVRRFLTLQP

SEQ ID NO: 6201 - protein, 975 aa, Bembecia ichneumoniformis
MDANVCEYGCECLLLFRAKYPVLLVIFIVTSHNNNNNNNNNKHSILYCGAIAVCRVAHIRFLNTTEIPKGDAHTPTWQVRIEKRIGTFRTLIAKLLCFKNGNKRPRVMRFVAQAFVGTDIRPKDYMACVTERIDFLKQKIYAWANRIRRYKERVDRFHQNRLFQSDQRKVYRHWEGTDNRVDAGQLPDADAMTNFWRGIWSVSDEHTDGDWINIVKQTCESIEPMGAITISPDDVSCAIRTAKNWKSPGPDGLHNFWIKWFRCSHECLAMQFQRALDIGALPSLFTTGITFLLHKSGSTAETKNYRPITCLPTLYKLLTSILRSKINSHIVANNILAPAQNGCRVGSRGTKELLLIDMTICQNVRRNRGALSTAWIDYKKAYDSVPHSWLRRILELYKINPTLRSFLSTCMGQWITVLHQPGSLQSVSGPQDKISIKRGIFQGDSLSPLWFCLALNPLSTLLKDSTLGYRLRREGEVISHLLYMDDLKLFASKRQDLVELLKITEIFSNSIKMEFGVDKCAIMHVQRGKVVNSSNLQLTEVTFKSLSETETYKYLGMSQSLGIVDKDIKQMVKERFCSRLTKVLKSLLSGGNKVRAFNSWVMPLLTYSFGILRWTQTELDALDRRVRQLLTTHRMLHPRSSVMRLYIPRKLGGRGFLNAKNLHNREICSLREYFLNTECGIHHDVVTVDKNLTPLCLSKENWRKPIILSTEDRREVWKSKELHGRFYRALTGPDVDPLASINWLRFGDLFGETEGFVCAIADEVIKTRNYRKYILKDGTADICRACHRPGESLRHIISGCSHLANGEYLHRHNQVARIIHQQLALRYHLVESVVPYYQYVPAPVLENGHATLYWDRSIITDRTIVANKPDIVIIDRSQRQTRLVDIAVPHDENLVKAEKEKLTKYIDLAHEVTAMWDVDSTIIVPIVVSANGLIAKSLDQHLKRLSLDGWIKGQIQKAVLLDTARIVRRFLTLQP

SEQ ID NO: 6202 - protein, 1202 aa, Bembecia ichneumoniformis
MILRKRRRNTAEQSARPPPLPVSSSPCSSADEFLTADDKSTSSDDDGPTPPSPPRRPARRGRPPLPASLGPARPSASRTAPATGGVVRRMRWTHTMNENCMRAYYGATEGATNLTAYRARMLSLFQSLEPAVTVTAQRLSDQVRAIQRCQLLDQSALDRLRLHSLPVRATTAPSQVLPRAASTAEPTAHPPLINPADGEEDCANELVSTQVNEQLRRTLEETILRYRSTSELKPRLPRLPANRRGFALMGAVNALLSPYIQDSKDLTDTHSILYCGAIAVCRVAHIRFLNTTEIPKGDAHTPTWQVRIEKRIGTFRTLIAKLLCFKNGNKRPRVMRFVAQAFVGTDIRPKDYMACVTERIDFLKQKIYAWANRIRRYKERVDRFHQNRLFQSDQRKVYRHWEGTDNRVDAGQLPDADAMTNFWRGIWSVSDEHTEGDWINIVKQTCESIEPMGAITISPDDISCAIRTAKNWKSPGPDGLHNFWIKWFRCSHECLAMQFQRALDIGALPSLFTTGITFLLHKSGSTAETKNYRPITCLPTLYKLLTSILRSKINSHIVANNILAPAQNGCRVGSRGTKELLLIDMTICQNVRRNRGALSTAWIDYKKAYDSVPHSWLRRILELYKINPTLRSFLSTCMGQWITVLHQPGSLQSVSGPQDKISIKRGIFQGDSLSPLWFCLALNPLSTLLKDSTLGYRLRREGEVISHLLYMDDLKLFASKRQDLVELLKITEIFSNSIKMEFGVDKCAIMHVQRGKVVNSSNLQLTEVTFKSLSETETYKYLGMSQSLGIVDKDIKQMVKERFCSRLTKVLKSLLSGGNKVRAFNSWVMPLLTYSFGILRWTQTELDALDRRVRQLLTTHRMLHPRSSVMRLYIPRKLGGRGFLNAKNLHNREICSLREYFLNTECGIHHDVVTVDKNLTPLCLSKENWRKPIILSTEDRREVWKSKELHGRFYRALTGPDVDPLASINWLRFGDLFGETEGFVCAIADEVIKTRNYRKYILKDGTADICRACHRPGESLRHIISGCSHLANGEYLHRHNQVARIIHQQLALRYHLVESVVPYYQYVPAPVLENGHATLYWDRSIITDRTIVANKPDIVIIDRSQRQTRLVDIAVPHDENLVKAEKEKLTKYIDLAHEVTAMWDVDSTIIVPIVVSANGLIAKSLDQHLKRLSLDGWIKGQIQKAVLLDTARIVRRFLTLQP

SEQ ID NO: 6203 - protein, 954 aa, Bembecia ichneumoniformis
MGAVNALLSPYIQDSKDLTDTHSILYCGAIAVCRVAHIRFLNTTEIPKGDAHTPTWQVRIEKRIGTFRTLIAKLLCFKNGNKRPRVMRFVAQAFVGTDIRPKDYMACVTERIDFLKQKIYAWANRIRRYKERVDRFHQNRLFQSDQRKVYRHWEGTDNRVGAGQLPDADAMTNFWRGIWSVSDEHTEGDWINIVRQTCESIEPMGAITISPDDVSCAIRTAKNWKSPGPDGLHNFWIKWFRCSHECLAMQFQRALDIGALPSLFTTGITFLLHKSGSTAETKNYRPITCLPTLYKLLTSILRSKINSHIVANNILAPAQNGCRVGSRGTKELLLIDMTICQNVRRNRGALSTAWIDYKKAYDSVPHSWLRRILELYKINPTLRSFLSTCMEQWTTVLHQPGSLQSVSGPQDKISIKRGIFQGDSLSPLWFCLALNPLSTLLKDSTLGYRLRREGEVISHLLYMDDLKLFASKRQDLVELLKITEIFSNSIKMEFGVDKCAIMHVQRGKVVNSSNLQLTEVTFKSLSETETYKYLGMSQSLGIVDRDIKQMVKERFCSRLTKVLKSLLSGGNKVRAFNSWVMPLLTYSFGILRWTQTELDALDRRVRQLLTTHRMLHPRSSVMRLYIPRKLGGRGFLNAKNLHNREICSLREYFLNTECGIHHDVVTVDKNLTPLCLSKENWRKPIILSTEDRREVWKSKELHGRFYRALTGPDVDPLASINWLRFGDLFGETEGFVCAIADEVIKTRNYRKYILKDGTADICRACHRPGESLRHIISGCSHLANGEYLHRHNQVARIIHQQLALRYHLVESVVPYYQYVPAPVLENGHATLYWDRSIITDRTIVANKPDIVIIDRSQRQTMLVDIAVPHDENLVKAEKEKLTKYIDLAHEVTAMWDVDSTIIVPIVVSANGLIAKSLDQHLKRLSLDGWIKGQIQKAVLLDTARIVRRFLTLQP

SEQ ID NO: 6204 - protein, 1204 aa, Bembecia ichneumoniformis
MKLRERTRKKSTAEQSARPPPLPVSSSPCSSADEFLTADDKSTSSDDDGPTPPSPPRRPARRGRPPLPASLGPARPSASRPAPATGGVVRRMRWTHTMNKNCMRAYYGATEGATNLTAYRARMLSLFQALEPAVTVTAQRLSDQVRAIQRCQLLDQSALDRLRLDSLPVRTTTAPSQVLPTAASTAEPTAHPPLINPADGEEDCANELVSTEVNEQLRSTLEETILRYRFTSELKPRLPRLPANRRSFALMGAVNALLSPYIQDSKDLTDTHSILYCGAIAVCRVAHIRFLNTTEIPKDNARTPTWQVRIEKRIGTFRTLIAKLLCFKNGNKRPRVMRFVAQAFVGTNIRPKDYMACVTERVDFLKQKIYAWANRIRRYKERVDRFRQNRLFQSDQRKVYRQWEGTDNRVDAGQLPDADAMTNFWRGIWSVSDEHTEGDWINIVKQTCESIEPMGAITISPDDVSCAIRTAQNWKSPGPDGLHNFWIKWFRCSHECLAMQFQRALDIGALPSLFTTGITFLLHKSGSTAETKNYRPITCLPTLYKLLTSILRSKINSHIVANNVLAPAQNGCRVGSRGTKELLLIDMTICQNVRRNRGALSTAWIDYKKAYDSVPHSWLRRILELYKINPTLRSFLSTCMGQWTTVLHQPGSLQSVSGPQDKISIKRGIFQGDSLSPLWFCLALNPLSTLLRDSTLGYRLQREGEVISHLLYMDDLKLFAPKRQDLVELLKITEIFSNSIKMEFGVDKCAVMHVQRGKVVNSSNLQLTEVTFKSLSETETYKYLGMSQSLGIVDRDIKQMVKERFCSRLTKVLKSLLSGGNKVRAFNSWVMPLLTYSFGILRWTQTELDALDRRVRQLLTTHRMLHPRSSVMRLYIPRKLGGRGFLNAKNLHNREICSLREYFLNTECGIHHDVVTIDKNLTPLCLSKENWRKPIILSAEDRREIWKRKELHGRFYRALTGPDVDPLASINWLRFGDLFGETEGFVCAIADEVIKTRNYRKYILKDGTADICRACHRPGESLRHIISGCSHLANGEYLHRHNQVARIIHQQLALRYHLVESVVPYYQYVPAPVLANGHATLYWDRSIITDRTIVANKPDIVIIDRSQRRAILVDIAVPHDENLVKAEKEKLTKYIDLAHEVTAMWDVDATIIVPIVVSANGLIAKSLDQHLKRLSLDGWVRGQIQKAVLLDTARIVRRFLTLQP

SEQ ID NO: 6205 - protein, 1090 aa, Bembecia ichneumoniformis
MILRKRRRNTAEQSARPPPLPVSSSPCSSADEFLTADDKSTSSDDDGPTPPSPPRRPARRGRPPLPASLGPARPSASRPAPATGGVVRRMRWTHTMNENCMRAYYGATEGATNLTAYRARMLSLFQSLEPAVTVTAQRLSDQVRAIQRCQLLDQSALDRLRLDSLPVRATTAPSQVLPRAASTAEPTAHPPLINPADGEEDCANELVSTQVNEQLRRTLEETILRYRSTSELKPRLPRLPANRRSFALMGAVNALLSPYIQDSKDLTDTHSILYCGAIAVCRVAHIRFLNTTEIPKGDAHTPTWQVRIEKRIGTFRTLIAKLLCFKNGNKRPRVMRFVAQAFVGTDIRPKDYMACVTERIDFLKQKIYAWANRIRRYKERVDRFHQNRLFQSDQRKVYRHWEGTDNRVDAGQLPDADAMTNFWRGIWSVSDEHTEGDWINIVRQTCESIEPMGAITISPDDVSCAIRTAKNWKSPGPDGLHNFWIKWFRCSHECLAMQFQRALDIGALPSLFTTGITFLLHKSGSTAETKNYRPITCLPTLYKLLTSILRSKINSHIVANNVLAPAQNGCRVGSRGTKELLLIDMTICQNVRRNRGALSTAWIDYKKAYDSVPHSWLRRILELYKINPTLRSFLSTCMGQWTTVLHQPGSLQSVSGPQDKISIKRGIFQGDSLSPLWFCLALNPLSTLLKDSTLGYRLRREGEVISHLLYMDDLKLFASKRQDLVELLKITEIFSNSIKMEFGVDKCAIMHVQRGKVVNSSNLQLTEVTFESLSETETYKYLGMSQSLGIVDKDIKQMVKERFCSRLTKVLKSLLSGGNKVRAFNSWVMPLLTYSFGILRWTQTELDALDRRVRQLLTTHRMLHPRSSVMRLYIPRKLGGRGFLNAKNLHNREICSLREYFLNTECGIHHDVVTVDKNLTPLCLSKENWRKPIILSTEDRREVWKSKELHGRFYRALTGPDVDPLASINWLRFGDLFGETEGFVCAIADEVIKTRNYRKYILKDGTADICRACHRPGESLRHIISGCSHLANGEYLHRHNQVARIIHQQLALRYHLVESVVPYYQYVPAPVLENGLLGSLHNHGQDYCRQ

SEQ ID NO: 6206 - protein, 1204 aa, Bembecia ichneumoniformis
MKLRERTRKKSTAEQSARPLPLPVSSSPCSSADEFLTADDKSTSSDDDGPTPPSPPRRPARRGRPPLPASLGPARPSASRPAPATGGVVRRMRWTHTMNENCMRAYYGATEGATNLTAYRARMLSLFQALEPAVTVTAQRLSDQVRAIQRCQLLDQSALDRLRLDSLPVRTTTAPSQVLPTAASTAEPTAHPPLINPADGEEDCANKLVSTEVNEQLRSTLEETILRYRFTSELKPRLPRLPANRRSFALMGAVNALLSPYIQDSKDLTDTHSILYCGAIAVCRVAHIRFLNTTEIPKDNARTPTWQVRIEKRIGTFRTLIAKLLCFKNGNKRPRVMRFVAQAFVGTNIRPKDYMACVTERVDFLKQKIYAWANRIRRYKERVDRFRQNRLFQSDQRKVYRQWEGTDNRVDAGQLPDADAMTNFWRGIWSVSDEHTEGDWINIVKQTCESIEPMGAITISPDDVSCAIRTAQNWKSPGPDGLHNFWIKWFRCSHECLAMQFQRALDIGALPSLFTTGITFLLHKSGSTAETKNYRPITCLPTLYKLLTSILRSKINSHIVANNVLAPAQNGCRVGSRGTKELLLIDMTICQNVRRNRGALSTAWIDYKKAYDSVPHSWLRRILELYKINPTLRSFLSTCMGQWTTVLHQPGSLQSVSGPQDKISIKRGIFQGDSLSPLWFCLALNPLSTLLRDSTLGYRLQREGEVISHLLYMDDLKLFAPKRQDLVELLKITEIFSNSIKMEFGVDKCAVMHVQRGKVVNSSNLQLTEVTFKSLSETETYKYLGMSQSLSIVDRDIKQMVKERFCSRLTKVLKSLLSGGNKVRAFNSWVMPLLTYSFGILRWTQTELDALDRRVRQLLTTHRMLHPRSSVMRLYIPRKLGGRGFLNAKNLHNREICSLREYFLNTECGIHHDVVTVDKNLTPLCLSKENWRKPIILSAEDRREIWKRKELHGRFYRALTGPDVDPLASINWLRFGDLFGETEGFVCAIADEVIKTRNYRKYILKDGTADICRACHRPGESLRHIISGCSHLANGEYLHRHNQVARIIHQQLALRYHLVESVVPYYQYVPAPVLANGHATLYWDRSIITDRTIVANKPDIVIIDRSQRRAILVDIAVPHDENLVKAEKEKLTKYIDLAHEVTAMWDVDATIIVPIVVSANGLIAKSLDQHLKRLSLDGWVKGQIQKAVLLDTARIVRRFLTLQP

SEQ ID NO: 6207 - protein, 1079 aa, Bembecia ichneumoniformis
MLSLFQALEPAVTVTAQRLSDQVRAIQRCQLLDQSALDRLRLDSLPVRTTTAPSQVLPIAASTTEYPPLINSADGEEDCANELVSTEVNEQLRSTLEEAILRYRFTSELKPRLPRLPANRRSFALMGAVNALLSPYIQDSKDLTDTHSILYCGAIAVCRVANIRFLNTREIPKDNARTPTWQVRIEKRIGTFRTLIAKLLCFKNGNKRPRVMRFVAQAFVGTNIRPKDYMACVTERVDFLKQKIYAWANRIRRYKERVNRFRQNRLFQSDQRKVYRQWEGTDNRVDAGQLPDADAMTNFWRGIWSVSDEHTEGDWINIVKQTCESIEPMGAITISPDDVSCAIRTAQNWKSPGPDGLHNFWIKWFRCSHECLAMQFQRALDIGALPSLFTTGITFLLHKSGSTAETKNYRPITCLPTLYKLLTSILRSKINSHIVANNVLAPTQNGCRVGSRGTKELLLIDMTICQNVRRNRGALSTAWIDYKKAYDSVPHSWLRRILELYKINPTLRSFLSTCMGQWTTVLHQPGSLQSVSGPQDKISIKRGIFQGDSLSPLWFCLALNPLSTLLKDSTLGYRLQREGEVISHLLYMDDLKLFASKRQDLVELLKITEIFSNSIKMEFGVDKCAVMHVQRGKVVNSSNLQLTEVTFKSLSETETYKYLGMSQSLGIVDRDIKQMVKERFCSRLTKVLKSLLSGGNKVRAFNSWVMPLLTYSFGILRWTQTELDALDRRVRQLLTTHRMLHPRSSVMRLYIPRKLGGRGFLNAKNLHNREICSLREYFLNTECGIHHDVVTVDKNLTPLCLSKENWRKPIILSTEDRREVWKSKELHGRFYRALTGPDVDPLASINWLRFGDLFGETEGFVCAIADEVIKTRNYRKYILKDGTADICRACHRPGESLRHIISGCSHLANGEYLHRHNQVARIIHQQLALRYHLVESVVPYYQYVPAPVLANGHATLYWDRSIITDRTIVANKPDIVIIDRSQRRAILVDIAVPHDENLVKAEKEKLTKYIDLAHEVTAMWDVDATIVVPIVVSANGLIAKSLDQHLKRLSLDGWIKGQIQKAVLLDTARIVRRFLTLQP

SEQ ID NO: 6208 - protein, 1124 aa, Bembecia ichneumoniformis
MGWMDGWMDGLMRWTHTMNENCMRAYYGATEGATNLTAYRARMLSLFQALEPAVTVTAQRLSDQVRAIQRCQLLDQSALDRLRLDSLSVRTTTAPSQVLPTAASTAEPIAHPPLINPADGEEDCANELVSTEVNEQLRSTLEETILRYRFTSELKPRLPRLPANRRSFALMGAVNALLSPYIQDSKDLTDTHSILYCGAIAVCRVAHIRFLNTTEIPKDNARTPTWQVRIEKRIGTFRTLIAKLLCFKNGNKRPRVMRFVAQAFVGTNIRPKDYMACVTERVDFLKQKIYAWANRIRRYKERVDRFRQNRLFQSDQRKVYRQWEGTDNRVDAGQLPDADAMTNFWRGIWSVSDEHTEGDWINIVKQTCESIEPMGAITISPDDVSCAIRTAQNWKSPGPDGLHNFWIKWFRCSHECLAMQFQRALDIGALPSLFTTGITFLLHKSGSTAETKNYRPITCLPNLYKLLTSILRSKINSHIVANNVLAPAQNGCRVGSRGTKELLLIDMTICQNVRRNRGALSTAWIDYKKAYDSVPHSWLRRILELYKINPTLRSFLSTCMGQWTTVLHQPGSLQSVSGPQDKISIKRGIFQGDSLSPLWFCLALNPLSTLLRDSTLGYRLQREGEVISHLLYMDDLKLFAPKRQDLVELLKITEIFSNSIKMEFGVDKCAVMHVQRGKVVNSSNLQLTEVTFKSLSETETYKYLGMSQSLGIVNRDIKQMVKERFCSRLTKVLKSLLSGGNKVRAFNSCVMPLLTYSFGILRWTQTELDALDRRVRQLLTTHRMLHPRSSVMRLYIPRKLGGRGFLNAKNLHNREICSLREYFLNTECGIHHDVVTVDKNLTPLCLSKENWRKPIILSAEDRREIWKRKELHGRFYRALTGPDVDPLASINWLRFGDLFRETEGFVCAIADEVIKTRNYRKYILKDGTADICRACHRPGESLRHIISGCSHLANGEYLHRHNQVARIIHQQLALRYHLVESVVPYYQYVPAPVLANGHATLYWDRSIITDRTIVANKPDIVIIDRSQRRAILVDIAVPHDENLVKAEKEKLTKYIDLAHEVTAMWDVDATIIVPIVVSANGLIAKSLDQHLKRLSLDGWVKGQIQKAVLLDTARIVRRFLTLQP

SEQ ID NO: 6209 - protein, 860 aa, Cydia splendana
MRFVNQAFVGTDIRPRDYMANVTERIDFLKQKVYAWANRIRRYRERVDRFQQNRLFQSDQRKMYRKWEETNLRASDSRPPDATVMHDFWRSIWSVPVGHTEGSWMSVVERECESIEPMGAVTISPDDVSCAIRTAQNWKSPGPDGLHNFWLKWFRCSHSYLAAQFQQALELGSLPPSLTTGVTFLLYKSGSTTEAKNYRPITCLPTLYKLLTSILRAKINAHIVANNILASAQNGCRVGSRGTKELLLIDMTICQQIRRTKGASLYDSVPHSWLGRVLELYKVDAALRAFLSACMGQWTTVLRQPEGGDDRPGPQDFIRIERGIFQGDSLSPLWFCLALNPLSTLLKDLGLGCRLRREGEVISHLLYMDDLKLFAPNTQGLLELLKTTEVFSSAINMEFGVDKCAVMHVQRGKVVNSTNLQLSETMSFRSISESETYKYLGMSQSLGIEDEGIRRSVKERFFSRLTKVLNSLLSGGNKVRAFNAWVMPLLTYSFGILRWTQTELDALDRRVRSLLTTHRMLHPRSSVMRLYIPRKCGGRGFLNAKDLHNREVYNLRNYFLNNECGMHRDVVAVDRNLTPLSLANENWRKPVVLSTADRKAAWESKALHGRFYKALTGPDVDLLASVNWLRFGDLFGETEGFACAIADEVMMTNNYRKYILKDGTVDICRACRRPGESLRHIISGCSHLANGEYLHRHNLVARIIHQQLALLYGLVDREVPYYKYLPAPVLENGRATLYWDRSIITDRTIVANKPDIVLIDRSQRRAVLADVTIPHDENLVKAEKDKSSKYLDLAHEITAMWDVDSTIIVPIVVSANGLIAKSLDQHLERLSLGGWIKGQMQKAVILDTARIVRRFLTLRP

SEQ ID NO: 6210 - protein, 1205 aa, Hylaea fasciaria
MITRSKAGTKAQPPPPAPAPSSPSSISSSGSEYGTPPDTSPSSGESRPPSPPSPPRPVRRGRPPLPARLGPVGQSAPRSAPATGSQAQRMRWTPTMNENCMRAYYGATEGGTNLTAYRVRMLSLFQALVPTVAVSAQRLSDQVRTIHRCKLMEQSVLDRLRLEALPTRATSDSARGLPDAMSAPGPVTTPALVAPRVEPVADEEDGATSVSTQDNEQLRRALDDAIQQYRSTPDSRPRLPRMPTHRHNLALMGALNALLAPYLRTSEDLTDTHSILYCGAIAACRVARVKFPNAVQAPRTAGCTPAWQIRIERRINTFRTPIAKLICFSRGNHRPRVMRFVNQAFAGTGIRPRDYPTCVTERIDFLKQKVYAWANRIRRYRERVDRFQQNRLFQSDQRKVYRTWEVTGQRVCDGRLPDATAMINFWRNIWSVPVEHTEGEWMNIVERACEPIEAMEAISISPVDVSCAMRTAQNWKSPGPDGLHNFWIKWIRCSHSCLAMQFQEALEVGSLPSFMTTGCTSLLYKSGGITDPKNYRPITCLPTIYKLLTSILRTKINAHIVANNILASAQNGCRIGSRGTKELLLIDMAICQQVRRNRGALSTAWIDYKKAYDSVPHSWLERILELYKIDATLRSFLGTCMRQWTTVLCQPGGGGVSDPQDFIRIERGIFQGDSLSPLWFCLALNPLSTLLRDSGLGCRLRREGENISHLLYMDDLKLFTPKRPDLMKLLKTTEVFSNSISMEFGIDKCAVMHVQRGKVVNSSNLQLSETMSLRSLSEAETYKYLGMSESLGIVDRDIKQSVKERFFCRLTKVLKSLLSGGNKARAFNGWVMPLLIYSFGILRWTQTELDALDRKVRQQLTLHRMLHPRSSVMRLYIPRKWGGRGFLNAKNLHNREVCSLREYFLSSECGMHRDVVAVDRALTPLSLANENWRKPSVLTTDDRKDVWKGKELHGRFYRALTGSDVDLLASVNWLRFGDLFGETEGFVCAIADEVIKTNNYRKYIMKDGTVDICRACRRPGESLRHIISGCSHLANGEYLHRHNQVARIIHQQLALRYGLVESEVPYYKYAPAPVLENRRALLYWDRSVITDRTIVANKPDIVLVDRSQRRAVLVDITIPHDENLVKAEKDKLSKYLDLAHEVTAMWDVDSTIIVPIVVTANGLIAKSLDQHLKRLSLDGWIKGRMQKAVLLDTARIVRRFLSLQP

SEQ ID NO: 6211 - protein, 1205 aa, Hylaea fasciaria
MITRSKAGTKAQPPPPAPAPSSPSSISSSGSEYGTPPDTSPSSGESGPPSPPSPPRPVRRGRPPLPARLGPVGQSAPRSAPATGSQAQRMRWTPTMNENCMRAYYGATEGGTNLTAYRVRMLSLFQALVPTVAVSAQRLSDQVRAIHRCKLMEQSVLDRLRLEALPTRATSDSARGLPDAMSAPGPVTTPALVAPRVEPVADEEDGATSVSTQDNEQLRRALDDAIQQYRSTPDSRPRLPRMPTHRHNLALMGALNALLAPYLRTSEDLTDTHSILYCGAIAACRVARVKFPNAVQAPRTAGCTPAWQIRIERRINTFRTLIAKLICFSRGNHRPRVMRFVNQAFAGTGIRPRDYPTCVTERIDFLKQKVYAWANRIRRYRERVDRFQQNRLFQSDQRKVYRTWEVTGQRVCDGRLPDATAMINFWRNIWSVPVEHTEGEWMNIVERACEPIEAMEAISISPVDVSCAMRTAQNWKSPGPDGLHNFWIKWIRCSHSCLAMQFQEALEVGSLPSFMTTGCTSLLYKSGGTTDPKNYRPITCLPTIYKLLTSILRTKINAHIVANNILASAQNGCRIGSRGTKELLLIDMAICQQVRRNRGALSTAWIDYKKAYDSVPHSWLERILELYKIDATLRSFLGTCMRQWTTVLCQPGGGGVSDPQDFIRIERGIFQGDSLSPLWFCLALNPLSTLLRDSGLGCRLRREGENISHLLYMDDLKLFTPKRPDLMKLLKTTEVFSNSISMEFGIDKCAVMHVQRGKVVNSSNLQLSETMSLRSLSEAETYKYLGMSESLGIVDRDIKQSVKERFFCRLTKVLKSLLSGGNKARAFNGWVMPLLIYSFGILRWTQTELDALDRKVRQQLTLHRMLHPRSSVMRLYIPRKWGGRGFLNAKNLHNREVCSLREYFLSSECGMHRDVVAVDRALTPLSLANENWRKPSVLTTDDRKDVWKGKELHGRFYRALTGSDVDLLASVNWLRFGDLFGETEGFVCAIADEVIKTNNYRKYIMKDGTVDICRACRRPGESLRHIISGCSHLANGEYLHRHNQVARIIHQQLALRYGLVESEVPYYKYAPAPVLENRRALLYWDRSVITDRTIVANKPDIVLVDRSQRRAVLVDITIPHDENLVKAEKDKLSKYLDLAHEVTAMWDVDSTIIVPIVVTANGLIAKSLDQHLKRLSLDGWIKGRMQKAVLLDTARIVRRFLSLQP

SEQ ID NO: 6212 - protein, 1205 aa, Hylaea fasciaria
MITRSKAGTKAQPPPPAPAPSSPSSISSSGSEYGTPPDTSPSSGESGPPSPPSPPRPVRRGRPPLPARLGPVGQSAPRSAPATGSQAQRMRWTPTMNENCMRAYYGATEGGTNLTAYRVRMLSLFQALVPTVAVSAQRLSDQVRAIHRCKLMEQSVLDRLRLEALPTRATSDSARGLPDAMSAPGPVTTPASVAPRVEPVADEEDGATSVSTQDNEQLRRALDDAIQQYRSTPDSRPRLPRMPTHRHNLALMGALNALLAPYLRTSEDLTDTHSILYCGAIAACRVARVKFPNAVQAPRTAGCTPAWQIRIERRINTFRTLIAKLICFSRGNHRPRVMRFVNQAFAGTGIRPRDYPTCVTERIDFLKQKVYAWANRIRRYRERVDRFQQNRLFQSDQRKVYRTWEVTGQRVCDGRLPDATAMINFWRNIWSVPVEHTEGEWMNIVERACEPIEAMEAISISPVDVSCAMRTAQNWKSPGPDGLHNFWIKWIRCSHSCLAMQFQEALEVGSLPSFMTTGCTSLLYKSGGTTDPKNYRPITCLPTIYKLLTSILRTKINAHIVANNILASAQNGCRIGSRGTKELLLIDMAICQQVRRNRGALSTAWIDYKKAYDSVPHSWLERILELYKIDATLRSFLGTCMRQWTTVLCQPGGGGVSDPQDFIRIERGIFQGDSLSPLWFCLALNPLSTLLRDSGLGCRLRREGENISHLLYMDDLKLFTPKRPDLMKLLKTTEVFSNSISMEFGIDKCAVMHVQRGKVVNSSNLQLSETMSLRSLSEAETYKYLGMSESLGIVDRDIKQSVKERFFCRLTKVLKSLLSGGNKARAFNGWVMPLLIYSFGILRWTQTELDALDRKVRQQLTLHRMLHPRSSVMRLYIPRKWGGRGFLNAKNLHNREVCSLREYFLSSECGMHRDVVAVDRALTPLSLANENWRKPSVLTTDDRKDVWKGKELHGRFYRALTGSDVDLLASVNWLRFGDLFGETEGFVCAIADEVIKTNNYRKYIMKDGTVDICRACRRPGESLRHIISGCSHLANGEYLHRHNQVARIIHQQLALRYGLVESEVPYYKYAPAPVLENRRALLYWDRSVITDRTIVANKPDIVLVDRSQRRAVLVDITIPHDENLVKAEKDKLSKYLDLAHEVTAMWDVDSTIIVPIVVTANGLIAKSLDQHLKRLSLDGWIKGRMQKAVLLDTARIVRRFLSLQP

SEQ ID NO: 6213 - protein, 964 aa, Hylaea fasciaria
MPTHRHNLALMGALNALLAPYLRTSEDLTDTHSILYCGAIAACRVACVKFPNAVRAPRTAGCTPAWQIRIDRRINTFRTLIAKLICFSRGNHRPRVMRFVNQAFAGTGIRPRDYPTCVTERIDFLKQKVYAWANRIRRYRERVDRFQQNRLFQSDQRKVYRTWEVTGQRVCDGRLPDATAMINFWRNIWSVPVEHTEGEWMNIVERACEPIEAMEAISISPVDVSCAMRTAQNWKSPGPDGLHNFWIKWIRCSHSCLAMQFQEALEVGSLPSFMTTGCTSLLYKSGGTTDPKNYRPITCLPTIYKLLTSILRTKINAHIVANNILASAQNGCRIGSRGTKELLLIDMAICQQVRRNRGALSTAWIDYKKAYDSVPHSWLERILELYKIDATLRSFLGTCMRQWTTVLCQPGGGGVSDPQDFIRIERGIFQGDSLSPLWFCLALNPLSTLLRDSGLGCRLRREGENISHLLYMDDLKLFTPKRPDLMKLLKTTEVFSNSISMEFGIDKCAVMHVQRGKVVNSSNLQLSETMSLRSLSEAETYKYLGMSESLGIVDRDIKQSVKERFFCRLTKVLKSLLSGGNKARAFNGWVMPLLIYSFGILRWTQTELDALDRKIRQQLTLHRMLHPRSSVMRLYIPRKWGGRGFLNAKNLHNREVCSLREYFLRSECGMHRDVVAVDRALTPLSLANENWRKPSVLTTDDRKDVWKGKELHGRFYRALTGPDVDLLASVNWLRFGDLFGETEGFVCAIADEVIKTNNYRKYIMKDGTVDICRACRRPGESLRHIISGCSHLANGEYLHRHNQVARIIHQQLALRYGLVESEVPYYKYAPAPVLENRRALLYWDRSVITDRTIVANKPDIVLVDRSQRRAVLVDITIPHDENLVKAEKDKLSKYLDLAHEVTAMWDVDSTIIVPIVVTANGLIAKSLDQHLKRLSLDGWIKGRMQKAVLLDTARIVRRFLSLQP

SEQ ID NO: 6214 - protein, 1205 aa, Hylaea fasciaria
MITRSKAGTKAQPPPPAPAPSSPSSISSSGSEYGTPPDTSPSSGESGPPSPPSPPRPVRRGRPPLPARLGPVGQSAPRSAPATGSQAQRMRWTPTMNENCMRAYYGATEGGTNLTAYRVRMLSLFQALVPTVAVSAQRLSDQVRAIHRCKLMEQSVLDRLRLEALPTRATSDSARGLPDAMLAPGPVTTPASVAPRVEPVADEEDGATSVSTQDNEQLRRALDDAIQQYRSTPDSRPRLPRMPTHRHNLALMGALNALLAPYLRTSEDLTDTHSILYCGAIAACRVARVKFPNAVQAPRTAGCTPAWQIRIERRINTFRTLIAKLICFSRGNHRPRVMRFVNQAFAGTGIRPRDYPTCVTERIDFLKQKVYAWANRIRRYRERVDRFQQNRLFQSDQRKVYRTWEVTGQRVCDGRLPDATAMINFWRNIWSVPVEHTEGEWMNIVERACEPIEAMEAISISPVDVSCAMRTAQNWKSPGPDGLHNFWIKWIRCSHSCLAMQFQEALEVGSLPSFMTTGCTSLLYKSGGTTDPKNYRPITCLPTIYKLLTSILRTKINAHIVANNILASAQNGCRIGSRGTKELLLIDMAICQQVRRNRGALSTAWIDYKKAYDSVPHSWLERILELYKIDATLRSFLGTCMRQWTTVLCQPGGGGVSDPQDFIRIERGIFQGDSLSPLWFCLALNPLSTLLRDSGLGCRLRREGENISHLLYMDDLKLFTPKRPDLMKLLKTTEVFSNSISMEFGIDKCAVMHVQRGKVVNSSNLQLSETMSLRSLSEAETYKYLGMSESLGIVDRDIKQSVKERFFCRLTKVLKSLLSGGNKARAFNGWVMPLLIYSFGILRWTQTELDALDRKVRQQLTLHRMLHPRSSVMRLYIPRKWGGRGFLNAKNLHNREVCSLREYFLSSECGMHRDVVAVDRALTPLSLANENWRKPSVLTTDDRKDVWKGKELHGRFYRALTGSDVDLLASVNWLRFGDLFGETEGFVCAIADEVIKTNNYRKYIMKDGTVDICRACRRPGESLRHIISGCSHLANGEYLHRHNQVARIIHQQLALRYGLVESEVPYYKYAPAPVLENRRALLYWDRSVITDRTIVANQPDIVLVDRSQRRAVLVDITIPHDENLVKAEKDKLSKYLDLAHEVTAMWDVDSTIIVPIVVTANGLIAKSLDQHLKRLSLDGWIKGRMQKAVLLDTARIVRRFLSLQP

SEQ ID NO: 6215 - protein, 1205 aa, Hylaea fasciaria
MITRSKAGTKAQPPPPAPAPSSPSSISSSGSEYGTPPDTSPSSGESGPPSPPSPPRPVRRGRPPLPARLGPVGQSAPRSAPATGSQAQRMRWTPTMNENCMRAYYGATEGGTNLTAYRVRMLSLFQALVPTVAVSAQRLSDQVRAIHRCKLMEQSVLDRLRLEALPTRATSDSARGLPDAMSAPGPVTTPASVAPRVEPVADEEVGATSVSTQDNEQLRRALDDAIQQYRSTPDSRPRLPRMPTHRHNLALMGALNALLAPYLRTSEDLTDTHSILYCGAIAACRVARVKFPNAVRAPRTAGCTPAWQIRIERRINTFRTLIAKLICFSRGNHRPRVMRFVNQAFAGTGIRPRDYPTCVTERIDFLKQKVYAWANRIRRYRERVDRFQQNRLFQSDQRKVYRTWEVTGQRVCDGRLPDATAMINFWRNIWSVPVEHTEGEWMNIVERACEPIEAMEAISISPVDVSCAMRTAQNWKSPGPDGLHNFWIKWIRCSHSCLAMQFQEALEVGSLPSFMTTGCTSLLYKSGGTTDPKNYRPITCLPTIYKLLTSILRTKINAHIVANNILASAQNGCRIGSRGTKELLLIDMAICQQVRRNRGALSTAWIDYKKAYDSVPHSWLERILELYKIDATLRSFLGTCMRQWTTVLCQPGGGCVSDPQDFIRIERGIFQGDSLSPLWFCLALNPLSTLLRDSGLGCRLRREGENISHLLYMDDLKLFTPKRPDLMKLLKTTEVFSNSISMEFGIDKCAVMHVQRGKVVNSSNLQLSETMSLRSLSEAETYKYLGMSESLGIVDRDIKQSVKERFFCRLTKVLKSLLSGGNKARAFNGWVMPLLIYSFGILRWTQTELDALDRKVRQQLTLHRMLHPRSSVMRLYIPRKWGGRGFLNAKNLHNREVCSLREYFLSSECGMHRDVVAVDRALTPLSLANENWRKPSVLTTDDRKDVWKGKELHGRFYRALTGPDVDLLASVNWLRFGDLFGETEGFVCAIADEVIKTNNYRKYIMKDGTVDICRACRRPGESLRHIISGCSHLANGEYLHRHNQVARIIHQQLALRYGLVESEVPYYKYAPAPVLENRRALLYWDRSVITDRTIVANKPDIVLVDRSQRRAVLVDITIPHDENLVKAEKDKLSKYLDLAHEVTAMWDVDSTIIVPIVVTANGLIAKSLDQHLKRLSLDGWIKGRMQKAVLLDTARIVRRFLSLQP

SEQ ID NO: 6216 - protein, 1205 aa, Hylaea fasciaria
MITRSKAGTKAQPPPPAPAPSSPSSISSSGSEYGTPPDTSPSSGESGPPSPPSPPRPLRRGRPPLPARLGPVGQSAPRSAPATGSQAQRMRWTPTMNENCMRAYYGATEGGTNLTAYRVRMLSLFQALVPTVAVSAQRLSDQVRAIHRCKLMEQSVLDRLRLEALPTRATSDSARGLPDAISAPGPVTTPASVAPRVEPVADEEVGATSVSTQDNEQLRRALDDAIQQYRSTPDSRPRLPRMPTHRHNLALMGALNALLAPYLRTSEDLTDTHSILYCGAIAACRVARVKFPNAVRAPRTAGCTPAWQIRIERRINTFRTLIAKLICFSRGNHRPRVMRFVNQAFAGTGIRPRDYPTCVTERIDFLKQKVYAWANRIRRYRERVDRFQQNRLFQSDQRKVYRTWEVTGQRVCDGRLPDATAMINFWRNIWSVPVEHTEGEWMNIVERACEPIEAMEAISISPVDVSCAMRTAQNWKSPGPDGLHNFWIKWIRCSHSCLAMQFQEALEVGSLSSFMTTGCTSLLYKSGGTTDPKNYRPITCLPTIYKLLTSILRTKINAHIVANNILASAQNGCRIGSRGTKELLLIDMAICQQVRRNRGALSTAWIDYKKAYDSVPHSWLERILELYKIDATLRSFLGTCMRQWTTVLCQPGGGGVSDPQDFIRIERGIFQGDSLSPLWFCLALNPLSTLLRDSGLGCRLRREGENISHLLYMDDLKLFTPKRPDLMKLLKTTEVFSNSISMEFGIDKCAVMHVQRGKVVNSSNLQLSETMSLRSLSEAETYKYLGMSESLGIVDRDIKQSVKERFFCRLTKVLKSLLSGGNKARAFNGWVMPLLIYSFGILRWTQTELDALDRKVRQQLTLHRMLHPRSSVMRLYIPRKWGGRGFLNAKNLHNREVCSLREYFLSSECGMHRDVVAVDRALTPLSLANENWRKPSVLTTDDRKDVWKGKELHGRFYRALTGPDVDLLASVNWLRFGDLFGETEGFVCAIADEVIKTNNYRKYIMKDGTVDICRACRRPGESLRHIISGCSHLANGEYLHRHNQVARIIHQQLALRYGLVESEVPYYKYAPAPVLENRRALLYWDRSVITDRTIVANKPDIVLVDRSQRRAVLVDITIPHGENLVKAEKDKLSKYLDLAHEVTAMWDVDSTIIVPIVVTANGLIAKSLDQHLKRLSLDGWIKGRMQKAVLLDTARIVRRFLSLQP

SEQ ID NO: 6217 - protein, 964 aa, Hylaea fasciaria
MPTHRHNLALMGALNALLAPYLRTSEDLTDTHSILYCGAIAACRVARVKFPNAVRAPRTAGCTPAWQIRIERRINTFRTLIAKLICFSRGNHRPRVMRFVNQAFAGTGIRPRDYPTCVTERIDFLKQKVYAWANRIRRYRERVDRFQQNRLFQSDQRKVYRTWEVTGQRVCDGRLPDATAMINFWRNIWSVPVEHTEGEWMNIVERACEPIEAMEAISISPVDVSCAMRTAQNWKSPGPDGLHNFWIKWIRCSHSCLAMQFQEALEVGSLPSFMTTGCTSLLYKSGGTTDPKNYRPITCLPTIYKLLTSILRTKINAHIVANNILASAQNGCRIGSRGTKELLLIDMAICQQVRRNRGALSTAWIDYKKAYDSVPHSWLERILELYKIDATLRSFLGTCMRQWTTVLCQPGGGGVSDPQDFIRIERGIFQGDSLSPLWFCLALNPLSTLLRDSGLGCRLRREGENISHLLYMDDLKLFTPKRPDLMKLLKTTEVFSNSISMEFGIDKCAVMHVQRGKVVNSSNLQLSETMSLRSLSEAETYKYLGMSESLGIVDRDIKQSVKERFFCRLTKVLKSLLSGGNKARAFNGWVMPLLIYSFGILRWTQTELDALDRKVRQQLTLHRMLHPRSSVMRLYIPRKWGGRGFLNAKNLHNREVCSLREYFLSSECGMHRDVVAVDRALTPLSLANENWRKPSVLTTDDRKDVWKGKELHGRFYRALTGPDVDLLASVNWLRFGDLFGETEGFVCAIADEVIKTNNYRKYIMKDGTVDICRACRRPGESLRHIISGCSHLANGEYLHRHNQVARIIHQQLALRYGLVESEVPYYKYAPAPVLENRRALLYWDRSVITDRTIVANKPDIVLVDRSQRRAVLVDITIPHDENLVKAEKDKLSKYLDLAHEVTAMWDVDSTIIVPIVVTANGLIAKSLDQHLKRLSLDGWIKGRMQKAVLLDTARIVRRFLSLQP

SEQ ID NO: 6218 - protein, 1205 aa, Hylaea fasciaria
MITRSKAGTKAQPPPPAPAPSSPSSISSSGSEYGTPPDTSPSSGESGPPSPPSPPRPVRRGRPPLPARLGPVGQSAPRSAPATGSQAQRMRWTPTMNENCMRAYYGATEGGTNLTAYRVRMLSLFQALVPTVAVSAQRLSDQVRAIHRCKLMEQSVLDRLRLEALPTRATSDSARGMPDAISAPGPVTTPASVAPRVEPVADEEVGATSVSTQDNEQLRRALDDAIQQYRSTPDSRPRLPRMPTHRHNLALMGALNALLAPYLRTSEDLTDTHSILYCGAIAACRVARVKFPNAVRAPRTAGCTPAWQIRIERRINTFRTLIAKLICFSRGNHRPRVMRFVNQAFAGTGIRPRDYPTSVTERIDFLKQKVYAWANRIRRYRERVDRFQQNRLFQSDQRKVYRTWEVTGQRVCDGRLPDATAMINFWRNIWSVPVEHTEGEWMNIVERACEPIEAMEAISISPVDVSCAMRTAQNWKSPGPDGLHNFWIKWIRCSHSCLAMQFQEALEVGSLPSFMTTGCTSLLYKSGGTTDPKNYRPITCLPTIYKLLTSILRTKINAHIVANNILASAQNGCRIGSRGTKELLLIDMAICQQVRRNRGALSTAWIDYKKAYDSVPHSWLERILELYKIDATLRSFLGTCMRQWTTVLCQPGGGGVSDPQDFIRIERGIFQGDSLSPLWFCLALNPLSTLLRDSGLGCRLRREGENISHLLYMDDLKLFTPKRPDLMKLLKTTEVFSNSISMEFGIDKCAVMHVQRGKVVNSSNLQLSETMSLRSLSEAETYKYLGMSESLGIVDRDIKQSVKERFFCRLTKVLKSLLSGGNKARAFNGWVMPLLIYSFGILRWTQTELDALDRKVRQQLTLHRMLHPRSSVMRLYIPRKWGGRGFLNAKNLHNREVCSLREYFLSSECGMHRDVVAVDRALTPLSLANENWRKPSVLTTDDRKDVWKGKELHGRFYRALTGPDVDLLASVNWLRFGDLFGETEGFVCAIADEVIKTNNYRKYIMKDGTVDICRACRRPGESLRHIISGCSHLANGEYLHRHNQVARIIHQQLALRYGLVESEVPYYKYAPAPVLENRRALLYWDRSVITDRTIVANKPDIVLVDRSQRRAVLVDITIPHDENLVKAEKDKLSKYLDLAHEVTAMWDVDSTIIVPIVVTANGLIAKSLDQHLKRLSLDGWIKGRMQKAVLLDTARIVRRFLSLQP

SEQ ID NO: 6219 - protein, 1205 aa, Hylaea fasciaria
MITRSKAGTKAQPPPPAPAPSSPSSISSSGSEYGTPPDTSPSSGESGPPSPPSPPRPVRRGRPPLPARLGPVGQSAPRSAPATGSQAQRMRWTPTMNENCMRAYYGATEGGTNLTAYRVRMLSLFQALVPTVAVSAQRLSDQVRAIHRCKLMEQSVLDRLRLEALPTRATSDSARGLPDVMSAPGPVTTPASVAPRVEPVADEEVGATSVSTQDNEQLRRALDDAIQQYRSTPDSRPRLPRMPTHRHNLALMGALNALLAPYLRTSEDLTDTHSILYCGAIAACRVARVKFPNAVRAPRTAGCTPAWQIRIERRINTFRTLIAKLICFSRGNHRPRVMRFVNQAFAGTGIRPRDYPTCVTERIDFLKQKVYAWANRIRRYRERVDRFQQNRLFQSDQRKVYRTWEVTGQRVCDGRLPDATAMINFWRNIWSVPVEHTEGEWMNIVERACEPIEAMEAISISPVDVSCAMRTAQNWKSPGPDGLHNFWIKWIRCSHSCLAMQFQEALEVGSLPSFMTTGCTSLLYKSGGTTDPKNYRPITCLPTIYKLLTSILRTKINAHIVANNILASAQNGCRIGSRGTKELLLIDMAICQQVRRNRGALSTAWIDYKKAYDSVPHSWLERILELYKIDATLRSFLGTCMRQWTTVLCQPGGGGVSDPQDFIRIERGIFQGDSLSPLWFCLALNPLSTLLRDSGLGCRLRREGENISHLLYMDDLKLFTPKRPDLMKLLKTTEVFSNSISMEFGIDKCAVMHVQRGKVVNSSNLQLSETMSLRSLSEAETYKYLGMSESLGIVDRDIKQSVKERFFCRLTKVLKSLLSGGNKARAFNGWVMPLLIYSFGILRWTQTELDALDRKVRQQLTLHRMLHPRSSVMRLYIPRKWGGRGFLNAKNLHNREVCSLREYFLSSECGMHRDVVAVDRALTPLSLANENWRKPSVLTTDDRKDVWKGKELHGRFYRALTGPDVDLLASVNWLRFGDLFGETEGFVCAIADEVIKTNNYRKYIMKDGTVDICRACRRPGESLRHIISGCSHLANGEYLHRHNQVARIIHQQLALRYGLVESEVPYYKYAPAPVLENRRALLYWDRSVITDRTIVANKPDIVLVDRPQRRAVLVDITIPHDENLVKAEKDKLSKYLDLAHEVTAMWDVDSTIIVPIVVTANGLIAKSLDQHLKRLSLDGWIKGRMQKAVLLDTARIVRRFLSLQP

SEQ ID NO: 6220 - protein, 1205 aa, Hylaea fasciaria
MITRSKAGTKAQPPPPAPAPSSPSSISSSGSEYGTPPDTSPSSGESGPPSPPSPPRPVRRGRPPLPARLGPVGQSAPRSAPATGSQAQRMRWTPTMNENCMRAYYGATEGGTNLTAYRVRMLSLFQALVPTVAVSAQRLSDQVRAIHRCKLMEQSVLDRLRLEALPTRATSDSARGLPDAISAPGPVTTPASVAPRVEPVADEEVGATSVSTQDNEQLRRALDDAIQQYRSTPDSRPRLPRMPTHRHNLALMGALNALLAPYLRTSEDLTDTHSILYCGAIAACRVARVKFPNAVRAPRTAGCTPAWQIRIERRINTFRTLIAKLICFSRGNHRPRVMRFVNQAFAGTGIRPRDYPTCVTERIDFLKQKVYAWANRIRRYRERVDRFQQNRLFQSDQRKVYRTWEVTGQRVCDGRLPDATAMINFWRNIWSVPVEHTEGEWMNIVERACEPIEAMEAISISPVDVSCAMRTAQNWKSPGPDGLHNFWIKWIRCSHSCLAMQFQEALEVGSLPSFMTTGCTSLLYKSGGTTDPKNYRPITCLPTIYKLLTSILRTKINAHIVANNILASAQNGCRIGSRGTKELLLIDMAICQQVRRNRGALSTAWIDYKKAYDSVPHSWLERILELYKIDATLRSFLGTCMRQWTTVLCQPGGGGVSDPQDFIRIERGIFQGDSLSPLWFCLALNPLSTLLRDSGLGCRLRREGENISHLLYMDDLKLFTPKRPDLMKLLKTTEVFSNSISMEFGIDKCAVMHVQRGKVVNSSNLQLSETMSLRSLSEAETYKYLGMSESLGIVDRDIKQSVKERFFCRLTKVLKSLLSGGNKARAFNGWVMPLLIYSFGILRWTQTELDALDRKVRQQLTLHRMLHPRSSVMRLYIPRKWGGRGFLNAKNLHNREVCSLREYFLSSECGMHRDVVAVDRALTPLSLANENWRKPSVLTTDDRKDVWKGKELHGRFYRALTGPDVDLLASVNWLRFGDLFGETEGFVCAIADEVIKTNNYRKYIMKDGTVDICRACRRPGESLRHIISGCSHLANGEYLHRHNQVARIIHQQLALRYGLVESEVPYYKYAPAPVLENRRALLYWDRSVITDRTIVANKPDIVLVDRSQRRAVLVDITIPHDENLVKAVKDKLSKYLDLAHEVTAMWDVDSTIIVPIVVTANGLIAKSLDQHLKRLSLDGWIKGRMQKAVLLDTARIVRRFLSLQP

SEQ ID NO: 6221 - protein, 1116 aa, Hylaea fasciaria
MRWTPTMNENCMRAYYGATEGGTNLTAYRVRMLSLFQALVPTVAVSAQRLSDQVRAIHRCKLMEQSVLDRLRLEALPTRATSDSARGLPDAMSAPGPVTTPASVAPRVEPVADEEDGATSVSTQDNEQLRRALDDAIQQYRSTPDSRPRLPRMPTHRHNLALMGALNALLAPYLRTSEDLTDTHSILYCGAIAACRVARVKFPNAVQAPRTAGCTPAWQIRIERRINTFRTLIAKLICFSRGNHRPRVMRFVNQAFAGTGIRPRDYPTCVTERIDFLKQKVYAWANRIRRYRERVDRFQQNRLFQSDQRKVYRTWEVTGQRVCDGRLPDATAMINFWRNIWSVPVEHTEGEWMNIVERACEPIEAMEAISISPVDVSCAMRTAQNWKSPGPDGLHNFWIKWIRCSHSCLAMQFQEALEVGSLPSFMTTGCTSLLYKSGGTTDPKNYRPITCLPTIYKLLTSILRTKINAHIVANNILASAQNGCRIGSRGTKELLLIDMAICQQVRRNRGALSTAWIDYKKAYDSVPHSWLERILELYKIDATLRSFLGTCMRQWTTVLCQPGGGGVSDPQDFIRIERGIFQGDSLSPLWFCLALNPLSTLLRDSGLGCRLRREGENISHLLYMDDLKLFTPKRPDLMKLLKTTEVFSNSISMEFGIDKCAVMHVQRGKVVNSSNLQLSETMSLRSLSEAETYKYLGMSESLGIVDRDIKQSVKERFFCRLTKVLKSLLSGGNKARAFNGWVMPLLIYSFGILRWTQTELDALDRKVRQQLTLHRMLHPRSSVMRLYIPRKWGGRGFLNAKNLHNREVCSLREYFLSSECGMHRDVVAVDRALTPLSLANENWRKPSVLTTDDRKDVWKGKELHGRFYRALTGSDVDLLASVNWLRFGDLFGETEGFVCAIADEVIKTNNYRKYIMKDGTVDICRACRRPGESLRHIISGCSHLANGEYLHRHNQVARIIHQQLALRYGLVESEVPYYKYAPAPVLENRRALLYWDRSVITDRTIVANKPDIVLVDRSQRRAVLVDITIPHDENLVKAEKDKLSKYLDLAHEVTAMWDVDSTIIVPIVVTANGLIAKSLDQHLKRLSLDGWIKGRMQKAVLLDTARIVRRFLSLQP

SEQ ID NO: 6222 - protein, 1205 aa, Hylaea fasciaria
MITRSKAGTKAQPPPPAPAPSSPSSISSSGSEYGTPPDTSPSSGESGPPSPPSPPRPVRRGRPPLPARLGPVGQSAPRSAPATGSQAQRMRWTPTMNENCMRAYYGATEGGTNLTAYRVRMLSLFQALVPTVAVSAQRLSDQVRAIHRCKLMEQSVLDRLRLEALPTRATSDSARGLPDAMSAPGPVTTPASVAPRVEPVADEEDGATSVSTQDNEQLRRALDDAIQQYRSTPDSRPRLPRMPTHRHNLALMGALNALLAPYLRTSEDLTDTHSILYCGAIAACRVARVKFPNAVQAPRTAGCTPAWQIRIERRINTFRTLIAKLICFSRGNHRPRVMRFVNQAFAGTGIRPRDYPTCVTERIDFLKQKVYAWANRIRRYRERVDRFQQNRLFQSDQRKVYRTWEVTGQRVCDGRLPDATAMINFWRNIWSVPVEHTEGEWMNIVERACEPIEAMEAISISPVDVSCAMRTAQNWKSPGPDGLHNFWIKWIRCSHSCLAMQFQEALEVGSLPSFMTTGCTSLLYKSGGTTDPKNYRPITCLPTIYKLLTSILRTKINAHIVANNILASAQNGCRIGSRGTKELLLIDMAICQQVRRNRGALSTAWIDYKKAYDSVPHSWLERILELYKIDATLRSFLGTCMRQWTTVLCQPGGGGVSDPQDFIRIERGIFQGDSLSPLWFCLALNPLSTLLRDSGLGCRLRREGENISHLLYMDDLKLFTPKRPDLMKLLKTTEVFSNSISMEFGIDKCAVMHVQRGKVVNSSNLQLSETMSLRSLSEAETYKYLGMSESLGIVDRDIKQSVKERFFCRLTKVLKSLLSGGNKARAFNGWVMPLLIYSFGILRWTQTELDALDRKVRQQLTLHRMLHPRSSVMRLYIPRKWGGRGFLNAKNLHNREVCSLREYFLSSECGMHRDVVAVDRALTPLSLANENWRKPSVLTTDDRKDVWKGKELHGRFYRALTGFDVDLLASVNWLRFGDLFGETEGFVCAIADEVIKTNNYRKYIMKDGTVDICRACRRPGESLRHIISGCSHLANGEYLHRHNQVARIIHQQLALRYGLVESEVPYYKYAPAPVLENRRALLYWDRSVITDRTIVANKPDIVLVDRSQRRAVLVDITIPHDENLVKAEKDKLSKYLDLAHEVTAMWDVDSTIIVPIVVTANGLIAKSLDQHLKRLSLDGWIKGRMQKAVLLDTARIVRRFLSLQP

SEQ ID NO: 6223 - protein, 927 aa, Hylaea fasciaria
MCVMACRVARVKFPNAVQAPRTAGCTPAWQIRIERRINTFRTLIAKLICFSRGNHRPRVMRFVNQAFAGTGIRPRDYPTCVTERIDFLKQKVYAWANRIRRYRERVDRFQQNRLFQSDQRKVYRTWEVTGQRVCDGRLPDATAMINFWRNVWSVPVEHTEGEWMNIVERACEPIEAMEAISISPVDVSCAMRTAQNWKSPGPDGLHNFWIKWIRCSHSCLAMQFQEALEVGSLPSFMTTGCTSLLYKSGGTTDPKNYRPITCLPTIYKLLTSILRTKINAHIVANNILASAQNGCRIGSRGTKELLLIDMAICQQVRRNRGALSTAWIDYKKAYDSVPHSWLERILELYKIDATLRSFLGTCMRQWTTVLCQPGGGGVSDPQDFIRIERGIFQGDSLSPLWFCLALNPLSTLLRDSGLGCRLRREGENISHLLYMDDLKLFTPKRPDLMKLLKTTEVFSNSISMEFGIDKCAVMHVQRGKVVNSSNLQLSETMSLRSLSEAETYKYLGMSESLGIVDRDIKQSVKERFFCRLTKVLKSLLSGGNKARAFNGWVMPLLIYSFGILRWTQTELDALDRKVRQQLTLHRMLHPRSSVMRLYIPRKWGGRGFLNAKNLHNREVCSLREYFLSSECGMHRDVVAVDRALTPLSLANENWRKPSVLTTDDRKDVWKGKELHGRFYRALTGSDVDLLASVNWLRFGDLFGETEGFVCAIADEVIKTNNYRKYIMKDGTVDICRACRRPGESLRHIISGCSHLANGEYLHRHNQVARIIHQQLALRYGLVESEVPYYKYAPAPVLENRRALLYWDRSVITDRTIVANKPDIVLVDRSQRRAVLVDITIPHDENLVKAEKDKLSKYLDLAHEVTAMWDVDSTIIVPIVVTANGLIAKSLDQHLKRLSLDGWIKGRMQKAVLLDTARIVRRFLSLQP

SEQ ID NO: 6224 - protein, 868 aa, Hylaea fasciaria
MRFVNQAFAGTGIRPRDYPTCVTERIDFLKQKVYAWANRIRRYRERVDRFQQNRLFQSDQRKVYRTWEVTGQRVCDGRLPDATAMINFWRNIWSVPVEHTEGEWMNIVDRACEPIEAMEAISISPVDVSCAMRTAQNWKSPGPDGLHNFWIKWIRCSHSCLAMQFQEALEVGSLPSFMTTGCTSLLYKSGGTTDPKNYRPITCLPTIYKLLTSILRTKINAHIVANNILASAQNGCRIGSRGTKELLLIDMAICQQVRRNRGALSTAWIDYKKAYDSVPHSWLERILELYKIDATLRSFLGTCMRQWTTVLCQPGGGGVSDPQDFIRIERGIFQGDSLSPLWFCLALNPLSTLLRDSGLGCRLRREGENISHLLYMDDLKLFTPKRPDLMKLLKTTEVFSNSISMEFGIDKCAVMHVQRGKVVNSSNLQLSETMSLRSLSEAETYKYLGMSESLGIVDRDIKQSVKERFFCRLTKVLKSLLSGGNKARAFNGWVMPLLIYSFGILRWTQTELDALDRKVRQQLTLHRMLHPRSSVMRLYIPRKWGGRGFLNAKNLHNREVCSLREYFLSSECGMHRDVVAVDRALTPLSLANENWRKPSVLTTDDRKDVWKGKELHGRFYRALTGPDVDLLASVNWLRFGDLFGETEGFVCASADEVIKTNNYRKYIMKDGTVDICRACRRPGESLRHIISGCSHLANGEYLHRHNQVARIIHQQLALRYGLVESEVPYYKYAPAPVLENRRALLYWDRSVITDRTIVANKPDIVLVDRSQRRAVLVDITIPHDENLVKAEKDKLSKYLDLAHEVTAMWDVDSTIIVPIVVTANGLIAKSLDQHLKRLSLDGWIKGRMQKAVLLDTARIVRRFLSLQP

SEQ ID NO: 6225 - protein, 1205 aa, Hylaea fasciaria
MITRSKAGTKAQPPPPAPAPSSPSSISSSGSEYGTPPDTSPSSGESGPPSPPSPPRPVRRGRPPLPARLGPVGQSAPRSAPATGSQAQRMRWTPTMNENCMRAYYGATEGGTNLTAYRVRMLSLFQALVPTVAVSAQRLSDQVRAIHRCKLMEQSVLDRLRLEALPTRATSDSARGLPDAMSAPGPVTTPASVAPRVEPVADEEVGATSVSTQDNEQLRRALDDAIQQYRSTPDSRPRLPRMPTHRHNLALMGALNALLAPYLRTSEDLTDTHSILYCGAIAACRVARVKFPNAVRAPRTAGCTPAWQIRIERRINTFRTLIAKLICFSRGNHRPRVMRFVNQAFAGTGIRPRDYPTCVTERIDFLKQKVYAWANRIRRYRERVDRFQQNRLFQSDQRKVYRTWEVTGQRVCDGRLPDATAMINFWRNIWSVPVEHTEGEWMNIVERACEPIEAMEAISISPVDVSCAMRTAQNWKSPGPDGLHNFWIKWIRCSHSCLAMQFQEALEVGSLPSFMTTGCTSLLYKSGGTTDPKNYRPITCLPTIYKLLTSILRTKINAHIVANNILASAQNGCRIGSRGTKELLLIDMAICQQVRRNRGALSTAWIDYKKAYDSVPHSWLERILELYKIDATLRSFLGTCMRQWTTVLCQPGGGGVSDPQDFIRIERGIFQGDSLSPLWFCLALNPLSTLLRDSGLGCRLRREGENISHLLYMDDLKLFTPKRPDLMKLLKTTEVFSNSISMEFGIDKCAVMHVQRGKVVNSSNLQLSETMSLRSLSEAETYKYLGMSESLGIVDRDIKQSVKERFFCRLTKVLKSLLSGGNKARAFNGWVMPLLIYSFGILRWTQTELDALDRKVRQQLTLHRMLHPRSSVMRLYIPRKWGGRGFLNAKNLHNREVCSLREYFLSSECGMHRDVVAVDRALTPLSLANENWRKPSVLTTDDRKDVWKGKELHGRFYRALTGPDVDLLASVNWLRFGDLFGETEGFVCAIADEVIKTNNYRKYIMKDGTVDICRACRRPGESLRHIISGCSHLANGEYLHRHNQVARIIHQQLALRYGLVESEVPYYKYAPAPVLENRRALLYWDRSVITDRTIVANKPDIVLVDRSQRRAVLVDITIPHDENLVKAEKDKLSKYLDLAHEVTAMWDVDSTIIVPIVVTANGLIAKSLDQHLKRLSLDGWIKGRMQKAVLLDTARIVRRFLSLQP

SEQ ID NO: 6226 - protein, 1205 aa, Hylaea fasciaria
MITRSKAGTKAQPPPPAPAPSSPSSISSSGSEYGTPPDTSPSSGESGPPSPPSPPRPVRRGRPPLPARLGPVGQSAPRSAPATGSQAQRMRWTPTMNENCMRAYYGATEGGTNLTAYRVRMLSLFQALVPTVAVSAQRLSDQVRAIHRCKLMEQSVLDRLRLEALPTRATSDSARGLPDAMSAPGPVTTPASVAPRVEPVADEEVGATSVSTQDNEQLRRALDDAIQQYRSTPDSRPRLPRMPTHRHNLALMGALNALLAPYLRTSEDLTDTHSILYCGAIAACRVARVKFPNAVRAPRTAGCTPAWQIRIDRRINTFRTLIAKLICFSRGNHRPRVMRFVNQAFAGTGIRPRDYPTCVTERIDFLKQKVYAWANRIRRYRERVDRFQQNRLFQSDQRKVYRTWEVTGQRVCDGRLPDATAMINFWRNIWSVPVEHTEGEWMNIVERACEPIEAMEAISISPVDVSCAMRTAQNWKSPGPDGLHNFWIKWIRCSHSCLAMQFQEALEVGSLPSFMTTGCTSLLYKSGGTTDPKNYRPITCLPTIYKLLTSILRTKINAHIVANNILASAQNGCRIGSRGTKELLLIDMAICQQVRRNRGALSTAWIDYKKAYDSVPHSWLERILELYKIDATLRSFLGTCMRQWTTVLCQPGGGGVSDPQDFIRIERGIFQGDSLSPLWFCLALNPLSTLLRDSGLGCRLRREGENISHLLYMDDLKLFTPKRPDLMKLLKTTEVFSNSISMEFGIDKCAVMHVQRGKVVNSSNLQLSETMSLRSLSEAETYKYLGMSESLGIVDRDIKQSVKERFFCRLTKVLKSLLSGGNKARAFNGWVMPLLIYSFGILRWTQTELDALDRKIRQQLTLHRMLHPRSSVMRLYIPRKWGGRGFLNAKNLHNREVCSLREYFLSSECGMHRDVVAVDRALTPLSLANENWRKPSVLTTDDRKDVWKGKELHGRFYRALTGPDVDLLASVNWLRFGDLFGETEGFVCAIADEVIKTNNYRKYIMKDGTVDICRACRRPGESLRHIISGCSHLANGEYLHRHNLVARIIHQQLALRYGLVESEVPYYKYAPAPVLENRRALLYWDRSVITDRTIVANKPDIVLVDRSQRRAVLVDITIPHDENLVKAEKDKLSKYLDLAHEVTARWDVDSTIIVPIVVTANGLIAKSLDQHLKRLSLDGWIKGRMQKAVLLDTARIVRRFLSLQP

SEQ ID NO: 6227 - protein, 1205 aa, Hylaea fasciaria
MITRSKAGTKAQPPPPAPAPSSPSSISSSGSEYGTPPDTSPSSGESGPPSPPSPPRPVRRGRPPLPSRLGPVGQSAPRSAPATGSQAQRMRWTPTMNENCMRAYYGATEGGTNLTAYRVRMLSLFQALVPTVAVSAQRLSDQVRAIHRCKLMEQSVLDRLRLEALPTRATSDSARGLPDAMSAPGPVTTPALVAPRVEPVADEEDGATSVSTQDNEQLRRALDDAIQQYRSTPDSRPRLPRMPTHRHNLALMGALNALLAPYLRTSEDLTDTHSILYCGAIAACRVARVKFPNAVQAPRTAGCTPAWQIRIERRINTFRTLIAKLICFSRGNHRPRVMRFVNQAFAGTGIRPRDYPTCVTERIDFLKQKVYAWANRIRRYRERVDRFQQNRLFQSDQRKVYRTWEVTGQRVCDGRLPDATAMINFWRNIWSVPVEHTEGEWMNIVERACEPIEAMEAISISPVDVSCAMRTAQNWKSPGPDGLHNFWIKWIRCSHSCLAMQFQEALEVGSLPSFMTTGCTSLLYKSGGTTDPKNYRPITCLPTIYKLLTSILRTKINAHIVANNILASAQNGCRIGSRGTKELLLIDMAICQQVRRNRGALSTAWIDYKKAYDSVPHSWLERILELYKIDATLRSFLGTCMRQWTTVLCQPGGGGVSDPQDFIRIERGIFQGDSLSPLWFCLALNPLSTLLRDSGLGCRLRREGENISHLLYMDDLKLFTPKRPDLMKLLKTTEVFSNSISMEFGIDKCAVMHVQRGKVVNSSNLQLSETMSLRSLSEAETYKYLGMSESLGIVDRDIKQSVKERFFCRLTKVLKSLLSGGNKARAFNGWVMPLLIYSFGILRWTQTELDALDRKVRQQLTLHRMLHPRSSVMRLYIPRKWGGRGFLNAKNLHNREVCSLREYFLSSECGMHRDVVAVDRALTPLSLANENWRKPSVLTTDDRKDVWKGKELHGRFYRALTGSDVDLLASVNWLRFGDLFGETEGFVCAIADEVIKTNNYRKYIMKDGTVDICRACRRPGESLRHIISGCSHLANGEYLHRHNQVARIIHQQLALRYGLVESEVPYYKYAPAPVLENRRALLYWDRSVITDRTIVANKPDIVLVDRSQRRAVLVDITIPHDENLVKAEKDKLSKYLDLAHEVTAMWDVDSTIIVPIVVTANGLIAKSLDQHLKRLSLDGWIKGRMQKAVLLDTARIVRRFLSLQP

SEQ ID NO: 6228 - protein, 1205 aa, Cydia splendana
MQTRSKTRAQLASPRNARPPPPSASSVSSQSSSGDEFATAPDTSESSDECGPPPPPSRPPARRGRPPLSAVSARLGPAGHPAPPTAPAAGGVVRRMRWSQTINENVMRAYYGATEGGTNLCAYRVRMLPLFQALEPTIDVTAQRLSDQVRVIQRQKRLDDSTLDRLRLEALSARAASTSARDPPATSPDPVPAPDQAPGAPRVDLSANEEEFAQSVGSTASEQLRRTLDEAITRYRSTPDTRPRLPRLPMNRHNLALMGALNTLLEPYLRTSKDLDDTHAIMYRGAIAACRVARVKFPDSERAPRTAGGAPAWQIRIERRISSFRTLIAKLICFRGGNNRPRVMRFVNQAFVGTDIRPRDYMANVTERIDFLKQKVYAWANRIRRYRERVDRFQQNRLFQSDQRKMYRKWEETNLRASDSRPPDATVMNDFWRSIWSVPVGHTEGSWMSVVERECESIEPMGAVTISPDDVSCAIRTAQNWKSPGPDGLHNFWLKWFRCSHSYLAAQFQQALELGSLPPSLTTGVTFLLYKSGSTTEAKNYRPITCLPTLYKLLTSILRAKINAHIVANNILASAQNGCRVGSRGTKELLLIDMTICQQIRRTKGALSAAWIDYKKAYDSVPHSWLGRVLELYKVDAALRAFLSACMGQWTTVLRQPGGGDDRPGPQDFIRIERGIFQGDSLSPLWFCLALNPLSTLLKDLGLGCRLRREGEVISHLLYMDDLKLFAPNTQGLLELLKTTEVFSSAINMEFGVDKCAVMHVQRGKVVNSTNLQLSETMSFRSISESETYKYLGMSQSLGIEDEGIRRSVKERFFSRLTKVLNKVRAFNAWVMPLLTYSFGILRWTQTELDALDRRVRSLLTTHRMLHPRSSVMRLYIPRKCGGRGFLNAKDLHNREVYNLRNYFLNNECGMHRDVVAVDRNLTPLSLANENWRKPVVLSTADRKAAWESKALHGRFYKALTGPDVDLLASVNWLRFGDLFGETEGFACAIADEVMMTNNYRKYILKDGTVDICRACRRPGESLRHIISGCSHLANGEYLHRHNLVARIIHQQLALLYGLVDREVPYYKYLPAPVLENGRATLYWDRSIITDRTIVANKPDIVLIDRSQRRAVLADVTIPHDENLVKAEKDKSSKYLDLAHEITAMWDVDSTIIVPIVVSANGLIAKSLDQHLERLSLGGWIKGQMQKAVILDTARIVRRFLTLRP

SEQ ID NO: 6229 - protein, 1212 aa, Hedya salicella
MQRYFTRSKNTRKISIAATPTHARPTPPPASSCSPSASSDDFATAPDTSELSDDECGPPPPPPRPPARRGRPRLPARLGPAGHSAPPTAPATGGIVRRMRWSQANNENVMRAYYGATEGGTHLSAYRDRMLLLFQTFEPAIAVSAQRLSDQVRAIQRRKLLDDATLDRLRLEVLAARAASTSSRNPPATSPVPAPALDLMPGAPRVDPDSDEGHCVSSVSTQANEQLRRTLEETIERYRFAPDSRPRLPRLPANKRNLALVGALNALLDPYLRASEDLADTHSIMYCGAIAACRVAPVKFPDADRAPRTAGGVPAWQVRIERRISTFMTLIAKLICFRGGNNRPRVMRYVAQAFARTDVSSCDYMACVTERIDFLKQKVYAWASRIRRYRKRVDRFQQNHLFQTDQRKVYRKWEGTDQRVTDGRLPDPTAMSNFWRSIWSVPVEHTEGEWMNVVERECEPIEAMGAVTISPDDVSCAARTTQNWKSPGPDGLHNFWVKWFRCSHERLATQFQQALELGSLPSFLTTGVTFLLYKSGSTTEAKNYRPITCLPTLYKLLTSILRAKINTHIVANNVLAFSQNGCRVGSRGTKELLLIDTTICQQVRRSRGSLSAAWIDYKKAYDSVPHSWLERILELYKVDTALRSFLGACMRQWTTVLCQPGGRDARPAPQDFIRIKRGIFQGDSLSPLWFCLALNPLSTLLKDSGLGCRLRRGGEIISHLMYMDDLKLFAPKRPELVELLKVTDTFSSAIKMEFGVDKCAVMHVQRGKVVNSTNLELSETMSLRSLSETETYKYLGMSQALSIADGDIRQAVKERFFCRLTKVLNSLLSGGNKARAFNAWVMPLLTYSFGILRWTQTELDALDRRVRMLLTTHRMLHPRSSVMRLYIPRKCGGRGFLNAKDLHNREVCSLREYFLNDECGIHRDVVAVDKGLTPLSLANENWRRPTVLSTVDRKDVWKSKELHGRFYKALTGPDVDLLASVNWLRFGDLFGETEGFSCAIADEVIMTNNYRRYILKDGTVDICRACRRPGESLRHIMSGCSHLANGEYLHRHNQVARIIHQQLAVKYDLVVPYYKYVPMPVLENGRATLYWDRSIITDRTIVANKPDIVLVDRSKRRAMLVDITIPHDENLVKAEKDKLSKYLDLAHEVTAMWDVDSTIIVPIVVSVNGLIAKSLDEHLKRLSLDGWIKGQIQKAVILDTARIIRRFLSVQP

SEQ ID NO: 6230 - protein, 1196 aa, Atethmia centrago
MLTRSAAVRARLPPPDSSLSSASPPPVPSPTVCAVTTPTAAVASSSSDEYFSPPTTPPPVRRRGGRRPPDGLGSRGPPASDRVPAPGGSVKRMRWTQSVNENVMRSYYGATEGGNNLTAYRVRMLSLFQVLEPAVNVSAQRLSDQVRVIQRNHMLDDTVLDRLRSEMQRSHVIVPPSQTVVLSPQLSTNQADEGSDDRATNVSTQCNVELRSALEDAIREYRLISPELRPRLPRLPMHKKNRALVAALDSQLSNYFDDCEDLTDTHSILYCAAVAVCRVAHVKFAKDSRTTRPKPTVPAWQCRIESRIGGARALIGKLICFREGNTRPRVMRFVRRAFSGTDIGPQDYMTRVTERIDFLKQKVYAWANRIRRYKRRVERYTQNRTFQSDERWVYRGWERPDQDVTDTRLPDDDVMCSFWRSIWSVPVSHTEGDWARKVERACDPIPEMGAITICPQDVARAVRPLPNWKSPGPDGLHNFWLKWFLRSHARLAAQYQTALESGSLPQFLTTGVTHLLHKSGSTAEPKNYRPITCLPTVYKLLTSILRAKINKHIDTNSIMSASQNGCRNGSRGTKELLLIDMTISQQVRHSRKDLSTCWIDYKKAYDSVPHTWLMRVLELYKVDATLRTFLISCMGQWRTVLRYPGCRNIQKNSEPIRIERGIFQGDSLSPLWFCLALNPLSTLLEDSGLGYRMRRGGQVISHLLYMDDLKLFASNNLQLMELLKITESFSSTIRMEFGVDKCAVMHVKRGKIVESVGTQLSDSINLRTLSASETYKYLGMSEALGINVTVMKQSLKERFFGRLKKVFNSLLSGGNKVRAFNGWVMPVLMYSFGILKWTQTELDALDRRVRTLLTAYRMHHPRSSVMRLYIPRKCGGRGFLNAKTLHNREVCSLREYFLEAGMHRDVVAVDKGLTPLSLAKENWRKLVVLDTNDRREVWQSKELHGRFFRYLHEPDVDFQASVAWLRFGDLFGETEGFVCAIMDEVIMTKNYRRFIVKDGTVDVCRACYRPGESIRHIISGCSRLANEEYLHRHNLVARIIHQQLALKYSLVESEVPYYRYVPDPVLDNGNITLYWDRSIITDRTIVANKPDIVVVDRTERRAMIVDITVPHDGNLVKAEKDKQIKYLDLAREVVDMWDVDSAIIVPIVVSANGLIAKSLDQHLKRLTLDGWIKGLIQKAVLLDTARIVRRFLSLEP

SEQ ID NO: 6231 - protein, 1206 aa, Crocallis elinguaria
MITRSRTKKAGTASARKTPPPASSSPSSSSGVEYGTPLDTSASSDEDGPPSPPPPPPPARRGRPPLPARLGPAGHSVPRTAPATGGIVRRMRWTSDMNENCMRAYYGATEGGTNMSAYRDRMLPLFQTLEPSVAVSTQRLSDQVRAIQRLKLLDESVLDRLRLEALPIRATSASARDLSVAPPVPAPLPAPSSVATRIDPVVDEDDCANISVSTQVNEQLRRALEDAILEYQYTPDSRPRLRRLPTNRRNLALMGALNVLLAPYLRASENLFDTHSIMYCGAIAVCRVARVKFPDADRAPRPAGSAPAWQVRIERRINTFRTLIAKLICFSRGNNRPRVMRFVNQAFAGTGIRPQNYMAGVTERIDFLKQKIYAWVNRIRRYRERVDRYHQNRLFESDQRKVYRNWEGTDQRVSDGQLPDTNAMINFWRGIWSVPVEHTEGDWMRTVEQSCESIETMGSVTIDPIDVSCAIRTAQNWKSPGPDGLHNFWIKWIRCSHECLAVQFQEALELGSLPRFLTTGVTSLLHKSGSTTEAKNYRPITCLPTLYKLLTSILRAKINSHVVANNILAPAQNGCRVGSRGTKELLLIDTAICQQVRRNKGALSTAWIDYKKAYDSVPHSWLERILELYKIDTTLRTFLSTCMRQWTTVLRQPGSGNSPSGPENIIKIERGIFQGDSLSPLWFCLALNPLSTLLRDSRLGCKLRREGEIISHLLYMAPKLAPKSPDLMKLLKITEIFSSAIKMELGVDKCAVMHVQRGKVVNSDNLQLSETMTLRSLSEAETYRYLGMSQSLGITVGDIKQSVKERFFCRLTKVLNSLLSGGNKARAFNGWVMPLLIYSFGILKWTQTELDSLDRRVRQLLTYHRMLHPRSSVMRLYIPRKWGGRGFLNAKTLHNREVCSLREYFLNNECGMHRDVVAVDRNLTPLSLANENWHKPVVMTTEDRKEVWKGKELHGRFYRALTGSDVDLLASVNWLRFGDLFGETEGFVCAIMDEVIKTNNYRKYIMKDGTVDICRACRRPGESLRHIISGCSHLANGEYLHRHNLVARIIHQQIALQYGLVESEVPYYKYAPVPVLENGCALLYWDRSIITDRTIVANKPDIVLVDRSQRRAVLVDITVPHDENLVKAEKDKLSKYLDLAHEVTAMWNVDSTIIVPIVVSANGLVAKSLDQHLKRLSLDGWIKGRIQKAVLLDTARIVRRFLTLQP

SEQ ID NO: 6232 - protein, 1212 aa, Agriopis aurantiaria
MITRSKTSAAARLTNAQPPPPPASSSSPSSSSGEDEYHTTREASGSSSDTSGPGTPPPPPPARRGRPPLPARLGLVGHSATRPAPATGGVVRRMRWSPTMNENCMRAYYRATEGGTNLSAYCARMLPLFQDLEPTVTVSAQRLSDQVRAIHRCKLLDDSVLDRLRLEELRARPTPALMRDPPVASSASTLASLPASVATLAAPADPVVDEGDLTSNSVSDQVREQLRGALEDAISQYRFAPDSRPRLPRLPTHRRNLALMGALNALLAPYLRASEDLVDTHSILYCGAFAACRVARVKFPDTNRAPRTAGGVPAWQVRIERRISTFRTLIAKLICFSRGNNRPRVMRFVTQAFAGTEIRPQHYLANVMERIDYLKQKVYAWVSRIRRYRERVNRYWQNRLFQSDQRKVYRGWEETDQRVSDGQLPDANAMINFWRGIWSVPVEHTEGDWMRVVERECESIEPMGSILIDSVDVSCAIRTAQNWKSPGPDGLHNFWIKWIRCSHDRLATQFQEALELGSLPSFMTTGVTFLLQKSGSTTEAKNYRPITCLPTIYKLLTSILRNKINAHIVANNVLAHAQNGCRVGSRGTKELLLIDTAISQQVRRNKGALSAAWIDYKKAYDSVPHSWLERVLELYKIDTTLKSFLGACMRQWTTVLRQPGGGDGTSGPQDLIRIERGIFQGDSFSPLWFCLALNPLSTLLRDSGLGYRLRRDGQVISHLLYMDDLKLFTPKRQDLVELLKITEVFSSAIRMEYGVDKCAVMHVQRGKVVNSPNLQLSEVMTLRSLSEAETYKYLGMSESLGISVENIKKSVKERFFCRLTKVLNSLLSGGNKVRAFNGWVMPLLIYSFGILRWTQTELDALDRRVRQLLTSHRMLHPRSSVMRLYIPRKWGGRGFLNAKNLHNREVCSLRDFFRNSESGMHRDVVAVDRGLTPLSLANENWRKPSVLRDRRDVWKGKELHGRFYRALTGPDVDLLSSVNWLRFGDLFGETEGFACAIADEVIKTNNYRKYIMKDGTVDICRACHRPGESLRHIISGCSHLANGEYLHRHNQVARIIHQQLALRYGLVESEVPYYKYAPAPVLENGRALLYWDRSIITDRTIVANKPDIVLVDRSQRRAVLVDITIPHDENLVKAEKDKLSKYLDLAHEVTAMWDVDSTIIVPIVVSVNGLIAKSLDQHLKRLSLDGWVKGQMQKAVILDTARIVRRFLTLQP

SEQ ID NO: 6233 - protein, 1194 aa, Junonia litoralis
MKNARGRLAQPSSQVNSSNSETQSSTSDDDYKTPLSTSESEKNEIDSPARTSKRRRAAHPPQEGLESKGRRAPATTPAAGGAVRRMKWSQKMNESVMRAYYEATGGGINLTAYRSKMLSLFQALEPTVTVTAQRLSDQVRAIQRCHLLDDSVLDRLRSNLQQLNTGSDTHRDEPNKEKQTETTAQNLNELPTNSVDLSVSDQHNEYMRGTLEDAILEYRFMPFNLRPKIPRLPMHRHNLALVSVLDKLLQKYLNNSQDLYDTYSILYCGAIAVSKVASVKLPIPKPISPSYTIPAWQSRIEKRISTTRTLIGKLICFREGNNRPRVMRFVHLAFAGTDIRPNEYMTSVTERIDSLKQKVYAWAKRIRRYKKRMNRYCQNSMFQKDQRRVFRNWEKRSNGEASGELPTPDLMSNFWRGIWSNPIGHTEGDWMSVVGKSCELLPPMDPVRISPNDVSCAIRSTSNWKCPGPDGLHNFWLKWFRNSHSTLAAQFQDAIACGSLPTFMTTGTTFLIYKSGCTADPKNYRPITCLSNLYKLLTSILAAKIKKHIIDNNILAPAQNGCRQGSRGTKELLLIDMTISQQVRRNRKNLCAAWIDYKKAYDSVPHTWLMRIMELYKIDTTLCSFLGSCMGQWITFLRHPGGTDIFGSTEPIKIKRGIFQGDSLSPLWFCLALNPLSTLLEDSGLGFRLRRASKPISHLLYMDDLKLYASKRSDLFKLLKITESFSSCIGMEFGVDKCAVIHVEKGRTVLSERVHLTNNLFLRSLDEGETYKYLGMSEALGIDNGSMKQLVRERFFGRLKKVFNSFLSGGNKVRAFNSWVMPLLVYTFGILRWTQTELDSLDRQVRKLLTTYRMHHPRSSVMRLYIPRKLGGRGFLNAKNLHNREVYNLRDYFLNNSGDMHKDVVAVDKGLTPLSLGKENWRGPAVMDTLDRVAVWRSKELHGRFYKALTGPDVDQTSSVSWLQHGDLFGETEGFVCAIMDEVIKTNNYRKHILKDGTLDVCRACHRPGESLRHIVSGCCHLANGEYLHRHNQVARIIHQQLALRYGLIDCELPYYRYNPTPVLENGHALLYWDRSIITDRCITANKPDIVVVDRSARQAIIVDITIPHDDNLVKAEKEKMTKYLDLAHEITAMWSVDSTIIVPIVVSVNGLIAKSFDQHLMKLSLGCWIKGRIQKAVLLETARIVRRFLSLEL

SEQ ID NO: 6234 - protein, 1184 aa, Junonia neildi
MKNARGRRAQIPTKVNSSSSDTKSSVSDDDYQTPLSSTESEQYETDPPAKTSKRRRAVHPPQDGLGLQEQRASARAPAAGGAVRRMRWTQKLNESVMRAYYGATGGGINLTGYRSTMLSLFQALEPTVTVTAQRLSDQVRAIQRCHLLDESVLERLRSSLQQLNTVTESHCTQESQKESNEIHMPDTSEIIRSSVDLVVSNQDNEHMRRALEDAILKYKHIPFNLRPQIPRLPMHRRNLALVGVLDKVLQNYLDNAVDLCDTHSILYCGAVAVCNIASVKFPTKRIFSTSYTAPAWQIRIEKRITLTRTLIGKLICFRAGNNRPRVMRFVHQAFAGTNIITSEYMASVTDRIDFLKQKLYAWAKRIKRYKLRVNRYRQNSMFQSDQRKVYRIWEQRNDSVVNGSLPTREEMSNFWRDIWSVPIDHTEGDWICTVRRHCESLKPMDPIKICPDDVSAAIRSTSNWKCPGPDGLQNFWLKWFRSSHSILAAQFQDALISGSLPTFMTTGVTILLYKSGCTADPKNYRPITCLPTIYKLLTSILAAKITKHIVTNNVLAPAQNGCRPGSRGTKELLLIDMTICRQVRRNRKNLVTAWIDYKKAYDSVPHTWLMRVMDLYKIDTVLCSFLGSCMGQWITFLRHPGSDETSGSTEPIRIRRGIFQGDSLSPLWFCLALNPLSSLLEDSGLGFRLRRGSNVISHLLYMDDLKLFAPKKPELVKLLKITETFSSSIGMEFGVDKCAVIHVERGRIVMSDDIQVTDNLSLRSLNEGETYKYLGVSEALGTDDGAIKQLVKERFFGRLRKVLNSLLSGGNKVRAFNSWVIPLLVYTFGILRWTQTELDSLDRQVRKQLTAFRMHHPRSSVMRLYIPRKCGGRGFLSAKNLHNREVCSLRQYFLGVSGDMHRDVVAVDKGFTPLSLGNENWRRPVVLDTLDRMNIWKSKELHGRFYKALMGSDVDKSSSLSWLQYGDLFGETEGFVCAIMDEVIKTNNYRKYIMKDGTPDICRACHRPGESLRHIISGCCYLANGEYLHRHNQVAKIVHQQLALRYGLVDIEVPYYRYNPTPVLENGNALLYWDRSIITDRYIPANKPDIVVVDRSARRAIIVDVTIPHDDNLVKAEKEKLSKYLDLAHEIAAMWRVDSAVIVPVVVSVNGLFAKSFDQHLQKLSLGCWIKGRIQKAVLLETAR

SEQ ID NO: 6235 - protein, 1189 aa, Junonia pacoma
MKKARGRHAQTTPMVNSSNSESQSSLTDDDYRTPLSTTESEQHETDPPTRRPKRRRAVHPPQDGLELQGQRAPARVPAAGGAVRRMRWTQKMNESVMRAYYGATGGGINLTGYRSTMLSMFQALEPTVTVTAQRLSDQVRAIQRCHLLDESVLERLRLNFQQINTASSIQHVQQSQKEPSVINVEDPPSSVDLVVSNQDNEHMRSALEDAILKYKHVAFNLRPQLPRLPMHRRNLSLVSVLDKVLPQYLDSAQDLSEVHSILYCGAVAVCNIASVKFPSKKLVTTNTAPAWQARIEKRITLTRTLIGKLICFRDGNNRPRVMRFVHQAFAGTNLTTYDYMASVTDRIDFLKQKIYAWAKRIKRYKKRINRYRQNSIFQSDQRKVYRYWEQRSDSVVNGILPTPDVMTNFWRDIWSSPIDHTEGDWMCVVRRCCESIKEMEPIAICSNDVSCAIRSMSNWKCPGPDGLHNFWLKWFRSSHSILASHFQNALKTGSLPTFMTTGVTILLYKSGCTADPKNYRPITCLPTIYKLFTSILAVKITKHVINNNILAPAQNGCRLGSRGTKELLLIDMTICRQVRRNRKNLFTAWIDYKKAYDSVPHTWLMRVMELYKLDAALCCLLESCMGQWITYLRQPGSDEIFGSTDPIRIKRGIFQGDSLSPLWFCLALNPLSFLLEDSGLGFRLRRGGKLISHLLYMDDLKLYASKQPDLVKLLKITESFSSCIGMEFGVDKCAVLNVERGRVITSANLQISNNICLRSLNEGETYKYLGMSEALGTEDGSIKQLVRERFFGRLKKVLNSFLSGGNKVRAFNSWVIPLLVYTFGILRWTQTELESLDRQVRKLLTTYRMHHPRSSVMRLYIPRKCGGRGFLNIKDHHNREVYNLREYFLSVSEDMHKDVVTVDKAFTPLSLGKENWRRPKVMDTGERMAIWKSKELHGRYYRALTGSDVDQVSSVSWLQHGDLFGETEGFVCAIMDEVVKTNNYRKYIMKDGTIDICRACHRPGESLRHIISGCCHLANGEYLHRHNQVARIIHQQIALRYGLVSTEVPYYRYNPTPVLENGHALLYWDRSIITDRYIPANKPDIVVVDRSTRRAIIVDITIPHDDNLVKAEKEKMCKYLDLAHEITAMWSVDSTVIVPVVVSVNGLLAKSFDQHLKKLSLGCWIKGRIQKAVLLETARIVRRFLSLEP

SEQ ID NO: 6236 - protein, 1161 aa, Hypolimnas misippus
MKNARGRFAHQISKVISSSSDSQSSQSDDEYRTPLSTAESETHEVDSPARRPKRRRAVNPLQDGLELQGQRASTKTPAAGGAVRRMRWSQKMNESVMRAYYGATSGGINLTAYRSTMLSLFQALEPTVTVTAQRLSDQVRAIQRCHLLDESVLERLRSNFQQINTVVTHSVQQSRNEENEVVHLDFNEIPHNSVDLSVSHQYNEYVRKALEDAILTYRFMPFNLRPQIPRLPIHRHNLALVGVLDNILPKYLDSSQDLYDTYSILYCGAVAVCNVASIKLTSNKYKLTPYTVPAWQARIEKRISATRTLIGKLISFKAGNHRPRVMRFVHQAFAETNIRSSDYMTSITDRIDFLKQKIYAWAQRIRRYKKRMNRYRQNSMFQKDQRRVFRKWEKCTDSVTSSVLPTPNLMSDFWRGIWSCPIGHTEGDWMSVVERSCESLPQMDPVIISPNDVSCAIRSTSNWKCPGPDGLHNFWLKWFRSSHSILATQFQDAIVSGSLPTFMTTGATFLLYKSGCTADPKNYRPITCLSTIYKLLTSILAAKIIKHVTVNNILDPAQNGCRPGSRGTKELLLIDMAICQQVRRNRKNLASAWIDYKKAYDSVPHSWLVRVMELYKVDATLCSFLNSCMRQWVTFLRHPGTADNFGSTEPIKIKRGIFQGDSLSPLWFCLALNPLGTLLEDSRLGFRLRRESKPISHLLYMDDLKLYASKRSDLIQLLKITESFGSCIGMEFGVDKCAIIHVERGRIVSSEHIHLTNNLFLRSLNVGETYKYLGMSEALGIDGVAMKQLVRERFFGRLKKVINSFLSGGNKVRAFNSWVMPLLVYTFGILRWTQTELDSLDRQVRKLLTAYRMHHPRSSVMRLYIPRKLGGRGFLSAKNLHNRVVYNLREYFLNMNGDMHKDVVAVDKGFTPLSLGKENWRKPLVMGTLDRVAVWKSKELHGRFYKALMGPDVDQTSSVSWLQYGNLFGETEGFVCAIMDEVIKTNNYRKYIMKDGTVDVCRACHRPGESLRHIISGCSHLANGEYLHRHNQVARILHQQLALLYDLIDFEVPYYRYNPTPVLENGRALLYWDRSVITDRYIPANKPDIVIVDRSARRAIIVDITVPHDDNLLKAEKEKNSKYLDLADEITAMWSVDSTIIVPVDEYKMYLKMYKTRKKIQ

SEQ ID NO: 6237 - protein, 1193 aa, Hypolimnas misippus
MKNARGRSAQSTSKVNSSSSETQSSLSDDDYRTPLSSTESEKYETDSPAKRPKRRRAVNPPQDGLELQGQHAPARAPAAGGAVRRMRWSQKLNESVMRAYYGATGGGINLTAYRSTMLSMFQALEPTVTVTAQRLSDQVRAIQRCHLLDESILERLRSNLQQINIASGSHCVQQSQKDTCEITVQDLIVKSPSSVDVTVSNQDNEHMRRALEDAILKYKHVPFNLRPQLPRLPMHRRNLALVSVLDKMLQQYLDRTLDLYDTHSILYCGAVAVCNIASVKFPNRTVTTTNTTPAWQARIERRISLTRTLIGKLICFRAGNNRPRVMRFVHQAFAGTNIKTTEYMSFVTDRIDFLKQKIYAWAKRIKRYKKRINRYRQNSMFQSDQRKVYRNWEPRGDSVANSVLPTPGVLTNFWRDIWSTPIEHTEGDWMRVVRRLCESFKPMDSITINPDDVSSAIRSTSNWKCPGPDRLQNFWLKWFRSSHSILASRFQDALISGSLPTFMTTGVTILIYKSGCTADPKNYRPITCLPTIYKLLTSILASKITKHIISNNILAPAQNGCRGGSRGTKELLLIDMTICRQVRRNRKNLVTAWIDYKKAYDSIPHTWLIRIMELYKIDTTLCSFLRSCMGQWITFLRHPESNETFGSTEPIRIMRGIFQGDSLSPLWFCLALNPLSSLLEDSGLGYRLRRGSKKISHLLYMDDLKLFASKQPELVELLKITESFSSCIGMEFGVDKCAVLHVERGKVVTSTDVQLTTTLSLRSLNEGETYKYLGMAEALGTDDGSIKQLVKERFFGRLKKVLNSFLSGGNKVRAFNGWVMPLLTYTFGILRWTQTELDDLDRQVRKLLTTYRMHHPRSSVMRLYIPRKCGGRGFLNAKSLHNREVYNLREYFLSINEGMHKDVVAIDKGFTPLSLGKENWRKPVVLDTLDRVTVWKSKELHGRFYRALMSSDVDLSSSISWLQYGDLFGETEGFVCAIMDEVIKTNNYRKYIMKDGTPDVCRACHRPGESLRHIISGCCHLANGEYLHRHNQVARIIHQQLALRYGLLDVEVPYYRYNPTAVLENGNALLYWDRSIITDRYITANKPDIVIVDRSACQAIIVDVTIPHDDNLVKAEKEKLSKYLDLAHEMTAMWSLNSTIIVPVVVSVNGLLAKSFDQHLKKLSLSSWIKGRIQKAVLLETARIVRRFLSLEP

SEQ ID NO: 6238 - protein, 880 aa, Junonia neildi
MREALEDAVLKYRLMPYNLRPKLPRLPMHRHNLALVGALDKILPKYLSNSKDLYDTYSILYCGAVAVCNVASTKFPTSTFISATNTVPAWQARIEKRITVTRTLIGKLICFREGNNRPRVMRYVHQAFAETSIRSCDYMASVTERLDYLKQKIYAWAKRIRRYKKRTSRYYQNSMFQKDQRKVFRNWEQQGKSVANGDLPPPDLMAEFWRNIWSNPVVHTEGDWMSVVERRCELLPQMDPVIISPDDVSCAIRSTPNWKCPGSDGLHNFWLKWFRSSHSILAAQFQDAITSGSLPKFMTTGTTFLIYKSGCTADPKNYRPITCLSTIYKLLTSILAAKITKHINTNNILAPAQNGCRTGSRGTKELLLIDMTICQQARRNRKNLATAWIDYKKAYDSVPHTWLMRIMELYKVDATLCSFLSSCMGQWITFLRHPGSTDIFGSTEPIRIRRGIFQGDSLSPLWFCLALNPLSTLLENSGLGFRLRRGSKPISHLLYMDDLKLYASKRPDLVQLLNITQSFSSCIEMEFGVDKCAVIHVERGRIVRSEHIHLASTLHLRSLDEGETYKYLGMSEALGIDDGSMKQLVRERFLGRLRKVFNSFLSGGNKVRAFNSWVMPLLVYTFGILRWTQTELDSLDRQVRKLLTAYRMHHPRSSVMRLYIPRKLGGRGFLNVKNLHNRELYNLRVYFLNNSGAMHRDVVAVDKGFTPLSLGKENWRKPAVMDTHDRVAVWRSKELHGRFYKALTGPDIDQTSSVSWLQHGDLFGETEGFVCAIMDEVIKTNNYRRHILKDGTLDVCRACHRPGESLRHIVSGCCHLANGEYLHRHNQVARIIHQQLALLYGLVDCEVPYYRYNPTPVLENGHALLYWDRSIITDRFITAN

SEQ ID NO: 6239 - protein, 995 aa, Junonia vestina
MRWTQKLNESVMRAYYGATGGGINLTGYRSTMLSMFQALEPTVTVTAQRLSDQVRAIQRCHLLDESVLERLRLNFQQLNTASSIQHVQQSQKEPSVINVEDPPSSVDLVVSNQDNEHMRSALEDAILKYKHVAFNLRPQLPRLPMHRRNLSLVSVLDKVLPQYLDSAQDLSDVHSILYCGAVAVCNIASVKFPSKKLVTTNTAPAWQARIEKRITLTRTLIGKLICFRDGNNRPRVMRFVHQAFAGTNLTTYDYMASVTDRIDFLKQKIYAWAKRIKRYKKRINRYRQNSIFQSDQRKVYRYWEQRSDSVVNGILPTPDVMTNFWRDIWSSPIDHTEGDWMCVVRRCCESIKEMEPIAICSNDVSCAIRSMSNWKCPGPDGLHNFWLKWFRSSHSILASHFQNALKTGSLPTFMTTGVTILLYKSGCTADPKNYRPITCLPTIYKLFTSILAVKITKHVINNNILAPAQNGCRSGSRGTKELLLIDMTICRQVRRNRKNLFTAWIDYKKAYDSVPHTWLMRVMELYKLDAALCCLLGSCMGQWITYLRQPGSDEIFGSTDPIRIKRGIFQGDSLSPLWFCLALNPLSSLLDDSGLGFRLRRGGKIISHLLYMDDLKLYASKQPELVELLKITESFSSCIGMEFGVDKCAVLHVERGRVITSADIQVTNCLRLRSLNEGETYKYLGMSEALGTEDGSIKQLVRERFFGRLKKVLNSFLSGGNKVRAFNGWVIPLLVYTFGILRWTQAELDSLDRQVRKLLTAYRMHHPRSSVMRLYIPRKCGGRGFLNAKNLHNREVYNLREYFLSINDDMHRDVVAVDKTFTPLSLGKENWRRPIVLDTGDRMAVWKNKELHGRYYRALMGSDVDWVSSVSWLQYGDLFGETEGFVCAIMDEVVKTNNYRKYIMKDGTIDICRACHRPGESLRHIISGCCHLANGEYLHRHNQVARIIHQQLALRYGLVSTEVPYYRYNPTPVLENGHALLYWDRSIITDRYIPA

SEQ ID NO: 6240 - protein, 1194 aa, Junonia pacoma
MKNARGRRAQIPTKVNSSSSDTKSSVSDDDYQTPLSSTESEQYETDPPAKTSKRRRAVHPPQDGLGLQEQRASARAPAAGGAVRRMRWTQKLNESVMRAYYGATGGGINLTGYRSTMLSLFQALEPTVTVTAQRLSDQVRAIQRCHLLDESVLERLRSSFQQLNTVIESHCTQESQKESNEIHMPDTSEIIRSSVDLMVSNQDNEHMRRALEDAILKYKHIPFNLRPQIPRLPMHRRNLALVGVLDKVLQNYLDNAVDLCDTHSILYCGAVAVCNIASVKFPTKRIFSTSYTAPAWQIRIEKRITLTRTLIGKLICFRAGNNRPRVMRFVHQAFAGTNIITSEYMASVTDRIDFLKQKLYAWAKRIKRYKLRVNRYRQNSMFQSDQRKVYRIWEQRNDSVVNGSLPTREEMSNFWRDIWSVPIDHTEGDWICTVRRHCESLKPMDPIKICPDDVSAAIRSTSNWKCPGPDGLQNFWLKWFRSSHSILAAQFQDALISGSLPTFMTTGVTILLYKSGCTADPKNYRPITCLPTIYKLLTSILAAKITKHIVTNNVLAPAQNGCRPGSRGTKELLLIDMTICRQVRRNRKNLVTAWIDYKKAYDSVPHTWLMRVMDLYKIDTVLCSFLGSCMGQWITFLRHPGSDETSGSTEPIRIRRGIFQGDSLSPLWFCLALNPLSSLLEDSGLGFRLRRGSNVISHLLYMDDLKLFAPKKPELVKLLKITETFSSSIGMEFGVDKCAVIHVERGRIVMSDDIQVTDNLSLRSLNEGETYKYLGVSEALGTDDGAIKQLVKERFFGRLRKVLNSLLSGGNKVRAFNSWVIPLLVYTFGILRWTQTELDSLDRQVRKQLTAFRMHHPRSSVMRLYIPRKCGGRGFLSAKNLHNREVCSLRQYFLGVSGDMHRDVVAVDKGFTPLSLGNENWRRPVVLDTLDRMNIWKSKELHGRFYRALMGSDVDKSSSLSWLQYGDLFGETEGFVCAIMDEVIKTNNYRKYIMKDGTPDICRACHRPGESLRHIISGCCYLANGEYLHRHNQVAKIVHQQLALRYGLVDIEVPYYRYNPTPVLENGNALLYWDRSIITDRYIPANKPDIVVVDRSARRAIIVDVTIPHDDNLVKAEKEKLSKYLDLAHEIAAMWRVDSAVIVPVVVSVNGLFAKSFDQHLQKLSLGCWIKGRIQKAVLLETARIVRRFLTLEP

SEQ ID NO: 6241 - protein, 1189 aa, Junonia genoveva
MKNARGRHAQTTPMVNSSNSESQSSLTDDDYRTPLSTTESEQHEADPPTRRPKRRRAVHPPQDGLELQGQRAPARVPAAGGAVRRMRWTQKMNESVMRAYYGATGGGINLTGYRSTMLSMFQALEPTVAVTAQRLSDQVRAIQRCHLLDESVLERLRLNFQQINTASSIQHVQQSQKEPSVINVEDPPSSVDLVVSNQDNEHMRSALEDAILKYKHVAFNLRPQLPRLPMHRRNLSLVSVLDKVLPQYLDSAQDLSEVHSILYCGAVAVCNIASVKFPSKKLVTTNTAPAWQARIEKRITLTRTLIGKLICFRDGNNRPRVMRFVHQAFAGTNLTTYDYMASVTDRIDFLKQKIYAWAKRIKRYKKRINRYRQNSIFQSDQRKVYRYWEQRSDSVVNGILPTPDVMTNFWRDIWSSPIDHTEGDWMCVVRRCCESIKEMEPIAICSNDVSCAIRSMSNWKCPGPDGLHNFWLKWFRSSHSILASHFQNALKTGSLPTFMTTGVTILLYKSGCTADPKNYRPITCLPTIYKLFTSILAVKITKHVINNNILAPAQNGCRLGSRGTKELLLIDMTICRQVRRNRKNLFTAWIDYKKAYDSVPHTWLMRVMELYKLDAALCCLLESCMGQWITYLRQPGSDEIFGSTDPIRIKRGIFQGDSLSPLWFCLALNPLSFLLEDSGLGFRLRRGGKLISHLLYMDDLKLYASKQPDLVKLLKITESFSSCIGMEFGVDKCAVLNVERGRVITSANLQISNNICLRSLNEGETYKYLGMSEALGTEDGSIKQLVRERFFGRLKKVLNSFLSGGNKVRAFNSWVIPLLVYTFGILRWTQTELESLDRQVRKLLTTYRMHHPRSSVMRLYIPRKCGGRGFLNIKDHHNREVYNLREYFLSVSEDMHKDVVTVDKAFTPLSLGKENWRRPKVMDTGERMAIWKSKELHGRYYRALTGSDVDQVSSVSWLQHGDLFGETEGFVCAIMDEVVKTNNYRKYIMKDGTIDICRACHRPGESLRHIISGCCHLANGEYLHRHNQVARIIHQQIALRYGLVSTEVPYYRYNPTPVLENGHALLYWDRSIITDRYIPANKPDIVVVDRSTRRAIIVDITIPHDDNLVKAEKEKMSKYLDLAHEISAMWSVDSTVIVPIVVSVNGLVAKSFDQHLKKLSLGCWIKGRIQKAVLLETARIVRRFLSLDP

SEQ ID NO: 6242 - protein, 937 aa, Junonia neildi
MLCEIMHVRIIHLRASSTLNVSVCRMSSIFHILIQLYVFIQSNENNNKKLPIPKPISPSYTIPAWQSRIEKRISTTRTLIGKLICFREGNNRPRVMRFVHLAFAGTDIRPNEYMTSVTERIDSLKQKVYAWAKRIRRYKKRMNRYCQNSMFQKDQRRVFRNWEKRSNGEASGELPTPDLMSNFWRGIWSNPIGHTEGDWMSVVGKSCELLPPMDPVRISPNDVSCAIRSTSNWKCPGPDGLHNFWLKWFRNSHSTLAAQFQDAIACGSLPTFMTTGTTFLIYKSGCTADPKNYRPITCLSNLYKLLTSILAAKIKKHIIDNNILAPAQNGCRQGSRGTKELLLIDMTISQQVRRNRKNLCAAWIDYKKAYDSVPHTWLMRIMELYKIDTTLCSFLGSCMGQWITFLRHPGGTDIFGSTEPIKIKRGIFQGDSLSPLWFCLALNPLSTLLEDSGLGFRLRRASKPISHLLYMDDLKLYASKRSDLFKLLKITESFSSCIGMEFGVDKCAVIHVEKGRTVLSERVHLTNNLFLRSLDEGETYKYLGMSEALGIDNGSMKQLVRERFFGRLKKVFNSFLSGGNKVRAFNSWVMPLLVYTFGILRWTQTELDSLDRQVRKLLTTYRMHHPRSSVMRLYIPRKLGGRGFLNAKNLHNREVYNLRDYFLNNSGDMHKDVVAVDKGLTPLSLGKENWRGPAVMDTLDRVAVWRSKELHGRFYKALTGPDVDQTSSVSWLQHGDLFGETEGFVCAIMDEVIKTNNYRKHILKDGTLDVCRACHRPGESLRHIVSGCCHLANGEYLHRHNQVARIIHQQLALRYGLIDCELPYYRYNPTPVLENGHALLYWDRSIITDRCITANKPDIVVVDRSARQAIIVDITIPHDDNLVKAEKEKMTKYLDLAHEITAMWSVDSTIIVAIVVSVNGLIAKSFDQHLMKLSLGC

SEQ ID NO: 6243 - protein, 1197 aa, Hypolimnas misippus
MKNARGRPAPSSSKVNSSHSDTQSSLSDDDYRTPLSSTESEKHEIDPPVRRPKHRRVLHLPQDGLELPEQRAPAKTPAAGGAVRRMKWTQKMNESVMRAYYGATGGGINLTAYRSTMLSMFQALEPTVTVTAQRLSDQVRAIQRCHLLDESVLEQLRLNLQQLNAVSNSHCVQLPQNEQNVQNETNEHILNVRPSNSIDLSVSDQDNEHMRRCLEDAILKYRSMPFNLRPRIPRLPMQKRNLMFVSIMDKILQQYLGDSQDLYDTYSILYCGAVAVCNASSIKFSIHKIVSTQNTIPTWQARIEKRIAFTRTLIGKLISFRAGNNRPRVMRFVHQAFAGTNIISNEYMNMVTDRIDFLKQKIYAWAKRIRRYKKRVDRYRQNRMFQSDQRKVYRNWEQRNDSVTNGVPPSPEVMTNFWRNIWSAPVDHTEGDWMNIVRGSCESLPQMGPITINPDDISCAIHSTSNWKCPGPDGLHNFWLKRFRASHPVLALQFQNALDTGTLPTFMTTGATFLIYKSGCTADPKNYRPITCLSTIYKLLTSVLAAKITQHITANNILAPAQNGCRPGSRGTKELLLVNMTICQQVRRNRKNLDTAWIDYKKAYDSVPHTWLVRILELYKIDATLCSFLKLCMGQWITFLCHPGSTDIFGSTELIRIKRGIFQGDSLSPLWFCLALNPLSTLLENSGLGFRLRRGSTIISHLLYMDDLKLYASKRTDLVKLLKLTETFSSSIGMEFGLDKCAVIHVERGRVVSSEHIQLTKTFLLRSLDVGESYKYLGMSEALGIDDGSIKQLVKERFFGRLKKVLNSFLSGGNKVRAFNSWVMPLLVYTFGILRWTQTELDSLDRQVRKLLTAYRMHHPRSSVMRLYIPRKCGGRGFLNAKNLHNREVYNLRNYVLGVNSDMHKDVVVVDKGFTPLSLGKENWRRPIVLNTLDRVAVWRSKELHGRFYKALTGSDVDQASSVSWLQYGDLFGETEGFVCAIMDEVIKTNNYRKYIMKDGTPDICRACHRPGESLRHVISGCCHLANGEYLHRHNQVARIIHQQLALRYGLVDIEVPYYRYNPTPVLENGNALLYWDRSIITDRHIPANKPDIVIVDRSARRAIIVDVTIPHDDNLVKAEKEKLSKYLDLAHEIAAMWSVDSAIIVPIVVSVNGLFAKSFDQHLKKLSLSCWVKSRIQKAVLLETARIVRRFLNLEP

SEQ ID NO: 6244 - protein, 1087 aa, Junonia evarete
MKNARGRLAQPSSQVNSSNSETQSSTSDDDYKTPLSTSESEKNEIDSPARTSKRRRAAHPPQEGLESKGRRAPATTPAAGGAVRRMKWSQKMNESVMRAYYEATGGGINLTAYRSKMLSLFQALEPTVTVTAQRLSDQVRAIQRCHLLDESVLDRLRSNLQQVNTVSDTRNVDECRIDQGEVATINLNVTPPNSVDLSVSSQYDEYMREALEDAVLKYRLMPYNLRPKLPRLPMHRHNLALVGALDKILPKYLSNSKDLYDTYSILYCGAVAVCNVASTKFPTSTFISATNTVPAWQARIEKRITVTRTLIGKLICFREGNNRPRVMRYVHQAFAETSIRSCDYMASVTERLDYLKQKIYAWAKRIRRYKKRTSRYYQNSMFQKDQRKVFRNWEQQGKSVANGDLPPPDLMAEFWRNIWSNPVVHTEGDWMSVVERRCELLPQMDPVIISPDDVSCAIRSTPNWKCPGSDGLHNFWLKWFRSSHSILAAQFQDAITSGSLPKFMTTGTTFLIYKSGCTADPKNYRPITCLSTIYKLLTSILAAKITKHINTNNILAPAQNGCRTGSRGTKELLLIDMTICQQARRNRKNLATAWIDYKKAYDSVPHTWLMRIMELYKVDATLCSFLSSCMGQWITFLRHPGSTDIFGSTEPIRIRRGIFQGDSLSPLWFCLALNPLSTLLENSGLGFRLRRGSKPISHLLYMDDLKLYASKRPDLVQLLNITQSFSSCIEMEFGVDKCAVIHVERGRIVRSEHIHLASTLHLRSLDEGETYKYLGMSEALGIDDGSMKQLVRERFLGRLRKVFNSFLSGGNKVRAFNSWVMPLLVYTFGILRWTQTELDSLDRQVRKLLTAYRMHHPRSSVMRLYIPRKLGGRGFLNVKNLHNRELYNLRVYFLNNSGAMHRDVVAVDKGFTPLSLGKENWRKPAVMDTHDRVAVWRSKELHGRFYKALTGPDIDQTSSVSWLQHGDLFGETEGFVCAIMDEVIKTNNYRRHILKDGTLDVCRACHRPGESLRHIVSGCCHLANGEYLHRHNQVARIIHQQLALLYGLVDCEVPYYRYNPTPVLENGHALLYWDRSIITDRFITANK

SEQ ID NO: 6245 - protein, 1194 aa, Junonia litoralis
MKNARGRRAQIPTKVNSSSSDTKSSVSDDDYQTPLSSTESEQYETDPPAKTSKRRRAVHPPQDGLGLQEQRASARAPAAGGAVRRMRWTQKLNESVMRAYYGATGGGINLTGYRSTMLSLFQALEPTVTVTAQRLSDQVRAIQRCHLLDESVLERLRSSLQQLNTVTESHCTQESQKESNEIHMPDTSEIIRSSVDLVVSNQDNEHMRRALEDAILKYKHIPFNLRPQIPRLPMHRRNLALVGVLDKVLQNYLDNAVDLCDTHSILYCGAVAVCNIASVKFPTKRIFSTSYTAPAWQIRIEKRITLTRTLIGKLICFRAGNNRPRVMRFVHQAFAGTNIITSEYMASVTDRIDFLKQKLYAWAKRIKRYKLRVNRYRQNSMFQSDQRKVYRIWEQRNDSVVNGSLPTREEMSNFWRDIWSVPIDHTEGDWICTVRRHCESLKPMDPIKICPDDVSAAIRSTSNWKCPGPDGLQNFWLKWFRSSHSILAAQFQDALISGSLPTFMTTGVTILLYKSGCTADPKNYRPITCLPTIYKLLTSILAAKITKHIVTNNVLAPAQNGCRPGSRGTKELLLIDMTICRQVRRNRKNLVTAWIDYKKAYDSVPHTWLMRVMDLYKIDTVLCSFLGSCMGQWITFLRHPGSDETSGSTEPIRIRRGIFQGDSLSPLWFCLALNPLSSLLEDSGLGFRLRRGSNVISHLLYMDDLKLFAPKKPELVKLLKITETFSSSIGMEFGVDKCAVIHVERGRIVMSDDIQVTDNLSLRSLNEGETYKYLGVSEALGTDDGAIKQLVKERFFGRLRKVLNSLLSGGNKVRAFNSWVIPLLVYTFGILRWTQTELDSLDRQVRKQLTTFRMHHPRSSVMRLYIPRKCGGRGFLSAKNLHNREVCSLRQYFLGVSGDMHRDVVAVDKGFTPLSLGNENWRRPVVLDTLDRMNIWKSKELHGRFYKALMGSDVDKSSSLSWLQYGDLFGETEGFVCAIMDEVIKTNNYRKYIMKDGTPDICRACHRPGESLRHIISGCCYLANGEYLHRHNQVAKIVHQQLALRYGLVDIEVPYYRYNPTPVLENGNALLYWDRSIITDRYIPANKPDIVVVDRSARRAIIVDVTIPHDDNLVKAEKEKLSKYLDLAHEIAAMWRVDSAVIVPVVVSVNGLFAKSFDQHLQKLSLGCWIKGRIQKAVLLETARIVRRFLTLEP

SEQ ID NO: 6246 - protein, 1072 aa, Junonia vestina
MRAYYEATGGGINLTAYRSKMLSLFQALEPTVTVTAQRLSDQVRAIQRCHLLDDYVLDRLRSNLQQLNTGSDTHRDEPNKEKQTETTAQNLSELPTNSVDLSVSDQHNEYMRGTLEDAILEYRFMPFNLRPKIPRLPMHRHNLALVSVLDKLLQKYLNNSQDLYDTYSILYCGAIAVSKVASVKLPIPKPISPSYTIPAWHSRIEKRISTTRTLIGKLICFREGNNRPRVMRFVHLAFAGTDIRPNEYMTSVTERIDSLKQKVYAWAKRIRRYKKRMNRYCQNSMFQKDQRRVFRNWEKRSNGEASGELPTPDLMSNFWRGIWSNPISHTEGDWISVVGKSYELLPRMDPVRISPNDVSCAIRSTSNWKCPGPDGLHNFWLKWFRNSHSTLAAQFQDAIACGSLPTFMTTGTTFLIYKSGCTADPKNYRPITCLSNLYKLLTSILAAKIKKHIIDNNILAPAQNGCRQGSRGTKELLLIDMTISQQVRRNRKKFCAAWIDYKKAYDSVPHTWLMRIMELYKIDTTLCSFLGSCMGQWITFLRHPGGTDIFGSTEPIKIKRGIFQGDSLSPLWFCLALNPLSTLLEDSGLGFRLRRASKPISHLLYMDDLKLYASKRSDLFKLLKITESFSSCIGMEFGVDKCAVIHVEKGRTVLSEHVHLTNNLFLRSLDEGETYKYLGMSEALGIDNGSMKQLVRERFFGRLKKVFSSFLSGGNKVRAFNSWVMPLLVYTFGILRWTQTELDSLDRQVRKLLTTYRMHHPRSSVMRLYIPRKLGGRGFLNAKNLHNREVYNLRDYFLNNSGDMHKDVVAVDKGLTPLSLGKENWRGPAVMDTLDRVAVWRSKELHVRFYKALTGPDVDQTSSVSWLQHGDLFGETEGFVCAIMDEVIKTNNYRKHILKDGTLDVCRACHRPGESLRHIVSGCCHLANGEYLHRHNQVARIIHQQLALRYGLIDCELPYYRYNPTPVLENGHALLYWDRSIITDRCITANKPDIVVVDRSARQAIIVDITIPHDDNLVKAEKEKMSKYLDLAHEITAMWSVDSTIIVPIVVSVNGLIAKSFDQHLKKLSLGC

SEQ ID NO: 6247 - protein, 988 aa, Junonia evarete
MREALEDAVLKYRLMPYNLRPKLPRLPMHRHNLALVGALDKILPKYLSNSKDLYDTYSILYCGAVAVCNVASTKFPTSTFISATNTVPAWQARIEKRITVTRTLIGKLMCFREGNNRPRVMRYVHQAFAETSIRSCDYMASVTERLDYLKQKIYAWAKRIRRYKKRTSRYYQNSMFQKDQRKVFRNWEQQGKSVANGDLPPPDLMAEFWRNIWSNPVVHTEGDWMSVVERRCELLPQMDPVIISPDDVSCAIRSTPNWKCPGSDGLHNFWLKWFRSSHSILAAQFQDAITSGSLPKFMTTGTTFLIYKSGCTADPKNYRPITCLSTIYKLLTSILAAKITKHINTNNILAPAQNGCRTGSRGTKELLLIDMTICQQARRNRKNLATAWIDYKKAYDSVPHTWLMRIMELYKVDATLCSFLSSCMGQWITFLRHPGSTDIFGSTEPIRIRRGIFQGDSLSPLWFCLALNPLSTLLENSGLGFRLRRGSKPISHLLYMDDLKLYASKRPDLVQLLNITQSFSSCIEMEFGVDKCAVIHVERGRIVRSEHIHLASTLHLRSLDEGETYKYLGMSEALGIDDGSMKQLVRERFLGRLRKVFNSFLSGGNKVRAFNSWVMPLLVYTFGILRWTQTELDSLDRQVRKLLTAYRMHHPRSSVMRLYIPRKLGGRGFLNVKNLHNRELYNLRVYFLNNSGAMHRDVVAVDKGFTPLSLGKENWRKPAVMDTHDRVAVWRSKELHGRFYKALTGPDIDQTSSVSWLQHGDLFGETEGFVCAIMDEVIKTNNYRRHILKDGTLDVCRACHRPGESLRHIVSGCCHLANGEYLHRHNQVARIIHQQLALLYGLVDCEVPYYRYNPTPVLENGHALLYWDRSIITDRFITANKPDIVVVDRSARQAIIVDITIPHDDNLVKAEKEKMSKYLDLAHEITAMWSVDSTIIVPIVVSVNGLIAKSFDQHLKKLSLGCWIKGRIQKAVLLETARIVRRFLSLEL

SEQ ID NO: 6248 - protein, 1194 aa, Junonia evarete
MKNARGRLAQPSSQVNSSNSETQSSTSDDDYKTPLSTSESEKNEIDSPARTSKRRRAAHPPQDGLESKGRRAPATTPAAGGAVRRMKWSQKMNESVMRAYYEATGGGINLTAYRSKMLSLFQALEPTVTVTAQRLSDQVRAIQRCHLLDESVLDRLRSNLQQVNTVSDTQNVDECRIDQGEVATINLNVTPPNSVDLSVSSQYDEYMREALEDAVLKYRLMPYNLRPKLPRLPMHRHNLALVGALDKILPKYLSNSKDLYDTYSILYCGAVAVCNVASTKFPTSTFISATNTVPAWQARIEKRITVTRTLIGKLICFREGNNRPRVMRYVHQAFAETSIRSCDYMASVTERLDYLKQKIYAWAKRIRRYKKRTSRYYQNSMFQKDQRKVFRNWEQQGKSVANGDLPPPDLMAEFWRNIWSNPVVHTEGDWMSVVERRCELLPQMDPVIISPDDVSCAIRSTPNWKCPGSDGLHNFWLKWFRSSHSILAAQFQDAITSGSLPKFMTTGTTFLIYKSGCTADPKNYRPITCLSTIYKLLTSILAAKITKHINTNNILAPAQNGCRTGSRGTKELLLIDMTICQQARRNRKNLATAWIDYKKAYDSVPHTWLMRIMELYKVDATLCSFLSSCMGQWITFLRHPGSTDIFGSTEPIRIRRGIFQGDSLSPLWFCLALNPLSTLLENSGLGFRLRRGSKPISHLLYMDDLKLYASKRPDLVQLLNITQSFSSCIEMEFGVDKCAVIHVERGRIVRSEHIHLASTLHLRSLDEGETYKYLGMSEALGIDDGSMKQLVRERFLGRLRKVFNSFLSGGNKVRAFNSWVMPLLVYTFGILRWTQTELDSLDRQVRKLLTAYRMHHPRSSVMRLYIPRKLGGRGFLNVKNLHNRELYNLRVYFLNNSGAMHRDVVAVDKGFTPLSLGKENWRKPAVMDTHDRVAVWRSKELHGRFYKALTGPDIDQTSSVSWLQHGDLFGETEGFVCAIMDEVIKTNNYRRHILKDGTLDVCRACHRPGESLRHIVSGCCHLANGEYLHRHNQVARIIHQQLALLYGLVDCEVPYYRYNPTPVLENGHALLYWDRSIITDRFITANKPDIVVVDRSARQAIIVDITIPHDDNLVKAEKEKMSKYLDLAHEITAMWSVDSTIIVPIVVSVNGLIAKSFDQHLKKLSLGCWVKGRIQKAVLLETARIVRRFLSLEL

SEQ ID NO: 6249 - protein, 1104 aa, Junonia evarete
MRWTQKMNESVMRAYYGATGGGINLTGYRSTMLSMFQALEPTVTVTAQRLSDQVRAIQRCHLLDESVLERLRLNFQQINTASSIQHVQQSQKEPSVINVEDPPSSVDLVVSNQDNEHMRSALEDAILKYKHVAFNLRPQLPRLPMHRRNLSLVSVLDKVLPQYLDSAQDLSEVHSILYCGAVAVCNIASVKFPSKKLVTTTTAPAWQARIEKRITLTRTLIGKLICFRDGNNRPRVMRFVHQAFAGTNLTTYDYMASVTDRIDFLKQKIYAWAKRIKRYKKRINRYRQNSIFQSDQRKVYRYWEQRSDSVVNGILPTPDVMTNFWRDIWSSPIDHTEGDWMCVVRRCCESIKEMEPIAICSNDVSCAIRSMSNWKCPGPDGLHNFWLKWFRSSHSILASHFQNALKTGSLPTFMTTGVTILLYKSGCTADPKNYRPITCLPTIYKLFTSILAVKITKHVINNNILAPAQNGCRLGSRGTKELLLIDMTICRQVRRNRKNLFTAWIDYKKAYDSVPHTWLMRVMELYKLDAALCCLLESCMGQWITYLRQPGSDEIFGSTDPIRIKRGIFQGDSLSPLWFCLALNPLSFLLEDSGLGFRLRRGGKLISHLLYMDDLKLYASKQPDLVKLLKITESFSSCIGMEFGVDKCAVLNVERGRVITSANLQISNNICLRSLNEGETYKYLGMSEALGTEDGSIKQLVRERFFGRLKKVLNSFLSGGNKVRAFNSWVIPLLVYTFGILRWTQTELESLDRQVRKLLTTYRMHHPRSSVMRLYIPRKCGGRGFLNIKDHHNREVYNLREYFLSVSEDMHKDVVTVDKAFTPLSLGKENWRRPKVMDTGERMAIWKSKELHGRYYRALTGSDVDQVSSVSWLQHGDLFGETEGFVCAIMDEVVKTNNYRKYIMKDGTIDICRACHRPGESLRHIISGCCHLANGEYLHRHNQVARIIHQQIALRYGLVSTEVPYYRYNPTPVLENGHALLYWDRSIITDRYIPANKPDIVVVDRSTRRAIIVDITIPHDDNLVKAEKEKMCKYLDLAHEITAMWSVDSTVIVPVVVSVNGLLAKSFDQHLKKLSLGCWIKGRIQKAVLLETARIVRRFLSLDP

SEQ ID NO: 6250 - protein, 1103 aa, Junonia neildi
MNESVMRAYYEATGGGINLTAYRSKMLSLFQALEPTVTVTAQRLSDQVRAIQRCHLLDDSVLDRLRSNLQQLNTGSDTHRDEPNKEKQTETTAQNLNELPTNSVDLSVSDQHNEYMRGTLEDAILEYRFMPFNLRPKIPRLPMHRHNLALVSVLDKLLQKYLNNSQDLYDTYSILYCGAIAVSKVASVKLPIPKPISPSYTIPAWQSRIEKRISTTRTLIGKLICFREGNNRPRVMRFVHLAFAGTDIRPNEYMTSVTERIDSLKQKVYAWAKRIRRYKKRMNRYCQNSMFQKDQRRVFRNWEKRSNGEASGELPTPDLMSNFWRGIWSNPIGHTEGDWMSVVGKSCELLPPMDPVRISPNDVSCAIRSTSNWKCPGPDGLHNFWLKWFRNSHSTLAAQFQDAIACGSLPTFMTTGTTFLIYKSGCTADPKNYRPITCLSNLYKLLTSILAAKIKKHIIDNNILAPAQNGCRQGSRGTKELLLIDMTISQQVRRNRKNLCAAWIDYKKAYDSVPHTWLMRIMELYKIDTTLCSFLGSCMGQWITFLRHPGGTDIFGSTEPIKIKRGIFQGDSLSPLWFCLALNPLSTLLEDSGLGFRLRRASKPISHLLYMDDLKLYASKRSDLFKLLKITESFSSCIGMEFGVDKCAVIHVEKGRTVLSERVHLTNNLFLRSLDEGETYKYLGMSEALGIDNGSMKQLVRERFFGRLKKVFNSFLSGGNKVRAFNSWVMPLLVYTFGILRWTQTELDSLDRQVRKLLTTYRMHHPRSSVMRLYIPRKLGGRGFLNAKNLHNREVYNLRDYFLNNSGDMHKDVVAVDKGLTPLSLGKENWRGPAVMDTLDRVAVWRSKELHGRFYKALTGPDVDQTSSVSWLQHGDLFGETEGFVCAIMDEVIKTNNYRKHILKDGTLDVCRACHRPGESLRHIVSGCCHLANGEYLHRHNQVARIIHQQLALRYGLIDCELPYYRYNPTPVLENGHALLYWDRSIITDRCITANKPDIVVVDRSARQAIIVDITIPHDDNLVKAEKEKMTKYLDLAHEITAMWSVDSTIIVPIVVSVNGLIAKSFDQHLMKLSLGCWIKGRIQKAVLLETARIVRRFLSLEL

SEQ ID NO: 6251 - protein, 1194 aa, Junonia evarete
MKNARGRLAQPSSQVNSSNSETQSSTSDDDYKTPLSTSESEKNEIDSPARTSKRRRAAHPPQEGLESKGRRAPATTPAAGGAVRRMKWSQKMNESVMRAYYEATGGGINLTAYRSKMLSLFQALEPTVTVTAQRLSDQVRAIQRCHLLDDSVLDRLRSNLHKLNTGSDTHRDEPNKEKQTETTAQNLNELPTNSVDLSVSDQHNEYMRGTLEDAILEYRFMPFNLRPKIPRLPMHRHNLALVSVLDKLLQKYLNNSQDLYDTYSILYCGAIAVSKVASVKLPIPKPISPSYTIPAWQSRIEKRISTTRTLIGKLICFREGNNRPRVMRFVHLAFAGTDIRPNEYMTSVTERIDSLKQKVYAWAKRIRRYKKRMNRYCQNSMFQKDQRRVFRNWEKRSNGEASGELPTPDLMSNFWRGIWSNPIGHTEGDWMSVVGKSCELLPPMDPVRISPNDVSCAIRSTSNWKCPGPDGLHNFWLKWFRNSHSTLAAQFQDAIACGSLPTFMTTGTTFLIYKSGCTADPKNYRPITCLSNLYKLLTSILAAKIKKHIIDNNILAPAQNGCRQGSRGTKELLLIDMTISQQVRRNRKNLCAAWIDYKKAYDSVPHTWLMRIMELYKIDTTLCSFLGSCMGQWITFLRHPGGTDIFGSTEPIKIKRGIFQGDSLSPLWFCLALNPLSTLLEDSGLGFRLRRASKPISHLLYMDDLKLYASKRSDLFKLLKITESFSSCIGMEFGVDKCAVIHVEKGRTVLSERVHLTNNLFLRSLDEGETYKYLGMSEALGIDNGSMKQLVRERFFGRLKKVFNSFLSGGNKVRAFNSWVMPLLVYTFGILRWTQTELDSLDRQVRKLLTTYRMHHPRSSVMRLYIPRKLGGRGFLNAKNLHNREVYNLRDYFLNNSGDMHKDVVAVDKGLTPLSLGKENWRGPAVMDTLDRVAVWRSKELHGRFYKALTGPDVDQTSSVSWLQHGDLFGETEGFVCAIMDEVIKTNNYRKHILKDGTLDVCRACHRPGESLRHIVSGCCHLANGEYLHRHNQVARIIHQQLALRYGLIDCELPYYRYNPTPVLENGHALLYWDRSIITDRCITANKPDIVVVDRSARQAIIVDITIPHDDNLVKAEKEKMTKYLDLAHEITAMWSVDSTIIVPIVVSVNGLIAKSFDQHLMKLSLGCWIKGRIQKAVLLETARIVRRFLSLEL

SEQ ID NO: 6252 - protein, 1108 aa, Hypolimnas misippus
MRWSQKMNESVMRAYYGATSGGINLTAYRSTMLSLFQALEPTVTVTAQRLSDQVRAIQRCHLLDESVLERLRSNFQQINTVVTHSVQQSRNEENEVVHLDFNEIPHNSVDLSVSHQYNEYVRKALEDAILTYRFMPFNLRPQIPRLPIHRHNLTLVSVLDNILPKYLDSSQDLYDTYSILYCGAVAVCNVASIKLTSNKYKLTPYTVPAWQARIEKRISATRTLIGKLISFKAGNNRPRVMRFVHQAFAETNIRSSDYMTSITDRIDFLKQKIYAWAQRIRRYKKRMNRYRQNSMFQKDQRRVFRKWEKCTDSVTSSVLPTPNLMSDFWRGIWSCPIGHTEGDWMSVVERSCESLPQMDPVIISPNDVSCAIRSTSNWKCPGPDGLHNFWLKWFRSSHSILATQFQDAIVSGSLPTFMTTGATFLLYKSGCTADPKNYRPITCLSTIYKLLTSILAAKIIKHVTVNNILDPAQNGCRPGSRGTKELLLIDMAICQQVRRNRKNLASAWIDYKKAYDSVPHSWLVRVMELYKVDATLCSFLNSCMRQWVTFLRHPGTADNFGSTEPIKIKRGIFQGDSLSPLWFCLALNPLGTLLEDSRLGFRLRRESKPISHLLYMDDLKLYASKRSDLIQLLKITESFGSCIGMEFGVDKCAIIHVERGRIVSSEHIHLTNNLFLRSLNVGETYKYLGMSEALGIDGVAMKQLVRERFFGRLKKVINSFLSGGNKVRAFNSWVMPLLVYTFGILRWTQTELDSLDRQVRKLLTAYRMHHPRSSVMRLYIPRKLGGRGFLSAKNLHNRVVYNLREYFLNMNGDMHKDVVAVDKGFTPLSLGKENWRKPLVMGTLDRVAVWKSKELHGRFYKALMGPDVDQTSSVSWLQYGNLFGETEGFVCAIMDEVIKTNNYRKYIMKDGTVDVCRACHRPGESLRHIISGCSHLANGEYLHRHNQVARILHQQLALLYDLIDFEVPYYRYNPTPVLENGRALLYWDRSVITDRYIPANKPDIVIVDRSARRAIIVDITVPHDDNLLKAEKEKISKYLDLAHEITAMWRVDSTIIVPVVVSVNGLLAKSFDQHLQKLSLGSWIKGRIQKAVLLETARIVRRFLNLEP

SEQ ID NO: 6253 - protein, 1194 aa, Junonia evarete
MKNARGRLAQPSSQVNSSNSETQSSTSDDDYKTPLSTSESEKNEIDSPARTSKRRRAAHPPQEGLESKGRRAPATTPAAGGAVRRMKWSQKMNESVMRAYYEATGGGINLTAYRSKMLSLFQALEPTVTVTAQRLSDQVRAIQRCHLLDESVLDRLRSNLQQVNTVSDTQNVDECRIDQGEVATINLNVTPPNSVDLSVSSQYDEYMREALEDAVLKYRLMPYNLRPKLPRLPMHRHNLALVGALDKILPKYLSNSKDLYDTYSILYCGAVAVCNVTSTKFPTSTFISATNTVPAWQARIEKRITVTRTLIGKLICFREGNNRPRVMRYVHQAFAETSIRSCDYMASVTERLDYLKQKIYAWAKRIRRYKKRTSRYYQNSMFQKDQRKVFRNWEQQGKSVANGDLPPPDLMAEFWRNIWSNPVVHTEGDWMSVVERRCELLPQMDPVIISPDDVSCAIRSTPNWKCPGSDGLHNFWLKWFRSSHSILAAQFQDAITSGSLPKFMTTGTTFLIYKSGCTADPKNYRPITCLSTIYKLLTSILAAKITKHINTNNILAPAQNGCRTGSRGTKELLLIDMTICQQARRNRKNLATAWIDYKKAYDSVPHTWLMRIMELYKVDATLCSFLSSCMGQWITFLRHPGSTDIFGSTEPIRIRRGIFQGDSLSPLWFCLALNPLSTLLENSGLGFRLRRGSKPISHLLYMDDLKLYASKRPDLVQLLNITQSFSSCIEMEFGVDKCAVIHVERGRIVRSEHIHLASTLHLRSLDEGETYKYLGMSEALGIDDGSMKQLVRERFLGRLRKVFNSFLSGGNKVRAFNSWVMPLLVYTFGILRWTQTELDSLDRQVRKLLTAYRMHHPRSSVMRLYIPRKLGGRGFLNVKNLHNRELYNLRVYFLNNSGAMHRDVVAVDKGFTPLSLGKENWRKPAVMDTHDRVAVWRSKELHGRFYKALTGPDIDQTSSVSWLQHGDLFGETEGFVCAIMDEVIKTNNYRRHILKDGTLDVCRACHRPGESLRHIVSGCCHLANGEYLHRHNQVARIIHQQLALLYGLVDCEVPYYRYNPTPVLENGHALLYWDRSIITDRFITANKPDIVVVDRSARQAIIVDITIPHDDNLVKAEKEKMSKYLDLAHEITAMWSVDSTIIVPIVVSVNGLIAKSFDQHLKKLSLGCWVKGRIQKAVLLETARIVRRFLSLEL

SEQ ID NO: 6254 - protein, 1095 aa, Junonia genoveva
MKNARGRLAQPSSQVNSSNSETQSSTSDDDYKTPLSTSESEKNEIDSPARTSKRRRAAHPPQEGLESKGRRAPATTPAAGGAVRRMKWSQKMNESVMRAYYEATGGGINLTAYRSKMLSLFQALEPTVTVTAQRLSDQVRAIQRCHLLDESVLDRLRSNLQQVNTVSDTRNVDECRIDQGEVATINLNVTPPNSVDLSVSSQYDEYMREALEDAVLKYRLMPYNLRPKLPRLPMHRHNLALVGALDKILPKYLSNSKDLYDTYSILYCGAVAVCNVASTKFPTSTFISATNTVPAWQARIEKRITVTRTLIGKLICFREGNNRPRVMRYVHQAFAETSIRSCDYMASVTERLDYLKQKIYAWAKRIRRYKKRTSRYYQNSMFQKDQRKVFRNWEQQGKSVANGDLPPPDLMAEFWRNIWSNPVVHTEGDWMSVVERRCELLPQMDPVIISPDDVSCAIRSTPNWKCPGSDGLHNFWLKWFRSSHSILAAQFQDAITSGSLPKFMTTGTTFLIYKSGCTADPKNYRPITCLSTIYKLLTSILAAKITKHINTNNILAPAQNGCRTGSRGTKELLLIDMTICQQARRNRKNLATAWIDYKKAYDSVPHTWLMRIMELYKVDATLCSFLSSCMGQWITFLRHPGSTDIFGSTEPIRIRRGIFQGDSLSPLWFCLALNPLSTLLENSGLGFRLRRGSKPISHLLYMDDLKLYASKRPDLVQLLNITQSFSSCIEMEFGVDKCAVIHVERGRIVRSEHIHLASTLHLRSLDEGETYKYLGMSEALGIDDGSMKQLVRERFLGRLRKVFNSFLSGGNKVRAFNSWVMPLLVYTFGILRWTQTELDSLDRQVRKLLTAYRMHHPRSSVMRLYIPRKLGGRGFLNVKNLHNRELYNLRVYFLNNSGAMHRDVVAVDKGFTPLSLGKENWRKPAVMDTHDRVAVWRSKELHGRFYKALTGPDIDQTSSVSWLQHGDLFGETEGFVCAIMDEVIKTNNYRRHILKDGTLDVCRACHRPGESLRHIVSGCCHLANGEYLHRHNQVARIIHQQLALLYGLVDCEVPYYRYNPTPVLENGHALLYWDRSIITDRFITANKPDIVVVDR

SEQ ID NO: 6255 - protein, 1193 aa, Hypolimnas misippus
MKNARGRSAQSTSKVNSSSSETQSSLSDDDYRTPLSSTESEKYETDSPAKRPKRRRAVNPPQDGLELQGQHAPARAPAAGGAVRRMRWSQKLNESVMRAYYGATGGGINLTAYRSTMLSMFQALEPTVTVTAQRLSDQVRAIQRCHLLDESILERLRSNLQQINIASGSHCVQQSQKDTCEITVQDLIVKSPSSVDVTVSNQDNEHMRRALEDAILKYKHVPFNLRPQLPRLPMHRRNLALVSVLDKMLQQYLDRTLDLYDTHSILYCGAVAVCNIASVKFPNRTVTTTNTTPAWQARIERRISLTRTLIGKLICFRAGNNRPRVMRFVHQAFAGTNIKTTEYMSFVTDRIDFLKQKIYAWAKRIKRYKKRINRYRQNSMFQSDQRKVYRNWEPRGDSVANSVLPTPVVLTNFWRDIWSTPIEHTEGDWMRVVRRLCESFKPMDSITINPDDVSSAIRSTSNWKCPGPDRLQNFWLKWFRSSHSILASRFQDALISGSLPTFMTTGVTILIYKSGCTADPKNYRPITCLPTIYKLLTSILASKITKHIISNNILAPAQNGCRGGSRGTKELLLIDMTICRQVRRNRKNLVTAWIDYKKAYDSIPHTWLIRIMELYKIDTTLCSFLRSCMGQWITFLRHPESNETFGSTEPIRIMRGIFQGDSLSPLWFCLALNPLSSLLEDSGLGYRLRRGSKKISHLLYMDDLKLFASKQPELVELLKITESFSSCIGMEFGVDKCAVLHVERGKVVTSTDVQLTTTLSLRSLNEGETYKYLGMAEALGTDDGSIKQLVKERFFGRLKKVLNSFLSGGNKVRAFNGWVMPLLTYTFGILRWTQTELDDLDRQVRKLLTTYRMHHPRSSVMRLYIPRKCGGRGFLNAKSLHNREVYNLREYFLSINEGMHKDVVAIDKGFTPLSLGKENWRKPVVLDTLDRVTVWKSKELHGRFYRALMSSDVDLSSSISWLQYGDLFGETEGFVCAIMDEVIKTNNYRKYIMKDGTPDVCRACHRPGESLRHIISGCCHLANGEYLHRHNQVARIIHQQLALRYGLLDVEVPYYRYNPTAVLENGNALLYWDRSIITDRYITANKPDIVIVDRSACQAIIVDVTIPHDDNLVKAEKEKLSKYLDLAHEMTAMWSLNSTIIVPVVVSVNGLLAKSFDQHLKKLSLSSWIKGRIQKAVLLETARIVRRFLSLEP

SEQ ID NO: 6256 - protein, 988 aa, Junonia stemosa
MREALEDAVLKYRLMPYNLRPKLPRLPMHRHNLALVGALDKILPKYLGNSKDLYDTYSILYCGAVAVCNVASTKFPTSTFISTTNTVPAWQARIEKRITVTRTLIGKLICFREGNNRPRVMRYVHQAFAETSIRSCDYMASVTERLDYLKQKIYAWAKRIRRYKKRTSRYYQNSMFQKDQRKVFRNWEQQGKSVANGDLPPPDLMAEFWRNIWSNPVVHTEGDWMSAVERRCELLPQMDPVIISPDDVSCAIRSTPNWKCPGSDGLHNFWLKWFRSSHSILAAQFQDAITSGSLPKFMTTGTTFLIYKSGCTADPKNYRPITCLSTIYKLLTSILAAKITKHINTNNILAPAQNGCRTGSRGTKELLLIDMTICQQARRNRKNLATAWIDYKKAYDSVPHTWLMRIMELYKVDATLCSFLSSCMGQWITFLRHPGSTDIFGSTEPIRIRRGIFQGDSLSPLWFCLALNPLSTLLENSGLGFRLRRGSKPISHLLYMDDLKLYASKRPDLVQLLNITQSFSSCIEMEFGVDKCAVIHVERGRIVRSEHIHLASTLHLRSLDEGETYKYLGMSEALGIDDGSMKQLVRERFLGRLRKVFNSFLSGGNKVRAFNSWVMPLLVYTFGILRWTQTELDSLDRQVRKLLTAYRMHHPRSSVMRLYIPRKLGGRGFLNVKNLHNRELYNLRVYFLNNSGAMHRDVVAVDKGFTPLSLGKENWRKPAVMDTHDRVAVWRSKELHGRFYKALTGPDIDQTSSVSWLQHGDLFGETEGFVCAIMDEVIKTNNYRRHILKDGTLDVCRACHRPGESLRHIVSGCCHLANGEYLHRHNQVARIIHQQLALLYGLVDCEVPYYRYNPTPVLENGHALLYWDRSIITDRFITANKPDIVVVDRSARQAIIVDITIPHDDNLVKAEKEKMSKYLDLAHEITAMWSVDSTIIVPIVVSVNGLIAKSFDQHLKKLSLGCWIKGRIQKAVLLETARIVRRFLSLEL

SEQ ID NO: 6257 - protein, 1193 aa, Hypolimnas misippus
MKNARGRSAQSTSKVNSSSSETQSSLSDDDYRTPLSSTESEKYETDSPAKRPKRRRAVNPPQDGLELQGQHAPARAPAAGGAVRRMRWSQKLNESVMRAYYGATGGGINLTAYRSTMLSMFQALEPTVTVTAQRLSDQVRAIQRCHLLDESILERLRSNLQQINIASGSHCVQQSQKDTCEITVQDLIVKSPSSVDMTVSNQDNEHMRRALEDAILKYKHVPFNLRPQLPRLPMHRRNLALVSVLDKMLQQYLDRTLDLYDTHSILYCGAVAVCNIASVKFPNRTVTTTNTTPAWQARIERRISLTRTLIGKLICFRAGNNRPRVMRFVHQAFAGTNIKTTEYMSFVTDRIDFLKQKIYAWAKRIKRYKKRINRYRQNSMFQSDQRKVYRNWEPRGDSVANSVLPTPVVLTNFWRDIWSTPIEHTEGDWMRVVRRLCESFKPMDSITINPDDVSSAIRSTSNWKCPGPDRLQNFWLKWFRSSHSILASRFQDALISGSLPTFMTTGVTILIYKSGCTADPKNYRPITCLPTIYKLLTSILASKITKHIISNNILAPAQNGCRGGSRGTKELLLIDMTICRQVRRNRKNLVTAWIDYKKAYDSIPHTWLIRIMELYKIDTTLCSFLRSCMGQWITFLRHPESNETFGSTEPIRIMRGIFQGDSLSPLWFCLALNPLSSLLEDSGLGYRLRRGSKKISHLLYMDDLKLFASKQPELVELLKITESFSSCIGMEFGVDKCAVLHVERGKVVTSTDVQLTTTLSLRSLNEGETYKYLGMAEALGADDGSIKQLVKERFFGRLKKVLNSFLSGGNKVRAFNGWVMPLLTYTFGILRWTQTELDDLDRQVRKLLTTYRMHHPRSSVMRLYIPRKCGGRGFLNAKSLHNREVYNLREYFLSINEGMHKDVVAIDKGFTPLSLGKENWRKPVVLDTLDRVTVWKSKELHGRFYRALMSSDVDLSSSISWLQYGDLFGETEGFVCAIMDEVIKTNNYRKYIMKDGTPDVCRACHRPGESLRHIISGCCHLANGEYLHRHNQVARIIHQQLALRYGLLDVEVPYYRYNPTAVLENGNALLYWDRSIITDRYITANKPDIVIVDRSACQAIIVDVTIPHDDNLVKAEKEKLSKYLDLAHEMTAMWSLNSTIIVPVVVSVNGLLAKSFDQHLKKLSLSSWIKGRIQKAVLLETARIVRRFLSLEP

SEQ ID NO: 6258 - protein, 1109 aa, Junonia villida
MKWSQKMNESVMRAYYEATGGGINLTAYRSKMLSLFQALEPTVTVTAQRLSDQVRAIQRCHLLDESVLDRLRSNLQQVNTVSDTRNIDQCRINQGEVATINLNVTPPNSVDLSVSSQYDEYMREAMEDAVLKYRLMPYNLRPKLPRLPMHRHNLALVGVLDKILPKYLNNSKDLHDTYSILYCGAVAVCNVASIKFPTITFISTTYTVPAWQARIEMRISVTRTLIGKLTCFREGNNRPRVMRYVHQAFAGTNIRSCDYMASVTERIDYLKQKIYAWAKRIRRYKKRASRYYQNSMFQKDQRKVFRNWEQQGKSVGNGDLPSPDLMSEFWRNIWSNPVIHTEGEWMSVVERRCELIPQMDHVIISPDDVSCAIRSTPNWKCPGPDGLHNFWLKWFRSSHSILAAQFQDAITSGSLPKFMTTGTTFLIYKSGCTADPKNYRPITCLSTIYKLLTSILAAKITKHINTNNLLAPAQNGCRTGSRGTKELLLIDMTICQQARRNRKNLATAWIDYKKAYDSVPHTWLMRIMELYKVDATLCSFLGSCMGQWTTFLRHPGSTDIFGSTEPIRIRRGIFQGDSLSPLWFCLALNPLSTLLEDSGLGFRLRRGSKPISHLLYMDDLKLYASKRPDLVQLLKITQSFSSCIEMEFGVDKCAVIHVERGRIVTSENIQLENALHLRSLHEGETYKYLGMSEALGIDDGSMKQLVRERFFGRLRKVFNSFLSGGNKVRAFNSWVMPLLVYTFGILRWTQTELDSLDRQVRKLLTAYRMHHPRSSVMRLYIPRKLGGRGFLNVKNLHNREVYNLRDYFLKNSGVMHRDVVAVDKGFTPLSLGKKNWRKPAVMDTLDRVAVWRSKELHGRFYKALTGPDVDQISSVSWLQHGDLFGETEGFVCAIMDEVIKTNNYRRHILKDGTLDVCRACHRPGESIRHIVSGCCHLANGEYLHRHNQVARIIHQQLALLYGLIDCEVPYYRYNPTPVLENGHALLYWDRSIITDRFITANKPDIVVVDRSARQAIIVDITIPHDDNLVKAEKEKMSKYLDLAHEITAMWSVDSTIIVPIVVSVNGLIAKSFDQHLKKLSLGCWIKGRIQKAVLLETARIVRRFLSLEL

SEQ ID NO: 6259 - protein, 1103 aa, Junonia evarete
MNESVMRAYYEATGGGINLTAYRSKMLSLFQALEPTVTVTAQRLSDQVRAIQRCHLLDDSVLDRLRSNLQQLNTGSDTHRDEPNKEKQTETTAQNLNELPTNSVDLSVSDQHNEYMRGTLEDAILEYRFMPFNLRPKIPRLPMHRHNLALVSVLDKLLQKYLNNSQDLYDTYSILYCGAIAVSKLASVKLPIPKPISPSYTIPAWQSRIEKRISTTRTLIGKLICFREGNNRPRVMRFVHLAFAGTDIRPNEYMTSVTERIDSLKQKVYAWAKRIRRYKKRMNRYCQNSMFQKDQRRVFRNWEKRSNGEASGELPTPDLMSNFWRGIWSNPIGHTEGDWMSVVGKSCELLPPMDPVRISPNDVSCAIRSTSNWKCPGPDGLHNFWLKWFRNSHSTLAAQFQDAIACGSLPTFMTTGTTFLIYKSGCTADPKNYRPITCLSNLYKLLTSILAAKIKKHIIDNNILAPAQNGCRQGSRGTKELLLIDMTISQQVRRNRKNLCAAWIDYKKAYDSVPHTWLMRIMELYKIDTTLCSFLGSCMGQWITFLRHPGGTDIFGSTEPIKIKRGIFQGDSLSPLWFCLALNPLSTLLEDSGLGFRLRRASKPISHLLYMDDLKLYASKRSDLFKLLKITESFSSCIGMEFGVDKCAVIHVEKGRTVLSERVHLTNNLFLRSLDEGETYKYLGMSEALGIDNGSMKQLVRERFFGRLKKVFNSFLSGGNKVRAFNSWVMPLLVYTFGILRWTQTELDSLDRQVRKLLTTYRMHHPRSSVMRLYIPRKLGGRGFLNAKNLHNREVYNLRDYFLNNSGDMHKDVVAVDKGLTPLSLGKENWRGPAVMDTLDRVAVWRSKELHGRFYKALTGPDVDQTSSVSWLQHGDLFGETEGFVCAIMDEVIKTNNYRKHILKDGTLDVCRACHRPGESLRHIVSGCCHLANGEYLHRHNQVARIIHQQLALRYGLIDCELPYYRYNPTPVLENGHALLYWDRSIITDRCITANKPDIVVVDRSARQAIIVDITIPHDDNLVKAEKEKMTKYLDLAHEITAMWSVDSTIIVPIVVSVNGLIAKSFDQHLMKLSLGCWIKGRIQKAVLLETARIVRRFLSLEL

SEQ ID NO: 6260 - protein, 1194 aa, Junonia evarete
MKNARGRLAQPSSQVNSSNSETQSSTSDDDYKTPLSTSESEKNEIDSPARTSKRRRAAHPPQEGLESKGRRAPATTPAAGGAVRRMKWSQKMNESVMRAYYEATGGGINLTAYRSKMLSLFQALEPTVTVTAQRLSDQVRAIQRCHLLDESVLDRLRSNLQQVNTVSDTRNVDECRIDQGEVATINLNVTPPNSVDLSVSSQYDEYMREALEDAVLKYRLMPYNLRPKLPRLPMHRHNLALVGALDKILPKYLSNSKDLYDTYSILYCGAVAVCNVASTKFPTSTFISATNTVPAWQARIEKRITVTRTLIGKLICFREGNNRPRVMRYVHQAFAETSIRSCDYMASVTERLDYLKQKIYAWAKRIRRYKKRTSRYYQNSMFQKDQRKVFRNWEQQGKSVANGDLPPPDLMAEFWRNIWSNPVVHTEGDWMSVVERRCELLPQMDPVIISPDDVSCAIRSTPNWKCPGSDGLHNFWLKWFRSSHSILAAQFQDAITSGSLPKFMTTGTTFLIYKSGCTADPKNYRPITCLSTIYKLLTSILAAKITKHINTNNILAPAQNGCRTGSRGTKELLLIDMTICQQARRNRKNLATAWIDYKKAYDSVPHTWLMRIMELYKVDATLCSFLSSCMGQWITFLRHPGSTDIFGSTEPIRIRRGIFQGDSLSPLWFCLALNPLSTLLENSGLGFRLRRGSKPISHLLYMDDLKLYASKRPDLVQLLNITQSFSSCIEMEFGVDKCAVIHVERGRIVRSEHIHLASTLHLRSLDEGETYKYLGMSEALGIDDGSMKQLVRERFLGRLRKVFNSFLSGGNKVRAFNSWVMPLLVYTFGILRWTQTELDSLDRQVRKLLTAYRMHHPRSSVMRLYIPRKLGGRGFLNVKNLHNRELYNLRVYFLNNSGAMHRDVVAVDKGFTPLSLGKENWRKPAVMDTHDRVAVWRSKELHGRFYKALTGPDIDQTSSVSWLQHGDLFGETEGFVCAIMDEVIKTNNYRRHILKDGTLDVCRACHRPGESLRHIVSGCCHLANGEYLHRHNQVARIIHQQLALLYGLVDCEVPYYRYNPTPVLENGHALLYWDRSIITDRFITANKPDIVVVDRSARQAIIVDITIPHDDNLVKAEKEKMSKYLDLAHEITAMWSVDSTIIVPIVVSVNGLIAKSFDQHLKKLSLGCWVKGRIQKAVLLETARIVRRFLSLEL

SEQ ID NO: 6261 - protein, 997 aa, Junonia villida
MVSNQDNEHMRRALEDAILKYKHIPFNLRPQLPRLPMHRRNLALVGVLDKVLQDYLDNSVDIYDTHSILYCGAVAVCNMASVEFLTKRILSTSNTAPAWQVRIEKRITLTRTLIGKLICFRAGNNRPRVMRFVHQAFAGTNIRTSEYMASITDRIDSLKQKLYALAKRIKRYKLRVNRYRQNSMFQSDQRKVYRIWEQGNDSVVNGSLPTPEEMSNFWRDIWSVPIDHTEGDWICAVRRHCESLKPMEPIRIGPDDVSSAIRSTSNWKCPGPDGLQNFWLKWFRSSHSVLAAQFQDALNSGSLPTFMTTGVTILLYKSGCTADPKNYRPITCLPTIYKLLTSILAAKITKHIVTNNILAPAQNGCRPGSRGTKELLLIDMTICRQVRRNRKNLATAWIDYKKAYDSVPHTWLMRVMDLYKIDTVLCSFLRSCMGQWITFLRHPGSDETSGATEPIRIRRGIFQGDSLSPLWFCLALNPLSSLLEDSGLGFRLRRGSNVISHLLYMDDLKLFAPKKPELVKLLKITETFSSSIGMEFGVDKCAVIHVERGRIVMSDDIQVTDNLSLRSLNEGETYKYLGVSEALGTDDGAIKQLVKERFFGRLRKVLNSLLSGGNKVRAFNSWVMPLLVYTFGILRWTQTELDSLDRQVRKLLTAFRMHHPRSSVMRLYIPRKCGGRGFLSAKNLHNREVYSLRQYFLGVDGGMHRDVVAVDKGFTPLSLGNENWRRPVVLDTLDRMNIWKSKELHGRFYRALMGSDVDKSSSISWLQYGDLFGETEGFVCAIMDEVIKTNNYRKYIMKDGTPDICRACHRPGESLRHIISGCCYLANGEYLHRHNQVAKIIHQQLALRYGLVDIEVPYYRYNPAPVLENGHALLYWDRSIITDRYIPANKPDIVVVDRSARRAIIVDVTIPHDDNLVKAEKEKLSKYLDLAHEIAAMWRVESAVIVPVVVSVNGLFAKSFDQHLQKLSLGCWIKGRIQKAVLLETARIVRRFLTLEP

SEQ ID NO: 6262 - protein, 959 aa, Apotomis turbidana
MHKRNLALMGALDALLDPYLRASEDLADTHSIMYCGAIAACRVARVRFPDTDRAPRTAGGVPAWQVRIERRISSFRTLIAKLICFRGGNNRPRVMRYVTQAFAGTGTRPCDYMACVTERIDYLKQKVYAWANRIRRYRERVDRFQQNRLFQSDQRKVYRKWEGTDQCVTDGQLPDPTAMINFWRSIWSVPVEHTEGEWMNVVRRECEPIENMGAVTISPDDVSCAVRTTQNWKSPGPDGLHNFWIKWFRSSHERLATQFQDALELGSLPSFMTNGATFLLYKSGSTTEVKNYRPITCLPTLYKLLTSILRTKINTHIVANNVLAFSQNGCRVGSRGTKELLLIDTTICQQVRWNRGSLSATWIDYKKAYDSVPHSGLERILELYKIDTALRSLLSSCMRQWTTVLRQPGVGDGPPGPQDLIRIERCIFQGDSLSPLWFCLALNPLSTLLKDSGLGCRLRRGGEVISHLLYMDDLKLYAAKRQDLEVTETFSSAIKMEFGVDKCAVMHVQRGKVVNSANLQLSETMSLRSISEVETYKYLGMSQSLGIADGDIRQALKERFFCRLTKVLNSFLSGGNKARAFNAWVMPLLTYSFGILRWTQTELDALDTRVRQLLTTHRMRHPRSSVMRMYIPRKCGGRGFLNAKDLHNREVCSLREYFLNNECGIHRDVVAVDKGLTSLSLANENWRRPKVLSTDDRRAVWKSKELHGRFYKALTGPDVDLLASVNWLRFGDLFGETEGFVCAIADEVMMTNNYRRYILKDGKVDICRACRRPGESLRHIISGCSHLANGEYLHRHNQVARIIHQQLALRYGLVGSEVPYYKYAPMPVLENGRATFYWDRSIITDRTIVANKPDIVLVDRSKRQAVLVDITIPHDENLVKAEKDKLSKYLDLAHEVTAMWDVDSTIIVPIVVSANGLIAKSLDKHLKRLSLDGWIKGQIQKAVLLDTARIVSRFLSLQP

SEQ ID NO: 6263 - protein, 1200 aa, Amphipyra tragopoginis
MLTRSRSRIARPPPPDSPLSSASQPPESSPTVSAVTPAAAVASSSSDEYFSPPTSPTPVRRQGRRRPPTSLGPRGPPAPSRVLATGGCVQRMKWTQSINENVMRAYYGSTEGGTNLTAYRVRMLTLFQELEPAINVSAQRLSDQVRVIQRNHRLDDAALDRLRLEVQNSRVTPVPSQTAVHQLNISVVPPRSDRVDGDVDDRAVTVCSQYNDQLRSALEDAIREYRANPELRPRLPRLPMHNKNRALVCALDSLLSSYFEGSEDLGDTHSIMYCAAVAACRVANVKFNNSERPTRPKPAVPAWQCRIERRIDGARALIGKPICFREGNTRPRVMRFVRRAFSGTGISPREYMSQVTERIDFLKQKVCAWASRIRRYKRRVERYTQNRMFQCDQRWVYRAWERPDQGVSDGRLPDDDAMNSFWRSIWSIPVIHTEGDWMRDIERACEPIEEMGEILISPQDVASAARPLPNWKSPGPDGLHNFWIKWLRSSHARLATQFQSSLESGSLPQFFTTGVTHLLHKSGSTAEPKNYRPITCLPTVYKLLTSILRSKINTHIENNSVMSSSQNGCRNGSRGTKELLLIDMAISQQVRRSRKNLSTCWIDYKKAYDSVPHTWLTRVLELYKINATLRTFLTSCMGQWRTVLRYPGCGQIRGSGEPIRIERGIFQGDSLSPLWFCLALNPLSTLLEGSGLGYPLRRGGQVVSHLLYMDDLKLFAPTELQLVELLKVTESFSNSIRMEFGVDKCAVMHVRRGGIMESEGLQLSDSIHLRSLSANDTYKYLGMSEGLGISEADMKQSLKERFFGRLKKVLKSLLSGGNKVRAFNGWVMPVLMYSFGILKWTQTELDALDRRVRTLLTANRMHHPRSSVMRLYIPRKCGGRGLLNATLNNREVCSLREYFLHADAGMHRDVVAVDKGLTPLSLAKENWRKPVVLSTNDRREVWQSKELHERFYRALHGPDVDFLASVSWLRFGDLFGETEGFVCAIMDEVIMTNNYRRYIVKDGTVDICRACHCPGESLRHIISGCSRLANGEYLHRHNQVARIIHQQLALKYNLEESEVPYYKYVPDPVLEKGHITLYWDRSIITDRTIVANKPDIVVIDRSERRTMIVDVTIPHDENLVKAEKDKQIKYLDLAHEVVSMWDVESATIVPIVVTANGLMAKSLDQHLKRLSLGGWIKGLIQKAVLLDTARIVRRFLSLEP

SEQ ID NO: 6264 - protein, 1199 aa, Apodemia virgulti
MITRSRRLKTQNAHPPSQPVAPSSSASSEEEYATPPEHSASSSDNGLPSPAPRRPPAPRRGRPPPPCLGPAGRPAPHPVPAAGGAVRRMRWTQAINENVMRAYYEATEGGTNLTAWRSRLLSLFQVLEPELTVSAQRLSDQVRFIQRNCALDAATLDRLRSEVVVSAPTTEIVQPQIHLPSVVLDSGLADTNCNMVDTETTNVSTHEFEQLRRALEDAIFEFKTIPICDRPRLPRFPTHKRNMALMIALDGMLDSYLQSSQDLADTHLILYCAGVAACRIAHVKFPKSDRVIRSVDEAPAWQKRIERRISTTRSIIGKLICFRSGNIRPRVMRYVTQAFAGTGVSSQDYMTCVTERIDYLKQKVCAWANRIRRYKQRVNRFNQNRIFRSDQRKVYRSWEKPSTSVIDGQLPDIHEMFSFWRNIWSVSINHVNGEWVRVVERSCEGLQPMASVRITPQDVREAICATQNWKSPGPDGLHNFWLKWLQSSHELLAKQFQEAIESGSLPPFMTTGLTFLLYKSGSTTDPKNFRPITCLPTIYKLLTSILRSKLNTHLYRNNILDSAQNGCRAGSRGTKEQLLIDMTINRQVHRNRKNLSAAWIDYKKAYDSVPHSWLSRVIELYKVDTVLCNFLQSCMRQWTTTLCLPRGGESFCISEPIRIERGIFQGDSLSPLWFCLALNPLSALLRDSKLGYRFRREGEIISHLLYMDDLKLFASNKPDLISLLNLTQKFSNDIRMEFGLDKCAVIHVQRGRVVNSENLQLSETVYFRSLSETETYKYLGMSEGLGIQDRDIKRLVTERFFGRLTKVLKSLLSGGNKVRAFNSWVMPLLVYTFGILKWTQTELDALDCKVRKLLTTYRMHHPRSSVMRLYIPRKCGGRGFLNAKNLHNREVYNLREYFLHVDCGMHRDIVAVDNGLTPLSLARKNWHKPVVFSTQDRLNVWKSKELHGRFYRALYGPDIDLPASLAWLRFGDLFGETEGFACAIADEVVKTNNYRKYIMKDGTVDICRACHRPGESIRHVISGCSHLANGEYLHRHNQVAKIIHQQLALRYGLVSFEVPYYKYAPEAVLENGRAKLYWDRSVITDRTITNNKPDIVLVDRLERRAFIVDITVPHDDNLVKAEKEKLTKYLDLAHEITDMWGVDSATIVPIVVSVNGLVAKSLEQHLRSLSLQFWIKGRIQKAAVLGTARIVRRFLSLSP

SEQ ID NO: 6265 - protein, 1198 aa, Emesis russula
MFTRSRMVIKNARLPSQPVSPNGSTSSEEEYATPPEHDASSSDDELPPPAPRRPPAPRRGRPPPPRLGPAGRSAPQPAPAVGGAVRRMRWTRQINENVMRAYYGATEGGTNLTAWRSRMQPLFQVLEPDLTVSTQRLSDQVRFIQRNCALDAATLERLRSEIVVSTPTTERIQLQTQLPSASLDGEVAIGSCNVVDVETINVSTHELEQLRRALEDAILEFRYMPVCKRPRLPRFPTHKRNMALVRALDGILDSYLKSSQDLADTHSILYCAGVTACRIARVKFPKSDTVIRSMEDVPAWQKRIEWRISATRAVIGKLYCFKSGNSRPRVMRYVTQAFAGTGVRPQNYLSCVTERIDYLKQKVCAWANRIRRYKKRVNRFYQNRIFQSDQRKVYRSWEEPTTRVIDGQLPGISEMSSFWKNIWSMPINHLNGEWLRVVERSCEDLQPMTSIIITSEDVGEAVRSTQNWKSPGPDGLHNFWLKWLQSSHKLLAEQFQKAIESGSLPTFMTTGLTFLLYKSGSTTDPKNFRPITCLPTIYKLLTSILRSKLNKHFYTNKILDPAQNGCKAGSRGTKEQLLIDMAINQQVRRNRKSLSAAWIDYKKAYDSVPHSWLIRVMELYKVDSVLCNFLQSCMRQWTTTLCLAGGGESFCISEPIRIERGIFQGDSLSPLWFCLALNPLSTLLRDSKLGYRFRREGEIISHLLYMDDLKLFAPNKPDLVSLLNITQKFSNDIRMEFGVDKCAVIHVQKGKVENSENLQLSETVYFRSLSETETYKYFGMSECLGIQDRDIKQLVTARFFSRLTKVLKSLLSGGNKVRAFNSWVMPLLIYTFGILKWTQTELDALDCKVRKLLTAYRMHHPRSSIMRLYIPRKCGGRGFLNAKNLHNREVYNLREYFLQVESGMHYDVVAVDNGLTPLSLAKKNWHKPVVLSTQDRLNVWKSKELHGRFYRALYGPDIDLPASIAWLRFGDLFGETEGFACAIADEIVKTNNYRKYIMKDGTVDLCRACHRPGESIRHIISGCSHLANGDYLHRHNQVAKIIHQQLALLYGLVSFEVPYYKYTPEPVLENGRAKLYWDRSIITDRTIVANKPDIVLVDRMERRAFIVDITVPHDENLVKAEKEKLSKYLDLAHEITDMWSVELTIIVPIVVSVNGLVAKSLDQHLKRLSLQLWIKGQIQKAAVLGTARIVRRFLSLSP

SEQ ID NO: 6266 - protein, 1199 aa, Apodemia mormo
MITRSRRLKTQNAHPPSQPVAPSSSASSEEEYATPPEHSASSSDNGLPSPAPRRPPAPRRGRPPPPCLGPAGRPAPHPVPAAGGAVRRMRWTQAINENVMRAYYEATEGGTNLTAWRSRLLSLFQVLEPELTVSAQRLSDQVRFIQRNCALDAATLDRLRSEVVVSAPTTEIVQPQIHLPSVVLDSGLADTNCNMVDTETTNVSTHEFEQLRRALEDAIFEFKTIPICDRPRLPRFPTHKRNMALMIALDGMLDSYLQSSQDLADTHLILYCAGVAACRIAHVKFPKSDRVIRSVDEAPAWQKRIERRISATRSIIGKLICFRSGNIRPRVMRYVTQAFAGTGVSSQDYMTCVTERIDYLKQKVCAWANRIRRYKQRVNRFNQNRIFRSDQRKVYRSWEKPSTSVIDGQLPDIHEMFSFWRNIWSVSINHVNGEWVRVVERSCEGLQPMASVRITPQDVREAICATQNWKSPGPDGLHNFWLKWLQSSHELLAKQFQEAIESGSLPPFMTTGLTFLLYKSGSTTDPKNFRPITCLPTIYKLLTSILRSKLNTHLYRNNILDSAQNGCRAGSRGTKEQLLIDMTINRQVHRNRKNLSAAWIDYKKAYDSVPHSWLSRVIELYKVDTVLCNFLQSCMRQWTTTLCLPRGGESFCISEPIRIERGIFQGDSLSPLWFCLALNPLSALLRDSKLGYRFRREGEIISHLLYMDDLKLFASNKPDLISLLNLTQKFSNDIRMEFGLDKCAVIHVQRGRVVNSENLQLSETVYFRSLSETETYKYLGMSEGLGIQDRDIKRLVTERFFGRLTKVLKSLLSGGNKVRAFNSWVMPLLVYTFGILKWTQTELDALDCKVRKLLTTYRMHHPRSSVMRLYIPRKCGGRGFLNAKNLHNREVYNLREYFLHVDCGMHRDIVAVDNGLTPLSLARKNWHKPVVFSTQDRLNVWKSKELHGRFYRALYGPDIDLPASLAWLRFGDLFGETEGFACAIADEVVKTNNYRKYIMKDGTVDICRACHRPGESIRHVISGCSHLANGEYLHRHNQVAKIIHQQLALRYGLVSFEVPYYKYAPEAVLENGRAKLYWDRSVITDRTITNNKPDIVLVDRLERRAFIVDITVPHDDNLVKAEKEKLTKYLDLAHEITDMWGVDSATIVPIVVSVNGLVAKSLEQHLRSLSLQFWIKGRIQKAAVLGTARIVRRFLSLSP

SEQ ID NO: 6267 - protein, 1121 aa, Apodemia virgulti
MITRSRKATHENARPISQPVAPSGSASSEEEYATPPEHDALSSDDELPPPAPRRPPAPRRGRPPPPRLGPAGRPAPHPVPAVGGAVRRMRWTRTINENVMRAYYGATEGGTNLTAWRSRLLPLFQVLEPELTVSTQRLSDQVRFIQRNRALDAATLDRLRSEVVVSTSTTDQIQPRTQSPSVPPEIRLADEIYDVVDVETTNVSTHELEQLRRTLEDAILEFKSMPICERPRLPRFPTHKRNMALVMALDGMLDSYLRSSQNLADTHSILYCAGVTACRIAHVRFPVSDRVIRSTEDVPAWQKRIERRISATRAIIGKLICFRSGNIRPKVMRFVTQAFAGTGVSPQDYMTCVTDRIDYLKQKVCAWANRIRRYKERVNRFNQNRIFRSDQRKVYRSWEEPATRMVDGQLPDIQEMSSFWRNIWSVPVNHINGEWVRVVERSCELLQPMASISITPQDVREAVRSTHNWKSPGLDGLHNFWLKWLQSSHELLAEQFQEAIESGYLPSFMTTGLTFLLYKSGSTTDPKNFRPITCLPTIYKLLTSILRSKLNQHFYTNNILDPAQNGCRAGSRGTKEQLLIDMAINHQVRRNRKGLAAAWIDYKKAYDSVPHSWLLRVMELYKVDTVLCDFLRSCMRQWTTTLCLPRGGESFCISQPIRIERGIFQGDSLSPLWFCLALNPLSALLRDSKVGYRFRREGEIISHLLYMDDLKLFASNKPDLLSLLNLTQRFSNDIRMEFGVDKCGVIHVQRGRVLNSENLQLSETVSFKSLSETETYKYLGMSECLGIQDGDIKQLVTERFFGRLTKVLKSLLSGGNKVRAFNSWVMPLLVYTFGILKWTQTELDALDCKVRKLLTMYRMHHPRSSVMRLYIPRKYGGRGFLNAKNLHNREVYNLREYFLHVECGMHRDVVAVDNGLTPLSLAKENWHKPVVLSIQDRLNVWKSKELHGRFYRVLYGPDIDLPASTAWLRFGDLFGETEGFACAIADEVVKTNNYRKYIMKDGTVDICRACHRPGESIRHIISGCSHLANGEYLHRHNQVAKIIHQQLALRYGLVSFEVPYYKYAPESVLENGRAKLYWDRSVITDRTIITNRPDIVLVDRMERRAFIVDITIPHDDNLVKA

SEQ ID NO: 6268 - protein, 1091 aa, Emesis mandana
MITRSRMVNKNARLPSQPVSPNGSTSSEEEYATPPEHDASSSDDELPPPAPRRPPAPRRGRPPPPRLGPAGRSAPQPAPAVGGAVRRMRWTRQINENVMRAYYGATEGGTNLTAWRSRMQPLFQVLEPDLTVSTQRLSDQVRFIQRNCALDAATLERLRSEIVVSTPTTERIQLQTQLPSASLDGEVAIGSCNVVDVETINVSTHELEQLRRALEDAILEFRYMPVCKRPRLPRFPTHKRNMALVRALDGILDSYLKSSQDLADTHSILYCAGVTACRIARVKFPKSDTVIRSMEDVPAWQKRIEWRISATRAVIGKLYCFKSGNSRPRVMRYVTQAFAGTGVRPQNYLSCVTERIDYLKQKVCAWANRIRRYKKRVNRFYQNRIFQSDQRKVYRSWEEPTTRVIDGQLPGISEMSSFWKNIWSMPINHLNGEWLRVVERSCEDLQPMTSIIITSEDVGEAVRSTQNWKSPGPDGLHNFWLKWLQSSHKLLAEQFQKAIESGSLPTFMTTGLTFLLYKSGSTTDPKNFRPITCLPTIYKLLTSILRSKLNKHFYTNKILDPAQNGCKAGSRGTKEQLLIDMAINQQVRRNRKSLSAAWIDYKKAYDSVPHSWLIRVMELYKVDSVLCNFLQSCMRQWTTTLCLAGGGESFCISEPIRIERGIFQGDSLSPLWFCLALNPLSTLLRDSKLGYRFRREGEIISHLLYMDDLKLFAPNKPDLMSLLNITQKFSNDIRMEFGVDKCAVIHVQKGKVENSENLQLSETVYFRSLSETETYKYFGMSECLGIQDRDIKQLVTARFFSRLTKVLKSLLSGGNKVRAFNSWVMPLLIYTFGILKWTQTELDALDCKVRKLLTAYRMHHPRSSIMRLYIPRKCGGRGFLNAKNLHNREVYNLREYFLQVESGMHYDVVAVDNGLTPLSLAKKNWHKPVVLSTQDRLNVWKSKELHGRFYRALYGPDIDLPASIAWLRFGDLFGETEGFACAIADEIVKTNNYRKYIMKDGTVDLCRACHRPGESIRHIISGCSHLANGDYLHRHNQVAKIIHQQLALLYGLVSFEVPYYKYTPEPVLENGRAKLYWDRSIITDRTIVANK

SEQ ID NO: 6269 - protein, 1198 aa, Dryas iulia
MITRSKTKGKARPPSQLVAPDGSASSEEEYATPPEYVASSSDNELPPPAPRRAPAPRRGRPPLPRLGSAGQPAQRTSSAVGGAVRRMKWTQSINVNVMRAYYGVTEGGTNLTAYRARLLPLFQTLEPELTVTAQRLSDQVRFIQRNRVLDDATLERLRSEVAVSAPATKPSQPRNQPPPVPSVTGLENGMANVTDVDTATLSTQEHEQVRITLENAILQYRFALTRAIPSLPRFPPHKRNMAVGMTLDALLDPYIRSSQNLADTHSILYCAAVAACRIARVWFPETDSRIRPAGDTPAWQERIERRISATRVIIGKLICFRSGNIRPKIMRCVTQAFAGTGVKPQDYMACVTERIDYLKQKVSAWANRIRRYKERVNRYKQNRIFERDQRKVYRRWEQPASSVIDEHVPDISEMSTFWKSIWFVPVNHTEGEWMSVVKRSCEHIQPMRCIQISPEDVSNAARSTKNWKSPGPDGLHNFWLKYLISSHERLAEQFQEAIEHGILPPFMTTGITFLLHKSGSTTDPKNFRPITCLPTIYKLLTSILTSKLNKHFEINNILDTAQNGCRVGSRGTKELLLIDMAVCKQVQRSKKNLSATWIDYKKAFDSVPHTWLRRVLELYKVDTDLCTFLESCMGQWTTSLCLSGVGGSLHTSEPIRIERGIFQGDSLSPLWFCLALNPLSALLRDSKLGFQFHRASEIISHLLYMDDLKLFASNKQDLVSLLNITQIFSNDIRMEFGVDKCAAIHVQRGHDVNSENLQFSETMTFKSLSETETYKYLGMSECLCIPGGDIKQMVTERFFGRLTKVLKSFLSGGNKVRAFNSWVMPLLMYTFGILRWTQTELDALDRKVRKMLTTYRMHHPRSSVMRLYIPRKCGGRGFLNAKDLHNREVYSLREYFQKMKCGMHRDVVNADNGLTPLSLAKENWHKPVVLSTQDRLNIWKSKELHGRFHQAQRGLDVDLQASVAWLRFGDLFGETEGFACAIADEVVKTNNYRKYIMKDGTIDICRACHRPGESIRHIISGCFHLANGEYLHRHNQVARIVHQQLALRYGLVCQEVPYYKYTPEPVLENGHAKLYWDRSIITDRTIVANKPDIVLVDRLERRAFIVDITIPCDVNLVKAEKDKQSKYIDLAHEITDMWDVDSTIVVPIVVSVNGLVAKSLNQHLMRLSLHAWIKGRIQKAAILGMARIVRLWFLSLSP

SEQ ID NO: 6270 - protein, 1197 aa, Dryas iulia
MITRSKTKGKARPPSQLVAPDGSASSEEEYATPPEYVASSSDDELPPPAPRRAPAPRRGRPPLPRLGSAGQPAQRTSSAVGGAVRRMKWTQSINVNVMRAYYGVTEGGTNLTAYRARLLPLFQTLEPELTVTAQRLSDQVRFIQRNRVLDDATLERLRSEVAVSAPATKPSQPRNQPPPVPAVTGLENGMANVTDVDTATLSTQEHEQVRITLENAILQYRFALTRDRPSLPRFPTHKRNMVLVMTLDALLDPYIRSSQNLADTHSILYCAAVAACRIARVRFPETDSRIRPAGDTPAWQERIERRISATRVIIGKLICFRSGNIRPKIMRCVTQAFAGTGVKPQDYMACVTERIDYLKQKVSAWANRIRRYKERVNRYKQNRIFERDQRKVYRRWEQPASSVIDEHVPDISEMSTFWKSIWSVPVNHTEGEWMSVVKRSCEHIQPMRCIQISPEDVSNAARSTKNWKTPGPDGLHNFWLKYLISSHERLAEQFQEAIEHGILPPFMTTGITFLLHKSGSTTDPKNFRPITCLPTIYKLLTSILTSKLNKHFEINNILDTAQNGCRVGSRGTKELLLIDMAVCKQVQRSKKNLSATWIDYKKAFDSVPHTWLRRVLELYKVDTDLCTFLESCMGQWTTSLCLSGVGGSLHTSEPIRIERGIFQGDSLSPLWFCLALNPLSALLRDSKLGFQFHRASEIISHLLYMDDLKLFASNKQDLVSLLNITQIFSNDIRMEFGVDKCAAIHVQRGKVVNSENLQFSETMTFKSLSETETYKYLGMSECLCIPGGDIKQMVTERFFGRLTKVLKSFLSGGNKVRAFNSWVMPLLMYTFGILRWTQTELDALDRKVRKMLTTYRMHHPRSSVMRLYIPRKCGGRGFLNAKDLHNREVYSLREYFQKMKCGMHRDVVNADNGLTPLSLAKENWHKPVVLSTQDRLNIWKSKELHGRFHQVLFGPDVDLQASVAWLRFGDLFGETEGFACAIADEVVKTNNYRKYIMKDGTIDICRACHRPGESIRHIISGCFHLANGEYLHRHNQVARIVHQQLALRYGLVCQEVPYYKYTPEPVLENGHAKLYWDRSIITDRTIVANKPDIVLVDRLERRAFIVDITIPCDVNLVKAEKDKQSKYIDLAHEITDMWDVDSTIVVPIVVSVNGLVAKILNQHLMMLSLHAWIKGRIQKAAILGTARIVRRFLSLSP

SEQ ID NO: 6271 - protein, 921 aa, Dryas iulia
MALVMTLDALLDPYIRSSRNLADTHSILYCAAVAACRIARVRFPETDSRIRPAGDTPAWQGRIERRISATRVIIGKLICFRSGNIRPKIMRCVTQAFAGTGVKPQDYMACVTERIDYLKQKVSAWANRIRRYKERVNRYKQNRIFERDQRKVYRRWEQPASSVIDEHVPDISEMSTFWKSIWSVPVNHTEGEWMSVVKRSCEHIQPMRCIQISPEDVSNAARSTKNWKSPGPDGLHNFWLKYLISSHERLAEQFQEAIEHGILPPFMTTGITFLLHKSGSTTDHKNFRPITCLPTIYKLLTSILTSKLNKHFEINNILDTAQNGCRVGSRGTKELLLIDMAVCKQVQRSKKNLSATWIDYKKAFDSVPHTWLRRVLELYKVDTDLCIFLESCMGQWTTSLCLSGVGGSLHTSEPIRIERGIFQGDSLSPLWFYLALNPLSALLRDSKLGFQFQRASEIISYLLYMDDLKLFASNKQDLVSLLNITQIFSNDIRMEFGVDKCAAIHVQRGKVVNSENLQFSETMTFKSLSETETYKYLGMSECLCIPGGDIKQMVTERFFGRLTKVLKSFLSGGNKVRAFNSWVMPLLMYTFGILRWTQTELDALDRKVRKMLTTYRMHHPRSSVMRLYIPRKCGGRGFLNAKDLHNREVYSLREYFQKMKCGMHRDVVNADNGLTPLSLAKENWHKPVVLSTQDRLNIWKSKELHGRFHQVLFGPDVDLQASVAWLRFGDLFGETEGFACAIADEVVKTNNYRKYIMKDGTLDKCQSYHRPGESIRHIISGCFHLANGEYLHRHNLVARIVHQQLALRYGMVCQEVPYYKYTPEPVLENGHAKLYWDRSIITDRTIVAKEPDIVLVDRLERRAFIVDITIPCDVNLVKAEKDKQSKYIDLAHEITDMSDVDSTIVVPIVVSVNGLVTKSLN

SEQ ID NO: 6272 - protein, 1007 aa, Dryas iulia
MAKVTDVVIATLSTQHEQVRITLENAILQYRFALTRDRPSLPRFPTHKRNMALVMTLDALLDPYIRSSQNLADTHSILYCAAVAACRIARVRFPETDSRIRHAGDTPPWQERIERRISATRVIIGKLICFRSGNIRPKIMRCVTQAFAGTGVKPQDYMACVTERIDYLQQKVSSWANRIRRYKVRVNRYKQNRIFERDQRKVYRRWEQPASSVIDEHVPDISEMSTFWKSIWSVPVNHTVGEWMSVVKRSCEHIQPMRSIQISPEDVSNAARSTKNWKSPGPDGLHNFWLKYLISSHERLAEQFQEAIEHRILPSFLTTGITFLLHKSGSTTDPKNFRPITCLPTIYKLLTSILTSKLNKHFEINNILDTAQNGCRVGSRGTKELLLIDMAVCKQVQRSKKNLSATWIDYKKAFDSVPHTWLRRVLELYKVDTDLCTFLESCMGQWTTSLCLSGVGGSLHTSEPIRIERGIFQGDSLSPLWFCLALNPLSALLRDSKLGFQFHRASEIISHLLYMDDLKLFASNKQDLVSLLNITQIFSNDIRMEFGVDKCAAIHVQRGKVVNSENLQFSETMTFKSLSETETYKYLGMSECLCIPGGDIKQMVTERFFGRLTKVLKSFLSGGNKVRAFNSWVMPLLMYTFGILRWTQTELDALDRKVRKMLTTYRMHHPRSSVMRLYIPRKCGGRGFLNAKDLHNREVYSLREYFQKMKCGMHRDVVNADNGLTPLSLAKENWHKPVVLSTQDRLNIWKSKELHGRFHQVLFGPDVDLQASVAWLRFGDLFGETEGFACAIADEVVKTNNYRKYIMKDGTIDICRACHRPGESIRHIISGCFHLANGEYLHRHNQVARIVHQQLALRYGLVCQEVPYYKYTPEPVLENGHAKLYWDRSIITDRTIVANKPDIVLVDRLERRAFIVDITIPCDVNLVKAEKDKQSKYIDLAHEITDMWDVDSTIVVPIVVSVNGLVAKSLNQHLMRLSLHAWIKGRIQKAAILGTARIVRRFLSLSP

SEQ ID NO: 6273 - protein, 1197 aa, Dryas iulia
MITRSKTKGKARPPSQLVAPDGSASSEEEYATPPEYVASSSDDELPPPAPRRAPAPRRGRPPLPRLGSAGQPAQRTSSAVGGAVRRMKWTQSINVNIMRAYYGVTEGGTNLTAYRARLLPLFQTLEPELTVTAQRLSDQVRFIQRNRVLDDATLERLRSEVAVSAPATKPSQPRNQPPPVPAVTGLENGMANVTDVDTATLSTQEHEQVRFTLENAILQYRFALTRDRPSLPRFTTHKRNMALVMTLDALLDPYIRSSQNLADTHSILYCAAVAACRIARVRFPETDSRIRPAGDTPAWQERIERSISATRVITGKLICFRSGNIHPKIMRCVPQAFAGTGVKPQDYMACVTERIDYLKQKVSAWANRIRRYKERVNRYKQNRIFERDQRKVYRRWEQPASSVIDEHAPDISEISTFWKNIRYMFINHTEGEWMSVVKRSCEHIQPMRCIQISPEDVSNAARSTKNWKSPGPDGLHNFWLKYLISSHERLAEQFQEAIEHGILPPFMTTGITFLLHKSGSTTDPKNFRPITCLPTIYKLLTSILTSKLNKHFEINNILDTAQNGCRVGSRGTKELLLIDMAVCKQVQRSKKNLSATWIDYKKAFDSVPHTWLRRVLELYKVDTDLCTFLESCMGQWTTSLCLSGVGGSLHTSEPIRIERGIFQGDSLSPLWFCLALNPLSALLRDSKLGFQFHRASEIISHLLYMDDLKLFASNKQDLVSLLNITQIFSNDIRMEFGVDKCAAIHVQRGKVVNSENLQFSETMTFKSLSETETYKYLGMSECLCIPGGDIKQMVTERFFGRLTKVLKSFLSGGNKVRAFNSWVMPLLMYTFGILRWTQTELDALDRKVRKMLTTYRMHHPRSSVMRLYIPRKCGGRGFLNAKNLHNREVYSLREYFQKMKCGMHRDVVNADNGLTPLSLAKENWHRPVVLSTQDRLNIWKSKELHGRFHQVLFGLDVDLQASVAWLRFGDLFRETEGFACAIADEVVKTNNYRKYIMKDSTIDICRACHRPGESIRHIISGCFHLANGEYLHRHNLVARIVHQQLALRYGLVCQEVPYYKYTPEPVLENGHAKLYWDRSIITDRTIVANKPDIVLVDRLERRAFIVDITIPCDVNLVKAEKDKQSKYIDLAHEITDMWDVDSTIVVPIVVSVNGLVAKSLNQHLMRLSLHAWIKGRIQKAAILGTARIVRRFLSLPP

SEQ ID NO: 6274 - protein, 972 aa, Dryas iulia
MANVTDVDTATLSTQEHEQVRITLENSILQNRFALTRDRPSLPRFPTHKRNMALVMTLDALLDPYIRSSQNLADTHSILYCAAVAACRIARVRFPETDSRIRPAGNTPAWQERIERRISATRVIIGKLICFRSGNIRPKIMRCVTQAFAGTGVKPQDYMACVTERIDYLKQKVSAWANRIRRYKERVNRYKQNRIFERDQRKVYRRWEQPASSVIDEHVPDISEMSTFWKSIWSVAVNHNEGEWMSVVKRSCEHIQPMRCIQISPEDVSNAARSTKNWKSPGPDGLHNFWLKYLISSHERLAEQFQEAIEHGTLPPFMTTGITFLLHKSGSTTDPKNFRPITCLPTIYKLLTSILTSKLNKHFEINNILDTAQNGCRVGSRGTKELLLIDMAVCKQVQRSKKNLSATWIDYKKAFDSVPHTWLRRVLELYKVDTDLCTFLESCMGQWTTSLCLSGVGGSLHTSEPIRIERGIFQGDSLSPLWFCLALNPLSALLRDSKLGFQFHRASEIISRLLYMDDLKLFASNKQDLVSLLNITQIFSNDIRMEFGVDKCAAIHVQRGKVVNSENLQFSETMTFKSLSETETYKYLGMSECLCIPGGDIKQMVTERFFGRLTKVLKSFLSGGNKVRAFNSWVMPLLMYTFGILRWTQTELDALDRKVRKMLTTYRMHHPRSSVMRLYIPRKCGGRGFLNAKDLHNREVYSLREYFQKMKCGMHRDVVNADNGLTPLSLAKENWHKPVVLSTQDRLNIWKSKELHGRFHQVLFGPDVDLQASVAWLRFGDLFGETEGFACAIADEVVKTNNYRKYIMKDGTIDICRACHRPGESIRHIISGCFHLANGEYLHRHNQVARIVHQQLALRYGLVCQEVPYYKYTPEPVLENGHAKLYWDRSIITDRTIVANKPDIVLVDRLERRAFIVDITIPCDVNLVKAEKDKQSKYIDLAHEITDMSDVDSTIVVPIVVSVNGLVTKSLN

SEQ ID NO: 6275 - protein, 1197 aa, Dryas iulia
MITRSKTKGKARPPSQLVAPDGSASSEEEYATPPEYVASSSDDELPPPAPRRAPAPRRGRPPLPRLGSAGHPAQRTSSAVGGAVRRMKWTQSINVNVMRAYYGVTEGGTNLTAYRARLLPLFQTLEPELTVTAQRLSDQVRFIQRNRVLDDATLERLRSEVAVSAPATKPSRPRNQPPPVPAVTGLENGMANVTDVDTTTFSTQEHEQVRITLENAILQYRFALTRDRPSLPRFPTHKRNMALVMTLDALLDPYIRSSQNLADTHSILYCAAVAACRIARVRFPETDSRIRPAGDTPAWQERIERRISATRIIIGKLICFRSGNIRPKIMRCVTQAFAGTGVKPQDYMACVTERIDYLKQKVSAWANRIRRYKERVNRYKQKRIFERDQRKVYRRWEQPASSVIDEHVPDISEMSTFWKSIWSVPVNHTEGEWMSVVKRSCEHIQPMRCIQISPEDVSNAARSTKNWKSPGPDGLHNFWLKYLISSHERLAEQFQEAIEHGTLPPFMTTGITFLLHKSGSTTDPKNFRPITCLPTIYKLLTSILTSKLNKHFEINNILDTAQNGCRVGSRGTKELLLIDMAVCKQVQRSKKNLSATWIDYKKAFDSVPHTWLRRVLELYKVDTDLCTFLESCMGQWTTSLCLSGVGGSLHTSEPIRIERGIFQGDSLSPLWFCLALNPLSALLRDSKLGFQFHRASEIISHLLYMDDLKLFASNKQDLVSLLNITQIFSNDIRMEFGVDKCAAIHVQRGKVVNSENLQFSETMTFKSLSETETYKYLGMSECLCIPGGDIKQMVTERFFGRLTKVLKSFLSGGNKVRAFNSWVMPLLMYTFGILRWTQTELDALDRKVRKMLTTYRMHHPRSSVMRLYIPRKCGGRGFLNAKDLHNREVYSLREYFQKMKCGMHRDVVNADNGLTPLSLAKENWHKPVVLSTQDRLNIWKSKELHGRFHQVLFGPDVDLQASVAWLRFGDLFGETEGFACAIADEVVKTNNYRKYIMKDGTIDICRACHRPGESIRHIISGCFHLANGEYLHRHNQVARIVHQQLALRYGLVCQEVPYYKYTPEPVLENGHAKLYWDRSIITDRTIVANKPDIVLVDRLERRAFIVDITIPCDVNLVKAEKDKQSKYIDLAHEITDMWDVDSTIVVPIVVSVNGLVAKSLNQHLMRLSLHAWIKGRIQKAAILGTARIVRRFLSLSP

SEQ ID NO: 6276 - protein, 1177 aa, Dryas iulia
MAPRRQRRSTQRLQSTSRARSDDELPPPAPRRAPAPRRGRPPLPRLGSAGQPAQRTSSAVGGAVRRMKWTQSINVNVMRAYYGVTEGGTNLTAYRARLLPLFQTLEPELTVTAQRLSDQVRFIQRNRVLDDATLERLRSEVAVSAPATKPSQPRNQPPPVPAVTGLENGMANVTDVDTATLSTQEHEQVRITLENAILQYRFALTRDRPSLPRFPTHKRNMALVMTLDALLDPYIRSSQNLADTHSILYCAAVAACRIARVRFPETDSRIRPAGDTPAWQERIERRISATRVIIGKLICFRSGNIRPKIMRCVTQAFAGTGVKPQDYMACVTERIDYLKQKVSAWANRIRRYKERVNRYKQNRIFERDQRKVYRRWEQPASSVIDEHAPDISEMSTFWKSIWSVPVNHTEGEWMSVVKRSCEHIQPMRCIQISPEDVSNAARSTKNWKSPGPDGLHNFWLKYLISSHERLAEQFQEAIEHGILPPFMTTGITFLLHKSGSTTDPKNFRPITCLPTIYKLLTSILTSKLNKHFEINNILDTAQNGCRVGSRGTKELLLIDMAVCKQVQRSKKNLSATWIDYKKAFDSVPHTWLRRVLELYKVDTDLCTFLESCMGQWTTSLCLSGVGGSLHTSEPIRIERGIFQGDSLSPLWFCLALNPLSALLRDSKLGFQFHRASEIISHLLYMDDLKLFASNKQDLVSLLNITQIFSNDIRMEFGVDKCAAIHVQRGKVVNSENLQFSETMTFKSLSETETYKYLGMSECLCIPGGDIKQMVTERFFGRLTKVLKSFLSGGNKVRAFNSWVMPLLMYTFGILRWTQTELDALDRKVRKMLTTYRMHHHRRSWMMLYIPRKCGGRGFLNAKDLHNREVYSLREYFQKMKCGMHRDVVNADNGLTPLSLAKENWHKPVVLSTQDRLNIWKSKELHGRFHQVLFGPDVDLQASVAWLRFGDLFGETEGFACAIADEVVKTNNYRKYIMKDGTIDICRACHRPGESIRHIISGCFHLANGEYLHRHNQVARIVHQQLALRYGLVCQEVPYYKYTPEPVLENGHAKLYWDRSIITDRTIVANKPDIVLVDRLERRAFIVDITIPCDVNLVKAEKDKQSKYIDLAHEITDMWDVDSTIVVPIVVSVNGLVAKSLNQHLMRLSLHAWIKGRIQKAAILGTARIVRRFLSLSP

SEQ ID NO: 6277 - protein, 1197 aa, Dryas iulia
MITRSKTKGKARPPSQLVAPDGSASSEEEYATPPEYVASSSDDELPPPAPRRAPAPRRGRPPLPRLGSAGQPAQRTSSAVGGAVRRMKWTQSINVNVMRAYYGVTEGGTNLTAYRARLLPLFQTLEPELTVTTQRLSDQVRFIQRNRVLDDATLERLRSEVAVSAPATKPSQPRNQPPPVPAVTGLENGMANVTDVDTATLSTQEHEQVRITLENAILQYRFALKRDRPSLPRFPTHKRNMALVMTLDALLDPYIRSSQNLADTHSILYCAAVAACRIARVRFPETDSRIRPAGDTPAWQERIECRISATRVIIGKLICFRSGNIRPKIMRCVTQAFAGTGVKPQDYMACVTERIDYLKQKVSAWANRIRRYKVRVNRYKQNRIFERDQRKVYRRWEQPASSVIDEHVPDISEMSTFWKSIWSVPVNHTEGEWMSVVKRSCEHIQPMRCIQISPEDVSNAARSTKNWKSPGPDGLHNFWLKYLISSHERLAEQFQEAIEHGILPPFMTTGITFLLHKSGSTTDPKNFRPITCLPTIYKLLTSILTSKLNKHFEINNILDTAQNGCRVGSRGTKELLLIDMAVCKQVQRSKKNLSATWIDYKKAFDSVPHTWLRRVLELYKVDTDLCTFLESCMGQWTTSLCLSGVGGSLHTSEPIRIERGIFQGDSLSPLWFCLALNPLSALLRDSKLGFQFHRASEIISHLLYMDDLKLFASNKQDLVSLLNITQIFSNDIRMEFGVDKCTAIHVQRGKVVNSENLQFSETMTFKSLSETETYKYLGMSECLCIPGGDIKQMVTERFFGRLTKVLKSFLSGSNKVRAFNSWVMPLLMYTFGILRWTQTELDALDRKVRKMLTTYRMHHPRSSVMRLYIPRKCGGRGFLNAKDLHNREVYSLREYFQKMKCGMHRDVVNADNGLTPLSLAKENWHKPVVLSTQDRLNIWKSKELHGRFHQVLFGPDVDLQASVAWLRFGDLFGETEGFACAIADEVVKTNNYRKYIMKDGTIDICRACHRPGESIRHIISGCFHLANGEYLHRHNQVARIVHQQLALRYGLVCQEVPYYKYTPEPVLENGHAKLYWDRSIITDRTIIANKPDIVLVDRLERRAFIVDITIPCDVNLVKAEKDKQSKYIDLAHEITDMWDVDSTIVVPIVVSVNGLVAKSLNQHLMRLSLHAWIKGRIQKAAILGTARIVRRFLSLSP

SEQ ID NO: 6278 - protein, 1197 aa, Dryas iulia
MITRSKTKGKARPPSQLVAPDGSASSEEEYATPPEYVASSSDDELPPPAPRRAPAPRRGRPPLPRLGSAGQPAQRTSSAVGGAVRRMKWTQSINVNVMRAYYGVTEGGTNLTAYRARLLPLFQTLEPELTVTAQRLSDQVRFIQRNRVLDDATLERLRSEVAVSAPATKPSQPRNQPPPVPAVTGLENGMANVTDVDTATLSTQEHEQVRITLENAILQYRFALTRDRPSLPRFPTHKRNMVLVMTLDALLDPYIRSSQNLADTHSILYCAAVAACRIARVRFPETDSRIRPAGDTPAWQERIERRISATRVIIGKLICFWSGNIRPKIMRCVTQAFAGTGVKPQDYMACVTERIDYLKQKVSAWANRIRRYKERVNRYKQNRIFERDQRKVYRRWEQPASSVIDEHVPDISEMSTFWKSIWSVPVNHTEGEWMSVVKRSCEHIQPMRCIQISPEDVSNAARSTKNWKSPGPDGLHNFWLKYLISSHERLAEQFQEAIEHGILPPFMTTGITFLLHKSGSTTDPKNFRPITCLPTIYKLLTSILTSKLNKHFEINNILDTAQNGCRVGSRGTKELLLIDMAVCKQVQRSKKNLSATWIDYKKAFDSVPHTWLRRVLELYKVDTDLCTFLESCMGQWTTSLCLSGVGGSLHTSEPIRIERGIFQGDSLSPLWFCLALNPLSALLRDSKLGFQFHRASEIISHLLYMDDLKLFASNKQDLVSLLNITQIFSNDIRMEFGVDKCAAIHVQRGKVVNSENLQFSETMTFKSLSETETYKYLGMSECLCIPGGDIKQMVTERFFGRLTKVLKSFLSGGNKVRAFNSWVMPLLMYTFGILRWTQTELDALDRKVRKMLTTYRMHHPRSSVMRLYIPRKCGGRGFLNAKDLHNHEVYSLREYFQKMKCGMHRDVVNADNGLTPLSLAKENWHKPVVLSTQDRLNIWKSKELHGRFHQVLFGPDVDLQASVAWLRFGDLFGETEGFACAIADEVVKTNNYRKYIMKDGTIDICRACHRPGESIRHIISGCFHLANGEYLHRHNQVARIVHQQLALRYGLVCQEVPYYKYTPEPVLENGHAKLYWDRSIITDRTIVANKPDIVLVDRLERRAFIVDITIPCDVNLVKAEKDKQSKYIDLAHEITDLWDVDSTIVVPIVVSVNGLVAKSLNQHLMRLSLHAWIKGRIQKAAILGTARIVRRFLSLSP

SEQ ID NO: 6279 - protein, 1197 aa, Dryas iulia
MITRSKTQGKARPPSQLVAPDGSASSEEEYATPPEYVASSSDDELPPPAPRRAPAPRRGRPPLPRLGSAGQPAQRTSSAVGGAVRRMKWTQSINVNVMRAYYGVTEGGTNLTAYRARLLPLFQTLEPELTVTTQRLSDQVRFIQRNRVLDDATLERLRSEVAVSAPATKPSQPRNQPPPVPAVTGLENGMANVTDVDTATLSTQEHEQVRITLENAILQYRFALTRDRPSLPRFPTHKRNMALVMTLDALLDPYIRSSQNLADTHSILYCAAVAACRIARVRFPETDSRIRPAGDTPAWQERIERRISATRVIIGKLICFRSGNIRPKIMRCVTQAFAGTGVKPQDYMACVTERIDYLKQKVSAWANRIRRYKVRVNRYKQNRIFERDQRKVYRRWEQPASSVIDEHVPDISEMSTFWKSIWSVPVNHTEGEWMSVVKRSCEDIQPVRCNQISPEGVPNAARSTKNWKSPGPDGLHNFWLKYLISSHERLAEQFQEAIEHGILPPFMTTGITFLLHKSGSTTDPKNFRPITCLPTIYKLLTSILTSKLNKQFEINNSLDTARNGCRVGSRGTKELPLIDMAVCQQVQRSKKNLSATWIDYKKAFDSVPHTWLRRVLELYKVDTDLCTFLESCMGQWTTSLCLSGVGGSLHTSEPIRIERGIFQGDSLSPLWFCLALNPLSALLRDSKLGFQFHRASEIISHLLYMDDLKLFASNKQDLVSLLNITQIFSNDIRMEFGVDKCAAIHVQRGKVVNSENLQFSETMTFKSLSETETYKYLGMSECLCIPGGDIKQMVTERFFGRLTKVLKSFLSGGNKVRAFNSWVMPLLMYTFGILRWTQTELDALDRKVRKMLTTYRMHHPRSSVMRLYIPRKCGGRGFLNAKDLHNREVYSLREYFQKMKCGMHRDVVNADNGLTPLSLAKENWHKPVVLSTQDRLNIWKSKELHGRFHQVLFGPDVDLQASVAWLRFGDLFGETEGFACAIADEVVKTNNYRKYIMKDGTIDICRACHRPGESIRHIISGCFHLANGEYLHRHNQVARIVHQQLALRYGLVCQEVPYYKYTPEPVLENGHAKLYWDRSIITDRTIVANKPDIVLVDRLARRAFIVDITIPCDVNLVKAEKDKQSKYIDLAHEITDMWDVDSTIVVPIVVSVNGLVAKSLNQHLMRLSLHAWIKGRIQKAAILGTARIVRRFLSLSP

SEQ ID NO: 6280 - protein, 1006 aa, Dryas iulia
MKWTQSINVNVMRAYYGVKEGGTNLTAYRARLLPLFQTLEPELTVTAQRLSDQVRFIQRNRVLDDATLERLRSEVAVSAPATKPSQPRTQPPPVPSVTGLENGMANVTDVDTATLSTQEHEQVRITLENAILQYRFALTRDRPSLPRFPTHKRNMALVMTLDALLDPYIRSSQNLADTHSILYCAAVAACRIARVWFPETDSRIRPAGDTPAWQERIERRISATRVIIGKLICFRSGNIRPKIMRCVTQAFAGTGVKPQDYMACVTERIDYLKQKVSAWANRIRRYKERVNRYKQNRIFERDQRKVYRRWEQPASSVIDEHVPDISEMSTFWKSIWSVPVNHTEGEWMSVVKRSCEHIQPMRCIQISPQDVSNAARSTKNWKSPGPDGLHNFWLKYLISSHERLAEQFQEAIEHGTLPPFMTTGITFLLHKSGSTTDPKNFRPITCLPTIYKLLTSILTSKLNKHFEINNILDTAQNGCRVGSRGTKELLLIDMAVCKQVQRSKKNLSATWIDYKKAFDSVPHTWLRRVLELYKVDTDLCTFLESCMGQWTTSLCLSGVGGSLHTSEPIRIERGIFQGDSLSPLWFCLALNPLSALLRDSKLGFQFHRASEIISHLLYMDDLKLFASNKQDLISLLNITQIFSNDIRMEFGVDKCAAIHVQRGKVVNSENLQFSETMTFKSLSETETYKYLGMSECLCIPGGDIKQMVTERFFGRLTKVLKSFLSGGNKVRAFNSWVMPLLMYTFGILRWTQTELDALDRKVRKMLTTYRMHHPRSSVMRLYIPRKCGGRGFLNAKDLHNREVYSLREYFQKMKCGMHRDVVNADNGLTPLSLAKENWHKPVVLSTQDRLNIWKSKELHGRFHQVLFGPDVDLQASVAWLRFGDLFGETEGFACAIADEVVKTNNYRKYIMKDGTIDICRACHRPGESIRHIISGCFHLANGEYLHRHNQVARIVHQQLALRYGLVCQEVPYYKYTPFSKTAMPNFIGTALLSRTGLLSPISLTSC

SEQ ID NO: 6281 - protein, 1008 aa, Dryas iulia
MANVTDVDTATLSTQEHEQVRITLENAILQYRFALTRDRPSLPRFPTHKRNMALVMTLDALLDPYIRSSQNLADTHSILYCAAVAACRIARVRFPETDSRIRPAGDTPAWQERIERRISATRVIIGKLICFRSGNIRPKIMRCVTQAFAGTGVKPQDYMACVTERIDYLKQKVSAWANRIRRYKVRVNRYKQNRIFERDQRKVYRRWEQPASSVIDEHVPDISEMSTFWKSIWSVPVNHTEGEWMSVVKRSCEHIQPMRCIQISPEDVSNAARSTKNWKSPGPDGLHNFWLKYLISSHERLAEQFQEAIEHGILPPFMTTGITFLLHKSGSTTDPKNFRPITCLPTIYKLLTSILTSKLNKHFEINNILDTAQNGCRVGSRGTKELLLIDMAVCKQVQRSKKNLSATWIDYKKAFDSVPHTWLRRVLELYKVDTDLCTFLESCMGQWSTSLCLSGVGGSLHTSEPIRIERGIFQGDSLSPLWFCLALNPLSALLRDSKLGFQFHRASEIISHLLYMDDLKLFASNKQDLVSLLNITQIFSNDIRMEFGVDKCAAIHVQRGKVVNSENLQFSETMTFKSLSETETYKYLGMSECLCIPGGDIKQMVTERFFGRLTKVLKSFLSGGNKVRAFNSWVMPLLMYTFGILRWTQTELDALDRKVRKMLTTYRMHHPRSSVMRLYIPRKCGGRGFLNAKDLHNREVYSLREYFQKMKCGMHRDVVNADNGLTPLSLAKENWHKPVVLSTQDRLNIWKSKELHGRFHQVLFGPDVDLQASVAWLRFGDLFGETEGFACAIADEVVKTNNYRKYIMKDGTIDICRACHRPGESIRHIISGCFHLANGEYLHRHNQVARIVHQQLALRYGLVCQEVPYYKYTPEPVLENGHAKLYWDRSIITDRTIAANKPDIVLVDRLERRAFIVDITIPCDVNLVKAEKDKQSKYIDLAHEITDMWDVDSTIVVPIVVSVNGLVAKSLNQHLMRLSLHAWIKGRIQKAAILGTARIVRRFLSLSP

SEQ ID NO: 6282 - protein, 1008 aa, Dryas iulia
MTNVTDVDTATLSTQEHEQVRITLENAILQYRFALTRDRPSLPRFSTHKRNMALVMTLDALLDPYIRSSQNLADTHSILYCAAVAACRIARVRFPETDSRIRPAGDTPAWQERIERRIIATRVIIGKLICFRSGNIRPKIMRCVTQAFAGTGVKPQDYMACVTERIDYLKQKVSAWANRIRRYKERVNRYKQNRIFERDQRKVYRRWEQPASSVIDEHVPDISEMSTFWKSIWSVPVNHTEGEWMSVVKRSCEHIQPMRCIQISPEDVSNAARSTKNWKSPGPDGLHNFWLKYLISSHERLAEQFQEAIEHGILPPFMTTGITFLLHKSGSTTDPKNFRPITCLPTIYKLLTSILTSKLNKHFEINNILDTAQNGCRVGSRGTKELLLIDMAVCKQVQRSKKNLSATWIDYKKAFDSVPHTWLRRVLELYKVDTDLCTFLESCMEQWITSLCLSGVGGSLHTSEPIRIERGIFQGDSLSPLWFCLALNPLSALLRDSKLGFQFHRASEIISHLLYMDDLKLFASNKQDLVSLLNITQIFSNDIRMEFGVDKCAAIHVQRGKVVNSENLQFSETLTFKSLSETETYKYLGMSECLCIPGGDIKQMVTERFFGRLTKVLKSFLSGGNKVRAFNSWVMPLLMYTFGILRWTQTELDALDRKVRKMLTTYRMHHPRSSVMRLYIPRKCGGRGFLNAKDLHNREVYSLREYFQKMKCGMHRDVVNADNGLTPLSLAKENWHKPVVLSTQDRLNIWKSKELHGRFHQVLFGPDVDLQASVAWLRFGDLFGETEGFACAIADEVVKTNNYRKYIMKDGTIDICRACHRPGESIRHIISGCFHLANGEYLHRHNQVARIVHQQLALRYGLVCQEVPYYKYTPEPVLENGHAKLYWDRSIITDRTIVANKPDIVLVDRLERRAFIVDITIPCDVNLVKAEKDKQSKYIDLAHEITDMWDVDSTIVVPIVVSVNGLVAKSLNQHLTRLSLHAWIKGRIQKAAILGTARIVRRFLSLSP

SEQ ID NO: 6283 - protein, 1197 aa, Dryas iulia
MITRSKTKGKARPPSQLVAPDGSASSEEEYATPPEYVASSSDDELPPPAPRRAPAPRRGRPPLPRLGSAGQPAQRTSSAVGGAVRRMKWTQSINVNVMRAYYGVTEGGTNLTAYRARLLPLFQTLEPELTVTAQRLSDQVRFIQRNRVLDDATLERLRSEVAVSAPATKPSQPRNQPPPVPAVTGLENGMANVTDVDTTTLSTQEHEQVRITLENAILQYRFALTRDRPSLPRFPTHKRNMALVMTLDALLDPYIRSSQNLADTHSILYCAAVAACRIARVRFPETDSRIRPAGDTPAWQERIERRISATRIIIGKLICFRSGNIRPKIMRCVTQAFAGTGVKPQDYMACVTERIDYLKQKVSAWANRIRRYKERVNRYKQNRIFERDQRKVYRRWQQPASSVIDEHVPDISEMSTFCKSIWSVPVNHTEGEWMSIVKRSCEHIQPMRCIQISPEDVSNAARSTKNWKSPGPDGLHNFWLKYLISSHERLAEQFQEAIEHGTLPPFMTTGITFLLHKSGSTTDPKNFRPITCLPTIYKLLTSILTSKLNKHFEINNILDTAQNGCRVGSRGTKELLLIDMAVCKQVQRSKKNLSATWIDYKKAFDSVPHTWLRRVLELYKVDTDLCTFLESCMGQWTTSLCLSGVGGSLHTSEPVRIERGIFQGDSLSPLWFCLALNPLSALLRDSKLGFQFHRASEIISHLLYMDDLKLFASNKQDLVSLLNITQIFSNDIRMEFGVDKCAAIHVQRGKVVNSENLQFSETMTFKSLSETETYKYLGMSECLCIPGGDIKQMVTERFFGRLTKVLKSFLSGGNKVRAFNSWVMPLLMYTFGILRWTQTELDALDRKVRKMLTTYRMHHPRSSVMRLYIPRKCGGRGFLNAKDLHNREVYSLREYFQKMKCGMHRDVVNADNGLTPLSLAKENWHKPVVLSTQDRLNIWKSKELHGRFHQVLFGPDVDLQASVAWLRFGDLFGETEGFACAIADEVVKTNNYRKYIMKDGTIDICRACHRPGESIRHIISGCFHLANGEYLHRHNQVARIVHQQLALRYGLVCQEVPYYKYTPEPVLENGHAKLYWDRSIITDRTIVANKPDIVLVDRLERRAFIVDITIPCDVNLVKAEKDKQSKYIDLAHEITDMWDVDSTIVVPIVVSVNGLVAKSLNQHLMRLSLHAWIKGRIQKAAILGTARIVRRFLSLSP

SEQ ID NO: 6284 - protein, 1114 aa, Dendrolimus kikuchii
MRWSQQMNESVMRAYFEATDIGTNLTAYRDRMLSLFQVLHPDTTVTAQRLSDQVRAIQRLHLLDESVLDRLRTEVRTSLRVTETSQSPVPQNDHLITLTQVPTVTSEANLGNPSADYVSSQDIEHMRRILEAVIKDFKDVPTLSRPRLPRLPIHRRSLAIIGNMNSLLIPYFELSKDLVETHSILYCGAVAVCQAAGVKFNKNPEPVQNRREKPAWQYRIERRINTARTLIAKLLCFRSGNTRLKIMRFVTQAFAGTNISPNDYKQRVTERIDFLKQKICAWANRIRRYRKRTERFCLNRRFQIDQKGVYRGWGRPDEQGNDGQPPNADDITAFWRGIWSLPVSHTEGNWKSAVEQRCQRIPEMDPVVIEPSDVGYAIGSAHNWKSPGLDGLHNFWIKWFKVSHPCLATQFQEALSTCNIPTFMTTGVTYLLYKSGSTTEPKNYRPITCLPTIYKLLTSILRSKLLKHLVDNKLLAYTQNGCRPGSRGTKELLLIDMTINQQARRNRKNLCTAWVDYKKAYDSVPHTWLMRVLELYKIDVTLRTFLGACMGQWVTRLCMPGGGSLPISDGLIKVERGIFQGDSLSPLWFCLALNPLSYLLEDSKLGFHLRRGSEAISHLLYMDDLKLFASKKHDLLELLNLTKTFSSSIGMEFGVDKCAVMYVQRGRIINSNGLELSEGMCFKTLSEDETYKYLGISQSLGIVDEDMKQLVTVRFFSRLKKVLNCLLSGGNKIRAFNSWVMPSLAYSFGILRWTQTELDALDRRVRCILTTYRMHHPRSSVMRLYIPRKCGGRGFLNAKDLHNREVYNLREYFLKTDESMHRDMVSVDKGFTPLSLAKENWLRPTVLSTSERMDIWKSKELHGRFYQALYGPDIDLPASVNWLRFGDLFGETEGFVCAIMDEVIKTNNYRKYILKDGTLDVCRACHRPGESIRHVTSCCSRLANSEYLHRHNLVARIIHQQLALRYGLIANEVPYYKYAPEPVLENGHITLYWDRSIITDRTIVANKPDIVIIDRSARRTILVDISIPHDCNLVKAETDKLTKYLDLAHEITAMWHMDSTIIVPIVVSVNGLIAKSLDRHLERLSLGKWVKGQMQKAVLLSTARIVRKFLSLEP

SEQ ID NO: 6285 - protein, 1092 aa, Dendrolimus kikuchii
MNIYRVHINNNNNNQVLHPDTTVTAQRLSDQVRAIQRLHLLDESVLDRLRTEVRTSLRVTETSQSPVPQNDHLITLTQVPTVTSEANLGNPSADYVSSQDIEHMRRILEAVIKDFKDVPTLSRPRLPRLPIHRRSLAIIGNMNSLLIPYFELSKDLVETHSILYCGAVAVCQAAGVKFNKNPEPVQNRREKPAWQYRIERRINTARTLIAKLLCFRSGNTRLKIMRFVTQAFAGTNISPNDYKQRVTERIDFLKQKICAWANRIRRYRKRTERFCLNRRFQIDQKGVYRGWGRPDEQGNDGQPPNADDITAFWRGIWSLPVSHTEGNWKSAVEQRCQRIPEMDPVVIEPSDVGYAIGSAHNWKSPGLDGLHNFWIKWFKVSHPCLATQFQEALSTCNIPTFMTTGVTYLLYKSGSTTEPKNYRPITCLPTIYKLLTSILRSKLLKHLVDNKLLAYTQNGCRPGSRGTKELLLIDMTINQQARRNRKNLCTAWVDYKKAYDSVPHTWLMRVLELYKIDVTLRTFLGACMGQWVTRLCMPGGGSLPISDGLIKVERGIFQGDSLSPLWFCLALNPLSYLLEDSKLGFHLRRGSEAISHLLYMDDLKLFASKKHDLLELLNLTKTFSSSIGMEFGVDKCAVMYVQRGRIINSNGLELSEGMCFKTLSEDETYKYLGISQSLGIVDEDMKQLVTVRFFSRLKKVLNCLLSGGNKIRAFNSWVMPSLAYSFGILRWTQTELDALDRRVRCILTTYRMHHPRSSVMRLYIPRKCGGRGFLNAKDLHNREVYNLREYFLKTDESMHRDMVSVDKGFTPLSLAKENWLRPTVLSTSERMDIWKSKELHGRFYRALYGPDIDLPASVNWLRFGDLFGETEGFVCAIMDEVIKTNNYRKYILKDGTLDVCRACHRPGESIRHVTSCCSRLANSEYLHRHNLVARIIHQQLALRYGLIANEVPYYKYAPEPVLENGHITLYWDRSIITDRTIVANKPDIVIIDRSARRTILVDISIPHDCNLIKAETDKLTKYLDLAHEITAMWHMDSTIIVPIVVSVNGLIAKSLDRHLERLSLGKWVKGQMQKAVLLSTARIVRKFLSLEP

SEQ ID NO: 6286 - protein, 1114 aa, Dendrolimus kikuchii
MRWSQQMNESVMRAYFEATDIGTNLTAYRDRMLSLFQVLHPDTTVTAQRLSDQVRAIQRLHLLDESVLDRLRTEVRTSLRVTETSQSPVPQNDHLITLTQVPTVTSEANLGNPSADYVSSQDIEHMRRILEAVIKDFKDVPTLSRPRLPRLPIHRRSLAIIGNMNSLLIPYFELSKDLVETHSILYCGAVAVCQAAGVKFNKNPEPVQNRREKPAWQYRIERRINTARTLIAKLLCFRSGNTRLKIMRFVTQAFAGTNISPNDYKQRVTERIDFLKQKICAWANRIRRYRKRTERFCLNRRFQIDQKGVYRGWGRPDEQGNDGQPPNADDITAFWRGIWSLPVSHTEGNWKSAVEQRCQRIPEMDPVVIEPSDVGYAIGSAHNWKSPGLDGLHNFWIKWFKVSHPCLATQFQEALSTCNIPTFMTTGVTYLLYKSGSTTEPKNYRPITCLPTIYKLLTSILRSKLLKHLVDNKLLAYTQNGCRPGSRGTKELLLIDMTINQQARRNRKNLCTAWVDYKKAYDSVPHTWLMRVLELYKIDVTLRTFLGACMGQWVTRLCMPGGGSLPISDGLIKVERGIFQGDSLSPLWFCLALNPLSYLLEDSKLGFHLRRGSEAISHLLYMDDLKLFASKKHDLLELLNLTKTFSSSIGMEFGVDKCAVMYVQRGRIINSNGLELSEGMCFKTLSEDETYKYLGISQSLGIVDEDMKQLVTVRFFSRLKKVLNCLLSGGNKIRAFNSWVMPSLAYSFGILRWTQTELDALDRRVRCILTTYRMHHPRSSVMRLYIPRKCGGRGFLNAKDLHNREVYNLREYFLKTDESMHRDMVSVDKGFTPLSLAKENWLRPTVLSTSERMDIWKSKELHGRFYRALYGPDIDLPASVNWLRFGDLFGETEGFVCAIMDEVIKTNNYRKYILKDGTLDVCRACHRPGESIRHVTSCCSRLANSEYLHRHNLVARIIHQQLALRYGLIANEVPYYKYAPEPVLENGHITLYWDRSIITDRTIVANKPDIVIIDRSARRTILVDISIPHDCNLVKAETDKLTKYLDLAHEITAMWHMDSTIIVPIVVSVNGLIAKSLDRHLERLSLGKWVKGQMQKAVLLSTARIVRKFLSLEP

SEQ ID NO: 6287 - protein, 1114 aa, Dendrolimus kikuchii
MRWSQQMNESVMRAYFEATDIGTNLTAYRDRMLSLFQVLHPDTTVTAQRLSDQVRAIQRLHLLDESVLDRLRTEVRTSLRVTETSQSPVPQNDHLITLTQVPTVTSEANLGNPSADYVSSQDIEHMRRILEAVIKDFKDVPTLSRPRLPRLPIHRRSLAIIGNMNSLLIPYFELSKDLVETHSILYCGAVAVCQAAGVKFNKNPEPVQNRREKPAWQYRIERRINTARTLIAKLLCFRSGNTRLKIMRFVTQAFAGTNISPNDYKQRVTERIDFLKQKICAWANRIRRYRKRTERFCLNRRFQIDQKGVYRGWGRPDEQGNDGQPPNADDITAFWRGIWSLPVSHTEGNWKSAVEQRCQRIPEMDPVVIEPSDVGYAIGSAHNWKSPGLDGLHNFWIKWFKVSHPCLATQFQEALSTCNIPTFMTTGVTYLLYKSGSTTEPKNYRPITCLPTIYKLLTSILRSKLLKHLVDNKLLAYTQNGCRPGSRGTKELLLIDMTINQQARRNRKNLCTAWVDYKKAYDSVPHTWLMRVLELYKIDVTLRTFLGACMGQWVTRLCMPGGGSLPISDGLIKVERGIFQGDSLSPLWFCLALNPLSYLLEDSKLGFHLRRGSEAISHLLYMDDLKLFASKKHDLLELLNLTKTFSSSIGMEFGVDKCAVMYVQRGRIINSNGLELSEGMCFKTLSEDETYKYLGISQSLGIVDEDMKQLVTVRFFSRLKKVLNCLLSGGNKIRAFNSWVMPSLAYSFGILRWTQTELDALDRRVRCILTTYRMHHPRSSVMRLYIPRKCGGRGFLNAKDLHNREVYNLREYFLKTDESMHRDMVSVDKGFTPLSLAKENWLRPTVLSTSERMDIWKSKELHGRFYQALYGPDIDLPASVNWLRFGDLFGETEGFVCAIMDEVIKTNNYRKYILKDGTLDVCRACHRPGESIRHVTSCCSRLANSEYLHRHNLVARIIHQQLALRYGLIANEVPYYKYAPEPVLENGHITLYWDRSIITDRTIVANKPDIVIIDRSARRTMLVDISIPHDCNLVKAETDKLTKYLDLAHEITAMWHMDSTIIVPIVVSVNGLIAKSLDRHLERLSLGKWVKGQMQKAVLLSTARIVRKFLSLEP

SEQ ID NO: 6288 - protein, 1114 aa, Dendrolimus kikuchii
MRWSQQMNESVMRAYFEATDIGTNLTAYRDRMLSLFQVLHPDTTVTAQRLSDQVRAIQRLHLLDESVLDRLRTEVRTSLRVTETSQSPVPQNDHLITLTQVPTVTSEANLGNPSADYVSSQDIEHMRRILEAVIKDFKDVPTLSRPRLPRLPIHRRSLAIIGNMNSLLIPYFELSKDLVETHSILYCGAVAVCQAAGVKFNKNPEPVHNRREKPAWQYRIERRINTARTLIAKLLCFRSGNTRLKIMRFVTQAFAGTNISPNDYKQRVTERIDFLKQKICAWANRIRRYRKRTERFCLNRRFQIDQKGVYRGWGRPDEQGNDGQPPNADDITAFWRGIWSLPVSHTEGNWKSAVEQRCQRIPEMDPVVIEPSDVGYAIGSAHNWKSPGLDGLHNFWIKWFKVSHPCLATQFQEALSTCNIPTFMTTGVTYLLYKSGSTTEPKNYRPITCLPTIYKLLTSILRSKLLKHLVDNKLLAYTQNGCRPGSRGTKELLLIDMTINQQARRNRKNLCTAWVDYKKAYDSVPHTWLMRVLELYKIDVTLRTFLGACMGQWVTRLCMPGGGSLPISDGLIKVERGIFQGDSLSPLWFCLALNPLSYLLEDSKLGFHLRRGSEAISHLLYMDDLKLFASKKHDLLELLNLTKTFSSSIGMEFGVDKCAVMYVQRGRIINSNGLELSEGMCFKTLSEDETYKYLGISQSLGIVDEDMKQLVTVRFFSRLKKVLNCLLSGGNKIRAFNSWVMPSLAYSFGILRWTQTELDALDRRVRCILTTYRMHHPRSSVMRLYIPRKCGGRGFLNAKDLHNREVYNLREYFLKTDESMHRDMVSVDKGFTPLSLAKENWLRPTVLSTSERMDIWKSKELHGRFYQALYGPDIDLPASVNWLRFGDLFGETEGFVCAIMDEVIKTNNYRKYILKDGTLDVCRACHRPGESIRHVTSCCSRLANSEYLHRHNLVARIIHQQLALRYGLIANEVPYYKYAPEPVLENGHITLYWDRSIITDRTIVANKPDIVIIDRSARRTILVDISIPHDCNLVKAETDKLTKYLDLAHEITAMWHMDSTIIVPIVVSVNGLIAKSLDRHLERLSLGKWVKGQMQKAVLLSTARIVRKFLSLEP

SEQ ID NO: 6289 - protein, 989 aa, Dendrolimus kikuchii
MRRILEAVIKDFKDVPTLSRPRLPRLPIHRRSLAIIGNMNSLLIPYFELSKDLVETHSILYCGAVAVCQAAGVKFNKNPEPVQNRREKPAWQYRIERRINTARTLIAKLLCFRSGNTRLKIMRFVTQAFAGTNISPNDYKQRVTERIDFLKQKICAWANRIRRYRKRTERFCLNRRFQIDQKGVYRGWGRPDEQGNDGQLPNADDITAFWRGIWSLPVNHTEGNWKSAVEQRCQRIPEMDPVVIEPSDVGYAIGSAHNWKSPGLDGLHNFWIKWFKVSHPCLATQFQEALSTCNIPTFMTTGVTYLLYKSGSTTEPKNYRPITCLPTIYKLLTSILRSKLLKHLVDNKLLAYTQNGCRPGSRGTKELLLIDMTINQQARRNRKNLCTAWVDYKKAYDSVPHTWLMRVLELYKIDVTLRTFLGACMGQWVTRLCMPGGGSLPISDGLIKVERGIFQGDSLSPLWFCLALNPLSYLLEDSRLGFHLRRGSEAISHLLYMDDLKLFASKKHDLLELLNLTETFSSSIGMEFGVDKCAVMYVQRGRVVNSNGLQLSEGVCFKTLSEDETYKYLGISQSLGIVDEDVKQLIKERFFSRLKKVLNCLLSGGNKIRAFNSWVMPSLAYSFGILRWTQTELDALDRRVRCILTTYRMHHPRSSVMRLYIPRKCGGRGFLNAKDLHNREVYNLREYFLKTDESMHRDMVSVDKGFTPLSLAKENWLRPTVLSTSERMDIWKSKELHGRFYQALYGPDIDLPASVNWLRFGDLFGETEGFVCAIMDEVIKTNNYRKYILKDGTLDVCRACHRPGESIRHVTSCCSRLANSEYLHRHNLVARIIHQQLALRYGLIANEVPYYKYAPEPVLENGHITLYWDRSIITDRTIVANKPDIVIIDRSARRTMLVDISIPHDCNLVKAETDKLTKYLDLAHEITAMWHMDSTIIVPIVVSVNGLIAKSLDRHLERLSLGKWVKGQMQKAVLLSTARIVRKFLSLEP

SEQ ID NO: 6290 - protein, 912 aa, Notocelia uddmanniana
MYCGAIAACRVARVKFPDADRAPRTAGSVPTWQVRIERRVDTYRTLIAKLICFRGGNSRPRVMRFVNQAFAGTGIRPRDYMTCVTERIDFLKQKVYAWASRIRRYREHLDRYQQNRLFQSDQRKVYRKWDGTDHRVSDGQRPNATAMVMFWRSIWSVPVEHNEGAWMGVVERECESIEPMGSVTISPADVSCAIRTAPNWKSPGPDGLHNFWLKWFRCSHARLAAQFQQALELGSLPPPLTTGVTSLLYKSGSTTEAKNYRPITCLPTLYKLLTSILRAKINTHIVTNNILAPAQNGCRVGSRGTKELLLIDMTICQRVRRNRGTLSTAWIDYKKAYDSVPHSWLRRILELYKVDAVLRSFLVACMGQWTTVLRQPGGGEGPSGPQDSIRIERGIFQGDSLSPLWFCLALNPLSTLLKDSGLGCQLRREGEVISHLLYMDDLKLFAPNKHDLLELLKTTEAFSSAIKMEFGVDKCAAMHVQRGKVVNSTNLQISETMDLRSLSEAETYKYLGMSQSLGIEGGDIKRAVKERFFCRLTKVLNSFLSGGKLRWTQTELDFLDRRVRVLLAAHRMLHPRSSVMRLYIPRKFGGRGFLNAKDLHNREVCSLRDYFLNSECGMHRDVVAVDASFTPLSMANENWRRLKVLSTEDRRAVWRSKELHGRIYKALTGPDVDLLASVNWLRFGDLFAEIEGFVCAIADEVMMTNNYRKYILKDGTVDICRACRRPGESLRHIISGCGHLANGEYLHRHNLVAKIIHQQLALLYGLVDFEVPYYKYTPAPVLENGCATLYWDRSVITDRTIIANKPDIVLTDRLKRQAVLVDITIPHDENLVKAEKDKVSKYLDLAHEVTAMWDVDSTIIVPIVVSANGLIAKSLDQHLKRLSLDGWVKGQMQKAVLLDTARIVRRVLSLSP

SEQ ID NO: 6291 - protein, 1118 aa, Ephestia elutella
MTWTTSINENVMRAYFGATEGGSNLSAYRARMLPLFQALEPTVNVSAQRLSDQVRAIQRCRMLDMPTLERLRQEAQPVPTIIVANSQTRREPVVMSNTQNSSSLQVDDVPAQNDCGNTNVSTQNNEQLRSALDDAIHLYRSVPASQRPRLPRLPMHKKNILLMGALDRLLDPYLESSQDLADTHSILYCAAIAACRVAQVKFPDSNRSPRQVTETPAWQLRIERRITTARTLIAKLICFRSGNNRPRVMRFVTQAFVGTNIQPRDYMLWVTERIDFLKQKIYAWANRIRRFRERVDRYRQNRIFQCDQRKVYREWESPANSVVDRQLPSDQNIIHFWQSIWSVPVDHTEDAWIDVVRGACDSMDTMEPVIISADDVSCAIRSAHNWKTPGPDGLHNFWLKWFHRSHAVLATQFQNSIEAGSLPAFMTTGITFLLYKNGSTTEAKNYRPVTCLPTLYKLLTSILTSKINQHVDNNNIMAIVQNGCRAGSRGTKELLLIDKTICQQVRRNRKNLSVAWIDYKKAYDSVPHSWLRRVLELYKLDTTLCTFLNTCMGQWTTVLCRPGGGVSSCLTDPIRIQRGIFQGDSLSPLWFCLALNPLSTLLKDSGLGIRLRRGGEIISHLLYMDDLKLFAPKKPDLLRMLKITENFSTSIGMEFGVDKCAVMHVERGRVANSDGLQLSEMMTLRSLSEVETYKYLGMPESLGISDGDIKQSVRERFFGRLKKVLKSVLSGGNKVRAFNGWVMPLLIYTFGILKWTQTELDALDVKVRKLLTTYRMYHPRSSVMIMRLYIPRKCGGRGFLNAKNLHNREVCNLREYFLSRESGLHRDVVTVDNGFTPLSMANRNWRKPQVLTTQSRIDVWKSKELHGRFYRVLHGPDVDLLASVAWLRFGDLFGETEGFACAIMDEVIKTNNYRKYILKDGTVDICRACHHPGESLRHIVSGCSHLANGEYLHRHNQVARIIHQQLALKYGLVGSEVPYYKYAPAPVLENGHVTLYWDRSIITDRTIVANRPDIVIIDRETSRAILVDVTIPHDENLVKAEKEKLSKYLDLAHEVTAMWRVGSTIIVPIVVSVNGLIAKSLDRHLERLSLGSWVKSQIQKAVLLDTARIVRRFLSLEP

SEQ ID NO: 6292 - protein, 1205 aa, Notocelia uddmanniana
MNTRLRSRAEQRARPPSPSAPSSSSPSSSGDEFATAHDTSESSSDERGPSPPPPRPSARRGRRPLPARLEPTGHSAPPTAPASGGVVRRMRWTQEINENCMRAYFGATEGGTNLSAYRVRMLPLFQALEPTISVTAQRLSDQVRVIQRNKRLDDSTLDRLRLEALSARVASTSARDLPAATPVPVPAFDTAPGAPRVDPDADEDYTTQSVSTQTNVQLRRVLDDAIGQYRSTPNSRPRLPRLPVNRRNLALMGALNDLLDPYLQASDDLIDTHSIMYCGAVAACRVARVKFPDADRAPRTVGSIPAWQVRIERRVNTFRTLIAKLICFRGGNSRPRVMRFVNQAFAGTGVRPRDYMACVTERIDFLKQKVHAWASRIRRYRERVDRYQQNRLFQSDQRIPSYWKWDGTDHNVCDGQLPDATAMVNFWRSIWSVPVEHTEGTWMGVVERECEAIEPMGSVTISPEDVSCAIRTAPNWKSPGPDGLHNFWLKWFRCSHARLAAQFQQALELGSLPPPLTTGVTSLLYKSGSTTEAKNYRPITCLPTLYKLLTSILRAKINTHIVANNILAPAQNGCRVGSRGTKELLLVDMTICQRVRRNRGTLSTAWIDYKKAYDSVPHSWLRRILELYKVHAVLRSFLVACMGRWTTFLRQPGGGEGGSQDSIRIERGIFQGDSLSPLWFCLALNPLSTLLKDSGLGCQLRREGEVISHLLYMDDLKLFAPNKHDLLELLKTTETFSSAIKMEFGVDKCAVVHVQRGKVVNSTNLQISETMALRSLSEAETYKYLGMSQSLGIESGDINRAVKERFFCRLTKVLNSFLSGGYKVRAFNAWVMPLLTYSFGILRWTQTELDFMDRRVRVLLTAHRMLHPRSSVMRLYIPRKLGGRGFLNAKDLHNREVCSLRDYFINSDCGMHRDVVAVDASFTPLSMANKNWRRLQVLSTEDHRAVWKRKELHGRFYKALTGPDVDLLASVNWLRFEDLFAETEGFVCAIADEVIMTNNYRRYILKDGTVDICRACRRPGESLRHIISGCGHLANGEYLHRHNLVAKIIHQQLALLYGLVDFEVPYYKYTPAPVLENGHATLYWDRSVITDRTIIANKPDIVLTDRLKRQAVLVDITVPHDENLVKAEKDKASKYLDLAHEITAMWDVDSTIIVPIVVSANGLIAKSLDQHLKRLLLDGWVKGQIQKAVLLDTARIVRRFLSLSP

SEQ ID NO: 6293 - protein, 865 aa, Notocelia uddmanniana
MRFVNQAFAGTGVRPRDYVTCVTERIDFLKQKVYAWAGRIRRYRERVDRYQQNRLFQSDQRKVYRKWEGTDHRVCDGQRPDATAMGNFWRSIWSVPVEHTEGAWIGVVERECESIEPMGSVTISPEDISCAIRTAPNWKSLGPDGLHNFWLKWFRCSHERLATQFQQALELGSLPHLLTTGVTSLLYKSGSTTEAKNYRPITCLPTLYKLLTSILRAKINTHIVANNILAPAQNGCRVGSRGTKELLLIDMTICQRVRRSRGALSAAWIDYKKAYDSVPHSWLRRILELYKVDAALRSFLSACMGQWTTVLRQPGGGDGSSGPQDSIRIERGIFQGDSLSPLWFCLALNPLSTLLKDSGLGCQLRRGDEVISHLLHMDDLKLFAPNRQDLLELLKTTEVFSSAIKMEFGVDKCAVMHVQRGKIVNSTNLQLSETMSLRSLSEAETYKYLGMSQSLGIEGEGIKQAVKERFFCRLTKVLNSFLSGGNKVRAFNAWVMPLLTYSFGILRWTQTELDALDRRVRVLLTAHRMLHPRSSVMRLYIPRKCGRRGFLNAKDLHNREVCSLRDYFLNSKCGMHRDVVAVDASFTPLSMANENWRRFKVLSTEDRKAEWKSRELHGRFYKALTGPDVDLLASVNWLRFGETEGFVCAIADEVIMTNNYRKYILKDGTVDIWRACRRPGESLRHIISGCGHLANGEYLHRHNLVARIIHQQLALSYGLVNFEVPYYKYLPAPVLENGRATLYWDRSIITDRTIVANKPDIVLIDRSKRQAVLVDITIPHDENLVKAEKDKVSKYLDLAHEVTAMWDVDSTIIVPIVVSANGLIAKSLDQHLKRLSLDGWVKGQIQKAVLLDTARIVRRFLSLSP

SEQ ID NO: 6294 - protein, 1116 aa, Gomalia elma
MRWSQAINESVMRAYFEATEVGTNLTAYRDRMLSLFQALQPETNVTAQRLSDQVRAIQRLNLLDEPTLDRLRTEVRAIRGAIETPSPPITVHPHNVGGLVTSSTANAAETSNPTVGIVNSPDYEPIRRTLEEAIEEYKYQPTLNRPRLPRLPTHKHNLRLMGVVDSLLVPYFAASNDLVESHSILYCGAVTVCRASGTKFPNLERRPQYIGDRPAWQKRIECRINKARTLIAKLTCFRTGNNRPRVMRFVTQAFAGTNVRPSEYLARVTERIDFYKQKVCAWANRIRRYKERAGRYNLNRLFQRDQKRVYKGWEQPSDSMGGGHGPDVNSMTSFWSDIWSVPASHDEGDWIRVVERECEAVQEMEHLALEPLDIECAIRTASNWKSPGLDGLHNFWIKWFKSSHCRLAAQFQEAINNSSLPSFMTTGVTHLLHKSGSTTEAKNYRPITCLPTIYKLLTSVLRSKLMLFLKNNNILANTQNGCKEGSRGTKELLLIDMAISHQVRRSRKNLSVSWIDYKKAYDSVPHTWLRRILELYKINTKIREFLSTCMEQWVTILRHPGDTGVSALNDPIRIKRGIFQGDSLSPLWFCLALNPLSTLLRNSKLGFQLRRGGEAISHLMYMDDVKLFASKKSDLIELLKITETFSNSISMEFGVDKCAVMHVQRGRIVNSENLQISENISLKSLSQDETYKYLGMAESLGIPDADVKKVVKDRFYSRLRKVLTSLLSGGNKVRAFNTWVLPALAYSFGILRWTQTELDALDRRVRCLLTAHRMHHPRSSVMRLYIPRKLGGRGFLNVKDFHNREMYNLREYFLKAGENVGMHHDVVSVDKGLTPLSLSKQNWQKPLVLGASDRVDVWKTKELHGRFYQALVGPDVDLSASVNWLRFGDLFGETEGFVCAIMDEVIKTNNYRKYILKDGTVDVCRACHRPGESIRHVTSGCSRLANCEYLHRHNLVASIIHQQLALRYGLIDLEVPYYQYKPEPVLDNGQYLLYWDRSIITDRTIVANKPDIVILDRSARRAIIIDVAVPHDSNLVNAEKEKQIKYIDLAHEVTAMWCLESTIIVPIVVSVNGLIAKSLNHHLERLSLGLWVRGRIQKAAILDTARIVRRFLTLQP

SEQ ID NO: 6295 - protein, 872 aa, Erannis defoliaria
MRFVTQAFAGTGIRPQQYMANVTERIDYLKQKVYAWANRIRRYRERVDRYWQNRLFQSDQRKVYRNWEGNEQRVSDGQLPDASAMTNFWRGIWSVPVEHTEGDWMRVVERECESIEPMGSILIDPVDVSCAIRTAQNWKSPGPDGLHNFWIKWFRCSHDRLATQFQEALELGSLPSFMTTGVTFLLHKSGSTTEPKNYRPITCLPTIYKLLTSILSTKINAHIVANNVLAPAQNGCRVGSRGTKELLLIDMAISQQVRRNKGALSAAWIDYKKAYDSVPHSWLERILELYQIDATLKSFLGACMRQWTTVLRQPGGGNGSSDSQDLIRIERGIFQGDSLSPSWFCLALNPLSTLLKDSGLGYRLRRGGEVISHLLYMDDLKLFAPKHQDLLELLKTTQVFSSAISMEFGVDKCAVMRVQRGKVVNSPDLQLSEIMTLRSLSEAETYKYLGMSESLGISVVDIKKSVKERFFCRLTKVLNSLLSGGNKARAFNGWVMPLLIPERSTFGILRWTQTELDALDRRVRQLLTAHRMLHPRSSVMRLYIPRKWGGRGFLNAKNLHNREVCSLRDYFLNNECGMHRDVVTVDKGLTPLSLANENWRTPSVLSTDDRKEVWKSKELHGRFYRVLSGPDVDLLASVNWLRFGDLFGETEGFACAIADEVIKTNNYRKYIMKDGTVDICRACHRPGESLRHIISGCSHLANGEYLHRHNQVARIIHQQLALQYGLVESEVPYYKYAPAPVLENGRALLYWDRSIITDRTIVANKPDIVMVDRSQRRAVLVDVAIPHDENLVKAEKDKLSKYLDLAFEITAMWDVDSTIIVPIVVSANGLIAKSLDQYLKRLSLDGWVKGQIQKAVVLDTARIVRRFLTLQP

SEQ ID NO: 6296 - protein, 1205 aa, Notocelia uddmanniana
MITRTRSRAAQRARPPSPPAPSSSSPSSSGDEFATAPDTSESSCDERGPPSPPPRPPARRGRPPLPARLGPVGHSALPTAPAAGGVVRRMRWTQEMNENCMRAYFGATEGETNLSAYRVRMLPLFQALEPTITVTAQRLSDQVRVIQRLKRLDDVTLDRLRLEALSARTASALARDPPATSPAPVPTPDMAPGVPRVDPSVDEDCANQTVSTQTNEQLRRALEEAITRYRSTPNSRPRLPRLPVNRRNLALMGALNDLLDPYLRASEDLIDTHSILYCGAIAACRVARVKFPDADRAPRTAGGVPAWQVRIERRINTFRTLIAKLICFRGGNDRPRVMRFVNQAFAGTGVRPRDYVTCVTERIDFLKQKVYAWASRIRRYRERVDRYQQNRLFQSDQRKVYRKWEGTDHRVCDGQRPDATAMGNFWRSIWSVPVEHTEGAWIGVVERECESIEPMGSVTISPEDISCAIRTAPNWKSPGPDGLHSFWLKWFRCSHERLATQFQQALELGSLPHLLTTGVTSLLYKSGSTTEAKNYRPITCLPTLYKLLTSILRAKINTHIVANNILAPAQNGCRVGSRGTKELLLIDMTICQRVRRSRGALSAAWIDYKKAYDSVPHSWLRRILELYKVDAALRSFLSACMGQWTTVLRQPGGGDGSSGPQDSIRIERGIFQGDSLSPLWFCLALNPLSTLLKDSGLGCQLRRGGEVISHLLYMDDLKLFAPNRQDLLELLKTTEVFSSAIKMEFGVDKCAVMHVQRGKVVNSTNLQLSETMSLRSLSEAETYKYLGMSQSLGIEGEGIKQAVKERFFCRLTKVLNSFLSGGNKVRAFNAWVMPLLTYSFGILRWTQTELDALDRRVRVLLTAHRMLHPRSSVIRLYIPRKCGGRGFLNAKDLHNREVCSLRDYFLNSECGMHRDVAVDASFTPLSMANENWRRFKVLSTEDRKAEWKSRELHGRFYKALTGPDVDLLASVNWLRFGDLFGETEGFVCAIADEVIMTNNYRKYILKDGTVDICRACRRPGESLRHIISGCGHLANGEYLHRHNLVARIIHQQLAPSYGLVNFEVPYYKYLPAPVLENGRATLYWDRSIITDRTIVANKPDIVLIDRSKRQAVLVDITIPHDENLVKAEKDKVSKYLDLAHEVTTMWDVDSTIIVPIVVSANGLIAKSLDQHLKRLSLDGWVKGQIQKAVLLDTARIVRRFLSLSP

SEQ ID NO: 6297 - protein, 1214 aa, Biston betularia
MWTRSRTAAASGLHDAHIPSPPAPSTPSASSGDEEFATPLATSASSSSSDVSGPRTPAPPPPARRGRPPLPARLGPAGQSASRSALAAGGVVRRMRWSQTNNENCMRAYYGATEGGINLSAYRVRMLPLFQALEPTVAVSTQRLSDQVRAIQRLQLLDQFVLDRLRLEALPARPTPVSTRDSPVASSAPTLVSVPTSMATLATPTDPVVDVGECTSMGVCSQVSEHLRRTLEDAICQYRFAPDSRPRLPRLPTHRRNLALMGALNALLAPYLRASEDLTDTHSILYCGAIAACRVARVKFPDTNSAPRPAGGVPAWQLRIERRISTFRTLIAKLICFSRGNNRPRVMRFVTQAFAGTGIRPQHYLASVTERIDYLKQKVYAWANRIRRYRERADRYWQNRVFQSDQRKVYRDWEGTGQRVSDRQLPDTSVMTEFWRGIWSLPVEHTEGDWMRVVERECESIESMGSVLIDPVDVSCAIRTAQNWKSPGPDGLHNFWIKWIRCSHDRLATQFQEALELGSLPCFMTTGVTFLLHKTGSTTEAKNYRPITCLPTIYKLLTSILRTKINAHVVANNVLAPAQNGCRVGSRGTKELLLIDMTISQQVRRNKGALSTAWIDYKKAYDSVPHSWLERVLELYKIDTTLKSFLGACMRQWTTVLRQPGSGDGSSEPQDLIRIERGIFQGDSLSPLWFCLALNPLSTLLKESGLGHRLRRGGEVISHLLYMDDLKLFAPKRPDLIELLKTTQVFSNAIKMEFGVDKCAVMHVQRGEVVNCPDLQLSETMTFRSLSEAETYKYLGMSESLGIAVVDIKRSVKERFFCRLTKVLNSFLSGGNKVRAFNGWVMPLLIYSFGILRWTQTELDALDRRVRQQLTTHRMLHPRSSVMRLYIPRKLGGRGFLSTKNLHNREVCSLRDYFRDECGMHRDVVAVDKGLTPLSLANENWRKPSVLSTEDRKEVWKSKQLHGRFYRVLTGPDVDMLASVNWLRFGDLFGETEGFACAIADEVIKTNNYRKYIMKDGTVDICRACHRPGESLRHIISGCSHLANGEYLHRHNQVARIIHQQLALQYGLVESEVPYYKYAPAPVLENGRALLYWDRSIITDRTIVANKPDIVVVDRAQRRAVLVDITIPHDENLVKAEKDKLSKYLDLAHEITAMWDVDSTIIVPIVVTVNGLIAKSLDQHLKRLSLDGWVKGQLQKAVILDTARIVRRFLTLQP

SEQ ID NO: 6298 - protein, 953 aa, Notocelia uddmanniana
MGALNDLLAPYLRASEDLIDTHSIMYCGAIAACRVARVKFPDADRAPRPAGSVPTWQVRIERRVDTYRTLIAKLICFRGGNSRPRVMRFVNQAFAGTGVRPRDYMACVTERIDFLKQKVYAWASRIRRYRERLDQYQQNRLFQSDQRKVYRKWDGTDHRVPDGQRPDATAMVNFWRSIWSVPVEHTEGSWIGAVERECESIEPMGSVTIGPEDVSCAIRTAQNWKSPGPDGLHNFWLKWFRCSHARLAAQFQQALELGSLPPPLTTGVTSLLYKSGSTTEAKNYRPITCLPTLYKLLTSILRAKINAHIVANNILAPAQNGCRVGSRGTKELLLIDMTICQQVRRIKGTLSAAWIDYRKAYDSVPHSWLRRVLELYKVDAVLRSFLSACMRQWTTVLRQPGGGDGPSGPQDSIRIERGIFQGDSLSHLWFCLALNPLSTLLKDSGLGCQLRREGEVISHLLYMDDLKLFAPNKHDLLELLKTTEVFSSAIKMEFGVDKCAVMHVQRGKVVNSTNLQLSETTSLRSLSEVDTYKYLGMSQSLGIEGEGIKQAMKERFFCRLTKVLNSLLSGGNKVRAFNAWVMPLLTYSFGILRWTQTELDFLDRRVRVLLTTHLHPRSSVMRLYIPRKLGGRGFLNAKDLHNREVCSLRDYFLNSECGIHRDVVAVDTLLTPLSMAKENWRRLKVLSAGDRRAVWKSKELHGRFYKALTSPDVDLLASVNWLRFGDLFGETEGFVCAIADEVIMTNNYRKYILKDGTVDICRACRRPGESLRHIISGCSHLANGEYLHRHNLVARIIHQQLALLYGLVDFEVPYYKYTPAPVLENGRATLYWDRSVITDRTIIANKPDIVLTERLKRQAVLVDITIPHDENLVKAEKDKSSKYLDLAHEVTAMWDVESTIIVPIVVSANGLIAKSLDQHLKRLSLDGWVKGQIQKAVLLDTARIVRRFLSLSP

SEQ ID NO: 6299 - protein, 870 aa, Notocelia uddmanniana
MRFVNQAFAGTGVRPRDYMACVTERIDFLKQKVYAWASRIRRYRERVDRYQQNRLFQSDQRKVYRKWVGTDHRVCDGQRPDATAMVNFWRSIWSVPVEHTEGAWIGVVERDCESIEPMGSVTISPEDVSCAIRTAPNWKSPGPDGLHNFWLKWFRCSHERLATQFQQALELGSLPPPLTTGVTSLLYKSGSTTEAKNYRPITCLPTLYKLLTSILRAKINTHIVTNNILAPAQNGCRVGSRGTKELLLIDMTICQRVRRNRGTLSASWIDYKKAYDSVPHSWLRRILELYKVDAALRSFLSACMGQWTTVLRQPGGGDGPSGPQDSIRIERRIFQGDSLSPLWFCLALNPLSTLLQDSGLGCQLRRGGEVISHLLYMDDLKLFAPNRQDLLELLKTTEVFSSAIKMEFGVDKCAVMHVQRGKVVNSTNLQLSETMSLRSLSEAETYKYLGMSQALGIEGEGIKQAVKERFFCRLTKVLNSFLSGGNKARAFNAWVMPLLTYSFGILRWTQTELDALDRRVRVLLTAHRMLHPRSSVMRLYIPRKCGGRGFLNAKDLHNREVCSLRDYFPLNSECGMHRDVVAVDASFTPLSMANENWRRFKVLSTEDRRAEWKSKELHGRFYRALTGPDVDLLASVNWLRFGDLFGETEGFVCAIADEVIMTNNYRKYILKDGTVDICRACRRPGESLRHIISGCSHLANGEYLHRHNLVARIIHQQLALSYGLVDFEVPYYKYLPAPVLENGRATLYWDRSIITDRTIVANKPDIVLIDRSKRQAVLVDITILHDENLVKAEKDKVSKYLDLAHEVTAMWDVDSTIIVPIVVSANGLIAKSLDQHLKRLSLDGWVKGQIQKAVLLDTARIVRRFLSLSP

SEQ ID NO: 6300 - protein, 1208 aa, Erannis defoliaria
MITRSKKRNAAVQHARPTPPPVPSSSPSSSSPSEEEFHTCGTSSSSEDVSGPRTLTPPIPVRRGRPPLPARLGPAGQPASRPALAAGGVVRRMRWSQTNNENCMRAYYGATEGGTNLTAYRVRMLSLFQTLEPTVTVSAQRISDQVRAIQRLNLLDQPLLDRLRLEVQSARPTPASTRDLDVASSAPTLASVPTSAATLATSADPVLDEGDCTGMSVSTQVSEQLRRALEDAIGQYRFALNSRPRLPRLPTHRRNLALMGALNALLAPYLRASEDLTDTHSILYCGAIAACRVARVKFPDTNRAPRPAGDVPAWQLRIERRISTFRTLIAKLICFSRGNNRPRVMRFVTQAFAGTGIRPQQYMASVTERIDYLKQKVYAWANRIRRYRERVDRYWQNRLFQSDQRKVYRNWEGTEQRVSDGQLPDASAMTNFWRGIWSVPVEHTEGDWMRVVERECESIEPMGSILIDPVDVSCAIRTAQNWKSPGPDGLHNFWIKWFRCSHDRLATQFQEALELGSLPSFMTTGVTFLLHKSGSTTEPKNYRPITCLPTIYKLLTSILSTKINAHIVANNVLAPAQNGCRVGSRGTKELLLIDMAISQQVRRNKGALSAAWIDYKKAYDSVPHSWLERILELYQIDTTLKSFLGACMRQWTTVLRQPGGGNGSSDSQDLIRIERGIFQGDSLSPSWFCLALNPLSTRLGYRLRRGGEVISHLLYMDDLKLFAPKHQDLLELLKTTQVFSSAIRMEFGVDKCAVMRVQRGKVVNSPDLQLSEIMTLRSLSEAETYKYLGMSESLGISVVDIKKSVKERFFCRLTKVLNSLLSGGNKARAFNGWVMPLLIYSFGILRWTQTELDALDRRVRQLLTAHRMLHPRSSVMRLYIPRKWAGRGFLNAKNLHNREVCSLRDYFLNNECGMHRDVVTVDKGLTPLSLANENWRRPSVISTDDRKEVWKSKELHGRFYRALTGPDVDLLASANWLRFGDLFGETEGFACAIADEVIKTNNYRKYIMKDGTVDICRACHRPGESLRHIISGCSHLANGQYLHRHNQVARIIHQQLALQYGLVESEVPYYKYAPAPVLENGRALLYWDRSIITDRTIVANKPDIVMVDRSQRRAVLVDVTIPHDENLVKAEKDKLSKYLDLAFEITAMWDVDSTIIVPIVVSANGLIAKSLDQYLKRLSLDGWVKGQIQRAVVLDTAHIVRRFLTLQP

SEQ ID NO: 6301 - protein, 1219 aa, Notocelia uddmanniana
MITRSKARLEKKASNPQSARPPPSPASSSSASSSEEFATAPDTSSSSSSDECGPPPPPPRPPARRGRPPLPARLGPAGHPAPPTAPATGGIVRRMQWSQSINENCMRAYYGATDGGTNLSAYRDRMLPLFRALEPAISVSAQRLSDQVRVIQRLKRLDDATLDRLRLEALSARAASASARNLSATLPAPVPALDTAPGADSSADEGCANQSVSSQAYEQLRRALEEAITQYRSTPNSRPRLPRLPVNRRNLTLMGALNDLLVPYLGASEDLIDSHSIMYCGAIAACRVARVKFPDADRAPRTAGSVPTWQVRIERRVDTYRTLIAKLICFRGGNSRPRVMRFVNQAFAGTGIRPRDYMTCVTERIDFLKQKVYAWASRIRRYRERLDRYQQNRLFQSDQRKVYRKWDGTDHRVSDGQRPDATAMVNFWRSIWSVPVEHNEGAWMGVVERECESIEPMGSVTISPADVSCAIRTAPNWKSPGPDGLHNFWLKWFRCSHARLAAQFQQALELGSLPPPLTTGVTSLLYKSGSTTEAKNYRPITCLPTLYKLLTSILRAKINTHIVANNILAPAQNGCRVGSRGTKELLLIDICQRVRRNRGTLSTAWIDYKKAYDSVPHSLLRRILELYKVDAVLRFFLVACMGQWTTVLRQPGGGEGPSGPQDSIRIERGIFQGDSLSPLWFCLALNPLSTLLKDSGLGCQLRREGEVISHLLYMDDLKLFAPNKHDLLELLKTTEAFSSAIKMEFGVDKCAAMHVQRGKVVNSTNLQISETMDLRSLSEAETYKYLGMSQSLGIEGGDIKRAVKERFFCRLTKVLNSFLSGGNRVRAFNAWVMPLLTYSFGILRWTQTELDFLDRRVRVLLTAHRMLHPRSSVMRLYIPRKFGGRGFLNAKDLHNREVCSLRDYFLNSECGMHRDVVAVDASFTPLSMANENWRRLKVLSTEDRRAVWKSKELHGRFYKALTGPDVDLLASVNWLRFGDLFAETEGFVCAIADEVIMTNNYRKYILKDGTVDICRACRRPGESLRHIISGCGHLANGEYLHRHNLVAKIIHQQLALLYGLVNFEVPYYKYTPAPVLENGRATLYWDRSVITDRTIIANKPDIVLTDRLKRQAVLVDITIPHDENLVKAEKDKASKYLDLAHEITAMWDVDSTIIVPIVVSANGLIAKSLDQHLKRLSLDGWVKGQIQKAPGHGANSQEVPLSVALTTGSLGPASLPAAP

SEQ ID NO: 6302 - protein, 1212 aa, Pammene fasciana
MITRSRTKAASTNARPPSSPASSVSSPSSSGDEFATAPDTSESSDECGPPPPPPRPPARRGRPPLPARLGLAGHPVPPRAPAAGGIVRRMRWTPAMNENVMRAYYGATEGGTNLSAYRDRILPLFQALEPTIDTTAQRLSDQVRAIQRLKRLDDATLDRLRLEALSARADSTSVRDPPATSPDPMPVPDLASGAPRIDPSADEEYIASQSMSSTANEQLRRTLEEAITQYRSTNIPRPRLPRLPMNRRNLALMGALNDLLDPILWTSKDLDDTHSIMYCGAIAACRVARVKFPDAERAPRTAGGVPVWQVRIERRINSFRTLIAKLICFRGGNNRPRVMRFVHQAFAGTGIEPRDYMANVTERIDFLKQKVYAWASRIRRYRERVDRFRQNRLFQSDQRKVYRRWEEADPRVSDVRLPDATAMTDFWRSIWSAPVEHTEGEWMSVVERECESIEPMGAITISPDDVSCAIRTAQNWKSPGPDGLHNFWLKWFRCSHSRLATQFQQALELGSLPPSLTTGVTFLLYKSGSTTEAKNYRPITCLPTLYKLLTSILRAKINAHIVANNILASSQNGCRVGSRGTKELLLIDMTICQRVRRNRGALSAAWIDYKKAYDSVPHSWLERILELYKVDAALRSFLGACMRQWTTVLRQPGGGDDPPDPHDFIRIERGIFQGDSLSPLWFCLALNPLSTLLKDSGLGCRLRREGEVISHLLYMDDLKLFAPNNRDLNDLMELLKTTEVFSSYIKMEFGVDKCAVMHVQRGKVVNSTNLQLSETMTFRSISESETYKYLGMSQSLGIEDAGIKQALKERFFGRLTKVLNSLLSGGNKVRAFNAWVMPLLTYSFGILRWTQTELDALDRRVRLLLTTHRMLHPRSSVMRLYIPRKCGGRGFLNAKNLHNREVYNLRNYFLNNECGMHRDVVAVDKSLTPLSLANENWRKPVVLSTEDRKAVWKSKELHGRFYGALTGPDVDLLASVNWLRFGDLFGETEGFACAIADEVIMTNNYRRYILKDGTVDICRACRRPGESLRHIISGCSHLANGEYLHRHNLVARIIHQQLALLYGLVDHEVPYYKYTPAPVLENGRATLYWDRSIITDRTIVANKPDIVIIDRSQRRAMLVDITVPCDVNLVKAEKDKSSKYLDLAHEVTAMWEVDSAIIVPIVVSANGLIAKSLDQHLERLSLRDCGWIKGQIQKAVILDTARIVRRFLSLRP

SEQ ID NO: 6303 - protein, 962 aa, Abrostola tripartita
MHNRNRALVCALDSLLPIYFDSSEDLCDTHSIMYCVAVAACRVAHIKFPTNRATRPSNAPPAWQCRIERRIDETRVLIGKLVAFRDGNTRPRVMRFVRRAFSGIEINPLEYLAQVTERIDFLKQKICAWANRIRRYKRRVDRYTQNRLFQRDQKWVYRNWERPDNGVGDVHLPDDSTTNEFWRSIWSVPVNHTEGDWIGDVEQSCELLPTMPEIIITTQDVASAVRLMSNWKSPGPDELHNFWLKWLHSSHGCLASQFQSALESASLPEFLTTGVTHLLHKSGSITDPKNYRPITCLPTIYKLLTSILKAKICQHNIDNNNIMNVAQNGCRNGSRGTKELLLIDMTINRQVRRNRKDLSACWIDYKKAYDSVPHTWLMRVLELYKINATLRAFLMSCMGQWKTNLKYPGCRQTREYDEPIRIKRGIFQGDSLSPLWFCLALNPLSTLLEGSRLGYRLKRGGQVISHLFYMDDLKLFASNSLQLMDLLKITESFSRSISMEFGADKCALIHVKRGEAVESEGTHLSDSTYLRVLSSTETYKYLGISESLGLKETDMKQLFKERFYGRLKKVLKSLLSGGNKVRAFNSWVMPVLMYSFGILKWTQTELETLDRKVRTTLTTYRMHHPRSSMMRLYIPRKCGGRGLLNAKTLHNREVCNLREYFLKADVGMHRNVVAVDKGLTPLSLSKENWHKPAVLDTNDRREVWQSKELHGRFYRALHGPDVDFLASISWLRFGDLFGETEGFVCAIMDEVMMTNNYRKYILKDGTVDICRACHHPGESIRHIVSGCSSLANGEYLHRHNQVAKIIHQQLALKYDLVESEVPYYRYVPDPVLENSRVTLYWDRSIITDRTIVANKPDIVVIDRSERRTMIVDITIPHDENLVKAEKDKQIKYLDLAHEIVDMWEVDSAIVVPIVVTVNGLMAKSLDHHLKRLALGGWVKGLMQKAVLLDTARIVRRFLSLEP

SEQ ID NO: 6304 - protein, 1191 aa, Abrostola tripartita
MITRSQARKNLNTRPPSSDSSLSSASQPSNRASTANDVIPAAVASSSSDEYFSPPTSPPRRRGRGRPPASLGPRGQPASGRVLAVGGSVQRMRWTQTMNVNFMRAYFGATDGGANLTAYRSRMLAMFQALEPAVNVSTQRLSDQVRAIQRCHLLDDAVLETLRSETQSSRTIPTSSQTMQHHQQQEDEGDDRATTVSTQCNEQLKSTLECALQEYRSTTPELRPRLPRLPMHNRNRALVCALDSLLPIYFDSSEDLCDTHSIMYCAAVAACRVAHIKVPTNRATRPSNAPPAWQCRIERRIDETRVLIGKLVAFRDGNSRPRVMRFVRRAFSGIEINPLEYLAQVTERIDFLKQKICAWANRIRRYKRRVDRYTQNRLFQRDQKWVYRNWERPDNGVGDVHLPDDSTTNEFWRSIWSVPVNHTEGDWIGDVEQSCELLPTMPEIIITTQDVASAVRLMSNWKSPGPDGLHNFWLKWLHSSHGCLASQFQSALESASLPEFLTTGVTHLLHKSGSITDPKNYRPITCLPTIYKLLTSILKAKICQHIDNNNIMNVAQNGCRNGSRGTKELLLIDMTINRQVRRNRKDLSACWIDYKKAYDSVPHTWLMRVLELYKINATLRTFLMSCMGQWKTNLKYPGCRQTREYDQPIRIKRGIFQGDSLSPLWFCLALNPLSTLLEGSRLGYRLKRGGQVISHLFYMDDLKLFASNSLQLMDLLKITESFSRSISMEFGADKCALIHVKRGEVVESEGTHLSDSTYLRALSSTETYKYLGISESLGLKETDMKQLFKERFYGRLKKVLKSLLSGGNKVRAFNSWVMPVLMYSFGILKWTQTELETLDRKVRTTLTTYRMHHPRSSMMRLYIPRKCGGRGLLNAKTLHNREVCNLREYFLKTDVGMHRNVVAVDKGLTPLSLSKENWHKPAVLDTNDRREVWQSKELHGRFYRALHGPDVDFLASISWLRFGDLFGETEGFVCAIMDEVMMTNNYRKYILKDGTVDICRACHRPGESIRHIVSGCSSLANGEYLHRHNQVAKIIHQQLALKYDLVESEVPYYRYVPDPVLENSRVTLYWDRSIITDRTIVANKPDIVVIDRSERRTMIVDITIPHDENLVKAEKDKQIKYLDLAHEIVDMWEVDSAIVVPIVVTVNGLMAKSLDHHLKRLALGGWVKGLMQKAVLLDTARIVRRFLSLEP

SEQ ID NO: 6305 - protein, 1191 aa, Abrostola tripartita
MITRSQARKNLNTRPPSSDSSLSSASQPSNRASTANDVIPAAVASSSSDEYFSPPTSPPRRRGRGRPPASLGPRGQPASGRVLAVGGSVQRMRWTQTMNVNVMRAYFGATDGGANLTAYRSRMLAMFQALEPAVNVSTQRLSDQVRAIQRCHLLDDAVLETLRSETQSSRTIPTSSQTMQHHQQQEDEGDDRATTVSTQCNEQLKSTLECTLQEYRSTTPELRPRLPRLPMHNRNRALVCALDSLLPIYFDSSEDLCDTHSIMYCAAVAACRVAHIKVPTNRATRPSNAPPAWQCRIERRIDETRVLIGKLVAFRDGNSRPRVMRFVRRAFSGIEINPLEYLAQVTERIDFLKQKICAWANRIRRYKRRVDRYTQNRLFQRDQKWVYRHWERPDNGVGDVHLPDDSTTNEFWRSIWSVPVNHTEGDWIGDVEQSCELLPTMPEIIITTQDVASAVRLMSNWKSPGPDGLHNFWLKWLHSSHGCLASQFQSALESASLPEFLTTGVTHLLHKSGSITDPKNYRPITCLPTIYKLLTSILKAKICQHIDNNNIMNVAQNGCRNGSRGTKELLLIDMSINRQVRRNRKDLSACWIDYKKAYDSVPHTWLMRVLELYKINATLRTFLMSCMGQWKTNLKYPGCRQTREYDEPIRIKRGIFQGDSLSPLWFCLALNPLSTLLEGSRLGYRLKRGGQVISHLFYMDDLKLFASNSLQLMDLLKITESFSRSISMEFGADKCALIHVKRGEVVESEGTHLSDSTYLRALSSTETYKYLGISESLGLKETDMKQLFKERFYGRLKKVLKSLLSGGNKVRAFNSWVMPVLMYSFGILKWTQTELETLDRKVRTTLTTYRMHHPRSSMMRLYIPRKCGGRGLLNAKTLHNREVCNLREYFLKTDVGMHRNVVAVDKGLTPLSLSKENWHKPAVLDTNDRREVWQSKELHGRFYRALHGPDVDFLASISWLRFGDLFGETEGFVCAIMDEVMMTNNYRKYILKDGTVDICRACHRPGESIRHIVSGCSSLANGEYLHRHNQVAKIIHQQLALKYDLVESEVPYYRYVPDPVLENSRVTLYWDRSIITDRTIVANKPDIVVIDRSERRTMIVDITIPHDENLVKAEKDKQIKYLDLAHEIVDMWEVDSAIVVPIVVTVNGLMAKSLDHHLKRLALGGWVKGLMQKAVLLDTARIVRRFLSLEP

SEQ ID NO: 6306 - protein, 1191 aa, Abrostola tripartita
MITRSQARKNLNTRPPSSDSSLSSASQPSNRASTANDVIPAAVASSSSDEYFSPPTSPPRRRGRGRPPASLGPRGQPASGRVLAVGGSVQRMRWTQTMNVNVMRAYFGATDGGANLTAYRSRMLAMFQALEPAVNVSTQRLSDQVRAIQRCHLLDDAVLETLRSETQSSRTIPTSSQTMQHHQQQEDEGDDRATTVSTQCNEQLKSTLECALQEYRSTTPELRPRLPRLPMHNRNRALVCALDSLLPIYFDSSEDLCDTHSIMYCAAVAACRVAHIKVPTNRATRPSNAPPAWQCRIERRIDETRVLIGKLVAFRDGNSRPRVMRFVRRAFSGIEINPLEYLAQVTERIDFLKQKICALANRIRRYKRRVDRYTQNRLFQRDQKWVYRNWERPDNGVGDVHLPDDSTTNEFWRSIWSVPVNHTEGDWIGDVEQSCELLPTMPEIIITTQDVASAVRLMSNWKSPGPDGLHNFWLKWLHSSHGCLASQFQSALESASLPEFLTTGVTHLLHKSGSITDPKNYRPITCLPTIYKLLTSILKAKICQHIDNNNIMNVAQNGCRNGSRGTKELLLIDMTINRQVRRNRKDLSACWIDYKKAYDSVPHTWLMRVLELYKINATLRTFLMSCMGQWKTNLKYPGCRQTREYDQPIRIKRGIFQGDSLSPLWFCLALNPLSTLLEGSRLGYRLKRGGQVISHLFYMDDLKLFASNSLQLMDLLKITESFSRSISMEFSADKCALIHVKRGEVVESEGTHLSDSTYLRALSSTETYKYLGISESLGLKETDMKQLFKERFYGRLKKVLKSLLSGGNKVRAFNSWVMPVLMYSFGILKWTQTELETLDRKVRTTLTTYRMHHPRSSMMRLYIPRKCGGRGLLNAKTLHNREVCNLREYFLKTDVGMHRNVVAVDKGLTPLSLSKENWHKPAVLDTNDRREVWQSKELHGRFYRALHGPDVDFLASISWLRFGDLFGETEGFVCAIMDEVMMTNNYRKYILKDGTVDICRACHRPGESIRHIVSGCSSLANGEYLHRHNQVAKIIHQQLALKYDLVESEVPYYRYVPDPVLENSRVTLYWDRSIITDRTIVANKPDIVVIDRSERRTMIVDITIPHDENLVKAEKDKQIKYLDLAHEIVDMWEVDSAIVVPIVVTVNGLMAKSLDHHLKRLALGGWVKGLMQKAVLLDTARIVRRFLSLEP

SEQ ID NO: 6307 - protein, 1191 aa, Abrostola tripartita
MITRSQARKNLNTRPPSSDSSLSSASQPSNRASTANDVIPAAVASSSSDEYFSPPTSPPRRRGRGRPPASLGPRGQPASGRVLAVGGSVQRMRWTQTMNVNVMRAYFGATDGGANLTAYRSRMLAMFQALEPAVNVSTQRLSDQVRAIQRCHLLDDAVLETLRSETQSSRTIPTSSQTMQHHQQQEDEGDDRATTVSTQCNEQLKSTLECALQEYRSTTPELRPRLPRLPMHNRNRALVCALDSLLPIYFDSSEDLCDTHSIMYCAAVAACRVAHIKVPTNRATRPSNAPPAWQCRIERRIDETRVLIGKLVAFRDGNSRPRVMRFVRRAFSGIEINPLEYLAQVTERIDFLKQKICAWANRIRRYKRRVDRYTQNRLFQRDQKWVYRNWERPDNGVGDVHLLDDSTTNEFWRSIWSVPVNHTEGDWIGDVEQSCELLPTMPEIIITTQDVASAVRLMSNWKSPGPDGLHNFWLKWLHSSHGCLASQFQSALESASLPEFLTTGVTHLLHKSGSITDPKNYRPITCLPTIYKLLTSILKAKICQHIDNNNIMNVAQNGCRNGSRGTKELLLIDMTINRQVRRNRKDLSACWIDYKKAYDSVPHTWLMRVLELYKINATLRTFLMSCMGQWKTNLKYPGCRQTREYDQPIRIKRGIFQGDSLSPLWFCLALNPLSTLLEGSRLGYRLKRGGQVISHLFYMDDLKLFASNSLQLMDLLKITESFSRSISMEFGADKCALIHVKRGEVVESEGTHLSDSTYLRALSSTETYKYLGISESLGLKETDMKQLFKERFYGRLKKVLKSLLSGGNKVRAFNSWVMPVLMYSFGILKWTQTELETLDRKVRTTLTTYRMHHPRSSIMRLYIPRKCGGRGLLNAKTLHNREVCNLREYFLKTDVGMHRNVVAVDKGLTPLSLSKENWHKPAVLDTNDRREVWQSKELHGRFYRALHGPDVDFLASISWLRFGDLFGETEGFVCAIMDEVMMTNNYRKYILKDGTVDICRACHRPGESIRHIVSGCSSLANGEYLHRHNQVAKIIHQQLALKYDLVESEVPYYRYVPDPVLENSRVTLYWDRSIITDRTIVANKPDIVVIDRSERRTMIVDITIPHDENLVKAEKDKQIKYLDLAHEIVDMWEVDSAIVVPIVVTVNGLMAKSLDHHLKRLALGGWVKGLMQKAVLLDTARIVRRFLSLEP

SEQ ID NO: 6308 - protein, 1191 aa, Abrostola tripartita
MITRSQARKNLNTRPPSSDSSLSSASQPSNRASTANDVIPAAVASSSSDEYFSPPTSPPRRRGRGRPPASLGPRGQPASGRVLAVGGSVQRMRWTQTMNVNVMRAYFGATDGGANLTAYRSRMLAMFQALEPAVNVSTQRLSDQVRAIQRCHLLDDAVLETLRSETQSSRTIPTSSQTMQHHQQQEDEGDDRATTVSTQCNEQLKSTLECALQEYRSTTPELRPRLPRLPMHNRNRALVCALDSLLPIYFDSSEDLCDTHSIMYCAAVAACRVAHIKVPTNRATRPSNAPPAWQCRIERRIDETRVLIGKLVAFRDGNSRPRVMRFVRRAFSGIEINPLEYLAQVTERIDFLKQKICAWANRIRRYKRRVDRYTQNRLFQRDQKWVYRNWERPDNGVGDVHLPDDSTTNEFWRSIWSVPVNHTEGDWIGDVEQSCELLPTMPEIIITTQDVASAVRLMSNWKSPGPDGLHNFWLKWLHSSHGCLASQFQSALESASLPEFLTTGVTHLLHKSGSITDPKNYRPITCLPTIYKLLTSILKAKICQHIDNNNIMNVAQNGCRNGSRGTKELLLIDMTINRQVRRNRKDLSACWIDYKKAYDSVPHTWLMRVLELYKINATLRTFLMSCMGQWKTNLKYPGCRQTREYDQPIRIKRGIFQGDSLSPLWFCLALNPLSTLLEGSRLGYRLKRGGQVISHLFYMDDLKLFASNSLQLMDLLKITESFSRSISMEFGADKCALIHVKRGEVVESEGTHLSDSTYLRALSSTETYKYLGISESLGLKETDMKQLFKERFYGRLKKVLKSLLSGGNKVRAFNSWVMPVLMYSFGILKWTQTELETLDRKVRTTLTTYRMHHPRSSMMRLYIPRKCGGRGLLNAKTLHNREVCNLREYFLKTDVGMHRNVVAVDKGLTPLSLSKENWHKPAVLDTNDRREVWQSKELHGRFYRALHGPDVDFLASISWLRFGDLFGETEGFVCAIMDEVMMTNNYRKYILKDGTVDICRACHRPGESIRHIVSGCSSLANGEYLHRHNQVAKIIHQQLALKYDLVEPEVPYYRYVPDPVLENSRVTLYWDRSIITDRTIVANKPDIVVIDRSERRTMIVDITIPHDENLVKAEKDKQIKYLDLAHEIVDMWEVDSAIVVPIVVMVNGLMAKSLDHHLKRLALGGWVKGLMQKAVLLDTARIVRRFLSLEP

SEQ ID NO: 6309 - protein, 1105 aa, Heliconius numata
MRWSQQLNESVMRAYYRATEGGTNLTAYRSRLLSMFQELEPTATVTAQRLSDRVRIIQRRHLLDESVLERLRLSFQQVNTTNNNNSCDIRSQFQHANIESQGNIELSVSAQDDERLRRSLKDAILEYGSIPVDLRPKLPRLPMHRRNIALVRILDQHLPSHFNNCNDLTDTHSLLYCGAVAVCSVAGVQFPNKGGTKASKHTVPAWQYDTEKRINLTRILIGKLISFKSGNRRPRVMRFVAEAFAGTNLKPSEYMANVTNRIDFLKQKLYALAKRIRRYKERWDRYNQNSAFQKNQRSVYRKWERSGDSVVNCEIPNPDASADFWRSIWSAPVEHTEGEWFCDIAKNCENIIPMRSITISEIDVRCAIRYASNWKCPGLDGLHNFWLKWFRSSHSVFATQFQDALDSGSLPTFLTTGVTFLSYKSGCTTEPKNYRPITCLPTIYKLLTSILNKKITGHIVRNKILAPTQNGCKAGGRGTKELLLIDTTISQQVRRNRKNLTTAWIDYKKAYDSVPHTWLLKVLELYKIDITLRSFLEACMGQWVTVLRHLGECDIPATSEPIRIKRGIFQGDSLSPLWFCLALNPLSTMLEDSGLGFRLRRGGKVISHLLLYMDDLKLFASKRSDLMRLLKVTQTFSSDIRMEFGVDKCASMHVVRGSVIRSDNICISDSVSFRTLGEGETYKYLGMSEALGIDERSIKQLVKERFFSRLKKVLGSLLSGGNKVRAFNGWVMPLLAYTFGIVRWTQTELDSVDRQIRKLLTTYRMHHPRSSVMRLYIPRKCGGRGFLNVKNLHNHEVCSLREYFLKIDVDMHKDVVTVDKGLTPLSLGKENWRRPVVLTTSDRMAVWKSKELHGRFHRALVGQDVDTVSSLSWLQFGDLFGETEGFVCAIMDEVIKTRNYQRHIMKDGTIDICRACHRPGESLRHIVSGCSHLANGEYLHRHNQVAKIIHQQLALQYGLVELEVPYYRYNPMSVLENSCALLYWDRSIITDRYIVANRPDIVLVDRAARRAVIVDVTIPHDENLVKAEKEKQSKYLDLAHEITAMWDVNATIIVPIVVSVNGLIAKSLDQHLKRLSLSCWIKNRIQKAVLLETARIVRRFLSLEP

SEQ ID NO: 6310 - protein, 1199 aa, Heliconius numata
MPGGQVHSQHHGRRCCPSNPQPPSSEDDYRTAASTAGSEEGMSESEGPALRPRRRADIPPAEGLEPGASRMLNKAPATGGKVPRMRWSQQLNESVMRARRATEGGTNLTAYRSRLLSMFQELEPTATVTAQRLSDRVRIIQRRHLLDESVLERLRLSFQQVNTTNNNSCDIRSQFQHANIESQGNIELSVSAQDDERLRRSLKDAILEYGSIPVDLRPKLPRLPMHRRNIALVRILDQHLPSHFNNCNDLTDTHSLLYCGAVAVCRVAGVQFPNKGGTKASKHTVPAWQYDTEKRINLTRILIGKLISFKSGNRRPRVMRFVAEAFAGTNLKPSEYMANVTNRIDFLKQKLYALAKRIRRYRERWDRYNQNSAFQKNQRSVYRKWERSGDSVVNCEIPNPDASADFWRSIWSAPVEHTEGEWFCDIAKNCENIIPMRSIKISEIDVRCAIRYASNWKCPGLDGLHNFWLKWFRSSHSVFATQFQDALDSGSLPTFLTTGVTFLSYKSGCTTEPKNYRPITCLPTIYKLLTSILNKKITGHIVRNKILAPTQNGCKAGGRGTKELLLIDTTISQQVRRNRKNLTTAWIDYKKAYDSVPHTWLLKVLELYKIDITLRSFLEACMEQWVTVLRHLGECDIPATSEPIRIKRGIFQGDSLSPLWFCLALNPLSTMLEDSGLGFRLRRGGKVISHLLYMDDLKLFASKRSDLMRLLKVTQTFSSDIRMEFGVDKCASMHVVRGSMIRSDNICISDSVSFRTLGEGETYKYLGMSEALGIDERSIKQLVKERFFSRLKKVLGSLLSGGNKVRAFNGWVMPLLAYTFGIVRWTQTELDSVDRQIRKLLTTYRMHHPRSSVMRLYIPRKCGGRGFLNVKNLHNHEVCSLREYFLKIDVDMHKDVVTVDKGLTPLSLGKENWRRPVVLTTSDRMAVWKSKELHGRFHRALVGQDVDTVSSLSWLQFGDLFGETEGFVCAIMDEVIKTRNYQRHIMKDGTIDICRACHRPGESLRHIVSGCSHLANGEYLHRHNQVAKIIHQQLALQYGLVELEVPYYRYNPMSVLENSCALLYWDRSIITDRYIVANRPDIVLVDRAARRAVIVDVTIPHDENLVKAEKEKQSKYLDLAHEITAMWDVNATIIVPIVVSVNGLIAKSLDQHLKRLSLSCWIKNRIQKAVLLETSHRWLGPLSRPRKSGFFIFLNVSFL

SEQ ID NO: 6311 - protein, 1105 aa, Griposia aprilina
MRWTQSINENVMRSYYGATEGGNNLTAYRVRMLSLFQVLEPAVNVSAQRLSDQVRVIQRNHMLDDTVLDRLRSEMQSSHVIAPPSQTVVVLPQPITSHDEGSDDRATNVSTQCNEELRSALEGAIREYRFMSPELRPRLPRLPMHNKNRALVAALDSQLSNYFDDCVDLTDTHSILYCAAVAACRVAHVKFANDSRATRPKPAVPAWQCRIERRIGGARALIGKLICFREGNTRPRVMRFVRRAFAGTDVSPQDYISCVTERIDFLKQKVYAWASRIRRYKRRVERYTQNRTFQRDERWVYRDWERPDQGVADTYLPDDDAMCSFWHNIWSVPVSHTEGDWTREVERACEPIPEMGAITICPQDVARAVRPLPNWKSPGPDGLHNFWIKWFLKSHARLAAQFQAALESGSLPQFLTTGVTHLLHKSGSIAEPKNYRPITCLPTVYKVLTSILRAKINKHIDTNSIMSASQNGCRNGSRGTKELLLIDMAISQQVRRSRKDLSTCWIDYKKAYDSVPHTWLMRVLELYKVDATLRTFLKSCMGQWRTVLRYPTCRNTQRNSEPIRIERGIFQGDSLSPLWFCLALNPLSTLLEDSGLGYRLRRGGRVISHLLYMDDLKLFAPNNLQLIELLKVTETFSSAIRMEFGLDKCAVMHVKRGEIVESVGTKLSDSMNLRALSASETYKYLGMSEALGVNNTDMKQSLKERFFGRLKKVFNSLLSGGNKVRAFNGWVMPVLMYSFGILKWTQTELDTLDRRVRTLLTANRMHHPRSSVMRLYIPRKCGGRGFLNAKSLHNREICSLREYFLEVDVGMHRDVVAVDKGLTPLSLAKENWRKPVVLDTNDRMEVWQSKELHGRFFRALHGPDVDVQASVAWLRFGDLFGETEGFVCAIMDEVMMTNNYRRFIVKDGTVDICRACHRPGESIRHIISGCSRLANEEYLHRHNLVARIIHQQLALKYSLVESEVPYYRYVPDPVLENGTITLYWDRSIITDRTIIANKPDIVLVDRRERRAMIVDITIPHDGNLVKAEKDKQIKYLDLAREVVDMWDVDSAIIVPIVVTANGLIAKSLDQHLRRLSLSSWIKGLIQKAVLLDTARIVRRFLSLEP

SEQ ID NO: 6312 - protein, 1187 aa, Heliconius numata
MPGGQVHSQHHGRRCCPSNPQPPSSEDDYRTAASTAGSEEGISESEGPALRPRRRADIPPAEGLEPGASRMLNKAPATGGKVPRMRWSQQLNESVMRAYYRATEGGTNLTAYRSRLLSMFQELEPTATVTAQRLSDRVRIIQRRHLLDESVLERLRLSFQQVNTTNNNSCDIRSQFQHANIESQGNIELSVSAQDDERLRRSLKDAILEYGSIPVDLRPKLPRLPMHRHNIALVRILDQHLPSHFNNCNDLTDTHSLLYCGAVAVCRVAGVQFPNKGGTKASKHTVPAWQYDTEKRINLTRILIGKLISFKSGNRRPRVMRFVVEAFAGTNLKPSEYMANVTNRIDFLKQKLYALAKRIRRYRERWDRYNQNSAFQKNQRSVYRKWERSGDSVVNCEIPNPDASADFWRSIWSAPVEHTEGEWFCDIAKNCENIIPMRSIKISEIDVWCAIRYASNWKCPGLDGLHNFWLKWFRSSHSVFATQFQDALDSGSLPTFLTTGVTFLSYKSGCTTEPKNYRPITCLPTIYKLLTSILNKKITGHIVRNKILAPTQNGCKAGGRGTKELLLIDTTISQQVRRNRKNLTTAWIDYKKAYDSVPHTWLLKDLELYKIDITLRSFLEACMGQWVTVLRHLGECDIPATSEPIRIKRGIFQGDSLSPLWFCLALNPLSTMLEDSGLGFRLRRGGKVISHLLYMDDLKLFASKRSDLMRLLKVAQTFSSDIRMEFGVDKCASMHVVRGSVIRSDNICISDSVSFRTLGEGETYKYLGMSEALGIDERSIKQLVKERFFSRLKKVLGSLLSGGNKVRAFNGWVMPLLAYTFGIVRWTQTELDSVDRQIRKLLTTYRMHHPRSSVMRLYIPRKCGGRGFLNVKNLHNHEVCSLREYFLKIDVDMHKDVVTVDKGLTPLSLGKENWRRPVVLTTSDRMAVWKSKELHGRFHRALVGQDVDTVSSLSWLQFGDLFGETEGFVCAIMDEVIKTRNYQRHIMKDGTIDICRACHRPGESLRHIVSGCSHLANGEYLHRHNQVAKIIHQQLALQYGLVELEVPYYRYNPMSVLENSCALLYWDRSIITDRYIVANRPDIVLVDRAARRAVIVDVTIPHDENLVKAEKEKQSKYLDLAHEITAMWDVNATIIVPIVVSVNGLIAKSLDQHLKRLSLSCWIKNRIQKAVLLETARIVRRFLSLEP

SEQ ID NO: 6313 - protein, 1109 aa, Vanessa cardui
MRWTQSINENVMRAYYGATEGGTNLTAYRVRMLSLFQALEPAINVSAQRLSDQVRVILRNNRLSDTVLDRIRSETCNSGVTSGPSTPVVEEPLPAIPQGPEHDDEDGGDMAITTSKYSDQLRSALGDAIREYRNTPVELRPRLPRLPMSKRNRDLVCTLDSLLADYFESSENLEDTHSILFCAAVAACRVAGVTFEDSERATRPKAATPAWQSRIEKRISETRVLIGKLYCFKEGNTRPRVMRFVGRAFLGTGIGPQEYPSHVVERIDFLKQKVYAWASRIRRYRRRVDRYYLNRKFQSDQRWVYRTWERLDQGVSDGCRPDDDATNTFWRNIWSVPVDHIEGDWMLEVRQACEPLEVMGKISIASEDVAAAVRSVPNWKSPGPDGLHSFWLKWLRSSHECLAFQFQSALESGSLPQFLTTGVTHLLHKSGSATDPKNYRPITCLPTVYKVLTFILRDKINSHIQNNSILSVSQNGCGDGSRGTKELLLIDMTISQQVRRFRKSLSTCWIDYKKAYDSVPHTWLLRVLELYKLDTTLCSFLRSCMRQWRTVLRYPGYRTIHGDDEPIRIERGIFQGDSLSPLWFCLALNPLSTLLEGSRLGYRLRRGGKVISHLLYMDDLKLFAPSGSQLVELLKVTETFSNSIRMEFGVDKCAVMHVKRGEIMESDGLQLSDSINFKSLSANESYKYLGMSEALGINVTDMKQSLQERFFGRLKKVLKSLLSGGNKVRAFNGWVMPVLMYSFGILKWTQKELDALDRRVRVLLTANRMHHPRSSVMRLYIPRRYGGRGFLNAKTLHNREVYKLSEYFLHTVLDMHRDVVIMDKGLTPLSLGKENWRKPVVLSTENRKEVWKSKELHGRFYRALHGPDVDFMASVSWLRFGNLFGETEGFVCAIMDEVIMTNNYRKYIVRDGTVDICRACHTPGESLRHMISGCSRLANGEYLHRHNQVAKIIHQQLALRYGLVVSEVPYYRYMPDPVLEDGHITLYWDRSIITDRTVVANKPDIVVTDRSERRTIIVDITIPHDENLVKAEKDKQIKYLDLAHEIVDMWDVDTAVIVPIVVSANGLMTKSLDQQLKRLSLGSWVKGLMQKAVLLGTARIVRKFLSLEP

SEQ ID NO: 6314 - protein, 1187 aa, Heliconius numata
MPGGQVHSQHHGRRCCPSNPQPPSSEDDYRTAASTAGSEEGMSESEGPALRPRRRADIPPAEGLEPGASRMLNKAPATGGKVPRMRWSQQLNESVMRAYFRATEGGTNLTAYRSRLLSMFQELEPTATVTAQRLSDRVRIIQRRHLLDESVLERLRLSFQQVNTTNNNSCDIRSQFQHANIESQGNIELSVSAQDDERLRRSLKDAILEYGSIPVDLRPKLPRLPMHRRNIALVRILDQHLPSHFNNCNDLTDTHSLLYCGAVAVCRVAGVQFPNKGGTKASKHTVPAWQYDTEKRINLTRILIGKLISFKSGNRRPRVMRFVAEAFAGTNLKPSEYMANVTNRIDFLKQKLYALAKRIRRYRERWDRYNQNSAFQKNQRSVYRKWERSGDSVVNCEIPNPDASADFWRSIWSAPVEHTEGEWFCDIAKNCENIIPMRSIKISEIDVRCAIRYASNWKCPGLDGLHNFWLKWFRSSHSVFATQFQDALDSGSLPTFLTTGVTFLSYKSGCTTEPKNYRPITCLPTIYKLLTSILNKKITGHIVRNKILAPTQNGCKAGGRGTKELLLIDTTISQQVRRNRKNLTTAWIDYKKAYDSVPHTWLLKVLELYKINITLRSFLEACMGQWVTVLRHLGECDIPATSEPIRIKRGIFQGDSLSPLWFCLALNPLSTMLEDSGLGFRLRRGGKVISHLLYMDDLKLFASKRSDLMRLLKVTQTFSSDIRMEFGVDKCASMHVVRGSVIRSDNICISDSVSFRTLGEGETYKYLGMSEALGIDERSIKQLVKERFFNRLKKVLGSLLSGGNKVRAFNGWVMPLLAYTFGIVRWTQTELDSVDRQIRKLLTTYRMHHPRSSVMRLYIPRKCGGRGFLNVKNLHNHEVCSLREYFLKIDVDMHKDVVTVDKGLTPLSLGKENWRRPVVLTTSDRMAVWKSKELHGRFHRALVGQDVDTVSSLSWLQFGDLFGETEGFVCAIMDEVIKTRNYQRHIMKDGTIDICRACHRPGESLRHIVSGCSHLANGEYLHRHNQVAKIIHQQLALQYGLVELEVPYYRYNPMSVLENSCALLYWDRSIITDRYIVANRPDIVLVDRAARRAVIVDVTIPHDENLVKAEKEKQSKYLDLAHEITAMWDVNATIIVPIVVSVNGLIAKSLDQHLKRLSLSCWIKNRIQKAVLLETARIVRRFLSLEP

SEQ ID NO: 6315 - protein, 1187 aa, Heliconius numata
MPGGQVHSQHHGRRCCPSNPQPPSSEDDYRTAASTAGSEEGISESEGPALRPRRRADIPPAEGLEPGASRMLNKAPATGGKVPRMRWSQQLNESVMRAYYRATEGGTNLTAYRSRLLSMFQELEPTATVTAQRLSDRVRIIQRRHLLDESVLERLRLSFQQVNTTNNNSCDIRSQFQHANIESQGNIELSVSAQDDERLRRSLKDAILEYGSIPVDLRPKLPRLPMHRRNIALVRILDQHLPSHFNNCNDLTDTHSLLYCGAVAVCRVAGVQFPNKGGTKASKHTVPAWQYDTEKRINLTRILIGKLISFKSGNRRPRVMRFVAEAFAGTNLKPSEYMANVTNRIDFLKQKLYALAKRIRRYRERWDRYNQNSAFQKNQRSVYRKWERSGDSVVNCEIPNPDASADFWRSIWSAPVEHTEGEWFCDIAKNCENIIPMRSIKISEIDVRCAIRYASNWKCPGLDGLHNFWLKWFRSSHSVFATQFQDALDSGSLPTFLTTGVTFLSYKSGCTTEPKNYRPITCLPTIYKLLTSILNKKITGHIVRNKILAPTQNGCKAGGRGTKELLLIDTTISQQVRRNRKNLTTAWIDYKKAYDSVPHTWLLKVLELYKIDITLRSFLEACMGQWVTVLRHLGECDIPATSEPIRIKRGIFQGDSLSPLWFCLALNPLSTMLEDSGLGFRLRRGGKVISHLLYMDDLKLFASKRSDLMRLLKVTQTFSSDIRMEFGVDKCASMHVVRGSVIRSDNICISDSVSFRTLGEGETYKYLGMSEALGIDERSIKQLVKERFFSRLKKVLGSLLSGGNKVRAFNGWVMPLLAYTFGIVRWTQTELDSVDRQIRKLLTTYRMHHPRSSVMRLYIPRKCGGRGFLNVKNLHNHEVCSLREYFLKIDVDMHKDVVTVDKGLTPLSLGKENWRRPVVLTTSDRMAVWKSKELHGRFHRALVGQDVDTVSSLSWLQFGDLFGETEGFVCAIMDEVIKTRNYQRHIMKDGTIDICRACHRPGESLRHIVSGCSHLANGEYLHRHNQVAKIIHQQLALQYGLVELEVPYYRYNPMSVLENSCALLYWDRSIITDRYIVANRPDIVLVDRAARRAVIVDVTIPHDENLVKAEKEKQSKYLDLAHEITAMWDVNATIIVPIVVSVNGLIAKSLDQHLKRLSLSCWIKNRIQKAVLLETARIVRRFLSLEP

SEQ ID NO: 6316 - protein, 1193 aa, Melitaea cinxia
MNKARGRRAQKRPKVPSSSETQSLTTDDEYQTPPSTAESDAYDADSSTRTSNRRRVIRPPPACLEVQGQCAPTRNPAAGGAVRRMRWTQKMNESVMRAYYEATGGGINLTAYRSTMLSLFQALEPTVTVTAQRLSDQVRAIQRCHLLDESVLERLRTNLPQLNTVSHIRDIQTSQKEQREVINFNINHISPNSVDLSVNEQDNEPMRRALEDAILKYRFLPPNIRPQLPRLPIHRRNLALVGVMDKILQPYLDSTQNLSDTHSLLYCGAAAVCNVANVKFKSNKITLPSHTAPAWQARIEKRINLTRTLIAKLTCFRAGNRRPKIMRFVHQAFAGTNIRSNEYITSVSDRIDFLKQKLCAWAKRIKRYKKRRDRYHQNSIFQSDQRKVYRNWEQGTTNVVNGNLPTRESINNFWRNIWSNPIDHIESDWMDVVRRRCSSLPQMEQIKINSEDISYAIRSTSNWKCPGLDGLHNFWLKWFRSSHPILASQFQNAISTNTLPKFMTTGTTFLLYKSGCTADPKNYRPITCLPTIYKLLTSVLVTKITKHITTNNILATTQNGCKSGSRGTKELLLIDMTICQQVRRNRKNLAAAWIDYKKAYDSVPHTWLMKVMELYKIDAALCSFLSTCMRQWNTFLRHPGAVDVSGSTEPIRIMRGIFQGDSLSPLWFCLALNPLSTLLEDSRLGFHLRRGSKAISHLLYMDDLKLFASKLPDLYKLLKITETFSTCIRMEFGVDKCAVIHVERGRTVSSQNLKLNNSLSFRSLNEGETYKYLGMSEALGIDDGAMKQLVKERFFGRLKKVLNSFLSGGNKVRAFNSWVMPLIVYTFGILRWTQTELDTLDRQVRKLLTAYRIHHPRSSVMRLYIPRKCGGRGFLNAKNLHNREVYNLRQYFLNMKSDMHMDVVAVDRGFTPLSLGKEKWRKPIVMRTVDRVAVWKSKELHGRFYKVLTDPDIDQPSSISWLQHGNLFGETEGFVCAIMDEVIKTNNYRKHIMKDGTPDICRACHKPGESIRHVVSGCIHLANGEYLHRHNQVARIIHQQLAIRYGLVENELPYYRYSPTPFLENGRALLYWDRSIVTDRFIAANKPDIVLVDRSARRAIIVDITVPHDDNLVKAEKEKLSKYLDLAHEITGMWNVDSTIIVPIVVSVNGLFAKSFDQHLKKLSLDCWIKGRIQKAVLLETARIVRRFLSLEP

SEQ ID NO: 6317 - protein, 1192 aa, Melitaea cinxia
MNKARGRRAQKRPKVPSSSETQSTTDDEYQTPPSTAESDADDADSSTRPSNRRRVIRPPPACLEVQGQYAPTRNPAASGAVRRMRWTQKMNESVMRAYYEATGGGINLTAYRSTMLSLFQALEPTITVTAQRLSDQVRAIQRCHLLDESVLERLRTNLPQLNTVSHIRDIQTSQKEQREVINFNINHISPNSVDLSVNEQDNEPMRRALEDAILKYRSLPPNIRPQLPRLPIHRRNLALVGVMDKILQQYLDSTQNLSDTHSLLYCGAAAVCNVANLKFKSNKITLPSHTAPAWQARIEKRINLTRTLIAKLTCFRAGNMRPKIMRFVHQAFAGTNIRSNEYITSVSDRIDFLKQKLCAWAKRIKRYKKRRDRYHQNSIFQSDQRKVYRNWEQCTTNVVNGNLPTRESINNFWRNIWSNPIDHIESDWMDVVRRRCSSLPQMEQIKINSEDISYAIRSTSNWKCPGLDGLHNFWLKWFHSSHPILASQFQNAISTNTLPKFMTTGTTFLLYKSGCTADPKNYRPITCLPTIYKLLTSVLVTKITKHITTNNILATTQNGCKSGSRGTKELLLIDMTICQQVRRNRKNLAAAWIDYKKAYDSVPHTWLMKVMELYKIDAALCSFLSTCMRQWNTFLRHPGAVDVSGSTEPIRIMRGIFQGDSLSPLWFCLALNPLSTLLEDSRLGFHLRRGSKAISHLLYMDDLKLFASKLPDLYKLLKITETFSTCIRMEFGVDKCAVIHVERGRTVSSQNLKLNNSLSFRSLNEGETYKYLGMSEALGIDDGAMKQLVKERFFGRLKKVLNSFLSGGNKVRAFNSWVMPLIVYTFGILRWTQTELDTLDRQVRKLLTTYRIHHPRSSVMRLYIPRKCGGRGFLNAKNLHNREVYNLREYFLNMKSDMHMDVVAVDRRFTPLSLGKEKWRKPIVMRTVDRVAIWKSKELHGRFYKVLTDPDVDQPSSISWLQHGNLFGETEGFVCAIMDEVIKTNNYRKHIMKDGTPDICRACHKPGESIRHVVSGCSHLANGEYLHRHNQVARIIHQQLAIRYGLVENELPYYRYSPTPFLENGRALLYWDRSIVTDRFIAANKPDIVLVDRSARRAIIVDITVPHDDNLVKAEKEKLSKYLDLAHEITGMWNVDSTIIVPIVVSVNGLLAKSFDQHLKKLSLDCWIKGRIQKAVLLETARIVRRFLSLEP

SEQ ID NO: 6318 - protein, 1076 aa, Mellicta athalia
MLSLFQALEPTVTVTAQRLSDQVRAIQRCHLLDESVLERLRTNLPQLNTVSHIRAVQTSQKEQREVINLNHISPNSVDLSVNEQDNEPMRRALEDAILKYRSMPPNIRPQLPRLPIHRRNLALVGIMDTILKEYLDTTQNLSDTHSVLYCGAAAVCDVAKVKFTSNKITLPSHTAPAWQARIEKRINLTRTLIAKLTCFRAGNRRPKIMRFVHQAFAGTNISSKEYTTSVSDRIDFLKQKLCAWAKRIKRYKKRSDRYHQNSMFQRDQRKVYRNWEQCTTNVVNGELPTRDSIANFWRNIWSNPIDHIESDWMDVVRKRCSSLPQMDQIKISPEDINYAIRSTSNWKCPGLDGLHNFWLKRFHSSHPILASQFQDAILNNSLPKFMTTGTTFLLYKSGCTADPKNYRPITCLPTIYKLLTSVLVAKITKHITINNILATTQNGCKSGSRGTKELLLIDMTICQQVRRNRKNLAAAWIDYKKAYDSVPHTWLMKVMELYKIDAALCSFLSTCMRQWNTFLRYPGVVDVPGSTEPIRIMRGIFQGDSLSPLWFCLALNPLSTLLEDSGLGFHLRRGSKAISHLLYMDDLKLFASKLPDLYKLLKITETFSTCIRMEFGVDKCAVIHVERGRIVSSENLKLTNSLSFRSLNEGETYKYLGMSEALGIDDGAMKQLVRERFFGRLKKVLNSFLSGGNKVRAFNSWVMPLIVYTFGILRWTQTELDSLDRQVRKLLTAYRIHHPRSSLMRLYIPRKCGGRGFLNVKNLHNREVYDLREYFLNIKSDMHMDVVAVDKGFTPLFLGKEKWRKPIVMSTVDRVAVWKSKELHGRFYKSLTDPDVDQPSSVSWLQHGNLFGETEGFVCAIMDEVIKTNNYRKHIMKDGTPDICRACHKPGESIRHVVSGCSHLANGEYLHRHNQVARIIHQQLAIRYGLVENELPYYRYNPTPFLENGRALLYWDRSIVTDRFIAANKPDIVLVDRSARRAIIVDITVPHDDNLVKAEKEKLSKYLDLAHEITGMWNVDSTIIVPIVVSVNGLLAKSFDQHLKKLSLDGWIKGRIQKAVLLETARIVRRFLSLEP

SEQ ID NO: 6319 - protein, 1188 aa, Maniola jurtina
METRRHRHASAHTAQITSGVDSSSDEDYRTPPSSTGSADDTRPPRRAPRRRATHPPPDGLEQQELRAPTTASAASGVVRRMRWTQRMNENVMRAYYRATDGGTNLTGYRSRMVSLFQALEPTVTVSAQRLSDQVRVIQRRRVLDESTLDRLRLNLPQVITTGNSTHESPQIPSVIEILNTQEELQGGLDLEVSNQNDEQMRRTLEDAILEFRSVPNNLRPKLPRLPVHRRNMALMAVLDKILGTYLESSYDLNDTHSILYCGAVAVCRIASIKFPELHRAVKRPNTAPAWQAGIERRISLTRTLIAKLICFKAGNSRPRIMRFVHQAFAGTNISPSQYLSLVTDRIDFLKQKVYAWAQRIRRFKKRIDRASQNRMFQSDQRKMYRNWERPRGCMVVGELPTPDSMSDFWRSIWSAPIDHTEGEWMNVVRDQCATVVEMNPVTISAEDVRCAIRSASNWKCPGPDGLHNFWLKWFRSAHPVLATQFQNSIDSGSLPTLMTTGVTFLIHKSGSTVDPKNYRPITCLPTIYKLLTSILTTKINMHINANNILAQVQNGCKARARGTKELLLIDTAICQQVRRNRKNLVAAWIDYKKAYDSVPHTWLMEIMRLYKVDATLCSFLDSCMSQWMTVLRQPGGDEFFELAEPIRIKRGIFQGDSLSPLWFCLALNPLSTLLKDSGLGYRLRKGGEVISHLLYMDDLKLYASKRTDLVKLLKITQNFSNNIGMEFGVDKCAIINIERGRVVNSENLVLSETLILRSLCEGETYKYLGMSEALGIEVRTMKQVVEERFFGRLKKVLNSLLSGGNKVRAFNGWVMPLLIYTFGILKWTQTELDALDRRIRKLLTTYRMHHPRSSVMRLYIPRKCGGRGFLNAKNLHNREVCNLRDYFLKVNVGIHRDVVAVDKGLTPLSLGKNNWRKPIVLSTSDRIAVWRSKELHGRFYKALTRPDVDSIASVSWLQFGDLFGETEGFICAIMDEVIKTNNYRKHIMKDGTLDICRACHLPGESLRHIVSGCSYLANGEYLHRHNQVAKIIHQQLALQYGLVDTEVPYYGYDPMSVLENSSALLYWDRSVITDRYIVANRPDIVLVDRSARRAMIVDVTIPHDDNLVKAEKEKVSKYLDLAHEITAMWSVDSAVIVPIVVSVHGLLANSFDQHLKKLSLNCWIKGKIQKAVVLETARIVRRFLTLEP

SEQ ID NO: 6320 - protein, 1192 aa, Melitaea cinxia
MNKARGRRAQKTPKVPSSSETQSTTDDEYQTPPSTADSDADDADSSTRPSNRRRVIRPPPACLEIQGQCAPTRNPAAGGAVRRMRWTQKMNESVMRAYYEVTGGGINLTAYRSTMLSLFQALEPTVTVTAQRLSDQVRAIQRCHLLDESVLERLRTNLPQLNTVSHIRDIQTSQKEQREVINFNINHISPNSVDLSVNEQDNEPMRRALEDAILKYRSLPPNIRPQLPRLPIHRRNLALVGVMDKILQQYLDSTQNLSDTHSLLYCGAAAVCNVANVKFKSNKITLPSHTAPAWQARIEKRINLTRTLIAKLTCFRAGNRRPKIMRFVHQAFAGTNIRPNEYITSVSDRIDFLKQKLCAWAKRIKRYKKRRDRYHQNSIFQSDQRKVYRNWEQCTTNVVNGNLPTRESINNFWRNIWSNPIDHIESDWMDVVRRRCSSLPQMEQIKINSEDISYAIRSTSNWKCPGLDGLHNFWLKWFHSSHPILASQFQNAISTNTLPKFMTTGTTFLLYKSGCTADPKNYRPITCLPTIYKLLTSVLVTKITKHITTNNILATTQNGCKSGSRGTKELLLIDMTICQQVRRNRKNLAAAWIDYKKAYDSVPHTWLMKVMELYKIDTALCSFLSTCMRQWNTFLRHPGAVDVSGSTEPIRIMRGIFQGDSLSPLWFCLALNPLSTLLEDSRLGFHLRRGSKAISHLLYMDDLKLFASRLPDLYKLLKITETFSTCIRMEFGVDKCAVIHVERGRTVSSQNLKLNNSLSFRSLNEGETYKYLGMSEALGIDDGAMKQLVKERFFGRLKKVLNSFLSGGNKVRAFNSWVMPLIVYTFGILRWTQTELDTLDRQVRKLLTTYRIHHPRSSVMRLYIPRKCGGRGFLNAKNLHNREVYNLREYFLNMKSDMHMDVVAVDRGFTPLSLGKEKWRKPIVMRTVDRVAVWKSKELHGRFYKVLTDPDVDQPSSISWLQHGNLFGETEGFVCAIMDEVIKTNNYRKHIMKDGTPDICRACHKPGESIRHVVSGCSHLANGEYLHRHNQVARIIHQQLAIRYGLVENELPYYRYSPMPFLENGRALLYWDRSIVTDRFIAANKPDIVLVDRSARRAIIVDITVPHDDNLVKAEKEKLSKYLDLAHEITGMWNVDSTIIVPIVVSVNGLLAKSFDQHLKKLSLDCWIKGRIQKAVLLETARIVRRFLSLEP

SEQ ID NO: 6321 - protein, 868 aa, Heliconius numata
MRFVAEAFAGTNLKPSEYMANVTNRIDFLKQKLYALAKRIRRYRERWDRYNQNSAFQKNQRSVYRKWERSGDSVVNCEIPNPDASADFWRSIWSAPVEHTEGEWFCDIAKNCENIIPMRSIKISEIDVRCAIRYASNWKCPGLDGLHNFWLKWFRSSHSVFATQFQDALDSGSLPTFLTTGVTFLSYKSGCTTEPKNYRPITCLPTIYKLLTSILNKKITGHIVRNKILAPTQNGCKAGGRGTKELLLIDTTISQQVRRNRKNLTTAWIDYKKAYDSVPHTWLLKVLELYKIDITLRSFLEACMGQWVTVLRHLGECDIPATSEPIRIKRGIFQGDSLSPLWFCLALNPLSTMLEDSGLGFRLRRGGKVISHLLYMDDLKLFASKRSDLMRLLKVTQTFSSDIRMEFGVDKCASMHVVRGSVIRSDNICISDSVSFRTLGEGETYKYLGMSEALGIDERSIKQLVKERFFSRLKKVLGSLLSGGNKVRAFNGWVMPLLAYTFGIVRWTQTELDSVDRQIRKLLTTYRMHHPRSSAMRLYIPRKCGGRGFLNVKNLHNHEVCSLREYFLKIDVDMHKDVVTVDKGLTPLSLGKENWRRPVVLTTSDRMAVWKSKELHGRFHRALVGQDVDPVSSLSWLQFGDLFGETEGFVCAIMDEVIKTRNYQRHIMKDGTIDICRACHRPGESLRHIVSGCSHLANGEYLHRHNQVAKIIHQQLALQYGLVELEVPYYRYNPMSVLENSCALLYWDRSIITDRYIVANRPDIVLVDRAARRAVIVDVTIPHDENLVKAEKEKQSKYLDLAHEITAMWDVNATIIVPIVVSVNGLIAKSLDQHLKRLSLSCWIKNRIQKAVLLETARIVRRFLSLEP

SEQ ID NO: 6322 - protein, 1146 aa, Heliconius numata
MSESEGPALRPRRRADIPPAEGLEPGASRMLNKAPATGGKVPRMRWSQQLNESVMRAYYRATEGGTNLTAYRSRLLSMFQELEPTATVTAQRLSDRVRIIQRRHLLDESVLERLRLSFQQVNTTNNNSCDIRSQFQHANIESQGNIELSVSAQDDERLRRSLKDAILEYGSIPVDLRPKLPRLPMHRRNIALVRILDQHLPSHFNNCNDLTDTHSLLYCGAVAVCRVAGVQFPNKGGTKASKHTVPAWQYDTEKRINLTRILIGKLISFKSGNRRPRVMRFVAEAFSGTNLKPSEYMANVTNRIDFLKQKLYALAKRIRRYRERWDRYNQNSAFQKNQRSVYRKWERSGDSVVNCEIPNPDACADFWRSIWSAPVEHTEGEWFCDIAKNCENIIPMRSIKISEIDVRCAIRYASNWKCPGLDGLHNFWLKWFRSSHSVFATQFQDALDSGSLPTFLTTGVTFLSYKSGCTTEPKNYRPITCLPTIYKLLTSILNKKITGHIVRNKILAPTQNGCKAGGRGTKELLLIDTTISQQVRRNRKNLTTAWIDYKKAYDSVPHTWLLKVLELYKIDITLRSFLEACMGQWVTVLRHLGECDIPATSEPIRIKRGIFQGDSLSPLWFCLALNPLSTLLEDSGLGFRLRRGGKVISHLLYMDDLKLFASKRSDLMRLLKVTQTFSSDIRMEFGVDKCASMHVVRGSVIRSDNICISDSVSFRTLGEGETYKYLGMSEALGIDERSIKQLVKERFFSRLKKVLGSLLSGGNKVRAFNGWVMPLLAYTFGIVRWTQTELDSVDRQIRKLLTTYRMHHPRSSVMRLYIPRKCGGRGFLNVKNLHNHEVCSLREYFLKIDVDMHKDVVTVDKGLTPLSLGKENWRRPVVLTTSDRMVVWKSKELHGRFHRALVGQDVDTVSSLSWLQFGDLFGETEGFVCAIMDEVIKTRNYQRHIMKDGTIDICRACHRPGESLRHIVSGCSHLANGEYLHRHNQVAKIIHQQLALQYGLVELEVPYYRYNPMSVLENSCALLYWDRSIITDRYIVANRPDIVLVDRAARRAVIVDVTIPHDENLVKAEKEKQSKYLDLAHEITAMWDVNATIIVPIVVSVNGLIAKSLDQHLKRLSLSCWIKNRIQKAVLLETARIVRRFLSLEP

SEQ ID NO: 6323 - protein, 1192 aa, Melitaea cinxia
MNKARGRRAQKTPKVPSSSEIQSTTDDEYQTPPSTAESDADDADSSTRPSNRRRVIRPPPACLEIQGQCAPTRNPAAGGAVRRMRWTQKMNESVMRAYYEATGGGINLTAYRSTMLSLFQALEPTVTVTAQRLSDQVRAIQRCHLLDESVLERLRTNLPQLNTVSHIRDIQTSQKEQREVINFNINHISPNSVDLSVNEQDNEPMRRALEDAILKYRSLPPNIRPQLPRLPIHRRNLALVGVMDKILQQYLDSTQNLSDTHSLLYCGAAAVCNVANVKFKSNKITLPSHTAPAWQARIEKRINLTRTLIAKLTCFRAGNRRPKIMRFVHQAFAGTNIRPNEYITSVSDRIDFLKQKLCAWAKRIKRYKKRRDRYHQNSIFQSDQRKVYRNWEQCTTNVVNGNLPTRESINNFWRNIWSNPIDHIESDWMDAVRRRCSSLPQMEQIKINSEDISYAIRSTSNWKCPGLDGLHNFWLKWFHSSHPILASQFQNAISTNTLPKFMTTGTTFLLYKSGCTADPKNYRPITCLPTIYKLLTSVLVTKITKHITTNNILATIQNGCKSGSRGTKELLLIDMTICQQVRRNRKNLAAAWIDYKKAYDSVLHTWLMKVMELYKIDTALCSFLSTCMRQWNTFLRHPGAVDVSGSTEPIRIMRGIFQGDSLSPLWFCLALNPLSTLLEDSRLGFHLRRGSKAISHLLYMDDLKLFASKLPDLYKLLKITETFSTCIRMEFGVDKCAVIHVERGRTVSSQNLKLNNSLSFRSLNEGETYKYLGMSEALGIDDGAMKQLIKERFFGRLKKVLNSFLSGGNKVRAFNSWVMPLIVYTFGILRWTQTELDTLDRQVRKLLTTYRIHHPRSSVMRLYIPRKCGGRGFLNAKNLHNREVYNLREYFLNMKSDMHMDVVAVDRGFTPLSLGKEKWRKPIVMRTVDRVAVWKSKELHGRFYKVLTDPDVDQPSSISWLQHGNLFGETEGFVCAIMDEVIKTNNYRKHIMKDGTPDICRACHKPGESIRHVVSGCSHLANGEYLHRHNQVARIIHQQLAIRYGLVENELPYYRYSPMPFLENGRALLYWDRSIVTDRFIAANKPDIVLVDRSARRAIIVDITVPHDDNLVKAEKEKLSKYLDLAHEITDMCNVDSTIMVPIVVSVNGLLAKSFDQHLKKLSLDCWIKGRVQKAVLLETARIVRRFISLEP

SEQ ID NO: 6324 - protein, 1109 aa, Melitaea cinxia
MRWTQKMNESVMRAYYEATGGGINLTAYRSTMLSLFQALEPTVTVTAQRLSDQVRAIQRCHLLDESVLERLRTNLPQLNTVSHIRDIQTSQKEQREVINFNINHISHNSVDLSVNEQDNEPMRRALEDAILKYRSLPPNIRPQLPRLPIHRRNLALVGVMDKILQQYLDSTQNLSDTHSLLYCGAAAVCNVANLKFKSNKITLPSHTAPAWQARIEKRINLTRTLIAKLTCFRAGNMRPKIMRFVHQAFAGTNIRSNEYITSVSDRIDFLKQKLCAWAKRIKRYKKRRDRYHQNSIFQSDQRKVYRNWEQCTTNVVNGNLPTRESINNFWRNIWSNPIDHIESDWMDVVRRRCSSLPQMEQIKINSEDISYAIRSTSNWKCPGLDGLHNFWLKWFHSSHPILASQFQNAISTNTLPKFMTTGTTFLLYKSGCTADPKNYRPITCLPTIYKLLTSVLVTKITKHITTNNILATTQNGCKSGSRGTKELLLIDMTICQQVRRNRKNLAAAWIDYKKAYDSVPHTWLMKVMELYKIDAALCSFLSTCMRQWNTFLRHPGAVDVSGSTEPIRIMRGIFQGDSLSPLWFCLALNPLSTLLEDSRLGFHLRRGSKAISHLLYMDDLKLFASKLPDLYKLLKITETFSTCIRMEFGVDKCAVIHVERGRTVSSQNLKLNNSLSFRSLNEGETYKYLGMSEALGIDDGAMKQLVKERFFGRLKKVLNSFLSGGNKVRAFNSWVMPLIVYTFGILRWTQTELDTLDRQVRKLLTTYRIHHPRSSVMRLYIPRKCGGRGFLNAKNLHNREVYNLREYFLNMKSDMHMDVVAVDRGFTPLSLGKEKWRKPIVMRTVDRVAVWKSKELHGRFYKVLTDPDVDQPSSISWLQHGNLFGETEGFVCAIMDEVIKTNNYRKHIMKDGTPDICRACHKPGESIRHIVSGCSHLANGEYLHRHNQVARIIHQQLAIRYGLVENELPYYRYSPTPFLENGRALLYWDRSIVTDRFIAANKPDIVLVDRSARRAIIVDITVPHDDNLVKAEKEKLSKYLDLAHEITGMWNVDSTIIVPIVVSVNGLLAKSFDQHLKKLSLDCWIKGRIQKAVLLETARIVRRFLSLEP

SEQ ID NO: 6325 - protein, 1190 aa, Mellicta athalia
MNKARGQHAQSTSKAPSRSETQSSTDDEYETPPSTAESDADDADSSTRRSKRRRVIRPPPVSLDVQGQRAPTRNPAAGGAVRRMRWTQKMNESVMRAYYEATGGGINLTAYRSTMLSLFQALEPTVTVTAQRLSDQVRAIQRCHLLNESVLERLRKNLPQFNTVSHIRAVQTSQKEQREVINLNNISPNSVDLSVNEEDNEPMRRALEDAILKYRSMSPNIRPQLPRLPIHRRNLALVGVMDTILKEYLDSTQNLSDTHSVLYCGAAAVCDVAKVKFTSNKITLPSHTAPAWQARIEKRINLTRTLIAKLTCFRAGNRRPKIMRFVHQAFAGTNITSNEYITSVSDRIDFLKQKLCAWAKRIKRYKKRSDRYHQNSMFQRDQRKVYRNWEQCTTNVVNGELPTRDSITNFWRNIWSNPIDHIESDWMDVVRKRCSSLPQMEQIKISSEDISYAIRSTSNWKCPGLDGLHNFWLKRFHSSHPILASQFQDAILNNSLPKFMTTGTTFLLYKSGCTADPKNYRPITCLPTIYKLLTSVLVAKIRKHITINNILATTQNGCKSGSRGTKELLLIDMTICQQVRRNRKNLAATWIDYKKAYDSVPHTWLMKVMELYKIDATLCSFLSTCMRQWNTFLRYPGVVDVPGSTEPIRIMRGIFQGDSLSPLWFCLALNPLSTLLEDSGLGFHLRRGSKAISHLLYMDDLKLFASKLPDLYKLLKITETFSTCIRMEFGVDKCAVIHVERGRIVSSENLKLTNSLSFRSLNEGETYKYLGMSEALGIDDGAMKQLVKERFFGRLKKVLNSFLSGGNKVRAFNSWVMPLIVYTFGILRWTQTELDSLDRQVRKLLTTYRIHHPRSSLMRLYIPRKCGGRGFLNVKNLHNREVNNLREYFLNIKSDIHVDVVAVDKGFTPLSLGNEKWRKPIVMSTVDRVAVWKSKELHGRFYKALTDPDVDQPSSVSWLQHGNLFGETEGFVCAIMDEVIKTNNYRKHIMKDGTPDICRACHKPGESIRHVVSGCSHLANGEYLHRHNQVARIVHQQLALRYGLVENELPYYRYNPTPFLENGRALLYWDRSIVTDRFIAANKPDIVLVDRSARRAIIVDITVPHDDNLVKAEREKLSKYLDLAHEITGMWNVDSTIIVPIVVLVNGLLAKSFDQHLKKLSLDSWIKGRIQKAVLLETARIVRRFLSLEP

SEQ ID NO: 6326 - protein, 1193 aa, Mellicta athalia
MNKARRQHAHTRTKATSSSDTQSSTTDDEYKTPPSTAESDADDADSSARPSKRRRVIRPPPASLDVQGQRQRAPTRNPAAGGAVRRMRWTQKMNESVMRAYYEATGGGINLTAYRSTMLSLFQALEPTVTVTAQRLSDQVRAIQRCHLLDESVLERLRTNLPQLNTVSHIRAVQTSQKEQREVINLNRISPNSVDLSVNEQDNEPMRRALEDAILKYRSMPPNIRPQLPRLPIHRRNLALVGIMDTILKEYLDTTQNLSDTHSVLYCGAAAVCDVAKVKFTSNKITLPSHTAPAWQARIEKRINLTRTLIAKLTCFRAGNRRPKIMRFVHQAFAGTNISSKEYTTSVSDRIDFLKQKLCAWAKRIKRYKKRSDRYHQNSMFQRDQRKVYRNWEQCTTNVVNGELPTRDSIANFWRNIWSNPIDHIESDWMDVVRKRCSSLPQMDQIKISPEDINYAIRSTSNWKCPGLDGLHNFWLKRFHSSHPILASQFQDAILNNSLPKFMTTGTTFLLYKSGCTADPKNYRPITCLPTIYKLLTSVLVAKITKHITINNILATTQNGCKSGSRGTKELLLIDMTICQQVRRNRKNLAAAWIDYKKAYDSVPHTWLMKVMELYKIDAALCSFLSTCMRQWNTFLRYPGVVDVPGSTEPIRIMRGIFQGDSLSPLWFCLALNPLSTLLEDSGLGFHLRRGSKAISHLLYMDDLKLFASKLPDLYKLLKITETFSTCIRMEFGVDKCAVIHVERGRIVSSENLKLTNSLSFRSLNEGETYKYLGMSEALGIDDGAMKQLVRERFFGRLKKVLNSFLSGGNKVRAFNSWVMPLIVYTFGILRWTQTELDSLDRQVRKLLTAYRIHHPRSSLMRLYIPRKCGGRGFLNVKNLHNREVYNLREYFLNIKSDMHMDVVAVDKGFTPLSLGKEKWRKPIVMSTVDRVAVWKSKELHGRFYKSLTDPDVDQPSSVSWLQHGNLFGETEGFVCAIMDEVIKTNNYRKHIMKDGTPDICRACHKPGESIRHVVSGCSHLANGEYLHRHNQVARIIHQQLAIRYGLVENELPYYRYNPTPFLENGRALLYWDRSIVTDRFIAANKPDIVLVDRSARRAIIVDITVPHDDNLVKAEKEKLSKYLDLAHEITGMWNVDSTIIVPIVVSVNGLLAKSFDQHLKKLSLDGWIKGRIQKAVLLETARIVRRFLSLEP

SEQ ID NO: 6327 - protein, 1187 aa, Heliconius numata
MPGGQVHSQHHGRRCCPSNPQPPSSEDDYRTAASTAGSEEGMSESEGPALRPRRRADIPPAEGLEPGASRMLNKAPATGGKVPRMRWSQQLNESVMRAYYRATEGGTNLTAYRSRLLSMFQELEPTATVTAQRLSDRVRIIQRRHLLDESVLERLRLSFQQVNTTNNNSCDIRSQFQHANIESQGNIELSVSAQDDERLRRSLKDAILEYGSIPVDLRPKLPRLPMHRRNIALVRILDQHLPSHFNNCNDLTDTHSLLYCGAVAVCRVAGVQFPNKGGTKASKHTVPAWQYDTEKRINLTRILIGKLISFKSGNRRPRVMRFVAEAFAGTNLKPSEYMANVTNRIDFLKQKLYALAKRIRRYRERWDRYNQNSAFQKNQRSVYRKWERSGDSVVNCEIPNPDASADFWRSICSAPVEHTEGEWFCDIAKNCENIIPMRSIKISEIDVRCAIRYASNWKCPGLDGLHNFWLKWFRSSHSVFATQFQDALDSGSLPTFLTTGVTFLSYKSGCTTEPKNYRPITCLPTIYKLLTSILNKKITGHIVRNKILAPTQNGCKAGGRGTKELLLIDTTISQQVRRNRKNLTTAWIDYKKAYDSVPHTWLLKVLELYKIDITLRSFFEACMGQWVTVLRHLGECDIPATSEPIRIKRGIFQGDSLSPLWFCLALNPLSTMLEDSGLGFRLRRGGKVISHLLYMDDLKLFASKRSDLMRLLKVTQTFSSDIRMEFGVDKCASMHVVRGSVISSDNICISDSVSFRTLGEGETYKYLGMSEALGIDERSIKQLVKERFFSRLKKVLGRLLSGGNKVRAFNGWVMPLLAYTFGIVRWTQTELDSVDRQIRKLLTTYRMHHPRSSVMRLYIPRKCGGRGFLNVKNLHNHEVCSLREYFLKIDVDMHKDVVTVDKGLTPLSLGKENWRRPVVLTTSDRMAVWKSKELHGRFHRALVGQDVDTVSSLSWLQFGDLFGETEGFVCAIMDEVIKTRNYQRHIMKDGTIDICRACHRPGESLRHIVSGCSHLANGEYLHRHNQVAKIIHQQLALQYGLVELEVPYYRYNPMSVLENSCALLYWDRSIITDRYIVANRPDIVLVDRAARRAVVVDVTIPHDENLVKAEKEKQSKYLDLAHEITAMWDVNATIIVPIVVSVNGLIAKSLDQHLKRLSLSCWIKNRIQKAVLLETARIVRRFLSLEP

SEQ ID NO: 6328 - protein, 1187 aa, Heliconius numata
MPGGQVHSQHHGRRCCPSNPQPPSSEDDYRTAASTAGSEEGMSETEGPALRPRRRADYPPSEGLEPGASRMLNKAPATGGKVPRMRWSQQLNESVMRAYYRATEGGTNLTAYRSRLLSMFQELEPTATVTAQRLSDRVRIIQRRHLLDESVLERLRLSFQQVNTTNNNSCDIRSQFQHANIESQGNIELSVSAQDDERLRRSLKDAILEYGSIPVNLRPKLPRLPMHRRNIALVRILDQHLPSHFNNCNDLTDTHSLLYCGAVAVCRVAGVQFPNKGGTKASKHTVPAWQYDTEKRINLTRILIGKLISFKSGNRRPRVMRFVAEAFAGTNLKPSEYMANVTNRIDFLKQKLYALAKRIRRYRERWDRYNQNSAFQKNQRSVYRKWERSGDSVVNCEIPNPDASADFWRSIWSAPVEHTEGEWFCDIAKNCENIIPMRSIKISEIDVRCAIRYASNWKCPGLDGLHNFWLKWFRSSHSVFATQFQDALDSGSLPTFLTTGVTFLSYKSGCTTEPKNYRPITCLPTIYKLLTSILNKKITGHIVRNKILAPTQNGCKAGGRGTKELLLIDTTISQQVRRNRKNLTTAWIDYKKAYDSVPHTWLLKVLELYKIDITLRSFLEACMGQWVTVLRHLGECDIPATSEPIRIKRGIFQGDSLSPLWFCLALNPLSTMLEDLGLGFRLRRGGKVISHLLYMDDLKLFASKRSDLMRLLKVTQTFSSDIRMEFGVDKCASMHVVRGSVIRSDNICISDSVSFRTLGEGETYKYLGMSEALGIDERSIKQLVKERFFSRLKKVLGSLLSGGNKVRAFNGWVMPLLAYTFGIVRWTQTELDSVDRQIRKLLTTYRMHHPRSSVMRLYIPRKCGGRGFLNVKNLHNHEVCSLREYFLKIDVDMHKDVVTVDKGLTPLSLGKENWRRPVVLTTSDRMAVWKSKELHGRFHRALVGQDVDTVSSLSWLQFGDLFGETEGFVCAIMDEVIKTRNYQRHIMKDGTIDICRACHRPGESLRHIVSGCSHLANGEYLHRHNQVAKIIHQQLALQYGLVELEVPYYRYNPMPVLENSCALLYWDRSIITDRYIVANRPDIVLVDRAARRAVIVDVTIPHDENLVKAEKEKQSKYLDLAHEITAMWDVNATIIVPIVVSVNGLIAKSLDQHLKRLSLSCWIKNRIQKAVLLETARIVRRFLSLEP

SEQ ID NO: 6329 - protein, 1198 aa, Melitaea cinxia
MNDDKMNKARGRRAQKRPKVPSSSETQSSTTDDEYQTPPSTAESDADDADSSTRPSNRRRVIRPPPACLEVQGQRVPTRNPAAGGAVRRMRWTQKMNESVMRAYYEATGGGINLTAYRSTMLSLFQALEPTVTVTAQRLSDQVRAIQRCHLLDESVLERLRTNLPQLNTVSHIRAIQTSQKEQREVINFNFNHISPNSVDLSVNEQDNEPMRRALEDAILRYRSLPPNIRPQLPRLPIHRRNLALVGVMDKILQQYLDSTQNLSDTHSLLYCGAAAVCNVAKVKFTSNKVTLPPYTAPAWQARIEKRINLTRTLIAKLTCFRAGNRRPKIMRFVHQAFAGTNIRSNEYITSVSDRIDFLKQKLCAWAKRIKRYKKRRDRYHQNRIFQSDQRKVYRNWEQCTTNVVNGDLPTRESINNFWRNIWSNPIDHIESDWMDVVRRRCSSLPQMEQIKINSEDISYAIRSTSNWKCPGLDGLHNFWLKWFHSSHPILASQFQNAISTNSLPKFMTTGTTFLLYKSGCTADPKNYRPITCLPTIYKLLTSVLVAKITKHITTNNILATTQNGYKSGSRGTKELLLIDMTICQQVRRNRKNLAAAWIDYKKAYDSVPHTWLMKVMELYKIDAALCSFLSTCMRQWNTFLRHPGAVDVSGSTEPIRIMRGIFQGDSLSPLWFCLALNPLSTLLEDSRLGFHLRRGSKAISHLLYMDDLKLFASKLPDLYKLLKITETFSTCIRMEFGVDKCAVIHVERGRIVSSENLQLNNSLSFRSLNEGETYKYLGMSEALGIDDGAMKQLVKERFFGRLKKVLHSFLSGGNKVRAFNSWVMPLIVYTFGILRWTQTELDTLDRQVRKLLTAYRIHHPRSSVMRLYIPRKCGGRGFLNAKNLHNREVCNLREYFLNMKNDMHMDVVAVDRGFTPLSLGKEKWRKPIVMRTVDRVAIWKSKELHGRFYKVLTDPDVDQPSSISWLQHGNLFGETEGFVCAIMDEVIKTNNYRKHIMKDGTPDICRACHKPGESIRHVVSGCSHLANGEYLHRHNQVARIIHQQLAIRYGLVENELPYYRYSPTPFLENGRALLYWDRSIVTDRFIAANKPDIVLVDRSARRAIIVDITVPHDDNLVKAEKEKLSKYLDLAHEITGMWNVDSTIIVPIVVSVNGLLAKSFDQHLKKLSLDCWIKGQIQKAVLIETARIVRRFLSLEP

SEQ ID NO: 6330 - protein, 988 aa, Melitaea cinxia
MRRALEDAILRYRSLPPNIRPQLPRLPIHRRNLALVGVMDKILQQYLDSTQNLSDTHSLLYCGAAAVCNVAKVKFTSNKVTLPPYTAPAWQARIEKRINLTRTLIAKLTCFRAGNRRPKIMRFVHQAFAGTNIRSNEYITSVSDRIDFLKQKLCAWAKRIKRYKKRRDRYHQNRIFQSDQRKVYRNWEQCTTNVVNGDLPTRESINNFWRNIWSNPIDHIESDWMDVVRRRCSSLPQMEQIKINSEDISYAIRSTSNWKCPGLDGLHNFWLKWFHSSHPILASQFQNAISTNSLPKFMTTGTTFLLYKSGCTADPKNYRPITCLPTIYKLLTSVLVAKITKHITTNNILATTQNGCKSGSRGTKELLLIDMTICQQVRRNRKNLAAAWIDYKKAYDSVPHTWLMKVMELYKIDAALCSFLSTCMRQWNTFLRHPGAVDVSGSTEPIRIMRGIFQGDSLSPLWFCLALNPLSTLLEDSRLGFHLRRGSKAISHLLYMDDLKLFASKLPDLYKLLKITETFSTCIRMEFGVDKCAVIHVERGRIVSSENLQLNSSLSFRSLNEGETYKYLGMSEALGIDDGAMKQLVKERFFGRLKKVLHSFLSGGNKVRAFNSWVMPLIVYTFGILRWTQTELDTLDRQVRKLLTAYRIHHPRSSVMRLYIPRKCGGRGFLNAKNLHNREVCNLREYFLNMKNDMHMDVVAVDRGFTPLSLGKEKWRKPIVMRTVDRVAVWKSKELHGRFYKVLTDPDVDQPSSISWLQHGNLFGETEGFVCAIMDEVIKTNNYRKHIMKDGTPDICRACHKPGESIRHVVSGCIHLANGEYLHRHNQVARIIHQQLAIRYGLVENELPYYRYSPTPFLENGRALLYWDRSIVTDRFIAANKPDIVLVDRSARRAIIVDITVPHDDNLVKAEKEKLSKYLDLAHEITGMWNVDSTIIVPIVVSVNGLLAKSFDQHLKKLSLDCWIKGQIQKAVLLETARIVRRFLSLEP

SEQ ID NO: 6331 - protein, 1160 aa, Mellicta athalia
MNKARGQHAHTRTKATSSSDTQSSTTDDEYKTPPSTAESDADDADSSARPSKRRRVIRPPPASLDVQGQRQRAPTRNPAAGGAVRRMRWTQKMNESVMRAYYEATGGGINLTAYRSTMLSLFQALEPTVTVTAQRLSDQVRAIQRCQLLDESVLERLRTNLPQLNTVSHIRAVQTSQKEQREVINLNRISPNSVDLSVNEQDNEPMRRALEDAILKYRSMPPNIRPQLPRLPIHRRNLALVGIMDTILKEYLDTTQNLSDTHSVLYCGAAAVCDVAKVKFTSNKITLPSHTAPAWQARIEKRINLTRTLIAKLTCFRAGNRRPKIMRFVHQAFAGTNISSKEYTTSVSDRIDFLKQKLCAWAKRIKRYKKRSDRYHQNSMFQRDQRKVYRNWEQCTTNVVNGELPTRDSIANFWRNIWSNPIDHIESDWMDVVRKRCSSLPQMDQIKISPEDINYAIRSTSNWKCPGLDGLHNFWLKRFHSSHPILASQFQDAILNNSLPKFMTTGTTFLLYKSGCTADPKNYRPITCLPTIYKLLTSVLVAKITKHITINNILATTQNGCKSGSRGTKELLLIDMTICQQVRRNRKNLAAAWIDYKKAYDSVPHTWLMKVMELYKIDAALCSFLSTCMRQWNTFLRYPGVVDVPGSTEPIRIMRGIFQGDSLSPLWFCLALNPLSTLLEDSGLGFHLRRGSKAISRLLYMDDLKLFASKLPDLYKLLKITETFSTCIRMEFGVDKCAVIHVERGRIVSSENLKLTNSLSFRSLNEGETYKYLGMSEALGIDDGAMKQLVRERFFGRLKKVLNSFLSGGNKVRAFNSWVMPLIVYTFGILRWTQTELDSLDRQVRKLLTAYRIHHPRSSLMRLYIPRKCGGRGFLNVKNLHNREVYNLREYFLNIKSDMHMDVVAVDKGFTPLSLGKEKWRKPIVMSTVDRVAVWKSKELHGRFYKSLTDPDVDQPSSVSWLQHGNLFGETEGFVCAIMDEVIKTNNYRKHIMKDGTPDICRACHKPGESIRHVVSGCSHLANGEYLHRHNQVARIIHQQLAVRYGLVENELPYYRYNPTPFLENGRALLYWDRSIVTDRFIAANKPDIVLVDRSARRAIIVDITVPHDDNLVKAEKEKLSKIFRPCPRDYRHVECRLNNNCSNCCVGQWFISEEFRPTP

SEQ ID NO: 6332 - protein, 892 aa, Heliconius nattereri
MHRRNIALVGILDQHLPSHFNNCNDLTDTHSLLYCGAVAVCRVAGVQFPNKGGTKASKHTVPAWQYDTEKRINLTRILIGKLISFKSGNRRPRVMRFVAEAFAGTNLKPSEYMANVTNRIDFLKQKLYALAKRIRRYRERWDRYNQNSAFQRNQRSVYRKWERSGDSVVNCEIPNPDASAGFWRSIWSAPVEHTEGEWFCDIAKNCENIIPMRSIKISEIDVRCAIRYASNWKCPGLDGLHNFWLKWFRSSHSVFATQFQDALDSGSLPTFLTTGVTFLSYKSGCTTEPKNYRPITCLPTIYKLLTSILNKKITGHIVRNKILAPTQNGCKAGGRGTKELLLIDTTISQQVRRNRKNLTTAWIDYKKAYDSVPHTWLLKVLELYKIDITLRSFLEACMGQWVTVLRHLGECDIPATSEPIRIKRGIFQGDSLSPLWFCLALNPLSTMLEDSGLGFRLRRGGKVISHLLYMDDLKLFASKRSDLMRLLKVTQTFSSDIRMEFGVDKCASMHVVRGSVIRSDNICISDSVSFRTLGEGETYKYLGMSEALGIDERSIKQLVKERFFSRLKKVLGSLLSGGNKVRAFNGWVMPLLAYTFGIVRWTQTELDSVDRQIRKLLTTYRMHHPRSSVMRLYIPRKCGGRGFLNVKNLHNHEVCSLREYFLKIDVDMHKDVVTVDKGLTPLSLGKENWRRPVVLTTSDRMAVWKSKELHGRFHRALVGQDVDTASSLSWLQFGDLFGETEGFVCAIMDEVIKTRNYQRHIMKDGTIDICRACHRPGESLRHIVSGCSHLANGEYLHRHNQVAKIIHQQLALQYGLVELEVPYYRYNPMSVLENSCALLYWDRSIITDRYIVANRPDIVLVDLVARRAVIVDVTIPHDDNLEKAEKEKLSKV

SEQ ID NO: 6333 - protein, 1187 aa, Heliconius numata
MPGGQVHSQHHGRRCCPSNPQPPSSEDDYRTAASTAGSEEGMSESEGPALRPRRRADIPPAEGLEPGASRMLNKAPATGGKVPRMRWSQQLNESVMRAYYRATEGGTNLTAYRSRLLSMFQELEPTATVTAQRLSDRVRIIQRRHLLDESVLERLRLSFQQVNTTNNNSCDIRSQFQHANIESQGNIELSVSAQDDERLRRSLKDAILEYGSIPVDLRPKLPRLPMHRRNIALVRILDQHLPSHFNNCNDLTDTHSLLYCGAVAVCRVAGVQFPNKGGTKASKHTVPAWQYDTEKRINLTRILIGKLISFKSGNRRPRVMRFVAEAFAGTNLKPSEYMANVTNRIDFLKQKLYALAKRIRRYRERWDRYNQNSAFQKNQRSVYRKWERSGDSVVNCEIPNPDASADFWRSIWSAPVEHTEGEWFCDIAKNCENIIPMRSIKISEIDVRCAIRYASNWKCPGLDGLHNFWLKWFRSSHSVFATQFQDALDSGSLPTFLTTGVTFLSYKSGCTTEPKNYRPITCLPTIYKLLTSILNKKITGHIVRNKILAPTQNGCKAGGRGTKELLLIDTTISQQVRRNRKNLTTAWIDYKKAYDSVPHTWLLKVLELYKIDITLRSFLEACMGQWVTVLRHLGECDIPATSEPIRIKRGIFQGDSLSPLWFCLALNPLSTMLEDSGLGFRLRRGGKVISHLLYMDDLKLFASKRSDLMRLLKVTQTFSSDIRMEFGVDKCASMHVVRGSVIRSDNICISDSVSFRTLGEGETYKYLGMSEALGIDERSIKQLVKERFFSRLKKVLGSLLSGGNKVRAFNGWVMPLLAYTFGIVRWTQTELDSVDRQIRKLLTTYRMHHPRSSVMRLYIPRKCGGRGFLNVKNLHNHEVCSLREYFLKIDVDMHKDVVTVDKGLTPLSLGKENWRRPVVLTTSDRMAVWKSKELHGRFHRALVGQDVDTVSSLSWLQFGDLFGETEGFVCAIMDEVIKTRNYQRHIMKDGTIDICRACHRPGESLRHIVSGCSHLANGEYLHRHNQVAKIIHQQLALQYGLVELEVPYYRYNPMSVLENSCALLYWDRSIITDRYIVANRPDIVLVDRAARRAVIVDVTIPHDENLVKAEKEKQSKYLDLAHEITAMWDVNATIIVPIVVSVNGLIAKSLDQHLKRLSLSCWIKNRIQKAVLLETARIVRRFLSLEP

SEQ ID NO: 6334 - protein, 1117 aa, Heliconius numata
MLNKAPATGGKVPRMRWSQQLNESVMRAYYRATEGGTNLTAYRSRLLSMFQELEPTATVTAQRLSDRVRIIQRRHLLDESVLERLRLSFQQVNTTNNNSCDIRSQFQHANIESQGNIELSVSAQDDERLRRSLKDAILEYGSIPVDLRPKLPRLPMHRRNIALVRILDQHLPSHFNNCNDLTDTHSLLYCGAVAVCRVAGVQFLNKGGTKASKHTVPAWQYDTEKRINLTRILIGKLISFKSGNRRPRVMRFVAGAFAGTNLKPSEYMANVTNRIDFLKQKLYALAKRIRRYRERWDRYNQNSAFQKNQRSVYRKWERSGDSVVNCEIPNPDASADLWRSIWSAPVEHTEGEWFCDIAKNCENIIPMRSIKISEIDVRCAIRYASNWKCPGLDGLHNFWLKWFRSSHSVFATQFQDALDSGSLPTFLTTGVTFLSYKSGCTTEPKNYRPITCLPTIYKLLTSILNKKIIGHIVRNKILAPTQNGCKAGGRGTKELLLIDTTISQQVRRNRKNLTTAWIDYKKAYDSVPHTWLLKVLELYKIDITLRSFLEACMGQWVTVLRHLGECDIPATSEPIRIKRGIFQGDSLSPLWFCLALNPLSTMLEDSGLGFRLRRGGKVISHLLYMDDLKLFASKRSDLMRLLKVTQTFSSDIRMEFGVDKCASMHVVRGSVIRSDNICISDSVSFRTLGEGETYKYLGMSEALGIDERSIKQLVKERFFSRLKKVLGSLLSGGNKVRAFNGWVMPLLAYTFGIVRWTQTELDSVDRQIRKLLTTYRMHHPRSSVMRLYIPRKCGGRGFLNVKNLHNHEVCSLREYFLKIDVDMHKDVVTVDKGLTPLSLGKENWRRPVVLTTSDRMAVWKSKELHGRFHRALVGQDVDTVSSLSWLQFGDLFGETEGFVCAIMDEVIKTRNYQRHIMKDGTIDICRACHRPGESLRHIVSGCSHLANGEYLHRHNQVAKIIHQQLALQYGLVELEVPYYRYNPMSVLENSCALLYWDRSIITDRYIVANRPDIVLVDRAARRAVIVDVTIPHDENLVKAEKEKQSKYLDLAHEITAMWDVNATIIVPIVVSVNGLIAKSLDQHLKRLSLSCWIKNRIQKAVLLETARIVRRFLSLEP

SEQ ID NO: 6335 - protein, 1140 aa, unidentified
MPGGQVHSQHHGRRCCPSNSQPSSSEDDYRTAPSTAGSEEGMSESEGPALRPRRRADIPPSEGLEPGVSRMLNKAPATGGKVPRMRWSQQLNESVMRAYYRATEGGTNLTAYRSRLLSMFQELEPTATVTAQRLSDRVRIIQRRHLLDESVLERLRLSFQQVNTTNNNSCDIRSQFQHANIESQGNIELSVSAQDDERLRRSLKDAILEYGSIPVNLRPKLPRLPMHRRNIALVRILDQHLPSHFNNCNDLTDTHSLLYCGAVAVCRVAGVQFPNKGGTKASKHTVPAWQYDTEKRINLTRILIGKLISFKSGNRRPRVMRFVAEAFAGTNLKPSEYMANVTNRIDFLKQKLYALAKRIRRYRERWDRYNQNSAFQKNQRSVYRKWERSGDSVVNCEIPNPDASAGFWRSIWSAPVEHTEGEWFCDIVKNCENIIPMPSIKISEIDVRCAIRYASNWKCPGLDGLHNFWLKWFRSSHSVFATQFQDALDSGSLPTFLTTGVTFLSYKSGCTTEPKNYRPITCLPTIYKLLTSILNKKITGHIVRNKILAPTQNGCKAGGRGTKELLLIDTTISQQVRRNRKNLTTAWIDYKKAYDSVPHTWLLKVLELYKIDITLRSFLEACMGQWVTVLRHLGECDIPATSEPIRIKRGIFQGDSLSPLWFCLALNPLSTLLEDSGLGFRLRRGGKVISHLLYMDDLKLFASKRSDLMRLLKVTQTFSSDIGMEFGVDKCASMHVVRGSVIRSDNICISDSVSFRTLGEGETYKYLGMSEALGIDERSIKQLVKERFFSRLKKVLGSLLSGGNKVRAFNGWVMPLLAYTFGIVRWTQTELDSVDRQIRKLLTTYRMHHPRSSVMRLYIPRKCGGRGFLNVKNLHNHEVCSLREYFLKIDVDMHKDVVTVDKGLTPLSLGKENWRRPVVLTTSDRMAVWKSKELHGRFHRALVGQDVDTVSSLSWLQFGDLFGETEGFVCAIMDEVIKTRNYQRHIMKDGTIDICRACHRPGESLRHIVSGCSHLANGEYLHRHNQVAKIIHQQLALQYGLVELEVPYYRYNPMSVLENSCALLYWDRSIITDRYIVANRPDIVLVDRVARRAVIVDVTIPHDENLVKAEKEKQSKYLDLAHEITAMWDVNATIIVPIVV

SEQ ID NO: 6336 - protein, 1194 aa, Junonia zonalis
MKNARGRHARLTPKVISSNSESQSSLSDDEYHTPLSSTESEQHEADPPTRRSKRRRAVHPPQDGLELQGQCAPARVPAAGGAVRRMRWTQKMNESVMRAYYGATGGGINLTGYRSTMLSLFQALEPTVTVTAQRLSDQVRAIQRCHLLDESVLERLRLNLQQSNAAGDIHHVQRSVREPNMTNIPEFNENPSSSVDFAVSDQDNEHMRSALEDAILKYKHVPFNLRPRLPRLPMHRRNLMLVSVLDKVLPSYLDDTLDIYDIHSILYCGAVAVCNIASVKFPTEKNIVRTNTPPAWQIRIENRITLTRTLIGKLICFRAGNNRPRVMRFVHQAFAGTNIKVSEYMASVTDRIDFMKQKIFAWAKRIKRYKKRINRYRQNSMFQSDQRKVYRYWEQGSDNLANGVLPTPDVMSKFWHDIWSSPISHTEGDWMRVVGRDCEPIQQMEPITICSNDVACATRSMSNWKCPGPDGLQSFWLKWFHSSHSLLASRFQDALASGSLPTFMTTGVTILLYKSGCTADPKNYRPITCLPTIYKLFTSILAVKIKKHVENNNILAPAQNGCRSGSRGTKELLLIDMTICRQVRRNRKNLATAWIDYKKAYDSVPHTWLMRVMELYKIDATLCLLLRSCMGQWITYLRHPGSDEISGSTEPIRIKRGIFQGDSLSPLWFCLALNPLSSLLDDSGLGFRLRRGGKIISHLLYMDDLKLYASKQPELVELLKITESFSSCIGMEFGVDKCAVLHVERGRVIPSADIQVTNCLRLRSLNEGETYKYLGMSQALGIEDGSIKQLVRERFFGRLKKVLNSFLSGGNKVRAFNGWVIPLLVYTFGILRWTQAELDSLDRQVRKLLTAFRMHHPRSSVMRLYIPRKCGGRGFLNAKNLHNREVYNLRKYFLSVNDDMHRDVVAVDKTFTPLSLGKENWRRPIVLDTGDRMAVWKSKELHGRYYRALMGSDVDRVSSVSWLQYGDLFGETEGFVCAIMDEVVKTNNYRKYIIKDGTPDICRACHHPGESIRHIISGCCHLANGEYLHRHNQVARIIHQQLALRYGLVSAEVPYYRYNPTPVLENGPALLYWDRSIITDRYIPANKPDIVVVDRSTRRAIIVDITIPHDDNLVKAEKEKMSKYLDLAHEISAMWSVDSTVIVPIVVSVNGLVAKSFDQHLKKLSLGCWIKGRIQKAVLLETARIVRRFLSLDS

SEQ ID NO: 6337 - protein, 1192 aa, Mellicta athalia
MNKARGQHAQSTSKAPSCSETQSSTDDEYETPPSTAESDANDAYSPTRRSKRRRVIRPPPVSLDVQGQRAPTRNPAAGGAVRRMRWTHKMNESVMRAYYEATGGGINLTAYRSTMLSLFQALEPTVTVTAQRLSDQVRAIQRCHLLDESVLERLRTNLPQLNTVSHIRAVQTSQKEQREVINLNLNNISPNSVDLSVNKQDNEHMRRALEDAILKYRSMPSNIRPQLPRLPIHRRNLALVGVMDTILKEYLDSTQNLSDTHSVLYCGAAAVCNVANVKFISNKITLPLHTAPAWQARIEKRINLTRTLIAKLTCFRAGNRRPKIMRFVHQAFAGTNITSNEYITSVSDRIDFLKQKLCAWAKRIKRYKKRRDRYNQNRMFQSNQRKVYRNWEQCTTNVVNGDLPARESITNFWRNIWSNPIDHIESDWMDVVRRRCSSLPQMEQIKISSEDISYAIRSTSNWKCPGLDGLHNFWLKWFHSSHPILASQFQDAIFNNSLPKFMTTGTTFLLYKSGCTADPKNYRPITCLPTIYKLLTSVLVTKITKHITTNNILATTQNGCKSGSRGTKELLLIDMTICQQVRRNRKNLAAAWIDYKKAYDSVPHTWLMKIMELYKIDATLCSFLSTCMRQWNTFLRYPGAVDVPGSTEPIRIMRGIFQGDSLSPLWFCLALNPLSTLLEDSGLGFHLRRGSKAISHLLYMDDLKLFASKLPDLNKLLKITETFSTCIRMEFGVDKCAVIHVERGRIVSTENLKLANSLTFRSLNEGETYKYLGMSEALGIDDGAMKQLVKERFFGRLKKVLNSFLSGANKVRAFNSWVMPLIVYTFGILRWTQTELDSLDRQVRKLLTAYRIHHPRSSLMRLYIPRKCGGRGFLNVKNLHNREVYNLREYFLNIKSDIHMDVVAVDKGFTPLSLGKEKWRKPIIMSTVDRVAVWKSKELHGRFYKVLTDPDVDQPSSISWLQHSNLFGETEGFVCAIMDEVIKTNNYRKHIMKDGTPDICRACHKPGESIRHVVSGCSHLANGEYLHRHNQVARIIHQQLAIRYGLVENELPYYRYNPTPFLENGRALLYWDRSIVTDRFIAANKPDIVLVDRSARRAIIVDITVPHDDNLVKAEKEKLSKYLDLAHEITGMWNVDSTIIVPIVVSVNGLLAKSFDQHLKKLSLDGWIKGRIQKAVLLETARIVRRFLSLEP

SEQ ID NO: 6338 - protein, 1190 aa, Mellicta athalia
MNKARGQHAQSTSKVPSRSETQSSTDDEYETPLSTAESDADDADSSTRRPKRRRVIRPPPVSLDVQGQRAPTRNPAAGGAVRRMRWTHKMNESVMRAYYEATGGGINLTAYRSTMLSLFQALEPTVTVTAQRLSDQVRAIQRCHLLDESVLERLRANLPQFNTVSHIRAVQTSQKEQREVINLNNISPNSVDLSVNEQDNEPMRRALEDAILKYRSMPPNIRPQLPRLPIHRRNLALVGVMDTILKEYLNSTQNLADTHSVLYCGAAAVCNVAKVKFTSNKITLPSHTAPAWQARIEKRINLTRTLIAKLTCFRAGNRRPKIMRFVHQAFAGTNITSNEYITSVSDRIDFLKQKLCAWAKRIKRYKKRRDRYNQNSMFQSDQRKVYRNWEQCTTNVVNGDLPTRESITNFWRNIWSNPIDHIESDWMDVVRRRCSSLPQMEQIKITSEDISYAIRSTSNWKCPGLDGLHNFWLKWFHSSHPILASQFQDAIFNNSLPKFMTTGTTFLLYKSGCTADPKNYRPITCLPTIYKLLTSVLVAKITKHISANNILATTQNGCKSGSRGTKELLLIDMTICQQVRRNRKNLAAAWIDYKKAYDSVPHTWLMKVMELYKIDVTLCSFLSTCMRQWNTFLRYPGAVDVPGSTEPIRIMRGIFQGDSLSPLWFCLALNPLSTLLEDSRLGFHLRRGSKAISHLLYMDDLKLFASKLPDLNKSLKITETFSSCIRMEFGVDKCAVIHVERGRIVSSENLKLANSLSFRSLNEGETYKYLGMSEALGIDEGAMKQLVKERFFSRLKKVLNSFLSGANKVRAFNSWVMPLIVYTFGILRWTQTELDSLDRQVRKLLTAYRIHHPRSSLMRLYIPRKCGGRGFLNVKNLHNRELYNLREYFLNIKSDIHMDVVAVDKGFTPLSLGKEKWRKPIVMSTVDRVAVWKSKELHGRFYKVLTDPDVDQPSSISWLQHGNLFGETEGFVCAIMDEVIKTNNYRKHIMKDGTPDICRACHKPGESIRHVVSGCSHLANGEYLHRHNQVARIIHQQLAIRYGLVENELPYYRYNPTPFLENGRALLYWDRSIVTDRFIAANKPDIVLVDRSARRAIIVDITVPHDDNLVKAEKEKLSKYLDLAHEITGMWNVDSTIIVPIVVSVNGLLAKSFDQHLKKLSLDGWIKGRIQKAVLLETARIVRRFLSLES

SEQ ID NO: 6339 - protein, 1187 aa, Heliconius numata
MPGGQVHSQHHGRRCCPSNPQPPSSEDDYRTAASTAGSEEGMSESEGPALRPRRRADIPPAEGLEPGASRMLNKAPATGGKVPRMRWSQQLNESVMRAYYRATEGGTNLTAYRSRLLSMFQELEPTATVTAQRLSDRVRIIQRRHLLDESVLERLRLSFQQVNTTNNNSCDIRSQFQHANIESQGNIELSVSAQDDERLRRSLKDAILEYGSIPVDLRPKLPRLPMHRRNIALVRILDQHLPSHFNNCNDLTDTHSLLYCGAVAVCRVAGVQFPNKGGTKASKHTVPAWQYDTEKRINLTRILIGKLISFKSGNRRPRVMRFVAEAFAGTNLKPSEYMANVTNRIDFLKQKLYALAKRIRRYRERWDRYNQNSAFQKNQRSVYRKWERSGDSVVNCEIPNPDASADFWRSIWSAPVEHTEGEWFCDIAKNCENIIPMRSIKISEIDVRCAIRYASNWKCPGLDGLHNFWLKWFRSSHSVFATQFQDALDSGSLPTFLTTGVTFLSYKSGCTTEPKNYRPITCLPTIYKLLTSILNKKITGHIVRNKILAPTQNGCKAGGRGTKELLLIDTTISQQVRRNRKNLTTAWIDYKKAYDSVPHTWLLKVLELYKIDITLRSFLEACMGQWVTVLRHLGECDIPATSEPIRIKRGIFQGDSLSPLWFCLALNPLSTMLEDSGLGFRLRRGGKVISHLLYMDDLKLFASKRSDLMRLLKVTQTFSSDIRMEFGVDKCASMHVVRGSVIRSDNICISDSVSFRTLGEGETYKYLGMSEALGIDERSIKQLVKERFFSRLKKVLGSLLSGGNKVRAFNGWVMPLLAYTFGIVRWTQTELDSVDRQIRKLLTTYRMHHPRSSVMRLYIPRKCGGRGFLNVKNLHNHEVCSLREYFLKIDVDMHKDVVTVDKGLTPLSLGKENWRRPVVLTTSDRMAVWKSKELHGRFYRALVGQDVDTVSSLSWLQFGDLFGETEGFVCAIMDEVIKTRNYQRHIMKDGTIDICRACHRPGESLRHIVSGCSHLANGEYWHRHNQVAKIIHQQLALQYGLVELEVPYYRYNPMSVLENSCALLYWDRSIITDRYIVANRPDIVLVDRAARRAVIVDVTIPHDENLVKAEKEKQSKYLDLAHEITAMWDVNATIIVPIVVSVNGLIAKSLDQHLKRLSLSCWIKNRIQKAVLLETARIVRRFLSLEP

SEQ ID NO: 6340 - protein, 1190 aa, Melitaea cinxia
MNKARGRRAQKRPKVPSSSETQSSTTDDEYQTPPSTAESDADDADSSTRPSNRRRVIRPPPACLEVPGQRPPTRNPAAGGAVRRMRWTQKVNESVMRAYYEATGGGINLTAYRSTMLSLFQALEPTVTVTAQRLSDQVRAIQRCHLLDESVLERLRTNLPQLNTVSHIRAIQTSQKETREVINFNLSPNSVDLSVNEQDNEPMRRALEDAILKYRSLPPNIRPQLPRLPIHRRNLALVGVMDKILQQYLDSTQNLSDTHSLLYCGAAAVCNVANVKFTSNKVTLPSHKAPAWQTRIEKRINLTRTLIAKLTCFRTGNRRPKIMRFVHQAFAGTNIRSNEYITSVSDRIDFLKQKLCAWAKRIKRYKKRRDRYHQNSIFQSDQRKVYRNWEQCTTNVVNGDLPTRESINNFWRNIWSNPIDHIESDWMDVVRRRCSSLPQMEQVKINSEDISYAIRSTSNWKCPGLDGLHNFWLKWFHSSHPILASQFQNAICTNSLPKFMTTGTTFLLYKSGCTADPKNYRPITCLPTIYKLLTSVLVAKITKHITTNNILATTQNGCKSVSRGTKELLLIDMTICQQVRRNRKNLAAAWIDYKKAYDSVPHTWLIKVMELYKIDAALCSFLSTCMRQWNTFLRHPGAVDISGSTEPIRIMRGIFQGDSLSPLWFCLALNPLSTLLEDSRLGFHLRRGSKAISHLLYMDDLKLFASKLPDLYKLLKITETFSTCIRMEFGVDKCAVIHVERGRIVSSENLELNNSLSFRSLNEGETYKYLGMSEALGIDDGAMKQLVKERFFGRLKQVLNSFLSGGNKVRAFNSWVMPLIVYTFGILRWTQTELDTLDRQVRKLLTAYRIHHPRSSVMRLYIPRKCGGRGFLNAKNLHNREVYNLREYFLNMKSDIHMDVVAVDRGFTPLSLGKEKCRKPIIMRTVDRVAVWKSKELHGRFYKVLTDPDVDQPSSISWLQHGNLFGETEGFVCAIMDEVIKTNNYRKHIMKDGTPDICRACHKPGESIRHIVSGCSHLANGEYLHRHNQVARIIHQQLAIRYGLVENELPYYRYNPTPFLENGRALLYWDRSIVTDRFIGCNKPDIVLVDRSARRAIIVDITVPHDDNLVKAEKEKLSKYLDLAHEITGMWNVDSTIIVPIVVSVNGLLAKSFDQHLKKLSLDCWIKGRIQKAVLLETARIVRRFLSLEP

SEQ ID NO: 6341 - protein, 950 aa, Mellicta athalia
MDTILKEYLDSTQNLSDTHSVLYCGAAAVCDVAKVKFTSNKITLPSHTAPAWQARIEKRINLTRTLIAKLTCFRAGNRRPKIMRFVHQAFAGTNITSNEYITSVSDRIDFLKQKLCAWAKRIKRYKKRSDRYHQNSMFQRDQRKVYRNWEQCTTNVVNGELPTRDSIANFWRNIWSNPIDHIESDWMDVVRKRCSSLPQMEQIKISSEDISYAIRSTSNWKCPGLDGLHNFWLKRFHSSHPILASQFQDAILNNSLPKFMTTGTTFLLYKSGCTADPKNYRPITCLPTIYKLLTSVLVAKIRKHITINNILATTQNGCKSGSRGTKELLLIDMTICQQVRRNRKNLAATWIDYKKAYDSVPHTWLMKVMELYKIDATLCSFLSTCMRQWNTFLRYPGVVDVPGSTEPIRIMRGIFQGDSLSPLWFCLALNPLSTLLEDSGLGFHLRRGSKAISHLLYMDDLKLFASKLPDLYKLLKITETFSTCIRMEFGVDKCAVIHVERGRIVSSENLKLTNSLSFRSLNEGETYKYLGMSEALGIDDGAMKQLVKERFFGRLKKVLNSFLSGGNKVRAFNSWVMPLIVYTFGILRWTQTELDSLDRQVRKLLTTYRIHHPRSSLMRLYIPRKCGGRGFLNVKNLHNREVNNLREYFLNIKSDIHMDVVAVDKGFTPLSLGNEKWRKPIVMSTVDRVAVWKSKELHGRFYKALTDPDVDQPSSVSWLQHGNLFGETEGFVCAIMDEVIKTNNYRKHIMKDGTPDICRACHKPGESIRHVVSGCSHLANGEYLHRHNQVARIIHQQLALRYGLVENELPYYRYNPTPFLENGRALLYWDRSIVTDRFIAANKPDIVLVDRSARRAIIVDITVPHDDNLVKAEREKLSKYLDLAHEITGMWNVDSTIIVPIVVSVNGLLAKSFDQHLKKLSLDSWIKGRIQKAVLLETARIVRRFLSLEP

SEQ ID NO: 6342 - protein, 1190 aa, Mellicta athalia
MNKARGQHAQSTSKVPSHSETQSSTDDEYETPLSTAESDADDADSSTRRPKRRRVIRPPPVSLDVQGQHAPTRNPAAGGAVRRIRWTHKMNESVMRAYYEATGGGINLTAYRSTMLSLFQALEPTVTVTAQRLSDQVRAIQRCHLLDESVLERLRTNLPQFNTVSHIRAVQTSQKEQREVINLNNISPNSVDLSVNEQDNEPMRRALEDAILKYRSKPPNIRPQLPRLPIHRRNLALVGVMDTILKEYLDSTQNLADTHSILYCGAAAVCNVAEVKFTSNKITLPSHTAPAWQARIEKRINLTRTLIAKLTCFRAGNRRPKIMRFVHQAFAGTNITSNEYITSVSDRIDFLKQKLCAWAKRIKRYKKRRDRYNQNSMFQSDQRKVYRNWEQCTTNVVNGDLPTRESITNFWCNIWSNPIDHIESDWMGVVRRRCSSLPQMEQIKITSEDISYAIRSTSNWKCPGLDGLHNFWLKWFHSSHPILASQFQDAIFNNSLPKFMTTGTTFLLYKSGCTADPKNYRPITCLPTIYKLLTSVLVAKITKHISSNNILATTQNGCKSGNRGTKELLLIDMTICQQVRRNRKNLAAAWIDYKKAYDSVPHTWLMKVMELYKIDVTLCSFLSTCMRQWNTFLRYPGAVDVPGSTEPIRIMRGIFQGDSLSPLWFCLALNPLSTLLEDSRLGFHLRRGSKAISHLLYMDDLKLFASKLPDLNKLLKITETFSTCIRMEFGVDKCAVIHVERGRIVSSENLKLANSLSFRSLNEGETYKYLGMSEALGIDEGAMKQLVKERFFSRLKKVLNSFLSGANKVRAFNSWVMPLILYTFGILRWTQTELDSLDRQVRKLLTAYRIHHPRSSLMRLYIPRKCGGRGFLNVKNLHNRELYNLREYFLNIKSEIHMDVVAVDKGFTPLSLGKEKWCKPIVMSTVDRVAVWKSKELHGRFYKVLTDPDVDQPSSISWLQHGNLFGETEGFVCAIMDEVIKTNNYRKHIMKDGTPDICRACHKPGESIRHVVSGCSHLANGEYLHRHNQVARIIHQQLAIRYGLVENELPYYRYNPTPFLENGRALLYWDRSIVTDRFIAANKPDIVLVDRSARRTIIVDITVPHDDNLVKAEKEKLSKYLDLAHEITGMWNVDSTIIVPIVVSVNGLLAKSFDQHLKKLSLDGWIKGRIQKAVLLETARIVRRFLSLEP

SEQ ID NO: 6343 - protein, 1190 aa, Mellicta athalia
MNKARGQHAQSTSKVPSRSETQSSTDDEYETPPSTAESDADDADSSTRRPKRRRVIRPPPVSLDVQGQRAPTRNPAAGGAVRRMRWTHKMNESVMRAYYEATGGGINLTAYRSTMLSLFQALEPTVTVTAQRLSDQVRAIQRCHLLDESVLERLRTNLPQFNTVSHIRAVQTSQKEQREVINLNNISPNSVDLSVNEQDNEPMRRALEDAILKYRTMPPNIRPQLPRLPIHRRNLALVGVIDTILKEYLNSTQNLADTHSVLYCGAAAVCNVAKVKFTSNKITLPSHTAPAWQARIEKRINLTRTLIAKLTCFRAGNRRPKIMRFVHQAFAGTNITSNEYITSVSDRIDFLKQKLCAWAKRIKRYKKRRDRYNQNSMFQSDQRKVYRNWEQCTTNVVNGDLPTRESITNFWRNIWSNPIDHIESDWMDVVRRRCSSLPQMEQIKITSEDISYAMRSTSNWKCPGLDGLHNFWLKWFHSSHPILASQFQDAIFNNSLPKFMTTGTTFLLYKSGCTADPKNYRPITCLPTIYKLLTSVLVAKITKHISANNILATTQNGCKSGSRGTKELLLIDMTICQQVRRNRKNLAAAWIDYKKAYDSVPHTWLMKVMELYKIDVTLCSFLSTCMRQWNTFLRYPGAVDVPGSTEPIRIMRGIFQGDSLSPLWFCLALNPLSTLLEDSRLGFHLRRGSKAISHLLYMDDLKLFASKLPDLNKLLKITETFSTCIRMEFGVDKCAVIHVERGRIVSSENLKLANSLSFRSLNEGETYKYLGMSEALGIDEGAMKQLVKERFFSRLKKVLNSFLSGANKVRAFNSWVMPLIVYTFGILRWTQTELDSLDRQVRKLLTAYRIHHPRSSLMRLYIPRKCGGRGFLNVKNLHNRELYNLREYFLNIKSDIHMDVVAVDKGFTPLSLGKEKWRKPIVMSTVDRVAVWKSKELHGRFYKVLTDPDVDQPSSISWLQHGNLFGETEGFVCAIMDEVIKTNNYRKHIMKDGTPDICRACHKPGESIRHIVSGCSHLANGEYLHRHNQVARIIHQQLAIRYGLVENELPYYRYNPTPFLENGRALLYWDRSIVTDRFIVANKPDIVLVDRSARRAIIVDITVPHDDNLVKAEKEKLSKYLDLAHEITGMWNVDSTIIVPIVVSVNGLLAKSFDQHLKKLSLDGWIKGRIQKAVLLETARIVRRFLSLEP

SEQ ID NO: 6344 - protein, 1187 aa, Heliconius nattereri
MPGGQKHSQHHGRRCCPSNPQPPSSEDEYRTAASTAGSEGGMSESEGPALRPRRRADIPPSEGLEPGVSRMLNKAPTTGGKVPRMRWSQQLNESVMRAYYRATEGGTNLTAYRSRLLSMFQELEPTATVTAQRLSDRVRIIQRRHLLDESVLERLRLSFQQVNTTNNNSCDIRSQFQHANIESQGNIELSVSAQDDERLRRSLKDAILEYGSIPVNLRPKLPRLPMHRRNIALVGILDQHLPSHFNNCNDLTDTHSLLYCGAVAVCRVAGVQFPNKGGTKASKHTVPAWQYDTEKRINLTRILIGKLISFKSGNRRPRVMRFVAEAFAGTNLKPSEYMANVTNRIDFLKQKLYALAKRIRRYRERWDRYNQNSAFQRNQRSVYRKWERSGDSVVNCEIPNPDASAGFWRSIWSAPVEHTEGEWFCDIAKNCENIIPMRSIKISEIDVRCAIRYASNWKCPGLDGLHNFWLKWFRSSHSVFATQFQDALDSGSLPTFLTTGVTFLSYKSGCTTEPKNYRPITCLPTIYKLLTSILNKKITGHIVRNKILAPTQNGCKAGGRGTKELLLIDTTISQQVRRNRKNLTTAWIDYKKAYDSVPHTWLLKVLELYKIDITLRSFLEACMGQWVTVLRHLGECDIPATSEPIRIKRGIFQGDSLSPLWFCLALNPLSTMLEDSGLGFRLRRGGKVISHLLYMDDLKLFASKRSDLMRLLKVTQTFSSDIRMEFGVDKCASMHVVRGSVIRSDNICISDSVSFRTLGEGETYKYLGMSEALGIDERSIKQLVKERFFSRLKKVLGSLLSGGNKVRAFNGWVMPLLAYTFGIVRWTQTELDSVDRQIRKLLTTYRMHHPRSSVMRLYIPRKCGGRGFLNVKNLHNHEVCSLREYFLKIDVDMHKDVVTVDKGLTPLSLGKENWRRPVVLTTSDRMAVWKSKELHGRFHRALVGQDVDTASSLSWLQFGDLFGETEGFVCAIMDEVIKTRNYQRHIMKDGTIDICRACHRPGESLRHIVSGCSHLANGEYLHRHNQVAKIIHQQLALQYGLVELEVPYYRYNPMSVLENSCALLYWDRSIITDRYIVANRPDIVLVDRVARRAVIVDVTIPHDDNLVKAEKEKLSKYLDLAHEITAMWDVNATIIVPIVVSVNGLIAKSLDQHLKRLSLSCWIKNRIQKAVLLETARIVRRFLSLEP

SEQ ID NO: 6345 - protein, 1187 aa, Heliconius numata
MPGGQVHSQHHGWRCCPSNPQPPSSEDDYRTAASTAGSEEGMSESEGPALRPRRRADIPPAEGLEPGASRMLNKAPATGGKVPRMRWSQQLNESVMRAYYRATEGGTNLTAYRSRLLSMFQELEPTATVTAQRLSDRVRIIQRRHLLDESVLERLRLSFQQVNTTNNNSCDIRSQFQHANIESQGNIELSVSAQDDERLRRSLKDAILEYGSIPVNLRPKLPRLPMHRRNIALVRILDQHLPSHFNNCNDLTDTHSLLYCGAVAVCRVAGVQFPNKGGTKASKHTVPAWQYDTEKRINLTRIFIGKLISFKSGNRRPRVMRFVAEAFAGTNLKPSEYMANVTNRIDFLKQKLYALAKRIRRYRERWDRYNQNSAFQKNQRSIYRKWERSGDSVVNCEIPNPDASAGFWRSIWSAPVEHTEGEWFCGIAKNCENIIPMRSIKISEIDVRCAIRYASNWKCPGLDGLHNFWLKWFRSSHSVFATQFQDALDSGSLPTFLTTGVTFLSYKSGCTTEPKNYRPITCLPTIYKLLTSILNKKITEHIVRNKILAPTQNGCKAGGRGTKELLLIDTTISQQVRRNRKNLTTAWIDYKKAYDSVPHTWLLKVLELYKIDITLRSFLEACMGQWVTVLRHLGECDIPATSEPIRIKRGIFQGDSLSPLWFCLALNPLSTMLEDSGLGFRLRRGGKVISHLLYMDDLKLFASKRSDLMRLLKVTQTFSSDIRMEFGVDKCASMHVVRGSVIRSDNICISDSVSFRTLGEGETYKYLGMSEALGIDERSIKQLVKERFFSRLKKVLGSLLSGGNKVRAFNGWVMPLLAYTFGIVRWTQTELDSVDRQIRKLLTTYRMHHPRSSVMRLNIPRKCGGRGFLNVKNLHNHEVCSLREYFLKIDVDMHKDVVTVDKGLTPLSLGKENWRRPVVLTTSDRMAVWKSKELHGRFHRALVGQDVDTVSSLSWLQFGDLFGETEGFVCAIMDEVIKTRNYQRHIMKDGTIDICRACHRPGESLRHIVSGCSHLANGEYLHRHNQVAKIIHQQLALQYGLVELEVPYYRYNPMSVLENSCALLYWDRSIITDRYIVANRPDIVLVDRAARRAVIVDVTIPHDENLVKAEKEKQSKYLDLAHEITAMWDVNATIIVPIVVSVNGLIAKSLDQHLKRLSLSCWIKNRIQKAVLLETARIVRRFLSLEP

SEQ ID NO: 6346 - protein, 1190 aa, Mellicta athalia
MNKARGQHAQSTSKVPSRSETQSSTDDEYETPPSTAESDADDADSSTRRSKRRRVIRPPPVSLDVQGQRAPTRNPAAGGAVRRVRWTQKMNESVMRAYYQATGGGINLTAYRSTMLSLFQALEPTVTVTAQRLSDQVRAIQRCHLLDESVLERLRTNLPQFNTVSHIRAVQTSQKEQREVINLNNISPNSVDLSVNEQDNEPMRRALEDAILKYRSMSPNIRPQLPRLPIHRRNLALVGVMDTILKEYLDSTQNLSDTHSVLYCGAAAVCDVAKVKFTSNKITLPSHTAPAWQARIEKRINLTRTLIAKLTCFRAGNRRPKIMRFVHQAFAGTNITSNEYITSVSDRIDFLKQKLCAWAKRIKRYKKRSDRYHQNSMFQRDQRKVYRNWEQCTTNVVNGELPTRDSIANFWRNIWSNPIDHIESDWMDVVRKRCSSLPQMEQIKISSEDISYAIRSTSNWKCPGLDGLHNFWLKRFHSSHPILASQFQDAILNNSLPKFMTTGTTFLLYKSGCTADPKNYRPITCLPTIYKLLTSVLVAKIRKHITINNILATTQNGCKSGSRGTKELLLIDMTICQQVRRNRKNLAATWIDYKKAYDSVPHTWLMKVMELYKIDATLCSFLSTCMRQWNTFLRYPGVVDVPGSTEPIRIMRGIFQGDSLSPLWFCLALNPLSTLLEDSGLGFHLRRGSKAISHLLYMDDLKLFASKLPDLYKLLKITETFSTCIRMEFGVDKCAVIHVERGRIVSSENLKLTNSLSFRSLNEGETYKYLGMSEALGIDDGAMKQLVKERFFGRLKKVLNSFLSGGNKVRAFNSWVMPLIVYTFGILRWTQTELDSLDRQVRKLLTTYRIHHPRSSLMRLYIPRKCGGRGFLNVKNLHNREVNNLREYFLNIKSDIHMDVVAVDKGFTPLSLGNEKWRKPIVMSTVDRVAVWKSKELHGRFYKALTDPDVDQPSSVSWLQHGNLFGETEGFVCAIMDEVIKTNNYRKHIMKDGTPDICRACHKPGESIRHVVSGCSHLANGEYLHRHNQVARIIHQQLALRYGLVENELPYYRYNPTPFLENGRALLYWDRSIVTDRFIAANKPDIVLVDRSARRAIIVDITVPHDDNLVKAEREKLSKYLDLAHEITGMWNVDSTIIVPIVVSVNGLLAKSFDQHLKKLSLDSWIKGRIQKAVLLETARIVRRFLSLEP

SEQ ID NO: 6347 - protein, 1109 aa, Mellicta athalia
MRWTHKMNESVMRAYYEATGGGINLTTYRSTMLSLFQALEPTVTVTAQRLSDQVRAIQRCHLLDESVLERLRTNLPQLNTVSHIRAVQTSQKEQREVINLNLNNISPNSVDLSVNKQDNEHMRRALEDAILKYRSMPSNIRPQLPRLPIHRRNLALVGVMDTILKEYLDSTQNLSDTHSVLYCGAAAVCNVANVKFISNKITLPLHTAPAWQARIEKRINLTRTLIAKLTCFRAGNRRPKIMRFVHQAFAGTNITSNEYITSVSDRIDFLKQKLCAWAKRIKRYKKRRDRYNQNRMFQSNQRKVYRNWEQCTTNVVNGELPARESITNFWRNIWSNPIDHIESDWMDVVRRRCSSLPQMEQIKISSEDISYAIRSTSNWKCPGLDGLHNFWLKWFHSSHPILASQFQDAIFNNSLPKFMTTGTTFLLYKSGCTADPKNYRPITCLPTIYKLLTSVLATKITKHITTNNILATTQNGCKSGSRGTKELLLIDMTICQQVRRNRKNLAAAWVDYKKAYDSVPHTWLMKIIELYKIDATLCSFLSTCMRQWSTFLRYPGAVDASGSTEPIRIMRGIFQGDSLSPLWFCLALNPLSTLLEDSGLGFHLRRGSKAISHLLYMDDLKLFASKLPDLNKLLKITETFSTCIRMEFGVDKCAVIHVERGRIVSTENLKLANSLTFRSLNEGETYKYLGMSEALGIDDGAMKQLVKERFFGRLKKVLNSFLSGANKVRAFNSWVMPLIVYTFGILRWTQTELDSLDRQVRKLLTAYRIHHPRSSLMRLYIPRKCGGRGFLNVKNLHNREVYNLREYFLNIKSDIHMDVVAVDKGFTPLSLGKENWRKPIIMSTVDRVAVWKSKELHGRFYKVLTDPDVDQPSSISWLQHSNLFGETEGFVCAIMDEVIKKNNYRKHIMKDGTPDICRACHKPGESITHVVSGCSHLANGEYLHRHNQVARIIHQQLAIRYGLVENELPYYRYNPTPFLENGRALLYWDRSIVTDRFIAANKPDIVLVDRSARRAIIVDITVPHDDNLVKAEKEKLSKYLDLAHEITGMWNVDSTIIVPIVVSVNGLLAKSFDQHLKKLSLDGWIKGRIQKAVLLETARIVRRFLSLEP

SEQ ID NO: 6348 - protein, 1162 aa, Heliconius numata
MPGGQVHSQHHGRRCCPSNPQPPSSEDDYRTAASTAGSEEGMSESEGPALRPRRRADIPPAEGLEPGASRMLNKAPATGGKVPRMRWSQQLNESVMRAYYRATEGGTNLTAYRSRLLSMFQELEPTATVTAQRLSDRVRIIQRRHLLDESVLERLRLSFQQVNTTNNNSCDIRSQFQHANIESQGNIELSVSAQDDERLRRSLKDAILEYGSIPVDLRPKLPRLPMHRRNIALVRILDQHLPSHFNNCNDLTDTHSLLYCGAVAVCRVAGVQFPNKGGTKASKHTVPAWQYDTEKRINLTRTLIGKLISFKSGNRRPRVMRFVAEAFAGTNLKPSEYMANVTNRIDFLKQKLYALAKRIRRYRERWDRYNQNSAFQKNQRSVYRKWERSGDSVVNCEIPNPDASADFWRSIWSAPVEHTEGEWFCDIAKNCENIIPMRSIKISEIDVRCAIRYASNWKCPGLDGLHNFWLKWFRSSHSVFATQFQDALDSGSLPTFLTTGVTFLSYKSGCTTEPKNYRPITCLPTIYKLLTSILNKKITGHIVRNKILAPTQNGCKAGGRGTKELLLIDTTISQQVRRNRKNLTTAWIDYKKAYDSVPHTWLLKVLELYKIDITLRSFLEACMGQWVTVLRHLGECDIPATSEPIRIKRGIFQGDSLSPLWFCLALNPLSTMLEDSGLGFRLRRGGKVISHLLYMDDLKLFASKRSDLMRLLKVTQTFSSDIRMEFGVDKCASMHVVRGSVIRSDNICISDSVSFRTLGEGETYKYLGMSEALGIDERSIKQLVKERFFSRLKKVLGSLLSGGNKVRAFNGWVMPLLAYTFGIVRWTQTELDSVDRQIRKLLTTYRMHHPRSSVMRLYIPRKCGGRGFLNVKNLHNHEVCSLREYFLKIDVDMHKDVVTVDKGLTPLSLGKENWRRPVVLTTSDRMAVWKSKELHGRFHRALVGQDVDTVSSLSWLQFGDLFGETEGFVCAIMDEVIKTRNYQRHIMKDGTIDICRACHRPGESLRHIVSGCSHLANGEYLHRHNQVAKIIHQQLALQYGLVELEVPYYRYNPMSVLENSCALLYWDRSIITDRYIVANRPDIVLVDRAARRAVIVDVTIPHDENLVKAEKEKQSKYLDLAHEITAMWDVNATIIVPIVVSVNGLIAKSLDQHLKRLSLSCW

SEQ ID NO: 6349 - protein, 1187 aa, Heliconius numata
MPGGQVHSQHHGRRCCPSNPQPPSSEDDYRTAASTAGSEEGMSESEGPALRPRRRADIPPAEGLEPGASRMLNKAPATGGKVPRMRWSQQLNESVMRAYYRATEGGTNLTAYRSRLLSMFQELEPTATVTAQRLSDRVRIIQRRHLLDESVLERLRLSFQQVNTTNNNSCDIRSQFQHANIESQGNIELSVSAQDDERLRRSLKDAILEYGSIPVDLRPKLPRLPMHRRNIALVRILDQHLPSHFNNCNDLTDTHSLLYCGAVAVCRVAGVQFPNKGGTKASKHTVPAWQYDTEKRINLTRILIGKLISFKSGNRRPRVMRFVAEAFAGTNLKPSEYMANVTNRIDFLKQKLYALAKRIRRYRERWDRYNQNSAFQKNQRSVYRKWERSGDSVVNCEIPNPDASADFWRSIWSAPVEHTEGEWFCDIAKNCESIIPMRSIKISEIDVRCAIRYASNWKCPGLDGLHNFWLKWFRSSHSVFATQFQDALDSGSLPTFLTTGVTFLSYKSGCTTEPKNYRPITCLPTIYKLLTSILNKKITGHIVRNKILAPTQNGCKAGGRGTKELLLIDTTISQQVRRNRKNLTTAWIDYKKAYDSVPHTWLLKVLELYKIDITLRSFLEACMGQWVTVLRHLGECDIPATSEPIRIKRGIFQGDSLSPLWFCLALNPLSTMLEDSGLGFRLRRGGKVISHLLYMDDLKLFASKRSDLMRLLKVTQTFSSDIRMEFGVDKCASMHVVRGSVIRSDNICISDSVSFRTLGEGETYKYLGMSEALGIDERSIKQLVKERFFSRLKKVLGSLLSGGNKVRAFNGWVMPLLAYTFGIVRWTQTELDSVDRQIRKLLTTYRMHHPRSSVMRLYIPRKCGGRGFLNVKNLHNHEVCSLREYFLKIDVDMHKDVVTVDKGLTPLSLGKENWRRPVVLTTSDRMAVWKSKELHGRFHRALVGQDVDTVSSLSWLQFGDLFGETEGFVCAIMDEVIKTRNYQRHIMKDGTIDICRACHRPGESLRHIVSGCSHLANGEYLHRHNQVAKIIHQQLALQYGLVELEVPYYRYNPMSVLENSCALLYWDRSIITDRYIVANRPDIVLVDRAARRAVIVDVTIPHDENLVKAEKEKQSKYLDLAHEITAMWDVNATIIVPIVVSVNGLIAKSLDQHLKRLSLSCWIKNRIQKAVLLETARIVRRFLSLEP

SEQ ID NO: 6350 - protein, 1187 aa, Heliconius numata; identical to SEQ ID NO: 6333

SEQ ID NO: 6351 - protein, 1119 aa, Mellicta athalia
MNKARGQHAQSTSKAPSCSETQSSTDDEYETPPSTAESDANDAYSPTRRPKRRRVIRPPPVSLDVQGQRAPTRNPAAGGAVRRMRWTHKMNESVMRAYYEATGGGINLTAYRSTMLSLFQALEPTVTVTAQRLSDQVRAIQRCHLLDESVLERLRTNLPQLNTVSHIRAVQTSQKEQREVINLNNISPNSVDLSVNKQNNEHMRRALEDAILKYRSMPSNIRPQLPRLPIHRRNLALVGVMDTILKEYLDSTQNLSDTHSVLYCGAAAVCNVANVKFISNKITLPLHTAPAWQARIEKRINLTRTLIAKLTCFRAGNRRPKIMRFVHQAFAGTNITSNEYITSVSDRIDFLKQKLCAWAKRIKRYKKRRDRYNQNRMFQSNQRKVYRNWEQCTTNVVNGDLPARESITNFWRNIWSNPIDHIESNWMDVVRRRCSSLPQMEQIKISSEDISYAIRSTSNWKCPGLDGLHNFWLKWFHSSHPILASQFQDAIFNNSLPKFMTTGTTFLLYKSGCTADPKNYRPITCLPTIYKLLTSVLVTKITKHITTNNILATTQNGCKSGSRGTKELLLIDMTICQQVRRNRKNLAAAWIDYKKAYDSVPHTWLMKIMELYKIDATLCSFLSTCMRQWSTFLRYPGAVNVSGSTEPIRIMRGIFQGDSLSPLWFCLALNPLSTLLEDSGLGFHLRRGSKAISHLLYMDDLKLFASKLPDLNKLLKITETFSTCIRMEFGVDKCAVIHVERGRIVSTENLKLANSLTFRSLNEGETYKYLGMSEALGIDDGAMKQLVKERFFGQLKKVLNSFLSGANKVRAFNSWVMPLIVYTFGILRWTQTELDSLDRQVRKLLTAYRIHHPRSSLMRLYIPRKCGGRGFLNVKNLHNREVYNLREYFLNIKSDIHMDVVAVDKGFTPLSLGKEKWRKPIIMSTVDRVAVWKSKELHGRFYKVLTDPYVDQPSSISWLQHSNLFGETEGFVCAIMDEVIKTNNYRKHIMKDGTPDICRACHKPGESIRHVVSGCSHLANGEYLHRHNQVARIIHQQLAIRYGLVENELPYYRYNPTPFLENGRALLYWDRSIVTDRFIAANKPDIVLVDRSARRAIIVDITVPHDDNLVKAEKEKLSK

SEQ ID NO: 6352 - protein, 1192 aa, Mellicta athalia
MNKARGQHAQSTSKAPSRSETQSSTDDEYETPPSTAESDANDAYSPTRRSKRRRVVRPPPASLDVQGQRAPTRNPAAGGAVRRMRWTHKMNESVMRAYYEATGGGINLTAYRSTMLSLFQALEPTVTVTAQRLSDQVRAIQRCHLLDESVLERLRTNLPQLNTVSHIRAVQTSQKEQREVINLNLNNISPNSVDLSVNKQDNEHMRRALEDAILKYRSMPSNIRPQLPRLPIHRRNLALVGVMDTILKEYLDSTQNLSDTHSVLYCGAAAVCNVANVKFISNKSTLPLHTAPAWQARIEKRINLTRTLIAKLTCFRAGNRRPKIMRFVHQAFAGTNITSNEYITSVSDRIDFLKQKLCAWAKRIKRYKKRRDRYNQNRMFQSNQRKVYRNWEQCTTNVVNGDLPARESITNFWRNIWSNPIDHIESDWMDVVRRRCSSLPQMEQIKISSEDISYAIRSTSNWKCPGLDGLHNFWLKWFHSSHPILASQFQDAIFNNSLPKFMTTGTTFLLYKSGCTADPKNYRPITCLPTIYKLLTSVLVTKITKHITTNNILATTQNGCKSGSRGTKELLLIDMTICQQVRRNRKNLAAAWIDYKKAYDSVPHTWLMKIMELYKIDATLCSFLSTCMRQWSTFLRYPGAVDVLGSTEPIRIMRGIFQGDSLSPLWFCLALNPLSTLLEDSGLGFHLRRGSKAISHLLYMDDLKLFASKLPDLNKLLKITETFSTCIRMEFGVDKCAVIHVERGRIVSTENLKLANSLTFRSLNEGETYKYLGMSEALGIDDGAMKQLVKERFFGRLKKVLNSFLSGANKVRAFNSWVMPLIVYTFGILRWTQTELDSLDRQVRKLLTAYRIHHPRSSLMRLYIPRKCGGRGFLNVKNLHNREVYNLREYFLNIKSDIHMDVVAVDKGFTPLSLGKEKWRKPIIMSTVDRVAVWKSKELHGRFYKVLTDPDVDQPSSISWLQHSNLFGETEGFVCAIMDEVIKTNNYRKHIMKDGTPDICRACHKPGESIRHVVSGCSHLANGEYLHRHNQVARIIHQQLAIRYGLVENELPYYRYNPTPFLENGRALLYWDRSIVTDRFIAANKPDIVLVDRSARRAIIVDITVPHDDNLVKAEKEKLSKYLDLAHEITGMWNVDSTIIVPIVVSVNGLLAKSFDQHLKKLSLDGWIKGRIQKAVLLETARIVRRFLSLEP

SEQ ID NO: 6353 - protein, 1081 aa, Vanessa cardui
MLTRARQRAHNNASPDPPLSSASQAQDPAQGNNLMSAAASSSSDEYFSPPTSPTPVRRAGRRRPPTGLGARGQLVSNGVPASGGGVQRMRWTQSINENVMRAYYGATEGGTNLTAYRVRMLSMFQALEPAINVSAQRLSDQVRVILRNNRLSDTVLDRIRSEQCNGSVTSAPSQPVVQGPLPAIPQGPCHDHDDEGEGDMAITTSKYSDQLRSALEDAIREYRDIPVELRPRLPRLPMTKRNRDLVCTLDSLLADYIESSENLEDTHSILFCAAVAACRVAGVTFEDTERATRPKTVAPAWQSRIEKRINETRVLIGKLCCFKEGNTRPRVMRFVGRALLGTGISPQEYPSHVVERIDFLKQKVYAWASRIRRYRRRVDRYYLNRMFHSDQRWVYRTWERLDEGVSDGCRPDDDATNTFWRNIWSVPVDHIEGDWMREVRQACEPLEAMGEISIASEDVAAAVRSVPNWKSPGPDGLHSFWLKWLRSSHECLASQFQSALESGSLPQFLTTGVTHLLHKSGSATDPKNYRPITCLPTVYKLLNSILRDKINSHIENNTILSVSQNGCRGGSRGTKELLLIDMTISQQVRRSRKSLSTCWIDYKKAYDSVPHTWLLRVLELYKLDTTLCSFLRSCMGQWRTVLRYPGCRTIHSNDEPIRIERGIFQGDSLSPLWFCLALNPLSTLLESSRLGYRLRRGGKVISHLLYMDDLKLFAPSDSQLVEFLKVTETFSNSIRMEFGVDKCAVMHVKRGEIMESDGLQLSDSINFKSLSANESYKYLGMSEALGINVTDMKQSLQERFFGRLKKVLKSLLSGGNKVRAFNGWVMPVLMYSFGILKWTQKELDALDRRVRVLLTTYRMHHPRSSVMRLYIPRRCGGRGFLNAKTLRNREVYKLREYFLHTDLDMHRDVVTIDKGLTPLSLGKENCRKPVVLSTENRKEVWKSKELHGRFYRALHGPDVDFMASVSWLRFGNLFGETEGFVCAIMDEVIMTNNYRKYIVRDGTVDICRACHTPGESLRHIISGCSRLANGEYLHRHNQVAKIIHQQLALRYGLVVSEVPYYRYVPDPVLENGHITLYWDCR

SEQ ID NO: 6354 - protein, 1081 aa, Vanessa cardui
MLTRARQRAHNYPSPDPPLSSASQTQDPAQGSSLVSAVASSSSDEYFSPPTSPTPVRRAGRRRPPTGLGARGQPVSNRVPASGGGVQRMRWTQPINENVMRAYYGATKGGTNLTAYRVRMLSLFQALEPAVNVSAQRLSDQVRVILRNNRLSDTVLDRIRSETCNSGVTSGPSTPVVEEPLPTIPQGPEHDDEGGGDMAITTSKYSDHLRSALGDAIREYRNTPAELRPRLPRLPMTKRHRDLVCTLDSLLTDYFESSENLEDTHSILFCAAVAACSVAGVTFEDTERATRPKAVAPAWQSRIEKRINETRVLIGKLCCFKEGNTRPRVMRFVGRAFLGTGIGPQEYPSHVVERIDFLKQKVYAWASRIRRYRRRVDRYHLNRKFQSDQRWVYRTWERLDQDVSDGCRPDDDATNTFWRNIWSVPVDHIEGDWMLEVRQACEPLEVMGKISIASEDVAAAVRSVSNWKSPGPDGLHNFWLKWLRSSHERLASQFQSALESGSLPQFLTTGVTHLLHKSGSATDPKNYRPITCLPTVYKLLTAILRDKINSHIQNNSILSVSQNGCRGGSRGTKELLLIDMTISQQVRRSRKSLSTCWIDYKKAYDSVPHTWLLRVLELYKLDTTLCSFLRSCMGQWRTVLRYPGCRTIHGNDEPIRIERGIFQGDSLSPLWFCLALNPLSTLLESSRLGYRLRRGGKVISHLLYMDDLKLFAPSDSQLMELLKVTETFSNSIRMEFGVDKCAVMHVKRGEIMESDGLQLSDSINFKSLSANESYKYLGMSEALGINVTDMKQSLQERFFGRLKKVLKSLLSGGNKVRAFNGWVMPVLMYSFGILKWTQKELDTLDRKVRFLLTAYRMHHPRSSVMRLYIPRRCGGRGFLNAKTLHNREVYKLREYFLHTDLDMHRDVVTMDKGLTPLSLGKENWRKPVVLSTENRKEVWKCKELHGRFYRVLHGPDVDFMASVSWLRFGNLFGETEGFVCAIMDEVIMTNNYRKYIVRDGTVDICRACHTPGESLRHIISGCSRLANGEYLYRHNQVAKIIHQQLALRYGLVVSEVPYYRYVPDPVLENGHITVLGPIYNH

SEQ ID NO: 6355 - protein, 1187 aa, Heliconius nattereri
MPGGQKHSQHHGRRCCPSNPQPPSSEDEYRTAASTAGSEGGMSESEGPALRPRRRADIPPSEGLEPGVSRMLNKAPATGGKVPRMRWSQQLNESVMRAYYRATEGGTNLTAYRSRLLSMFQELEPTATVTAQRLSDRVRIIQRRHLLDESVLERLRLSFQQVNTTNNNSCDIRSQFQHANIESQGNIELSVSAQDDERLRRSLKDAILEYGSIPVNLRPKLPRLPMHRRNIALVGILDQHLPSHFNNCNDLTDTHSLLYCGAVAVCRVAGVQFPNKGGTKASKHTVPAWQYDTEKRINLTRILIGKLISFKSGNRRPRVMRFVAEAFAGTNLKPSEYMANVTNRIDFLKQKLYALAKRIRRYRERWDRYNQNSAFQRNQRSVYRKWERSGDSVVNCEIPNPDASAGFWRSIWSAPVEHTEGEWFCDIAKNCENIIPMRSIKISEIDVRCAIRYASNWKCPGLDGLHNFWLKWFRSSHSVFATQFQDALDSGSLPTFLTTGVTFLSYKSGCTTEPKNYRPITCLPTIYKLLTSILNKKITGHIVRNKILAPTQNGCKAGGRGTKELLLIDTTISQQVRRNRKNLTTAWIDYKKAYDSVPHTWLLKVLELYKIDITLRSFLEACMGQWVTVLRHLGECDIPATSEPIRIKRGIFQGDSLSPLWFCLALNPLSTMLEDSGLGFRLRRGGKVISHLLYMDDLKLFASKRSDLMRLLKVTQTFSSDIRMEFGVDKCASMHVVRGSVIRSDNICISDSVSFRTLGEGETYKYLGMSEALGIDERSIKQLVKERFFSRLKKVLGSLLSGGNKVRAFNGWVMPLLAYTFGIVRWTQTELDSVDRQIRKLLTTYRMHHPRSSVMRLYIPRKCGGRGFLNVKNLHNHEVCSLREYFLKIDVDMHKDVVTVDKGLTPLSLGKENWRRPVVLTTSDRMAVWKSKELHGRFHRALVGQDVDTASSLSWLQFGDLFGETEGFVCAIMDEVIKTRNYQRHIMKDGTIDICRACHRPGESLRHIVSGCSHLANGEYLHRHNQVAKIIHQQLALQYGLVELEVPYYRYNPMSVLENSCALLYWDRSIITDRYIVANRPDIVLVDRVARRAVIVDVTIPHDDNLVKAEKEKLSKYLDLAHEITAMWDVNATIIVPIVVSVNGLIAKSLDQHLKRLSLSCWIKNRIQKAVLLETARIVRRFLSLEP

SEQ ID NO: 6356 - protein, 1187 aa, Heliconius numata
MPGGQVHSQHHGRRCCPSNPQPPSSEDDYRTAASTAGSEEGMSESEGPALRPRRRADIPPAEGLEPGASRMLNKAPATGGKVPRMRWSQQLNESVMRAYYRATEGGTNLTAYRSRLLSMFQELEPTATVTAQRLSDKVRIIQRRHLLDESVLERLRLSFQQVNTTNNNSCDIRSQFQHANIESQGNIELSVSAQDDERLRRSLKDAILEYGSIPVDLRPKLPRLPMHRRNIALVRILDQHLPSHFNNCNDLTDTHSLLYCGAVAVCRVAGVQFPNKGGTKASKHTVPAWQYDTEKRINLTRILIGKLISFKSGNRRPRVMRFVAEAFAGTNLKPSEYMANVTNRIDFLKQKLYALAKRIRRYRERWDRYNQNSAFQKNQRSVYRKWERSGDSVVNCEIPNPDASADFWRSIWSAPVEHTEGEWFCDIAKNCENIIPMRSIKISEIDVRCAIRYASNWKCPGLDGLHNFWLKWFRSSHSVFATQFQDALDSGSLPTFLTTGVTFLSYKSGCTTEPKNYRPITCLPTIYKLLTSILNKKITGHIVRNKILAPTQNGCKAGGRGTKELLLIDTTISQQVRRNRKNLTTAWIDYKKAYDSVPHTWLLKVLELYKIDITLRSFLEACMGQWVTVLRHLGECDIPATSEPIRIKRGIFQGDSLSPLWFCLALNPLSTMLEDSGLGFRLRRGGKVISHLLYMDDLKLFASKRSDLMRLLKVTQTFSSDIRMEFGVDKCASMHVVRGSVIRSDNICISDSVSFRTLGEGETYKYLGMTEALGIDERSIKQLVKERFFSRLKKVLGSLLSGGNKVRAFNGWVMPLLAYTFGIVRWTQTELDSVDRQIRKLLTTYRMHHPRSSVMRLYIPRKCGGRGFLNVKNLHNHEVCSLREYFLKIDVDMHKDVVTVDKGLTPLSLGKENWRRPVVLTTSDRMAVWKSKELHGRFHRALVGQDVDTVSSLSWLQFGDLFGETEGFVCAIMDEVIKTRNYQRHIMKDGTIDICRACHRPGESLRHIVSGCSHLANGEYLHRHNQVAKIIHQQLALQYGLVELEVPYYRYNPMSVLENSCALLYWDRSIITDRYIVANRPDIVLVDRAARRAVIVDVTIPHDENLVKAEKEKQSKYLDLAHEITAMWDVNATIIVPIVVSVNGLIAKSLDQHLKRLSLSCWIKNRIQKAVLLETARIVRRFLSLEP

SEQ ID NO: 6357 - protein, 1118 aa, Heliconius melpomene
MLPPSSEDDYRTAASTAGSEEGMSESEGPALRPRRRADIPPSEGLEPGVSRMLNKAPATGGKVPRMRWSQQLNESVMRAYYRATEGGTNLTAYRSRLLSMFQELEPTATVTAQRLSDRVRIIQRRHLLDESVLERLRLSFQQVNTTNNNSCDIRSQFQHANIESQGNIELSVSAQDDERLRRSLKDAILEYGSIPVNLRPKLPRLPMHRRNIALVRILDQHLPSHFNNCNDLTDTHSLLYCGAVAVCRVAGVQFPNKGGTKASKHTVPAWQYDTEKRINLTRILIGKLISFKSGNRRPRVMRFVAEAFAGTNLKPSEYMANVTNRIDFLKQKLYALAKRIRRYRERWDRYNQNSAFQKNQRSVYRKWERSGDSVVNCEIPNPDASAGFWRSIWSAPVEHTEGEWFCDIAKKCENIIPMRSIKISEIDVRCAIRYASNWKCPGLDGLHNFWLKWFRSSHSVFATQFQDALDSGSLPTFLTTGVTFLSYKSGCTTEPKNYRPITCLPTIYKLLTSILNKKITGHIVRNKILAPTQNGCKAGGRGTKELLLIDTTISQQVRRNRKNLTTAWIDYKKAYDSVPHTWLLKVLELYKIDITLRSFLEACMGQWVTVLRHLGECDIPATSEPIRIKRGIFQGDSLSPLWFCLALNPLSTLLEDSGLGFRLRRGGKVISHLLYMDNLKLFASKRSDLMRLLKVTQTFSSDIRMEFGVDKCASMHVVRGSVISSDNICISDSVSFRTLGEGETYKYLGMSEALGIDERSIKQLVKERFFSRLKKVLGSVLSGGNKVRAFNGWVMPLLAYTFGIVRWTQTELDSVDRQIRKLLTTYRMHHLRSSVMRLYIPRKCGGRGFLNVKNLHNHEVCSLREYFLKIDVDMHKDVVTVDKGLTPLSLGKENWRRPVVLTTSDRMAVWKSKELHGRFHRALMGQDVDTVSSLSWLQFGDLFGETEGFVCAIMDEVIKTRNYQRHIMKDGTIDICRACHRPGESLRHIVSGCSHLANGEYLHRHNQVAKIIHQQLALQYGLVELEVPYYRYNPMSVLENSCALLYWDRSIITDRYIVANRPDIVLVDRVARRAVIVDVTIPHDENLVKAEKEKQSKYLDLAHEITRLDYHCADSGFG

SEQ ID NO: 6358 - protein, 1192 aa, Mellicta athalia
MNKARGQHAQSTSKAPSRSETQSSTDDEYETPPSTAESDANDAYSPTRRSKRRRVVRPPPASLDVQGQRAPTRNPAAGGAVRRMRWTHKMNESVMRAYYEATGGGINLTAYRSTMLSLFQALEPTVTVTAQRLSDRVRAIQRCHLLDESVLERLRTNLPQLNTVSHIRAVQTSQKEQREVINLNLNNISPNSVDLSVNKQDNEHMRRALEDAILKYRSMPSNIRPQLPRLPIHRRNLALVGVMDTILKEYLDSTQNLSDTHSVLYCGAAAVCNVANVKFISNKITLPLHTAPAWQARIEKRINLTRTLIAKLTCFRAGNRRPKIMRFVHQAFAGTNITSNEYITSVSDRIDFLKQKLCAWAKRIKRYKKRRDRYNQNRMFQSNQRKVYRNWEQCTTNVVNGDLPARESITNFWRNIWSNPIDHIESDWMDVVRRRCSSLPQMEQIKISSEDISYAIRSTSNWKCPGLDGLHNFWLKWFHSSHPILASQFQDAIFNNSLPKFMTTGTTFLLYKSGCTADPKNYRPITCLPTIYKLLTSVLVTKITKHITTNNILATTQNGCKSGSRGTKELLLIDMTICQQVRRNRKNLAAAWIDYKKAYDSVPHTWLMKIMELYKIDATLCSFLSTCMRQWSTFLRYPGAVDVSGSTEPIRIMRGIFQGDSLSPLWFCLALNPLSTLLEDSGLGFHLRRGSKAISHLLYMDDLKLFASKLPDLNKLLKITETFSTCIRMEFGVDKCAVIHVERGRIVSTENLKLANSLTFRSLNEGETYKYLGMSEALGIDDGAMKQLVKERFFGRLKKVLNSFLSGANKVRAFNSWVMPLIVYTFGILRWTQTELDSLDRQVRKLLTAYRIHHPRSSLMRLYIPRKCGGRGFLNVKNLHNREVYNLREYFLNIKSDIHMDVVAVDKGFTPLSLGKEKWRKPIIMSTVDRVAVWKSKELHGRFYKVLTDPDVDQPSSISWLQHSNLFGETEGFVCAIMDEVIKTNNYRKHIMKDGTPDICRACHKPGESIRHVVSGCSHLANGEYLHRHNQVARIIHQQLAIRYGLVENELPYYRYNPTPFLENGRALLYWDRSIVTDRFIAANKPDIVLVDRSARRAIIVDITVPHDDNLVKAEKEKLSKYLDLAHEITSMWNVDSTIIVPIVVSVNGLLAKSFDQHLKKLSLDGWIKGRIQKAVLLETARIVRRFLSLEP

SEQ ID NO: 6359 - protein, 1077 aa, Maniola jurtina
MVSLFQALEPTVTVSAQRLSDQVRVIQRRRMLDESTLDRLRLNLPQVITTGNSTHKSPQIPSVIEILNTQEELQGSLDLTVSNQNDEQMRRTLEDAILEFRSVPNNLRPKLPRLPVHRRNMALMAVLDKILGTYLESSYDLNDTHSILYCGAVAACRIASIKFPELHRAVKRPNTAPAWQAGIERRISLTRTLIAKLICFRAGNSRPRIMRFVHQAFAGTNISPSQYLSLVTDRIDFLKQKVYAWAQRIRRFRKRIDRASQNRMFQSDQRKMYRNWERPRGCMVDGELPTPDSTSDFWRSIWSAPIDHTEGEWMNVVRDQCATVVEMNPVTISAEDVRCAIRSASNWKCPGPDGLHNFWLKWFRSAHPVLATQFQNSIDSGSLPTLMTTGVTFLIHKSGSTADPKNYRPITCLPTIYKLLTSILTTKITMHINANNILAQVQNGCKARARGTKELLLIDTAICQQVRRNRKNLVAAWIDYKKAYDSVPHTWLMEIMRLYKVDATLCSFLDSCMSQWMTVLRQPGGNEFFESAEPIRIKRGIFQGDSLSPLWFCLALNPLSTLLKDSGLGYRLRKRGEVISHLLYMDDLKLYASKRTDLVKLLKITQNFSNNIGMEFGVDKCAIINIERGRVVNSENLVLSETLILRSLCEGETYKYLGMSEALGIEVRTMKQAVEERFFGRLKKVLNSLLSGGNKVRAFNGWVMPLLIYTFGILKWTQTELDALDRRIRKLLTTYRMHHPRSSVMRLYIPRKCGGRGFLNAKNLHNREVCNLRDYFLKVNVGIHRDVVAVDKGLTPLSLGKNNWRKPIVLSTSDRIAVWRSKELHGRFYKALTRPDVDSIASVSWLQFGDLFGETEGFICAIMDEVIKTNNYRKHIMKDGTLDICRACHLPGESLRHIVSGCSYLANGEYLHRHNQVAKIIHQQLALQYGLVDTEVPYYRYDPMSVLENSSALLYWDRSVITDRYIVANRPDIVLVDRSARRAMIVDVTIPHDDNLVKAEKEKVSKYLDLAHEITAMWSVDSAIIVPIVVSVHGLIANSFDQHLKKLSLNCWIKGKIQKAVILETARIVRRFLTLEP

SEQ ID NO: 6360 - protein, 1188 aa, Maniola jurtina
METRRHRHASAHTAQITSGVDSSSDEDYRTPPSSTGSADDTRPPRRAPRRRATHPPPDGLEQQELRAPTTASAASGVVRRMRWTQRMNENVMRAYYRATDGGTNLTGYRSRMVSLFQALEPTVTVSAQRLSDQVRVIQRRRVLDESTLDRLRLNLPQVITTGNSTHKSPQIPSVIEILNTQEELQGSLDLAVSNQNDEQMRRTLEDAILEFRSVPNNLRPKLPRLPVHRRNMALMAVLDKILGTYLESSYDLNDTHSILYCGAVAACRIASIKFPELHRAVKRPNTAPAWQAGIERRISLTRTLIAKLICFRASNSRPRIMRFVHQAFAGTNISPSQYLSLVTDRIDFLKQKVYAWAQRIRRFRKRIDRASQNRMFQSDQRKMYRNWERPRGCMVDGELPTPDSTSDFWRSIWSAPIDHTEGEWMNVVRDQCATVVEMNPVTISAEDVGCAIRSASNWKCPGPDGLHNFWLKWFRSAHPVLATQFQNSIDSGSLPTLMTTGVTFLVHKSGSTADPKNYRPITCLPTIYKLLTSILTTKITMHINANNILAQVQNGCKARARGTKELLLIDTAICQQVRRNRKNLVAAWIDYKKAYDSVPHTWLMEIMRLYKVDATLCSFLDSCMSQWMTVLRQPGGDEFFESAEPIRIKRGIFQGDSLSPLWFCLALNPLSTLLKDSGLGYRLRKGGEVISHLLYMDDLKLYASKRTDLVKLLKITQNFSNNIGMEFGVDKCVIINIERGRVVNSENLVLSETLILRSLCEGETYKYLGMSEALGIEVRTMKQAVEERFFGRLKKVLNSLLSGGNKVRAFNGWVMPLLIYTFGILKWTQTELDALDRRIRKLLTTYRMHHPRSSVMRLYIPRKCGGRGFLNAKNLHNREVCNLRDYFLKVNVGIHRDVVAVDKGLTPLSLGKNNWRKPIVLSTSDRIAVWRSKELHGRFYKALTRPDVDSIASVSWLQFGDLFGETEGFICAIMDEVIKTNNYRKHIMKDGTLDICRACHLPGESLRHIVSGCSYLANGEYLHRHNQVAKIIHQQLALQYGLVDTEVPYYRYDPMSVLENSSALLYWDRSVITDRYIVANRPDIVLVDRSARRAMIVDVTIPHDDNLVKAEKEKVSKYLDLAHEITAMWSVDSAIIVPIVVSVNGLIANSFDQHLKKLSLNCWIKGKIQKAVVLETARIVRRFLTLEP

SEQ ID NO: 6361 - protein, 868 aa, Heliconius melpomene
MRFVAEAFAGTNLKPSEYMANVTNRIDFLKQKLYALAKRIRRYRERWDRYNQNSAFQKNQRSVYRKWERSGDSVVNCEIPNPDASAGFWRSIWSAPVEHTEGEWFCDIVKNCENIIPMPSIKISEIDVRCAIRYASNWKCPGLDGLHNFWLKWFRSSHSVFATQFQDALDSGSLPTFLTTGVTFLSYKSGCTTEPKNYRPITCLPTIYKLLTSILNKKITGHIVRNKILAPTQNGCKAGGRGTKELLLIDTTISQQVRRNRKNLTTAWIDYKKAYDSVPHTWLLKVLELYKIDMTLRSFLEACMGQWVTVLRHLGECDIPATSEPIRIKRGIFQGDSLSPLWFCLALNPLSTLLEDSGLGFRLRRGGKVISHLLYMDDLKLFASKRSDLMRLLKVTQTFSSDIGMEFGVDKCASMHVVRGSVIRSDNICISDSVSFRTLGEGETYKYLGMSEALGIDERSIKQLVKERFFSRLKKVLGSLLSGGNKVRAFNGWVMPLLAYTFGIVRWTQTELDSVDRQIRKLLTTYRMHHPRSSVMRLYIPRKCGGRGFLNVKNLHNHEVCSLREYFLKIDVDMHKDVVTVDKGLTPLSLGKENWRRPVVLTTSDRMAVWKSKELHGRFHRALVGQDVDTVSSLSWLQFGDLFGETEGFVCAIMDEVIKTRNYQRHIMKDGTIDICRACHRPGESLRHIVSGCSHLANGEYLHRHNQVAKIIHQQLALQYGLVELEVPYYRYNPMSVLENSCALLYWDRSIITDRYIVANRPDIVLVDRAARRAVIVDVTIPHDENLVKAEKEKQSKYLDLAHEITAMWDVNATIIVPIVVSVNGLIAKSLDQHLKRLSLSCWIKNRIQKAVILETARIVRRFLSLEP

SEQ ID NO: 6362 - protein, 1192 aa, Melitaea cinxia
MNKARGRREQKRPKVPSSSETQSTTDDEYQTPPSTAESDANDADSSTRPSNRRRVIRPPPACLEVQGQCAPTRNPAAGGVVRRMRWTQKMNESVMRAYYEATGGGINLTAYRSTMLSLFQALEPTVTVTAQRLSDQVRAIQRCHLLDESVLERLRTNLPQLNTVSHIRDIQTSQKEQREVINFNINHISPNSVDLSVNEQDNEPMRRALEDAILKYRSLPPNIRPQLPRLPIHRRNLALVGVMDKILQQYLDSTQNLSDTHSLLYCGAAAVCNVANVKFKSNKITLPSHTAPAWQARIEKRINLTRTLIAKLTCFRAGNRRPKIMRFVHQAFAGTNIRSNEYITSVSDRIDFLKQKLCAWAKRIKRYKKRRDRYHQNSIFQSDQRKVYRNWEQCTTNVVNGNLPTRESINNFWRNIWSNPIDHIESDWMDVVRRRCSSLPQMEQIKINPEDISYAIRSTSNWKCPGLDGLHNFWLKWFHSSHPILASQFQNAISTNTLPKFMTTGTTFLLYKSGCTADPKNYRPITCLPTIYKLLTSVLVTKITKHITTNNILATTQNGCKSGSRGTKELLLIDMTICQQVRRNRKNLAAAWIDYKKAYDSVPHTWLMKVMELYKIDAALCSFLSTCMRQWNTFLRHPGAVDVSGSTEPIRIMRGIFQGDSLSPLWFCLALNPLSTLLEDSRLGFHLRRGSKAISHLLYMDDLKLFASKLPDLYKLLKITETFSTCIRMEFGVDKCAVIHVERGRTVSSQNLKLNNSLSFRSLNEGETYKYLGMSEALGIDDGAMKQLVKERFFGRLKKVLNSFLSGGNKVRAFNSWVMPLIVYTFGILRWTQTELDTLDRQVRKLLTTYRIHHPRSSVMRLYIPRKCGGRGFLNAKNLHNREVYNLRNYFLNMKSDMHMDVVAVDRGFTPLSLSKEKWRKPIVMRTVDRVAVWKSKELHGRFYKVLTDPDVDQPSSISWLQHGNLFGETEGFVCAIMDEVIKTNNYRKHIMKDGTPDICRACHKPGESIRHVVSGCSHLANGEYLHRHNQVARIIHQQLAIRYGLVENELPYYRYSPMPFLENGRALLYWDRSIVTDRFIAANKPDIVLVDRSARRAIIVDITVPHDDNLVKAEKEKLSKYLDLAHEITGMWNVDSTIIVPIVVSVNGLLAKSFDQHLKKLSLDCWIKGRIQRAVLLETARIVRRFLSLEP

SEQ ID NO: 6363 - protein, 974 aa, Mellicta athalia
MPPNIRPQLPRLPIHRRNLALVGIVDTILKEYLDNTQNLADTHSVLYCGAAAVCNVAKVKFTSNKITLPSHTAPAWQARIEKRINLTRTLIAKLTCFRAGNRRPKIMRFVHQAFAGTNITSNEYITSVSDRIDFLKQKLCAWAKRIKRYKKRRDRYNQNSMFQSDQRKVYRNWEQCTTNVVNGDLPTRESITNFWRNIWSNPIDHIESDWMDVVRRRCSSLPQMEQIKISSEDISYAIRSTSNWKCPGLDGLHNFWLKWFHSSHPILASQFQDAIFNNSLPKFMTTGTTFLLYKSGCTADPKNYRPITCLPTIYKLLTSVLVAKITKHIRANNILATTQNGCKSGSRGTKELLLIDMTICQQVRRNRKNLAAAWIDYKKAYDSVPHTWLMKVMELYKIDVTLCSFLSTCMRQWNTFLRYPGAVDVPGSTEPIRIMRGIFQGDSLSPLWFCLALNPLSTLLEDSRLGFHLRRGSKAISHLLYMDDLKLFASKLPDLNKLLKIAETFSTCIRMEFGVDKCAVIHVERGRIVSSENLKLANSLSFRSLNEGETYKYLGMSEALGIDEGAMKQLVKERFFSRLKKVLNSFLSGANKVRAFNSWVMPLIVYTFGILRWTQTELDSLDRQVRKLLTAYRIHHPRSSLMRLYIPRKCGGRGFLNVKNLHNRELYNLREYFLNIKSDIHMDVVAVDKGFTPLSLGKEKWRKPIVMSTVDRVAVWKSKELHGRFYKALTDPDVDQPSSISWLQHGNLFGETEGFVCAIMDEVIKTNNYRKHIMKDGTPDICRACHKPGESIRHIVSGCSHLANGEYLHRHNQVARIIHQQLAIRYGLVENELPYYRYNPTPFLENGRALLYWDRSIVTDRFIAANKPDIVLVDRSTRRAIIVDITVPHDDNLVKAEKEKLSKYLDLAHEITGMWNVDSTIIVPIVVSVNGLLAKSFDQHLKKLSLDGWIKGRIQKAVLLETARIVRRFLSLEP

SEQ ID NO: 6364 - protein, 1192 aa, Melitaea cinxia
MNKARGRRAQKRPKVPSSSETQSTTDDEYQTPPSTAESDANDADSSTRPSNRRRVIRPPPACLEVQGQCAPTRNPAAGGAVRRMRWTQKMNESVMRAYYEATGGGINLTAYRSTMLSLFQALEPTVTVTAQRLSDQVRAIQRCHLLDESVLERLRTNLPQLNTVSHIRDIQTSQKEQREVINFNINHISPNSVDLSVNEQDNEPMRRALEDAILKYRSLPPNIRPQLPRLPIHRRNLALVGVMDKILQQYLDSTQNLSDTHSLLYCGAAAVCNVANVKFKSNKITLPSHTAPAWQARIEKRINLTRTLIAKLTCFRVGNRRPKIMRFVHQAFAGTNIRSNEYITSVSDRIDFLKQKLCAWAKRIKRYKKRRDRYHQNSIFQSDQRKVYRNWEQCTTNVVNGNLPTRESINNFWRNIWSNPIDHIESDWMDVVRRRCSSLPQMEQIKINPEDISYAIRSTSNWKCPGLDGLHNFWLKWFHSSHPILASQFQNAISTNTLPKFMTTGTTFLLYKSGCTADPKNYRPITCLPTIYKLLTSVLVTKITKHITTNNILATTQNGCKSGSRGTKELLLIDMTICQQVRRNRKNLAAAWIDYKKAYDSVPHTWLMKVMELYKIDAALCSFLSTCMRQWNTFLRHPGAVDVSGSTEPIRIMRRIFQGDSLSPLWFCLALNPLSTLLEDSRLGFHLRRGSKAISHLLYMDDLKLFASKLPDLYKLLKITETFSTCIRMEFGVDKCAVIHVERGRIVSSQNLKLNNSLSFRSLNEGETYKYLGMSEALGIDDGAMKQLVKERFFGRLKKVLNSFLSGGNKVRAFNSWVMPLIVYTFGILRWTQTELDTLDRQVRKLLTTYRIHHPRSSVMRLYIPRKCGGRGFLNAKNLHNREVYNLRNYFLNMKSDMHMDVVAVDRGFTPLSLGKEKWRKPIVMRTVDRVAVWKSKELHGRFYKVLTDPDVDQPSSISWLQHGNLFGETEGFVCAIMDEVIKTNNYRKHIMKDGTPDICRACHKPGESIRHVVSGCSHLANGEYLHRHNQVARIIHQQLAIRYGLVENELPYYRYSPMPFLENGRALLYWDRSIVTDRFIAANKPDIVLVDRSARRAIIVDITVPHDDNLVKAEKEKLSKYLDLAHEITGMWNVDSTIIVPIVVSVNGLLAKSFDQHLKKLSLDCWIKGRIQRAVLLETARIVRRFLSLEP

SEQ ID NO: 6365 - protein, 1192 aa, Melitaea cinxia
MNKARGRRAQKRPKVPSSSETQSTTDDEYQTPPSTAESDADDADSSTRPSNRRRVIRPPPACLEVQGQYAPTRNPAAGGAVRRMRWTQKMNESVMRAYYEATGGGINLTAYRSTMLSLFQALEPTVTVTAQRLSDQVRAIQRCHLLDESVLERLRTNLPQLNTVSHIRDIQTSQKEQREVINFNINHISPNSVDLSVNEQDNEPMRRALENAILKYRSLPPNIRPQLPRLPIHRRNLALVGVMDKILQQYLDSTQNLSDTHSLLYCGAAAVCNVANVKFKSNKITLPSHTAPAWQARIEKRINLTRTLIAKLTCFRAGNMRPKIMRFVHQAFAGTNIRSNEYITSVSNRIDFLKQKLCAWAKRIKRYKKRRDRYHQNSIFQSDQRKVYRNWEQCTTNVVNGNLPTRESINNFWRNIWSNPIDHIESDWMDVVRRRCSSLPQMEQIKINSEDISYAIRSTSNWKCPGLDGLHNFWLKWFHSSYPILASQFQNAISTNTLPKFMTTGTTFLLYKSGCTADPKNYRPITCLPTIYKLLTSVLVTKITKHITTNNILATTQNGCKSGSRGTKELLLIDMTICQQVRRNRKNLAATWIDYKKAYDSVPHTWLMKVMELYKIDAALCSFLSTCMRQWNTFLRHPGAVDVSGSTEPIRIMRGIFQGDSLSPLWFCLALNPLSTLLEDSRLGFHLRRGSKAISHLLYMDDLKLFASKLPDLYKLFKITETFSTCIRMDFGVDKCAVIHVERGRTVSSQNLKLNNSLSFRSLNEGETYKYLGMSEALGIDDGAMKQQVKERFFGRLKKVLNSFLSGGNKVRAFNSWVMPLIVYTFGILRWTQTELDTLDRQVRKLLTTYRIHHPRSSVMRLYIPRKCGGRGFLNAKNLHNREVYNLREYFLNMKSDMHMDVVAVDRGFTPLSLGKEKWRKPIVMRTVDRVAVWKSKELHGRFYKVLTDPDVDQPSSISWLQHGNLFGETEGFVCAIMDEVIKTNNYRKHIMKDGTPDICRACHKPGESIRHVVSGCSHLANGEYLHRHNQVARIIHQQLAIRYGLVENELPYYRYSPTPFLENGRALLYWDRSIVTDRFIAANKPDIVLVDRSARRAIIVDITVPHDDNLVKAEKEKLSKYLDLAHEITGMWNVDSTIIVPIVVSVNGLLAKSFDQHLKKLSLDCWIKGRIQKAVLLETARIVRRFLSLEP

SEQ ID NO: 6366 - protein, 1193 aa, Mellicta athalia
MNKARGQHAHTRTKATSSSDTQSSTTDDEYKTPPSTAESDADDADSSARPSKRRRVIRPPPASLDVQGQRQRAPTRNPAAGGAVRRMRWTQKMNESVMRAYYEATGGGINLTAYRSTMLSLFQALEPTVTVTAQRLSDQVRAIQRCHLLDESVLERLRTNLPQLNTVSHIRAVQTSQKEQREVINLNHISPNSVDLSVNEQDNEPMRRALEDAILKYRSMPPNIRPQLPRLPIHRRNLALVGIMDTILKEYLDSTQNLSDTHSVLYCGAAAVCDVAKVKFTSNKITLPSHTAPAWQARIEKRINLTRTLIAKLTCFRAGNRRPKIMRFVHQAFAGTNISSKEYTTSVSDRIDFLKQKLCAWAKRIKRYKKRSDRYHQNSMFQRDQRKVYRNWEQCTTNVVNGELPTRDSIANFWRNIWSNPIDHIESDWMDVVRKRCSSLPQMEQIKISPEDINYAIRSTSNWKCPGLDGLHNFWLKRFHSSHPILASQFQDAILNNSLPKFMTTGTTFLLYKSGCTADPKNYRPITCLPTIYKLLTSVLVAKITKHITINNILATTQNGCKSGSRGTKELLLIDMTICQQVRRNRKNLAAAWIDYKKAYDSVPHTWLMKVMELYKIDAALCSFLSTCMRQWNTFLRYPGVVDVPGSTEPIRIMRGIFQGDSLSPLWFCLALNPLSTLLEDSGLGFHLRRGSKAISHLLYMDDLKLFASKLPDLYKLLKITETFSTCISMEFGVDKCAVIHVERGRIVSSENLKLTNSLSFRSLNEGETYKYLGMSEALGIDDGAMKQLVRERFFGRLKKVLNSFLSGGNKVRAFNSWVVPLIVYTFGILRWTQTELDSLDRQVRKLLTAYRIHHPRSSLMRLYIPRKCGGRGFLNVKNLHNREVYNLREYFLNIKNDMHMDVVAVDKGFTPLSLGKEKWRKPIVMSTVDRVAVWKSKELHGRFYKSLTDPDVDQPSSVSWLQHGNLFGETEGFVCAIMDEVIKTNNYRKHIMKDGTPDICRACHKPGESIRHIVSGCSHLANGEYLHRHNQVARIIHQQLAIRYGLVENELPYYRYNPTPFLENGRALLYWDRSIVTDRFIAANKPDIVLVDRSARRAIIVDITVPHDDNLVKAEKEKLSKYLDLAHEITGMWNVDSTIIVPIVVSVNGLLAKSFDQHLKKLSLDCWIKGRIQKAVLLETARIVRRFLNLEP

SEQ ID NO: 6367 - protein, 868 aa, Mellicta athalia
MRFVHQAFAGTNISSKEYTTSVSDRIDFLKQKLCAWAKRIKRYKKRSDRYHQNSMFQRDQRKVYRNWEQCTTNVVNGELPTRDSIANFWRNIWSNPIDHIESDWMDVVRKRCSSLPQMEQIKISPEDINYAIRSTSNWKCPGLDGLHNFWLKRFHSSHPILASQFQDAILNNSLPKFMTTGTTFLLYKSGCTADPKNYRPITCLPTIYKLLTSVLVAKITKHITINNILATTQNGCKSGSRGTKELLLIDMTICQQVRRNRKNLAAAWIDYKKAYDSVPHTWLMKVMELYKIDAALCSFLSTCMRQWNTFLRYPGVVDVPGSTEPIRIMRGIFQGDSLSPLWFCLALNPLSTLLEDSGLGFHLRRGSKAISHLLYMDDLKLFASKLPDLYKLLKITETFSTCIRMEFGVDKCAVIHVERGRIVSSENLKLTNSLSFRSLNEGETYKYLGMSEALGIDDGAMKQLVRERFFGRLKKVLNSFLSGGNKVRAFNSWVMPLIVYTFGILRWTQTELDSLDRQVRKLLTAYRIHHPRSSLMRLYIPRKCGGRGFLNVKNLHNREVYNLREYFLNIKSDMHMDVVAVDKGFTPLSLGKEKWRKPIVMSTVDRVAVWKSKELHGRFYKSLTDPDVDQPSSVSWLQHGNLFGETEGFVCAIMDEVIKTNNYRKHIMKDGTPDICRACHKPGESIRHVVSGCSHLANGEYLHRHNQVARIIHQQLAIRYGLVENELPYYRYNPTPFLENGRALLYWDRSIVTDRFIAANKPDIVLVDRSARRAIIVDITVPHDDNLVKAEKEKLSKYLDLAHEITGMWNVDSTIIVPIVVSVNGLLAKSFDQHLKKLSLDCWIKGRIQKAVLLETARIVRRFLSLEP

SEQ ID NO: 6368 - protein, 1188 aa, Maniola jurtina
METRRHRHASAHTAQITSGVDSSSDEDYRTPPSSTGSADDTRPPRRAPRRRATHPPPDGLEQQELRAPTTASAASGVVRRMRWTQRMNENVMRAYYRATDGGTNLTGYRSRMVSLFQALEPTVTVSAQRLSDQVRVIQRRRVLDESTLDRLRLNLPQVITTGNSTHKSPQIPSVIEILNTQEELQGGLDLTVSNQNDEQMRRTLEDAILEFRSVPNNLRPKLPRLPVHRRNMALMAVLDKILGTYLESSYDLNDTHSILYCGAVAACRIASIKFPELHRAVKRPNTAPAWQAGIERRISLTRTLIAKLICFRAGNSRPRIMRFVHQAFAGTNISPSQYLSLVTDRIDFLKQKVYAWAQRIRRFRKRIDRASQNRMFQSDQRKMYRNWERPRGCMVDGELPTPDSTSDFWRSIWSAPIDHTEGEWMNVVRDQCATVVEMNPVTISAEDVGCAIRSASNWKCPGPDGLHNFWLKWFRSAHPVLATQFQNSIDSGSLPTLMTTGVTFLIHKSGSTADPKNYRPITCLPTIYKLLTSILTTKITMHINANNILAQVQNGCKARARGTKELLLIDTAICQQVRRNRKNLVAAWIDYKKAYDSVPHTWLMEIMRLYKVDATLCSFLYSCMSQWMTVLRQPGGDEFFESAEPIRIKRGIFQGDSLSPLWFCLALNPLSTLLKDSGLGYRLRKGGEVISHLLYMDDLKLYASKRTDLVKLLKITQNFSNNIGMEFGVDKCAIINIERGRVVNSENLVLSETLILRSLCEGETYKYLGMSEALGIEVRTMKQAVEERFFGRLKKVLNSLLSGGNKVRAFNGWVMPLLIYTFGILKWTQTELDALDRRIRKLLTTYRMHHPRSSVMRLYIPRKCGGRGFLNAKNLHNREVCNLRDYFLKENVGIHRDVVAVDKGLTPLSLGKNNWRKPIVLSTSDRIAVWRSKELHGRFYKALTRPDVDSIASVSWLQFGDLFGETEGFICAIMDEVIKTNNYRKHIMKDGTLDICRACHLPGESLRHIVSGCSYLANGEYLHRHNQVAKIIHQQLALQYGLVDTEVPYYRYDPMSVLENSSALLYWDRSVITDRYIVANRPDIVLVDRSARRAMIVDVTIPHDDNLVKAEKEKVSKYLDLAHEITTMWSVDSAIIVPIVVSVHGLIANSFDQHLKKLSLNCWIKGKIQKAVVLETARIVRRFLTLEP

SEQ ID NO: 6369 - protein, 973 aa, Heliconius numata
MFQELEPTATVTAQRLSDRVRIIQRRHLLDESVLERLRLSFQQVNTTNNNSCDIRSQFQHANIASQGNIELSVSAQDDERLRRSLKDAILEYGSIPVNLRPKLPRLPMHRRNIALVRILDQHLPSHFNNCNDLTDTHSLLYCGAVAVCRVAGVQFPNKGGTKASKHTVPAWQYDTEKRINLTRILIGKLISFKSGNRRPRVMRFVAEAFAGTNLKPSEYMANVTNRIDFLKQKLYALAKRIRRYRERWDRYNQNSAFQKNQRSVYRKWERSGDSVVNCEIPNPDASAGFWRSIWSAPVEHTEGEWFCDIAKNCENIIPMRSIKISEIDVRCAIRFASNWKCPGLDGLHNFWLKWFRSSHSVFATQFQDALDSGSLPTFLTTGVTFLSYKSGCTTEPKNYRPTTSLPTIYKLLTSILNKKITGHIVRNKILAPTQNGCKAGGRGTKELLLIDTTISQQVRRNRKNLTTAWIDYKKAYDSVPHTWLLKVLELYKIDITLRSFLEACMGQWVTVLRHLGECDIPATSEPIRIKRGIFQGDSLSPLWFCLALNPLSTMLEDSGLGFRLRRGGKVISHLLYMDDLKLFASKRSDLMRLLKVTQTFSSDIRMEFGVDKCASMHVVRGSVIRSDNIYISDSVSFRTLGEGETYKYLGMSEALGIDERSIKQLVKERFFSRLKKVLGSLLSGGNKVRAFNGWVMPLLAYTFGIVRWTQTELDSVDRQIRKLLTTYRMHHPRSSVMRLYIPRKCGGRGFLNVKNLHNHEVCSLREYFLKIDVDMHKDVVTVDKGLTPLSLGKENWRRPVVLTTSDHMAVWKSKELHGRFHRALVGQDVDTVSSLSWLQFGDLFGETEGFVCAIMDEVIKTRNYQRHIMKDGTIDICRACHRPGESLRHIVSGCSHLANGEYLHRHNQVAKIIHQQLALQYGLVELEVPYYRYNPMSVLENSCALLYWDRSIITDRYIVANTSRPSGAPRSDC

SEQ ID NO: 6370 - protein, 868 aa, Heliconius numata
MRFVAEAFAGTNLKPSEYMANVTNRIDFLKQKLYALAKRIRRYRERWDRYNQNSAFQKNQRSVYRKWERSGDSVVNCEIPNPDASADFWRSIWSAPVEHTEGEWFCDIAKNCENIIPMRSIKISEIDVRCAIRYASNWKCPGLDGLHNFWLKWFRSSHSVFATQFQDALDSGSLPTFLTTGVTFLSYKSGCTTEPKNYRPITCLPTIYKLLTSILNKKITGHIVRNKILAPTQNGCKAGGRGTKELLLIDTTISQQVRRNRKNLTTAWIDYKKAYDSVPHTWLLKVLELYKIDITLRSFLEACMGQWVTVLRHLGECDIPATSEPIRIKRGIFQGDSLSPLWFCLALNPLSTMLEDSGLGFRLRRGGKVISHLLYMDDLKLFASKRSDLMRLLKVTQTFSSDIRMEFGVDKCASMHVVRGSVIRSDNICISDSVSFRTLGEGETYKYLGMSEALGIDERSIKQLVKERFFSRLKKVLGSLLSGGNKVRAFNGWVMPLLAYTFGIVRWTQTELDSVDRQIRKLLTTYRMHHPRSSVMRLYIPRKCGGRGFLNVKNLHNHEVCSLREYFLKIDVDMHKDVVTVDKGLTPLSLGKENWRRPVVLTTSDRMAVWKSKELHGRFHRALVGQDVDTVSSLSWLQFGDLFGETEGFVCAIMDEVIKTRNYQRHIMKDGTIDICRACHRPGESLRHIVSGCSHLANGEYLHRHNQVAKIIHQQLALQYGLVELEVPYYRYNPMSVLENSCALLYWDRSIITDRYIVANRPDIVLVDRAARRAVIVDVTIPHDENLVKAEKEKQSKYLDLAHEITAMWDVNATIIVPIVVSVNGLIAKSLDQHLKRLSLSCWIKNRIQKAVLLETARIVRRFLSLEP

SEQ ID NO: 6371 - protein, 1092 aa, Heliconius melpomene
MRAYYRATEGGTNLTAYRSRLLSMFQELEPTATVTAQRLSDRVRIIQRRHLLDESVLERLRLSFQQVNTTNNNSCDIRSQFQHANIESQGNIELSVSAQDDERLRRSLKDAILEYGSIPVNLRPKLPRLPMHRRNIALVRILDQHLPSHFNNCNDLTDTHSLLYCGAVAVCRVAGVQFPNKGGTKASKHTVPAWQYDTEKRINLTRILIGKLISFKSGNRRPRVMRFVAEAFAGTNLKPSEYMANVTNRIDFLKQKLYALAKRIRRYRERWDRYNQNSAFQKNQRSVYRKWERSGDSVVNCEIPNPDASAGFWRSIWSAPVEHTEGEWFCDIVKNCENIIPMPSIKISEIDVRCAIRYASNWKCPGLDGLHNFWLKWFRSSHSVFATQFQDALDSGSLPTFLTTGVTFLSYKSGCTTEPKNYRPITCLPTIYKLLTSILNKKITGHIVRNKILAPTQNGCKAGGRGTKELLLIDTTISQQVRRNRKNLTTAWIDYKKAYDSVPHTWLLKVLELYKIDITLRSFLEACMGQWVTVLRHLGECDIPATSEPIRIKRGIFQGDSLSPLWFCLALNPLSTLLEDSGLGFRLRRGGKVISHLLYMDDLKLFASKRSDLMRLLKVTQTFSSDIRMEFGVDKCASMHVVRGSVIRSDNICISDSVSFRTLGEGETYKYLGMSEALGIDERSIKQLVKERFFSRLKKVLGSLLSGGNKVRAFNGWVMPLLAYTFGIVRWTQTELDSVDRQIRKLLTTYRMHHPRSSVMRLYIPRKCGGRGFLNVKNLHNHEVCSLREYFLKIDVDMHKDVVTVDKGLTPLSLGKENWRRPVVLTTSDRMAVWKSKELHGRFHRALVGQDVDTASSLSWLQFGDLFGETEGFVCAIMDEVIKTRNYQRHIMKDGTIDICRACHRPGESLRHIVSGCSHLANGEYLHRHNQVAKIIHQQLALQYGLVELEVPYYRYNPMSVLENSCALLYWDRSIITDRYIVANRPDIVLVDRVARRAVIVDVTIPHDENLVKAEKEKQSKYLDLAHEITAMWDVNATIIVPIVVSVNGLIAKSLDQHLKRLSLSCWIKNRIQKAVLLETARIVRRFLSLEP

SEQ ID NO: 6372 - protein, 1099 aa, Junonia neildi
MKNARGRHARLTPKVISSNSESQSSLSGDEYHTPLSSTESEQHEADPPTRRSKRRRTVHPPQDGLELQGQCAPARVPAAGGAVRRMRWTQKMNESVMRAYYGATGGGINLTGYRSTMLSLFQALEPTVTVTAQRLSDQVRAIQRCHLLDESVLERLRLNLQQSNAAGDIHHVQRSVREPNMTNIPEFNENPSSSVDFAVSDQDNEHMRSALEDAILKYKHVPFNLRPRLPRLPMHRRNLMLVSVLDKVLPSYLDDTLDIYDIHSILYCGAVAVCNIASVKFPTEKNIVRTNTPPAWQIRIENRITLTRTLIGKLICFRAGNNRPRVMRFVHQAFAGTNIKVSEYMASVTDRIDFMKQKIFAWAKRIKRYKKRINRYRQNSMFQSDQRKVYRYWEQGSDNLANGVLPTPDVMSKFWHDIWSSPISHTEGDWMRVVGRDCEPIQQMEPITICSNDVACATRSMSNWKCPGPDGLQSFWLKWFHSSHSLLASRFQDALASGSLPTFMTTGVTILLYKSGCTADPKNYRPITCLPTIYKLFTSILAVKIKKHVENNNILAPAQNGCRSGSRGTKELLLIDMTICRQVRRNRKNLATAWIDYKKAYDSVPHTWLMRVMELYKIDATLCLLLKSCMGQWITYLRHPGSDEISGSTEPIRIKRGIFQGDSLSPLWFCLALNPLSSLLDDSGLGFRLRRGGKIISHLLYMDDLKLYASKQPELVELLKITESFSSCIGMEFGVDKCAVLHVERGRVIPSADIQVTNCLRLRSLNEGETYKYLGMSQALGIEDGSIKQLVRERFFGRLKKVLNSFLSGGNKVRAFNGWVIPLLVYTFGILRWTQAELDSLDRQVRKLLTAFRMHHPRSSVMRLYIPRKCGGRGFLNAKNLHNREVYNLRKYFLSINDDMHRDVVAVDKTFTPLSLGKENWRRPIVLDTGDRMAVWKSKELHGRYYRALMGSDVDRVSSVSWLQYGDLFGETEGFVCAIMDEVVKTNNYRKYIIKDGTPDICRACHHPGESIRHIISGCCHLANGEYLHRHNQVARIIHQQLALRYGLVSAEVPYYRYNPTPVLENGPALLYWDRSIITDRYIPANKPDIVVVDRSTRR

SEQ ID NO: 6373 - protein, 952 aa, Heliconius melpomene
MHRRNIALVRILDQHLPSHFNNCNDLTDTHSLLYCGAVAVCRVAGVQFPNKGGTKASKHTVPAWQYDTEKRINLTRILIGKLISFKSGNRRPRVMRFVAEAFAGTNLKPSEYMANVTNRIDFLKQKLYALAKRIRRYRERWDRYNQNSAFQKNQRSVYRKWERSGDSVVNCEIPNPDASAGFWRSIWSAPVEHTEGEWFCDIAKNCENIIPMRSIKIGEIDVRCAIRYASNWKCPGLDGLHNFWLKWFRSLHSVFATQFQDALDSGSLPTFLTTGVTFLSYKSGCTTEPKNYRPITCLPTIYKLLTSILNKKITGHIVRNKILAPTQNGCKAGGRGTKELLLIDTTISQQVRRNRKNLTTAWIDYKKAYDSVPHTWLLKVLELYKIDMTLRSFLEACMGQWVTVLRHLGECDIPATSEPIRIKRGIFQGDSLSPLWFCLALNPLSTMLEDSGLGFRLRRGGKVISHLLYMDDLKLFASKRSDLMRLLKVTQTFSSDIRMEFGVDKCASMHVVRGSVIRSDNICISDSVSFRTLGEGETYKYLGMSEALGIDERSIKQLVKERFFSRLKKVLGSLLSGGNKVRSFNGWVMPLLAYTFGIVRWTQTELDSVDRQIRKLLTTYRMHHPRSSVMRLYIPRKCGGRGFLNVKNLHNHEVCSLREYFLKIDVDMHKDVVTVDKGLTPLSLGKENWRRPVVLTTSDRMAVWKSKELHGRFHRALVGQNVDTASSLSWLQFGDLFGETEGFVCAIMDEVIKTRNYQRHIMKDGTIDICRACHRPGESLRHIVSGCSHLANGEYLHRHNQVAKIIHQQLALQYGLVELEVPYYRYNPMSVLENSCALLYWDRSIITDRYIVANRPDIVLVDRVARRAVIVDVTIPHDDNLVKAEKEKQSKYLDLAHEITAMWDVNATIIVPIVVSVNGLIAKSLDQHLKRLSLSCWIKNRIQKAVLLETAP

SEQ ID NO: 6374 - protein, 1109 aa, Melitaea cinxia
MRWTQKMNESVMRAYYEATGGGINLTAYRSTMLSLFQALEPTVTVTAQRLSDQVRAIQRCHLLDESVLERLRTNLPQLNTVSHIRDIQTSQKEQREVINFNINHISPNSVDLSVNEQDNEPMRRALEDAILKYRSLPPNIRPQLPRLPIHRRNLALVGVMDKILQQYLDSTQNLSDTHSLLYCGAAAVCNVANLKFKSNKITLPSHTAPAWQARIEKRINLTRTLIAKLTCFRAGNMRPKIMRFVHQAFAGTNIRSNEYITSVSDRIDFLKQKLCAWAKRIKRYKKRRDRYHQNSIFQSDQRKVYRNWEQCTTNVVNGNLPTRESINNFWRNIWSNPIDHIESDWMDVVRRRCSSLPQMEQIKINSEDISYAIRSTSNWKCPGLDGLHNFWLKWFHSSHPILASQFQNAISTNTLPKFMTTGTTFLLYKSGCTADPKNYRPITCLPTIYKLLTSVLVTKITKHITTNNILATTQNGCKSGSRGTKELLLIDMTICQQVRRNRKNLAAAWIDYKKAYDSVPHTWLMKVMELYKIDAALCSFLSTCMRQWNTFLRHPGAVDVSGSTEPIRIMRGIFQGDSLSPLWFCLALNPLSTLLEDSRLGFHLRRGSKAISHLLYMDDLKLFASKLPDLYKLLKITETFSTCIRMEFGVDKCAVIHVERGRTVSSQNLKLNNSLSFRSLNEGETYKYLGMSEALGIDDGAMKQLVKERFFGRLKKVLNSFLSGGNKVRAFNSWVMPLIVYTFGILRWTQTELDTLDRQVRKLLTTYRIHHPRSSVMRLYIPRKCGGRGFLNAKNLHNREVYNLREYFLNMKSDMHMDVVAVDRGFTPLSLGKEKWRKPIVMRTVDRVAVWKSKELHGRFYKVLTDPDVDQPSSISWLQHGNLFGETEGFVCAIMDEVIKTNNYRKHIMKDGTPDICRACHKPGESIRHVVSGCSHLANGEYLHRHNQVARIIHQQLAIRYGLVENELPYYRYSPTPFLENGRALLYWDRSIVTDRFIAANKPDIVLVDRSARRAIIVDITVPHDDNLVKAEKEKLSKYLDLAHEITGMWNVDSTIIVPIVVSVNGLLAKSFDQHLKKLSLDCWIKGRIQKAVLLETARIVRRFLSLEP

SEQ ID NO: 6375 - protein, 1098 aa, Ochropleura plecta
MITRLAARQHARLPPPDSPLSSASPPPEPSLIVSAVTPAVAVASSSSDEYFSPPTTPPPACRRGGRRPPDGLGLRGPLASDRVPAPGGSVQRMRWTSSINENVMRSYYGATEGGNNLTAYRVRMLSLFQVLEPAVNVSAQRLSDQVRVIQRNRMLDDTVLDRLRTEMQSSQVITSSSQAVVPPQSHQLVSHADEVSNDMATNVSTQCNEEMRIALEGAIQEYRYISPELRPRLPRLPMHNKNRALVAVLDSQLSNYFDNCENLTDAHSILYCAAVAACRVAHVKFPDDGATRPKPAVPFWQCRIERRIGVARALIGKLICFREGNTRPRVMRFVRRAFAGTDISPPDYMSHITERIDFLKQKVYAWANRIRRYKRRVERYTLNRTFQSDERWVYRAWERPDQGVSDTHLPDDDAMCLFWRNIWSVPVSHTEGEWTREVERACDPIPEMGALTISPQDVACAVRPLPNWKSPGPDGLHNFWLKWIQRSHARLATLFQTALESGSLPKFLTTGITHLLHKSGSTTEPKNYRPITCLPTIYKVLTSILRAKITKHIDDNSIMSASQNGCRNGSRGTKELLLIDMAISQQVRRSRRHLSTCWIDYKKAYDSVPHTWLMRVLELYKVDATLCTFLSSCMRQWNTVLRYPGCRQIQRNSEPIRIERGIFQGDSLSPLWFCLALNPLSTLLEDSGLGYRLRRGGRVISHLLYMDDLKLFAPNDSQLMELLKVTETFSSAISMEFGVDKCAVMHVKRGEIVESVGTQLSDSIHLRSLSANETYKYLGMSEALGINVADMKQSLKERFFGRLRKVFNSLLSGGNKVRAFNGWVMPVLMYSFGILKWTQTELDALDRKVRTLLTAYRMHHPRSSVMRLYIPRSCGGRGFLNAKTLHNREICSLREYFLEADVGMHRDVVTVDKGFTPLSLAKENWRKPVVLDTNDRREVWQSKELHGRFFRALHGPDVDQPASVAWLRSGDLFGETEGFVCAIMDEVMMTNNYRRFIVKDGTVDICRACHRPGESIRHIISGCSRLANGEYLHRHNLVARIIHQQLALKYSLVESEVPYYRYEPDPVLEHGNITLYWDRSIITDRTIVANKPDIVVVD

SEQ ID NO: 6376 - protein, 1193 aa, Melitaea cinxia
MNKARGRRAQKRPKVPSSSETQSSTTDDEYQTPPSTAESDAYDADSSTRTSNRRRVIRPPPACLEVQGQCAPTRNPAAGGAVRRMRWTQKMNESVMRAYYEATGGGINLTAYRSTMLSLFQALEPTVTVTAQRLSDQVRAIQRCHLLDESVLERLRTNLPQLNTVSHIRDIQTSQKEQREVINFNINHISPNSVDLSVNEQDNEPMRRALEDAILKYRSLPPNIRPQLPRLPIHRRNLALVGVMDKILQPYLDSTQNLSDTHSLLYCGAAAVCNVANVKFKSNKITLPSHTAPAWQARIEKRINLTRTLIAKLTCFRAGNRRPKIMRFVHQAFAGTNIRSNEYITSVSDRIDFLKQKLCAWAKRIKRYKKRRDRYHQNSIFQSDQRKVYRNWEQCTTNVVNGNLPTRESINNFWRNIWSNPIDHIESDWMDVVRRRCSSLPQMEQIKINSEDISYAIRSTSNWKCPGLDGLHNFWLKWFRSSHPILASQFQNAISTNTLPKFMTTGTTFLLYKSGCTADPKNYRPITCLPTIYKLLTSVLVTKITKHITTNNILATTQNGCKSGSRGTKELLLIDMTICQQVRRNRKNLAAAWIDYKKAYDSVPHTWLMKVMELYKIDAALCSFLSTCMRQWNTFLRHPGAVDVSGSTEPIRIMRGIFQGDSLSPLWFCLALNPLSTLLEDSRLGFHLRRGSKAISHLLYMDDLKLFASKLPDLYKLLKITETFSTCIRMEFGVDKCAVIHVERGRTVSSQNLKLNNSLSFRSLNEGETYKYLGMSEALGIDDGAMKQLVKERFFGRLKKVLNSFLSGGNKVRAFNSWVMPLIVYTFGILRWTQTELDTLDRQVRKLLTAYRIHHPRSSVMRLYIPRKCGGRGFLNAKNLHNREVYNLRQYFLNMKSDMHMDVVAVDRGFTPLSLGKEKWRKPIVMRTVDRVAVWKSKELHGRFYKVLTDPDVDQPSSISWLQHGNLFGETEGFVCAIMDEVIKTNNYRKHIMKDGTPDICRACHRPGESIRHVVSGCIHLANGEYLHRHNQVARIIHQQLAIRYGLVENELPYYRYSPTPFLENGRALLYWDRSIVTDRFIAANKPDIVLVDRSARRAIIVDITVPHDDNLVKAEKEKLSKYLDLAHEITGMWNVDSTIIVPIVVSVNGLFAKSFDQHLKKLSLDCWIKGRIQKAVLLETARIVRRFLSLEP

SEQ ID NO: 6377 - protein, 988 aa, Mellicta athalia
MRRALEDAILKYRSMPPNIRPQLPRLPIHRRNLALVGIMDTILKEYLDSTQNLSDTHSVLYCGAAAVCDVAKVKFTSNKITLPSHTAPAWQARIEKRINLTRTLIAKLTCFRAGNRRPKIMRFVHQAFAGTNISSKEYTTSVSDRIDFLKQKLCAWAKRIKRYKKRSDRYHQNSMFQRDQRKVYRNWEQCTTNVVNGELPTRDSIANFWRNIWSNPIDHIESDWMDVVRKRCSSLPQMEQIKISPEDINYAIRSTSNWKCPGLDGLHNFWLKRFHSSHPILASQFQDAILNNSLPKFMTTGTTFLLYKSGCTADPKNYRPITCLPTIYKLLTSVLVAKITKHITINNILATTQNGCKSGSRGTKELLLIDMTICQQVRRNRKNLAAAWIDYKKAYDSVPHTWLMKVMELYKIDAALCSFLSTCMRQWNTFLRYPGVVDVPGSTEPIRIMRGIFQGDSLSPLWFCLALNPLSTLLEDSGLGFHLRRGSKAISHLLYMDDLKLFASKLPDLYKLLKITETFSTCIRMEFGVDKCAVIHVERGRIVSSENLKLTNSLSFRSLNEGETYKYLGMSEALGIDDGAMKQLVRERFFGRLKKVLNSFLSGGNKVRAFNSWVMPLIVYTFGILRWTQTELDSLDRQVRKLLTAYRIHHPRSSLMRLYIPRKCGGRGFLNVKNLHNREVYNLREYFLNIKSDMHMDVVAVDKGFTPLSLGKEKWRKPIVMSTVDRVAVWKSKELHGRFYKSLTDPDVDQPSSVSWLQHGNLFGETEGFVCAIMDEVIKTNNYRKHIMKDGTPDICRACHKPGESIRHVVSGCSHLANGEYLHRHNQVARIIHQQLAIRYGLVKNELPYYRYNPTPFLENGRALLYWDRSIVTDRFIAANKPDIVLVDRSARRAIIVDITVPHDDNLVKAEKEKLSKYLDLAHEITGMWNVDSTIIVPIVVSVNGLLAKSFDQHLKKLSLDCWIKGRIQKAVLLETARIVRRFLSLEP

SEQ ID NO: 6378 - protein, 1193 aa, Melitaea cinxia
MNKARGRRAQKRPKVPSSSETQSSTTDDEYQTPPSTAESDAYDADSSTRTSNRRRVIRPPPACLEVQGQCAPTRNPAAGGAVRRMRWTQKMNESVMRAYYEATGGGINLTAYRSTMLSLFQALEPTVTVTAQRLSDQVRAIQRCHLLDESVLERLRTNLPQLNTVSHIRDIQTSQKEQREVINFNINHISPNSVDLSVNEQDNEPMRRALEDAILKYRSLPPNIRPQLPRLPIHRRNLALVGVMDKILQPYLDSTQNLSDTHSLLYCGAAAVCNVANVKFKSNKITLPSHTAPAWQARIEKRINLTRTLIAKLTCFRAGNRRPKIMRFVHQAFAGTNIRSNEYITSVSDRIDFLKQKLCAWAKRIKRYKKRRDRYHQNSIFQSDQRKVYRNWEQCTTNVVNGNLPTRESINNFWRNIWSNPIDHIESDWMDVVRRRCSSLPQMEQIKINSEDISYAIRSTSNWKCPGLDGLHNFWLKWFRSSHPILASQFQNAISTNTLPKFMTTGTTFLLYKSGCTADPKNYRPITCLPTIYKLLTSVLVTKITKHITTNNILATTQNGCKSGSRGTKELLLIDMTICQQVRRNRKNLAAAWIDYKKAYDSVPHTWLMKVMELYKIDAALCSFLSTCMRQWNTFLRHPGAVDVSGSTEPIRIMRGIFQGDSLSPLWFCLALNPLSTLLEDSRLGFHLRRGSKAISHLLYMDDLKLFASKLPDLYKLLKITETFSTCIRMEFGVDKCAVIHVERGRTVSSQNLKLNNSLSFRSLNEGETYKYLGMSEALGIDDGAMKQLVKERFFGRLKKVLNSFLSGGNKVRAFNSWVMPLIVYTFGILRWTQTELDTLDRQVRKLLTAYRIHHPRSSVMRLYIPRKCGGRGFLNAKNLHNREVYNLRQYFLNMKSDMHMDVVAVDRGFTPLSLGKEKWRKPIVMRTVDRVAVWKSKELHGRFYKVLTDPDVDQPSSISWLQHGNLFGETEGFVCAIMDEVIKTNNYRKHIMKDGTPDICRACHKPGESIRHVVSGCIHLANGEYLHRHNQVARIIHQQLAIRYGLVENELPYYRYSPTPFLENGRALLYWDRSIVTDRFIAANKPDIVLVDRSARRAIIVDITVPHDDNLVKAEKEKLSKYLDLAHEITGMWNVDSTIIVPIVVSVNGLFAKSFDQHLKKLSLDCWIKGRIQKAVLLETARIVRRFLSLEP

SEQ ID NO: 6379 - protein, 1122 aa, Mellicta athalia
MNKARGQHAQSTSKVPSRSETQSSTDDEYETPPSTAESDADDADSSTRRSKRRRVIRPPPVSLDVQGQRAPTRNPAAGGAVRRMRWNQKMNESVMRAYYEATGGGINLTAYRSTMLSLFQALEPTVTVTAQRLSDQVRAIQRCHLLDESVLERLRTNLPQFNTVSHIRAVQTSQKEQREVINLNNISPNSVDLSVNEQDNEPMRRALEDAILKYRSMSPNIRPQLPRLPIHRRNLALVGVMDTILKEYLDSTQNLSDTHSVLYCGAAAVCDVAKVKFTSNKITLPSHTAPAWQARIEKRINLTRTLIAKLTCFRAGNRRPKIMRFVHQAFAGTNITSNEYITSVSDRIDFLKQKLCAWAKRIKRYKKRSDRYHQNSMFQRDQRKVYRNWEQCTTNVVNGELPTRDSIANFWRNIWSNPIDHIESDWMDVVRKRCSSLPQMEQIKISSEDISYAIRSTSNWKCPGLDGLHNFWLKRFHSSHPILASQFQDAILNNSLPKFMTTGTTFLLYKSGCTADPKNYRPITCLPTIYKLLTSVLVAKIRKHITINNILATTQNGCKSGSRGTKELLLIDMTICQQVRRNRKNLAATWIDYKKAYDSVPHTWLMKVMELYKIDATLCSFLSTCMRQWNTFLRYPGVVDVPGSTEPIRIMRGIFQGDSLSPLWFCLALNPLSTLLEDSGLGFHLRRGSKAISHLLYMDDLKLFASKLPDLYKLLKITETFSTCIRMEFGVDKSAVIHVERGRIVSSENLKLTNSLSFTSLNEGETYKYLGMSEALGIDDGAMKQLVKERFFGRLKKVLNSFLSGGNKVRAFNSWVMPLIVYTFGILRWTQTELDSLDRQVRKLLTTYRIHHPRSSLMRLYIPRKCGGRGFLNVKNLHNREVNNLREYFLNIKSDIHMDVVAVDKGFTPLSLGNEKWRKPIVMSTVDRVAVWKSKELHGRFYKALTDPDVDQPSSVSWLQHENLFGETEGFVCAIMDEVIKTNNYRKHIMKDGTPDICRACHKPGESIRHVVSGCSHLANGEYLHRHNQVARIIHQQLALRYGLVENELPYYRYNPTPFLENGRALLYWDRSIVTDRFIAANKPDIVLVDRSARRAIIVDITLKEMFCIQLHKIWLLFTQKK

SEQ ID NO: 6380 - protein, 1188 aa, Maniola jurtina
METRRHRHASAHTAQITSGVDSSSDEDYRTPPSSTGSADDTRPPRRAPRRRATHPPPDGLEQQELRAPTTASAASGVVRRMRWTQRMNENVMRAYYRATDGGTNLTGYRSRMVSLFQALEPTVTVSAQRLSDQVRVIQRRRVLDESTLDRLRLNLPQVITTGNSTHKSPQIPSVIEILNTQEELQGGLDLAVSNQNDEQMRRTLEDAILEFRSVPNNLRPKLPRLPVHRRNMALMAVLDKILGTYLESSYDLNDTHSILYCGAVAACRIASIKFPELHRAVKRPNTAPAWQAGIERRISLTRTLIAKLICFRAGNSRPRIMRFVHQAFAGTNISPSQYLSLVTDRIDFLKQKVYAWAQRIRRFRKRIDRASQNRMFQSDQRKMYRNWERPRGCMVDGELPTPDSTSDFWRSIWSAPIDHSEGEWMNVVRDQCATVVEMNPVTISAEDVGCAIRSASNWKCPGPDGLHNFWLKWFRSAHPVLATQFQNSIDSGSLPTLMTTGVTFLIHKSGSTADPKNYRPITCLPTIYKLLTSILTTKITMHINANNILAQVQNGCKARARGTKELLLIDTAICQQVRRNRKNLVAAWIDYKKAYDSVPHTWLMEIMRLYKVDATLCSFLDSCMSQWMTVLRQPGGDEFFESAEPIRIKRGIFQGDSLSPLWFCLALNPLSTLLKDSGLGYRLRKGGEVISHLLYMDDLKLYASKRTDLVKLLKITQNFSNNIGMEFGVDKCAIINIERGRVVNSENLVLSETLILRSLCEGETYKYLGMSEALGIEVRTMKQAVEERFFGRLKKVLNSLLSGGNKVRAFNGWVMPLLIYTFGILKWTQTELDALDRRIRKLLTTYRMHHPRSSVMRLYIPRKCGGRGFLNAKNLHNREVCNLRDYFLKVNVGIHRDVVAVDKGLTPLSLGKNNWRKPIVLSTSDRIAVWRSKELHGRFYKALTRPDVDSIASVSWLQFGDLFGETEGFICAIMDEVIKTNNYRKHIMKDGTLDICRACHLPGESLRHIVSGCSYLANGEYLHRHNQVAKIIHQQLALQYGLVDTEVPYYRYDPMSVLENSSALLYWDRSVITDRYIVANRPDIVLVDRSARRAMIVDVTIPHDDNLVKAEKEKVSKYLDLAHEITAMWSVDSAIIVPIVVSVHGLIANSFDQHLKKLSLNCWIKGKIQKAVVLETARIVRRFLTLEP

SEQ ID NO: 6381 - protein, 1174 aa, Heliconius numata
MLPFESATAVVRRRLSHCGFDCGFGGRNVRVGRAGFKTTPDIPPAEGLEPGASRMLNKAPATGGKVPRMRWSQQLNESVMRAYYRATEGGTNLTAYRSRLLSMFQELEPTATVTAQRLSDRVRIIQRRHLLDDSVLERLRLSFQQVNTTNNNSCDIRSQFQHANIESQGNIELSVSAQDDERLRSLKDAILEYGSIPVDLRPKLPRLPMHRRNIALVRILDQHLPTHFNNCNDLTDTHSLLYCGAVAVCRVAGVQFPNKGGTKASKHTVPAWQYDTEKRINLTRILIGKLISFKSGNRRPRVMRFVAEAFAGTNLKPSEYMANVTNRIDFLKQKLYALAKRIRRYRERWDRYNQNSAFQKNQRSVYRKWERSGDSVVNCEIPNPDANADFWRSIWSAPVECVQQCAEGEWFCDIAKNCENIIPMRSIKISEIDVRCAIPYASNWKCPGLDGLHNFWLKWFRSSHSVFATQFQDALDSGSLPTFLTTGVTFLSYKSGCTTEPKNYRPITCLPTIYKLLTSILNKKITGHIVRNKILAPTQNGCKAGGRGTKELLLIDTTISQQVRRNRKNLTTAWIDYKKAYDSVPHTWLLKVLELYKIDITLRSFLEACMGQWITVLRHLGECDIPATSEPIRIKRGIFQGDSLSPLWFCLALNPLSTMLEDSGLGFRLRRGGKVISHLLYMDDLKLFASKRSDLMRLLKVTQTFSSDIRMEFGVDKCASMHVVRGSVIRSDNICISDSVSFRTLGEGETYKYLGMSEALGIDERSIKQLVKERFFSRLKKVLGSLLSGGNKVRAFNGWVMPLLAYTFGIVRWTQTELDSVDRQIRKLLTTYRMHHPRSSVMRLYIPRKCGGRGFLNVKNLHNHEVCSLREYFLKIDVDMHKDVVTVDKGLTPLSLGKENWRRPVVLTTSDRMAVWKSKELHGRFHRALVGQDVDTVSSLSWLQFGDLFGETEGFVCAIMDEVIKTRNYQRHIMKDGTIDICRACHRPGESLRHIVSGCSHLANGEYLHRHNQVAKIIHQKLALQYGLVELEVPYYRYNPMSVLENSCALLYWDRSIITDRYIVANRPDIVLVDRAARRAVIVDVTIPHDENLVNAEKEKQSKYLDLAHEITAMWDVNATIIVPIVVSVNGLIAKSLDQHLKRLSLSCWIKNRIQKAVLLETARIVRRFLSLEP

SEQ ID NO: 6382 - protein, 1193 aa, Melitaea cinxia
MNKARGRRAQKRPKVPSSSETQSSTTDDEYQTPPSTAESDAYDADSSTRTSNRRRVIRPPPACLEVQGQCAPTRNPAAGGAVRRMRWTQKMNESVMRAYYEATGGGINLTAYRSTMLSLFQALEPTVTVTAQRLSDQVRAIQRCHLLDESVLERLRTNLPQLNTVSHIRDIQTSQKEQREVINFNINHISPNSVDLSVNEQDNEPMRRALEDAILKYRSLPPNIRPQLPRLPIHRRNLALVGVMDKILQPYLDSTQNLSDTHSLLYCGAAAVCNVANVKFKSNKITLPSHTAPAWQARIEKRINLTRTLIAKLTCFRAGNRRPKIMRFVHQAFAGTNIRSNEYITSVSDRIDFLKQKLCAWAKRIKRYKKRRDRYHQNSIFQSDQRKVYRNWEQCTTNVVNGNLPTRESINNFWRNIWSNPIDHIESDWMDVVRRRCSSLPQMEQIKINSEDISYAIRSTSNWKCPGLDGLHNFWLKWFRSSHPILASQFQNAISTNTLPKFMTTGTTFLLYKSGCTADPKNYRPITCLPTIYKLLTSVLVTKITKHITTNNILATTQNGCKSGSRGTKELLLIDMTICQQVRRNRKNLAAAWIDYKKAYDSVPHTWLMKVMELYKIDAALCSFLSTCMRQWNTFLRHPGAVDVSGSTEPIRIMRGIFQGDSLSPLWFCLALNPLSTLLEDSRLGFHLRRGSKAISHLLYMDDLKLFASKLPDLYKLLKITETFSTCIRMEFGVDKCAVIHVERGRTVSSQNLKLNNSLSFRSLNEGETYKYLGMSEALGIDDGAMKQLVKERFFGRLKKVLNSFLSGGNKVRAFNSWVMPLIVYTFGILRWTQTELDTLDRQVRKLLTAYRIHHPRSSVMRLYIPRKCGGRGFLNAKNLHNREVYNLRQYFLNMKSDMHMDVVAVDRGFTPLSLGKEKWRKPIVMRTVDRVAVWKSKELHGRFYKVLTDPDVDQPSSISWLQHGNLFGETEGFVCAIMDEVIKTNSYRKHIMKDGTPDICRACHKPGESIRHVVSGCIHLANGEYLHRHNQVARIIHQQLAIRYGLVENELPYYRYSPTPFLENGRALLYWDRSIVTDRFIAANKPDIVLVDRSARRAIIVDITVPHDDNLVKAEKEKLSKYLDLAHEITGMWNVDSTIIVPIVVSVNGLFAKSFDQHLKKLSLDCWIKGRIQKAVLLETARIVRRFLSLEP

SEQ ID NO: 6383 - protein, 1194 aa, Mellicta athalia
MNKARGQHAHTRTKATSSSDTQSSTTDDEYKTPPSTAESDADDADSSARPSKRRRVIRPPPASLDVQGQRQRAPTRNPAAGGAVRRMRWTQKMNESVMRAYYEATGGGINLTAYRSTMLSLFQALEPTVTVTAQRLSDQVRAIQRCHLLDESVLERLRTNLPQLNTVSHIRAVQTSQKEQKEVINLNHNISPNSVDLSVNEQDNEPMRRALEDAILKYRSMPPNIRPQLPRLPIHRRNLALVGIMDTILKEYLDTTQNLSDTHSVLYCGAAAVCDVARVKFTSNKITLPSHTAPAWQARIEKRINLTRTLIAKLTCFRAGNRRPKIMRFVHQAFAGTNISSKEYTTSVSDRIDFLKQKLCAWAKRIKRYKKRSDRYHQNSMFQRDQRKVYRNWEQCTTNVVNGELPTRDSIANFWRNIWSNPIDHIESDWMHVVRKRCSSLPQMDQIKISPEDINYAIRSTSNWKCPGLDGLHNFWLKRFHSSHPILASQFQDAILNNSLPKFMTTGTTFLLYKSGCTADPKNYRPITCLPTIYKLLTSVLVAKITKHITINNILATTQNGCKSGSRGTKELLLIDMTICQQVRRNRKNLAAAWIDYKKAYDSVPHTWLMKVMELYKIDAALCSFLSTCMRQWNTFLRYPGVVDVPGSTEPIRIMRGIFQGDSLSPLWFCLALNPLSTLLEDSGLGFHLRRGSKAISHLLYMDDLKLFASKLPDLYKLLKITETFSTCIRMEFGVDKCAVIHVERGRIVSSENLKLTNSLSFRSLNEGETYKYLGMSEALGIDDGAMKQLVRERFFGRLKKVLNSFLSGGNKVRAFNSWVMPLIVYTFGILRWTQTELDSLDRQVRKLLTAYRIHHPRSSLMRLYIPRKCGGRGFLNVKNLHNREVYNLREYFLNIKSDMHMDVVAVDKGFTPLALGKEKWRKPIVMSTVDRVAVWKSKELHGRFYKSLTDPDVDQPSSVSWLQHGNLFGETEGFVCAIMDEVIKTNNYRKHIMKDGTPDICRACHKPGESIRHVVSGCSHLANGEYLHRHNQVARIIHQQLAIRYGLVENELPYYRYNPTPFLENGRALLYWDRSIVTDRFIAANKPDIVLVDRSARRAIIVDITVPHDDNLVKAEKEKLSKYLDLAHEITGMWNVDSTIIVPIVVSVNGLLAKSFDQHLKKLSLDGWIKGRIQKAVLLETARIVRRFLSLEP

SEQ ID NO: 6384 - protein, 1188 aa, Maniola jurtina
METRRHRHASAHTAQITSGVDSSSDEDYRTPPSSTGSADDTRPPRRAPRRRATHPPPDGLEQQELRAPTTASAASGVVRRMRWTQRMNENVMRAYYRATDGGTNLTGYRSRMVSLFQALEPTVTVSAQRLSDQVRVIQRRRVLDESTLDRLRLNLPQVITTGNSTHKSPQIPSVIEILNTQEELQGGLDLAVSNQNDEQMRRTLEDAILEFRSVPNNLRPKLPRLPVHRRNMALMAVLDKILGTYLESSYDLNDTHSILYCGAVAACRIASIKFPELHRAVKRPNTAPAWQAGIERRISLTRTLIAKLICFRAGNSRPRIMRFVHQAFAGTNISPSQYLSLVTDRIDFLKQKVYAWAQRIRRFRKRIDRASQNRMFQSDQRKMYRNWERPRGCMVDGELPTPDSTSDFWRSIWSAPIDHTEGEWMNVVRDQCATVVEMNPVTISAEDVGCAIRSASNWKCPGPDGLHNFWLKWFRSAHPVLATQFQNSIDSGSLPTLMTTGVTFLIHKSGSTADPKNYRPITCLPTIYKLLTSILTTKITMHINANNILAQVQNGCKARARGTKELLLIDTAICQQVRRNRKNLVAAWIDYKKAYDSVPHTWLMEIMRLYKVDATLCSFLDSCMSQWMTVLRQPGGDEFFESAEPIRIKRGIFQGDSLSPLWFCLALNPLSTLLKDSGLGYRLRKGGEVISHLLYMDDLKLYASKRTDLVKLLKITQNFSNNIGMEFGVDKCAIINIERGRVVNSENLVLSETLILRSLCEGETYKYLGMSEALGIEVRTMKQAVEERFFGRLKKVLNSLLSGGNKVRAFNGWVMPLLIYTFGILKWTQTELDALDRRIRKLLTTYRMHHPRSSVMRLYIPRKCGGRGFLNAKNLHNREVCNLRDYFLKVNVGIHRDVVAVDKGLTPLSLGKNNWRKPIVLSTSDRIAVWRSKELHGRFYKALTRPDVDSIASVSWLQFGDLFGETEGFICAIMDEVIKTNNYRKHIMKDGTLDICRACHLPGESLRHIVSGCSYLANGEYLHRHNQVAKIIHQQLALQYGLVDTEVPYYRYDPMSVLENSSALLYWDRSVITDRYIVANRPDIVLVDRSARRAMIVDVTIPHDDNLVKAEKEKVSKYLDLAHEITAMWNVDSAIIVPIVVSVHGLIANSFDQHLKKLSLNCWIKGKIQKAVVLETARIVRRFLTLEP

SEQ ID NO: 6385 - protein, 1188 aa, Maniola jurtina
METRRHRHASAHTAQITSGVDSSSDEDYRTPPSSTGSADDTRPPRRAPRRRATHPPPDGLEQQELRAPTTASAASGVVRRMRWTQRMNENVMRAYYRATDGGTNLTGYRSRMVSLFQALEPTVTVSAQRLSDQVRVIQRRRMLDESTLDRFRLNLPQVITTGNSTHKSPQIPSVIEILNTQEELQGSLDLTVSNQNDEQMRRTLEDAILEFRSVPNNLRPKLPRLPVHRRNMALMAVLDKILGTYLESSYDLNDTHSILYCGAVAACRIASIKFPELHRAVKRPNTAPAWQAGIERRISLTRTLIAKLICFRAGNSRPRIMRFVHQAFAGTNISPSQYLSLVTDRIDFLKQKVYAWAQRIRRFRKRIDRASQNRMFQSDQRKMYRNWERPRCCMVDGELPTPDSTSDFWRSIWSAPIDHTEGEWMNVVRDQCATVVEMNPVTISAEDVRCAIRSASNWKCPGPDGLHNFWLKWFRSAHPVLATQFQNSIDSGSLPTLMTTGVTFLIHKSGSTADPKNYRPITCLPTIYKLLTSILTTKITMHINANNILAQVQNGCKARARGTKELLLIDTAICQQVRRNRKNLVAAWIDYKKAYDSVPHTWLMEIMRLYKVDATLCSFLDSCMSQWMTVLRQPGGNEFFESAEPIRIKRGIFQGDSLSPLWFCLALNPLSTLLKDSGLGYRLRKGGEVISHLLYMDDLKLYASKRTDLVKLLKITQNFSNNIGMEFGVDKCAIINIERGRVVNSENLVLSETLILRSLCEGETYKYLGMSEALGIEVRTMKQAVEERFFGRLKKVLNSLLSGGNKVRAFNGWVMPLLIYTFGILKWTQTELDALDRRIRKLLTTYRMHHPRSSVMRLYIPRKCGGRGFLNAKNLHNREVCNLRDYFLKVNVGIHRDVVAVDKGLTPLSLGKNNWRKPIVLSTSDRIAVWRSKELHGRFYKALTRPDVDSIASVSWLQFGDLFGETEGFICAIMDEVIKTNNYRKHIMKDGTLDICRACHLPGESLRHIVSGCSYLANGEYLHRHNQVAKIIHQQLALQYGLVDTEVPYYRYDPMSVLENSSALLYWDRSVITDRYIVANRPDIVLVDRSARRAMIVDVTIPHDDNLVKAEKEKVSKYLDLAHEITAMWSVDSAIIVPIVVSVHGLIANSFDQHLKKLSLNCWIKGKIQKAVILETARIVRRFLTLEP

SEQ ID NO: 6386 - protein, 1194 aa, Junonia evarete
MKNARGRHARLTPKVISSNSESQSSLSDDEYHTPLSSTESEQHEADPPTRRSKRRRAVHPPQDGLELQGQCAPARVPAAGGAVRRMRWTQKMNESVMRAYYGATGGGINLTGYRSTMLSLFQALEPTVTVTAQRLSDQVRAIQRCHLLDESVLERLRLNLQQSNAAGDIHHVQRSVREPNMTNIPEFNENPSSSVDFAVSDQDNEHMRSALEDAILKYKHVPFNLRPRLPRLPMHRRNLMLVSVLDKVLPSYLDDTLDIYDIHSILYCGAVAVCNIASVKFPTEKNIVRTNTPPAWQIRIENRITLTRTLIGKLICFRAGNNRPRVMRFVHQAFAGTNIKVSEYMASVTDRIDFMKQKIFAWAKRIKRYKKRINRYRQNSMFQSDQRKVYRYWEQGSDNLANGVLPTPDVMSKFWHDIWSSPISHTEGDWMRVVGRDCEPIQQMEPITICSNDVACATRSMSNWKCPGPDGLQSFWLKWFHSSHSLLASRFQDALASGSLPTFMTTGVTILLYKSGCTADPKNYRPITCLPTIYKLFTSILAVKIKKHVENNNILAPAQNGCRSGSRGTKELLLIDMTICRQVRRNRKNLATAWIDYKKAYDSVPHTWLMRVMELYKIDATLCLLLKSCMGQWITYLRHPGSDEISGSTEPIRIKRGIFQGDSLSPLWFCLALNPLSSLLDDSGLGFRLRRGGKIISHLLYMDDLKLYASKQPELVELLKITESFSSCIGMEFGVDKCAVLHVERGRVIPSADIQVTNCLRLRSLNEGETYKYLGMSQALGIEDGSIKQLVRERFFGRLKKVLNSFLSGGNKVRAFNGWVIPLLVYTFGILRWTQAELDSLDRQVRKLLTAFRMHHPRSSVMRLYIPRKCGGRGFLNAKNLHNREVYNLRKYFLSINDDMHRDVVAVDKTFTPLSLGKENWRRPIVLDTGDRMAVWKSKELHGRYYRALMGSDVDRVSSVSWLQYGDLFGETEGFVCAIMDEVVKTNNYRKYIIKDGTPDICRACHHPGESIRHIISGCCHLANGEYLHRHNQVARIIHQQLALRYGLVSAEVPYYRYNPTPVLENGPALLYWDRSIITDRYIPANKPDIVVVDRSTRRAIIVDITIPHDDNLVKAEKEKMSKYLDLAHEISAMWSVDSTVIVPIVVSVNGLVAKSFDQHLKKLSLGCWIKGRIQKAVLLETARIVRRFLSLDP

SEQ ID NO: 6387 - protein, 988 aa, Melitaea cinxia
MRRALEDAILKYRSLPPNIRPQLPRLPIHRRNLALVGVMDKILQQYLDSTQNLSDTHSLLYCGAAAVCNVANVKFKSNKITLPSHTAPAWQARIEKRINLTRTLIAKLTCFRAGNRRPKIMRFVHQAFAGTNIRSNEYITSVSDRIDFLKQKLCAWAKRIKKYKKRRDRYHQNSIFQCDQRKVYRNWEQCTTNVVNGNLPTRESINNFWRNIWSNPIDHIESDWMDVVRRRCKSLPQMEQIKINSEDISYAIRSTSNWKCPGLDGLHNFWLKWFHSSHPILASQFQNAISTNTLPKFMTTGTTFLLYKSGCTADPKNYRPITCLPTIYKLLTSVLVTKITKHITTNNILATTQNGCKSGSRGTKELLLIDMTICQQVRRNRKNLAAAWIDYKKAYDSVPHTWLMKVMELYKIDAALCSFLSTCMRQWNTFLRHPGAVDVSGSTEPIRIMRGIFQGDSLSPLWFCLALNPLSTLLEDSRLGFHLRRGNKAISHLLYMDDLKLFASKLPDLYKLLKITETFSTCIRMEFGVDKCDVIHVERGRTVSSQNLKLNNSLSFRSLNEGETYKYIGMSEALGIDDGAMKQLVKERFFGRLKKVLNSFLSGGNKVRAFNSWVMPLIVYTFGILRWTQTELDTLDRQVRKLLTAYRIHHPRSSVMRLYIPRKCGGRGFLNAKNLHNCEVYNLRQYFLNMKSDMHMDVVAVDRGFTPLSLGKEKWRKPIVMRTVDRVAVWKSKELHGRFYKVLTDPDVDQPSSISWLQHGNLFGETEGFVCAIMDEVIKTNNYRKHIMKDGTPDICRAYHKPGESIRHVVSGCSHLANGEYLHRHNQVARIIHQQLAIRYGLVENELPYYRYSPTPFLENGRALLYWDRSIVTDRFIAANKPDIVLVDRSARRAVIVDITVPHDDNLVKAEKEKLSKYLDLAHEITGMWNVDSTITVPIVVSVNGLLAKSFDQHLKKLSLDCWIKGRIQKAVLLETARIVRRFLSLEP

SEQ ID NO: 6388 - protein, 950 aa, Mellicta athalia
MDTILKEYLDSTQNLADTHSVLYCGAAAVCNVAKVKFTSNKITLPSHTAPAWQARIEKRINLTRTLIAKLTCFRAGNRRPKIMRFVHQAFAGTNITSNEYITSVSDRIDFLKQKLCAWAKRIKRYKKRRDRYNQNSMFQSDQRKVYRNWEQCTTNVVNGDLPTRESITNFWRNIWSNPIDHVESDWMDVVRRRCSSLPQMEQIKITSEDISYAIRSTSNWKCPGLDGLHNFWLKWFHSSHPILASQFQDAIFNNSLPKFMTTGTTFLLYKSGCTADPKNYRPITCLPTIYKLLTSVLVAKITKHISANNILATTQNGCKSGSRGTKELLLIDMTICQQVRRNRKNLAAAWIDYKKAYDSVPHTWLMKVMELYKIDVTLCSFLSTCMRQWNTFLRYPGAVDVPGSTEPIRIMRGIFQGDSLSPLWFCLALNPLSTLLEDSRLGFHLRRGSKAISHLLYMDDLKLFASKLPDLNKLLKITETFSTCIRMEFGVDKCAVIHVERGRIVSSENLKLANSLSFRSLNEGETYKYLGMSEALGIDEGAMKQLVKERFFSRLKKVLNSFLSGANKVRAFNSWVMPLIVYTFGILRWTQTELDSLDRQVRKLLTAYRIHHPRSSLMRLYIPRKCGGRGFLNVKNLHNRELYNLREYFLNIKSDIHMDVVAVDKGFTPLSLGKEKWRKPIVMSTVDRVAVWKSKELHGRFYKVLTDPDVDQPSSISWLQHGNLFGETEGFVCAIMDEVIKTNNYRKHIMKDGTPDICRACHKPGESIRHIVSGCSHLANGEYLHRHNQVARIIHQQLAIRYGLVENELPYYRYNPTPFLENGRALLYWDRSIVTDRFIAANKPDIVLVDRSARRAIIVDITVPHDDNLVKAEKEKLSKYLDLAHEITGMWNVDSTIIVPIVVSVNGLLAKSFDQHLKKLSLDGWIKGRIQKAVLLETARIVRRFLSLEP

SEQ ID NO: 6389 - protein, 1070 aa, Mellicta athalia
MRFFQQGVTAQRLSDQVRAIQRCHLLDESVLERLRTNLPQLNTVSHIRAVQTSQKEQREVINLNHISPNSVDLSVNEQDNEPMRRALEDAILKYRSMPPNIRPQLPRLPIHRRNLALVGIMDTILKEYLDSTQNLSDTHSVLYCGAAAVCDVAKVKFTSNKITLPPHTAPAWQARIEKRINLTRTLIAKLTCFRAGNRRPKIMRFVHQAFAGTNISSKEYTTSVSDRIDFLKQKLCAWAKRIKRYKKRSDRYHQNSMFQRDQRKVYRSWEQCTTNVVNGELPTRDSIANFWRNIWSNPIDHIESDWMDVVRKRCSSLPQMEQIKISPEDINYVIRSTSNWKCPGLDGLHNFWLKRFHSSHPILASQFQDAILNNSLPKFMTTDTTFLLYKSGCTADPKNYRPITCLPTIYKLLTSVLVAKITKHITINNILATTQNGCKSGSRGTKELLLIDMTICQQVRRNRKNLAAAWIDYKKAYDSVPHTWLMKVMELYKIDAALCSFLSTCMRQWNTFLRYPGVVDVPGSTEPIRIMRGIFQGDSLSPLWFCLALNPLSTLLEDSGLGFHLRRGSKAISHLLYMDDLKLFASKLPDLYKLLKITETFSTCIRMEFGVDKCAVIHVERGRIVSSENLKLTNSLSFRSLNEGETYKYLGMSEALGIDDGAMKQLVRERFFGRLKKVLNSFLSGGNKVRAFNSWVMPLIVYTFGILRWTQTELDSLDRQVRKLLTAYRIHHPRSSLMRLYIPRKCGGRGFLNVKNLHNREVYNLREYFLNIKSDMHMDVVAVDKGFTPLSLGKEKWRKPIVMSTVDRVAVWKSKELHGRFYKSLTDPDVDQPSSVSWLQHGNLFGETEGFVCAIMDEVIKTNNYRKHIMKDGTPDICRACHKPGESIRHVVSGCSHLANGEYLHRHNQVARIIHQQLAIRYGLVENELPYYRYNPTPFLENGRALLYWDRSIVTDRFIAANKPDIVLVDRSARRAIIVDITVPHDDNLVKAEKEKLSKYLDLAHEITGMWNVDSTIIVPIVVSVNGLLAKSFDQHLKKLSLDCWIKGRIQKAVLLETARIVRRFLSLEP

SEQ ID NO: 6390 - protein, 1107 aa, Mellicta athalia
MRWTQKMNESVMRAYYEATGGGINLTAYRSTMLSLFQALEPTVTVTAQRLSDQVRAIQRCHLLDESVLERLRTNLPQLNIVSHIRAVQTSQKEQREVINLNHISPNSVDLSVNEQDNEPMRRALEDAILKYRSMPPNIRPQLPRLPIHRRNLALVGIMDTILKEYLDSTQNLSDTHSVLYCGAAAVCDVAKVKFTSNKITLPSHTAPAWQARIEKRINLTRTLIAKLTCFRAGNRRPKIMRFVHQAFAGTNISSKEYTTSVSDRIDFLKQKLCAWAKRIKRYKKRSDRYHQNSMFQRDQRKVYRNWEQCTTNVVNGELPTRDSIANFWRNIWSNPIDHIESDWMDVVRKRCSSLPQMEQIKISPEDINYAIRSTSNWKCPGLDGLHNFWLKRFHSSHPILASQFQDAILNNSLPKFMTTGTTFLLYKSGCTADPKNYRPITCLPTIYKLLTSVLVAKITKHITINNILATTQNGCKSGSRGTKELLLIDMTICQQVRRNRKNLAAAWIDYKKAYDSVPHTWLMKVMELYKIDAALCSFLSTCMRQWNTFLRYPGVVDVPGSTEPIRIMRGIFQGDSLSPLWFCLALNPLSTLLEDSGLGFHLRRGSKAISHLLYMDDLKLFASKLPDLYKLLKITETFSTCIRMEFGVDKCAVIHVERGRIVSSENLKLTNSLSFRSLNEGETYKYLGMSEALGIDDGAMKQLVRERFFGRLKKVLNSFLSGGNKVRAFNSWVMPLIVYTFGILRWTQTELDSLDRQVRKLLTAYRIHHPRSSLMRLYIPRKCGGRGFLNVKNLHNREVYNLREYFLNIKSDMHMDVVAVDKGFTPLSLGKEKWRKPIVMSTVDRVAVWKSKELHGRFYKSLTDPDVDQPSSVSWLQHGNLFGETEGFVCAIMDEVIKTNNYRKHIMKDGTPDICRACHKPGESIRHVVSGCSHLANGEYLHRHNQVARIIHQQLAIRYGLVENELPYYRYNPTPFLENGRALLYWDRSIVTDRFIAANKPDIVLVDRSARRAIIVDITVPHDDNLVKAEKEKLSKYLDLAHEITGMWNVDSTIIVPIVVSVNGLLAKSFDQHLKKLSLDCWIKGRIQKAVLLETARIVRRFLSLEP

SEQ ID NO: 6391 - protein, 1051 aa, Maniola jurtina
MRRRVLDESTLDRLRLNLPQVITTGNSTHKSPQILSVIEILNTQEELQGGLDLAVSNQNDEQMRRTLEDAILEFRSVPNNLRPKLPRLPVHRRNMALMAVLDKILGTYLESSYDLNDTHSILYCGAVAACRIASIKFPELHRAVKRPNTAPAWQAGIERRISLTRTLIAKLICFRAGNSRPRIMRFVHQAFAGTNISPSQYLSLVTDRIDFLKQKVYAWAQRIRRFRKRIDRASQNRMFQSDQRKMYRNWERPRGCMVDGELPTPDSTSDFWRSIWSAPIDHTEGEWMNVVRDQCATVVEMNPVTISAEDVGCAIRSASNWKCPGPDGLHNFWLKWFRSAHPVLATQFQNSIDSGSLPTLMTTGVTFLVHKSGSTADPKNYRPITCLPTIYKLLTSILTTKITMHINANNILAQVQNGCKARARGTKELLLIDTAICQQVRRNRKNLVAAWIDYKKAYDSVPHTWLMEIMRLYKVDATLCSFLDSCMSQWMTVLRQPGGDEFFESAEPIRIKRGIFQGDSLSPLWFCLALNPLSTLLKDSGLGYRLRKGGEVISHLLYMDDLKLYASKRTDLVKLLKITQNFSNNIGMEFGVDKCAIINIERSRVVNSENLVLSETLILRSLCEGETYKYLGMSEALGIEVRTMKQAVEERFFGRLKKVLNSLLSGGNKVRAFNGWVMPLLIYTFGILKWTQTELDALDRRIRKLLTTYRMHHPRSSVMRLYIPRKCGGRGFLNAKNLHNREVCNLRDYFLKVNVGIHRDVVAVDKGLTPLSLGKNNWRKPIVLSTSDRIAVWRSKELHGRFYKALTRPDVDSIASVSWLQFGDLFGETEGFICAIMDEVIKTNNYRKHIMKDGTLDICRACHLPGESLRHIVSGCSYLANGEYLHRHNQVAKIIHQQLALQYGLVDTEVPYYRYDPMSVLENSSALLYWDRSVITDRYIVANRPDIVLVDRSARRAMIVDVTIPHDDNLVKAEKEKVSKYLDLAHEITAMWSVDSAIIVPIVVSVHGLIANSFDQHLKKLSLNCWIKGKIQKAVVLETARIVRRFLTLEP

SEQ ID NO: 6392 - protein, 1188 aa, Maniola jurtina
METRRHRHASAHTAQITSGVDSSSDEDYRTPPSSTGSANDTRPPRRAPRRRATHPPPDGLEQQELRAPTTASAASGVVRRMRWTQRMNENVMRAYYRATDGGTNLTGYRSRMVSLFQALEPTVTVSAQRLSDQVRVIQRRRVLDESTLDRLRLNLPQVITTGNSTHKSPQIPSVIEILNTQEELQGGLDLAVSNQNDEQMRRTLEDAILEFRSVPNNLRPKLPRLPVHRRNMALMAVLDKILGTYLESSYDLNDTHSILYCGAVAACRIASIKFPELHRAVKRPNTAPAWQAGIERRISLTRTLIAKLICFRAGNSRPRIMRFVHQAFAGTNISPSQYLSLVTDRIDFLKQKVYAWAQRIRRFRKRIDRASQNRMFQSDQRKMYRNWERPRGCMVDGELPTPDSTSDFWRSIWSAPIDHTEGEWMNVVRDQCATVVEMNPVTISAEDVGCAIRSASNWKCPGPDGLHNFWLKWFRSAHPVLATQFQNSIDSGSLPTLMTTGVTFLVHKSGSTADPKNYRPITCLPTIYKLLTSILTTKITMHINANNILAQVQNGCKARARGTKELLLIDTAICQQVRRNRKNLVAAWIDYKKAYDSVPHTWLMEIMRLYKVDATLCSFLDSCMSQWMTVLRQPGGNEFFESAEPIRIKRGIFQGDSLSPLWFCLALNPLSTLLKDSGLGYRLRKGGEVISHLLYMDDLKLYASKRTDLVKLLKITQNFSNNIGMEFGVDKCAIINIERGRVVNSENLVLSETLILRSLCEGETYKYLGMSEALGIEVRTMKQAVEERFFGRLKKVLNSLLSGGNKVRAFNGWVMPLLIYTFGILKWTQTELDALDRRIRKLLTTYRMHHPRSSVMRLYIPRKCGGRGFLNAKNLHNREVCNLRDYFLKVNVGIHRDVVAVDKGLTPLSLGKNNWRKPIVLSTSDRIAVWRSKELHGRFYKALTRPDVDSIASVSWLQFGDLFGETEGFICAIMDEVIKTNNYRKHIMKDGTLDICRACHLPGESLRHIVSGCSYLANGEYLHRHNQVAKIIHQQLALQYGLVDTEVPYYRYDPMSVLENSSALLYWDRSVITDRYIVANRPDIVLVDRSARRAMIVDVTIPHDDNLVKAEKEKVSKYLDLAHEITAMWSVDSAIIVPIVVSVHGLIANSFDQHLKKLSLNCWIKGKIQKAVVLETARIVRRFLTLEP

SEQ ID NO: 6393 - protein, 1092 aa, Heliconius pachinus
MRAYYRATEGGTNLTAYRSRLLSMFQELEPTATVTAQRLSDRVRIIQRRHLLDESVLERLRLSFQQVNTTNNNSCDIRSQFQHANIESQGNIELSVSAQDDERLRRSLKDAILEYGSIPVNLRPKLPRLPMHRRNIALVRILDQHLPSHFNNCNDLTDTHSLLYCGAVAVCRVAGVQFPNKGGTKASKHTVPAWQYDTEKRINLTRILIGKLISFKSGNRRPRVMRFVAEAFAGTNLKPSEYMANVTNRIDFLKQKLYALAKRIRRYRERWDRYNQNSAFQKNQRSVYRKWERSGDSVVNCEIPNPDASAGFWRSIWSAPVEHTEGEWFCDIAKNCENIIPMRSIKISEIDVRCAIRYASNWKCPGLDGLHNFWLKWFRSSHSVFATQFQDALDSGSLPTFLTTGVTFLSYKSGCTTEPKNYRPITCLPTIYKLLTSILNKKITGHIVRNKILAPTQNGCKAGGRGTKELLLIDTTISQQVRRNRKNLTTAWIDYKKAYDSVPHTWLLKVLELYKIDMTLRSFLEACMGQWVTVLRHLGECDIPATSEPIRIKRGIFQGDSLSPLWFCLALNPLSTMLEDSGLGFRLRRGGKVISHLLYMDDLKLFASKRSDLMRLLKVTQTFSSDIRMEFGVDKCASMHVVRGSVIRSDNICISDSVSFRTLGEGETYKYLGMSEALGIDERSIKQLVKERFFSRLKKVLGSLLSGGNKVRAFNGWVMPLLAYTFGIVRWTQTELDSVDRQIRKLLTTYRMHHPRSSVMRLYIPRKCGGRGFLNVKNLHNHEVCSLREYFLKIDVDMHKDVVTVDKGLTPLSLGKENWRRPVVLTTSDRMAVWKSKELHGRFHRALVGQDVDTASSLSWLQFGDLFGETEGFVCAIMDEVIKTRNYQRHIMKDGTIDICRACHRPGESLRHIVSGCSHLANGEYLHRHNQVAKIIHQQLALQYGLVELEVPYYRYNPMSVLENSCALLYWDRSIITDRYIVANRPDIVLVDRVARRAVIVDVTIPHDENLVKAEKEKQSKYLDLAHEITAMWDVNATIIVPIVVSVNGLIAKSLDQHLKRLSLSCWIKNRIQKAVLLETARIVRRFLSLEP

SEQ ID NO: 6394 - protein, 962 aa, Euriphellus phraxanor
MTKRNRDLVCTLDSLLADYFESSENLEDTHSILFCAAVAACRVAGVTFEDTERATRPKPAAPAWQSRIEKRINETRVLIGKLCCFKEGNTRPRVLRFVRRAFLGTGISPQEYPSHVVERIDFLKQKVYAWASRIRRYRRRVERYNLNRKFQSDQRRVYRTWERLDQRVDDGRRPDDDATNTFWRNIWSVPVDHIEGDWMREVRQACEPLEAMGEISIASEDVAAAVRSIPNWKAPGPDGLHNYWLKWLRSSHVCLASQFQSALESGSLPQFLTTGITHLLHKTGSTTDPKNYRPITCLPTVYKLLTSILKDKIDRHIHNNAIMSVSQNGCRGGSRGTKELLLIDMTISQQVRRSRKSLSTCWIDYKKAYDSVPHTWLLKVLELYKLDTTLCSFLRSCMGQWRTVLRYPGCRTIRENEEPIRIERGIFQGDSLSPLWFCLALNPLSTLLEGSRLGCRLRRGGKVISHLLYMDDLKLFAPSCSQLMELLKVTETFSNSIRMEFGVDKCAVMHVERGRIVESDGIQLSDSINFRSLSANESYKYLGMSEALGINVTDMKQSLQERFFGRLKKVLKSLLSGGNKVRAFNGWVMPVLMYSFGILKWTQKELDALDRKVRVLLTAYRMHHPRSSVMRLYIPRRCGGRGFLNAKTLHNREVYKLREYFLHTDVDMHRDVVATDKGLTPLSLGKENWRKPVVLSTENRKEVWKSKELHGRFYRALHGPDVDFMASVSWLRFGNLFGETEGFVCAIMDEVIMTNNYRKYIVRDGTVDICRACHTPGESLRHIISGCSRLANGEYLHRHNQVAKIIHQQLALRYGLVESEVPYYKYVSDPVLENGHITLYWDRTIITDRTVVANKPDIVVIDRSERRTIIVDVTIPHDENLVKAEKDKQIKYLDLAHEVVDMWDVDTAVIVPIVVTANGLMAKSLDQHLKRLSLGSWVKGLMQKAVLLGTARIVRKFLSLEP

SEQ ID NO: 6395 - protein, 1088 aa, Mellicta athalia
MNKARGQHAQSTSKAPSCSDTQSSTDDEYETPPSTAESDANDAYSPTRRSKRRRVIRPPPVSLDVQGQRAPTRNPAAGGAVRRMRWTHKMNESVMRAYYEATGGGINLTAYRSTMLSLFQALEPTVTVTAQRLSDQVRAIQRCHLLDESVLERLRTNLPQLNTVSHIRAVQTSQKEQREVINLNLNNISPNSVDLSVNKQDNEHMRRALEDAILKYRSMPSNIRPQLPRLPIHRRNLALVGVMDTILKEYLDSTQNLSDTHSVLYCGAAAVCNVANVKFISNKITLPLHTAPAWQARIEKRINLTRTLIAKLTCFRAGNRRPKIMRFVHQAFAGTNITSNEYITSVSDRIDFLKQKLCAWAKRIKRYKKRRDRYNQNRMFQSNQRKVYRNWEQCTTNVVNGDLPARESITNFWRNIWSNPIDHIESDWMDVVRRRCSSLPQMEQIKISSEDISYAIRSTSNWKCPGLDGLHNFWLKWFHSSHHILASQFQDAIFNNSLPKFMTTGTTFLLYKSGCTADPKNYRPITCLPTIYKLLTSVLVTKITKHITKNNILATTQNGCKSGSRGTKELLLIDMTICQQVRRNRKNLAAAWIDYKKAYDSVPHTWLMKIMELYKIDATLCSFLSTCMRQWNTFLRYPGAVDVPGSTEPIRIMRGIFQGDSLSPLWFCLALNPLSTLLEDSGLGFHLRRGSKAISHLLYMDDLKLFASKLPDLNKLLKITETFSTCIRMEFGVDKCAVIHVERGRIVSTENLKLANSLTFRSLNEGETYKYLGMSEALGIDDGAMKQLVKERFFGRLKKVLNSFLSGANKVRAFNSWVMPLIVYTFGILRWTQTKLDSLDRQVRKLLTAYRIHHPRSSLMRLYIPRKCGGRGFLNVKNLHNREVYNLREYFLNIKSDIHMDVVAVDKGFTPLSLGKEKWRKPIIMSTVDRVAVWKSKELHGRFYKVLTDPDVDQPSSISWLQHSNLFGETEGFVCAIMDEVIKTNNYRKHIMKDGTPDICRACHKPGESIRHVVSGCSHLANGEYLHRHNQVARIIHQQFAIRYGLVENELPYYRYNPTPFLENGRALLYCSGRQPFGRQGPRGGQIN

SEQ ID NO: 6396 - protein, 1194 aa, Junonia litoralis
MKNARGRHARLTPKVISSNSESQSSLSDDEYHTPLSSTESEQHEADPPTRRSKRRRAVHPPQDGLELQGQCAPARVPAAGGAVRRMRWTQKMNESVMRAYYGATGGGINLTGYRSTMLSLFQALEPTVTVTAQRLSDQVRAIQRCHLLDESVLERLRLNLQQSNAAGDIHHVQRSVREPNMTNIPEFNENPSSSVDFAVSDQDNEHMRSALEDAILKYKHVPFNLRPRLPRLPMHRRNLMLVSVLDKVLPSYLDDTLDIYDIHSILYCGAVAVCNIASVKFPTEKNIVRTNTPPAWQIRIENRITLTRTLIGKLICFRAGNNRPRVMRFVHQAFAGTNIKVSEYMASVTDRIDFMKQKIFAWAKRIKRYKKRINRYRQNSMFQSDQRKVYRYWEQGSDNLANGVLPTPDVMSKFWHDIWSSPISHTEGDWMRVVGRDCEPIQQMEPITICSNDVACATRSMSNWKCPGPDGLQSFWLKWFHSSHSLLASRFQDALASGSLPTFMTTGVTILLYKSGCTADPKNYRPITCLPTIYKLFTSILAVKIKKHVENNNILAPAQNGCRSGSRGTKELLLIDMTICRQVRRNRKNLATAWIDYKKAYDSVPHTWLMRVMELYKIDATLCLLLKSCMGQWITYLRHPGSDEISGSTEPIRIKRGIFQGDSLSPLWFCLALNPLSSLLDDSGLGFRLRRGGKIISHLLYMDDLKLYASKQPELVELLKITESFSSCIGMEFGVDKCAVLHVERGRVIPSADIQVTNCLRLRSLNEGETYKYLGMSQALGIEDGSIKQLVRERFFGRLKKVLNSFLSGGNKVRAFNGWVIPLLVYTFGILRWTQAELDSLDRQVRKLLTAFRMHHPRSSVMRLYIPRKCGGRGFLNAKNLHNREVYNLRKYFLSINDDMHRDVVAVDKTFTPLSLGKENWRRPIVLDTGDRMAVWKSKELHGRYYRALMGSDVDRVSSVSWLQYGDLFGETEGFVCAIMDEVVKTNNYRKYIIKDGTPDICRACHHPGESIRHIISGCCHLANGEYLHRHNQVARIIHQQLALRYGLVSAEVPYYRYNPTPVLENGPALLYWDRSIITDRYIPANKPDIVVVDRSTRRAIIVDITIPHDDNLVKAEKEKMCKYLDLAHEITAMWSVDSTVIVPVVVSVNGLLAKSFDQHLKKLSLGCWIKGRIQKAVLLETARIVRRFLSLEP

SEQ ID NO: 6397 - protein, 988 aa, Melitaea cinxia
MRRALEDAILKYRSLPPNIRPQLPRLPIHRRNLALVGVMDKILQQYLDSTQNLSDTHSLLYCGAAAVCNVANVKFKSNKITLPSHTAPAWQARIEKRINLTRTLIAKLTCFRAGNRRPKIMRFVHQAFAGTNIRSNEYITSVSDRIDFLKQKLCAWAKRIKRYKKRRDRYHQNSIFQSDQRKVYRNWEQCTTNVVNGNLPTRESINNFWRNIWSNPIDHIESDWMDVVRRRCSSLPQMEQIKINPEDISYAIRSTSNWKCPGLDGLHNFWLKWFHSSHPILASQFQNAISTNTLPKFMTTGTTFLLYKSGCTADPKNYRPITCLPTIYKLLTSVLVTKITKHITTNNILATTQNGCKSGSRGTKELLLIDMTICQQVRRNRKNLAAAWIDYKKAYDSVPHTWLMKVMELYKIDAALCSFLSTCMRQWNTFLRHLGAVDVSGSTEPIRIMRGIFQGDSLSPLWFCLALNPLSTLLEDSRLGFHLRRGSKAISHLLYMDDLKLFASKLPDLYKLLKITETFSTCIRMEFGVDKCAVIHVERGRTVSSQNLKLNNSLSFRSLNEGETYKYLGMSEALGIDDGAMKQLVKERFFGRLKKVLNSFLSGGNKVRAFNSWVMPLIVYTFGILRWTQTELDTLDRQVRKLLTTYRIHHPRSSVMRLYIPRKCGGRGFLNAKNLHNREVYNLRNYFLNMKSDMHMDVVAVDRGFTPLSLGKEKWRKPIVMRTVDRVAVWKSKELHGRFYKVLTDPDVDQPSSISWLQHGNLFGETEGFVCAIMDEVIKTNNYRKHIMKDGTPDICRACHKPGESIRHVVSGCSHLANGEYLHRHNQVARIIHQQLAIRYGLVENELPYYRYSPMPFLENGRALLYWDRSIVTDRFIAANKPDIVLVDRSARRAIIVDITVPHDDNLVKAEKEKLSKYLDLAHEITGMWNVDSTIIVPIVVSVNGLLAKSFDQHLKKLSLDCWIKGRIQKAVLLETARIVRRFLSLEP

SEQ ID NO: 6398 - protein, 1192 aa, Melitaea cinxia
MNKARGRRAQKTPKVPSSSETQSTTDDEYQTPPSTAESDADDADSSTRPSNRRRVIRPPPACLEILGQCAPTRNPAAGGAVRRMRWTQKMNESVMRAYYEATGGGINLTAYRSTMLSLFQALEPTVTVTAQRLSDQVRAIQRCHLLDESVLERLRTNLPQLNTVSHIRDIQTSQKEQREVINFNINHISPNSVDLSVNEQDNEPMRRALEDAILKYRSLPPNIRPQLPRLPIHRRNLALVGVMDKILQQYLDSTQNLSDTHSLLYCGAAAVCNVANVKFKSNKITLPSHTAPAWQARIEKRINLTRTLIAKLTCFRAGNRRPKIMRFVHQAFAGTNIRSNEYITSVSDRIDFLKQKLCAWAKRIKRYKKRRDRYHQNSIFQSDQRKVYRNWEQCTTNVVNGNLPTRESINNFWRNIWSNPIDHIESDWMDVVRRRCSSLPQMEQIKINSEDISYAIRSTSNWKCPGLDGLHNFWLKWFHSSHPILASQFQNAISTNTLPKFMTTGTTFLLYKSGCTADPKNYRPITCLPTIYKLLTSVLVTKITKHITTNNILATTQNGCKSGSRGTKELLLIDMTICQQVRRNRKNLAVAWIDYKKAYDSVPHTWLMKVMELYKIDTALCSFLSTCMRQWNTFLRHPGAVDVSGSTEPIRIMRGIFQGDSLSPLWFCLALNPLSTLLEDSRLGFHLRRGSKAISHLLYMDDLKLFASKLPDLYKLLKMTETFSTCIRMEFGVDKCAVIHVERGRTVSSQNLKLNNSLSFRYLNEGETYKYLGMSEALSIDDGAMKQVVKERFFGRQKKVLNSFLSGGNKVRAFNSWVMPLIVYTFGILRWTQTKLDTLDRQVRKLLTTYRIHHPRSSVMRLYIPRKCGGRGFLNAKNLHNCEVYNLREYFLNMKSDMHMDVVAVDRGFTPLSLGKEKWRKPIVMRTVDRVAVWKSKELHGRFYKVLTDPDVDQPSSISWLQHGNLFGETEGFVCAIMDEVIKTNNYRKHIMKDGTPDICRACHKPGESIRHVVSGCSHLANGEYLHRHNQVARIIHQQLAIRYGLVENELPYYRYSPMPFLENGRALLYWDRSIVTDRFIAANKPDIVLVDRSARRAIIVDITVPHDDNLVKAEKEKLSKYLDLAHEITGMWNVDSTIIVPIVVSVNGLLAKSFDQHLKKLSLGCWIKGRIQKAVLLETARIVRRFLSLEP

SEQ ID NO: 6399 - protein, 868 aa, Mellicta athalia
MRFVHQAFAGTNISSKEYTTSVSDRIDFLKQKLCAWAKRIKRYKKRSDRYHQNSMFQRDQRKVYRNWEQCTTNVVNGELPTRDSIANFWRNIWSNPIDHIESDWMDVVRKRCSSLPQMDQIKISPEDINYAIRSTSNWKCPGLDGLHNFWLKRFHSSHPILASQFQDAILNNSLPKFMTTGTTFLLYKSGCTADPKNYRPITCLPTIYKLLTSVLVAKITKHITINNILATTQNGCKSGSRGTKELLLIDMTICQQVRRNRKNLAAAWIDYKKAYDSVPHTWLIKVMELYKIDAALCSFLSTCMRQWNTFLRYPGVVDVPGSTEPIRIMRGIFQGDSLSPLWFCLALSPLSTLLEDSGLGFHLRRGSKAISHLLYMDDLKLFASKLPDLYKLLKITETFSTCIRMEFGVDKCAVIHVERGRIVSSENLKLTNSLSFRSLNEGETYKYLGMSEALGIDDGAMKQLVRERFFGRLKKVLNSFLSGGNKVRAFNSWVMPLIVYTFGILRWTQTELDSLDRQVRKLLTAYRIHHPRSSLMRLYIPRKCGGRGFLNVKNLHNREVYNLREYFLNIKSDMYMDVVAVDKGFTPLSLGKEKWRKPIVMSTVDRVAVWKSKELHGRFYKSLTDPDVDQPSSVSWLQHGNLFGETEGFVCAIMDEVIKTNNYRKHIMKDGTPDICRACHKPGESIRHVISGCSHLANGEYLHRHNQVARIIHQQLAIRYGLVENELPYYRYNPTPFLENGRALLYWDRSIVTDRFIAANKPDIVLVDRSARRAIIVDITVPHDDNLVKAEKEKLSKYLDLAHEITGMWNVDSTIIVPIVVSVNGLLAKSFDQHLKKLSLDGWIKGRIQKAVLLETARIVRRFLSLEP

SEQ ID NO: 6400 - protein, 1192 aa, Melitaea cinxia
MNKARGRRAQKTPKVPSSSETQSTTDDEYQTPPSTADSDAEDADSSTRPSNRRRVIRPPPACLEIQGQCAPTRNPAAGGAVRRMRWTQKMNESVMRAYYEATGGGINLTAYRSTMLSLFQALEPTVTVTAQRLSDQVRAIQRCHLLDESVLERLRTNLPQLNTVSHIRDIQTSQKEQREVINFNINHISPNSVDLSVNEQDNEPMRRALEDAILKYRSLPPNIRPQLPRLPIHRRNLALVGVMDKILQQYLDSTQNLSDTHSLLYCGAAAVCNVANVKFKSNKITLPSHTAPAWQARIEKRINLTRTLIAKLTCFRAGNRRLKIMRFVHQAFAGTNIRPNEYITSVSDRIDFLKQKLCAWAKRIKRYKKRRDRYHQNSIFQSDQRKVYRNWEQCTTNVVNGNLPTRESINNFWRNIWSNPIDHIESDWMDVVRRRCSSLPQMEQIKINSEDISYAIRSTSNWKCPGLDGLHNFWLKWFHSSHPILASQFQNAISTNTLPKFMTTGTTFLLYKSGCTADPKNYRPITCLPTIYKLLTSVLVTKITKHITTNNILATTQNGCKSGSRGTKELLLIDMTICQQVRRNRKNLAAAWIDYKKAYDSVPHTWLMKVMELYKIDTALCSFLSTCMRQWNTFLRHPGAVDVSGSTEPIRIMRGIFQGDSLSPLWFCLALNPLSTLLEDSRLGFHLRRGSKAISHLLYMDDLKLFASKLPDLYKLLKITETFSTCIRMEFGVDKCAVIHVERGRTVSSQNLKLNNSLSFRSLNEGETYKYLGMSEALGIDDGAMKQLVKERFFGRLKKVLNSFLSGGNKVRAFNSWVMPLIVYTFGILRWTQTELDTLDRQVRKLLTTYRIHHPRSSVMRLYIPRKCGGRGFLNAKNLHNREVYNLREYFLNMKSDMHMDVVAVDRGFTPLSLGKEKWRKPIVMRTVDRVAVWKSKELHGRFYKVLTDPDVDQPSSISWLQHGNLFGETEGFVCAIMDEVIKTNNYRKHIMKDGTPDICRACHKPGESIRHVVSGCSHLANGEYLHRHNQVARIIHQQLAIRYGLVENELPYYRYSPMPFLENGRALLYWDRSIVTDRFIAANKPDIVLVDRSARRATIVDITVPHDDNLVKAEKEKLSKYLDLAHEITGMWNVDSTIIVPIVVSVNGLLAKSFDQHLKKLSLDCWIKGRIQKAVLLETARIVRRFLSLEP

SEQ ID NO: 6401 - protein, 1192 aa, Mellicta athalia
MNKARGQHAQSTSKAPSRSETQSSTDDEYETPPSTAESDANDAYSPTRRSKRRRVVRPPPASLDVQGQRAPTRNPAAGGAVRRMRWTHKMNESVMRAYYEATGGGINLTAYRSTMLSLFQALEPTVTVTAQRLSDQVRAIQRCHLLDESVLERLRTNLPQLNTVSHIRAVQTSQKEQREVINLNLNNISPNSVDLSVNKQDNEHMRRALEDAILKYRSMPSNIRPQLPRLPIHRRNLALVGVMDTILKEYLDSTQNLSDTHSVLYCGAAAVCNVANVKFISNKITLPLHTAPAWQARIEKRINLTRTLIAKLTCFRAGNRRPKIMRFVHQAFAGTNITSNEYITSVSDRIDFLKQKLCAWAKRIKRYKKRRDRYNQNRMFQSNQRKVYRNWEQCTTNVVNGDLPARESITNFWRNIWSNPIDHIESDWMDVVRRRCSSLPQMEQIKISSEDISYAIRSTSNWKCPGLDGLHNFWLKWFHSSHPILASQFQDAIFNNSLPKFMTTGTTFLLYKSGCTADPKNYRPITCLPTIYKLLTSVLVTKITKHITTNNILATTQNGCKSGSRGTKELLLIDMTICQQVRRNRKNLAAAWIDYKKAYDSVPHTWLMKIMELYKIDATLCSFLSTCMRQWSTFLRYSGAGDVSGSTEPIRIMRGIFQGDSLSPLWFCLALNPLSTLLEDSGLGFHLRRGSKAISHLLYMDDLKLFASKLPDLNKLLKITETFSTCIRMEFGVDKCAVIHVERGRIVSTENLKLANSLTFRSLNEGETYKYLGMSEALGIDDGAMKQLVKERFFGRLKKVLNSFLSGANKVRAFNSWVMPLIVYTFGILRWTQTELDSLDRQVRKLLTAYRIHHPRSSLMRLYIPRKCGGRGFLNVKNLHNREVYNLREYFLNIKSDIHMDVVAVDKGFTPLSLGKEKWRKPIIMSTVDRVAVWKSKELHGRFYKVLTDPDVDQPSSISWLQHSNLFGETEGFVCAIMDEVIKTNNYRKHIMKDGTPDICRACHKPGESIRHVVSGCSHLANGEYLHRHNQVARIIHQQLAIRYGLVENELPYYRYNPTPFLENGRALLYWDRSIVTDRFIAANKPDIVLVDRSARRAIIVDITVPHDDNLVKAEKEKLSKYLDLAHEITGMWNVDSTIIVPIVVSVNGLLAKSFDQHLKKLSLDGWIKGRIQKAVLLETARIVRRFLSLEP

SEQ ID NO: 6402 - protein, 1107 aa, Mellicta athalia
MRWTQKMNESVMRAYYEATGGGINLTAYRSTMLSLFQALEPTVTVTAQRLSDQVRAIQRCHLLDESVLERLRTNLPQLNTVSHIRAVQTSQKEQREVINLNHISPNSVDLSVNEQDNEPMRRALEDAILKYRSMPPNIRPQLPRLPIHRRNLALVGIMNTILKEYLDSTQNLSDTHSVLYCGAAAVCDVAKVKFTSNKITLPSHTAPAWQARIEKRINLTRTLIAKLTCFRAGNRCPKIMRFVHQAFAGTNISSKEYTTSVSDRIDFLKQKLCAWAKRIKRYKKRSDRYHQNSMFQRDQRKVYRNWEQCTTNVVNGELPTRDSIANFWRNIWSNPIDHIESDWMDVVRKRCSSLPQMEQIKISPEDINYAIRSTSNWKCPGLDGLHNFWLKRFHSSHPILASQFQDAILNNSLPKFMTTGTTFLLYKSGCTADPKNYRPITCLPTIYKLLTSVLVAKITKHITINNILATTQNGCKSGSRGTKELLLIDMTICQQVRRNRKNLAAAWIDYKKAYDSVPHTWLMKVMELYKIDAALCSFLSTCMRQWNTFLCYPGVVDVPGSTEPIRIMRGIFQGDSLSPLWFCLALNPLSSLLEDSGLGFHLRRGSKAISHLLYMDDLKLFASKLSDLYKLLKITETFSTCIRMEFGVDKCAVIHVERGRIVSSENLKLTNSLSFRSLNEGETYKYLGMSEALGIDVGAMKQLVRERFFGRLKKVLNSFLSGGNKVRAFNSWVMPLIVYTFGILRWTQTELDSLDRQVRKLLTAYRIHHPRSSLMRLYIPRKCGGRGFLNVKNLHNREVYNLREYFLNIKSDMHMDVVAVDKGFTPLSLGKEKWRKPIVMSTVDRVAVWKSKELHGRFYKSLTDPDVDQPSSVSWLQHGNLFGETEGFVCAIMDEVIKTNNYRKHIMKDGTPEICRACHKPGESIRNVVSGCSHLANGEYLHRHNQVARIIHQQLAIRYGLVENELPYYRYNPTPFLENGRALLYWDRSIVTDRFIAANKPDIVLVDRSARRAIIVDITVPHDDNLVKAEKEKLSKYLDLAHEITGMWNVDSTIIVPIVVSVNGLLAKSFDQRLKKLSLDCWIKGRIQKAVLLETARIVRRFLSLEP

SEQ ID NO: 6403 - protein, 1188 aa, Maniola jurtina
METRRHRHASAHTAQITSGVDSSSDEDYRTPPSSTGSADDTRPLRRAPRRRATHPPPEGLEQQELRAPTTASAASGVVRRMRWTQRMNENVMRAYYRATDGGTNLTGYRSRMVSLFQALEPTVTVSAQRLSDQVRVIQRRRVLDESTLDRLRLNLPQVITTGNSTHKSPQIPSVIEILNTQEELQGGLDLAVSNQNDEQMRRTLEDAILEFRSVPNNLRPKLPRLPVHRRNMALMAVLDKILGTYLESSYDLNDTHSILYCGAVAACRIASIKFPELHRAVKRPNTAPAWQAGIERRISLTRTLIAKLICFRAGNSRPRIMRFVHQAFAGTNISPSQYLSLVTDRIDFLKQKVYAWAQRIRRFRKRIDRASQNRMFQSDQRKMYRNWERPRGCMVDGELPTPDSTSDFWRSIWSAPIDHTEGEWMNVVRDQCATVVEMNPVTISAEDVRCAIRSASNWKCPGPDGLHNFWLKWFRSAHPVLATQFQNSIDSGSLPTLMTTGVTFLIHKSGSTADPKNYRPITCLPTIYKLLTSILTTKITMHINANNILAQVQNGCKARARGTKELLLIDTAICQQVRRNRKNLVAAWIDYKKAYDSVPHTWLMEIMRLYKVDATLCSFLDSCMSQWMTVLRQPGGDEFFESAEPIRIKRGIFQGDSLSPLWFCLALNPLSTLLKDSGLGYRLRKGGEVISHLLYMDDLKLYASKRTDLVKLLKITQNFSNNIGMEFGVDKCAIINIERGRVVNSENLVLSETLILRSLCEGETYKYLGMSEALGIEVRTMKQAVEERFFGRLKKVLNSLLSGGNKVRAFNGWVMPLLIYTFGILKWTQTELDALDRRIRKLLTTYRMHHPRSSVMRLYIPRKCGGRGFLNAKNLHNREVCNLRDYFLKVNVGIHRDVVAVDKGLTPLSLGKNNWRKPIVLSTSDRIAVWRSKELHGRFYKALTRPDVDSIASVSWLQFGDLFGETEGFICAIMDEVIKTNNYRKHIMKDGTLDICRACHLPGESLRHIVSGCSYLANGEYLHRHNQVAKIIHQQLALQYGLVDTEVPYYRYDPMSVLENSSALLYWDRSVITDRYIVANRPDIVLVDRSARRAMIVDVTIPHDDNLVKAEKEKVSKYLDLAHEITAMWSVDSAIIVPIVVSVHGLIANSFDQHLKKLSLNCWIKGRIQKAVVLETARIVRRFLTLEP

SEQ ID NO: 6404 - protein, 1187 aa, Heliconius numata
MPGGQVHSQHHGRRCCPSNPQPPSSEDDYRTAASTAGSEEGMSESEGPALRPRRRADIPPAEGLEPGASRMLNKAPATGGKVPRMRWSQQLNESVMRAYYRATEGGTNLTAYRSRLLSMFQELEPTATVTAQRLSDRVRIIQRRHLLDESVLERLRLSFQQVNTTNSNSCDIRSQFQYANIESQGNIELSVSAQDDERLRRSLKDAILEYGSIPVDLRPKLPRLPMHRRNIALVRILDQHLPSHFNNCNDLTDTHSLLYCGAVAVCRVAGVQFPNKGGTKASKHTVPAWQYDTEKRISLTRILIGKLISFKSGNRRPRVMRFVAEAFAGTNLKPSEYMANVTNRIDFLKQKLYALAKRIRRYRERWDRYNQNSAFQKNQRSVYRKWERSGDSVVNCEIPNPDASADFWRSIWSAPVEHTEGEWFCDIAKNCENIIPMRSIKISEIDVRCAIRYASNWKCPGLDGLHNFWLKWFRSSHSVFATQFQDALDSGSLPTFLTTGVTFLSYKSGCTTEPKNYRPITCLPTIYKLLTSILNKKITGHIVRNKILAPTQNGCKAGGRGTKELLLIDTTISQQVRRNRKNLTTAWIDYKKAYDSVPHTWLLKVLELYKIDITLRSFLEACMGQWVTVLRHLGECDIPATSEPIRIKRGIFQGDSLSPLWFCLALNPLSTMLEDSGLGFRLRRGGKVISHLLYMDDLKLFASKRSDLMRLLKVTQTFSSDIRMEFGVDKCASMHVVRGSVIRSDNICISDSVSFRTLGEGETYKYLGMSEALGIDERSIKQLVKERFFSRLKKVLGSLLSGGNKVRAFNGWVMPLLAYTFGIVRWTQTELDSVDRQIRKLLTTYRMHHPRSSVMRLYIPRKCGGRGFLNVKNLHNHEVCSLREYFLKIDVDMHKDVVTVDKGLTPLSLGKENWRRPVVLTTSDRMAVWKSKELHGRFHRALVGQDVDTVSSLSWLQFGDLFGETEGFVCAIMDEVIKTRNYQRHIMKDGTIDICRACHRPGESLRHIVSGCSHLANGEYLHRHNQVAKIIHQQLALQYGLVELEVPYYRYNPMSVLENSCALLYWDRSIITDRYIVANRPDIVLVDRAARRAVIVDVTIPHDENLVKAEKEKQSKYLDLAHEITAMWDVNATIIVPIVVSVNGLIAKSLDQHLKRLSLSCWIKNRIQKAVLLETARIVRRFLSLEP

SEQ ID NO: 6405 - protein, 1183 aa, Eueides tales
MPGGQVHSQQHGWRCCPSNPQPPSSEDDYRTAASTAGSEEGMSESEGPALRPRRRADIPPSEGLEPAVSRMLNKAPATGGKVPRMRWSQQLNESVMRAYYRATEGGTNLTAYRSRLLSMFQELEPTATVTAQRLSDRVRIIQRRHLLDESVLERLRLSFQQVNTTNNNSCDIRSQFQHANIESQGNIELSVSAQDDERLRRSLKDAILEYGSIPVNLRPKLPRLPMHRRNIALVRILDQHLPSHFNNCNDLTDTHSLLYCGAVAVCRVAGVQFPNKGGTKASKHTVPAWQYDTEKRINLTRILIGKLISFKSGNRRPRVMRFVAEAFAGTNLKPSEYMANVTNRIDFLKQKLYALAKRIRRYRERWDRYNQNSAFQKNQRSVYRKWERSGDSVVNCEIPNPDASAGFWRSIWSAPVEHTEGEWFCDIAKNCENIIPMRSIKISEIDVRCAIRYASNWKCPGLDGLHNFWLKWFRSSHSVFATQFQDALDSGSLPTFLTTGVTFLSYKSGCTTEPKNYRPITCLPTIYKLLTSILNKKITGHIVRNKILAPTQNGCKAGGRGTKELLLIDTTISQQVRRNRKNLTTAWIDYKKAYDSVPHTWLLKVLELYKIDMTLRSFLEACMGQWVTVLRHLGECDIPATSEPIRIKRGIFQGDSLSPLWFCLALNPLSTMLEDSGLGFRLRRGGKVISHLLYMDDLKLFASKRSDLMRLLKVTQTFSSDIRMEFGVDKCASMHVVRGSVIRSDNICISDSVSFRTLGEGETYKYLGMSEALGIDERSIKQLVKERFFSRLKKVLGSLLSGGNKVRAFNGWVMPLLAYTFGIVRWTQTELDSVDRQIRKLLTTYRMHHPRSSVMRLYIPRKCGGRGFLNVKNLHNHEVCSLREYFLKIDVDMHKDVVTVDKGLTPLSLGKENWRRPVVLTTSDRMAVWKSKELHGRFHRALVGQDVDTASSLSWLQFGDLFGETEGFVCAIMDEVIKTRNYQRHIMKDGTIDICRACHRPGESLRHIVSGCSHLANGEYLHRHNQVAKIIHQQLALQYGLVELEVPYYRYNPMSVLENSCALLYWDRSIITDRYIVANRPDIVLVDRVARRAVIVDVTIPHDDNLVKAEKEKQSKYLDLAHEITAMWDVNATIIVPIVVSVNGLIAKSLDQHLKRLSLSCWIKNRIQKAVLLETARIVRRFL

SEQ ID NO: 6406 - protein, 1194 aa, Melitaea cinxia
MNKARGRRAQKRPKVPSSSETQSSTTDDEYQTPPSTAESDAYDADSSTRTSNRRRVIRPPPACLEVQGQCAPTRNPAAGGAVRRMRWTQKMNESVMRAYYEATGGGINLTAYRSTMLSLFQALEPTVTVTAQRLSDQVRAIQRCHLLDESVLERLRTNLPQLNTVSHIRDIIQTSQKEQREVINFNINHISPNSVDLSVNEQDNEPMRRALEDAILKYRSLPPNIRPQLPSLPIHRRNLALVGVMDKILQPYLDSTQNLSDTHSLLYCGAAAVCNVANVKFKSNKITLPSHTAPAWQARIEKRINLTRTLIAKLTCFRAGNRRPKIMRFVHQAFAGTNIRSNEYITSVSDRIDFLKQKLCAWAKRIKRYKKRRDRYHQNSIFQSDQRKVYRNWEQCTTNVVNGNLPTRESINNFRRNIWSNPIDHIESDWMDVVRRRCSSLPQMEQIKINSEDISYAIRSTSNWKCPGLDGLHNFWLKWFRSSHPILASQFQNAISTNTLPKFMTTGTTFLLYKSGCTADPKNYRPITCLPTIYKLLTSVLVTKITKHITTNNILATTQNGCKSGSRGTKELLLIDMTICQQVRRNRKNLAAAWIDYKKAYDSVPHTWLMKVMELYKIDAALCSFLSTCMRQWNTFLRHPGAVDVSGSTEPIRIMRGIFQGDSLSPLWFCLALNPLSTLLEDSRLGFHLRRGSKAISHLLYMDDLKLFASKLPDLYKLLKITETFSTCIRMEFGVDKCAVIHVERGRTVSSQNLKLNNSLSFRSLNEGETYKYLGMSEALGIDDGAMKQLVKERFFGRLKKVLNSFLSGGNKVRAFNSWVMPLIVYTFGILRWTQTELDTLDRQVRKLLTAYRIHHPRSSVMRLYIPRKCGGRGFLNAKNLHNREVYNLRQYFLNMKSDMHMDVVAVDRGFTPLSLGKEKWRKPIVMRTVDRVAVWKSKELHGRFYKVLTDPDVDQPSSISWLQHGNLFGETEGFVCAIMDEVIKTNNYRKHIMKDGTPDICRACHKPGESIRHVVSGCIHLANGEYLHRHNQVARIIHQQLAIRYGLVENELPYYRYSPTPFLENGRALLYWDRSIVTDRFIAANKPDIVLVDRSARRAIIVDITVPHDDNLVKAEKEKLSKYLDLAHEITGMWNVDSTIIVPIVVSVNGLFAKSFDQHLKKLSLDCWIKGRIQKAVLLETARIVRRFLSLEP

SEQ ID NO: 6407 - protein, 868 aa, Mellicta athalia
MRFVHQAFAGTNISSKEYTTSVSDRIDFLKQKLCAWAKRIKRYKKRSDRYHQNSMFQRDQRKVYRNWEQCTTNVVNGELPTRDSIANFWRNIWSNPIDHIESDWMDVVRKRCSSLPQMDQIKISPEDINYAIRSTSNWKCPGLDGLHNFWLKRFHSSHPILASQFQDAILNNSLPKFMTTGTTFLLYKSGCTADPKNYRPITCLPTIYKLLTSVLVAKIIKHITINNILATTQNGCKSGSRGTKELLLIDMTICQQVRRNRKNLAAAWIDYKKAYDSVPHTWLMKVMELYKIDAALCSFLSTCMRQWNTFLRYPGVVDVPGSTEPIRIMRGIFQGDSLSPLWFCLALNPLSTLLEDSGLGFHLRRGSKAISHLLYMDDLKLFASKLPDLYKLLKITETFSTCIRMEFGVDKCAVIHVERGRIVSSENLKLTNSLSFRSLNEGETYKYLGMSEALGIDDGAMKQLVREQFFGRLKKVLNSFLSGGNKVRAFNSWVMPLIVYTFGILRWTQTELDSLDRQVRKLLTAYRIHHPRSSLMRLYIPRKCGGRGFLNVKNLHNREVYNLREYFLNMKIDMHMDVVAVDKGFTPLSLGKEKWRKPIVMSTVDRVAVWKSKELHGRFYKSLTDPDVDQPSSVSWLQHGNLFGETEGFVCAIMDEVIKTNNYRKHIMKDGTPDICRACHKPGESIRHVISGCSHLANGEYLHRHNQVARIIHQQLAIRYGLVENELPYYRYNPTPFLENGRALLYWDRSIVTDRFIAANKPDIVLVDRSARRAIIVDITVPHDDNLVKAEKEKLSKYLDLAHEITGMWNVDSTIIVPIVVSVNGLLAKSFDQHLKKLSLDGWIKGRIQKAVLLETARIVRRFLSLEP

SEQ ID NO: 6408 - protein, 868 aa, Mellicta athalia
MRFVHQAFAGTNITSNEYITSVSDRIDFLKQKLCAWAKRIKRYKKRRDRYNQNSMFQSDQRKVYRNWEQCTTNVVNGDLPTRESITNFWRNIWSNPIDHIESDWMDVVRRRCSSLPQMEQIKITSEDISYAIRSTSNWKCPGLDGLHNFWLKWFHSSHPILASQFQDAIFNNSLPKFMTTGTTFLLYKSGCTADPKNYRPITCLPTIYKLLTSVLVAKITKHISANNILATTQNGCKSGSRGTKELLLIDMTICQQVRRNRKNLAAAWIDYKKAYDSVPHTWLMKVMELYKIDVTLCSFLSTCMRQWNTFLRYPGAVDVPGSTEPIRIMRGIFQGDSLSPLWFCLALNPLSTLLEDSRLGFHLRRGSKAISHLLYMDDLKLFASKLPDLNKLLKITETFSTCIRMEFGVDKCAVIHVERGRIVSSENLKLANSLSFRSLNEGETYKYLGMSEALGIDEGAMKQLVKERFFSRLKKVLNSFLSGANKVRAFNSWVMPLIVYTFGILRWTQTELDSLDRQVRKLLTAYRIHHPRSSLMRLYIPRKCGGRGFLNVKNLHNRELYNLREYFLNIKSDIHMDVVAVDKGFTPLSLGKEKWRKPIVMSTVDRVAVWKSKELHGRFYKVLTDPDVDQPSSISWLQHGNLFGETEGFVCAIMDEVIKTNNYRKHIMKDGTPDICRACHKPGESIRHIVSGCSHLANGEYLHRHNQVARIIHQQLAIRYGLVENELPYYRYNPTPFLENGRALLYWDRSIVTDRFIAANKPDIVLVDRSARRAIIVDITVPHDDNLVKAEKEKLSKYLDLAHEITGMWNVDSTIIVPIVVSVNGLLAKSFDQHLKKLSLDGWIKGRIQKAVLLETARIVRRFLSLEP

SEQ ID NO: 6409 - protein, 1188 aa, Maniola jurtina
METRRHRHASAHTAQITSGVDSSSDEDYRTPPSSTGSADDTRPPRRAPRRRATHPPPDGLEQQELRAPTTASAASGVVRRMRWTQRMNENVMRAYYRATDGGTNLTGYRSRMVSLFQALEPTVTVSAQRLSDQVRVIQRRRVLDESTLDRLRLNLPQVITTGNSTHKSPQIPSVIEILNTQEELQGGLDLAVSNQNDEQMRRTLEDAILEFRSVPNNLRPKLPRLPVHRRNMALMAVLDKILGTYLESSYDLNDTHSILYCGAVAACRIASIKFPELHRAVKRPNTAPAWQAGIERRISLTRTLIAKLICFRAGNTRPRIMRFVHQAFAGTNISPSQYLSLVTDRIDFLKQKVYAWAQRIRRFRKRIDRASQNRMFQSDQRKMYRNWERPRGCMVDGELPTPDSTSDFWRSIWSAPIDHTEGEWMNVVRDQCATVVEMNPVTISAEDVGCAIRSASNWKCPGPDGLHNFWLKWFRSAHPVLATQFQNSIDSGSLPTLMTTGVTFLVHKSGSTADPKNYRPITCLPTIYKLLTSILTTKITMHINANNILAQVQNGCKARARGTKELLLIDTAIWQQVRRNRKNLVAAWIDYKKAYDSVPHTWLMEIMRLYKVDATLCSFLDSCMSQWMTVLRQPGGDEFFESAEPIRIKRGIFQGDSLSPLWFCLALNPLSTLLKDSGLGYRLRKGGEVISHLLYMDDLKLYASKRTDLVKLLKITQNFSNNIGMEFGVDKCAIINIERGRVVNSENLVLSETLILRSLCEGETYKYLGMSEALGIEVRTMKQAVEERFFGRLKKVLNSLLSGGNKVRAFNGWVMPLLIYTFGILKWTQTELDALDRRIRKLLTTYRMHHPRSSVMRLYIPRKCGGRGFLNAKNLHNREVCNLRDYFLKVNVGIHRDVVAVDKGLTPLSLGKNNWRKPIVLSTSDRIAVWRSKELHGRFYKALTRPDVDSIASVSWLQFGDLFGETEGFICAIMDEVIKTNNYRKHIMKDGTLDICRACHLPGESLRHIVSGCSYLANGEYLHRHNQVAKIIHQQLALQYGLVDTEVPYYRYDPMSVLENSSALLYWDRSVITDRYIVANRPDIVLVDRSARRAMIVDVTIPHDDNLVKAEKEKVSKYLDLAHEITAMWSVDSAIIVPIVVSVNGLIANSFDQHLKKLSLNCWIKGKIQKAVVLETARIVRRFLTLEP

SEQ ID NO: 6410 - protein, 1169 aa, Vanessa cardui
MLTRARKRAHNYLSPDPPLSSASQAQDPAQESSLVSAAASSSSDEYFSPLTSPTPVRRAGRRRPPTGLGARGQPVSNRVLASGGGVQRMRWTQSINENVIRAYYGATEGGTNLTAYRVRMLSLFQALEPAINVSAQRLSDQVRVILRNNRLSDTVLDRIRSETCYSGVTSGLSTPVVEEPLPAIPQGPEHDDEDGGDMAITTSKYSDQLRSALGDAIREYRNTPAELRPRLPRLPMSKRNRDLVCTLDSLLADYFESSENLEDTHSILFCAAVAACRVAGVTFDDTELATRPKAAAPAWQRRIEKRISETRVLIGKLYCFKEGNTRPRVMRFVGRAFLGTGIGPQEYPSHVVERIDFLKQKVYAWASRIRRYRRRVDRYYLNRKFQSDQRWVYRTWERLDQGVSDGCRPDDDATNTFWHNIWSVPVDHIEGDWMLEVRQACEPLEVMGKISIASEDVAAAVRSVPNWMSPGPDGLHSYWLKWLRSSHECLAFQFQSALESGSLPQFLTTGVTHLLHKSGSATDPKNYRPITCLPTVYNLLTSILIDKIDSHIQSNSILSVSQNGCGGGSRGTKELLLIDMTISQQVRRFRKSLSTCWIDYKKAYDSVPHTWLLRVLELYKLDTTLCSFLRSCMRQWRTVLRYQGCRTIHGDDEPIRIERGIFQGDSLSPLWFCLALNPLSTLLEGSRLGYRLRRGGKVISHLLYMDDLKLFAPSGSQLVELLKVTETFSNSIRMEFGVDKCAVMHVKRGEIMESDGLQLSDSINFKSLSANKSYKYLGMSEALGINVTDMKQSLQERFFGRLKKVLKSLLSGGNKVRAFNGWVMPVLMYSFGILKWTQKDLDALDRRVRVLLTAYRMHHPRSSVMRLYIPRRYGGRGFLNAKTLHNREVYKLREYFLHTDLDMPRDVVIMDKGLTPLSLGKENWRKPVVLSTENRKEVWKSKELHGRFYRALHGPDVDFMASVSWLRFGNLFGETKGFVCAIMDEVIMTNNYRRYIVGDGTVDICRACHTPGESLRHIISGCSRLANGEYLYRHNQVAKIIHQQLALRYGLVVSEVPYYRYVPDPVLENGHITLYWDRSIITDRTVVANKPDIVVIDRSERRTIIVDISIPHDENLVKAEKDKQIKYLDLAHEVVDMWDVDTAVIVPIVVSANGLMAKSLDQHLKSFVR

SEQ ID NO: 6411 - protein, 1128 aa, Ochropleura plecta
MITRLAARQHARLPPPDSPLSSASPPPEPSLIVSAVTPAVAVASSSSDEYFSPPTTPPPARRRGGRRPPDGLGLRGPPASDRVPAPGGSVQRMRWTSSINENVMRSYYGATEGGNNLTAYRVRMLSLFQVLEPAVNVSAQRLSDQVRVIQRNRMLDDTVLDRLRTEMQSSQVITSSSQAVVPPQSHQLVSHADEVSNDMATNVSTQCNEEMRIALEGAIREYRYISPELRPRLPRLPMHNKNRVLVAVLDSQLSNYFDNCENLTDAHSILYCAAVAACRVAHVKFPDDGATRPKPAVPFWQCRIERRIGVARALIGKLICFREGNTRPRVMRFVRRAFAGTDISPPDYMSHITERIDFLKQKVYAWANRIRRYKRRVERYTLNRTFQSDERWVYRAWERPDQGVSDTHLPDDDAMCLFWRNIWSVPVSHTEGEWTREVERACDPIPEMGALTISPQDVACAVRPLPNWKSPGPDGLHNFWLKWIQRSHARLATLFQTALESGSLPKFLTTGITHLLHKSGSTTEPKNYRPITCLPTIYKVLTSILRAKITKHIDDNSIMSASQNGCRNGSRGTKELLLIDMAISQQVRRSRRHLSTCWIDYKKAYDSVPHTWLMRVLELYKVDATLRTFLSSCMRQWNTVLRYPGCRQIQRNSEPIRIERGIFQGDSLSPLWFCLALNPLSTLLEDSGLGYRLRRGGRVISHLLYMDDLKLFAPNDSQLMELLKVTETFSSAISMEFGVDKCAVMHVKRGEIVESVGTQLSDSIHLRSLSANETYKYLGMSEALGINVADMKQSLKERFFGRLRKVFNSLLSGGNKVRAFNGWVMPVLMYSFGILKWTQTELDALDRKVRTLLTAYRMHHPRSSVMRLYIPRSCGGRGFLNAKTLHNREICSLREYFLEADVGMHRDVVTVDKGFTPLSLAKENWRKPVVLDTNDRREVWQSKELHGRFFRALHGPDVDQPASVAWLRSGDLFGETEGFVCAIMDEVMMTNNYRRFIVKDGTVDICRACHRPGESIRHIISGCSRLANGEYLHRHNLVARIIHQQLALKYSLVESEVPYYRYEPDPVLEHGNITLYWDRSIITDRTIVANKPDIVVVDRSERRAMIVDITVPHDENLVKAEKDKQIKY

SEQ ID NO: 6412 - protein, 988 aa, Mellicta athalia
MRRALKDAILKYRSMPPNIRPQLPRLPIHRRNLALVGIMDTILKEYLDSTQNLSDTHSVLYCGAAAVCDVAKVKFTSNKITLPSHTAPAWQARIEKRINLTRTLIAKLTCFRAGNRRPKIMRFVHQAFAGTNISSKEYTTSVSDRIDFLKQKLCAWAKRIKRYKKRSDRYHQNSMFQRDQRKVYRNWEQCTTNVVNGELPTRDSIANFWRNIWSNPIDHIESDWMDVVRKRCSSLPQMEQIKISPEDINYAIRSTSNWKCPGLDGLHNFWLKRFHSSHPILASQFQDAILKNSLPKFMTTGTTFLLYKSGCTADPKNYRPITCLPTIYKLLTSVLVAKITKHITINNILATTQNGCKSGSRGTKELLLIDMTICQQVRRNRKNLAAAWIDYKKAYDSVPHTWLMKVMELYKIDAALCSFLSTCMRQWNTFLRYPGVVDVPGSTEPIRIMRGIFQGDSLSQLWFCLALNPLSTLLEDSGLGFHLRRGSKAISHLLYMDDLKLFASKLPDLYKLLKITETFSTCIRMEFGVDKCAVIHVERGRIVSSENLKLTNSLSFRSLNEGETYKYLGMSEALGIDDGAMKQLVRERFFGRLKKVLNSFLSGGNKVRAFNSWVMPLIVYTFGILRWTQTELDSLDRQVRKLLTAYRIHHPRSSLMRLYIPRKCGGRGFLNVKNLHNREVYNLREYFLNIKSDMHMDVVAVDKGFTPLSLGKEKWRKPIVMSTVDRVAVWKSKELHGRFYKSLTDPDVDQPSSVSWLQHGNLFGETEGFVCAIMDEVIKTNNYRKHIMKDGTPDICRACHKPGESIKHVVSGCSHLANGEYLHRHNQVARIIHQQLAIRYGLVENELPYYRYNPTPFLENGRALLYWDRSIVTDRFIAANKPDIVLVDRSARRAIIVDITVPHDDNLVKAEKEKLSKYLDLAHEITGMWNVDSTIIVPIVVSVNGLLAKSFDQHLKKLSLDCWIKGRIQKAVLLETARIVRRFLSLEP

SEQ ID NO: 6413 - protein, 1187 aa, Heliconius numata; identical to SEQ ID NO: 6333

SEQ ID NO: 6414 - protein, 1190 aa, Mellicta athalia
MNKARGQHAQSTSKVPSRSETQSSTDDEYETPLSTAESDADDADSSTRRPKRRRVIRPPPVSLDVQGQRAPTRNPAAGGAVRRMRWTHKMNESVMRAYYEATGGGINLTAYRSTMLSLFQALEPTVTVTAQRLSDQVRAIQRCHLLDESVLERLRTNLPQFNTVSHIRAVQTSQKEQREVINLNNISPNSVDLSVNEQDNEPMRRALEDAILKYRSMPPNIRPQLPRLPIHRRNLALVGVMDTILKEYLDSTQNLADTHSVLYCGAAAVCNVAKVKFTSNKITLPSHTAPAWQARIEKRINLTRTLIAKLTCFRAGNRRPKIMRFVHQAFAGTNITSNEYITSVSDRIDFLKQKLCAWAKRIKRYKKRRDRYNQNSMFQSDQRKVYRNWEQCTTNVVNGDLPTRESITNFWRNIWSNPIDHIESDWMDVVRRRCSSLPQMEQIKITSEDISYAIRSTSNWKCPGLDGLHNFWLKWFHSSHPILASQFQDAIFNNSLPKFMTTGTTFLLYKSGCTADPKNYRPITCLPTIYKLLTSVLVAKITKHISANNILATTQNGCKSGSRGTKELLLIDMTICQQVRRNRKNLAAAWIDYKKAYDSVPHTWLMKVMELYKIDVTLCSFLSTCMRQWNTFLRYPGAVDVPGSTEPIRIMRGIFQGDSLSPLWFCLALNPLSTLLEDSRLGFHLRRGSKAISHLLYMDDLKLFASKLPDLNKLLKITETFSTCIRMEFGVDKCAVIHVERGRIVSSENLKLANSLSFRSLNEGETYKYLGMSEALGIDEGAMKQLVKERFFSRLKKVLNSFLSGANKVRAFNSWVMPLIVYTFGILRWTQTELDSLDRQVRKLLTAYRIHHPRSSLMRLYIPRKCGGRGFLNVKNLHNRELYNLREYFLNIKSDIHMDVVAVDKGFTPLSLGKEKWRKPIVMSTVDRVAVWKSKELHGRFYKVLTDPDVDQPSSISWLQHGNLFGETEGFVCAIMDEVIKTNNYRKHIMKDGTSDICRACHKPGESIRHVVSGCSHLANGEYLHRHNQVARIIHQQLAIRYGLVENELPYYRYNPTPFLENGHALLYWDRSIITDRFIAANKPDIVLVDRSARRAIIVDITVPHDDNLVKAEKEKLSKYLDLAHEITGMWNVDSTIIVPIVVSVNGLLAKSFDQHLKKLSLDGWIKGRIQKAVLLETARIVRRFLSLEP

SEQ ID NO: 6415 - protein, 1077 aa, Maniola jurtina
MVSLFQALEPTVTVSAQRLSDQVRVIQRRRVLDESTLDRLRLNLPQVITTGNSTHKSPQIPSVIEILNTQEELQGGLDLEVSNQNDEQMRRTLEDAILEFRSVPNNLRPKLPRLPVHRRNMALMAVLDKILGTYLESSYDLNDTHSILYCGAVAVCRIASIKFPELHRAVKRPNTAPAWQAGIERRISLTRTLIAKLICFKAGNSRPRIMRFVHQAFAGTNISPSQYLSLVTDRIDFLKQKVYAWAQRIRRFKKRIDRASQNRMFQSDQRKMYRNWERPRGCMVDGELPTPDSTSDFWRSIWSAPIDHTEGEWMNVVRDQCATVVEMNPVTISAEDVRCAIRSASNWKCPGPDGLHNFWLKWFRSAHPVLATQFQNSIDSGSLPTLMTTGVTFLIHKSGSTADPKNYRPITCLPTIYKLLTSILTTKINMHINANNILAQVQNGCKARARGTKELLLIDTAICQQVRRNRKNLVAAWIDYKKAYDSVPHTWLMEIMRLYKVDATLCSFLDSCMSQWMTVLRQPGGDEFFESAEPIRIKRGIFQGDSLSPLWFCLALNPLSTLLKDSGLGYRLRKGGEVISHLLYMDDLKLYASKRTDLVKLLKITQNFSNNIGMEFGVDKCAIINIERGRVVNSENLVLSETLILRSLCEGETYKYLGMSEALGIEVRTMKQAVEERFFGRLKKVLNSLLSGGNKVRAFNGWVMPLLIYTFGILKWTQTELDALDRRIRKLLTTYRMHHPRSSVMRLYIPRKCGGRGFLNAKNLHNREVCNLRDYFLKVNVGIHRDVVAVDKGLTPLSLGKNNWRKPIVLSTSDRIAVWRSKELHGRFYKALTRPDVDSIASVSWLQFGDLFGETEGFICAIMDEVIKTNNYRKHIMKDGTLDICRACHLPGESLRHIVSGCSYLANGEYLHRHNQVAKIIHQQLALQYGLVDTEVPYYRYDPMSVLENSSALLYWDRSVITDRYIVANRPDIVLVDRSARRAMIVDVTIPHDDNLVKAEKEKVSKYLDLAHEITAMWSVDSAIIVPIVVSVHGLIANSFDQHLKKLSLNCWIKGKIQKAVVLETARIVRRFLTLEP

SEQ ID NO: 6416 - protein, 1187 aa, Heliconius numata
MPGGQVHSQHHGRRCCPSNPQPPSSEDDYRTAASTAGSEEGMSESERPALRPRRRADIPPAEGLEPGASRMLNKAPATGGKVPRMRWSQQLNESVMRAYYRATEGGTNLTAYRSRLLSMFQELEPTATVTAQRLSDRVRIIQRRHLLDESVLERLRLSFQQVNTTNNNSCDIRSQFQHANIESQGNIELSVSVQDDERLRRSLKDAILEYGSIPVDLRPKLPRLPMHRRNIALVRILDQHLPSHFNNCNDLTDTHSLLYCGAVAVCRVAGVQFPNKGGTKASKHTVPAWQYDTEKRINLTRILIGKLISFKSGNRRPRVMRFVAEAFAGTNLKPSEYMANVTNRIDFLKQKLYALAKRIRRYRERWDRYNQNSAFQKNQRSVYRKWERSGDSVVNCEIPNPDANADFWRSIWSAPVEHTEGEWFCDIAKNCENIIPMRSIKISEIDVRCAIRYASNWKCPGLDGLHNFWLKWFRSSHSVFATQFQDALDSGSLPTFLTTGVTFLSYKSGCTTEPKNYRPITCLPTIYKLLTSILNKKITEHIVRNKILAPTQNGCKAGGRGTKELLLIDTTISQQVRRNRKNLTTAWIDYKKAYDSVPHTWLLKVLELYKIDITLRSFLEACMGQWVTVLRHLGECDIPATSEPIRIKRGIFQGDSLSPLWFCLALNPLSTMLEDSGLGFRLRRGGKVISHLLYMDDLKLFASKRSDLMRLLKVTQTFSSDIRMEFGVDKCASMHVVRGSVIRSDNICISDSVSFRTLGEGETYKYLGMSEALGIDERSIKQLVKERFFSRLKKVLGSLLSGGNKVRAFNGWVMPLLAYTFGIVRWTQTELDSVDRQIRKLLTTYRMHHPRSSVMRLYIPRKCGGRGFLNVKNLHNHEVCSLREYFLKIDVDMHKDVVTVDKGLTPLSLGKENWRRPVVLTTSDRMAVWKSKELHGRFHRALVGQDVDTVSSLSWLQFGDLFGETEGFVCAIMDEVIKTRNYQRHIMKDGTIDICRACHRPGESLRHIVSGCSHLANGEYLHRHNQVAKIIHQQLALQYGLVELEVPYYRYNPMSVLENSCALLYWDRSIITDRYIVANRPDIVLVDRAARRAVIVDVTIPHDENLVKAEKEKQSKYLDLAHEITAMWDVNATIIVPIVVSVNGLIAKSLDQHLKRLSLSCWIKNRIQKAVLLETARIVRRFLSLEP

SEQ ID NO: 6417 - protein, 974 aa, Heliconius numata
MMIFRPKLPRLPMHRRNIALVRILDQHLPSHFNNCNDLTNTHSLLYCGAVAVCRVAGVQFPNKGGTTASKHTVPAWQYDTEKRINLTRILIGKLISFKSGNRRPRVMRFVAEAFAGTNLKPSEYMANVTNRIDFLKQKLYALAKRIRRYRERWDRYNQNSAFQKNQRSVYRKWERSGDSVVNCEIPNPDASADFWRSIWSAPVEHTEGEWFCDIAKNCENIIPMRSIKISEIDVRCAIRYASNWKCPGLDGLHNFWLKWFRSSHSVFATQFQDALDSGSLPTFLTTGVTFLSYKSGCTTEPKNYRPITCLPTIYKLLTSILNKKITGHIVRNKILAPTQNGCKAGGRGTKELLLIDTTISQQVRRNRKNLTTAWIDYKKAYDSVPHTWLLKVLELYKIDITLRSFLEACMGQWVTVLRHLGECDIPATSEPIRIKRGIFQGDSLSPLWFCLALNPLSTMLEDSGLGFRLRRGGKVISHLLYMDDLKLFASKRSDLMRLLKVTQTFNSDIRMEFGVDKCASMHVVRGSVIRSDNICISDSVFFRTLGEGETYKYLGMSEALGIDERSIKQLVKERFFSRLKKVLGSLLSGGNKVRAFNGWVMPLLAYTFGIVRWTQTELDSVDRQIRKLLTTYRMHHPRSSVMRLYIPRKCGGRGFLNVKNLHNHEVCSLREYFLKIDVDMHKDVVTVDKGLTPLSLGKENWRRPVVLTTSDRMAVWKSKELHGRFHRALVGQDVDTVSSLSWLQFGDLFGETEGFVCAIMDEVIKTRNYQRHIMKDGTIDICRACHRPGESLRHIVSGCSHLANGEYLHRHNQVAKIIHQQLALQYGLVELEVPYYRYNPMSVLENSCALLYWDRSIITDRYIVANRPDIVLVDRAARRAVIVDVTIPHDENLVKAEKEKQSKYLDLAHEITAMWDVNATIIVPIVVSVNGLIAKSLDQHLKRLSLSCWIKNRIQKAVLLETARIVRRFLSLEP

SEQ ID NO: 6418 - protein, 1193 aa, Melitaea cinxia
MNKARGRRAQKRPKVPSSSETQSSTTDDEYQTPPSTAESDADDADSSTRPSNRRRVIRPPPACLEVQGQRVPTRNPAAGGAVRRMRWTQKMNESVMRAYYEATGGGINLTAYRSTMLSLFQALEPTVTVTAQRLSDQVRAIQRCHLLDESVLERLRTNLPQLNTVSHIRAIQTSQKEQREVINFNFNHISPNSVDLSVNEQDNEPMRRALEDAILRYRSLPPNIRPQLPRLPIHRRNLALVGVMDKILQQYLDSTQNLSDTHSLLYCGAAAVCNVAKVKFTSNKVTLPPYTAPAWQARIEKRINLTRTLIAKLTCFRAGNRRPKIMRFVHQAFAGTKIRSNEYITSVSDRIDFLKQKLCAWAKRIKRYKKRRDRYHQNRIFQSDQRKVYRNWEQCTTNVVNGDLPTRESINNFWQNIWSNPIDHIESDWMDVVRRRCSSLPQMEQIKINSEDISYAIRSTSNWKCPGLDGLHNFWLKWFHSSHPILASQFQNAISTNSLPKFMTTGTTFLLYKSGCTADPKNYRPITCLPTIYKLLTSVLVAKITKHITTNNILATTQNGCKSGSRGTKELLLIDMTICQQVRRNRKNLAAAWIDYKKAYDSVPHTWLMKVMELYKIDAALCSFLSTCMRQWNTFLRHPGAVDVSGSTEPIRIMRGIFQGDSLSPLWFCLALNPLSTLLEDSRLGFHLRRGSKAISHLLYMDDLKLFASKLPDLYKLLKITETFSTCIRMEFGVDKCAVIHVERGRIVSSENLQLNNSLSFRSLNEGETYKYLGMSEALGIDDGAMKQLVKERFFGRLKKVLHSFLSGGNKVRAFNSWVMPLIVYTFGILRWTQTELDTLDRQVRKLLTAYRIHHPRSSVMRLYIPRKCGGRGFLNAKNLHNREVCNLREYFLNMKNDMHMDVVAVDRGFTPLSLGKEKWRKPIVMRTVDRVAVWKSKELHGRFYKVLTDPDVDQPSSISWLQHGNLFGETEGFVCAIMDEVIKTNNYRKHIMKDGTPDICRACHKPGESIRHIVSGCSHLANGEYLHRHNQVARIIHQQLAIRYGLVENELPYYRYSPTPFLENGRALLYWDRSIVTDRFIAANKPDIVLVDRSARRAIIVDITVPHDDNLVKAEKEKLSKYLDLAHEITGMWNVDSTIIVPIVVSVNGLLAKSFDQHLKKLSLDCWIKGQIQKAVLLETARIVRRFLSLEP

SEQ ID NO: 6419 - protein, 1190 aa, Mellicta athalia
MNKARGQHAQSTSKVPSRSETQSSTDDEYETPPSTAESDADDADSSTRRPKRRRVIRPPPVSLDVQGQRAPTRNPAAGGAVRRMRWTHKMNESVMRAYYEATGGGINLTAYRSTMLSLFQALEPTVTVTAQRLSDQVRAIQRCHLLDESVLERLRTNLPQFNTVSHIRAVQTSQKEQREVINLNNISPNSVDLSVNEQDNEPMRRALEDAILKYRSMPPNIRPQLPRLPIHRRNLALVGVMDTILKEYLDSTQNLADTHSVLYCGAAAVCNVAGVKFTSNKITLPSHTAPAWQARIEKRINLTRTLIAKLTCFRAGNRRPKIMRFVHQAFAGTNITSNEYITSVSDRIDFLKQKLCAWAKRIKRYKKRRDRYNQNSMFQSDQRKVYRNWEQCTTNVVNDDLPTRESITNFWRNIWSNPIDHIESDWMDVVRRRCSSLPQMEQIKISSEDISYAIRSTSNWKCPGLDGLHNFWLKWFHSSHPILASQFQDAIFNNSLPKFMTTGTTFLLYKSGCTADPKNYRPITCLPTIYKLLTSVLVAKITKHISANNILATTQNGCKSGSRGTKELLLIDMTICQQVRRNRKNLAAAWIDYKKAYDSVPHTWLIKVMELYKIDVTLCSFLSTCMRQWNTFLRYPGAVDVPGSTEPIRIMRGIFQGDSLSPLWFCLALNPLSTLLEDSGLGFHLRRGSKAISHLLYMDDLKLFASKLPDLYKLLKITETFSTCIRMEFGVDKCAVIHVERGRIVSSENLKLTNSLSFRSLNEGETYKYLGMSEALGIDDGAMKQLVRERFFGRLKKVLNSFLSGGNKVRAFNSWVMPLIVYTFGILRWTQTELDSLDRQVRKLLTAYRIHHPRSSLMRLYIPRKCGGRGFLNVKNLHNREVCNLREYFLNIKSDMHMDVVAVDKGFTPLSLGKEKWRKPLVMSTVDRVAVWKSKELHGRFYKSLTDPDVDQPSSVSWLQHGNLFGETEGFVCAIMDEVIKTNNYRKHIMKDGTPDICRACHKPGESIRHVVSGCSHLANGEYLHRHNQVARIIHQQLAIRYGLVENELPYYRYNPTPFLENGRALLYWDRSIVTDRFIAANKPDIVLVDRSARRAIIVDITVPHDDNLVKAEKEKLSKYLDLAHEITGMWNVDSTIIVPIVVSVNGLLAKSFDQHLKKLSLDCWIKGRIQKAVLLETARIVRRFLSLEP

SEQ ID NO: 6420 - protein, 1106 aa, Heliconius numata
MRWSQQLNESVMRAYYRATEGGTNLTAYRSRLLSMFQELEPTATVTAQRLSDRVRIIQRRHLLDESVLERLRLSFQQVNTTNNNSCDIRSQFQHANIESQGNIELSVSAQDDERLRRSLKDAILEYGSIPEDLRPKLPRLPMHRRNIALVRILDQHLPSHFNNCNDLTDTHSLLYCGAVAVCRVAGVQFPNKGGTKASKHTVPAWQYDTENRINLTRILIGKLISFKSGNHRPRVMRFVAEAFAGTNLKPNEYMANVTNRIDFLKQKLYALAKRIRRYRERWDRYNQNSAFQKNQRSVYRKWERSGDSVVNCEIPNPDASADFWRSIWSAPVEHTEGEWFCDIAKNCENIIPMRSIKISEIDVRCAIRYASNWKCPGLDGLHNFWLKWFRSSHSVFATQFQDALDSGLLPTFLTTGVTFLSYKSGCTTEPNNYRPITCLPTIYKLLTSILNKKITGHIVRNKILAPTQNGCKAGGRGTKELLLIDTTISQQVRRNRKNLTTAWIDYKKAYDSVPHTWLLKVLELYKIDITLRSFLEACMGQWVTVLRHLGECDIPATSEPIRIKRGIFQGDSLSPLWFCLALNPLSTMLEDSGLGFHLRRGGKVISHLLYMDDLKLFASKRSDLMRLLKVTQTFSSDIRMEFGVDKCASMHVVRGSVIRSDNICISDSVFFRTLGEGETYKYLGMSEALGIDERSIKQLVKERFFSRLKKVLGSLLSGGNKVRAFNGWVIPLLAYTFGIVRWTQTELDSVDRQIRKLLTTYRMHHPRSSVMRLYIPRKCGGRGFLNVKNLHNHEVCSLREYFLKIDVDMHKDVVTVDKGLTPLSLGKENWRRPVVLTTSDRMAVWKSKELHGRFHRALMGQDVDTVSSLSWLQFGDLFGETEGFVCAIMDEVIKTRNYQRHIMKDGTIDICRACHRPGESLRHIVSGCSHLANGEYLHRHNQVAKIIHQQLALQYGLVELEVPYYRYNPMSVLENSCALLYWDRSIITDRYIVANRPDIVLVDRAARRAVIVDVTIPHDENLVKSAFNLKEKQSKYLDLAHEITAMWDVNATIIVPIVVSVNGLIAKSLDQHLKRLSLSCWIKNRIQKAVLLETARIVRRFLSLEP

SEQ ID NO: 6421 - protein, 988 aa, Melitaea cinxia
MRRALEDAILKYRSLPPNIRPQLPRLPIHRRNLALVGVMDKILQPYLDSTQNLSDTHSLLYCGAAAVCNVANVKFKSNKITLPSHTAPAWQARIEKRINLTRTLIAKLTCFRAGNRRPKIMRFVHQAFAGTNIRSNEYITSVSDRIDFLKQKLCAWAKRIKRYKKRRDRYHQNSIFQSDQRKVYRNWEQCTTNVVNGNLPTRESINNFWRNIWSNPIDHIESDWMDVVRRRCSSLPQMEQIKINSEDISYAIRSTSNWKCPGLDGLHNFWLKWFRSSHPILASQFQNAISTNTLPKFMTTGTTFLLYKSGCTADPKNYRPITCLPTIYKLLTSVLVTKITKHITTNNILATTQNGCKSGSRGTKELLLIDMTICQQVRRNRKNLAAAWIDYKKAYDSVPHTWLMKVMELYKIDAALCSFLSTCMRQWNTFLRHPGAVDVSGSTEPIRIMRGIFQGDSLSPLWFCLALNPLSTLLEDSRLGFHLRRGSKAISHLLYMDDLKLFASKLPDLYKLLKITETFSTCIRMEFGVDKCAVIHVERGRTVSSQNLKLNNSLSFRSLNEGETYKYLGMSEALGIDDGAMKQLVKERFFGRLKKVLNSFLSGGNKVRAFNSWVMPLIVYTFGILRWTQTELDTLDRQVRKLLTAYRIHHPRSSVMRLYIPRKCGGRGFLNAKNLHNREVYNLRQYFLNMKSDMHMDVVAVDRGFTPLSLGKEKWSKPIVMRTVDRVAVWKSKELHGRFYKVLTDPDVDQPSSISWLQHGNLFGETEGFVCAIMDEVIKTNNYRKHIMKDGTPDICRACHKPGESIRHVVSGCIHLANGEYLHRHNQVARIIHQQLAIRYGLVENELPYYRYSPTPFLENGRALLYWDRSIVTDRFIAANKPDIVLVDRSARRAIIVDITVPHDDNLVKAEKEKLSKYLDLAHEITGMWNVDSTIIVPIVVSVNGLFAKSFDQHLKKLSLDCWIKGRIQKAVLLETARIVRRFLSLEP

SEQ ID NO: 6422 - protein, 1188 aa, Maniola jurtina
METRRHRHASAHTAQITSGVDSSSDEDYRTPPSSTGSANDTRPPRRAPRRRATHPPPDGLEQQELRAPTTASAASGVVRRMRWTQRMNENVMRAYYRATDGGTNLTGYRSRMVSLFQALEPTVTVSAQRLSDQVRVIQRRRVLDESTLDRLRLNLPQVITTGNSTHESPQIPSVIEILNTQEELQGGLDLEVSNQNDEQMRRTLEDAILEFRSVPNNLRPKLPRLPVHRRNMALMAVLDKILGTYLESSYDLNDTHSILYCGAVAVCRIASIKFPELHRAVKRPNTAPAWQAGIERRISLTRTLIAKLICFKAGNSRPRIMRFVHQAFAGTNISPSQYLSLVTDRIDFLKQKVYAWAQRIRRFKKRIDRASQNRMFQSDQRKMYRNWERPRGCMVVGELPTPDSMSDFWRSIWSAPIDHTEGEWMNVVRDQCATVVEMNPVNISAEDVRCAIRSASNWKCPGPDGLHNFWLKWFRSAHPVLATQFQNSIDSGSLPTLMTTGVTFLIHKSGSTADPKNYRPITCLPTIYKLLTSILTIKINMHINANNILAQVQNGCKARARGTKELLLIDTAICQQVRRNRKNLVAAWIDYKKAYDSVPHTWLMEIMRLYKVDATLCSFLDSCMSQWMTVLRQPGGDEFFELAEPIRIKRGIFQGDSLSPLWFCLALNPLSTLLKDSGLGYRLRKGGEVISHLLYMDNLKLYASKRTDLVKLLKITQNFSNNIGMEFGVDKCAIINIERGRVMNSENLVLSETLILRSLCEGETYKYLGMSEALGIEVRTMKQVVEERFFGRLKKVLNSLLSGGNKVRAFNGWVMPLLIYTFGILKWTQTELDALDRRIRKLLTTYRMHHPRSSVMRLYIPRKCGGRGFLNAKNLHNREVCNLRDYFLKVNVGIHRDVVAVDKGLTLLSLGKNNWRKPIVLSTSDRIAVWRSKELHGRFYKALTRPDVDSIASVSWLQFGDLFGETEGFICAIMDEVIKTNNYRKHIMKDGTLDICRACHLPGESLRHIVSGCSYLANGEYLHRHNQVAKIIHQQLALQYGLVDTEVPYYRYDPMSVLENSSALLYWDRSVITDRYIVANRPDIVLVDRSARRAMIVDVTIPHDDNLVKAEKEKVSKYLDLAHEITAMWSVDSAIIVPIVVSVHGLLANSFDQHLKKLSLNCWIKGKIQKAVVLETARIVRRFLTLEP

SEQ ID NO: 6423 - protein, 1187 aa, Heliconius numata
MPGGQVHSQHHGRRCCPSNPQPPSSEDDYRTAASTAGSEEGMSESEGPALRPRRRADIPPAEGLEPGASRMLNKAPATGGKVPRMRWSQQLNESVMRAYYRATEGGTNLTAYRSRLLSMFQELEPTATVTAQRLSDRVRIIQRRHLLDESVLERLRLSFQQVNTTNNNSCDIRSQFQHANIESQGNIELSVSAQDDERLRRSLKDAILEYGSIPVDLRPKLPRLPMHRRNIALVRILDQHLPSHFNNCNDLTDTHSLLYCGAVAVCRVAGVQFPNKGGTKASKHTVPAWQYDTEKRINLTRILIGKLISFKSGNRRPRVMRFVAEAFAGTNLKPSEYMANVTNRIDFLKQKLYALAKRIRRYRERWDRYNQNSAFQKNQRSVYRKWERSGDSVVNCEIPNPDASADFWRSIWSAPVEHTEGEWFCDIAKNCENIIPMRSIKISEIDVRCAIRYASNWKCPGLDGLHNFWLKWFRSSHSVFATQFQDALDSGSLPTFLTTGVTFLSYKSGCTTEPKNYRPITCLPTIYKLLTSILNKKITGHIVRNKILAPTQNGCKAGGRGTKELLLIDTTISQQVRRNRKNVTTAWIDYKKAYDSVPHTWLLKVLELYKIDITLRSFLEACMGQWVTVLRHLGECDIPATSGPIRIKRGIFQGDSLSPLWFCLALNPLSTMLEDSGLGFRLRRGGKVISHLLYMDDLKLFASKRSDLMRLLKVTQTFSSDIRMEFGVDKCASMHVVRGSVIRSDNICISDSVSFRTLGEGETYKYLGMSEALGIDERSIKQLVKERFFSRLKKVLGSLLSGGNKVRAFNGWVMPLLAYTFGIVRWTQTELDSVDRQIRKLLTTYRMHHPRSSVMRLYIPRKCGGRGFLNVKNLHNHEVCSLREYFLKIDVDMHKDVVTVDKGLTPLSMGKENWRRPVVLTTSDRMAVWKSKELHGRFHRALVGQDVDTVSSLSWLQFGDLFGETEGFVCAIMDEVIKTRNYQRHIMKDGTIDICRACHRPGESLRHIVSGCSHLANGEYLHRHNQVAKIIHQQLALQYGLVELEVPYYRYNPMSVLENSCALLYWDRSIITDRYIVANRPDIVLVDRAARRAVIVDVTIPHDENLVKAEKEKQSKYLDLAHEITAMWDVNATIIVPIVVSVNGLIAKSLDQHLKRLSLSCWIKNRIQKAVLLETARIVRRFLSLEP

SEQ ID NO: 6424 - protein, 868 aa, Junonia coenia
MRFVHQAFAGTNIKVSEYMASVTDRIDFMKQKIFAWAKRIKRYKKRINRYRQNSMFQSDQRKVYRYWEQGSDNLANGVLPTPDVMSKFWHDIWSSPISHTEGDWMRVVGRDCEPIQQMEPITICSNDVACATRSMSNWKCPGPDGLQSFWLKWFHSSHSLLASRFQDALASGSLPTFMTTGVTILLYKSGCTADPKNYRPITCLPTIYKLFTSILAVKIKKHVENNNILAPAQNGCRSGSRGTKELLLIDMTICRQVRRNRKNLATAWIDYKKAYDSVPHTWLMRVMELYKIDATLCLLLRSCMGQWITYLRHPGSDEISGSTEPIRIKRGIFQGDSLSPLWFCLALNPLSSLLDDSGLGFRLRRGGKIISHLLYMDDLKLYASKQPELVELLKITESFSSCIGMEFGVDKCAVLHVERGRVITSADIQVTNCLRLRSLNEGETYKYLGMSQALGIEDGSIKQLVRERFFGRLRKVLNSFLSGGNKVRAFNGWVIPLLVYTFGILRWTQAELDSLDRQVRKLLTAFRMHHPRSSVMRLYIPRKCGGRGFLNAKNLHNREVYNLRKYFLSINDDMHRDVVAVDKTFTPLSLGKENWRRPIVLDTGDRMAVWKSKELHGRYYRALMGSDVDRVSSVSWLQYGDLFGETEGFVCAIMDEVVKTNNYRKYIIKDGTPDICRACHHPGESIRHIISGCCHLANGEYLHRHNQVARIIHQQLALRYGLVSAEVPYYRYNPTPVLENGHALLYWDRSIITDRYIPANKPDIVVVDRSTRRAIIVDITIPHDDNLVKAEKEKMSKYLDLAHEISAMWSVDSTVIVPIVVSVNGLVAKSFDQHLKKLSLGCWIKGRIQKAVLLETARIVRRFLSLDP

SEQ ID NO: 6425 - protein, 1197 aa, Vanessa atalanta
MLTRARQRAHNNPSPDSPLSSASQAQDPTQGTNLVSAIASSSSDEYFSPPMSPTPVRRAGRRRPPTGLGARGQPASNGVPAFGGGVQCMRWTQPINENVMRAYYGATEGGTNLTAYRVRMLSLFQALEPAINVSAQRLSNQVRVILRNNRLSDTVLDRIRSEVSNSGVTFAPSQPVVEGPLPATPQGSDHDDEGEGDMAITTSKYSDQLRSALGDAIREYRNTSAELRPRLPRLPMTKRNRDLVCTLDSLLADYFESSENLEDTHSILFCAAVAACRVAGVTFEDTERVTRPKAAAPAWQSRIEKRINETRVLIGKLYCFKEGNTRPRVMRYVGRAFLGTGIIPQEYPSHVVERIDFLKQKVYAWASRIRRYRRRVDRYYLNRMFQNDQRWVYRTWERLDQGVSDGCRPDDDATSTFWRNIWSVPVDHIEGDWMREVRQACEPLEAMGEISIASEDVAAAVRSVPNWKSPGPDGLHSFWLKWLRSSHECLASQFQSALESGSLPQFLTTGVTHLLHKSGSATDPKNYRPITCLPTVYKLLTSILRDKINSHIQNISILSVSQNGCRGGSQGTKELLLIDMIISQQVRRFRKSLSTCWIDYKKAYDSVPHTWLLRVLELNKLDTTLCSFLKSCMGQWRTVLRYPGCRTIHGNDEPIRIERGIFQGDSLSPLWFCLALNPLSTLLEGSRLGYRLRRGGKVISHLLYMDDLKLFAPSGSQLMELLKVTETFSNSIRMEFGVDKCAVMHVERGEIMESDGLQLSDSINFRSLSANESYKYLGVSEALGINVTDMKQSLQERFFGRLKKVLKSLLSGGNKVRAFNGWVMPVLMYSFGILKWTQKELDALDRRVRVLLTAYRMHHPRSSVMRLYIPRRCGGRGFLNAKTLHNREVYKLREYFLHTDLDMHRDVVTMDKGLTPLSLGKENWRKPVVLSTENRKGVWKSKELHGRFYRALHGPDVDFMASVSWLRFGNLFGETEGFVCAIMDEVIMTNNYRKYIVRDGTVDICRACHTPGESLRHIISGCSRLANGEYLHRHNQVAKIIHQQLALRYDLVVSEVPYYRYVPDPVLENGRITLYWDRSIITDKAVVANKPDIVVIDRSERRTIIVDVTIPHDGNLVKAEKDKQIKYLDLAHEVVDMWDVDTAVIVPIVVSANGLMAKSLDQHLKRLSLGSWVKGLMQKAVLLGTARIVRKFLSLEP

SEQ ID NO: 6426 - protein, 1188 aa, Maniola jurtina
METRRHRHASAHTAQITSGVDSSSDEDYRTPPSSTGSADDTRPPRRAPRRRATHPPPDGLEQQELRAPTTASAASGVVRRMRWTQRMNENVMRAYYRATDGGTNLTGYRSRMVSLFQALEPTVTVSAQRLSDQVRVIQRRRMLDESTLDRLRLNLPQVITTGNSTHKSPQIPSVIEILNTQEELQGSLDLTVSNQNDEQMRRTLEDAILEFRSVPNNLRPKLPRLPVHRRNMALMAVLDKILGTYLESSYDLNDTHSILYCGAVAACRIASIKFPELHRAVKRPNTAPAWQAGIERRISLTRTLIAKLICFRAGNSRPRIMRFVHQAFAGTNISPSQYLSLVTDRIDFLKQKVYAWAQRIRRFRKRIDRASQNRMFQSDQRKMYRNWERPRGCMVDGELPTPDSTSDFWRSIWSAPIDHTEGEWMNVVRDQCATVVEMNPVTISAEDVRCAIRSASNWKCPGPDGLHNFWLKWFRSAHPVLATQFQNSIDSGSLPTLMTTGVTFLIHKSGSTADPKNYRPITCLPTIYKLLTSILTTKITMHINANNILAQVQNGCKARARGTKELLLIDTAICQQVRRNRKNLVAAWIDYKKAYDSVPHTWLMEIMRLYKVDATLCSFLDSCMSQWMTVLRQPGGNEFFESAEPIRIKRGIFQGDSLSPLWFCLALNPLSTLLKDSGLGYRLRKGGEVISHLLYMDDLKLYASKRTDLVKLLKITQNFSNNIGMEFGVDKCAIINIERGRVVNSENLVLSETLILRSLCEGETYKYLGMSEALGIEVRTMKQAVEERFFGRLKKVLNSLLSGGNKVRAFNGWVMPLLIYTFGILKWTQTELDALDRRIRKLLTTYRMHHPRSSVMRLYIPRKCGGRGFLNAKNLHNREVCNLRDYFLKVNVGIHRDVVAVDKGLTPLSLGKNNWRKPIVLSTSDRIAVWRSKELHGRFYKALTRPDVDSIASVSWLQFGDLFGETEGFICAIMDEVIKTNNYRKHIMKDGTLDICRACHLPGESLRHIVSGCSYLANGEYLHRHNQVAKIIHQQLALQYGLVDTEVPYYRYDPMSVLENSSALLYWDRSVITDRYIVANRPDIVLVDRSARRAMIVDVTIPHDDNLVKAEKEKVSKYLDLAHEITAMWSVDSAIIVPIVVSVHGLIANSFDQHLKKLSLNCWIKGKIQKAVILETARIVRRFLTLEP

SEQ ID NO: 6427 - protein, 1108 aa, Maniola jurtina
MRWTQRMNENVMRAYYRATDGGTNLIGYRSRMVSLFQALEPTVTVSAQRLSDQVRVIQRRRVLDESTLDRLRLNLPQVITTGNSTHESPQIPSVIEILNTQEELQGGLDLEVSNQNDEQMRRTLEDAILEFRSVPNNLRPKLPRLPVHRRNMALMAVLDKILGTYLESSYDLNDTHSILYCGAVTVCRIASIKFPELHRAVKRPNTAPAWQAGIERRISLTRTLIAKLICFKAGNSRPRIMRFVHQAFAGTNISPSQYLSLVTDRIDFLKQKVYAWAQRIRRFRKRIDRASQNRMFQSDQRKMYRNWERPRGCMVVGELPTPDSMSDFWRSIWSAPIDHTEGEWMNVVRDQCATVVEMNPVTISAEDVRCAIRSASNWKCPGPDGLHNFWLKWFRSAHPVLATQFQNSIDSGSLPTLMTTGVTFLIHKSGSTVDPRNYRPITCLPTIYKLLTSILTTKINMHINANNILAQVQNGCKARARGTKELLLIDTAICQQVRRNRKNLVAAWIDYKKAYDSVPHTWLMEIMRLYKVDATLCSFLDSCMSQWMTVLRQPGGDEFFELAEPIRIKRGIFQGDSLSPLWFCLALNPLSTLLKDSGLGYRLRKGGEVISHLLYMDDLKLYASKRTDLVKLLKITQNFSNNIGMEFGVDKCAIINIERGRVVNSENLVLSETLILRSLCEGETYKYLGMSEALGIEVRTMKQVVEERFFGRLKKVLNSLLSGGNKVRAFNGWVMPLLIYTFGILKWTQTELDALDRRIRKLLTTYRMHHPRSSVMRLYIPRKCGGRGFLNAKNLHNREVCNLRDYFLKVNVGIHRDVVAVDKGLTPLSLGKNNWRKPIVLSTSDRIAVWRSKELHGRFYKALTRPDVDSIASVSWLQFGDLFGETEGFICAIMDEVIKTNNYRKHIMKDGTLDICRACHLPGESLRHIVSGCSYLANGEYLHRHNQVAKIIHQQLALQYGLVDTEVPYYRYDPMSVLENSSALLYWDRSVITDRYIVANRPDIVLVDRSARRAMIVDVTIPHDDNLVKAEKEKVSKYLDLAHEITAMWSVDSAITVPIVVSVHGLLANSFDQHLKKLSLNCWIKGKIQKAVVLETARIVRRFLTLEP

SEQ ID NO: 6428 - protein, 864 aa, Cydia splendana
MRFVNQAFVGTDIRPRDYMANVTERIDFLKQKVYAWANRIRRYRERVDRFQQNRLFQSDQRKMYRKWEETNLRPSDSQPPDATVMNDFWRSIWSVPVGHTEGSWMSVVERECESIEPMGAVTISPDDVSCAIRTAQNWKSPGPDGLHNFWLKWFRCSHSYLAAQFQQALELGSLPPSLTTGVTFLLYKSGSTTEAKNYRPITCLPTLYKLLTSILRAKINAHIVANNILASAQNGCRVGSRGTKELLLIDMTICQQIRRTKGALSAAWIDYKKAYDSVPHSWLGRVLELYKVDAALRAFLSACMGQWTTVLRQPGGGDDRPGPQDFIRIERGIFQGDSLSPLWFCLALNPLSTLLKDLGLGCRLRREGEVISHLLYMDDLKLFASNTQGLLELLKTTEVFSSAIHMEFGVDKCAVMHVQRGKVVNSTNLQLSETMSFRSISESETYKYLGMSQSLGIEDEGIRRSVKERFFSRLTKVLNSLLSGGNKVRAFNAWVMPLLTYSFGILRWTQTELDALDRRVRSLLTTHRMLHPRSSVMRLYIPRKFLNAKDLHNREVYNLRNYFLNNECGMHRDVVAVDRNLTPLSLANENWRKPVVLSTADRKAAWESKALHGRFYKALTGPDVDLLVSVNWLRFGDLFGETEGFACAIADEVMMTNNYRKYILKDGTVDICRACRRPGESLRHIISGCSHLANGEYLHRHNLVARIIHQQLALLYGLVDREVPYYKYLPAPVLENGRATLYWDRSIITDRTIVANKPDIVLIDRSQRRVVLADVTIPHDENLVKAEKDKSSKYLDLAHEITAMWDVDSTIIVPIVVSANGLIAKSLDQHLERLSLGGWIKGQMQKAVILDTARIVRRFLTLRP

SEQ ID NO: 6429 - protein, 1190 aa, Eilema sororculum
MLTRAQASRNRSAPTTSPDSSLSSAAQPPAVEPAASSSSSSDEFFSPPTSPTPVRRPGRGRPPTCLGPRRPPASNRAPAAGGNVHRMRWTNSINENVMRAYFAATEGGTNLSAYRTRMLPLFQALEPSINVSAQRLSDQVRVIQRNRLLNETVLETLRLECLRNICVTPAPAPAPASTVEINDDTCVAPDDTPIPVSIQYNEEIKEALECALREYRSMPVHVRPRLPRLPIHRRNIALVSALDSLLPRYLENSENLGDTHSILYCTAVAACRMAGANFPKKDPAIRLKSAIPAWQCRIERRVAEARVLIGKLICFRSGNTRPRVMRYVTRAFAGTDISPQDYTSRVTERIDFLKQKVYAWANRIRRYKKRVDRYTVNRMFQRDQRWVYRSWERTEESVDDVRRPNAETTNAFWRSIWSVPVNHTEGDWMREVERACETIPEMEKINIDAIDVDCAVRSLSNWKSPGPDGLHNFWLKWLRSSHVVLASQFQSAVESGTLPAFMTTGVTHLLHKTGSTLEPNNYRPITCLPTVYKLLTSILRAKINNHINNNSIMCASQNGCRNGARGTKELLLIDMAISQQARRNRKDLTACWIDYKKAFDSVPHTWLLRVLELYKVNTTLCTFLRSCMGQWRTVLFYPGCRQALGSGEPITIERGIFQGDSLSPLWFCLALNPLSTLLVNSGLGYRLRREGQMVSHLFYMDDLKLFAHTNPQLIALLKVTETFSNSIKMAFGVDKCAVIHVKRGRVVESEGIQLSDSTNLRSLLVTETYKYLGMSQALCINEVDMKQMLQERFFGRLKKVLNSLLSGGNKVRACNSWVMPLLMYSFGILKWTQTELDTIDRKVRTQLTAFRMHHPRSSVMRLYIPRKCGGRGFLNAKTLHNREVCNLRVLKSNVDMHRDVVNVDTGLTPLGLAKENWRRPTIVGTDSRREVWQSKELHGRFYRALHRPEVDLLASVSWLRFSDLFGETEGFVCAIADEVIKTNNYRKYIMRDGTIDICRACHQPGESLRHITSGCSRLANGEYLHRHNQVARIIHQRLALKYNLVEVEVPYYRYVPEPVLENSHITLFWDRSIITDRTVVANKPDIVVIDRSERRALIVDVTIPHDENLVKAEKDKQVKYLDLAHEVVDMWNVDSAIIVPIVVSVNGLIAKSLDQHLKRLGLDGWVKGQMQKAVLLDTARIVRKFLSLEP

SEQ ID NO: 6430 - protein, 949 aa, Zygaena filipendulae
MGELNALLVPYLQMSEDLTDSHSILYCGAIAICQVARVKFPDTNRALHPPENTPEWQVRIERRINVFRTLIAKLICFRRGNNRPRVMRFVSQAFAGTGTRPEDYMTGAMERIDYLKQKVYAWANRIRRYKERVERYRLNRLFQNDQRKVYRKWEETKQRVADGQLPDPNAMLDFWRGIWSVPVAHTEDNWIRVVERECDSIEPMTPIIISPIDVSRAIRATQNWKSPGPDGLHNFWIKWIRCSHERLATQFQEALELGFLPGFMTTGVTSLLYKSGNTTDPKNYRPITCLPTIYKLFTSILTNKINAHIVANNILAPVQNGCRVGSRGTKELLLINMTICQQIKRNKRALSTAWIDYKKAYDSVPHSWLERILELYKIDTTLKSFLSTCMRQWTTVIRQPGGSVSQDCIKIERGIFQGDSLSPLWFCLALNPLTTLLKDSGLGCRLRRGGEVISHLFYMDDLKLFAPKRQDLLELLKITQIFSNAIRMEFGVDKCAVLHVQQGQVVNSPNLQLSETISLKSLSEAETYKYLGMSEALGISVNDIKNSVKERFLCRLKKVLNSLLSGGNKVRAFNGWVMPLLIYTFGILRWTQTELDTLDRRVRQSLTSHRMLHPRSSVMRLYIPRRWGGRGLLNIKDAHNREVCNLREYFHNNVCRMHCDVVVIDRGLTPLSLANENWRKPQVLSTDDRKNIWKSKELHGRFYRALTGPDVDLPASVNWLRFGDLFGETEGFACAIADEVMMTNNYRKYILKDGTIDICRACRRPGESLRHIISGCSHLANGEYLHRHNLVARIIHQQLALQYGLVESEVPYYQYAPAPVLENGHALLYWDRSIITDRTIIFNKPDIVVIDRSQRRAMIVDVTIPHDENLVKAEKDKVSKYLDLAHEVTAMWNVDSTTIVPIVVSANGLIAKSLDQHLERLSLGRWLKGQMQKAVILDTTRIVRRFLSL

SEQ ID NO: 6431 - protein, 1204 aa, Amphipyra tragopoginis
MLTRARIREARPPPPDSPLSSASQPPESSPTVSAVTPAAAVASSSSDEYFSPPTSPTPVRRQGRRQPPNSLGPRGPPAPSRVLATGGCVQRMKWTQNINENVMRAYYGSTEGGTNLTAYRVRMLTLFRELEPAINVSAQRLSDQVRVIQRNHRLDDAALDRLRLEVQNSRVTPVPSQTAVHHININVVPPRSDCVDGDVDDRAVTVSSQYNDRLRSALEDAIREYRANPELRPRLLRLPMHNKNRALVCALDSLLSSYFESSEDLVDTHSILYCAAVAACRVANVKFNNSERATRPKPAIPAWQCRIERRIDGARALIGKQICFREGNTRPRVMRFVRRAFSGTGISPREYMSQVTERIDFLKQKVCAWASRIRRYKRRVERYAQNRMFQCDQRWVYRAWERPDQGVSDGRLPDDDAMSSFWRSIWSVPVTHTEGDWTRDIERACEPIEEMGEILISPQDVASAARPLPNWKSPGPDGLHNFWIKWLRSSHARLASQFQSSLESGSLPQFLTTGVTHLLHKSGSTAEPKNYRPITCLPTVYKLLTSILRTKINTHVENNSIMSPSQNGYRNGSRGTKELLLIDMAISQQVRRSRKNLSTCWIDYKKAYDSVPHTWLMRVLELYKINTTLRTFLTSCMRQWRTVLCYPGCRPILGSGEPISIERGIFQGDSLSPLWFCLALNPLSTLLEGSGLGYPLRRRGQVVSHLLYMDDLKLFAPTKLQLVELLKVTETFSNSIRMEFGVDKCAVMHVRRGGIMESEGLQLSDSIHLRSLSANDTYKYLGMSEGLDISEADMKQSLRERFFGRLKKVLKSLLSGGNKVRTFNGWVMPVLMYSFGILKWTQTELDALDRRVRTLLTANLMHHPRSSVMRLYIPRKCGGRGLLNAKTLHNREVCSLREYFLHADAGMHRVVVAVDKGLTPLNLAKENWRKPVVLSTNDRREVWQSKELHGRFYRALHGPDVDFLASVSWLRFGDLFGETEGFVCAIMDEVIMTNNYLLYYKYIVKDGTVDICRACHCPGESLRHIISGCSRLANGEYLHRHNQVARIIHQQLALKYNLVESEVPYYKYVPDPVLENGHITLYWDRSIITDRTIVANKPDIVVIDRSERRTVIVDVTNPHDENLVKAEKDKQIKYLDLAHEVVNMWDVDSATIVPIVVTANGLMAKCLDQHLKRLSLGGWIKGLIQKVVLLDTARIVRRFLSLEP

SEQ ID NO: 6432 - protein, 1069 aa, Amphipyra tragopoginis
MLTRARTRAARPPPPDSPLSSASQPPESSPTVSAVTPAAAVASSSSDEYFSPPTSPTPERRQGRRRPPNSLGPRGPPAPSRVLATGGCVQRMKWTQSMNENVMRAYYGSTEGGTNLTAYRVRMLTLFQELEPAINVSAQRLSDQVRVIQRNHRLDDAALDRLRSEVQSSRVTPVPSQTAVQQVNISVVPPRSNSVDGDVDDRAVSVCSQYNDRLRSALEDAIREYRANPELRPRLPRLPMHNKNRALVCALDALLSSYFESSEDLGDTHSIMYCAAVAACRVANVKFNNSERATRPKPAVPAWQCRIERRIDGARALIGKLICFREGNTRPRVMRFVRRAFSGTGISPREYMSRVTERIDFLKQKVCAWASRIRRYKRRVERYAQNRMFQCDQRWVYRAWERPDEGVSDGRLPDDDAMSSFWRSIWSVPVTHTEGDWTRDIERACEPIEEMGEILISPQDVASAARPLPNWKSPGPDGLHNFWIKWLRSSHARLASQFQSSLESGSLPQFLTTGVTHLLHKSGSTAEPKNYRPITCLPTVYKLLTSIFRTKINTHVENNSIMSPSQNGCRNGSRGTKELLLIDMAISQQVRRSRKNLSTCWIDYKKAYDSVPHTWLMRVLELYKINTTLRTFLTSCMRQWRTVLRYPGCRPILGSGEPISIERGIFQGDSLSPLWFCLALNPLSTLLEGSGLGYPLRRGGQVVSHLFYMDDLKLFAPTKLQLGELLKVTETFSNSIRMEFGVDKCAVMHVRRGGIMESEGLQLSDSIHLRPLSANDTYKYLGMSEGLGISEADMKQSLRERFFGRLKKVFKSLLSGGNKVRAFNGWVMPVLMYSFGILKWTQTELDALDRRVRTLLTANRMHHPRSSVMRLYIPRKCGGRGLLNAKTLHNREVCSLREYFLHADAGMHRDVVAVDKGLTPLNLAKENWRKPVVLSTNDRREVWQSKELHGRFYRALHGPDVDFLASVSWLRFGDLFGETEGFVCAIMDEVIMTNNYRKYIVKDGTVDICRACHCPGESLRHIISGCSRLANGEYLHRHNQVARIIHQQLALKYNLVESEVPYYKYVPTE

SEQ ID NO: 6433 - protein, 1205 aa, Cydia splendana
MITRSKTRSQASITINARPPPSPVSSVSSQASSGDEFATAPDTSESSDECGPPPPPPRPPARRGRPPLPARLGPAGHHAPPTVPAAGGVVRRMRWSQTMNENVMRAYYGATEGGTDLCAYRVRMLPLFQALEPTIDVTAQRLSDQVRVIQRLKRLDDSTLDRLRLEALSTRAASTSVRDPPATSPDPVPAPDQAPEAPRVDLCADEEEFAQSVSSTANEQLRRTLDEAITQYRSTPNTRPRLPRLPMNRHNLALMGALNALLEPYLRTSKDLDDTHAIMYCGAIAACRVARVKFPDSERAPRTAGGAPAWQIRIERRISSFRTLIAKLICFRGGNNRPRVMRFVNQAFAGTDIRPRDYMANITERIDFLKQKVYAWANRIRRYRERVDRFQQNRLFQSDQRKMYRKWEETNPRASDSQPPEATVMNDFWRSIWSVPVGHTEGSWMSVVERECESIEPMGAVTISPDDVSCAIRTAQNWKSPGPDGLHNFWLKWFRCSHSCLAAQFQQALELGSPPPSLTTGVTFLLYKSGSTTEAKNYRPITCLPTLYKLLTSILRAKINAHIVANNILASAQNGCRVGSRGTKELLLIDMTICQQIRRNRGALSAAWIDYKKAYDSVPHSWLERVLELYKVDTALRAFLSACMRQWTTVLRQPGGGDGSPGPQDFIRIERGIFQGDSLSPLWFCLALNPLSTLLKDLELGCRLRRGGEVISHLLYMDDLKLFAPNSQDLVELLKTTEVFSNAINMEFGVDKCAVMHVQRGKVVNSTNLQLSETMSFRSISESETYKYLGMSQSLGIEEEGIRRSVKERFFSRLTKVLNSLLSGGNKVRAFNAWVMPLLTYSFGILRWTQTELDALDRRVRQLLTTHRMLHPRSSVMRLYIPRKCGGRGFLNAKNLHNREVYNLRNYFLNNECGMHCDVVAADKGLTPLSLANENWRKPVVLSTEDRKAVWKDKQLHGRFYKALTGPDVDLLASVNWLRFGDLFGETEGFADEVMMTNNYRKYILKDGTVDICRACRRPGESLRHIISGCSHLANGEYLHRHNLVARIIHQQLALLYGLVDREVPYYKYSPAPVLENGRATLYWDRSIITDRTIVANKPDIVLIDRSQRRTVLVDVTIPHDENLVKAEKDKSSKYLDLAHEITAMWDVDSTIIVPIVVSANGLIAKSLDQHLERLSLGGWIKGQMQKAVILDTARIVRRFLTLRP

SEQ ID NO: 6434 - protein, 1198 aa, Biston betularia
MWTRSRTAAASGLHDAHIPSPPAPSTPSASSGDEEFATPLATSASSSSSDVSGPRTPAPPPPARRGRPPLPARLGPAGQSASRSALAAGGVVRRMRWSQTNNENCMRAYYGATEGGINLSAYRVRMLPLFQALEPTVAVSTQRLSDQRLQLLDQSVLDRLRLEALPARPTPVSTRDSPVASSAPTLVSVPTSMATLATPTDPVVDVGECTSMAVCSQVSEHLRRTLEDAICQYRFAPDSRPRLPRLPTHRRNLALMGALNALLAPYLRASEDLTDTHSILYCGAIAACRVARVKFPDTNRAPRPAGGVPAWQLRIERRISTFRTLIAKLICFSRGNNRPRVMRFVTQAFAGTDIRPQHYLASVTERIDYLKQKVYAWANRIRRYRERADRYWQNRVFQSDQRKVYRDWEGTGQRVSDRQLPDTSVMTEFWRGIWSLPVEHTEGDWMRVVERECESIESMGSVLIDPVDVSCAIRTAQNWKSPGPDGLHNFWIKWIRCSHDRLATQFQEALELGSLPCFMTTGVTFLLHKTGSTTEAKNYRPITCLPTIYKLLTSILRTKINAHVVANNVLAPAQNGCRVGSRGTKELLLIDMTISQQVRRNKGALSTAWIDYKKAYDSVPHSWLERVLELYKIDTTLKSFLGACSGDGSSEPQDLIRIERGIFQGDSLSPLWFCLALNPLSTLLKESGLGHRLRRGGEVISHLLYMDDLKLFAPKRPDLMELLKTTQVFSNAIKMEFGVDKCAVMHVQRGEVVNCPDLQLSETMTFRSLSEAETYKYLGMSESLGIAVVDIKRSVKERFFCRLTKVLNSFLSGGNKVRAFNGWVMPLLIYSFGILRWTQTELDALDRRVRQQLTTHRMLHPRSSVMRLYIPRKLGGRGFLSAKNLHNREVCSLRDYFRDNECGMHRDVVAVDKGLTPLSLANENWRKPSVLSTEDRKEVWKSKQLHGRFYRVLTGPDVDMLASVNWLRFGDLFGETEGFACAIADEVIKTNNYRKYIMKDGTVDICRACHRPGESLRHIISGCSHLANGEYLHRHNQVARIIHQQLALQYGLVESEVPYYKYAPAPVLENGRALLYWDRSIITDRTIVANKPDIVVVDRAQRRAVLVDITIPHDENLVKSEKDKLSKYLDLAHEITAMWDVDSTIIVPIVVTVNGLIAKSLDQHLKRLSLDGWVKGQLQKAVILDTARIVRRFLTLQP

SEQ ID NO: 6435 - protein, 1201 aa, Ennomos fuscantarius
MITRSRKKQAEQSARLPPLPALSPSCSSSEDEYGTPPEITASSNEDGPPSPPPPPPPARRGRPPLPARLGPAGQPAPRPAPATGGVVRRMRWTQSMNENCMRAYYGAVEGGNNLTAYRNRMLSLFRNLEAAVAVSAQRLSDQVRAIQRCKLLDEPTLDRLRLEMLPVRATSSSTRDLSVTQPAPGPTTGPSPAMSRVVPEIEAEECANSSVSTQVNEQLRSALEDAILRYAPTSRPRLPRFPTNRRNLVLMGALNTLLGPYLRTSEDLVDTHSILYCGAIAACRVARVKFPDTDRAQRPADGAPAWQVRIERRITTFRTLIAKLVCFSRGNHRPRVMRFVAQAFAGTGIRPQDYMACVTERIDFLKQKVYAWASRIRRYRERVDRYQINRLFQSDQRKVYRDWEGTSQRVVDGQLPDANAMNEFWRSIWSVPVNHLEGDWMRVVERVCEPIESMGSITIDPEDISCAIRTAQNWKSPGPDGLHNFWIKWIRCSYPRLALQFQEAIEAGSLPSFMTTGVTFLLHKSGSTIEAKNYRPITCLPTLYKLLTSILRTKINSHIIANNILAPAQNGYRVGSHGTKELLLIDTAICQQVRRNRGALSTAWIDYKKAYDSVPHSWLRRVLDLYKINATLRSFLSACMGQWTTVLRQPGGGDIVSDPQDYIRIERGIFQGDSLSPLWFCLALNPLSTLLGDSELGYRLRRGGEIITHLLYMLFAPQRPQLIELLKITENFSNSIKMEFGVDKCAVMHVHGGKVVNSTNLQLSETMTLRSLSESETYKYLGMSESLGVSVGDVRQSVKERFFCRLTKVLNSLLSGGNKVRAFNGWVMPLLMYSFGILRWTQTELDTLDKKVRQILTSHRMLHPRSSVMRLYIPRKLGGRGFLNAKNLHNREMYSLREYFLNNECGMHRDVVAVDKGLTPLSLANKNWRKPVVLSTDDHRDVWKGKELHGRFYRALTGPDVDLPASVNWLRIGDLFGETEGFVCAIADEVIKTNNYRKYIMKDGTVDICRACRRPGESLRHIISGCSHLANGEYLHRHNLVARIIHQQLALQYGLVESEVPYYKYTPGPVLENGRALLYWDRSIITDRTIVANKPDIVLIDRSQRRAVLVDIAIPHDENLVKAEKDKLSKYLDLAHEVTAMWNVDSTSIVPIVVSANGLIAKSLDQHLERLSLDGWIKGQIQKAVLLDTARIVRRFLSLQP

SEQ ID NO: 6436 - protein, 1121 aa, Notocelia uddmanniana
MAPATGGVVRRMQWSPSMNENCMRAYYGATDGGTNLSAYRVRMLPLFQALEPAISVSAQRLSDQVRVIQRLKRLDDATLDRLRLEALSARAASVLARNPPATLPALVPAPDTAPGAPRVDPSADEDCANQSVSTQAHEELRRALEEAITQYRSTPNSRPRLPRLPVNRRNLELMGALNDLLVPYLGASEDLIDTHSIMYCGAIAACRVARVKFPDADRAPRPAGSVPTWQVRIERRVDTYRTLIAKLICFRGGNSRPRVMRFVNQAFAGTGVRPRDYMDCVTERIDFLKQKVYAWASRIRRYRERLDRYQQNRLFQSDQRKVYRKWDGTDHRVSDGQRPDAAAMVNFWRSIWSVPVEHTEGPWIGAVERECESIEPMGSVTISPEDVSCAIRTAPNWKSPGPDGLHNFWLKWFRCSHARLAAQFQQALELGSLPPLLTTGVTSLLYKSGSTTEAKNYRPITCLPTLYKLLTCILRAKINAHIVANNILAPAQNGCRVGSRGTKELLLIDMTMCQQVRRNRGALSAAWIDYRKAYDSVPHSWLGRILELYKVDAALRSFLRACNVRQPGRGDGPSVPQDSIRIERGIFQGDSLSPLWFCLALNPLSTLLKDSGLGCQLRRGGEVISHLLYMDDLKLFAPNTHDLLELLKTTEVFSSAIKMEFGVDKCAVMHVQRGKIVNSTNLQLSETTSLRSLSEADTYKYLGMSQSLGIEGEGIKRVLRERFFCRLTKVLNSFMSGGNKVRAFNAWVMPLLTYSFGILRWTQTELDLLDRRVRVLLTTNRMLHPRSSVMRLYIPRKLGGRGFLNAKDLHNREVCSLRDYFLNSECGMHRDVVAVDTLLTPLSMANENWRRLKVLSTEDRRAVWKSKELHGRFYEALTGPDVDLLASVNGLRFGDLFGETEGFVCAIADEVIMTNNYQRYILKDGTVDICRACRRPGESLRHIISGCGHLANGEYLHRHNLVARIIHQQLALLYGLVGFEVPYYKYTPAPVLENCRATLYWDRSVITNRTIVANKPDIVLTDRLKHQAILVDITIPHDENLVKAEKDKSSKYLDLAHEVTAMWDVDSTIIVPIVVSANGLIAKSLDQHLKRLSLDGWVKGQIQAVLLDTARIVRRFLSLSP

SEQ ID NO: 6437 - protein, 1195 aa, Atethmia centrago
MLTRSAAVRARLPPPDSSLSSASPPPVPSPTVCAVTTPTAAVASSSSDEYFSPPTTPPPVRRRGGRRPPDGLGSRGPPASDRVPAPGGSVKRMRWTQSVNENVMRSYYGATEGGNNLTAYRVRMLSLFQVLEPAVNISAQRLSDQVRVIQRNHMLDDTVLDRLRSEMQRSHVIVPPSQTVVLSPQLSTNQADEESDDRATNVSTQCNVELRSALEDAIREYRLMSPELRPRLPRLPMHKKNRALVAALDSQLSNYFDDCEDLTDTHSILYCAAVAVCRVAHVKFAKDSRTTRPKPTVPAWQCRIESRIGGARALIGKLICFREGNTRPRVMRFVRRAFSGTDIGPQDYMTRVTERIDFLKQKVYAWANRIRRYKRRVERYTQNRTFQSDERWVYRGWERPDQDVTDTRLPDDDVMCSFWRSIWSVPVSHTEGDWARKVERACDPIPEMGAITICPQDVARAVRPLPNWKSPGPDGLHNFWLKWFLRSHARLAAQYQIALESGSLPQFLTTGVTHLLHKSGSTAEPKNYRPITCLPTVYKLLTSILRAKINKHIDTNSIMSASQNGCRNGSRGTKELLLIDMTISQQVRHSRKDLSTCWIDYKKAYDSVPHTWLMRVLELYKVDATLRTFLISCMGQWRTVLRYPGCRNIQRNSEPIRIERGIFQGDSLSPLWFCLALNPLSTLLEDSGLGYRMRRGGQVISHLLYMDDLKLFASNNLQLMELLKITESFSSAIRMEFGVDKCAVMHVKRGKIVESVGTQLSDSINLRTLSASETYKYLGMSEALGINVTDMKQSLKERFFGRLKKVFNSLLSGGNKVRAFNGWVMPVLMYSFGILKWTQTELDALDRRVRTLLTAYRMHHPRSSVMRLRKCGGRGFLNAKTLHNREVCSLREYFLEADVGMHRDVVAVDKGLTPLSLAKENWRKLVVLDTNDRREVWQSKELHGRFFRALHEPDVDFQASVAWLRFGDLFGETEGFVCAIMDEVIMTKNYRRFIVKDGTVDVCRACHRPGESIRHIISGCSRLANEEYLHRHNLVARIIHQQLALKYSLVESEVPYYRYVPDPVLDNGNITLYWDRPIITDRTIVANKPDIVVVDRTERRAMIVDITVPHDGNLVKAEKDKQIKYLDLAREVVDMWGVDSAIIVPIVVSANGLIAKSLDQHLKRLTLDGWIKGLIQKAVLLDTARIVRRFLSLEP

SEQ ID NO: 6438 - protein, 1108 aa, Amphipyra berbera
MRWTLTMNENCMRAYFGATEGGTNLTAYRGRMLSLFQVLEPTVNVSAQRLSDQVRVIQRDHRLTDAALDRLRSEVQSNFIISLQSQTAAQPQTPTVVPPLPIHADEESNDRVTNVSTQCNEQLRSALELAIREYRFTPPNIRPRIPRLPMHRKNRALMCALDSLLSSYFDNSENLEDTHSILYCAAVAACRVAHAKFDNNDRATRPKPAVPAWQCRIERRINEARALIGKLICFREGNTRPRVMRFVRRAFSETDINPRDYLSRVTERIDFLKQKVYAWANRIRRYKRRVERYTQNRMFHSDERWVYRTWERPDHDVSDTHLPDSDVMNTFWRNIWSMPVTHTEGDWMQEVQRACEPIEEMGDITIVPQDVTSAVRPMANWKSPGPDGLHNFWLKWLRSSHARLASQFQSSLESGSLPEFLTTGVTHLLHKSGSTAEPKNYRPITCLPTVYKLLTSILRAKINSHIINNSIMSVSQNGCKNGSRGTKELLLIDMAISQQVRRSRKDLSTCWIDYKKAYDSVPHTWLMRVLELYKVNTTLCAFLTSCMGQWRTVLHYPGCRQIQGRGEPIRIERGIFQGDSLSPLWFCLALNPLSTLLEGSGLGYRLRRGGQVISHLLYMDDLKLFALNNLQLVKLLKVTETFSNSIRMEFGVDKCAVMHVKRGGIMESVVSDSIHLRSLSSTETYKYLGMSEALGINETDMTQSLRERFYGRLKKVLKSLLSGGNKVRAFNGWVMPVLMYSFGILKWTQTELDALDRRVRTLLTAYRMHHPRSSVMRLYIPRKCGGRGFLNAKTLHNREVCSLREYFLHADVGMHRDVVAVDKGFTPLSLAKENWRKPVVLDTNGRREVWQSKELHGRFYRALHGPDVDFLASVAWLCFGDLFGETEGFVCAIMDEVILTNNYRKYIVKDGTVDICRACHCPGESIRHIISGCSRLANGEYLHRHNLVARIIHQQLALKYNLVDAEVPYYKYVPDPVLENGHITLYWDRSIITDRTIVANKPDIVVIDRSERLTIIVDVTVPHDENLVKAEKDKEIKYQDLAHEVVDMWEVDSAVIVPIVVTANGLIAKSLDQHLMRLSLGSWVKGLIQKAVLLDTARIVRRFLSLRP

SEQ ID NO: 6439 - protein, 962 aa, Cydia splendana
MNRRNLALMGALNALLEPHLRTSKDLDDTHSIMYCGAIAACRVARVKFPDAERAPRTVGGVPAWQARIERRISSFRTLIAKLICFRGGNNRPRVMRFVNQAFAGTDIRPRDYMANVTERIDFLKQKVYAWANRIRRYRERVDRFQQNRLFQGDQRKVYRKWEETNLRTPDTQPPDVTAMTDFWRSIWSVPVGHTEGGWMSVVERECESIEPMGAVTISPDDVSCAIRTAQNWKSPGPDGLHNFWLKWFRCSHSCLAAQFQQALELGSLPPSLTTGVTFLLYKSGSTTEAKNYRPITCLPTLYKLLTSILRAKINAHIVANNILASAQNGCRVGSRGTKELLLIDMTICQQIRRNKGALSAAWIDYKKAYDSVPHSWLGRVLELYKVDAALRAFLSACMRQWTTVLRQPGGRDDRPGPQDFIRIERGIFQGDSLSPLWFCLALNPLSTLLKDLGLGCRLRREGEVISHLLYMDDLKLFAPNSQDLLELLKTTEVFSSAIHMEFGVDKCAVMHVQRGRVVNSTNLQLSETMSFRSISESETYKYLGMSQSLGIEEPFLRSVKERFFSRLTKVLNSLLSGGNKVRAFNAWVMPLLTYSFGILRWTQTELDALDRRVRSLLTAHRMLHPRSSVMRLYIPRKCGGRGFLNAKDLHNHEVYNLRNYFLNNECGMHRDVVAVDRNLTPLSLANENWRKPVVLSTADRKAAWESKVLHGRFYKALTGPDVDLLASVNWLRFGDLFGETEGFACAIADEVMMTNNYRKYILKDGTVDICRACRRPGESLRHIISGCSHLANGEYLHRHNLVARIIHQQLALLYDLVDREVPYYKYLPAPVLENGRATLYWDRSIITDRTIVANKPDIVIIDRSQRRAVLVDITIPHDENLVKAEKDKSSKYLDLAHEITAMRDVDSTIIVPIVVSVNGLIAKSLDQHLERLSLGGWIKGQMQKAVILDTARIVRRFLSLQP

SEQ ID NO: 6440 - protein, 1193 aa, Mellicta athalia
MNKARGQHAQSTSKAPSCSETQSSTDDEYETPPSTAESDANDAYSPTRRSKRRRVIRPPPVSLDVQGQRAPTRNPAAGGAVRRMRWTHKMNESVMRAYYEATGGGINLTAYRSTMLSLFQALEPTVTVTAQRLSDQVRAIQRCHLLDESVLERLRTNLPQLNTVSHIRAVQTSQKEQREVINLNLNNISPNSVDLSVNKQDNEHMRRALEDAILKYRSMPSNIRPQLPRLPIHRHNLALVGVMDTILKEYLDSTQNLSDTHSVLYCGAAAVCNVANVKFISNKITLPLHTAPAWQARIEKRINLTRTLIAKLTCFRAGNRRPKIMRFVHQAFAGTNITSNEYITSVSDRIDFLKQKLCAWAKRIKRYKKRRDRYNQNRMFQSNQRKVYRNWEQCTTNVVNGDLPARESITNFWRNIWSNPIDHIESDWMDVVRTRCSSLPQMEQIKISSEDISYAIRSTSNWKCPGLDRLHNFWLKWFHSSHPILASQFQDAIFNNSLPKFMTTGTTFLLYKSGCTADPKNYRPITCLPTIYKLLTSVLVTKITKHITTNNILATTQNGCKSGSRGTKELLLIDMTICQQVRRNRKNLAAAWIDYKKAYDSVPHTIWLMKIMELYKIDATLCSFLSTCMRQWSTFLRYPGAVDVSGSTEPIRIMRGIFQGDSLSPLWFCLALNPLSTLLEDSGLGFHLRRGSKAISHLLYMDDLKLFASKLPDLNKLLKITETFSTCIRMEFGVDKCAVIHVERGRIVSTENLKLENSLTFRSLNEGETYKYLGMSEALGIDDGAMKQLVKERFFGRLKKVLNSFLSGANKVRAFNSWVMPLIVYTFGILRWTQTELDSLDRQVRKLLTAYRIHHPRSSLMRLYIPRKCGGRGFLNVKNLHNREVYNLREYFLNIKSDIHMDVVAVDKGFTPLSLGKEKWRKPIIMSTVDRVAVWKSKELHGRFYKVLTDPDVDQPSSISWLQHSNLFGETEGFVCAIMDEVIKTNNYRKHIMKDGTPDICRACHKPGESIRHVVSGCSHLANGEYLHRHNQVARIIHQQLAIRYGLVENELPYYRYNPTPFLENGRALLYWDRSIVTDRFIVANKPDIVLVDRSARRAIIVDITVPHDDNLVKAEKEKLSKYLDLAHEITGMWNVDSTIIVPIVVSVNGLLAKSFDQHLKKLSLDGWIKGRIQKAVLLETARIVRRFLSLEP

SEQ ID NO: 6441 - protein, 1190 aa, Mellicta athalia
MNKARGQHAQSTSKVPSRSETQSSTDDEYETPPSTAESDADDADSSTRRPKRRRVIRPPPVSLDVQGQRAPTRNPAAGGAVRRMRWTHKMNESVMRAYYEATGGGINLTAYRSTMLSLFQALEPTVTVTAQRLSDQVRAIQRCHLLDESVLERLRTNLPQFNTVSHIRAVQTSQKEQREVINLINISPNSVDLSVNEQDNEPMRRALEDAILKYRSMPPNIRPQLPRLPIHRRNLVLVGVMDTILKEYLDSTQNLADTHSVLYCGAAAVCNVARVKFTSNKITLPSHTAPAWQARIEKRINLTRTLIAKLTCFRAGNRRPKIMRFVHQAFAGTNITSNEYITSVSDRIDFLKQKLCAWAKRIKRYKKRRDRYNQNSMFQSDQRKVYRNWEQCTTNVINGDLPTRESITNFWRNIWSNPIDHIESDWLDVVRRRCSSLPQMEQIKITSEDISYAIRSTSNWKCPGLDGLHNFWLKWFHSSHPILASQFRDAIFNNSLPKFMTTGTTFLLYKSGCTADPKNYRPITCLPTIYKLLTSVLVAKITKHISANNILATTQNGCKSGSRGTKELLLIDMTICQQVRRNRKNLAAAWIDYKKAYDSVPHTWLMKVMELYKIDVTLCSFLSTCMRQWNTFLRYPGAVDVPGSTEPIRIMRGIFQGDSLSPLWFCLALNPLSTLLEDSRLGFHLRRGSKAISHLLYMDDLKLFASKLPDLNKLLKITETFSTCIRMEFGVDKCAVIHVERGRIVSSENLKLANSLSFRSLNEGETYKYLGMSEALGIDEGAMKQLVKERFFSRLKKVLNSFLSGANKVRAFNSWVMPLIVYTFGILRWTQTELDSLDRQVRKLLTAYRIHHPRSSLMRLYIPRKCGGRGFLNVKNLHNRELYNLREYFLNIKSDIHMDVVAVDKGFTPLSLGKEKWRKPIVMSTVDRVAVWKSKELHGRFYKVLTDPDVDQPSSISWLQHGNLFGETEGFVCAIMDEVIKTNNYRKHIMKDGTPDICRACHKPGESIRHVVSGCSHLANGEYLHRHNQVARIIHQQLAIRYGLVENELPYYRYNPTPFLENGRALLYWDRSIVTDRFIAANKPDIVLVDRSARRAIIVDITVPHDDNLVKAEKEKLSKYLDLAHEITGMWNVDTTIIVPIVVSVNGLLAKSFDQHLKKLSLDGWIKGRIQKAVLLETARIVRRFLSLEP

SEQ ID NO: 6442 - protein, 1190 aa, Melitaea cinxia
MNKARGRRAQKRPKVPSSSETQSSTTDDEYQTPPSTAESDADDADSSTRPSNRRRVIRPPPACLEVPGQRPPTRNPAAGGAVRRMRWTQKVNESVMRAYYEATGGGINLTAYRSTMLSLFQALEPTVTVTAQRLSDQVRAIQRCHLLDETVLERLRTNLPQLNTVSHIRAIQTSQKETREVINFNLSPNSVDLSVNEQDNEPMRRALEDAILKYRSLPPNIRPQLPRLPIHRRNLALVGVMDKILQQYLDSTQNLSDTHSLMYCGAAAVCNVANVKFTSNKVTLPSHTAPAWQTRIEKRINLTRTLIAKLTCFRTGNRRPKIMRFVHQAFAGTNIRSNEYITSVSDRIDFLKQKLCAWAKRIKRYKKRRDRYHQNSIFQSDQQKVYRNWEQCTTNVVNGDLPTRESIYNFWRNIWSNPIDHIESDWMDVVRRRCSSLPQMEQVKINSEDISYAIRSTSNWKCPGLDGLHNFWLKWFHSSHPILASQFQNAICTNSLPKFMTTGTTFLLYKSGCTADPKNYRPITCLPTIYKLLTSVLVAKITKHITTNNILATTQNGCKSGSRGTKELLLIDMTICQQVRRNRKNLAAAWIDYKKAYDSVPHTWLIKVMELYKIDAALCSFLSTCMRQWNTFLRHPGAVDVSGSTEPIRIMRGIFQGDSLSPLWFCLALNPLSTLLEDSRLGFHLRRGSKAISHLLYMDDLKLFASKLPDLYKLLKITETFSTCIRMEFGVDKCAVIHVERGRIVSSENLELNNSLSFRSLNEGETYKYLGMSEALGIDDGAMKQLVKERFFGRLKKVLNSFLSGGNKVRAFNSWVMPLIVYTFGILRWTQTELDTLDRQVRKLLTAYRIHHPRSSVMKLYIPRKCGGRGFLNAKNLHNREVYNLREYFLNMKSDMHMDVVAVDRGFTPLSLGKEKWRKPIIMRTVDRVAVWKSKELHGRFYKVLTDPDVDQPSSISWLQHGNLFGETEGFVCAIMDEVIKTNNYRKHIMKDGTPDICRACHKPGESIRHIVSGCSHLANGEYLHRHNQVARIIHQQLAIRYGLVENELPYYRYNPTPFLENGRALLYWDRSIVTDRFIAANKPDIVLVDRSARRAIIVDITVPHDDNLVKAEKEKLSKYLDLAHEITGMWNVDSTIIVPIVVSVNGLLAKSFDQHLKKLSLDCWIKGRIQKAVLLETARIVRRFLSLEP

SEQ ID NO: 6443 - protein, 1087 aa, Biston betularia
MLPLFQALEPTVTVSAQRLSDQVRAIQRLQLLDQSVLDRLRLEALPARPTPVSTRDSPVASSAPTLVSVPTSMATLATPIDPVVDVGECASMGVCSQVSEHLRRTLEDAICQYRFAPDSRPRLPRLPTHRRNLALMGALNALLAPYLRASEDLTDTHSILYCGAIAACRVARVKFPDTNRAPRPAGGVPAWQLRIERRIGTFRTLIAKLICFSRGNNRPRVMRFVTQAFAGTGIRPQHYLASVTERIDYLKQKVYAWANRIRRYRERADRYWQNRVFQSDQRKVYRDWEGTGQRVSDRQLPDTSVMTEFWRGIWSLPVEHTEGDWMRVVERECESIESMGSVLIDPVDVSCAIRTAQNWKSPGPDGLHNFWIKWIRCSHDRLATQFQEALELGSLPCLMTTGVTFLLHKTGSTTEAKNYRPITCLPTIYKLLTSILRTKINAHVVANNVLAPAQNGCRVGSRGTKELLLIDMTISQQVRRNKGALFTAWIDYKKAYDSVPHSWLERVLELYKIDTTLKSFLGACMRQWTTVLRQPGSGDGSSEPQDLIRIERGIFQGDSLSPLWFCLALNPLSTLLKESGLGHRLRRGGEVISHLLYMDDLKLFAPKRPDLMELLKTTQVFSNAIKMEFGVDKCAVMHVQRGEVVNCPDLQLSETMTFRSLSEAETYKYLGMSESLGIAVVDIKRSVKERFFCRLTKVLNSLLSGGNKVRAFNGWVMPLLIYSFGILRWTQTELDALDRRVRQQLTTHRMLHPRSSVMRLYIPRKLGGRGFLSAKNLHNREVCSLRDYFRDNECGMHRDVVAVDKGLTPLSLANENWRKPSVLSRKEVWKSKQLHGRFYRVLTGPDVDMLASVNWLRFGDLFGETEGFACAIADEVIKTNNYRKYIMKDGTVDICRACHRPGESLRHIISGCSHLANGEYLHRHNQVARIIHQQLALQYGLVESEVPYYKYAPAPVLENGRALLYWDRSIITDRTIVANKPDIVVVDRAQRRAVLVDITIPHDENLVKAEKDKLSKYLDLAHEITAMWDVDSTIIVPIVVTVNGLIAKSLDQHLKRLSLDGWVKGQLQKAVILDTARIVRRFLTLQP

SEQ ID NO: 6444 - protein, 964 aa, Cydia splendana
MNRRNLALMGALNALLEPYLRTSKDLDDTHSIMYCGAIAACRVARVKFPDAERAPRNVGGVPAWQARIERRISSFRTLIAKLICFRGGNNRPRVMRFVNQAFAGTDIRPRDYMANVTERIDFLKQKVYAWANRIRRYRERVDRFQQNRLFQSDQRKVYRKWEETNLRTPDTQPPDATAMTDFWRSIWSVPVGHTEGSWMSVVERECESIEPMGAVTISPDDVSCAIRTAQNWKSPGPDGLHNFWLKWFRCSHSRLAAQFQQALELGSLPPSLTTGVTFLLYKSGSTTEAKNYRPITCLPTLYKLLTSILRAKINAHIVANNILASAQNGCRVGSRGTKELLLIDMTICQQIRRNKGALSAAWIDYKKAYDSVHGGSWLGRVLELYKVDAALRAFLSTCMGQWTTVLRQPGGGDDRLGPQDFIRIERGIFQGDSLSPLWFCLALNPLSTLLKDLGLGCRLQREGEVISHLLYMDDLKLFAPNSQDLLELLKTTEVFSSAINMEFGVDKCAVMHVQRGRVVNSRNLQLSETMSFRSISESETYKYLGMSQSLGIEDEGIRRSVKERFFSRLTKVLNSLLSGGNKVRAFNAWVMPLLTYSFGILRWTQTELDALDRRVRALLTTHRMLHPRSSVMRLYIPRKCGGRGFLNAKDLHNREVYNLRNYFLNNECGMHRDVVAVDRNLTPLSLANENWRKPVVLSTADRKAAWESKVLHGRFYKALTGPDVDLLASVNWLRFGDLFGETEGFACAIADEVMMTNNYRKYILKDGTVDICRACRRPGESLRHIISGCSHLANGEYLHRHNLVARIIHQQLALLYGLVDREVPYYKYLPAPVLENGRATLYWDRSIITDRTIVANKPDIVIIDRSQRRAVLVDITIPHDENLVKAEKDKSSKYLDLAHEITAMWDVDSTIIVPIVVSVNGLIAKSLDQHLERLLLGGWIKGQMQKAVILDTARIVRRFLSLRP

SEQ ID NO: 6445 - protein, 1144 aa, Cydia splendana
MRWSQTINENVMRAYYGATEGGTNLCAYRVRMLPLFQALEPTIDVTAQRLSDQVRVIQRQKRLDDSTLDRLRLQALSVRAASTSARDPPATSPDPVPAPDQAPGAPRVDLSADEEEFAQSVGSTANEQLRRTLDEAITWYRSTPDTRPRLPRLPMNRHNLALMGALNALLEPYLRTSKDLDDTHAIMYCGAIAACRVARVKFPDSERPPWTAGGAPAWQIRIERRISSFRTLIAKLICFRGGNNRPRVMRFVNQAFVGTDIRPRDYMANVTERIDFLKQKVYAWANRIRRYRERVDRFQQNRLFQSDQRKMYRKWEETNLRASDSRPPDATVMNDFWRSIWSVPVGHTEGSWMSVVERECESIEPMGAVTISPDDVSCAIRTAQNWKSPGPDGLHNFWLKWFRCSHSYLAAQFQQALGLGSLPPSLTTGVTFLLYKSGSTTEAKNYRPITCLPTLYKLLTSILRAKINAHIVANNILASAQNGCRVGSRGTKELLLIDMTICQQIRRTKGALSAAWIDYKKAYDSVPHSWLGRVLELYKVDAALRAFLSACMGQWTTVLRQPGGGDDRPGPQDFIRIERGIFQGDSLSPLWFCLALNPLSTLLKDLGLGCRLRREGEVISHLLYMDDLKLFAPNTQGLLELLKTTEVFSSAINMEFGVDKCAVMHVQRGKVVNSTNLQLSETMSFRSISESETYKYLGMSQSLDIEDEGIRRSVKERFFSRLTKVLNSLLSGGNKVRAFNAWVMPLLTYSFGILRWTQTELDALDRRVRSLLTTHRMLHPRSSVMRLYIPRKCGGRGFLNAKDLHNREVYNLRNYFLNNECGMHRDVVAVDRNLTPLSLANENWRKPVVLSTADRKAAWESKALHGRFYKALTGPDVDLLASVNWLRFGDLFGETKGFACAIADEVMMTNNYRKYILKDGTVDICRACRRPGESLRHIISGCPHLANGEYLHRHNLVARIIHQQLALLYGLVEREVPYYKYLPAPVLENGRATLYWDRSFPIERGTTIITIITDRTIVANKPDIVLIDRSQRRAVLADVTSPHDENLVKAEKDKSSKYLDLAHEITAMWDVDSTIIVPIVVSANGLIAKSLDQHLERLSLGGWMGGGSDAEGGNIGHGAYSTSVPHSAALTTGSLGQAPLPAAP

SEQ ID NO: 6446 - protein, 1135 aa, Ennomos quercinarius
MRTPTTTAHPVVSKFVVGYATPPDTTASSDEDGPSSPPPPPPPARRGRPPLPARLGPAGQPAPRPAPATGGIVRRMRWTQSMNENCMRAYYGAVEGGSSLTAYRDRMLSLFQNLEPSVSVSGQRLSDQVRAIHRCKLLDQSALDRLRLETLPIRATSPSPQVLPAALPDPGPIMGPPPVTPRGDPVIDGEESVNGSVSTQANEQLRSALEDVILRYRSTSTSRPRLPRLPTNRRNLVLMGALNTLLAPYLRTSKDLVDTHSILYCGAIAACRVARVKFPDTDRAPRPADGAPAWQVRIEKRITTFRTLIAKLVCFSRGNHRPRVMRFVTQAFAGTDIRPQDYMACVTERIDFLKQKVYAWASRIRRYRERVDRYQQNRLFQSDQRKVYRNWEGTGQRVTDGQLPDANATSEFWRSIWSVPVEHTEGDWMRVVERVCEPIESMGSITIDPEDISCAIRTAQNWKSPGPDGLHNFWIKWIRCSYPRLAIQFQEALEAGSLPSFMTTGVTFLLHKSGSTTEAKNYRPITCLPTLYKLLTSILRTKINSHIVANNILAPAQNGCRVGSRGTKELLLIDTAICQQVRRNRGALSTAWIDYKKAYDSVPHSWLERILELYKIDATLRSFLSACMGQWTTVLRQPGGGESVSDPQDFIRIERGIFQGDSLSPLWFCLALNPLSTLLGDSGLGYRLRRGGEIISHLLHMDDLKLFAPQRPQLIELLKITENFSNSIKMEFGVDNCAVMHVHRGKVVNSTNLQLSETMTLRSLSESETYRYLGMSESLGVSVGEVKQSVKERFFCRLTKVLNSLLSGGNKTRAFNGWVMPLLMYSFGILRWTQTELDALDRKVRQLLTSHRMLHPRSSVMRLYIPRKWGGRGFLNAKTLHNREVCSLRDYFLNNECGMHRDVVAVDKVLTPLSLANENWRKPVVLSTEDRRDVWKGKELHGRFYRALTGPDVDLHASVNWLRFGDLFGETEGFVCAIADEVIKTNNYRKYIMKDGTVDICRACRRPGESLRHIISGCSHLANGEYLHRHNLVARIIHQQLALQYGLVESEVPYYKYTPGPVLENGRALLYWDRSIITDRTIVANKPDIVLVDRSQRRAVLVNITIPHDENLVKAEKDKLSKYLDLAHEVTASTP

SEQ ID NO: 6447 - protein, 1092 aa, Notocelia uddmanniana
MITRTRSRAAQRARPPSPPAPSSSSPSSSGDEFATAPDTSESSCDERGPPSPPPRPPARRGRPPLPARLGPVGHSALPTAPAAGGVVRRMRWTQEMNENCMRAYFGATEGETNLSAYRVRMLPLFQALEPTITVTAQRLSDQVRVIQRLKRLDDATLDRLRLEALSARTASALARDPPATSPAPVPTPDMAPGVPRVDPSVDEDCANQTVSTQANEQLRRALEEAITRYRSTPNSRPRLPRLPVNRRNLALMGALNDLLDPYLRASEDLIDTYSILYCGAIAACRVARVKFPDADRAPRTAGGVPAWQVRIERRINTFRTLIAKLICFRGGNDRPRVMRFVNQAFAGTGVRPRDYVTCVTERIDFLKQKVYAWASRIRRYRERVDRYQQNRLFQSDQRKVYRKWEGTDHRVCDGQRPDATAMGNFWRSIWSVPVEHTEGAWIGVVERECESIEPMGSVTISPEDISCAIRTAPNWKSPGPDGLHNFWLKWFRCSHERLATQFQQALELGSLPHLLTTGVTSLLYKSGSTTEAKNYRPITCLPTLYKLLTSILLVRAKINTHIVANNILAPAQNGCRAGSRGTKELLLIDMTICQRVRRSRGALSAAWIDYKKAYDSVPHSWLRRILELYKVDAALRSFLSACMGQWTTVLRQPGGGDGSPGPQDSIRIERGIFQGDSLSPLWFCLALNPLSTLLKDSGLGCQLRRGGEVISHLLYMDDLKLFAPNTQDLLELLKTTEVFSSAIKMEFGVDKCAVMHVQRGKVVNSTNLQLSETMLLRSLSEAETYKYLGMSQSLGIEGEGIKQAVKERFFCRLTKVLNSFLSGGNKVRAFNAWVMPLLTYSFGILRWTQTELDALDRRVRVLLTAHRMLHPRSSVMRLYIPRKCGGRGFLNAKDLHNREVCSLRDYFLNSECGMHRDVVAVDASFTPLSMANENWRRFKVLSTEDRKAEWKSRELHGRFYKALTGPDVDLLASVNWLRFGDLFGETEGFVCAIADEVIMTNNYRKYILKDGTVDICRACRRPGESLRHIISGCGHLANGEYLHRHNLVARIIHQQLALSYGLVNFEVPYYKYLPAPVLENGRATLYWDRSII

SEQ ID NO: 6448 - protein, 1144 aa, Cydia splendana
MTERKMITRSKARSQASITTNARPPPSPVSSVSSQPSSGDEFATAPDTSESSDECGPPPPPPRPPARRGRPPLSARLGPAGHLAPPTAPAAGGVVRRMRWSQTMNENVMRAYYGATEGGTNLCAYRVRMLPLFQALEPTIDVTAQRLSDQVRVIQRLKRLDDSTLDRLRLEALSARAASTSVRDPPATSPDPVPAPDQAPGAPRVDLCADGEEFAQSVSSTANEQLRRTLDEAITQYRSTPNTRPRLPRLPMNRRNLALMGALNALLEPYLRTSKDLDDTHAIMYCGAIAACRVARVKFPDAEHAPRTAGGAPAWQIRIERRISSFRTLIAKLICFRGGNNRPRVMRFVNQAFAGTDIRPRDYMANVTERIDFLKQKVYAWANRIRRYRERVDRFQQNRLFQSDQRKMYRRWEETNLRASDSRPPDATVMNDFWRSIWSVPVGHTEGSWMSVVERECESIEPMGAVTISPDDVSCAIRTAQNWKSPGPDGLHNFWLKWFRCSHSCLAAQFQQALELGSLPPSLTTGVTFLLYKSGSTTEAKNYRPITCLPTLYKLLTSILRAKINAHIVANNILASAQNGCRVGSRGTKELLLIDMTICQQIRRNKGALSAAWIDYKKAYDSVPHSWLGRVLELYKVDAALRAFLSACMGQWTTVLRQPGGGDDRPGPQDFIRIERGIFQGDSLSPLWFCLALNPLSTLLKDLGLGCRLRREGEVISHLLYMDDLKLFAPNSQDLLELLKTTEVFSSAIHMEFGVDKCAVMHVQRGRVVNSTNLQLSETMSFRSISESETYKYLGMSQSLGIEDEGIRRSVKERFFSRLTKVLNSLLSGGNKVRAFNAWVMPLLTYSFGILRWTQTELDALDRRVRSLLTTHRMLHPRSSVMRLYIPRKCGGRGFLNAKDLHNREVYNLRNYFLNNECGMHRDVVAVDRNLTPLSLANENWRKPVVLSTADRKAAWESKVLHGRFYKALTGPDVDLLASVIWLRFGDLFGETEGFACAIADEVMMTNNYRKYILKDGTVDICRACRRPGESLRHIISGCSHLANGEYLHRHNLVARIIHQQLALLYGLVDREVPYYKYLPAPVLENGRATLYWDRSIITDRTIVANKPDIVLIDRLQAGPCSPTSPSPMMRISCRPRRTSPVST

SEQ ID NO: 6449 - protein, 873 aa, Notocelia uddmanniana
MGALNDLLDPYLRASDDLIDTHSIMYCGAIAACRVARVKFPDADRATRTAGGVPAWQVRIERRINTFRTLIAKLICFRGGNNRPRVMRFVNQAFAGTGVRPRDYMACVTERIDFLKQKVYAWASRIRRYRERVDRYQQNRLFQSDQRKVYRKWEGTDHRVCDGQRPDATAMVNFWRSIWSVPVEHTEGAWIGVVERDCESIEPMGSVTISPEDVSCAIRTAPNWKSPGPDGLHNFWLKWFRCSHERLATQFQQALELGSLPPPLTTGVTSLLYKSGSTTEAKNYRPITCLPTLYKLLTSILRAKINTHIVTNNILAPAQNGCRVGSRGTKELLLIDMTICQRVRRNRGTLSASWIDYKKAYDSVPHSWLRRILELYKVDAALRSFLSACMGQWTTVLRQPGGGDGPSGPQDSIRIERDIFQGDSLSPLWFCLALNPLSTLLQDSGLGCQLRRGGEVISHLLYMDDLKLFAPNRQDLLELLKTTEVFSSAIKMEFGVDKCAVMHVQRGKVVNSTNLQLSETMSLRSLSEAETYKYLGMSQALGIEGEGIKQAVKERFFCRLTKVLNSFLSGGNKARAFNAWVVPLLTYSFGILRWTQTELDALDRRVRVLLTAHRMLHPRSSVMRLYIPRKCGGRGFLNAKSLHNREVCSLRDYFLNSECGMHRDVVAVDASFTPLSMANENWRRFKVLSTEDRKAEWKSKELHGRFYRALTGPDVDLLASVNWLRFGDLFGETEGFVCAIADEVIMTNNYRRYILTDGTVDICRACRRPGESLRHIISGCGHLANGEYLHRHNLVARIIHQQLALSYGLVDFEVPYYKYLPAPVLENGRATLYWDRSIITDRTIVANKPDIVLIDRSKRQAVLVDIAIPMRTS

SEQ ID NO: 6450 - protein, 1070 aa, Notocelia uddmanniana
MKTETLFKLWNCNNNNKRLDDLTLDRLRLEALSARAAPTSARDLPATSPAPVPAPNTAPRAPRVDPSADGDCADQSVSTQAHEQLRRALDEAITRYRSTPNSRPRLPRLPVNRRNLALMGALNDLLDPYLRASDDLIDTHSIMYCGAIAACRVARVKFPDADRATRTAGGVPAWQVRIERRINTFRTLIAKLICFRGGNNRPRVMRFVNQAFAGTGVRPRDYMACVTERIDFLKQKVYAWASRIRRYRERVDRYQQNRLFQSDQRKVYRKWEGTDHRVCDGQRPDATAMVNFWRSIWSVPVEHTEGAWIGVVERDCESIEPMGSVTISPEDVSCAIRTAPNWKSPGPDGLHNFWLKWFRCSHERLATQFQQALELGSLPPPLTTGVTSLLYKSGSTTEAKNYRPITCLPTLYKLLTSILRVKINTHIVTNNILALAQNGCRVGSRGTKELLLIDMTICQRVRRNRGTLSASWIDYKKAYDSVPHSWLRRILELYKVDAALRSFLSACMGQWTTVLRQPGGGDGPSGPQDSIRIERGIFQGDSLSPLWFCLALNPLSTLLQDSGLGCQLRRGGEVISHLLYMDDLKLFAPNRQDLLELLKTTEVFSSAIKMEFGVDKCAVMHVQRGKVVNSTNLQLSETMSLRSLSESETYKYLGMSQALGIEGEGIKRAVKERFFCRLTKVLNSFLSGGNKARAFNAWVMPLLTYSFGILRWTQTELDALDRRVRVLLTAHRMLHPRSSVMRLYIPRKCGGRGFLNAKGLHNREVCSLRDYFLNSECGMHRDVVAVDASFTPLSMANENWRRFKVLSTEDRKAEWKSKELHGRFYRALTGPDVDLLASVNWLRFGDLFGETEGFVCAIADEVIMTNNYRKYILKDGTVDICRACRRPGESLRHIISGCSHLANGEYLHRHNLVARIIHQQLALSYGLVDFEVPYLPAPVLENGRTTLYWDRSIITDRTIVANKPDIVLIDRSKRQAVLVDITIPHDENLVKAEKDKVSKYLDLAHEVTAMWDVDSTIIVPIVVSANGLIAKSLDQHLKRLSLDGWVKGQIQKAVLLDTARIVRRFLSLSP

SEQ ID NO: 6451 - protein, 860 aa, Cydia splendana
MNKHNLALMGALNALLEPYLRTSKDLDDTHAIMYCGAIAACRVARVKFPDSERAPRTAGGAPAWQIRIERRISSFRTLIAKLICFRGGNNRPRVMRFVNQAFVGTDIRPRDYMANVTERIDFLKQKVYAWANRIRRYRERVDRFQQNRLFQSDQRKMYRRWEETNLRASDSRPPDATVMNDFWRSIWSVPVGHTEGSWMSVVERECESIEPMGAVTISPDDVSCAIRTAQNWKSPGPDGLHNFWLKWFRCSHSYLAAQFQQALELGSLPPSLTTGVTFLLYKSGSTTEAKNYRPITCLPTLYKLLTSILRAKINAHIVANNILASAQNGCRVGSRGTKELLLIDMTICQQIRRTKGALSAAWIDYKKAYDSVPHSWLGRVLELYKVDAALRAFLSACMGQWTTVLRQPGGGDDRPGPQDFIRIERGIFQGDSLSPLWFCLALNPLSTLLKDLGLGCRLRREGEVISHLLYMDDLKLFAPNTQGLLELLKTTEVFSSVINMEFGVDKCAVMHVQQGKVVNSTNLQLSETMSFRSISESETYKYLGMSQSLGIEDEGIRRSVKERFFSRLTKVLNSLLSGGNKVRAFNAWVMPLLTYSFGILRWTQTELDALDRRVRSLLTTHRMLHPRSSVMRLYIPRKCGGRGFLNAKDLHNREVYNLRNYFLNNECGMHRDVVAVDRNLTPLSLANENWRKPVVLSAADRKAAWESKALHGRFYKALTGPDVDLLASVNWLRFGDLFGETEGFACAIADEVMMTNNYRKYILKDGTVDICRACRRPGESLRHIISGCSHLANGEYLHRHNLVARIIHQQLALLYGLVDREVPYYKYLMRLFSRMVVPRSIGIDLSSPTGLLSPISLTSC

SEQ ID NO: 6452 - protein, 1138 aa, Cydia splendana
MITRSRTKAATTSARPPPPPASSTSSSTSSSGDEFATAPDTDGSSEESGPPPPPPRPPARRGRPPLPARLGPAGHPAPPTAPATGGIVRRMRWTRDMNENVMRAYYGATEGGTQLSAYRSRILPLFQALEPTITVSEQRLSDQVRVIQRLKRLDDTTLDRLRQEALSARADPTSVRDLPATSPDPVPAPDLAPGAPRVDFSTDEGNFASQNVSTTANEQLRRTLEEAITQYRATTTSRPRLPRLPMNRRNLALMGALNALLEPYLRTSKDLDDTHSIMYCGAIAACRVARIKFPDAERAPRTAGGVPAWQARIERRISSFRTLIAKLICFRGGNNRPRVMRFVNQAFAGTDIRPRDYMANVTERIDFLKQKVYAWANRIRRYREHVDRFQQNRLFQSDQRKVYRRWEETNLRTPDTQPPDATAMTNFWRSIWSVPVGHTEGSWMSVVERKCESIEPMGAVTISPDDVSCAIRTAQNWKSPGPDGLHNFWLKWFRCSHSRLAAQFQQALELGSLPPSLTTGVTFLLYKSGSTTEAKNYRPITCLPTLYKLLTSILRAKINAHIVANNILASAQNGCRVGSRGTKELLLIDMTICQQIWRNRGALSAAWIDYKKAYDSVPHSWLGRVLELYKVDAALRAFLSACMRQWTTVLRQPGGRDDRPGPQDFIRIERGIFQGDSLSPLWFCLALNPLSTLLKDLGLGCRLRREGEVISHLLYMDDLKLFAPNSQDLLELLKTTEVFSSAIHMEFGVDKCAVMHVQRGRVVNSTNLQLSETMSFRSISESETYKYLGMSQSLGIEDEGIRRSVKERFFSRLTKVLNSLLSGGNKVRAFNAWVMPLLTYSFGILRWTQTELDALDRRVRSLLTTHRMLHPRSSVMRLYIPRKCGGRGFLNAKDLHNREVYNLRNYFLNNECGMHRDVVAVDRNLTPLSLANENWRKPVVLSTADRKAAWESKVLHGRFYKALTGPDVDLLASVNWLRFGDLFGETEGFACAIADEVMMTNNYRKYILKDGTVDICRACRRPGESLRHIISGCSHLANGEYLHRHNLVARIIHQQLALLYGLVDREVPYYKYLPAPVLENGHATLYWDRSIITDRTIVANTPDIVIIDRSPISRRGRQRPRISTCYDPDIPLSLPSHS

SEQ ID NO: 6453 - protein, 884 aa, Notocelia uddmanniana
MGALNDLLDPYLRASEDLIDTHSILYCGAIAACRVARVKFPDADRAPRTAGGVPAWQVRIERRINTFRTLIAKLICFRGGNDRPRVMRFVNQAFAGTGVRPRDYVTCVTERIDFLKQKVYAWASRIRRYRERVDRYQQNRLFQSDQRKVYRKWEGTDHRVCDGQRPDATAMGNFWRSIWSVPVEHTEGAWIGVVERECESIEPMGSVTISPEDISCAIRTAPNWKSPGPDGLHNFWLKWFRCSHERLATQFQQALVLGSLPHLLTTGVTSLLYKSGSTTEAKNYRPVTCLPTLYKLLTSILRAKINTHIVANNILAPAQNGCRVWSRGTKELLLIDMTICQRVRRSRGALSAAWIDYKKAYDSVPHSWLRRILELYKVDAALRSFLSACMGQWTTVLRQPGGGDGSSGPQDSIRIERGIFQGDSLSPLWFCLALNPLSTLLKDSGLGCQLRRGGEVISHLLYMDDLKLFAPNRQDLLELLKTTEVFSSAIKMEFGVDKCAVMHVQRGKVVNSTNLQLSETMSLRSLSEAETYKYLGMSQSLGIEGEGIKQAVKERFFCRLTKVLNSFLSGGNKARAFNAWVMPLLTYSFGILRWTQTELDALDRRVRVLLTAHRMLHPRSSVMRLYIPRKCGGRGFLNAKDLHNREVCSLRDYFLNSECGMHRDVVAVDASFTPLSMANENWRRFKVLSAEDRKAEWKSRELHGRFYKALTGPDVDLLASVNWLRFGDLFGETEGFVCAIADEVIMTNNYRRYILKDGTVDICRACRRPGESLRHIISGCGHLANGEYLHRHNLVARIIHQQLALSYGLVNFEVPYYKYLPAPVLENGRATLYWDRSIITDRTIVANKPDIVLIDRSKRQAVLVDITIPHDENLVKAEKDKVST

SEQ ID NO: 6454 - protein, 1119 aa, Pammene fasciana
MITRSKTRLQQASPPNARPPSSPASSISSQSSSGDEFATAPDTSESSDERGPPPPPPRPPARRGRPPLPARLGLAGHPAPPRAPAAGGIVRRMRWTQTMNENVMRAYYGATEGGTNLCAYRVRLLPLFRALEPTTNVTAQRLSDQVRVIQRDKRLDDSTLDRLRLEALSAHAASTSARDPPATAPDPMPAPDLASGAPRVDPEEEIATQSVSSTANEQLRRTLEEAITQYRSTNIPRPRLPRLPMNRRNLALMGALNDLLDPFLRTSKDLDDTHSIMYCGAIAACRVARVKFPDAERAPRTAGGVPAWQVRIERRINSFRTLIAKLICFRGGNNRPRVMRFVHQAFAGTDIEPRDYMANVTERIDFLKQKVYAWASRIRRYRERVDRFRQNRLFQSDQRKVYRRWEEADPRVSDVRLPDATAMSDFWRSIWSAPVEHTEGEWMSVVERECETIEPMGAITISPDDVSCAIRTAQNWKSPGPDGLHNFWLKWFRCSHSRLATQFQQALELGSLPPSLTTGVTFLLYKSGSTTEAKNYRPITCLPTLYKLLTSILRAKINAHMVANNILASAQNGCRVGSRGTKELLLIDMTICQRVRRNRGALSAAWIDYKKAYDSVPHSWLERILELYKIDAALRSFLGACMRQWTTVLRQPGGGDDPPGPQDFIRIERGIFQGDSLSPLWLCLALNPLSTLLKDSGLGCRLRREGEVISHLLYMDDLKLFAPNNRDLLELLKTTEVFSSSIKMEFGVDKCAVMHVQRGKVVNSTNLQLSETMTFRSISESETYKYLGMSQSLGIEDAGIKQALRERFFGRLTKVLNSLLSGGNKVRAFNAWVMPLLTYSFGILRWTQTELDALDRRVRQLLTTHSMLHPRSSVMRLYIPRKCGGRGFLNAKNLHNREVYNLRNYFLNNECGMHRDVVAIDKGLTPLSLANENWRKPVVLSTEDRKAVWKSKELHGRFYGALTGPDVDLLASVNWLRFGDLFGETEGFACAIADEVIMTNNYRRYILKDGTVDICRACRRPGESLRHIISGCSHLANGEYLHRHNLVARIIHQQLALLYGLVDHEVPYYKYTPAPVLENGRATLYWDRSIITDRTIVANKPDIVVIDRPQRRAMLVDKL

SEQ ID NO: 6455 - protein, 1125 aa, Junonia evarete
MKKARGQLAQPSSEVNSPNSESQSSSSDNDYKTPLSTSESEKNEVDPPVRTTKRRRVAHPPQEGLESQGRRAPARTPAASGAVRRMKWSQKMNESVMRAYYGATGGGINLTAYRSTMLSMFQALEPTVTVTAQRLSDQVRAIQRCHLLDESVLERLRSNLQQINAVSDSHSVQQPRYEQIEATDNISNSWPPNSVDLSVSNQDDEHMRRTLEDAILKYRPMPFNLRPRIPRLPIHKRNITIVGVVDKMLQQYLNNSQDLYDTCSIMYCGAVAVCNLALVKFKTNKIIPISNTVPAWQARIENRISSTRTIIGKLISFKSGNNRPRIMRYVHQAFAGTNIRSSEYMDSVTERIDFFKQKIFAWAKRIRRYKKRVSRYRQNRMFQSDQRKVYRDWEQCNDTVASSAFPPSEVTSEFWRSIWSAPIEHTEGEWMSAVRKECESLPQMEPVTISPEDISCAIRTSSNWKCPGPDGLHNFWLKNFHSSHSVLASQFQNALVSGTLPTFLTTGTTSLLYKSGCTADPKNYRPITCLSTTYKLLTSILAAKINKHITANNILAPAQNGCRSGSRGTKELLLIDMTICQQARRNRKNLCAAWIDYKKAYDSVPHTWLVGIMELYKIDATLYSFLRSCMGQWITYLRHPGSTDISGSTEPIRIKRGIFQGDSLSPLWFCLALNPLSTLLENSGLGFRLRRGSTIISHLLYMDDLKLYASKKSDLVKLLQITETFSSCIGMEFGIDKCAVIHVERGRVVSSEHIQLTQSLFLRSLDVGENYKYLGMSEALGIDDGSMKQLVKERFFGRLKKVLNSFLSGGNKVRAFNSWVMPLLVYTFGILRWTQTELDSLDRQVRKQLTTYRMHHPRSSVMRLYIPRKCGGRGFLNAKNLHNREVYNLRNYFLGISGGMHKDVVAVDKGLTPLSLGKENWRRPIVLDTHDRMTVWKGKELHGRFYRALMSSDVDQASSVSWLQYGDLFGETEGFVCAIMDEVIKTNNYRKFIMKDGTADVCRACHRPGESLRHIISGCCHLANGEYLHRHNQVARIIHQQLALRYGLVDIEVPYYRYNPAPVLENGNALLYWDRSIITDRHIPANKPDIVIVDRSARLAIIVDITIPHDDNLVKAEKEKLSKYL

SEQ ID NO: 6456 - protein, 1078 aa, Junonia evarete
MLSLFQALEPTVTVTAQRLSDQVRAIQRCHLLDESVLERLRSNLQQINAVSDSHSVQQPRYEQIEATDNISNSWPPNSVDLSVSNQDDEHMRRTLEDAILKYRPMPFNLRPRIPRLPIHKRNITIVGVVDKMLQQYLNHSQDLYDTCSILYCGAVAVCNLALVKFKANKIIPIRNTVPAWQARIENRISSTRTIIGKLISFKSGNNRPRIMRYVHQAFAGTNIRSSEYMDSVTERIDFFKQKIFAWAKRIRRYKKRVSRYRQNRMFQSDQRKVYRDWEQCNDTVASSALPPSEVTSEFWRSIWSAPIEHTEGEWMSAVRKECESLPQMEPVTISPEDISCAIRTSSNWKCPGPDGLHNFWLKNFHSSHSVLASQFQNALVSGTLPTFLTTGTTSLLYKSGCTADPKNYRPITCLSTTYKLLTSILAAKINKHITANNILAPAQNGCRSGSRGTKELLLIDMTICQQARRNRKNLCAAWIDYKKAYDSVPHTWLVRIMELYKIDATLYSFLRSCMGQWITYLRHPGSTDISGSTEPIRIKRGIFQGDSLSPLWFCLALNPLSTLLENSGLGFRLRRGSTIISHLLYMDDLKLYASKKSDLVKLLQITETFSSCIGMEFGIDKCAVIHVERGRVVSSEHIQLTQTLFLRSLDVGENYKYLGMSEALGIDDGSMKQLVKERFFGRLKKVLNSFLSGGNKVRAFNSWVMPLLVYTFGILRWTQTELDSLDRQVRKQLTTYRMHHPRSSVMRLYIPRKCGGRGFLNAKNLHNREVYNLRNYFLGISGGMHKDVVAVDKGLTPLSLGKENWRRPIVLDTHDRMTVWKGKELHGRFYRALMSSDVDQASSVSWLQYGDLFGETEGFVCAIMDEVIKTNNYRKFIMKDGTADVCRACHRPGESLRHIISGCCHLANGEYLHRHNQVARIIHQQLALRYGLVDIEVPYYRYNPAPVLENGNALLYWDRSIITDRHIPANKPDIVIVDRSARLAIIVDITIPHDDNLVKAEKEKLSKYLDLAHEITAMWSVDSTIIVPVVVSVNGLFAKSFDQHLKKLSLGCWIKGRLQKAVLLETARIVRRFLTLES

SEQ ID NO: 6457 - protein, 868 aa, Junonia vestina
MRYVHQAFAGTNIRSSEYMDSVTERIDFFKQKTFAWAKRIRRYKKRVSRYRQNRMFQSDQRKVYRDWEQCNDTVASSALPPSEVTSEFWRSIWSAPIEHTEGEWMSAVRKECESLPQMEPVTISPEDISCAIRTSSNWKCPGPDGLHNFWLKNFHSSHSVLASQFQNALVSGTLPTFLTTGTTSLLYKSGCTADPKNYRPITCLSTTYKLLTSILAAKINKHITANIILAPAQNGCRSGSRGTKELLLIDMTICQQARRNRKNLCAAWIDYKKAYDSVPHTWLVGIMELYKIDATLYSFLRSCMGQWITYLCHPGSTDISGSTEPIRIKRGIFQGDSLSPLWFCLALNPLSTLLENSGLGFRLRRGSTIISHLIYMDDLKLYASKKSDLVKLLQITETFSSCIGMEFGIDKCAVIHVERGRVVSSEHIQLTQTLFLRSLDVGENYKYLGMSEALGIDDGSMKQLVKERFFGRLKKVLNSFLSGGNKVRAFNSWVMPLLVYTFGILRWTQTELDSLDRQVRKRLITYRMHHPRSSVMRLYIPRKCGGRGFLNAKNLHNREVYNLRNYFLGISGGMHKDVVAVDKGLTPLSLGKENWRRPIVLDTHDRMTVWKGKELHGRFYRALMSSDVDQASSVSWLQYGDLFGETEGFVCAIMDEVIKTNNYRKFIMKDGTADVCRACHRPGESLRHIISGCCHLANGEYLHRHNQVARIIHQQLALRYGLVDIEVPYYRYNPAPVLENGNALLYWDRSIITDRHIPANKPDIVIVDRSARLAIIVDITIPHDDNLVKAEKEKLSKYLDLAHEITAMWSVDSTIIVPVVVSVNGLFAKSFDQHLKKLSLGCWIKGRLQKAVLLETARIVRRFLTLES

SEQ ID NO: 6458 - protein, 1194 aa, Junonia villida
MKNARGRLAQPSSQVNSSNSETQSSTSDDDYKTPLSTSESEKNEIDSPARTSKRRRAAHPPQEGLESQGRRAPATTPAAGGAVRRMKWSQKMNESVMRAYYGATGGGINLTAYRSTMLSMFQALEPTVTVTAQRLSDQVRAIQRCHLLDESVLERLRSNLQQINAVSDSHSVQQPRYEQIETTDNISNSWPANSVDLSVSNQDDEHMRRTLEDAILKYRPMPFNLRPRIPRLPIHKRNLTIVGVVNKMLQQYLNNSQDLYDTCSILYCGAVAVCILALVKFKTNEVIPISNTVPAWQARIENRISSTRIIIGKLISFKSGNNRPRVMRYVHQAFAGTNIRSNEYMDSVTERIDFFKQKIFAWAKRIRRYKKRVGRYRQNRMFQNDQRKVYRDWEQCNDTVASSALPSSEVTSEFWRSIWSAPIEHTEGEWMSAVRRECESLPQMEPVTISSEDISYAIRTSSNWKCPGPDGLHNFWLKKFHSSYSVLASQFQNALVSGTLPTFLTTGTTSLLYKSGCTADPKNYRPITCLSTTYKLLTSILAAKINKHITANNILAPAQNGCRSGSRGTKELLLIDMTICQQARRNRKNLCAAWIDYKKAYDSVPHTWLVGIMELYKIDPTLYSFLRSCMGQWITYLRYPGSTDISGSTEPIRIKRGIFQGDSLSPLWFCLALNPLSTLLENSGLGFRLRRGSTIISHLLYMDDLKLYASKRSDLVKLLQITESFSRCIGMEFGIDKCAVIHVERGRVVSSEHIQLTQTLFLRSLDVGENYKYLGMSEALGIDDGSMKQLVKDRFFGRLKKVLNSFLSGGNKVRAFNSWVMPLLVYTFGILRWTQTELDSLDRQVRKQLTTYRMHHPRSSVMRLYIPRKCGGRGFLNAKNLHNREVYNLRNYFLGISSGMHKDVVAVDKGLTPLSLGKENWRRPVVLDTHDRMTVWKSKELHGRFYRALMSSDVDQASSVSWLQYGDLFGETEGFVCAIMDEVIKTNNYRKFIMKDGTADVCRACHRPGESLRHIISGCCHLANGEYLHRHNQVARIIHQQLALRYGLVDIEVPYYRYNPAPVLENGNALLYWDRSIITDRHIPANKPDIVIVDRSVRRAIIVDITIPHDDNLVKAEKEKISKYLDLAHEITAMWSMDSTIIVPVVVSVNGLFAKSFDQHLKKLSLGCWIKGRLQKAVLLETARIVRRFLTLES

SEQ ID NO: 6459 - protein, 1088 aa, Pammene fasciana
MITRSKSRQQQASPPNARPPSSPASSVSSPSSSGDEFATAPDTSESSDECGPPPPPPRPPARRGRPPLPAHLGLAGHPAPPRAPAAGGIVRRMRWTQTMNENVMRAYYGATEGGTNLCAYRVRLLPLFQALEPTTNVTAQRLSDQVRVIQRDKRLDDSTLDRLRLEALSAHAASTSARDPPATAPDPMPAPDLASGAPRVDPSADEEEIATQSVSSTANEQLRRTLEEAITQYRSTNIPRPRLPRLPMNRRNLALMGALNDLLDPFLRTSKDLDDTHSIMYCGAIAACRVARVKFPDAERAPRTAGGVPAWQVRIERRINSFRTLIAKLICFRGGNNRPRVMRFVHQAFAGTDIEPRDYMANVTERIDFLKQKVYAWASRIRRYRERVDRFRQNCLFQSDQRKVYRRWEEADPRVSDVRLPDATAMSDFWRSIWSAPVEHTEGEWMSVVERECETIEPMGAITISPNDVSCAIRTAQNWKSPGPDGLHNFWLKWFRCSHSRLATQFQQALELGSLPPSLTTGVTFLLYKSGSTTEAKNYRPITCLPTLYKLLTSILRAKINAHMVANNILASAQNGCRVGSRGTKELLLIDMTICQRVRRNRGALSAAWIDYKKAYDSVPHSWLERILELYKIDAALRSFLGACMRQWTTVLRQPGGGDDPPGPQDFIRIERGIFQGDSLSPLWFCLALNPLSTLLKDSGLGCRLRREGEVISHLLYMDDLKLFAPNNRDLLELLKTTEVFSSSIKMEFGVDKCAVMHVQRGKVVNSTNLQLSETMTFRSISESETYKYLGMSQSLGIEDAGIKQALRERFFGRLTKVLNSLLSGGNKVRAFNAWVMPLLTYSFGILRWTQTELDALDRRVRQLLTTHRMLHPRSSVMRLYIPRKCGGRGFLNAKNLHNREVYNLRNYFLNNECGMHRDVVAIDKGLTPLSLANENWRKPVVLSTEDRKAVWKSKELHGRFYGALTGPDVDLLASVNWLRFGDLFGETEGFACAIADEVIMTNNYRRYILKDGTVDICRACRRPGESLRHIISGCSHLANGEYLHRHNLVARIIHQQLALLYGLVDHEVPYYKYTPAPVLENGRATLY

SEQ ID NO: 6460 - protein, 1210 aa, Pammene fasciana
MITRSKARAATTHARPPSPLASSSSPSTSSSSDDFETAPDTDESSDESGPPPPPPQPPARRGRPPLPARLGPTGHPVPPRAPAAGGIVRRMRWTCSMNENVMRAYYGATEGGTNLCAYRARILPLFQALEPTIDTTTQRLSDQVRVIQRLKRLDDATLDRLRLEALSARAASTSARDPPATSPDPMPAPDLASGAPRIDPSADEEYIASQSVSSTANEQLRRTLEEAITQYRSTNIPRPRLPRLPMNRRNLALMGALNDLLDPILRTSKDLDDTHSIMYCGAIAACRVARIKFPDAERAPRTAGGVPAWQVRIERRINSFRTLIAKLICFRGGNNRPRVMRFVYQAFAGTDIEPRDYMANITERIDFLRQKVYAWASRIRRYRERVDRFRQNRLFQSDQRKVYRRWEEADPRVSDVRLPDATAMTDFWRSIWSAPVEHTEGEWMNVVERECESIEPMGAITISPDDVSCAIRTSQNWKSPGPDGLHNFWLKWFRCSHSRLATQFQHALELGSLPPSLTTGVTFLLYKSGSTTEAKNYRPITCLPTLYKLLTSILRAKINAHMVANNILASAQNGCRVGSRGTKELLLIDMTICQRVRRNRGALSAAWIDYKKAYDSVPHSWLERILELYKVDAALRSFLGACMRQWTTVLRQPGGGDDPPGPQDFIRIERGIFQGDSLSPLWFCLALNPLSTLLKDSGLGCRLRREGEVISHLLYMDDLKLFGPNNRDLLELLKTTEVFSSSIKMEFGVDKCAVMHVERGKVVNSTNLQLSETMTFRSISESETYKYLGMSQSLGIEDVGIKQALKERFFGRLTKVLNSLLSGGNKVRAFNAWVMPLLTYSFGILRWTQTELDALDRRVRLLLTTHRMLHPRSSVMRLYIPRKCGGRGFLNAKNLHNREVYNLRNYFLNNECGMHRDVVTVDKNLTPLSLANENWRKPVVLSTEDRKAVWKSKELHGRFYGALTGPDVDLLASVNWLRFGDLFGETEGFACAIADEVIMTNNYRRYILKDGTVDICRACRRPGESLRHIISGCSHLANGEYLHRHNLVARIIHQQLALLYGLVAHEVPYYKYTPAPVLENGRATLYWDRSIITDRTIVANKPDIVVIDRPQRRAMLVDITVPCDVNLVKAEKDKSSKYLDLAHEVTAMWEVDSAIIVPIVVSANGLIAKSLDQHLERLSLRGCGWIKGQIQKAVILDTARIVRRFLSLRP

SEQ ID NO: 6461 - protein, 1144 aa, Cydia splendana
MNENVMRAYYGATEGGTDLCAYRVRMLPLFQALEPTIDVTAQRLSDQVRVIQRLKRLDDSTLDRLRLEALSARAASTSVRDPPATSPDPVPAPDQAPEAPRVDLCADEEEFAQSVSSTANEQLRRTLDEAITQYRSTPNTRPRLPRLPMNRHNLALMGALNALLEPYLRTSKDLDDTHAIMYCGAIAACRVARVKFPDSERAPRTAGGAPAWQIRIERRISSFRTLIAKLICFRGGNNRPRVMRFVNQAFAGTDIRPRDYMANITERIDFLKQKVYAWANRIRRYRERVDRFQQNRLFQSDQRKMYRKWEETNPRASDSQPPDATVMNDFWRSIWSVPVGHTEGSWMSVVERECESIEPMGAVTISPDDVSCAIRTAQNWKSPGPDGLHNFWLKWFRCSHSCLAAQFQQALELGSPPPSLTTGVTFLLYKSGSTTEAKNYRPITCLPTLYKLLTSILRAKINAHIVANNILASAQNGCRVGSRGTKELLLIDMTICQQIRRNRGALSAAWIDYKKAYDSVPHSWLERVLELYKVDTALRTFLSACMRQWTTVLRQPGGGDESPGPQDFIRIERGIFQGDSLSPLWFCLALNPLSTLLKDLELGCRLRRGGEVISHLLYMDDIKLFAPNSQDLVELLKTTEVFSNAINMEFGVDKCAVMHVQRRKVVNSTNLQLSETMSFRSISESETYKYLGMSQSLGIEEEGIRRSVKERFFSRLTKVLNSLLSGGNKVRAFNAWVMPLLTYSFGILRWTQTELDALDRRVRSLLTTHRMLHPRSSVMRLYIPRKCGGRGFLNAKDLHNREVYNLRNYFLNNECGMHRDVVAVDRNLTPLSLANENWRKPVVLSTAGRKAAWESKVLHGRFYKALTGPDVDLLASVNWLRFGDLFGETEGFACAIADEVMMTNNYRKYILKDGTVDICRACRRPGESLRHIISGCSHLANGEYLHRHNLVARIIHQQLALLYGLVDREVPYYKYSPAPVLENGRATLYWDRSIITDRTIVANKPDIVLIDRSQRRTVLVDVTIPHDENLVKAEKDKSSKYLDLAHEITAMWDVDSTIIVPIVVSANGLIAKSLDQHLERLSLGGWIKGQMQKAVILDTARIVRRFLTLRPGAYFEIWRPGPISFAAREVKEKKNNLNKKIHTD

SEQ ID NO: 6462 - protein, 1227 aa, Cydia splendana
MQTRSKTRAQLASPRNARPPPPSASSVSSQSSSGDEFATAPDTSESSDECGPPPPPSRPPARRGRPPLSARLGPAGHPAPPTAPAAGGVVRRMRWSQTINENVMRAYYGATEGGTNLCAYRVRMLPLFQALEPTIDVTAQRLSDQVRVIQRQKRLDDSTLDRLRLEALSARAASTSARDPPATSPDPVPAPDQAPGAPRVDLSADEEEFAQSVGSTANEQLRMTLDEAITRYRSTPDTRPRLPRLPMNRHNLALMGALNALLEPYLRTSKDLDDTHAIMYCGAIAACRVARVKFPDSERAPRTAGGAPAWQIRIERRISSFRTLIAKLICFRGGNNRPRVMRFVNQAFVGTDIRPRDYMANVTERIDFLKQKVYAWANRIRRYRERVDRFQQNRLFQSDQRKMYRKWEETNLRASDSRPPDATVMNDFWRSIWSVPVGHTEGSWMSVVERECESIEPMGAVTISPDDVSCAIRTAQNWKSPGPDGLHNFWLKWFRCSHSYLAAQFQQALELGSLPPSLTTGVTFLLYKSGSTTEAKNYRPITCLPTLYKLLTSILRAKINAHIVANNILASAQNGCRVGSRGTKELLLIDMTICQQIRWTKGALSAAWIDYKKAYDSVPHSWLGRVLELYKVDAALRAFLSACMGQWTTVLRQPGGGDDRPGPQDFIRIERGIFQGDSLSPLWFCLALNPLSTLLKDLGLGCRLRREGEVISHLLYMDDLKLFAPNTQGLLELLKTTEVFSSAINMEFGVDKCAVMHVQRGKVVNSTNLQLSETMSFRSISESETYKYLGMSQSLGIEDEGIRRSVKERFFSRLTKVLNSLLSGGNKVRAFNAWVMPLLTYSFGILRWTQTELDALDRRVRSLLTTHRMLHPRSSVMRLYIPRKCGGRGFLNAKDLHNREVYNLRNYFLNNECGMHRDVVAVDRNLTPLSLANENWRKPVVLSTADRKAAWESKALHGRFYKALTGPDVDLLASVNWLRFGDLFGETEGFACAIADEVMMTNNYRKYILKDGTVDICRACRRPGESLRHIISGCSHLANGEYLHRHNLVARIIHQQLALLYGLVDREVPYYKYLPAPVLENGRATLYWDRSIITDRTIVANKPDIVLIDRSQRRAVLADVTIPHDENLVKAEKDKSSKYLDLAHEITAMWDVDSTIIVPIVVSANGLIAKSLDQHLERLSLGGWIKGQMQKAVILDTARIVRRFLTNPHSAALTTGSLGQAPLPAAP

SEQ ID NO: 6463 - protein, 1223 aa, Notocelia uddmanniana
MITRSKARLEKKASNPQSARPPPSPASSSSASSSEEFATAPDTSSSSSSDECGPPPPPPRPPARRGRPPLPARLGPAGHPAPPTAPATGGIVRRMQWSQSINENCMRAYYGATDGGTNLSAYRDRMLPLFRALEPAISVSAQRLSDQVRVIQRLKRLDDATLDRLRLEALSARAASASARNPSATLPAPVPALDTAPGADPSADEGCANQSVSSQAYEQLRRALEEAITQYRSTPNSRPRLPRLPVNRRNLALMGALNDLLVPYLGASEDLIDTHSIMYCGAIAACRVARVKFPDAERAPRTAGSVPTWQVRIERRVDTYRTLIAKLICFRGGNSRPRVMRFVNQAFAGTGIRPRDYMTCVTERIDFLKQKVYAWASRIRRYRERLDRYQQNRLFQSDQRKVYRKWDGTDHRVSDGQRPGATAMVNFWRSIWSVPVEHNEGAWMGVVERECESIEPMGSVTISPADVSCVIRTAPNWKSPGPDGLHNFWLKWFRCSHARLAAQFQQALELGSLPPPLTTGVTSLLYKSGSTTEAKNYRPITCLPTLYKLLTSILRAKINTHIVANNILAPAQNECRVGSRGTKELLLIDMTICQRVRRNRGTLSTAWIDYKKAYDSVPHSWLRRILELYKVDAVLRSFLVACMGQWTTVLRQPGGGEGPSGPQDSIRIERGIFQGDSLSPLWFCLALNPLSTLLKDSGLGCQLRREGEVISHLLYMDDLKLFAPNKHDLLALLKTTEAFSSAIKMEFGVDKCAAMHVQRGKVVNSTNLQISETMDLRSLSEAQTYKYLGMSQSLGIEGGDIKRAVKERFFCRLTKVLNSFLSGGNRMRAFNAWVMPLLTYSFGILRWTQTELDFLDRRVRVLLTAHRMLHPRSSVMRLYIPRNFGGRGFLNAKDLHNREVCSLRDYFLNSECGMHRDVVAVDASFTPLSMANENWRRLKVLSTEDRRAVWKSKELHGRFYKALTGPDVDLLASVNWLRFGDLFAETEGFVCAIADEVIMTNNYRKYILKDGTVDICRACRRPGESLRHIISGCGHLANGEYLHRHNLVAKIIHQQLALLYGLVNFEVPYYKYTPAPVLENGRATLYWDRSVITDRTIIANKPDIVLTDRLKRQAVLVDITIPHDENLVKAEKDKASKYLDLAHEITAMWDVDSTIIVPIVVSANGLIAKSLDQHLKRLSLDGWVKGQIQKAVRPGHGANSQEVPLSVALTTGSLGPASLPAAP

SEQ ID NO: 6464 - protein, 1240 aa, Pammene fasciana
MITRSKARQTQADTTNARPPPSPTPSDSSPSSSSDEAFATAADTSESSDECGLPSPPPRPPARRGRPPLPARLGLAGHPVPPKAPAAGGIVRRMRWTQKMNENCMRAYYGATEGGTNLCAYRVRLLPLFQALEPTTNVTAQRLSDQVRVIQRDKRLDDSTLDRLRLEVLSARAASTSARDPPATSPDPMPAPDLASGAPRVDPSANEEEIATQTVSSTANEQLRRTLEEAITQYRSTNIPRPRLPRLPMNRRNLALMGALNDLLDPFLRTSKDLDDTHSIMYCGAIAACRVARVKFPDAERAPRTAGGVPAWQVRIERRINSFRTLIAKLICFRGGNDRPRVMRFVHQAFAGTDIEPCDYMANITERIDFLKQKVYAWASRIRRYRERVDRFRQNRLFQSDQRKVYRKWEEADPRVSDVRLPDATAMTDFWRSIWSAPVEHTEGEWMSVVERECESIEPMGAITISPDDVSCAIRTAQNWKSPGPDGLHNFWLKWFRCSHSRLATQFQQALELGSLPPSLTTGVTFLLYKSGSTTEAKNYRPITCLPTLYKLLTSILRAKINAHMVANNILASAQNGCRVGSRGTKEHLLIDMTICQRVRRNRGALSAAWIDYKKAYDSVPHSWLERILELYKVDAALRSFLGACMRQWTTVLRQPEGGDDPPGPQDFIRIERGIFQGDSLSPLWFCLALNPLSTLLKDSGLGCRLRREGEVISHLLYMDDLKLFAPNNRDLLELLKTTEVFSSSIKMEFGVDKCAVMHVQRGKVVNSTNLQLSETMTFRSLSESETYKYLGMSQSLGIEDAGIKRALRERFFGRLTKVLNSLLSGGNKVRAFNAWVMPLLTYSFGILRWTQTELDALDRRVRLLLTTHRMLHPRSSVMRLYIPRKCGGRGFLNAKNLHNREVYNLRNYFLNNECGMHRDVVAIDKGLTPLSLANENWRKPVVLSTEDRKAVWKSKELHGRFYEALTGPDVDLLASVNWLRFGDLFGETEGFACAIADEVIMTNNYRRYILKDGTVDICRACRHPGESLRHIISGCSHLANGEYLHRHNLVARIIHQQLALLYGLVDHEVPYYKYTPAPVLENGRATLYWDRSIITDRTIVANKPDIVVIDRPQRRAMLVDITVPCDVNLVKAEKDKSSKYLDLAHEVTAMWEVDSAIIVPIVISANGLIAKSLDQHLERLSLRGCGWIKGQIQKAVILDTARIVRSTEINQDRRREFVNLYGDRACNILRRYNDVTSVI

SEQ ID NO: 6465 - protein, 1067 aa, Crocallis elinguaria
MITRSRNKAGTASARQPPPPASSSPSSSSGVEYGTPLDTSASSDEDGPPSPPPPPPPARRGRPPLPARLGPVGHSVPRAAPATGGIVRRMRWTSDMNENCMRAYYGATEGGTNMSAYRDRILPLFQTLEPSVAVSTQRLSDQVRAIQRLKLLDESVLDRLRLEALPIRATSTSTRDLSVAPPVPAPLPAPSSVATRIDPVVDEDDCANISVSTQVNEQLRRALEDAILEYQYTPDSRPRLPRLPTNRRNLALMGALNVLLAPYLRASENLFDTHSIMYCGAIAVCRVARVKFPDADRAPRTAGNAPAWQVRIERRINTFRTLIAKLVCFSRGNIRPRVMRFVNQAFAGTGIRPQNYMAGVTERIDFLKQKIYAWVNRIRRYRERVDRYHQNRLFESDQRKVYRNWEGTDQRVSDGQMPDTNAMINFWRGIWSVPVEHTEGDWMRTVEQSCESIETMGSVTIDPIDVSCAIRTAQNWKSPGPDGLHNFWIKWIRCSHECLAVQFQEALDLGSLPCFLTTGVTSLLHKSGSTTEAKNYRPITCLPTLYKLLTSILRAKINSHVVANNILAPAQNGCRVGSRGTKELLLIDTAICQQVRRNRGALSTAWIDYKKAYDSVPHSWLERILELYKIDTTLRSFLSTCMRQWTTVLRQPGSGNSPSGPENFIKIERGIFQGDSLSPLWFCLALNPLSTLLRDSRLGCKLRREGEIISHLLYMDDLKLLAPKSPDLMKLLKITEIFSSAIKMEFGVDKCAVMHVQRGKVVNSDNLQLSETMTLRSLSEAETYRYLGMSQSLGIAVGDIKQLVKERFFCRLTKVLNSLLSGGNKARAFNGWVMPLLIYSFGILKWTQTELDSLDRRVRQLLTYHRMLHPRSSVMRLYIPRKWGGRGFLNAKTLHNREVCSLREYFLNNECGMHRDVVAVDRNLTPLSLANENWRKPVVMTTEDRKDVWKGKELHGRFYRALTGSDVDLLASVNWLRFGDLFGETEGFVCAIMDEVIKTNNYRKYIMKDGTVDICRACRRPGESLRHIISGCSHLANGEYLHRHNLVARIIHQQIALQYGLVESEVP

SEQ ID NO: 6466 - protein, 1207 aa, Notocelia uddmanniana
MITRQRSRAVPQCARSPSPAPSSSSPSSSGDEFATAPDTSELSSDERGPSPPPPRPPARRGRRPLPARLGPAGHPAPSTAPATGGAVRRMRWTQEINENCMRAYFGATEGGTNLSAYRVRMLPLFQALEPTISVTAQRLSDQVRVIQRNKRLDDSTLDRLRLESLSARLASTSARDLPAATPALVPTFDTAPGVLRVDPNADEDYATQSVSTQAHEQLRRALEDAIRRYRSTPNSRPRLPRLPVNRRNQALMSALNDLLDPYLRASDDLIDTHSIMYYGAIAACRVARVKFPDADRAPLTVGSIPAWQVRIERRVNTFRTLIAKLICFRGGNSRPRVMRFVNQAFAGSGVRPRDYLACVTERIDFLKQKVHAWASRIRRYRERVDRYQQNRLFQSDQRKVYRKWDGTDHNVCDGQRPDATAMVSFWRSIWSVPVEHTEGAWMGVVKRECESIEPMGSVTISPEDVSCAIRTAPNWKSPGPDGLHNFWLKWFRCSHARLAAQFQQALELGSLPRPLTTGVTSLLYKSGSTTEAKNYRPITCLPTLYKLLTSILRAKINTHIVANNILAPAQNGCRVGSRGTKELLLIDMTICQRVRRNKGTLSAAWIDYKKAYDSVPHSWLRRVLELYKVDAALRSFLAACMEQWTTVLRQSGGGEGLSGAQDFIRIERGIFQGDSLSPLWFCLALNPLSTLLKDSGLGCQLRRGGEVISHLLYMDDLKLFAPNRQDLLELLKTTEVFSSAIKMEFGVDKCAVMHVQRGKVVNSTNLQLSETMSLRSLSEAETYKYLGMSQSLGIEGEGIKRAVKERFFCRLTKVLNSFLSGGNKVRAFNAWVMPLLTYSFGILRWTQTELDALDRRVRVLLTAHRMLHPRSSVMRLYIPRKCGGRGFLNAKDLHNREVCSLRDYFLNSECGMHRDVVAVDASFTPLSMANENWRRFKVLSTEDRKAEWKSRELHGRFYKALTGPDVPDLLASVNWLRFGDLFGETEGFVCAIADEVIMTNNYRKYILKDGTVDICRACRRPGESLRHIISGCGHLANGEYLHRHNLVARIIHQQLALSYGLVNSEVPYYKYLPAPVLENGRATLYWDRSIITDRTIVANKPDIVLIDRSKRQAVLVDITIPHDENLVKAEKDKVSKYLDLAHEVTAMWDVDSTIIVPIVVSANGLIAKSLDQHLKRLSLDGWVKGQIQKAVLLDTARIVRRFLSLSP

SEQ ID NO: 6467 - protein, 1085 aa, Crocallis elinguaria
MITRSRNKAGTASARQPPPPASSSPSSSSGDEYGTPLDTSASSDEDGPPSPPPPPPPARRGRPPLPARLGPVGHSVPRAAPATGGIVRRMRWTSVMNENCMRAYYGATEGGTNMSAYRDRMLPLFQTLEPSVAVSTQRLSDQVRAIQRLKLLDVSVLDRLRLEALPIRATSASTRDLSVAPPVPAPLPAPSSVATRIDPVVDEDDCANISVSTQVNEQLRRALEDAILEYQYTPDSRPRLPRLPTNRRNLALMGALNVLLAPYLRASENLFDTHSIMYCGAIAVCRVARVKFPDADRAPRTAGSAPAWQVRIERRINTFRTLIAKLVCFSRGNNRPRVMRFVNQAFAGTGIRPQNYMAGVTERIDFLKQKIYAWVNRIRRYRERVDRYHQNRLFESDQRKVYRNWEGTDQRVSDGQMPDTNAMINFWRGIWSVPVEHTEGDWMRTVEQSCESIETMGSVTIDPIDVSCAIRTAQNWKSPGPDGLHNFWIKWIRCSHECLAVQFQEALELGSLPCFLTTGVTSLLHKSGSTTEAKNYRPITCLPTLYKLLTSILRAKINSHVVANNILAPAQNGCRVGSRGTKELLLIDTAICQQVRRNKGALSTAWIDYKKVYDSVPHSWLERILELYKIDTTLRSFLSTCMRQWTTVLRQPGSGNSPSGPENFIKIERGIFQGDSLSPLWFCLALNPLSTLLRDSRLGCKLRREGEIISHLLYMDDLKLLAPKSPDLMKLLKITEIFSSAIKMEFGVDKCAVMHVQRGKVVNSDNLQLSETMTLRSLSEAETYRYLGMSQSLGIAVGDIKQSVKERFFCRLTKVLNSLLSGGNKARAFNGWVMPLLIYSFGILKWTQTELDSLDRRVRQLLTYHRMLHPRSSVMRLYIPRKWGGRGFLNAKTLHNREVCSLREYFLNNECGMHRDVVAVDRNLTPLSLANENWRKPVVMTTEDRKDVWKGKELHGRFYRALTGSDVDLLASVNWLRFGDLFGETEGFVCAIMDEVIKTNNYRKYIMKDGTVDICRACRRPGESLRHIISGCSHLANGEYLHRHNLVARIIHQQIALQYGLVESEVPYYKYAPAPVLENGRALLY

SEQ ID NO: 6468 - protein, 1207 aa, Crocallis elinguaria
MITRSRNKAGTASARQSPPPTSSSPSSSSGVEYGTPLDTSASSDEDGPPSPPPPPPPARRGRPPLPARLGPAGHSVPRAAPATGGIVRRMRWTSDMNENCMRAYYGATEGGTNMSAYRDRMLPLFQTLEPSVAVSAQRLSDQVRAIQRLKLLDESVLDRLRLEALPIRATSASTRDLSVAPPVLAPLPAPSSVATRIDPVVDEDDCANISVSTQVNEQLRRALEDAILDYQYTPDSRPRLPRLPTNRRNLALMGALNVLLAPYLRASENLFDTHSIMYCGAIAVCRVARVKFPDADRAPRTAESAPAWQVRIERRINTFRTLIAKLVCFSRGNNRPRVMRFVNQAFAGTGIRPQNYMASVTERIDFLKQKIYAWVNRIRRYRERVDKYHQNRLFESDQRKVYRNWEGTDQRVSDGQLPDTNAMINFWRGIWSVPVEHTEGDWMRTVEQSCESIETMGSVTIDPIDVSCAIRTAQNWKSPGPDGLHNFWIKWIRCSHECLAVQFQEALELGSLPCFLTTGVTSLLHKSGSTTEAKNYRPITCLPTLYKLLTSILRVKINSHVVANNILAPAQNGCRVGSRGTKELLLIDTAICQRVRRNKGALSAAWIDYKKAYDSVPHSWLERILELYKIDATLRSFLSMCMRQWTTVLRQPGSGNSPFGPENFIKIERGIFQGDSLSPLWFCLALNPLSTLLRDSRLGCQLRREGEIISHLLYMDDLKLFAPKRPDLMELLKITEIFSSAIKMEFGVDKCAVMHVQRGKVVNSDNLQLSETMTLRSLTEAETYKYLGMSQSLGIAVGDIKQSVKERFFCRLTKVLNSLLSGGNKARAFNGWVMPLLIYSFGILKWTQTELDSLDRRVRQLLTYHRMLHPRSSVMRLYIPRKWGGRGFLNAKTLHNREVCSLREYFLNNECGMHRDVVAVDRNLTPLSLANENWRKPVVMTTEDRKDVWKGKELHGRFYRALTGSDVDLLASVNWLRFGDLFGETEGFVCAIMDEVIKTNNYRKYIMKDGTVDICRACRRPGESLRHIISGCSHLANGEYLHRHNLVARIIHQQIALQYGLVESEVPYYKYAPAPVLENGRALLYWDRSIITDRTIVANKPDIVLVDRSQRRAVLVDITVPHDENLVKAEKDKLSKYLDLAHEVTAMWNVDSTIIVPIVVSANGLVAKSLDQHLKRLSLDGWIKGRMQKAVLLDTARIVRRFLTLQP

SEQ ID NO: 6469 - protein, 1096 aa, Erannis defoliaria
MITRSKNKAKTSTAETTNARPPPLPAPSSPSASSGDDVFLTPRESSVSSSDSDVSGPRTPAPPPPARRGRPPLPARLGPAGQPASRPALAAGGVVRRMRWSQTNNENCMRAYYGATEGGTNLTAYRVRMLSLFQALEPTVTVSAQRLSDQVRAIQRLNLLDQSLLDRLHLEAQSARPTPASTRDLDVASSAPTLTSVPTSAATLATSTDPVLDEGDCTGMSVSTQVSEQLRRALEDAIGQYRFTLNSRPRLPRLPTHRRNLALMGALNALLAPYLRASEDLTDTHWILYCGAIAACRVARVRFPDTNRAPRTAGDVPAWQVRIERRISTFRTLIAKLICFSRGNNRPRVMRFVTQAFAETGIRPQQYMASVTERIDYLKQKVYAWASRIRRYRERVDRYRQNRLFQSDQRKVYRNWEGNEQRVSDGHLPDASAMTNFWRSIWSVPVEHTEGDWMRVVERECEFIEPMGSILIDPVDVSCAVRTAQNWKSPGPDGLHNFWIKWFRCSHDRLATQFQEALELGSLPSFMTTGVTFQLHKSGSTTEPKNYRPITCLPTIYKLLTSILSTKINTHIVANNVLAPAQNGCRVGSRGTKELLLIDMAISQQVRRNKGALSAAWIDYKKAYDSVPHSWLERILELYKIDKTLKSFLSACMRQWTTVLRQPGGGNDSSDPQDLIRIERGIFQGDSLSPSWFCLALNPLSTLLKDSGLGYRLRRGGEVISHLLYMDDLKLFAPNHQDLLELLKTTQVFSSPIRMEFGVDKCAVMRVQRGKVVNSPDLQLSEIMTLRSLSEAETYKYLGMSESLGISVVDIKKSVKERFFCRLTKVLNSLLSGGNKARAFNGWVMPLLIYSFGILRWTQTELDALDRRVRQLLTAHRMLHPRSSVMRLYIPRKWGGRGFLNAKNLHNREVCSLRDYFLNNECGMHRDVVTVDKGLTPLSLANENWRRPSVLSTDDRKDVWKSKELHGWFYRALSGPDVDLLASVNWLRFGDLFGETEGFACAIADEVIKTNNYRKYIMKDGTVDICRACHRPGESLRHIISGCSHLANGEYLHRHNQVARIIHQQLALQYGLVESEVPYYKYAPAPVLENGRALLY

SEQ ID NO: 6470 - protein, 1213 aa, Erannis defoliaria
MITRSKKRNAAVQHARPTPPPVPSSSPSSSSPSEEEFHTCGTSSSSEDVSGPRTLTPPIPVRRGRPPLPARLGPAGQPASRPALAAGGVVRRMRWSQTHNENCMRAYYGATEGGTNLTAYRVRMLSLFQTLEPTVTVSAQRISDQVRAIQRLNLLDQPLLDRLRLEVQSARPTPASTRDLDVASSAPTLASVPTSAATLATSADPVLDEGDCTGMSVSTQVSEQLRRALEDAIGQYRFALNSRPRLPRLPTHRRNLALMGALNALLAPYLRASEDLTDTHSILYCGAIAACRVARVKFPDTNRAPRPAGDVPAWQLRIERRISTFRTLIAKLICFSRGNNRPRVMRFVTQAFAGTGIRPQQYMASVTERIDYLKQKVYAWANRIRRYRERVDRYWQNRLFQSDQRKVYRNWEGTEQRVSDGQLPDASAMTNFWRGIWSVPVEHTEGDWMRVVERECESIEPMGSILIDPVDVSCAIRTAQNWKSPGPDGLHNFWIKWFRCSHDRLATQFQEALELGSLPSFMTTGVTFLLHKSGSTTEPKNYRPITCLPTIYKLLTSILSTKINAHIVANNVLAPAQNGCRVGSRGTKELLLIDMAISQQVRRNKGALSAAWIDYKKAYDSVPHSWLERILELYQIDTTLKSFLGACMRQWTTVLRQPGGGNGSSDSQDLIRIERGIFQGDSLSPSWFCLALNPLSTLLKDSGLGYRLRRGGEVISHLLYMDDLKLFAPKHQDLLELLKTTQVFSSAIRMEFGVDKCAVMRVQRGKVVNSPDLQLSEIMTLRSLSEAETYKYLGMSESLGISVVDIKKSVKERFFCRLTKVLNSLLSGGNKARAFNGWVMPLLIYSFGILRWTQTELDALDRRVRQLLTGHRMLHPRSSVMRLYIPRKWGGRGFLNAKNLHNREVCSLRDYFVNNECGMHRDVVTVDKGLTPLSLANENWRTPSVLSTDDRKKVWKSKELHGRFYRVLSGPDVDLLASVNWLRFGDLFGETEGFACAIADEVIKTNNYRKYIMKDGTVDICRACHRPGESLRHIISGCSHLANGEYLHRHNQVARIIHQQLALQYGLVESEVPYYKYAPAPVLENGRALLYWDRSIITDRTIVANKPDIVMVDRSQRRAVLVDVTIPHDENLVKAEKDKLSKYLDLAFEITAMWDVDSTIIVPIVVSANGLIAKSLDQYLKRLSLDGWVKGQIQKAVVLDTARIVRRFLTLQP

SEQ ID NO: 6471 - protein, 1130 aa, Agriopis aurantiaria
MITRSRTKQADTKSARLPSPPASSSSPSTSSGEDEYHTTREASGSSSDTSGPGTPPPPPPARRGRPPLPARLGLVGHSATRPAPATGGVVRRMRWSTIMNEDCMRAYYRATEGGTNLSAYCARMLPLFQALQPTITVSAQRLSDQVRAIHRCKLLDDSVLDRLRQEELRARPIPVSTRDLPVASSAPTLASVPASVVTLAASADPVVDEGDLASGVSDQVREQLRGALEDAISQYRFTPDSRPRLPRLSTHRRNLALMGALNALLAPYLRASEDLVDTHSILYCGAIAACRVARVKFPDTNRAPRTAGGVPAWQVRIERRISTFRTLIAKLVCFRRGNNRPRVMRFVTQAFAGTDIRPQQYLANVTERIDYLKQKVYAWANRIRRYRERVDRYWQNRLFQSDQRKVYRGWEETDQRVSDGQLPDASAMINFWRGIWSVPVEHTEGDWMRVVERECESIEPMESILIDSIDVSCAIRTAQNWKSPGPDGLHNFWIKWIRCSHDRLATQFQEALELGSLPSFMTTGVTFLLHKSGSTTEAKNYRPITCLPTIYKLLTSILRNKINAHIVANNVLAHAQNGCRVGSRGTKELLLIDTAISQQVRRNKGALSAAWIDYKKAYDSVPHSWLERVLELYKIDTTLKSFLGACMRQWTTVLRQPGGGDGAFDPQDLLRIERGIFQGDSFSPLWFCLALNPLSTLLRDSGLGYRLRRDGQVISHLLYMDDLKLFTPKRQDLVELLKITEVFSSAIRMEFGVDKCAVMHVQRGKVVNSPNLQLSEVMTLRSLSEAETYKYLGMSESLGISVENIKKSVKERFFCRLTKVLNSLLSGGNKVRAFNGWVMPLLIYSFGILRWTQTELDALDRRVRQLLTSHRMLHPRSSVMRLYIPRKWGGRGFLNAKNLHNREVCSLRDFFRNSESGMHRDVVAVDRALTALSLANENWRKPSVLSIEDRRDVWKGKELHGRFYRALTGPDVDLLASVNWLRFGDLFGETEGFACAIADEVIKTNNYRKYIMKDGTVDICRACHRPGESLRHIISGCSHLANGEYLHRHNLVARIIHQQLALRYSLVESEVPYYKYAPAPVLENGRALLYWDRSSRTGLLSPISLISCWSTDPSAGQCSSTSPSHMTRTS

SEQ ID NO: 6472 - protein, 955 aa, Agriopis aurantiaria
MGALNALLAPYLRASEDLVDTHSILYCGAIAACRVARVKFPDTNRAPRTAGGVPAWQVRIERRISTFRTLIAKLVCFRRRNNRPRVMRFVTQAFAGTDIRPQHYLANVTERIDYLKQKVYAWANRIRRYRERVDRYWQNHLFQSDQRKVYRGWEETDQRVSDGQLPDASAMINFWRGIWSMPVEHTEGDWMRVVERECESIEPMGSILIDSIDVSCAIRTAQNWKSPGPDGLHNFWIKWIRCSHDRLATQFQEALELGSLPSFMTTGVTFLLHKSGSTTEAKNYRPITCLPTIYKLLTSILRNKINAHIVANNVLAHAQNGCRVGSRGTKELLLIDTAISQQVRRNKGALSAAWIDYKKAYDSVPHSWLERVLELYKIDTTLKSFLGACMRQWTTVLRQPGGGDGAFGPQDLLRIERGIFQGDSFSPLWFCLALNPLSTLLRDSGLGYRLRRDGQVISHLLYMDDLKLFTPKRQDLVELLKITEVFSSAIRMEFGVDKCAVMHVQRGKVVNSPNLQLSEVMTLRSLSEAETYKYLGMSESLGIAVENIKKSVKERFFCRLTKVLNSLLSGGNKVRAFNGWVMPLLIYSFGILRWTQTELDALDRRVRQLLTSHRMLHPRSSVMRLYIPRKWGGRGFLNAKNLHNREVCSLRDFFRNSESGMHRDVVAVDRGLTALSLANENWRKPSVLSIEDRRDVWKGKELHGRFYRALTGPDVDLLASVNWLRFGDLFGETEGFACAIADEVIKTNNYRKYIMKDGTVDICRACHRPGESLRHIISGCSHLANGEYLHRHNLVARIIHQQLALRYSLVESEVPYYKYAPAPVLENGRALLYWDRSIITDRTIVANKPDIVLVDRSQRRAVLVDITIPHDENLVKAEKDKLSKYLDLAHEVTAMWDVDSTIIVPIVISVNGLIAKSLDQHLKRLSLDGWVKGQMQKAVILDTARIVRRFLTLQP

SEQ ID NO: 6473 - protein, 1087 aa, Hedya salicella
MQTRSKTRLADTSARPPPSPASASSAASPSSDEYATAPDESSESSDERGPPPPPPRPPARRGRPPLPARLGPAGHSAPPTAPATGGIVRRMRWSQANNENVMRAYYGATEGGTHLSAYRDRMLLLFETFEPAIAASAQRLSDQVRAIQRRKLLDDATLDRLRLEVLAARAASTSSRNPPATSPVPAPALDLMPGAPRVDPDSDEEHCASSVSTQANEQLRRTLEETIERYRFAPDSRPRLPRLPANKRNLALVGALNALLDPYLRASEDLADTHSIMYYGAIAACRVARVKFPDADQAPRTAGGVPAWQVRIERRISTFRTLIAKLICFRGGNNRPRVMRYVAQAFAGTDVSSCDYMACVTERIDFLKQKVYAWASRIRRYRERVDRFQQNRLFQSDQRKVYRKWEGTDQRVTDGRLPDPTAMSNFWRSIWSVPVEHTEGEWMNVVERECEPIEAMGAVTISPDDVSCAARTTQNWKSPGPDGLHNFWVKWFRCSHERLATQFQQALELGSLPSFLTTGVTFLLYKSGSTTEAKNYRPITCLPKLYKLLTSILRAKINTHIVANNVLAFSQNGCRVGSRGTKELLLIDTTICQQVRRSRGSLSAAWIDYKKAYDSVPHSWLERILELYKVDTALRSFLGACMRQWTTVLCQPGGRDARPAPQDFIRIKRGIFQGDSLSPLWFCLALNPLSTLLKDSGLGCRLRRGGEIISHLMYMDDLKLFAPKRPELVELLKVTDTFSSAIKMEFGVDKCTVMHVQRGKVVNSTNLELSETMSLRSLSETETYKYLGMSQALSIADGDIRQAVKERFFCRLTKVLNSLLSGGNKARAFNAWVMPLLTYSFGILRWTQTELDALDRRVRMLLTTHRMLHPRSSVMRLYIPRKCGGRGFLNAKDLHNREVCSLREYFLNNECGIHRDVVAVDKGLTPLSLANENWRRPTVLSTVDRKDVWKSKELHGRFYKALTGPDVDLLASVNWLRFGDLFGETEGFSCAIADEVIMTNNYRRYILKDGTVDICRACRRPGESLRHIMSGCSHLANGEYLHRHNQVARIIHQQLAVKYDLVGSEVPYYKYVPMPVLENGRATLYWD

SEQ ID NO: 6474 - protein, 1129 aa, Hedya salicella
MRWSQANNENVMRAYYGATEGGTHLSAYRDRMLLLFQTFEPAIAASAQRLSDQVRAIQRRKLLDDATLDRLRLEVLAARAASTSSRNPPATSPVPAPALDLMPGAPRVDPDSDEEHCASSVSTQANEQLRRTLEETIERYRFAPDSRPRLPRLPANKRNLALVGALNALLDPYLRASEDLADTHSIMYCGAIAACRVARVKFPDADRAPRTAGGVPAWQVRIERRISTFRTLIAKLICFRGGNNRPRVMRYVAQAFAGTDVSSCDYMACVTERIDFLKQKVYAWASRIRRYRERVDRFQQNRLFQSDQRKVYRKWEGTDQRVTDRRLPDPTAMSNFWRSIWSVPVEHTEGEWMNVVERECEPIEAMGAVTISPDDVSCAARTTQNWKSPGPDGLHNFWVKWFRCSHERLATQFQQALELGSLPSFLTTGVTFLLYKSGSTTEAKNYRPITCLPTLYKLLTSILRAKINTHIVANNVLAFSQNGCRVGSRGTKELLLIDTTICQQVRRSRGSLSAAWIDYKKAYDSVPHSWLERILELYKVDTALRSFLGTCMRQWTTILCQPGGRDARPAPQDFIRIKRGIFQGDSLSPLWFCLALNPLSTLLKDSGLGCRLQRAGEIISHLMYMDDLKLFAPKRPELVELLKVTDTFSSAIKMEFGVDKCAVMHVQRGKVVNSTNLELSETMSLRSLSETETYKYLGMSQALSIADGDIRQAVKERFFCRLTKVLNSLLSGGNKARAFNAWVMPLLTYSFGILRWTQTELDALDRRVRMLLTTHRMLHPRSSVMRLYIPRKCGGRGFLNAKDLHNREVLREYFLNNECGIHRDVVAVDKGLTPLSLANENWRRPTVLSTVDRKDVWKSKELHGRFYKALTGPDVDLLASVNWLRFGDLFGETEGFSCAIADEVIMTNNYRRYILKDGTVDICRACRRPGESLRHIMSGCSHLANGEYLHRHNQVARIIHQQLAVKYDLVGSEVPYYKYVPMPVLENGRATLYWDRSILTDRTIVANKPDIVLVDRSKRRAMLVDITIPHDENLVKAEKDKLSKYLDLAHEVTAMWDVDSTIIVPIVVSVNGLIAKSLDEHLKRLARWLDQGSDTEGSNPGHGPHCQEVPLCAALTTGSLSPAPLPAAP

SEQ ID NO: 6475 - protein, 1223 aa, Apotomis turbidana
MITRSQRKKAETSHARPPPSPAPSSSTPSSSGDEFATAPDTSESSDDERGPPPPPPRPPARRGRPPLPARLGPTGQSAPSTAPATGGVVRRMRWSQAMNENVMRAYYGATEGGTNLSAYRDRMLPLFLSFDPTITVSAQRLSDQVRFIQRRKLLDDATLDRLRLEVLAARTSSTPARNPPATSPVSAPAPYLVPEVPRTDRDADEEDCASSVSTQANEQLRRALEEAIRCYRSAPDSRPRLPRLPMHKRNLALMGALAALLDPYLRASEDLADTHSIMYCGAIAACRVARVRFPDTDRAPRTAGGVPAWQVRIERRISSFRTLIAKLICFRGGNNRPRVMRYVTQAFAGTGIRPCDYMACVTERIDYLKQKVYAWANRIRRYRERVDRFQQNRLFQSDQRKVYRKWEGTDQCVTDGQLPDPTAMINFWRSIWSVPVEHTEGEWMNVVRRECEPIENMGAVTISPDDVSCAVRTTQNWKSPGPDGLHNFWIKWFRSSHERLATQFQDALELGSLPSFMTTGATFLLYKSGSTTEAKNYRPITCLPTLYKLLTSILRTKINTHIVANNVLAFSQNGCRVGSRGTKELLLIDTTICQQVRRNRGSLSATWIDYKKAYDSVPHSWLERILELYKIDTALRSLLSSCMRQWTTVLRQPGVGDGPPGPQDLIRIERGIFQGDSLSPLWFCLALNPLSTLLKDSGLGCRLRRGGEVISHLLYMDDLKLYAPKRQDLVELLEVTETFSSAIKMEFGVDKCAVMHVQRGKVVNSANLQLSETMSLRSISEVETYKYLGMSQSLGIADGDIRQALKERFFCRLTKVLNSLLSGGNKARAFNAWVMPLLTYSFGILRWTQTELDALDTRVRQLLTTHRMRHPRSSVMRMYIPRKCGGRGFLNAKDLHNREVCSLREYFLNNECGIHRDVVAVDKGLTSLSLANENWRRPKVLSTDDRKAVWKSKELHGRFYKALTGPDVDLLASVNWLRFGDLFGETEGFVCAIADEVMMTNNYRRYILKDGTVDICRACRRPGESLRHIISGCSHLANGEYLHRHNQVARIIHQQLALRYGLVGSEVPYYKYAPMPVLENGRATLYWDRSIITDRTIVANKPDIVLVDRSKRQAVLVDITIPHDENLVKAEKDKLSKYLDLAHEVTAIWDVDSTIIVPIVVSANGLIAKSLDKHLKRLSLDGWIKGQIQKAVLVDTARIFRRFLSLQPDATGSLGPAPLPAAP

SEQ ID NO: 6476 - protein, 1062 aa, Junonia neildi
MKWSQKMNESVMRAYYGATGGGINLTAYRSTMLSMFQALEPTVTVTAQRLSDQVRAIQRCHLLDESVLERLRSNLQQINAVSDSHSVQQPRYEQIEATDNISNSWPPNSVDLSVSNQDDEHMRRTLEDAILKYRPMPFNLRPRIPRLPIHKRNLTIVGVIDKMLQQYLNNSQDLYDTCSILYCGAVAVCNLALLKFKTNKIIPISNTVPAWQARIENRISSTRTIIGKLISFKSGNNRPRIMRYVHQAFAGTNIRSSEYMDSVTERIDFFKQKIFAWAKRIRRYKKRVSRYRQNRMFQSDQRKVYRDWEQCNDTVASSALPPSEVTSEFWRSIWSAPIEHTEGEWMSAVRKECESLPQMEPVTISPEDISCAIRTSSNWKCPGPDGLHNFWLKNFHSSHSVLASQFQNALVSGTLPTFLTTGTTSLLYKSGCTADPKNYRPITCLSTTYKLLTSILAAKINKHITANNILAPAQNGCRSGSRGTKELLLIDMTICQQARRNRKNLCAAWIDYKKAYDSVPHTWLVGIMELYKIDPTLYSFLRSCMGQWITYLRHPGSTDISGSTEPIRIKRGIFQGDSLSPLWFCLALNPLSTLLENSGLGFRLRRGSTIISHLLYMDDLKLYASKKSDLVKLLQITETFSSCIGMEFGIDKCAVIHVERGRVVSSEHIQLTQTLFLRSLDVGENYKYLGMSEALGIDDGSMKQLVKERFFGRLKKVLNSFLSGGNKVRAFNSWVMPLLVYTFGILRWTQTELDSLDRQVRKQLTTYRMHHPRSSVMRLYIPRKCGGRGFLNAKNLHNREVYNLRNYFLGISGGMHKDVVAVDKGLTPLSLGKENWRRPIVLDTHDRMTVWKGKELHGRFYRALMSSDVDQASSVSWLQYGDLFGETEGFVCAIMDEVIKTNNYRKFIMKDGTADVCRACHRPGESLRHIISGCCHLANGEYLHRHNQVARIIHQQLALRYGLVDIEVPYYRYNPAPVLENGNALLYWDRSIITDRHIPANKPDIVIVDRSARLAIIVDITIPHDDNLVKAEKDFIHNMTIRKSKMADQYGVTDTKWRYCRQ

SEQ ID NO: 6477 - protein, 902 aa, Hedya salicella
MNRRNLALVGALNALLDPYLRASEDLADTHSIMYCGAIAACRVARVKFPDADRTPRTAGGVPAWQVRIERRISTFRTLIAKLICFRGGNKRARDMRYVAQAFAGTDVRPCDYMACVTERIDFLKQKVYAWASRIRRYRERVDRFQQNRLFQSDQRKVYRKWEGTEQRVTDGRLPDPTTMSNFWRSIWSVPVEHTQGEWMIVVERECEPIETMGAVTISPDDMSCAARTTQNWKNPGPDVLHNFWVKWFRCSHERLATQFQQALELGSLPPFLTTGVIFLLYKSGSTTEAKNYRPITCLPTLYKLLTSILRAKINTHIVVNNVLAFSQNGCRVGSHGTKELLLIDTTICQQVRRNRGTLSAAWIDYKKAYDSVPHSWLGRIFELYKIDTVLKSSIGSCMSQWTTVLRQPGGRDGPPNPQDFIKIKRGIFQGDTLSPLWFCLALNPLSTLLKDSGLGCRLRRGGEIISHLQYMDDLKLFAPKRPKLVELLKVTATFSSAIKMEFGVDKCAIMHVQRGKVVNSTNLQFSETMFLKSLSEVETYKYLGMSQSLSIADGDIRQVVKERFFCRLTKVLNSLLSGGNKARAFNAWVMPLLTYSFGILRWTQTELDALDRRVRMLLTTHRMLHPRSSVMRLYIPRKCGGRGFLNANDLHNREVCSLREYFLNNECGIHRDVAAVDKGLTPLSLAKENWRRPTVLSTVDRKDVWRSKELPGRFNKALTGPDVNLLASVNWLRFGDLFGETEGFACANADEVIMTNNYRKYILKDGTSLRHIISGCSHLANSEYLHRHNQVARIIHQQLAVKYGLVGSEVPYYKYAPMPVLENGRATLYWDRSIITGRTIVANKPDIVLVDRSKRRAILIEITIPHDENLVKAEKDKLSKYHDLGHEVTAMWDVDSIPLLSR

SEQ ID NO: 6478 - protein, 1213 aa, Hedya salicella
MLTRQRARAASTPDTNARPPPPPASSSSSASSSGDEFATAPDTNSQSSDDERGPPPPPPRPPARRGRPPLPARLGPAGHPAPPTAPATGGVVLRMRWTQAMNEHCMRAYYGATEGGTHLSAYRDRMLLLFQTLEPAIAVSAQRLSDQVRAIQRRKLLDDAMLDQLRLEVLAARAASTSSRNPPATSPVSAPALDLVPGAPRVDPGSDEEHCASSVSTQANEQLRRTLEETIERYRFAPDSRPRLPRLPTNRRNLALVGTLNALLDPYLRASEDLADTHSIMYCGAIAACRVARVKFPDADRAPRTAGGVPAWQVRIERRISTFRTLIAKLICFRGGNNRPRVMRYVAQAFAGTAVRPRDYMACVTERIDFLKQKVYAWASRIRRYRERVDRFQQNRLFQSDQRKVYRKWEGTDQRVTDGRLPDPTAMNNFWRSIWSVPVEHTEGEWMNVVERECEPIETMGAVTISPDDVSCAARTTHNWKSPGPDGLHNFWVKWFRCSHERLATQFQQALELGSLPSFLTTGVTFLLYKSGSTTEAKNYRPITCLPTLYKLLTSILRAKINTHIVANNVLAFSQNGCRVGSRGTKELLLIDTTICQQVRRNRGTLSAAWIDYKKACDSVPHSWLGRILELYKIDTVLLVKSFIGSCMRQWTTVLRQPGGRDGPPDPQDFIRIKRGIFQGDSLSPLWFCLALNPLSTLLKDSGLGCRLRRGGEIISHLLYMDDLKLFAPKRPELVELLKVTETFSSAIKMEFGVDKCATMHVQRGKVVNSTNLQLSETMSLKSLSEVETYKYLGMSQSLSIADGDIKQAVKERFFCRLTKVLNSLLSGGNKARAFNAWVMPLLTYSFGILRWTQTELDALDWRVRMLLTTHRMLHPRSSVMRLYIPRKCGGRGFLNAKDLHNREVCSLREYFLNNECGIHRDVVAVDKGLTSLSLANENWRRPTLLSTVDRKDVWRSKELHGRFYKALTGPDVDLLASVNWLRFGDLFGETEGFACAITDEVIMTNNYRKYILKDGTVDICRACRRPGESLRHIISGCSHLANSEYLHRHNQVARIIHQQLAVKYGLVGSEVPYYKYAPMPVLENGRATLYWDRSIITDRTIVANKPDIVLVDRSKRRAILIDITIPHDENLVKAEKDKLSKYLDLAHEVTAMWDVDSTIIVPIVVSANGLIAKSLNEHLKRLSLDGWVKGQIQKAVILDTARIVRRFLSVQP

SEQ ID NO: 6479 - protein, 1099 aa, Hedya salicella
MLTRQRARAASTPDTNARPPPPPASSSSSASSSGDEFATAPDTNSQSSDDERGPPPPPPRPPARRGRPPLPARLGPAGHPAPPTAPATGGVVRRMRWTQAMNEHCMRAYYGATEGGTHLSAYRDRMLLLFQTLEPAIAVSAQRLSDQVRAIQRRKLLDDAMLDQLRLEVLAARAASTSSRNPPATSPVSAPALDLVPGAPRVDPGSDEEHCASSVSTQANEQLRRTLEETIERYRFAPDSRPRLPRLPTNRRNLALVGALNALLDPYLRASEDLADTHSIMYCGAIAACRVARVKFPDADRAPRTAGGVPAWQVRIERRISTFRTLIAKLICFRGGNNRPRVMRYVAQAFAGTAVRPRDYMACVTERIDFLKQKVAWASRIRRYRERVDRFQQNRLFQSDQRKVYRKWEGTDQRVTDGRLPDPTAMNNFWRSIWSVPVEHTEGEWMNVVERECEPIETMGAVTISPDDVSCAARTTQNWKSPGPDGLHNFWVKWFRCSHERLATQFQQALELGSLPSFLTTGVTFLLYKSGSTTEAKNYRPITCLPTLYKLLTSILRAKINTHIVANNVLAFSQNGCRVGSRGTKELLLIDTTICQQVRRNRGTLSAAWIDYKKAYDSVPHSWLGRILELYKIDTVLKSFIGSCMRQWTTVLRQPGGRDGPPDPQDFIRIKRGIFQGDSLSPLWFCLALNPLSTLLKDSGLGCRLRRGGEIISHLLYMDDLKLFAPKRPELVELLKVTETFSSAIKMEFGVDKCATMHVQRGKVVNSTNLQLSETMSLKSLSEVETYKYLGMSQSLSIADGDIKQAVKERFFCRLTKVLNSLLSGGNKARAFNAWVMPLLTYSFGILRWTQTELDALDRRVRMLLTTHRMLHPRSSVMRLYIPRKCGGRGFLNAKDLHNREVCSLREYFLNNECGIHRDVVAVDKGLTSLSLANENWRRPTVLSTVDRKDVWRSKELHGRFYKALTGPDVDLLASVNWLRFGDLFGETEGFACAITDEVIMTNNYRKYILKDGTVDICRACRRPGESLGHIISGCSHLANSEYLHRHNQVARIIHQQLAVKYGLVGSVVPYYKYAPMPVLENGRATLYWDHHGQDYCSQ

SEQ ID NO: 6480 - protein, 1210 aa, Chilo suppressalis
MNLRPRQRRADPYARPSSPPAPSSSSSPDSSGYDFATAPDTSESSDDGRRPSTAPPPPPVRRGRPPLPARLGPAEPSAPRLAPATGGVVRRMRWSYTNNENCMRAYYGATEGETNMTAYRVRMLALFQALEPAITVSAQRLSDQVRVIQRNKRLDDSVLERLRLEALPERTVPVVTCGQSSTPRVLSTSVVTPEVTRIDPVINDGDSANISVSTQTQEQLRRALEEAIDRYRYTPDSRPRLPRLPTNKRNIALMIALDNLLVSYFETSENLVDTHSILYCGAIAACRVARVRFPDPDCATRPAVYVPTWQVRIEQRISRCRTIIAKLMCFRKGNNRPRVMRFVNQAFAGTGIRPCDYLACVTERIDFLKQKVYAWAGRIRRYRERVDRFRINRLFQSDQRKVYRKWEGINQSVTNEPLPDTAAMTNFWRSIWSVPVEHTESDWIDVVERECESIEPMEAVNISRENVSCAIRTAHNWKSPGPDGLHNFWIKWFRSSHERLAMQFQYALESGSLPIFLTTGITFLLYKSGSTTEAKNYRPITCLPTLYKLLTSILRAEINKHINANNIMSASQNGCTVGSRGTKELLLIDMTICQHIRRSKGALSAAWIDYKKAYDSVPHSWLRRILELYKIDVTLRSFLGTCMRQWTTVLRQPDRRAPYDPSDTSDGIRIERGIFQGDSLSPLWFCLALNPLSTLLRETGLGCRLRRGGEVISHLLYMDDLKLFAPKQPDLIKLLKITEVFSSSIGMEFGVDKCAVMHVKRGKVVNSTNLQLSETITLKSLSETETYKYLGMSQSLGITDGDVKQALKERFFWRLTKVLNCLLSGANKVRAFNAWVMPLFTYSFGILRWTQTELDTLDRKVRQLLTMHRMLHPRSSVMRLYIPRKCGGRGLLNAKNLHNREVCSLRDYFLNSEGGLHRDIVAVDKNLTPLSLAKENWRKPRVLSTQDRKEVWKSKELHGRFYRALTGPDVDQLASVNWLRFGDLFGETEGFVCAIADEVMMTNNYRRYILRDGTADICRACRRPGESLRHIVSGCSHLANGEYLHRHNLVARIIHQQLAVQYNLVESEVPYYKYTPAPVLENGHATLYWDRPVITDRTIIANRPDIVLTDRLKRQAVLIDITIPHDENLVKAEKDKLSKYLDLAHEVTALWDVDSTIIVPIVVSVNGLIAKSLDQHLKSLSLDGWVKGQMQKAVLLDTARIVRRFLSLRP

SEQ ID NO: 6481 - protein, 1394 aa, Pararge aegeria
MKMQATEHPQVPGDPERNFNDGRKMPRRVRGEKNLRVAVFNHQTTQGVPMDSDNNQTERKNEKKMMRTGTTRQNTTKYYLRSKKTATGSTEHYQEQHSSPSSTQSLFDSPLSSPHQFEVQDSLSSSSSNSSRPEIVVQVATATNSAPTSGHNRARKKWTIEMNKFIWRTYLIVSELGSKPHYLDLLHKKFTDKFKDFKVSKQRIGDQRRAILRNKLLPQETIDVIRKDVNEELHNKKTQSQLNTAGSSSRIRWTDDINEAIIREYYKITQCESNKTAYRGPLHAAITSQFTQISHVSEQRIADQRRFIVKNNRLAAEKILEIRNEVEHTLIIPTITVNNKKDNENPTSSQLLSTEDNYSAAFTNSNISISNYNSETQQYIHATVDFDSKIQITFENTYDLYRNSNPTQRAFIPKQNTSRKLSHIVGYIDKNILPEYLSIDHDFTTTQTIIYCAAYTAATCNGAKIKDIESYNTLTHHNKTYTSHWQKRLQQKKESLRKDIGRMTQYIRGNRNNRLISKIETIKEKYKVHSRYEESNITNEQYLDSLKQRLSATSSRLRRYESCTLRKKQNTQFAVNEKLFYRKLNQSTNNTHHATDTTISKPSPSLEEVKEYWSGIWDNPVQHNKKAEWFQIESQNEINTPQMIFENIPLEIFLNVLKKSHNWKTPGPDHIHNYWYKKFPTTHPILHNQLNLFIENPSLMPTHITQGTTFMIPKDNNDTQNPAKYRPITCLQSIYKILTGCITQLIDKHITSKNILAQEQKGCRKRSQGCKEQLIIDSVYMKKLYAQKQDTCTMYIDYRKAFDSVPHSWLVQVLHLYKIHPTLITFLSHTMQSWRTNLKIGTGTDTIQTGEIPMRRGIFQGDSLSPLWFCLALNPLSHLLNRFNSSRDESSPTISLSHLLYMDDIKLYSSTVISLHQLADITQQFSKDICMEFGIDKCKTFTLKKGKLQLNDYTLSTGEKMNALDLSDSYKYLGFQQDRQIRQTDTKIELTRKFSHRINSVLKTQLNSRNTIKAINSYAIPVLTYSFGIIKWSQTDLKKLQRVINTSMTKQRKHHPRSCTERLTLPRDEGGRGIIDITNLHNRQITALRNYFHDRAHSSELHKSIVSADKSLTPLNLFDGNIQINQNLTDHQDKIKAWSQKSLHGRHRYDLQQQHVDMVASNTWLKRGDLFPETEGFMLAIQDQVIDTKNYQKYIIRRPNISDTCRHCHSSPETIQHITGACKSIAQTDYKHRHDQVAAIIHQNLAFQYKLISEKVPYYKYQPQSVLENNSYRVYWDRTIVTDKTIHNNRPDITILDKENRSVYLIDIAICNTHNLTTTYTDKISKYTDLAIEIKTQWKINSSKTIPIIISSTGVIPHTLHVGLKTLNIHKSAYTLLQKAVILNTCRLVRRFLT

SEQ ID NO: 6482 - protein, 1350 aa, Pararge aegeria
MKMQATEHPQVPGDPERNFNDGRKMPRRVRGEKNLRVAVFNHQTTQGVPMDSDNNQTERKNEKKMMRTGTTRQNTTKYYLRSKKTATGSTEHYQEQHSSPSSTQSLFDSPLSSPHQFEVQDSLSSSSSNSSRPEIVVQVATATNSAPTSGHNRARKKWTIEMNKFIWRTYLIVSELESKPHYLDLLHKKFTDKFKDFKVSKQRIGDQRRAILRNKLLPQETIDVIRKDVNEELHNKKTQSQLNTAGSSSRIRWTDDINEAIIREYYKITQCESNKTAYRGPLHTAITSQFTQISHVSEQRIADQRRFIVKNNRLAAEKILEIRNEVEHTLIIPTITVNNKKDSENPTSSQLLSTEDNYSAAFTNSNISISNYNSETQQYIHATVDFDSKIQITFENTYDLYRNSNPTQRAFIPKQNTSRKLSHIVGYIDKNILPKYLSIDHDFTTTQTIIYCAAYTAATCNGAKIKDIESYNTLTHHNKTYTPHWQNRLQQKKESLRKDIGRMTQYIRGNRNNRLISKIETIKEKYKVHSRYEESNITNEQYLDSLKQRLSATSSRLRRYESCTLRKKQNTQFAVNEKLFYRKLNQSTNNTHHATDTTISKPSPSLEEVKEYWSGIWDNPVQHNKKVEWLQIESQNEINTPQMIFENIPLEIFLNVLKKSHNWKTPGPDHIHNYWYKKFTTTHPLLHNQLNLFIGNPSLMPTHITQGTTFMIPKDNNDTQNPAKYRPITCLQSIYKILTGCITQLIDKHITSKNILAQEQKGCRKRSQGCKEQLIIDSVYMKKLYAQKQDTCTMYIDYRKAFDSVPHSWLVQVLHLYKIHPTLITFLSHTMQSWRTNLKIGTGTDTIQTGEIPMRRGIFQGDSLSPLWFCLALNPLSHLLNRFNSSRDESSPTISLSHLLYMDDIKLYSSTVISLHQLADITQQFSKDICMEFGIDKCKTFTLKKGKLQLNDYTLSTGEKMNALDLSDSYKYLGFQQDRQIRQTDTKIELTRKFSHRINSVLKTQLNSRNTIKAINSYAIPVLTYSFGIIKWSQTDLKKLQRVINTSMTKQRKHHPRSCTERLTLPRDEGGRGIIDITNLHNRQITALRNYFHDRAHSSELHKSIVSADKSLTPLNLFDGNIQINQNLTDHQDKIKAWSQKSLHGRHRYDLQQQHVDMVASNAWLKRGDLFPETEGFMLAIQDQVIDTKNYQKYIIRRPNISDTCRHCHSSPETIQHITGACKSIAQTDYKHRHDQVAAIIHQNLAFQYKLISEKVPYYKYQPQSVLENNSYRVYWDRTIVTDKTIHNNRPDITILDKENRSVYLIDIAICNTHNLTTTYTDKISKYTDLAIEIKTQWKINSPKTIPIII

SEQ ID NO: 6483 - protein, 1365 aa, Pararge aegeria
MKMQATEHPQVPGDPERNFNDGRKMPRRVRGEKNLRVAVFNHQTTQGVPMDSDNNQTERKNEKKMMRTGTTRQNTTKYYLRSKKTATGSTEHYQEQHSSPSSTQSLFDSPLSSPHQFEVQDSLSSSSSNSSRPEIVVQVATATNSAPTSGHNRARKKWTIEMNKFIWRTYLIVSELESKPHYLDLLHKKFTDKFKDFKVSKQRIGDQRRAILRNKLLPQETIDVIRKDVNEELHNKKTQSQLNTAGSSSRIRWTDDINEAIIREYYKITQCESNKTAYRGPLHAAITSQFTQISHVSEQRIADQRRFIVKNNRLAAEKILEIRNEVEHTLIIPTITVNNKKDNENPTSSQLLSTEDNYSAAFTNSNISISNYNSETQQYIHATVDFDSKIQITFENTYDLYRNSNPTQRAFIPKQNTSRKLSHIVGYIDKNILPKYLSIDHDFTTTQTIIYCAAYTAATCNGAKIKDIESYNTLTHHNKTYTPHWQKRLQQKKESLRKDIGRMTQYIRGNRNNRLISKIETIKEKYKVHSRYEESNITNEQYLDSLKQRLSATSSRLRRYESCTLRKKQNTQFAVNEKLFYRKLNQSTNNTHHATDTTISKPSPSLEEVKEYWSGIWDNPVQHNKKAEWLQIESQNEINTPQMIFENIPLEIFLNVLKKSHNWKTPGPDHIHNYWYKKFTTTHPLLHNQLNLFIGNPSLMPTHITQGTLTGCITQLIDKHITSKNILAQEQKGCRKRSQGCKEQLIIDSVYMKKLYAQKQDTCTMYIDYRKAFDSVPHSWLVQVLQLYKIHPTLITFLSHTMQSWRTNLKIGTGTDTIQTGEIPMRRGIFQGDSLSPLWFCLALNPLSHLLNRFNSSRDESSPTISLSHLLYMDDIKLYSSTVISLHQLADITQQFSKDICMEFGINKCKTFTLKKGKLQLNDYTLSTGEKMNALDLSDSYKYLGFQQDRQIRQTDTKIELTRKFSHRINSVLKTQLNSRNTIKAINSYAIPVLTYSFGIIKWSQTDLKKLQRVINTSMTKQRKHHPRSCTERLTLPRDEGGRGIIDITNLHNRQITALRNYFHDRAHSSELHKSIVSADKSLTPLNLFDGNIQINQNLTDHQDKIKAWSQKSLHGRHRYDLQQQHVDMVASNAWLKRGDLFPETEGFMLAIQDQVIDTKNYQKYIIRRPNISDTCRHCHSSPETIQHITGACKSIAQTDYKHRHDQVAAIIHQNLAFQYKLISEKVPYYKYQPQSVLENNSYRVYWDRTIVTDKTIHNNRPDITILDKENRSVYLIEIAICNTHNLTTTYTDKISKYTDLAIEIKTQWKINSSKTIPIIISSTGVIPHTLHVGLKTLNIHKSAYTLLQKAVILNTCCLVRRFLT

SEQ ID NO: 6484 - protein, 1396 aa, Heliconius atthis
MKMQPINIPQVPGGSDSDADDGRQISGRARGEKNLRVVVSNHQTTSAIPLDSDQASEQNDRVLNSQTMRYNLRKRKININNQPHSIRTNFKQYDQESISSSCHSLFTSPSSSPNTYSLTSRSGSLSPNTQGLEDVMQTAPAVVSASTVSQNRTRKKWTTDMNEFIWRTYLTITCLETKNRGYLSLLHKKFREKFKDFDVSQQRVGVQRRAIVKNKLLQQSILDEIRQDVERNIHVTNSTTQLSTENTEPILTTSSTRIRWADDINEAIIRTYFKITNLESNNTSYRKLLHVAITQQFPQISHLSDQRIPDQRQSIIHNKLLSAEKIEEIRNEVKQTLPIMPISNEHNEHSLLSEIAILSQPQRCSTNVTQSLHNYNSERSEYQIAPDFNIKIEETFKNIHQKFINTDPTTRPFIPKQKTSKRLTYIVQYLDKNILPQFMATDTDFITMQTIIYCAAFSAAVCNGSKINDNSHSTLSNRNKTNTPVWKQRLQKQINNLRRDIGRLTQYKQGNRNDRIMSHVAVIKEKYKIHSKHEEPNITIEQFLDTLKQRLSAKSSRLRRYDNCSLRKKQNRLFLNNEKMFYRHLNQQTTNVHQKSTTSAKPLPAAEVLQDYWSSIWANSVEHNKNAEWIQTQSDTHSNIPQMKFDSISTEIFIKVLKMTHNWKTPGSDHIHNYWYNKFTATHSLIIKHLNMFIKNPNSMPKYITQGITFMIPKDNKDTHNPAKYRPITCLQTVYKILTSCIAQVIEHHITTNDLFAQEQKGCRKGSQGCKEQLVIDSVLMKQAHANKHDIFTMYIDYQKAFDSVPHSWLLKVLHLHHISPILITFLEHTMQHWRTILKAGNDVENVASEEIPIKRGIFQGDALSPLWFCLALNPLSFMLNSIDCGMKTVTGQQLISHLLYMDDIKLYSNNIYSLHKLADIAQIFSRDIHMEFGIEKCKTFSFSKGKLHLNNYMLNTGETIELLDHNSSYKYLGFQQDRQINQKHTKSELTRKFKHRLSSILKTNLNSSSIITAINSFAIPILTYSFGIITWSRTDLIRLQRIINTTMTMQRKHHPRSCVQRLTLPRVEGGRGIIDITNLHNSQIASLRNFFYVQSEKSILHKFIVTADKHLTPLNLQDRNKQINENITLNSDKIAEWNQKSLHGRHRHDLQQPHVDLTASNAWLKRGDLFPETEGFILAIQDQVIETKNYLKYIIQKPNILDICRHCHSSSETIQHITGACKSIAQSYYKHRYDQVAAIIHQNLAFQYNFITEKVPYYKYQPQQVLENDNYRIYWDRTIVTDKTIHYNRPDITIFDKTRNSVYFIDISICNTHNLDSTYTEKITKYTDLAIEVKTQWKVTTTKTIPIVLSTTGVIPYALHQSLNTLQMSPFTYTLLQKAVILNTCRIVRKFLSQI

SEQ ID NO: 6485 - protein, 1396 aa, unidentified
MKMQPINIPQVPGGSDSDADDGRQISGRARGEKNLRVVVSNHQTTSAIPLDSDQASEQNDRVLNSQTMRYNLRKRKININNQAHSIRTNFKQYDQESISSSCHSLFTSPSSSPNTYSLTSRSGSLSPNTQGLEDVMQTAPAVVSASTASQYRTRKKWTTDMNEFIWRTYLTITCLETKNRGYLSLLHKKFREKFKDFDVSQQRVGVQRRAIVKNKLLQQSILDEIRQDVERNIHVTNSTTQLSTENTEPILTTSSTRIRWADDINEAIIRTYFKITNLESNKTSYRKLLHVAITQQFPQISHLSEQRIADQRRSIIHNKLLSAEKIEEIRNEVKQTLPIMPINNEHNQHSPLSEVAILSQPQRCSTNVTQSSHNYNSERSEYQTAPDFNIKIEETFKNTHQKFINTDPTTRPFIPKQKTSKRLTYIVQYLDKNILPQFMATDTDFITMQTIIYCAAFSAAVCNGSKINDNSHSTLSNRNKTNTPVWKQRLQKQINNLRRDIGRLTQYKQGNRNDRIMSHVAVIKEKYKIHSKHEEPNITIEQFLDSLKQRLSAKSSRLRRYDNCSLRKKQNRLFLNNEKMFYRHLNQQTTNIHQKSTTSAKPLPAAEVLQDYWSSIWANSVEHNKNAEWIQSQSDTHSNIPQMKFDSIPTEIFIKVLKMTHNWKTPGSDHIHNYWYKKFTATHSLIIKHLNMFIKNPNSMPKYITQGITFMIPKDNKDTHNPAKYRPITCLQTVYKILTSCIAQVIDHHITTNDLFAQEQKGCRKGSQGCKEQLVIDSVLMKQAHANKQDIFTMYIDYQKAFDSVPHSWLLKVLHLHHISPILITFLEHTMQHWRTKLKAGNDVENVATEEIPIKRGIFQGDALSPLWFCLALNPLSYMLNSIDCGMKTVTGQQLISHLLYMDDIKLYSNNIDSLHKLADIAQIFSRDIHMEFGIEKCKTFSFSKGKLQLNNYILNTGETIESLDHNSSYKYLGFQQDRQINQKHTKSELTRKFKHRLSSILKTNLNSSSIIKAINSFAIPILTYSFGIITWSRTDLIRLQRIINTTMTKQRKHHPRSCVQRLTLPRVEGGRGIIDITNLHNSQIASLRNFFYVQSEKSILHKFIVTADKHLTPLNLQDRNKQINENITLNSDKIAEWNQKSLHGRHRHDLQQPHVDLTASNAWLKRGDLFPETEGFILAIQDQVIETKNYLKYIIRKPNILDICRHCHSSSETIQHITGACKSIAQSDYKHRHDQVAAIIHQNLAFQYNFITEKVSYYKYQPQQVLENDNYRIYWDRTIVTDKTIHYNRPDITIFDKTLNSVYFIDISICNTHNLDSTYTEKITKYTDLAIEVKTQWKVTTTKTIPIVLSTTGVIPYALHQSLNTLQMSPFTYTLLQKAVILNTCRIVRKFLSQI

SEQ ID NO: 6486 - protein, 1395 aa, Heliconius himera
MKMQPITIPQVPGGSDSDANDGRQISGRARGEKNLRVAVSNHQTTSAIPLDSDQASEQNEKMINSQTMRYNLRKRKININNQAHSTNLKQYDQESTSSSRHSLFTSPSSSPNTHSLISRSDSLSTYTQGLEDVMQTAPAVNSASTTGQSRTRKKWTTDMNEFIWRTYLTITCLETKNRGYLDLLHKKFNEKFKDFDVSKQRVGMQRRAIVKNKLLQQSILDEIRQDVERNTHVTNSTKQSSTQNTEPILTTSSTRIRWADDINEAIIRTYFKITNLESNKTSYRKLLHVAITQQFPQISHLSEQRIADQRRSIIHNKLLSAEKIEEIRNEVKQTLPIMPLSNEHNLHSPPAQFEITNKSQRFSTNVTQPLHNYNNERGEYQTAPDFNVKIEETFKSTHEKFINTDPTTRPFIPKQKTSKRLTYIVQYLDKNILPQFMTADTDFITMQTIIYCAAYSAAVCNGSKIDNNAQSTLLNKNKTNIPVWKQRLQKQIDNLRRDIGRLTQYKQGNRNDRIMSHVEVIKEKYKIHSKHEEPNITIEQFLDSLKQRLSAKSSRLRRYDNCSLRKKQNKLFMNNEKMFYRHLNQQTSNIQQKSIAPAKSLPTAKVLQDYWSSIWANRVEHNTNAEWIQTQSDKHSNISQMKFDSIPTEIFTKVLKMAHNWKTPGTDHIHNYWYKKFTTSHPLIIKHLNMFIKNPNSMPKYITQGITFMIPKDNKDTHNPAKYRPITCLQTVYKILTSCIAQVIDKHITTNDLFAQEQKGCRKGSQGCKEQLVIDSVLMKQAHANKQDIFTMYVDYQKAFDSVPHSWLLKVLHLHHVSPILITFLEHTMQHWRTKLKARNDVEYVETEEISIKRGIFQGDALSPLWFCLALNPLSYMLNSINCGMKTVAGEQQLISHLLYMDDIKLYSNNVNSLHKLADIAQVFSRDIHMEFGIEKCKTFSFSKGKLQLNNYILNTGETIESLDHNSSYKYLGFQQDRQINQKHTKIELTRKFKHRLSSVLKSNLNSGNIIKAINSFAIPILTYSFGIITWSRTDLIKLQRIINTTMTKQRKHHPRSCIQRLTLPREEGGRGIIDIINLHNSQITSLRNFFHVQAEESILHKFIVTADKHFTPLNLQDRNKQVNENIILNSDKIIEWNQKSLHGRHRHDLQQPHVDLIASNAWLKRGDLFPETEGFIFAIQDQVVETKNYLKYIIRKPNILDTCRHCHSSSETIQHITGACKSIAQSDYKHRHDQVAAIIHQNLAFQYHFITEKVPYYKYQPQQVLENDNYRIYWDRTIVTDKTIYYNRPDLTIFDKTRNSVYFIDISICNTHNLESTYTEKITKYTDLAIEVKTQWKVTTAKTIPIVLSTTGVIPYALHQSLNTLQISPFIYTLLQKAVILNTCRIVRKFLSQT

SEQ ID NO: 6487 - protein, 1057 aa, Heliconius charithonia
MPLSNEHTLHSPPSLEITSKSQRCSTNDTQPSHNYNNERGEYQTTPDFNIKIEETFKGTHEKFINTDPTTRPFIPKQKTSKRLTYIVQYLDKNILPQFMTTDADFITMQTIIYCAAYSAAVCNGSKINNNAQSTLLNKNKTNTPVWKQRLQKQIDNLRRDIGRLTQYKQGNRNDRIMSHVAVIKEKYKIHSKHEEPNVTIEQFLDSLKQRLSAKSSRLRRYDNCSLRKKHNKLFMNNERMFYRHLNQQTSNIHQKSIASAKSLPTAKVLQDYWSSIWANSVEHNKNAEWIQSQSDKHSNIPQMKLDSIPTEIFTKVLKMAHNWKTPGSDHIHNYWYKKFTTSHPLIIKHLNMFIENPNSMPKYITQGITFMIPKDNKDTHNPAKYRPITCLQTVYKILTSCIAQIIDKHITTNDLFAQEQKGCRKGSQGCKEQLVIDSVLMKQAHANKQDIFTMYVDYQKAFDSVPHSWLLKVLHLYHVSPILIKFLEHTMQHWRTKLKARNDVEYVETEEIPIKRGIFQGDALSPLWFCLALNPLSYMLNNTNCGMKTVAGEQQLISHLLYMDDIKLYSNNVNSLHNLADIAQVFSRDIHMEFGIEKCKTFSFSKGKLQFNNYVLNTGETIDSLDHNSSYKYLGFQQDRQINQKYTKIELTRKFKHRLSSILKTNLNSSNIIKAINSFAIPILTYSFGIITWSRTDLIKLQRIINTTMTKQRKHHPRSCIQRLTLPREEGGRGIIDIINLHNSQITSLRNFFYAQSEESILHNFIVTADKHFTPLNLQDRNKQINENISLNSDKIREWNQKSLHGRHRHDLQQPHVDLIASNAWLKRGDLFPETEGFILAIQDQVVETKNYLKYIIRKPNILDTCRHCHSSSETIQHITGACKSIAQSDYKHRHDQVAAIIHQNLAFQYNFITEKVPYYKYQPQQVLENDNYRIYWDRTIVTDKTICYNRPDLTILDKTRNSVYFIDISICNTHNLESTYTEKITKYTDLAIEVKTQWKVTTAKTIPIVLSTTGVIPYALHQSLSTLQISPFTYTLLQKAVILNTCRIVRKFLSQT

SEQ ID NO: 6488 - protein, 1405 aa, Hestina assimilis
MKIKSLAHPQVPGDSERDPDDGKQVPRGVRGEKNLRVAVSNHQTTHAMNFDSDLQTERNDEKHGTTSRTKRYNLRLRKTANNLTNPIRGTFELAKSQEQESTLSHLSTENLIESTTSSPRLLPSHEKFGFSSSSSSSEDVVQIAHATVLAPTTGLNRARKKWTTEMNEFIWRNYLIVTKLETNVRGYLDILHKKFKDRFKHFDVSKQRIGDQRRAIIRNKLLTQNTLDSIKQDVEIYFSSVDSITNSCTDDRLPCSSSSRIRWTDDINEAILRAYFRITELESNKTAYRGSLHKAITELFPHISHVSEQRIADQRRVIVNNKLLTTERIQAIRNDVQQELLAQVVNRIPSNNTYIANADQNTTYNMTEIKDNNLPTNTSSYSTIKHIGFTEIKTDFKIKIENVFKATYESYTNSNPTQRPFIPKQKTSKKLAQIVDYIDKNILPQYTSADDDFITTQTIIYCAACTAAICNGSKIIDEQRNPFARDRTKIPAWKERLQNKIELLRRDIGRMTQFIRGNTNDRLITQIAAIKQKHNVHSRHEEPNKTDLQYLDSLKQKLSAVSSRLRRYNNCTLRKNQNIQFNNNEKLFYRLINKHSSNTQQDSDNNSLPSAVELHKYWTSIWAKPVTHNGQVEWLETESQNSAHIPEMAFEHITIDLFIEVLKKTHNWKTPGSDHIHNYWYKKFTTVFPLLHKHLNMFIHNPNSMPSYITEGLTFMISKDSNDTGNPAKYRPITCLQTIYKILTACITQLINSHITTNNILTEEQKGCRKYSQGCKEQLVIDSIVMKKSYAQKQNICTMYVDYRKAFDSVPHSWLMQVLHLYKINPTLITFLKSAMHHWRTKLKLRNGTEIIETEEIPIRRGIFQGDALSPLWFCIALNPLSNQLNKLNSGLSVNDNQTPNTYTLTHLLYMDDIKLYSNRLSSLHQLADVTQTFSRDIHMEFGIDKCKTYTIERGRLKLNPYTINTGETMDALDENDSYKYLGYQQDRQIRQNITKVELTRKFRHRLQAILKTHLNSANTIKAINTYAIPILTYSFGIIAWSQTNLKNLQRTINTTMTKHRKHHPRSCVQRLTLPRKEGGRGLIDIVNLHNKQISTIRSFFYNRAKTSQLHKTIVEADKHLTPLNLKDRNIQANEHITNKTDKIATWKEKSLHGRHRNDLQQQHVDMSASNAWLKRGYLFPETEGFMLAIQDQVIETRNYQKHIIHRPNILDTCRHCHSCSETIQHITGSCKSIAHSDYKHRHDQVTAIIHQYLAFQYKLIPQKIPYYKYQPQSVLENNSYRIYWDRTIVTDKTIRNNRPDITILDKKNSSVYLIDVSICNTHNLAATHTEKIAKYTDLAIEIKTQWKVSSTKTIPIVLSSTGVIPHTLHTSLKTLNIHASTYMLLQQAVILNTCRLVRKFLSNT

SEQ ID NO: 6489 - protein, 1393 aa, Dryas iulia
MKMQPISIPQVPGGSDSDANDGRQISVGTRGEKNLRVAVSNHQTTKVFPTDTVKHNELGIEQRLISSQTTRYNLRKRETSKHNTPKYLTQYDQESISSLASDHSSFTSHSSSSILHSLPSRSGSLSPNSNGPVDVMQMATAIDSAPASGQNRTRKKWTLDMNEFIWRTYLTITCLETKNRGYLDLLHKKFTEKFKDFDVSKQRIGVQRRAILKNKLLPQYVLNEIRQDVQRNIDGRNSTAQSTPNNTESTLTTSSTRIRWADDINEAIIRTYFKITNLESNKTSYRKLLHISITQQFPIISHVSEQRIADQRRSIVHNKLLPAERIEKIRNEVKQTLTAVNDRTITNFNSLSNNSTQNLSRGIAHSFNSKIMRVEYQVSPDFDTKIQETFEKTHEKFINTDPTTRPFIPKQNTSKRLTYIVQYLDKNILPQYMTNDTDFITIQTIIYCAAYSAAICNGSKINNNAPSNFPSKNKTNSPIWKLRMQKQIDKLRRDIGRLTQYIQGNRSDKLRSHVAGIKEKFKIHSRYEESNVTNEQFLDSLKQRLSAKSSRLRRYDNCSLRKKQNKQFVNNEKMFYRQLNQQTGNIHQKPTAKKLPTTECMHNYWSCIWSNKTEHNKSAEWIPTQVENNRNVPQMKFDNIPIEIFTKVLKMAHNWKTPGSDHIHNYWYKKFTTAHPILIKHLNTFITNPNSIPNYITQGITFMISKDNTDTHNPAKYRPITCLQTIYKILTSCISQLIDEHITNNDILAQEQKGCRKGSQGCKEQLVIDSVVMKQAYANKQDIFTMYIDYQKAFDSVPHSWLLQVLRLYNISPTLINFLGHLMQYWRTKLKVGNGTEIIETEEIPIRRGIFQGDALSPLWFCLALNPLSDMLNSINYGMKIVPDQKLTTDLISHLLYMDDIKLYSNSANSLNKLADVVQVFSRDIRMEFGIGKCKTFSFSKGKLQLNNYVLDTGEKIDPLDHNSSYKYLGFQQDRQIRQKVTKIELTRKFKHRLTSILKTNLNSGNTIRAINTYAIPILTYSFGIIAWSRTDLIKLQRIINTTMTKQRKHHPRSCVQRLTLPREEGGRGIIDILNLHNAQITSLRNYFYKQSEKSSLHKFIVTVDKRLTPLNLQDRTKQINENITQNADKIAEWTQKSLHGRHRQDLQQPHVDLIASNAWLKRGDLFPETEGFILAIQDQVIETKNYLKYIIRKPNIIDTCRHCHSSSETIQHITSACKSIAQTDYKHRHDQVAAIIHQNLAFQYKLITEKVSYYKYKPQPVLENDKYRVYWDRTIVTDKTICYNRPDITIFDKTCDSVYFIDISICNTHYLDSTFTEKITKYTDLAIEVKTQWKVNTTKTIPIVLSTTGVIIPYALHQSLNTLHMPPFTHILLQKAVILNTCRIVRKFLSQT

SEQ ID NO: 6490 - protein, 1040 aa, Hestina assimilis
MTEIKDNNLPTNTSSYSTIKHIGFTEIKTDFKIKIENVFKATYESYTNSNPTQRPFIPKQKTSKKLAQIVDYIDKNILPQYTSADDDFITTQTIIYCAACTAAICNGSKIIDEQRNPSARDRTKIPAWKERLQNKIELLRRDIGRMTQFIRGNTNDRLITQIAAIKQKHNVHSRHEEPNKTDLQYLDSLKQKLSAVSSRLRRYNNCTLRKNQNIQFNNNEKLFYRLINKHSSNTQQDSDNNSLPSAVELHKYWTSIWAKPVTHNGQVEWLETESQNSAHIPEMAFEHITIDLFIEVLKKTHNWKTPGSDHIHNYWYKKFTTVFPLLHKHLNMFIHNPNSMPSYITEGLTFMIPKDSNDTRNPAKYRPITCLQTIYKILTACITQLINSHITTNNILTEEQKGCRKYSQGCKEQLVIDSIVMKKSYAQKQNICTMYVDYRKAFDSVPHSWLMQVLHLYKINPTLITFLKSAMHHWRTKLKLRNGTEIIETEEIPIRRGIFQGDALSPLWFCIALNPLSNQLNKLNSGLSVNDNQTPNTYTLTHLLYMDDIKLYSNRLSSLHQLADVTQTFSRDIHMEFGIDKCKTYTIERGKLKLNPYTINTGETMDALDENDSYKYLGYQQDRQIRQNITKVELTRKFRHRLQAILKTHLNSANTIKAINTYAIPILTYSFGIIAWSQTNLKNLQRTINTTMTKHRKHHPRSCVQRLTLPRKEGGRGLIDIVNLHNKQISTIRSFFYNRAKTSQLHKTIVEADKHLTPLNLKDRNIQANEHITNKTDKIATWKEKSLHGRHRNDLQQQHVDMSASNAWLKRGYLFPETEGFMLAIQDQVIETRNYQKHIIHRPNILDTCRHCHSCSETIQHITGSCKSIAHSDYKHRHDQVTAIIHQYLAFQYKLIPQKIPYYKYQPQSVLENNSYRIYWDRTIVTDKTIRNNRPDITILDKKNSSVYLIDVSICNTHNLAATHTEKIAKYTDLAIEIKTQWKVSSTKTIPIVLSSTGVIPHTLHTSLKTLNIHASTYMLLQQAVILNTCRLVRKFLSNS

SEQ ID NO: 6491 - protein, 1406 aa, Hestina assimilis
MKIKSLAHPQVPGDSERDPDDGKQVPRGVKGEKNLRVAVSNHQTTHAMNFDSDLQTKRNDEKQGTTSRTKRYNLRLRKTAYNLTNPIHETFELAKSQEQESTLSHLSTENLIESPISSPRLLPSHEKFGFSSSSSSSEDVVQIAHATVLAPTTGLNRARKKWTTEMNEFIWRNYLIVTKLETNVRGYLDILHKKFKDRFKHFDVSKQRIGDQRRAIIRNKLLTQNTLDSIKQDVEIYFTSVDSITNSCTDDRLLPCSSSSRIRWTDDINEAILRAYFRITELESNKTAYRGSLHKAITELFPHISHVSEQRIADQRRVIVNNKLLTTERIQAIRNDVQQELLAQVVNRIPSNNTYIANADQNPTHNMTEIKDNNLPTNASSYSTIKHIGFTEIKSDFKIKIENVFKATYESYTNSNPTQRPFIPKQKTSKKFAQIVDYIDKNILPQYTSADDDFITTQTIIYCAACTAAICNGSKIIDEQRNPSARDRTKIPAWKERLQNKIELLRRDIGRMTQFIRGNTNDRLITQIAAIKQKHNVHSRHEEPNKTDLQYLDSLKQKLSAVSSRLRRYNNCTLRKNQNIQFNNNEKLFYRLINKHSSNTQQDSDNNSLPSAVELHKYWTSIWAKPVTHNGQVEWLETESQNSAHIPEMAFEHITIDLFIEVLKKTHNWKTPGSDHIHNYWYKKFTTVFPLLHKHLNMFIHNPNSMPSYITEGLTFMIPKDSNDTRNPAKYRPITCLQTIYKILTACITQLINSHITTNNILTEEQKGCRKYSQGCKEQLVIDSIVMKKSYAQKQNICTMYVDYRKAFDSVPHSWLMQVLHLYKINPTLITFLKSAMHHWRTKLKLRNGTEIIETEEIPIRRGIFQGDALSPLWFCIALNPLSNQLNKLNSGLSVNDNQTPNTYTLTHLLYIDDIKLYSNRLSSLHQLADVTQTFSRDIHMEFGIDKCKTYTIEQGRLKLNPYTINTGETMDALDENDSYKYLGYQQDRQIRQNITKVELTRKFRHRLQAILKAHLNSANTIKAINTYAIPILTYSFGIIAWSQTNLKNLQLTINTTMTKHRKHHPRSCVQRLTLPRKEGGRGLIDIVNLHNKQISTIRSFFYNRAKTSQLHKTIVEADKHLTPLNLKDRNIQANEHITNKTDKIATWKEKSLHGRHRNDLQQQHVDMSASNAWLKRGYLFPETEGFMLAIQDQVIDTRNYQKHIIHRPNILDTCRHCHSCSETIQHITGSCKSIAHSDYKHRHDQVTAIIHQYLAFQYKLIPQKIPYYKYQPQSVVENNSYRIYWDRTIVTDKTIRNNRPDITILDKKNSSVYLIDVSICNTHNLVATHTEKIAKYTDLAIEIKTQWKVNSTKTIPIVLSSTGVIPHTLHTSLKTLNIHASTYMLLQQAVILNTCRLVRKFLSNT

SEQ ID NO: 6492 - protein, 1397 aa, Vanessa atalanta
MKMQSKKYPQVPGDPERDSDDGEEVSRGVRGEKNLRVAVSNHQTTRDLLSDYGANTIRNKETETMINNNTRYFLRSTRRTQNSTGTLKQQQESPLTPSPTSSLFESIASSPHSFELLDKSSSSSSNSSNPEDVVQLALATNIAPTAGHNSVRKKWTTEMNEFIWRTYLITSELESKPHYLDLLHARFIDKFKNFNVSKQRIGDQRRAIIRNNYLPQQTLDNIRKEVEKELQSNTQSLPLSNSGTCSSRLRWTDDINEAIMREYFKITQCESNRTAYREPLHAAITSQFPQISHVSEQRIADQRRVIVNNKRLTAERIQEIRKEVEQTLLPILAENDTSNNEVGNNSTTPNILLINDSDYSPHTNLTENNCSTNNVTRDCIQSATELQRKIQLTFETTYEKYKNSDPTQRPFIPKQNTSKKLAVIVSYLDKNILPQYISTDHDFTTIQTLIYCTAYTAATCNGTKIRESQSNKDSEYRIKPNIPPWQKRLHKKKESLRKDIGRMTQYIRGNRNNKLMSYIVAIKEKYKVHSQYEENNISNEQYLDSMKQRLSATSSRLRRYESCTLKKKQNIQFKNNERLFYRQLNQRTSNTTQTLDTTLRKPLPSLNELKLYWSSIWANPVQHNTQAEWLLLQSENKCNMPQMTFTNIPVDIFLNVLKNTHNWKTPGSDHIHNYWYKKLTSMHPFLHQYLNMFIQNPSSMPKYITQGTFMIPKDNIETHNPANYRPITCLQTIYKILTGCITRLIDTHIASNNILAQEQKGCRKRSQGCKEQLIIDSVIMKNAYAKKQNICTMYDDYRKAFDSVPHSWLIQILNLYNINPTVINFLSYTMQSWRTKLKVGIGIDTIETDEIPIRRGIFQGDALSPLWFCLALNPLSCLLNKCNSGLKVPNNSLLSNTIISHLLYMDDIKLYGNNVISLHQLADITQQFSKDIHMEFGVDKCKTFSFIKGKLQLNEYTLNSGKKMDALNQGDSYKYLGFQQNRQICQKETKKDLIRNFTHRINSILKTQLNSRNTIKAINSYAIPIFTYSFGVIKWSQTDLKKLQRIINTSMTKHRKHHPRSCIERLTLPREEGGRGLIDITNLHNRQINTLRSFFHERADSSEFHKSILNADKNFSPHNLLDRYTQPNEKLTNNKDKIKAWLQKTLHGRHRTDLQQQHVDIEASNAWLMRGDLFPESEGFMMAIQDQVIDTKNYQKHIIRRSNINDSCRHCHSSPETIQHITGACKSIAQTDYKHRHDQVAAIIHQNLAYQYKLISEKVPYYKYKPQSVLENNSYRIYWDRTIVTDKTIYNNRPDITVLDKQNSSVHLIDIAICNTHNLTNTFTEKISKYTDLSIEIKTQWKVKNTKMVPIVLSSTGVIPHTLHGSLKSLNIHKSVYMLLQKAVILNTCRLVRKFLS

SEQ ID NO: 6493 - protein, 1398 aa, Vanessa atalanta
MKMQSKKYPQVPGDPERDSDDGEEVSRGVRGEKNLRVAVSNHQTTRDLLSDYGANTIRNKETETMINNNTRYFLRSTRRTQNSTGTLKQQQESPLTPSPTSSLFESIASSPHSFELLDKSSSSSSNSSNPEDVVQLALATNIAPTAGHNSVRKKWTTEMNEFIWRTYLITSELESKPHYLDLLHARFIDKFKNFNVSKQRIGDQRRAIIRNNYLPQQTLDNIRKEVEKELESNTQSLPLSNSGTCSSRLRWTDDINEAIMREYFKITQCESNRTAYREPLHAAITSQFPQISHVSEQRIADQRRVIVNNKRLTAERIQEIRKEVEQTLLPILAENDTSNNEVGNNSTTPNILLINDSDYSPHTNLTENNCSTNNVTRDCIQSATELQRKIQLTFETTYEKYKNSDPTQRPFIPKQNTSKKLAVIVSYLDKNILPQYISTDHDFTTIQTLIYCTAYTAATCNGTKIRESQSNKDSEYRIKPNIPPWQKRLHKKKESLRKDIGRMTQYIRGNRNNKLMSYIVAIKEKYKVHSQYEENNISNEQYLDSMKQRLSATSSRLRRYESCTLKKKQNIQFKNNERLFYRQLNQRTSNTTQTFDTTLRKPLPSLNELKLYWSSIWANPVQHNTQAEWLLLQSENKCNMPQMTFTNIPVDIFLNVLKNTHNWKTPGSDHIHNYWYKKLTSMHPFLHQYLNMFIQNPSSMPKYITQGTTFMIPKDNIETHNPANYRPITCLQTIYKILTGCITRLIDTHIASNNILAQEQKGCRKRSQGCKEQLIIDSVIMKNAYAKKQNICTMYVDYRKAFDSVPHSWLIQILNLYNINPTVINFLSYTMQSWRTKLKVGIGIDTIETDEIPIRRGIFQGDALSPLWFCLALNPLSCLLNKCNSGLKVPNNSLLSNTIISHLLYMDDIKLYGNNVISLHQLADITQQFSKDIHMEFGVDKCKTFSFIKGKLQLNEYTLNSGKKMDALNQGDSYKYLGFQQNRQICQKETKKDLIRNFTHRINSILKTQLNSRNTIKAINSYAIPILTYSFGVIKWSQTDLKKLQRIINTSMTKHRKHHPRSCIERLTLPREEGGRGLIDITNLHNRQINTLRSFFHERADSSEFHKSILNADKNFSPLNLLDRNTQPNEKLTNNKDKIKAWLQKTLHGRHRTDLQQQHVDIEASNAWLIRGDLFPESEGFMMAIQDQVIDTKNYQKHIIRRSNINDSCRHCHSSPETIQHITGACKSIAQTDYKHRHDQVAAIIHQNLAYQYKLISEKVPYYKYKPQSVLENNSYRIYWDRTIVTDKTIYNNRPDITVLDKQNSSVHLIDIAICNTHNLTNTFTEKISKYTDLSIEIKTQWKVKNTKMVPIVLSSTGVIPHTLHGSLKSLNIHKSVYMLLQKAVILNTCRLVRKFLS

SEQ ID NO: 6494 - protein, 1387 aa, Vanessa cardui
MKMQEKKYPQVPGDPERDSDDGEEVSRRVRGEKNLRVAVSNHQTMRDLLSDNDANTIRNNVTEKTTSNNTRYFLRSTRRTQNAAGISKRQQESLSSSSPTNSLFESIASSSNSFELLNKSSSSSSSISSNPEDVVQMALAINSAPTPGHNSVRRKWTSEMNEFIWRTYLITSELESNPHYLDLLHSKFIDKFKNFNVSKQRLGDQRRAIIRNKYLPQQTLDNIRKEVEKELQSKTQSLPLSHSGTSSSRLRWTNDINEAIIREYFKITQCESNRTAYRKPLHAAITSQFPQISHVSEQRIADQRRVIVNNKRLTEERIQQIRKEVEKTIIPLSAEIYTSNNEDDNNITSPNRLTEKNRSTNNVTRECTQATTEFGRKIQLTFETTYEKYKNSDPTQRPFIPKQNTSKKLALIVSHLDKNILPQYISVNQDFITIQTLIYCAAYTAAICNGTKIKEPQNHTNLEPQNKPNMPPWQKRLHKKKESIRKDIGRMTQYIRGNRSNRLIQHIASIKEKYKVHSQYEENNVSNEQYLDSMKQRLSATSSRLRRYESCTLKKKQNTQFRNNERSFYRQLNQKTSNTTQTLDTTLRKQLPSLTELKVYWSSIWANPVQHNTQAEWLLLETERKRNTPEMTFTNIPVEIFLNVLKNTHNWKAPGSDHIHNYWYKKLTSMHPCNKLHEYLNMFILNPSSMPKYITQGTTFMIPKDNNETHNPANYRPITCLQTIYKILTGCITRLIDTHIASNNILAQEQKGCRKRSQGCKEQLIVDSVIMKNAYANKQNICSMYVDYHKAFDSVPQSWLIQILTVYNINPTVINFLSYTMQSWRTKLKVGTSIDTIETDEIPIRRGIFQGDALSPLWFCLALNPLSYLLNKCNSGLKVPNNSLSQTKISHLLYMDDIKLYSYNVISLHQLADITQQFSKDIHMEFGVDKCKTFSFIKGKLQLNDYILNSEKKMDALNENDSYKYLGFQQNRQICEKETKKDLTRNFTHRINSILKTQLNSRNTIKSINSYAIPILTYSFGVIKWSQSDLKKLQRIISTSMTKHRKHHPRSCIERLTLPREEGGRGLIDITNLHNRQINTLRTFFYERADNSEFHESIVNADKNFSPLNLLDRNPQLNEKLTDSKDKIKTWLQKALHGRHRSDLQQPHVDIEASNAWLKRGDLFPETEGFMLAIQDQVIDTKNYQKYIIRRSNINDTCRHCHSSPETIQHITGACKSIAQTDYKHRHDQVAAIIHQNLAYQYKLISEKVPYYKYKPQSVLENNSYRIYWDRTIVTDKTIYNNRPDITVLDKQNSSVYLRDIAICNTHNLNNTFTEKISKNTDLSIEIKTQWKVKNTKMVPIVLSSTGVIPHTLHTSLKLLNINNSTLTLLQKAVILNTCRLVRKFLG

SEQ ID NO: 6495 - protein, 1402 aa, Laothoe populi
MNMKPMAHPQVPGDPKMNANDGRQVNRRVRGEKNLRVAVSNHPTTQAIPTESDDYMKKKNNEQKTMTSRTTRYYLRTRKTISITPKQHQLSSSSLSSTQSLFGSPDSSPRSFEGRHRAGSSSSTSGPEDVVHAAIAATHAPATGQNRARYKWTPEMNEFIMRTYFIITKIETKTRGYLDPLHKQFITKFKDLDVSKQRIGDQRRAIVRNKLIPHNTLDAIKQDVKTYLQSTHLDLHNKNTSQGPNQSRMRWTDDINEAIMKEYFRITRLESNKTAYRAPLHASIIDQFPQFSHVSEQRISDQRRVIVNNKLLSAEKLQQIRLEVEQALHTQQNTLGMITLTNRTQNDNSLTRPTTPINNTEQRQQTNTLEYIPSSTAEVTDSPTLTNSVLNERIKDTFLTTYNTFKGTNPTQRPFIPKQKTSKKLSYIVVYIDQIVLPLYFTDEHDFITTQTLIYCAAYTAAICNGSKIKDTLQHNQSQYNKEAKTPAWKKRLQNKIQSLRRDIGRLTHYIKGNTSNKIKRHIEAIKDKYKTHSRHEEPNSTDNQYLDSLKQRLSAASSRLRRYDNCTLRKKQNTQFKNNEKLFYRTLNISSSNTQTLNSTLTTNLPSTEALQNYWSNIWANTVEHNRQAEWIQTETHRTTNIPQMSFDYIPVDLFINTLKKTHNWKTPGSDHIHNYWYKKFSSVHPLLHNYLNMFLQNPNSLPSYITQGITFMIPKDTNETLNPAKFRPITCLQTIYKILTACIAQLINNHISTHKILAEEQKGCRKHSQGCKEQLIIDSVIMKQTHANKEDICSMYIDYRKAFDSVPHSWLIEILQIYKVHPTLITFMAYAMQQWRTKLKAGNGTQAIETSEIPIRRGIFQGDALSPLWFCLALNPLSNLLNSLDLGATATPHQSTSIVTLSHLMYMDDIKLYSNNVQSLHRLADVTQQFSRDINMAFGIDKCKTLTFKQGKLHLNSYTLVTGEQMDPLDQNDTYKYLGFQQDRQICQKITKAELTRKFKYRLTSILKTQLNSGNTIKAINSYAIPILTYSFGVISWSQTALKNLQRVINTSMTKQRKHHPRSCTQRLTLPREEGGRGVIDVVNLHNTQITRLRNFFHTRAKECHLHETIVDCDKHFTPLNLQDRSTQKNEHIIDKKEKIAAWIQKSLHGRHRQDLLQSHVDMSASNAWLRRGDLFPETEGFMLAIQDQIIDTRNYQKHIIRRPNIIDLCRQCQSSSETIQHITGACKAIAQSDYKHRHDQAAAIIHQHLAFRYKLIAEKVPYYKYQPTSVLENTNYKMYWDRTIVTDKTIHFNRPDITVLDKINKTVYIIDIAICNTHNLASTHTQKIAKYTDLAIEIKTQWKVNTTKTVPIVLSTTGVIPHTLHTSLNMLNIHAFTYTLLQKSVILNTCRIVRKFLSN

SEQ ID NO: 6496 - protein, 1402 aa, Laothoe populi
MNMKPMAHPQVPGDPKMNANDGRQVNRRVKGEKNLRVAVSNHPTTQVIPTESDDYMKKKNNEQKTMTSRTTRYYLRTRKTISITPKQHQLSSSSLSSTQSLFGSPDSSPRSFEGRHRAGSSSSTSGPEDVVHAAIAATHAPATGQNRARYKWTPEMNEFIMRTYFIITKIETKTRGYLDPLHKQFITKFKDLDVSKQRIGDQRRAIVRNKLIPHNTLDAIKQDVKTYLQSTHLDLHNKNTSQGPNQSRMRWTDDINEAIMKEYFRITRLESNKTAYRAPLHASIIDQFPQFSHVSEQRISDQRRVIVNNKLLSAEKLQQIRLEVEQALHTQQNTLGMITLTNRTQNDNSLTRPTTPINNTEQRQQTNTLEYIPSSTAEVTDSPTLTNSVLNERIKDTFLTTYNTFKGTNPTQRPFIPKQKTSKKLSYIVVYIDQIVLPLYFTDEHDFITTQTLIYCAAYTAAICNGSKIKDTLQHNQSQYNKEAKTPAWKKRLQNKIQSLRRDIGRLTHYIKGNTSNKIKRHIEAIKDKYKTHSRHEEPNSTDNQYLDSLKQRLSAASSRLRRYNNCTLRKKQNTQFKNNEKLFYRTLNISSSNTQTLNSTLTTNLPSTEALQNYWSNIWANTVEHNCQAEWIQTETHRTTNIPQMSFDYIPVDLFINTLKKTHNWKTPGSDHIHNYWYKKFSSVHPLLHNYLNMFLQNPNSLPSYITQGITFMIPKDTNETLNPAKFRPITCLQTIYKILTACIAQLINNHISTHKILAEEQKGCRKHSQGCKEQLIIDSVIMKQTHANKEDICSMYIDYRKAFDSVPHSWLIEILQIYKVHPTLITFMAYAMQQWRTKLKAGNGTQAIETSEIPIRRGIFQGDALSPLWFCLALNPLSNLLNSLDLGATATPHQSTSIVTLSHLMYMDDIKLYSNNVQSLHRLADVTQQFSRDINMAFGIDKCETLTFKQGKLHLNSYTLVTGEQMDPLDQNDTYKYLGFQQDRQICQKITKAELTRKFKHRLTSILKTQLNSGNTIKAINSYAIPILTYSFGVISWSQTALKNLQRVINTSMTKQRKHHPRSCTQRLTLPREEGGRGVIDVVNLHNTQITRLRNFFHIRAKECHLHETIVDCDKHFTPLNLQDRSTQNNEHIIDKKEKIAAWIQKSLHGRHRQDLLQSHVDMSASNAWLRRGDLFPETEGFMLAIQDQIIDTRNYQKHIIRRPNIIDLCRQCQSSSETIQHITGACKAIAQSDYKHRHDQAAAIIHQRLAFRYKLIAEKVPYYKYQPTSVLENTNYKMYWDRTIVTDKTIHFNRPDITVLDKINKTVYIIDIAICNTHNLASTHTQKIAKYTDLAIEIKTQWKVNTTKTVPIVLSTTGVIPHTLHTSLNMLNIHAFTYTLLQKSVILNTCRIVRKFLLN

SEQ ID NO: 6497 - protein, 1069 aa, Mimas tiliae
MRWTDDINEAIMREYFRITRLESNKTAYRAHLHASIIEQFPQFSHVSQQRIADQRRVIVNNKLVSIEKLHQIRIEVEQELHTQEEYYTPDRSSFMNNNINKDSTQNDASQTLPTLLVNTQYPQYTNTSEHIPSSTAEATNSPVWSNYELNDRIKNTFSTAYSKFRDTNPTQRPFIPKQKTSKRLSYIVAYIDQMVLPVYFTDDDDFITTQTLIYCAAYTAVTCNGSKIKDTLQNNLQYSHQTKTPAWKKRLQHKIQSLRRDIGRLTHYIRGNRNGKLISHIETIKNKYNKHSRYEEPNSTDNQYLDSLKQRLSAASSRLRRYDNCTLRKKQNTQFTNNEKLFYRTLNYNSSNTQIQNSTSLTNLPSTEDLQNYWSNIWANTVEHNQQAEWIQTESNKLTDIPQMSFDFIPVDVFLNILKKTHNWKTPGSDHIHNYWYKKFTSVHPMLHNYLNMFIQNPTSLPSYITQGTTVMIPKDINDTQNPAKYRPITCLQTIYKILTACIAQLVNNHIHSHNILAEEQKGCRKQSQGCKEQLIIDSVIMKKAHANNQDTCTMYIDYKKAFDSVPHSWLIQILHIYKVHPTLITFLAYAMQQWRTKLKAGTGNYAIETDMIPIRRGIFQGDALSPLWFCLALNPLSSLLNSHNLGITMTANQSTPTITLSHLMYMDDIKLYSSSVQSLHRLADVTQEFSRDIKMEFGIDKCKTLTIKHGKLQLNTYILNTGEQMDPLDQSDTYKYLGFQQDRQICQKLTKSELTRKFKHRLSSILKTQLNSGNSIKAINSFAIPLLTYSFGIITWTQTELKNLQRVINTSMTKQRKHHPRSCTQRLTLPREEGGRGIIDIVNLHNTQIVRLRKFFHDHALDCQLHKTIVETDKHLTPLNLQDRSTQKTEHLTKNKDKIAAWAQKSLHGRHRHDLQQQHVDMTASNAWLKRGDLFPETEGFMLAIQDQIIDTRNYQKHIIRRPNITDICRHCQSSPETIQHITGACKSIAQSDYKHRHDQVAVIIHQYLAFQYKLISEKVPYYKYQPQSVLENNNYKIYWDRTIVGFGPCIVIIYPPVMEETVKGKKQ

SEQ ID NO: 6498 - protein, 1398 aa, Boloria selene
MKMQPTAHPQVPGDSDRDANDGRQVPGGVRGEKNLRVAVSNHQTTFATPMDADKETDRKNDEQQIRINQATRYNLRKRKITPQNIKNSLKKTSGSMEILSSPVSSIQTIPSPTSSIHLFDLHDSPSSSSAISDGSEDVVQMAPALKSAPTTDQNRTRKKWSSDMNKFIWRTYLLVTEIETKIRGHLDILHKKFIEKYPNYDVSKQRIGDQRRAIVRNKLLPQNILDEIRQEVEKSLCVPSSMTSLLPDSATPTTDSSSTRIRWTEDINEAIIRTYFKITNLDSNRSFYRKPLHTIITELFPQISHVSEQRIADQRRVIVNNRLLPPARIEEIRKEVEKTLDTTAEHATITFTGEDTRDQSPLTSNNNDQNSNIKYIKSHNSHLNYQTSSEFNNKIQETFQTSLNNYENTDPTKRPFIPKQKTSKKFTYIVHYLNNQIIPQYIKTNDDFKTLHTIIYCAAYTAAVCNGSKIKNTQPSPLNDKQKTIPSWKIRLQKKIEALRADIGRMTQYIRGNRSNRLISQVTYIKEKFKVHSRHEEPNISNEQYLDSLKQRLSAKTSRLRRYDACTLRKTQNRQFVNNQKNFYRNLNNNTNNLQQNISSNRLPTKEQFQNYWSGIWANPVQHNNQADWIQTLLKEENRIPQMKFEAVPQETFEKVIKKTHNWKTPGSDHIHNFWYKKFSTLHPLLLIHINRFIKNPNSTPHFITQGVTFMIEKDSGETQNPAKYRPITCLQTFYKLLTSCIAALFNEHVTSNNILANEQKGCRKNSQGCKEQLIIDSVIMKQAYANKQDIFTMYVDYQKAFDSVPHSWLLEVLHLYHINPTLITFLSHVMKQWRTKLTVRNEIETDEIIIRRGIFQGDALSPLWFCLALNPLSHLLNKNNFGITTAANQSLSNPVLISHLLYMDDIKLYSHNINTLHQLANITKQFSNDICMEFGIEKCKTYSFCQGRLQLNDYVLNSEEKIDPLDQNDSYKYLGFQQDRQILQKHTKTELIRKFRHRLCSVLKTNLNSANTIKAINSYAIPVLTYSFGIISWTKTDLIKLQRLINTSMTKQRKHHPRSCTQRLTLPREEGGRGLIDISNLHNKQIATLRHFFHEQAEQSTLHKAIVEADKRFTPLNLQDRKSQTSQTITTNKDKIAAWNEKSLHGRHRHDLQQPHVDLIASNAWLKRGDLFPETEGFMIAIQDQVIDTKNYQKYIIRRPNITDICRHCHSSSETIQHITGACKSIAQHDYKHRHDQVAAIIHQNLAFQNNLLPKQVPYYKYEPQSVLENNKCKIYWDRTIVTDKTIHFNRPDITILDKERNSVYFIDISICNTHNLASTYTEKLAKYTDLAIEIKTQWKVNTTKIIPIVLSSTGVIPKTLHQSLKILNIHPSTYILLQKAVILNTCRLVRKFLSQP

SEQ ID NO: 6499 - protein, 1398 aa, Boloria selene
MKMQPTAHPQVPGDSDRDANDGRQVPGGVRGEKNLRVAVSNHQMTFATPMDADKETDRKNDEQQIKINQATRYNLRKRKITPQNIKNSLKKTSGSMEILSSPVSSIQTIPSPTSSIHLFDLHDSPSSSSAISEGSEDVVQMAPALKSAPTTDQNRTRKKWSSDMNKFIWRTYLLVTEIETKIRGHLDILHKKFIEKYPNYDVSKQRIGDQRRAIVRNKLLPQNILDEIRQEVEKSLCVPSSMTSLLPDSATPTTDSSSTRIRWTEDINEAIIRTYFKITNLDSNRSFYRKPLHTIITELFPQISHVSEQRIADQRRVIVNNRLLPPARIEEIRKEVEKTLDTTAEHATITFTGEDTRDQSPLTSNNNDQNSNIKYIKSHNSHLNYQTSSEFNNKIQETFQTSLNNYENTDPTKRPFIPKQKTSKKFTYIVHYLNNQIIPQYIKTNDDFKTLHTIIYCAAYTAAVCNGSKIKNTQPSPLNDKQKTIPSWKIRLQKKIEALRADIGRMTQYIRGNRSNRLISQVTYIKEKFKVHSRHEEPNISNEQYLDSLKQRLSAKTSRLRRYDACTLRKTQNRQFVNNKKNFYRNLNNNTNNLQQNISSNRLPTKEQFQNYWSGIWANPVQHNNQADWIQTLLKEENRIPQMKFEAVPQETFEKVIKKTHNWKTPGSDHIHNFWYKKFSTLHPLLLIHINRFIKNPNSTPHFITQGVTFMIEKDSGETQNPAKYRPITCLQTFYKLLTSCIAALFNEHVTSNNILANEQKGCRKNSQGCKEQLIIDSVIMKQAYANKQDIFTMYVDYQKAFDSVPHSWLLEVLHLYHINPTLITFLSHVMKQWRTKLTVRNEIETDEIIIRRGIFQGDALSPLWFCLALNPLSHLLNKNNFGITTAANQSLSNPVLISHLLYMDDIKLYSHNINTLHQLANITKQFSNDICMEFGIEKCKTYSFCQGRLQLNDYVLNSEEKIDPLDQNDSYKYLGFQQDRQILQKHTKTELIRKFRHRLCSVLKTNLNSANTIKAINSYAIPVLTYSFGIISWTKTDLIKLQRLINTSMTKQRKHHPRSCTQRLTLPREEGGRGLIDISNLHNKQIATLRHFFHEQAEQSTLHKAIVEADKRFTPLNLQDRKSQTSQTITTNKDKIAAWNEKSLHGRHRHDLQQPHVDLIASNAWLKRGDLFPETEGFMIAIQDQVIDTKNYQKYIIRRPNITDICRHCHSSSETIQHITGACKSIAQHDYKHRHDQVAAIIHQNLAFQNNLLPKQVPYYKYEPQSVLENNKCKIYWDRTIVTDKTIHFNRPDITILDKERNSVYFIDISICNTHNLASTYTEKLAKYTDLAIEIKTQWKVNTTKIIPIVLSSTGVIPKTLHQSLKILNIHPSTYILLQKAVILNTCRLVRKFLSQP

SEQ ID NO: 6500 - protein, 1398 aa, Boloria selene
MKMQPTAHPQVPGDSDRDANDGRQVPGGVRGEKNLRVAVSNHQTTFATPMDADKETDRKNDEQQIRINQATRYNLRKRKITPQNIKNSLKKTSGSMEMLSSPVSSIQTVPSPTSSIHLFDLHDSPSSSSAISDGSEDVVQMAPALKSAPTTDQNRTRKKWSSDMNKFIWRTYLLVTEIETKIRGHLDILHKKFIEKYPNYDVSKQRIGDQRRAIVRNKLLPQNILDEIRQEVEKSLCLPSSMTSLLPDSATPTTDSSSTRIRWTEDINEAIIRTYFKITNLDSNRSFYRKPLHTIITELFPQISHVSEQRIADQRRVIVNNRLLPPARIEEIRKEVEKTLDTTAEHATITFTGEDTRDQSPLTSNNNDQNSNIKYIKSHNSHLNYQASSEFNSKIQETFQTSLNNYENTDPTKRPFIPKQKTSKKFTYIVHYLNNQIIPQYIKTNDDFKTLHTIIYCAAYTAAVCNGSKIKNTQPSPLNDKQKSIPSWKIRLQKKIKALRADIGRLTQYIRGNRSNRLISQVTYIKEKFKVHSRHEEPNISNEQYLDSLKQRLSAKTSRLRRYDACTLRKTQNRQFVNNQKNFYRNLNNNTNNLQQNISSNRLPTKEQFQNYWSGIWANPVQHNNQADWIQTLLKEENRIPQMKFEAVPQETFEKVIKKTHNWKTPGSDHIHNFWYKKFSTLHPLLLIHINRFIENPNSIPHFITQGVTFMIEKDSGETQNPAKYRPITCLQTIYKLLTSCIAALFNEHVTSNNILANEQKGCRKNSHGCKEQLIIDSVIMKQAYANKQDIFTMYVDYQKAFDSVPHSWLLEVLHLYHINPTLITFLSHVMKQWRTKLTVRNEIETDEIIIRRGIFQGDALSPLWFCLALNPLSHLLNKNNFGITTAANQSLSNPVLISHLLYMDDIKLYSHNINTLHQLANITKQFSNDICMEFGIEKCKTYSFCQGRLQLNDYVLNSEEKIDPLDQNDSYKYLGFQQDRQILQKHTKTELIRKFRHRLCSVLKTNLNSANTITAINSYAIPVLTYSFGIISWTKTDLIKLQRLINTSMTKQRKHHPRSCTQRLTLPREEGGRGLIDICNLHNKQIATLRHFFHEQAEQSTLHKAIVEADKRFTPLNLQDRKSQTSQTITQNKDKIAAWNEKSLHGRHRHDLQQPHVDLIASNAWLKRGDLFPETEGFMIAIQDQVIDTKNYQKYIIRRPNITDICRHCHSSSETIQHITGACKSIAQHDYKHRHDQVAAIIHQNLAFQNNLLPKQVPYYKYEPQSVLENNKCKIYWDRTIVTDKTIHFNRPDITILDKERNSVYFIDISICNTHNLASTYTEKLAKYTDLAIEIKTQWKVNTTKIIPIVLSSTGVIPKTLHQSLKILNIHPSTYILLQKAVILNTCRLVRKFLSQP

SEQ ID NO: 6501 - protein, 1398 aa, Boloria selene
MKMQPTAHPQVPGDSDRDANDGRQVPGGVRGEKNLRVAVSNHQTTFATPMDADKETDRKNDEQQIRINQATRYNLRKRKITPQNIKNSLKKTSGSMEILSSPVSSIQTIPSPTSSIHLFDLHDSPSSSSAISDGSEDVVQMAPALKSVPTTDQNRTRKKWSSDMNKFIWRTYLLVTEIETKIRGHLDILHKKFIEKYPNYDVSKQRIGDQRRAIVRNKLLPQNILDKIRQEVEKSLCVPSSMTSLLPDSATPTTDSSSTRIRWTEDINEAIIRTYFKITNLDSNRSFYRKPLHTIITELFPQISHVSEQRIADQRRVIVNNRLLPPARIEEIRKEVEKTLDTTAEHATITFTGEDTRDQSPLTSNNNDQNSNIKYIKSHNSHLNYQTSSEFNNKIQETFQTSLNNYENTDPTKRPFIPKQKTSKKFTYIVHYLNNQIIPQYIKTNDDFKTLHTIIYCAAYTAAVCNGSKIKNTQPSPLNDKQKTIPSWKIRLQKKIEALRADIGRMTQYIRGNRSNRLISQVTYIKEKFKVHSRHEEPNISNEQYLDSLKQRLSAKTSRLRRYDACTLRKTQNRQFVNNQKNFYRNLNNNTNNLQQNISSNRLPTKEQFQNYWSGIWANPVQHNNQADWIQTLLKEENRIPQMKFEAVPQETFEKVIKKTHNWKTPGSDHIHNFWYKKFSTLHPLLLIHINRFIKNPNSTPHFITQGVTFMIEKDSGETQNPAKYRPITCLQTFYKLLTSCIAALFNEHVTSNNILANEQKGCRKNSQGCKEQLIIDSVIMKQAYANKQDIFTMYVDYQKAFDSVPHSWLLEVLHLYHINPTLITFLSHVMKQWRTKLTVRNEIETDEIIIRRGIFQGDALSPLWFCLALNPLSHLLNKNNFGITTAANQSLSNPVLISHLLYMDDIKLYSHNINTLHQLANITKQFSNDICMEFGIEKCKTYSFCQGRLQLNDYVLNSEEKIDPLDQNDSYKYLGFQQDRQILQKHTKTELIRKFRHRLCSVLKTNLNSANTIKAINSYAIPVLTYSFGIISWTKTDLIKLQRLINTSMTKQRKHHPRSCTQRLTLPREEGGRGLIDISNLHNKQIATLRHFFHEQAEQSTLHKAIVEADKRFTPLNLQDRKSQTSQTITTNKDKIAAWNEKSLHGRHRHDLQQPHVDLIASNAWLKRGDLFPETEGFMIAIQDQVIDTKNYQKYIIRRPNITDICRHCHSSSETIQHITGACKSIAQHDYKHRHNQVAAIIHQNLAFQNNLLPKQVPYYKYEPQSVLENNKCKIYWDRTIVTDKTIHFNRPDITILDKERNSVYFIDISICNTHNLASTYTEKLAKYTDLAVEIKTQWKVNTTKIIPIVLSSTGVIPKTLHQSLKILNIHPSTYILLQKAVILNTCRLVRKFLSQP

SEQ ID NO: 6502 - protein, 1455 aa, Deilephila porcellus
MTMKPIANPQVPGDPERNANDGRQTPRRVRGEKNLRVAVSTHQTTQAAPVDSDTDQERNIDEKQTTTSRNSRYNLRSRKTHEQRSEPTLSPSSTRSLFESPPLSPNLFETHARPSSSSSSSSPEDDVQVAPAMDTAPASGQTRARYKWTSDMNEFIMRTYLTITELETKTRGYLDELHKRFISKYTHFNVSKQRVGDQRRAIVRNNLLSQNVLNAITLDVRKHLHPDSSTQNDITTTQMHSDIHVSSSSTRIRWTDDINESIMRAYLRITQLESNKTAYRRPLHAAIIEQFPQISHVSEQRIADQRRVIVNNRLLSAERLQEIRSEVESSLLIQEHTAPHNSLVIDNTIVEETNDPSTTSPGLETLLGTDTNRILHTNPRNNTVTNTDNITLESDLHKKIKETFENTHNKYKVSDPTKRPFIPKQKTSKKLCRIVNYINHNLLPQYTSVDHDFTTTQTIIYCAAYTAAICNGSKIKNTTGSNQGQCNQTTVPAWKKRIQSKILAYRKSIGRLIEYIKGNRSRKLMSHVKIIKDKYKIHSRYEEPNLSDEQYLDSLKQRLSAASSRLRRYDNCTLRKKQNFQFTHNEKLFYRQLNETTSNTQAASNGSNNSLPSPEALHCYWSNIWSKPVQHHQEADWLQSEVQHFHNTPLMKFDYIPIDVFINVLKKTHNWKAPGTDHIHNYWYKKFTTVHPLLHNNINMFIKNPEKMPIYITQGITYMIPKDNSDPQNPSKYRPITCLQTIYKILTACIAELIDKHITENNILAEEQKGCRKQSQGCKEQLIIDSIVMKQAYANKQDICTMYIDYSKAFDSVPHSWLIHILHIYKIHPTLIDYLRFTMQNWRTKLKAGNGSHFTETDNIPIRRGIFQGDALSPLWFCLALNPLSNLLNRTNLGIPTSDTHLISTFKLCHLMYMDDIKLYSNNITYLHQLADLTQQFSKDIYMTFGIDKCKTYTFKQGKLQLRDYTLNTGEQMEALNSDETYKYLGFQQDRQIRQKYTKTELTRKFKHRLVSVLKTKLNSRNTVKAINCYAIPILTYSFGVVTWSQTELKNLQRVINTTMTKHRKHHPRSCTQRLTLPGEEGGRGIIDVANLHNRQIIRLRKFFYERAIDSTLHKHIVDADKQLTPINLYSRNCQNNERLTENKEKIAAWIQKSLHGRHRLDLQQPHVDLVASNAWLRRGDLFPETVGFMLAIQDQVIDTKNYQKHIIHRPKIIDLCRHCHSSPETIQHITGACKSIAQSDYKHRHDHVAAIIHQNLAYQYKLVSEKLPYYKYKPQSVLENNKCRIYWDRTIVTDKTIHNNRPDITVLDKETMTVYIIDIAICNTHNLNNTCTEKISKYTDLSIEIKTQWKVNKTRTVPIILSTTGVIPHTLHNSLKTLHMHESTYKGKSYSTGRHTVPASYKFSKSIIDGTDSFTLFSAVPSCKYMPHAASTCHNRFTVSVKISVARDECMLRN

SEQ ID NO: 6503 - protein, 915 aa, Laothoe populi
MKKRLQNKIQFLRRSIGRLTQYIRGNRNYRLVIHVEALKDKYKTHSRYEEPNLTNEQYLDSLKQRLLAATSRLRRYNNCTLRKKQNRHFTNNEKVFYREINQITSNTQISNNSLHKPFPQSEELFSYWSNIWANPVKHNQQADWIRKDTHNHNETPQMTFDHIPVDIFVSVLKNTHNWKTPGTDHIQNYWYKKFTTVHPLLHNNLNMFIQNPNIMPAFITEGVTYMIPKDNNDTRDPAKYRPITCLQTIYKILTACITQLIDKHITDNNILAEEQKGCRKQSQGCKEQLILDSVVMKQSYSSKQDICTMYIDYRKAFDSVPHSWLVQILDLYKVHPVLITFLSHTMQQWRTKLKAGYGLHAIQTEYIPIRRGIFQGDALSPLWFCLALNPLSNLLNDLNCGIITNNNQLTPQVKLSHLMYMDDIKLYSNSITSLHQLADVTQQFSTDIQMNFGIDKCKTFTIKKGKIQLTDYTLGTGERMEPLEHYDTYKYLGFQQNRQIHHRHTKTELTRKFKHRLSSLLKTHLNSRNLIKAINSYAIPILTYSFGIITWSQTELKNLQRIINTTMTKQHKHHPRSCIQRLTLPREEGGRGIIDLVNLHNRQIATLRRFFHYRAENSDLHKSIVETDKKLTPLNLHNRNSQLNEQLTDNKTKIAAWSQKSLHGRHRHDLQQQHVDMSASNAWLKRGDLYPETEGFMLAIQDQVIDTKKYQKHIIRRPNIIDTCRHCHSNPETIQHITGACKSIAQSDYKHRHDQVAAIIHQYLAFQYKLIPNKLPYYKYQPQSVLENNKCRMYWDRTIVTDKTIYNNRPDITLLDKETMTVYIIDIAICNTHNLTTTHTEKIAKYTDLAIEIKTQWKVNNTKTIPIILSTTGVIPKTLHTSLKTLNIHASAYTLLQKAVILNTCRLVRKFLSIS

SEQ ID NO: 6504 - protein, 1446 aa, Signeta flammeata
MRLRSRNTLPQAGTRNGESRPEQTTSGSPTYSGGGTVSPEPAQSNAVAGRPTNTQSLNTPTHLSAPSASTQSPYQPPSSLSTTHFSQYLPSTLSGGLTRFTTMKENVEMSSHTSKYYLRSTKRIQHASGTSSQQHQEPPASPSSTRSLFESLTSSPHLFESQNISSCSSSNSSGSEDVVQVAHATNTAPTAGHKSARKKWTVEMNEFIWRTYLIVSELESKPQYLDLLHKKFKDKFKNFDVSKQRIGDQRRAILRNKLLPQQTINDIREDVEKEFQTNNTESQLITGEVSSRLRWTGDINEAIIREYFKITHCETNRTAYRGLLHAAITSQFPQISHVSEQRIADQRRFIIKNKRLTATRIQEIRNEVEQTLITLPTDSNTNNHIDNNQNPTPLQLQQTTSSSDESSLSTNVTRNTSTSNTVTHQYIQATENFYRKIEITFETTYAKYKNSDPTQRPFIPRQNTSKKFAHIVGYIDKNILPQYISTDHDFIMTQTLIYCAAYTAATCNGTKFRDTQNNNPLARQNSTYTPSWQKRLQKKKESLRKDIGRMTQYIRGNRNIKLIAHIATIKEKYKVHSRYEEPNLTNEQYLDSIKQRLSATSSRLKRYESCTLRKKQNAQFTNNEKLFYRQLNHNTSNTQQTSDTTLPKPLPSLEELKGYWSNIWANPVQHNVQAEWLLNIESQNDNNTSQMTFENIPVNIFLSVLKNTHNWKTPGSDHIHNYWYKKFTTTHVLLHNYLNMFIQDPSSMPTYITQGTTLMIPKDNNDTQNPTKYRPITCLQTIYKILTGCITQLIDAHLTKNNILAEEQKGCRKRSQGCKEQLIIDSVIMKKAYAQKQDICTMYIDYRKAFDSVPHSWLVQILNLYNIHPMLINFLSHTMQSWSTRLKVGKGTGTIVSDIIPIRRGIFQGDALSPLWFCLALNPLSHLLNSCNSGLQVSNDQTPSTATISHLLYMDDIKLYSNTVTSLHQLADIIQQFSKDINMEFGIDKCKTFTFKRGKVQLNDYTLDTGEKMDALEEIDSYKYLGFQQNRQIRQTETKKDLTRKFTHRINSVLKTQLNSQNTIKAINSYAIPILTYSFGIIKWSQTDLKKLQRIIHTSMTKQRKHHPRSCTERLTLPREEGGRGIIDITNLHNRQITALRIFFHDRAQSSEIHKSIVNADKNLTPLNLLDRNTQSTERLTDNKDKINTWTQKSLHGRHRNDLQRHHVDIEASNAWLKRGDLFPETEGFMLAIQDQVIDTKNYQKHIIRRPNINDTCRRCHSSPETIQHITGACKSIAQTDYKHRHDQVAAIIHQNLAFQYKFISEKVPYYKYKPQAVLENNNYRIYWDRTIVTDKTIYNNRPDITILDKKNSSVYLIDIAICNTHNLNNTFSEKISKYTDLAIEIKTQWQVNYTKTVPIVLSTTGVIPHTLHAGLKTLKIRETAYNLLQKATILNTCRLVRKFLT

SEQ ID NO: 6505 - protein, 758 aa, Laothoe populi
MTFDHIPVDIFVSVLKNTHNWKTPGTDHIQNYWYKKFTTVHPLLHNNLNMFIQNPNIMPAFITEGVTYMIPKDNNDTRNPAKYRPITCLQTIYKILTACITQLIDKHITDNNILAEEQKGCRKQSQGCKEQLILDSVVMKQSYSSKQDICTMYIDYRKAFDSVPHSWLVQILDLYKVHPVLITFLSHTMQQWRTKLKAGYGLHAIQTEYIPIRRGIFQGDALSPLWFCLALNPLSNLLNDLNCGIITNNNQLTPQVKLSHLMYMDDIKLYSNSITSLHQLADVTQQFSTDIQMNFGIDKCKTFTIKKGKIQLTDYTLGTGERMEPLEHYDTYKYLGFQQNRQIHHRHTKTELTRKFKHRLSSLLKTHLNSRNLIKAINSYAIPILTYSFGIITWSQTELKNLQRIINTTMTKQRKHHPRSCIQRLTLPREEGGRGIIDLVNLHNRQIATLRRFFHYRAENSDLHKSIVETDKKLTPLNLHNRNSQLNEQLTDNKTKIAAWSQKSLHGRHRHDLQQQHVDMSASNAWLKRGDLYPETEGFMLAIQDQVIDTKNYQKHIIRRPNIIDTCRHCHSHPETIQHITGACKSIAQSDYKHRHDQVAAIIHQYLAFQYNLIPNKLPYYKYQPQSVLENNKCRMYWDRTIVTDKTIYNNRPDITLLDKETMTVYIIDIAICNTHNLTTTHTEKIAKYTDLAIEIKTQWKVNNTKTIPIILSTTGVIPKTLHTSLKTLNIHASAYTLLQKAVILNTCRLVRKFLSIV

SEQ ID NO: 6506 - protein, 1409 aa, Deilephila porcellus
MTMKPIANPQVPGDPERNANDGRQTPRRVRGEKNLRVAVSTHQTTQAAPVDSDTDQERNIDEKQTTTSRNSRYNLRSRKTHEQRSEPTLSPSSTRSLFESPPSSPNLFETHARPSSSSSSSSPEDDVQVAPAMDTAPASGQTRARYKWTSDMNEFIMRTYLTITELETKTRGYLDELHKRFISKYTHFNVSKQRVGDQRRAIVRNNLLSQNVLNAITLDVRKHLHPDSSTQNDITTTQMHSDIHVSSSSTRIRWTDDINESIMRAYLRITQLESNKTAYRRPLHAAIIEQFPQISHVSEQRIADQRRVIVNNRLLSAERLQEIRSEVESSLLIQEHTAPHNSLAIDNTIVEETNDPSTTSPGLETLLATDTNRILHTNPRNNTVTNTDNITLESDLHKKIKETFENTYNKYKVSDPTKRPFIPKQKTSKKLCRIVNYINHNLLPQYTSVDHDFTTTQTIIYCAAYTAAICNGSKIKNTTGSNQGQCNQTTVPAWKKRIQSKILAYRKSIGRLIEYIKGNRSRKLMSHVKIIKDKYKIHSRYEEPNLSDEQYLDSLKQRLSAASSRLRRYDNCTLRKKQNFQFTHNEKLFYRQLNETTSNIQAASNGSNNSLPSPEALHCYWSNIWSKPVQHHQEADWLQSEVQHFHNTPLMKFDYIPIDVFINVLKKTHNWKAPGTDHIHNYWYKKFTTVHPLLHNNINMFIKNPEKMPIYITQGITYMITKDNSDPQNPSKYRPITCLQTIYKILTACIAELIDKHITENNILAEEQKGCRKQSQGCKEQLIIDSIVMKQAHANKQDICTMYIDYSKAFDSVPHSWLIHILHIYKIHPTLIDYLRFTMQNWRTKLKAGNGSHFTETDNIPIRRGIFQGDALSPLWFCLALNPLSNLLNRTNLGIPTSDTHLISTFKLCHLMYMDDIKLYSNNITYLHQLADLTQQFSKDIYMTFGIDKCKTYTFKQGKLQLRDYTLNTGEQMEALNSDETYKYLGFQQDRQIRQKYTKTELTRKFKHRLVSVLKTKLNSRNTVKAINCYAIPILTYSFGVVTWSQTELKNLQRVINTTMTKHRKHHPRSCTQRLTLPGEEGGRGIIDVANLHNRQIIRLRKFFYDRAIDSTLHKHIVDADKQLTPINLYSRNCQNNERLTENKEKIAAWIQKSLHGRHRLDLQQPHVDLVASNAWLRRGDLFPETVGFMLAIQDQVIDTKNYQKHIIHRPNIIDLCRHCHSSPETIQHITGACKSIAQSDYKHRHDQVAAIIHQNLAYQYKLVSEKLPYYKYKPQPVLENNKCRIYWDRTIVTDKTIHNNRPDITVLDKETMTVYIIDIAICNTHNLNNTYTEKISKYTDLSIEIKTQWKVNKTRTVPIILSTTGVIPHTLHNSLKTLHMHESTYILLQKAVILNTCRLVRKFLSNNN

SEQ ID NO: 6507 - protein, 757 aa, Mimas tiliae
MTFDHIPLDIFVNVIKKTHNWKTPGTDHIQNFWYKKFTSVHPLLHKHLNMFIQNPDIMPAYITQGTTYMIPKDNNDTLNPAKYRPITCLQTIYKILTACISQLIDRHITDNNILAEEQKGCRKQSQGCKEQLIIDSVVMKQAHASKQDICAIYIDYRKAFDSVPHSWLLQILDIYKVHPVLVTFLSHTMQQWRTKLKVGYGNHAIQTEDIPIRRGIFQGDALSPLWFCLSLNPLSNLLNSINSGIITNNNQLTPSVTLSHLMYMDDIKLYSNDITSLHQLADMTQQFSKDIQMNFGIDKCKTFTIKKGRLQLMGYNLNTGERVEPLEHNDTYKYLGFQQDRQIHQKHTKLELTRKFKHRLSSLLKTHLNSRNMVKAINSYAIPILTYSFGIITWTQTELKNLQRVINTTMTKHRKHHPRSCTQRLTLPREEGGRGIIDVVNLHNRQITTLRRFFHSRAESSYLHKSVVDADKLLSPLNLNDRNIQRNEHLTDNKAKIAAWAQKSLHGRHRHDLQLQHVDMTASNAWLKRGDLYPETEGFMLAIQDQVIDTKNYQKYIIRRPNINDTCRHCHSNPETIQHITGACKSIAQSDYKHRHDQVASIVHQYLAFQYKLIPDKVPYYKYQPQSVLENNKCRMYWDRTIVTDKTIYSNRPDITLLDKETMTVYIIDIAICNTHNLTTTHTEKIAKYTELAIEIKTQWKATNTKTIPIILSNTGVIPKSLHTSLKILNIHASAYTLLQKAVILNTCRLVRKFLSI

SEQ ID NO: 6508 - protein, 1174 aa, Mimas tiliae
MTIKIFLKICADLTNVIDSFTNCVHNNNNNNNNNNNFKLTELESNRTAYRKALHKAITEQFPQISHVSEQRIADQRRVIINNKLISHERLQQIRTEVQNALTTQCDNITPEQLTLTNDTLDNRHTQPTLSLNNCDRTQHTNVTATTQNLNINTSNYTLSDVELNTEVEEMFNTTYIKYKHSSPTHRPFIPKQKTSRRFSYIINYIDQNIIPKYTSVEHDFIKTQTIIYCAAYTASICNGSKIKDNPEEQIHNHNHTKTPAWKKRLENKIHYLRRSIGRLTQYIRGNRNNRIITHIETLKYKYKIHSRYEEPNVTNEQYLDSLKQRLSAATSRLRRYNDCTLRKKQNANFTNNERVFYRKINQTTSNTQVSNNTLHTPLPQPEELHSYWSNIWANPVQHNQQADWIKNETQNLTNIPQMTFDHIPLDIFVNVIKKTHNWKTPGTDHIQNFWYKKFTSVHPLLHKHLNMFIQNPDIMPAYITQGTTYMIPKDNNDTLNPAKYRPITCLQTIYKILTACISQLIDRHITDNNILAEEQKGCRKQSQGCKEQLIIDSVVMKQAHASKQDICAIYIDYRKAFDSVPHSWLLQILDIYKVHPVLVTFLSHTMQQWRTKLKVGYGNHAIQTEDIPIRRGIFQGDALSPLWFCLSLNPLSNLLNSINSGIITNNNQLTPSVTLSHLMYMDDIKLYSNDITSLHQLADMTQQFSKDIQMNFGIDKCKTFTIKKGRLQLMGYNLNTGERVEPLEHNDTYKYLGFQQDRQIHQKHTKLELTRKFKHRLSSLLKTHLNSRNMVKAINSYAIPILTYSFGIITWTQTELKNLQRVINTTMTKHRKHHPRSCTQRLTLPREEGGRGIIDVVNLHNRQITTLRRFFHSRAESSYLHKSVVDADKLLSPLNLNDRNIQRNEHLTDNKAKIAAWAQKSLHGRHRHDLQLQHVDMTASNAWLKRGDLYPETEGFMLAIQDQVIDTKNYQKYIIRRPNINDTCRHCHSNPETIQHITGACKSIAQSDYKHRHDQVASIVHQYLALQYKLIPDKVPYYKYQPQSVLENNKCRMYWDRTIVTDKTIYSNRPDITLLDKETMTVYIIDIAICNTHNLTTTHTEKIAKYTELAIEIKTQWKATNTKTIPIILSNTGVIPKSLHTSLKILNIHASAYTLLQKAVILNTCRLVRKFLSI

SEQ ID NO: 6509 - protein, 1409 aa, Deilephila porcellus
MTMKPIANPQVPGDPERNANDGRQTPRRVRGEKNLRVAVSTHLTTQAAPVDSDTDQERNIDEKQTTTSRNSRYNLRSRKTHEQRSEPTLSPSSTRSLFESPLSSPNLFETHARPSSSSSSSSPEDDVQVAPAMDTAPASGQTRARYKWTSDMNEFIMRTYLTITELETKTRGYLDELHKRFISKYTHFNVSKQRVGDQRRAIVRNNLLSQNVLNAITLDVRKHLHPDSSTQNDITTTQMHSDIHVSSSSTRIRWTDDINESIMRAYLRITQLESNKTAYRRPLHAAIIEQFPQISHVSEQRIADQRRVIVNNRLLSAERLQEIRSEVESSLLIQEHTAPHNSLAIDNTIVEETNDPSTTSPGLETLLATDTNRILHTNPRNNTVTNTDNITLESDLHKKIKETFENTYNKYKVSDPTKRPFIPKQKTSKKLYRIVNYINHNLLPQYTSVDHDFTTTQTIIYCAAYTAAICNGSKIKNTTGSNQGQCNQTTVPAWKKRIQSKILAYRKSIGRLIEYIKGNRSRKLMSHVKIIKDKYKIHSRYEEPNLSDEQYLDSLKQRLSAASSRLRRYDNCTLRKKQNFQFTHNEKLFYRQLNETTSNIQAASNGSNNSLPSPEALHCYWSNIWSKPVQHHQEADWLQSEVQHFHNTPLMKFDYIPIDVFINVLKKTHNWKAPGTDHIHNYWYKKFTTVHPLLHNNINMFIKNPEKMPIYITQGITYMIPKDNSDPQNPSKYRPITCLQTIYKILTACIAELIDKHITENNILAEEQKGCRKQSQGCKEQLIIDSIVMKQAHANKQDICTMYIDYSKAFDSVPHSWLIHILHIYKIHPTLIDYLRFTMQNWRTKLKAGNGSHFTETDNIPIRRGIFQGDALSPLWFCLALNPLSNLLNRTNLGIPTSDTHLISTFKLCHLMYMDDIKLYSNNITYLHQLADLTQQFSKDIYMTFGIDKCKTYTFKQGKLQLRDYTLNTGEQMEALNSDETYKYLGFQQDRQIRQKYTKTELTRKFKHRLVSVLKTKLNSRNTVKAINCYAIPILTYSFGVVTWSQTELKNVQRVINTTMTKHRKHHPRSCTQRLTLPGEEGGRGIIDVANLHNRQIIRLRKFFYDRAIDSTLHKHIVDADKQLTPINLYSRNCQNNERLTENKEKIAAWIQKSLHGRHRLDLQQPHVDLVASNAWLRRGDLFPETVGFMLAIQDQVIDTKNYQKHIIHRPNIIDLCRHCHSSPETIQHITGACKSIAQSDYKHRHDQVAAIIHQNLAYQYKLVSEKLPYYKYKPQPVLENNKCRIYWDRTIVTDKTIHNNRPDITVLDKETMTVYIIDIAICNTHNLNNTYTEKISKYTDLSIEIKTQWKVNKTRTVPIILSTTGVIPHTLHNSLKTLHMHESTYILLQKAVILNTCRLVRKFLSNNN

SEQ ID NO: 6510 - protein, 1457 aa, Mimas tiliae
MRLRNRTIPQAGTGANRDGESRPGPSSSGCPTCSGEGTVSHQPAQFKTVAGQHDQPATSCSSPTSLLSSSSSSPAYPGRNQASHSSNSLTLPIDIHRTPPNSDTNKIKGKKILNRRTIRYNLRTIENIPSHIPPRDNETRSTPSSTRSLFDSPSSSPHPFDNQDRSNSSCSSSSPEDVVQMAPATISAPTAGLNRVRKSWSSEMNQFIWRTYLTITELETKTRGYLDTLHRHFIERFTDFDVSKQRIGDQRRAIIRNRLIPPNILDAIKEDVKRKLHSNPSTNEAHGSSTQINNVSRTNLMSSRMRWTDDMNEAIMRAYFKLSELESNRTAYRKALHTAITEQFPQISHVSEQRIADQRRVIINNKLISHERLQQIRTEVQNALTTQYDNITPEQLTLTNDTLDNRHTQPTLSLNNCDRTQHTNVTATTQNLNINTSNYTLSDVELNTKVEEMFNTTYIKYKHSSPTHRPFIPKQKTSRRFSYIINYIDQNIIPKYTSVEHDFIKTQTIIYCAAYTASICNGSKIKDNPEEQIHNHNHTKTPAWKKRLENKIHYLRRSIGRLTQYIRGNRNNRIITHIETLKYKYKIHSRYEEPNVTNEQYLDSLKQRLSAATSRLRRYNDCTLRKKQNANFTNNERVFYRKINETTSNTQVSNNTLRTPLPQPQELHSYWSNIWANPVQHNQQADWIKNETQNLTNIPQMTFDHIPLDIFVNVIKKTHNWKTPGTDHIQNFWYKKFTSAHPLLHKHLNMFIQNPDIMPAYITQGTTYMIPKDNNDTLNPAKYRPITCLQTIYKILTACISQLIDRHITDNNILAEEQKGCRKQSQGCKEQLIIDSVVMKQAHASKQDICAIYIDYRKAFDSVPHSWLLQILDIYKVHPVLVTFLSHTMQQWRTKLKVGYGNHAIQTEDIPIRRGIFQGDALSPLWFCLSLNPLSNLLNSINSGIITNNNQLTPSVTLSHLMYMDDIKLYSNDITSLHQLADMTQQFSKDIQMNFGIDKCKTFTIKKGRLQLMGYNLNTGERVEPLEHNDTYKYLGFQQDRQIHQKHTKLELTRKFKHRLSSLLKTHLNSRNMVKAINSYAIPILTYSFGIITWTQTELKNLQRVINTTMTKHRKHHPRSCTQRLTLPREEGGRGIIDVVNLHNRQITTLRRFFHSRAESSYLHKSVVDADKLLSPLNLNDRNIQRNEHLTDNKAKIAAWAQKSLHGRHRHDLQLQHVDMTASNAWLKRGDLYPETEGFMLAIQDQVIDTKNYQKYIIRRPNTNDTCRHCHSNPETIQHITGACKSIAQSDYKHRHDQVASIVHQYLAFQYKLIPDKVPYYKYQPQSVLENNKCRMYWDRTIVTDKTIYSNRPDITLLDKETMTVYIIDIAICNTHNLTTTHTEKIAKYTELAIEIKTQWKATNTKTIPIILSNTGVIPKSLHTSLKILNIHASAYTLLQKAVILNTCRLVRKFLSI

SEQ ID NO: 6511 - protein, 1171 aa, Deilephila porcellus
MHSDIHVSSSSTRIRWTDDINESIMRAYLRITQLESNKTAYRRPLHAAIIEQFPQISHVSEQRIADQRRVIVNNRLLSAERLQEIRSEVESSLLIQEHTAPHNSLAIDNTIVEETNDPSTTSPGLETLLATDTNRILHTNPRNNTVTNTDNITLESDLHKKIKETFENTHNKYKVSDPTKRPFIPKQKTSKKLCRIVNYINHNLLPQYTSVDHDFTTTQTIIYCAAYTAAICNGSKIKNTTGSNQGQCNQTTVPAWKKRIQSKILAYRKSIGRLIEYIKGNRSRKLISHVKIIKDKYKIHSRYEEPNLSDEQYLDSLKQRLSAASSRLRRYDNCTLRKKQNFQFTHNEKLFYRQLNETTSNIQAASNGSNNSLPSPEALHCYWSNIWSKPVQHHQEADWLQSEVQHFHNTPLMKFDYIPIDVFINVLKKTHNWKAPGTDHIHNYWYKKFTTVHPLLHNNINMFIKNPEKMPIYITQGITYMIPKDNSDPQNPSKYRPITCLQTIYKILTACIAELIDKHITENNILAEEQKGCRKQSQGCKEQLIIDSIVMKQAHANKQDICTMYIDYSKAFDSVPHSWLIHILHIYKIHPTLIDYLRFTMQNWRTKLKAGNGSHFTETDNIPIRRGIFQGDALSPLWFCLALNPLSNLLNRTNLGIPTSDTHLISTFKLCHLMYMDDIKLYSNNITYLHQLADLTQQFSKDIYMTFGIDKCKTYTFKQGKLQLRDYTLNTGEQMEALNSDETYKYLGFQQDRQIRQKYTKTELTRKFKHRLVSVLKTKLNSRNTVKAINCYAIPILTYSFGVVTWSQTELKNLQRVINTTMTKHRKHHPRSCTQRLTLPGEEGGRGIIDVANLHNRQIIRLRKFFYDRAIDSILHKHIVDADKQLTPINLYSRNCQNNERLTENKEKIAAWIQKSLHGRHRLDLQQPHVDLVASNAWLRRGDLFPETVGFMLAIQDQVIDTKNYQKHIIHRPNIIDLCRHCHSSPETIQHITGACKSIAQSDYKHRHDQVAAIIHQNLAYQYKLVSEKLPYYKYKPQPVLENNKCRIYWDRTIVTDKTIYNNRPDITVLDKETMTVYIIDIAICNTHNLNNTYTEKISKYTDLSIEIKTQWKVNKTRTVPIILSTTGVIPHTLHNSLKTLHMHESTYILLQKAVILNTCRLVRKFLSNNN

SEQ ID NO: 6512 - protein, 1455 aa, Mimas tiliae
MRLRNRTIPQAGTGANRDGESRPGPSSSGCPTYSGEGTVSHKPAQFKTVAGQHDQPATSCSSPNSLLSSSSPAYPGRNQASHSSNSLTLPIDIHRTPPNSDTNNIKGKKILNRRTIRYNLRTIENIPSHIPPRDNETRSSPSSTRSLFDSPSSSPHPFDNQDRSSSSCSSSSPEDVVQMAPATISAPTAGLNRVRKSWSSEMNQFIWRTYLTITELETKTRGYLDTLHRHFIEKFTDFDVSKQRIGDQRRAIIRNRLIPPNILDAIKEDVKRKLHSNPSTNEAHGSSTQINNVSRTNLMSSRMRWTDDMNEAIMRAYFKLTELESNRTAYRKALHKAITEQFPQISHVSEQRIADQRRVIINNKLISHERLQQIRTEVQNALTTQYDNTTPEQLTFTNDTLDNRHTQPTLSLNNCDRTQHTNVTATTQNLNINTSNYTLSDVELNTKVEEMFNTTYIKYKHSSPTHRPFIPKQKTSRRFSYIINYIDQNIIPKYTSVEHDFIKTQTIIYCAAYTASICNGSKIKDNPEEQIHDHNHTKTPAWKKRLENKIHYLRRSIGRLTQYIRGNRNNRIITHVETLKYKYKIHSRYEEPNVTNEQYLDSLKQRLSAATSRLRRYNDCTLRKKQNANFTNNERVFYRKINETTSNTQVSNNTLHTPLPQPQELHSYWSNIWANPVQHNQQADWIKNETQNLTNIPQMTFDHIPLDIFVNVIKKTHNWKTPGTDHIQNFWYKKFTSAHPLLHKHLNMFIQNPDIMPAYITQGTTYMIPKDNNDTLNPAKYRPITCLQTIYKILTACISQLIDRHITDNNILAEEQKGCRKQSQGCKEQLIIDSVVMKQAHASKQDICAIYIDYRKAFDSVPHSWLLQILDIYKVHPVLVTFLSHTMQQWRTKLKVGYGNHAIQTEDIPIRRGIFQGDALSPLWFCLSLNPLSNLLNSINSGIITNNNQLTPSVTLSHLMYMDDIKLYSNDITSLHQLADMTQQFSKDIQMNFGIDKCKTFTIKKGRLQLMGYNLNTGERVEPLEHNDTYKYLGFQQDRQIHQKHTKLELTRKFKHRLSSLLKTHLNSRNMVKAINSYAIPILTYSFGIITWTQTELKNLQRVINTTMTKHRKHHPRSCTQRLTLPREEGGRGIIDVVNLHNRQITTLRRFFHSRAESSYLHKSVVDADKLLSPLNLNDRNIQRNEHLTDNKAKIAAWAHKSLHGRHRHDLQLQHVDMTASNAWLKRGDLYPETEGFMLAIQDQVIDTKNYQKYIIRRPNINDTCRHCHSNPETIQHITGACKSIAQSDYKHRHDQVASIVHQYLAFQYKLIPDKVPYYKYQPQSVLENNKCRMYWDRTIVTDKTIYSNRPDITLLDKETMTVYIIDIAICNTHNLTTTHTEKIAKYTELAIEIKTQWKATNTKTIPIILSNTGVIPKSLHTSLKILNIHASAYTLLQKAVILNTCRLVRKFLSI

SEQ ID NO: 6513 - protein, 1461 aa, Laothoe populi
MRLRNRIIPQAGTGANCDGESRPGPSSPGCPAYSGEGTVSHQPAQFQTVAAPHDTLTPSCFSPISPLLSKHSSPTSQCNRIQEFHSSESPILPIYLHKTLSNISNIANANDNLKKDMENGRTTKYNLRTRKNNNIENVAAHIPLRHNETPSPRSSNRSLFDSPSSSPHPFDELNSSESSGSSSGTEDVVQVASTTTAAPTTGLNCVRKSWSSEMNEFIWRTYLTITELETKTRGYLDILHKYFTDTFTDFEVSKQRIGDQRRAIVRNKLIPQNILDAIKDDVKRSLNLNPSTNETLGSTQKSIDSHTYLKSSRIRWTDDMNEAIMRAYFKLTKLESNRTAYRKPLHKVITEQFPHIAHVSEQRVADQRRIIINNKLISLEKLQEIRTEVQNTLDTQHEGNNSEYLSPTSNLLSTVSADVIDDSQYTNGIAPIQNLTTNTHNYTLSNNELTNKIEVIFSTTYNKYNNSNPTQRPYIPKQKTSKKLAYIINYIDQNIIPQYTSIDHDFIKIQTVIYCAAYTAAICNGAKIKDTTVEQRHDLYQTKTPAWKKRLQNKIQFLRRSIGRLTQYIRGNRNYRLVIHVEALKDKYKTHSRYEEPNLTNEQYLDSLKQRLLAATSRLRRYNNCTLRKKQNRNFTNNEKVFYREINQITSNTQISNNSLHKPFPQSEVLFSYWSNIWANPVQHNQQADWIRKDTQNHNETPQMTFDHIPVDIFVSVLKNTHNWKTPGTDHIQNYWYKKFTTVHPLLHNNLNMFIQNPNIMPAFITEGVTYMIPKDNNDTRNPAKYRPITCLQTIYKILTACITQLIDKHITDNNILAEEQKGCRKQSQGCKEQLILDSVVMKQSYSSKQDICTMYIDYRKAFDSVPHSWLVQILDLYKVHPVLITFLSHTMQQWRTKLKAGYGLHAIQTEYIPIRRGIFQGDALSPLWFCLALNPLSNLLNDLNCGIITNNNQLTPQVKLSHLMYMDDIKLYSNSITSLHQLADVTQQFSTDIQMNFGIDKCKTFTIKKGKIQLTDYTLGTGERMEPLEHYDTYKYLGFQQNRQIHHRHTKTELTRKFKHRLSSLLKTHLNSRNLIKAINSYAIPILTYSFGIITWSQTELKNLQRIINTTMTKQRKHHPRSCIQRLTLPREEGGRGIIDLVNLHNRQIATLRRFFHYRAENSDLHKSIVETDKKLTPLNLHNRNSQLNEQLTDNKTKIAAWSQKSLHGRHRHDLQQQHVDMSASNAWLKRGDLYPETEGFMLAIQDQVIDTKNYQKHIIRRPNIIDTCRHCHSNPETIQHITGACKSIAQSDYKHRHDQVAAIIHQYLAFQYKLIPNKLPYYKYQPQSVLENNKCRMYWDRTIVTDKTIYNNRPDITLLDKETMTVYIIDIAICNTHNLTTTHTEKIAKYTDLAIEIKTQWKVNNTKTIPIILSTTGVIPKTLHTSLKTLNIHASAYTLLQKAVILNTCRLVRKFLSIS

SEQ ID NO: 6514 - protein, 931 aa, Hyles vespertilio
MGPNQEQCNQTVTPAWKKRIQSKIQSYRKSIGRLTEYIKGNRSQKLISHIAIIKDKYKIHSRYEEPNLSDEQYLDSLKQRLSATSSRLKRYDNCTLRKKQNIQFIHNEKLFYRQLNGTTRNIQVASNGSNNSLPSPEALYCYWSNIWANPVQHHHEADWIQSEVQHLHNTPLMKFDYIPIDVFINVIKKTHNWKAPGTDHIHNYWYKKFTTVHPILHNNINMFIKNPETMPIYITQGITYMIPKDNNDPQNPAKYRPITCLQTIYKILTACIALLIDRHISENNILAEEQKGCRKQSQGCKEQLIIDSVVMKQAHANKQDICTMYIDYSKAFDSVPHSWLIHILHIYKIHPTIIEYLRFSMQNWRTKLKAGSGSHFTETDNIPIRRGIFQGDALSPLWFCLALNPLSNLLNHTNLGIPTSNTQLISTFKLCHLMYMDDIKLYSNNISSLHQLADLTQQFSKDIYMTFGIDKCKTYTFKQGKLQLKNYMTHTGEQMEALNSGETYKYLGFQQDRQIREKYTKTELTRKFKHRLGSVLKTQLNSRNTVKAINSYAIPILTYSFGVVKWSQTELKNLQRIINTTMTKHRKHHPRSCTQRLTLPREEGGRGIIDVANLHNRQIIRLRHFFYDRAIDSTLHKHIVEADKQLTPINLYNRNSQNNERLTDNNEKIAAWTQKSLHGRHRHDLQQPHVDLVASNAWLRQGDLFPETVGFMLAIQDQVIDTKNYQKYIIHRPNIIDTCRHCHSSPETIQHITGACKSIAQSDYKHRHDQVAAIVHQNLAYQYKLVPEKLPYYKYKPESVLENNKCRIYWDRTIVTDKTIHNNRPDITVLDKETMTVYIIDIAICNTHNLNNTHTEKISKYTDLAIEIKTQWKINKTKTVPIILSSTGVIPHTLHNSLKILNMHESTYILLQKAVILNTCRLVRKFLSNNN

SEQ ID NO: 6515 - protein, 1409 aa, Deilephila porcellus
MTMKPIANPQVPGDPERNANDGRQTPRRVRGEKNLRVAVSTHQTTQAAPVDSDTDQERNIDEKQTTTSRNSRYNLRSRKTHEQRSEPTLSPSSTRSLFESPPSSPNLFETHARPSSSSSSSSPEDDVQVAPAMDTAPASGQTRARYKWTSDMNEFIMRTYLSITELETKTRGYLDELHKRFISKYTHFNVSKQRVGDQRRAIVRNNLLSQNVLNAITLDVRKHLHPDSSTQNDITTTQMHSDIHVSSSSTRIRWTDDINESIMRAYLRITQLESNKTAYRRPLHAAIIEQFPQISHVSEQRIADQRRVIVNNRLLSAERLQEIRSEVESSLLIQEHTAPHNSLAIDNTIVEETNDPSTTSPGLETLLATDTNRILHTNPRNNTVTNTDNITLESDLHKKIKETFENTHNKYKDSDPTKRPFIPKQKTSKKLCRIVNYINHNLLPQYTSVDHDFTTTQTIIYCAAYTAAICNGSKIKNTTGSNQGQCNQTTVPAWKKRIQSKIQAYRKSIGRLIEYIKGNRSRKLMSHVKIIKDKYKIHSRYEEPNLSDEQYLDSLKQRLSAASSRLRRYDNCTLRKKQNFQFTHNEKLFYRQLNETTSNIQAASNGSNNSLPSPEALHCYWSNIWSKPVQHHQEADWLQSEVQHFHNTPLMKFDYIPIDVFINVLKKTHNWKAPGTDHIHNYWYKKFTTVHPLLHNNINMFIKNPEKMPMYITQGITYMIPKDNSDPQNPSKYRPITCLQTIYKILTACIAELIDKHITENNILAEEQKGCRKQSQGCKEQLIIDSIVMKQAHANKQDICTMYIDYSKAFDSVPHSWLIHILHIYKIHPILIDYLRFTMQNWRTKLKAGNGSHFTETDNIPIRRGIFQGDALSPLWFCLALNPLSNLLNRTNLGISTSDTHLISTFKLCHLMYMDDIKLYSNNITYLHQLADLTQQFSKDIYMTFGIDKCKTYTFKQGKLQLRDYTLNTGEQMEALNSDETYKYLGFQQDRQIRQKYTKSELTRKFKHRLVSVLKTKLNSRNTVKAINSYAIPILTYSFGVVTWSQTELKNLQRVINTTMTKHRKHHPRSCTQRLTLPEEEGGRGIIDVANLHNRQIIRLRKFFYDRAIDSILHKHIVDADKQLTPINLYSRNCQNNERLTENKEKIAAWIQKSLHGRHRLDLQQPHVDLVASNAWLRRGDLFPETVGFMLAIQDQVIDTKNYQKHIIHRPNIIDLCRHCHSSPETIQHITGACKSIAQSDYKHRHDQVAAIIHQNLAYQYKLVSEKLPYYKYKPQPVLENNKCRIYWDRTIVTDKTIHNNRPDITVLDKETMTVYIIDIAICNTHNLNNTYTEKISKYTDLSIEIKTQWKVNKTRTVPIILSSTGVIPHTLHNSLKTLHMHESTYILLQKAVILNTCRLVRKFLSNNN

SEQ ID NO: 6516 - protein, 1142 aa, Laothoe populi
MNEAIMRVYFKLTKLESNRTAYRKPLHKVITEQFPHIAHVSEQRVADQRRIIINNKLISLEKLQEIRTEVQNTLDTQHEGNNSEYLSPTSNLHSTVSADVIDDSQYTNGIAPIQNLTTNTHNYTLSNNELTNKIEEIFSTTYNKYNNSNPTQRPYIPKQKTSKKLAYIINYIDQNIIPQYTSIDHDFIEIQTVIYCAAYTAAICNGSKIKDTTEEQRHDLYQTKTPAWKKRLQNKIQFLRRSIGRLTQYIRGNRNYRLIIHVEALKDKYKTHSRYEEPNLTNEQYLDSLKQRLLAATSRLRRYNNCTLRKKQNRNFTKNEKVFYREINQITSNTQISNNSLHKPFPQSEELFSYWSNIWANPVQHNQQADWIRKDTQNHNETPQMTFDHIPVDIFVSVLKNTHNWKTPGTDHIQNYWYKKFTTVHPLLHNHLNMFIQNPNIMPAFITEGVTYMIPKDNHDTRDPAKYRPITCLQTIYKILTACITQLIDKHITDNNILAEEQKGCRKQSQGCKEQLILDSVVMKQSYSSKQDICTMYIDYRKAFDSVPHSWLVQILDLYKVHPVLITFLSHTMQQWRTKLKAGYGVHAIQTEDIPIRRGIFQGDALSPLWFCLALNPLSNLLNDLNCGIITNNNQLTPQVKLSHLMYMDDIKLYSNSITSLHQLADVTQQFSTDIQMNFGIDKCKTFTFKKGKIQLTDYTLGTGERMEPLEHYDTYKYLGFQQNRQIHHRHTKTELTRKFKHRLSSLLKTHLNSRNLIKAINSYAIPILTYSFGIITWSQTELKNLQRIINTTMTKQRKHHPRSCIQRLTLPREEGGRGIIDLVNLHNRQIATLRRFFHYRAENSDLHKSIVETDKKLTPLNLHNRNSQLNEQLTDNKTKIAAWSQKSLHGRHRHDLQQQHVDMSASNAWLKRGDLYPETEGFMLAIQDQVIDTKNYQKHIIRRPNIIDTCRHCHSHPETIQHITGACKSIAQSDYKHRHDQVAAIIHQYLAFQYKLIQNKLPYYKYQPQSVLENNKCRMYWDRTIVTDKTIYNNRPDITLLDKETMTVYIIDIAICNTHNLTTTHTEKIAKYTDLAIEIKTQWKVNNTKTIPIILSTTGVIPKTLHTSLKTLNIHASAYTLLQKAVILNTCRIVRKFLSIV

SEQ ID NO: 6517 - protein, 1461 aa, Laothoe populi
MRLRNRIIPQAGTGANCDGESRPGPSSPGCPAYSGEGTVSHQPAQFQTVAAPHDTLTPSCFSPISPLLSKHSSPTSQCNRIQEFHSSESPILPIYLHKTLSNISNIANANDNLKKDMENGRTTKYNLRTRKNNNIENVAAHIPLRHNETPSPRSSNRSLFDSPSSSPHPFDELNSSESSGSSSGTEDVVQVASTTTAAPTTGLNCVRKSWSSEMNEFIWRTYLTITELETKTRGYLDILHKYFTDTFTDFEVSKQRIGDQRRAIVRNKLIPQNILDAIKDDVKRSLNLNPSTNETLGSTQKSIDSHTYLKSSRIRWTDDMNEAIMRAYFKLTKLESNRTAYRKPLHKVITEQFPHIAHVSEQRVADQRRIIINNKLISLEKLQEIRTEVQNTLDTQHEGNNSEYLSPTSNLLSTVSADVIDDSQYTNGIAPIQNLTTNTHNYTLSNNELTNKIEVIFSTTYNKYNNSNPTQRPYIPKQKTSKKLAYIINYIDQNIIPQYTSIDHDFIKIQTVIYCAAYTAAICNGAKIKDTTVEQRHDLYQTKTPAWKKRLQNKIQFLRRSIGRLTQYIRGNRNYRLVIHVEALKDKYKTHSRYEEPNLTNEQYLDSLKQRLLAATSRLRRYNNCTLRKKQNRNFTNNEKVFYREINQITSNTQISNNSLHKPFPQSEVLFSYWSNIWANPVQHNQQADWIRKDTQNHNETPQMTFDHIPVDIFVSVLKNTHNWKTPGTDHIQNYWYKKFTTVHPLLHNNLNMFIQNPNIMPAFITEGVTYMIPKDNNDTQNPAKYRPITCLQTIYKILTACITQLIDKHITDNNILAEEQKGCRKQSQGCKEQLILDSVVMKQSYSSKQDICTMYIDYRKAFDSVPHSWLVQILDLYKVHPVLITFLSHTMQQWRTKLKAGYGLHAIQTEYIPIRRGIFQGDALSPLWFCLALNPLSNLLNDLNCGIITNNNQLTPQVKLSHLMYMDDIKLYSNSITSLHQLADVTQQFSTDIQMNFGIDKCKTFTIKKGKIQLTDYTLGTGERMEPLEHYDTYKYLGFQQNRQIHHRHTKTELTRKFKHRLSSLLKTHLNSRNLIKAINSYAIPILTYSFGIITWSQTELKNLQRIINTTMTKQRKHHPRSCIQRLTLPREEGGRGIIDLVNLHNRQIATLRRFFHYRAENSDLHKSIVETDKKLTPLNLHNRNSQLNEQLTDNKTKIAAWSQKSLHGRHRHDLQQQHVDMSASNAWLKRGDLYPETEGFMLAIQDQVIDTKNYQKHIIRRPNIIDTCRHCHSNPETIQHITGACKSIAQSDYKHRHDQVAAIIHQYLAFQYKLIPNKLPYYKYQPQSVLENNKCRMYWDRTIVTDKTIYNNRPDITLLDKETMTVYIIDIAICNTHNLTTTHTEKIAKYTDLAMEIKTQWKVNNTKTIPIILSTTGVIPKTLHTSLKTLNIHASAYTLLQKAVILNTCRLVRKFLSIS

SEQ ID NO: 6518 - protein, 1415 aa, Hyles vespertilio
MTMKPIANPQVPEDPERYANDGRQIPRRVRGEKNLRVAVSNHQTTQAAPVDSDTDQERKIDEKQQTTGRISRYNLRSRKISCSTHEQRPDPTLSPSSTQSLFESPPTSPNLFVTHTRPSSSSSSSSPEDDVQVAPATEAAPASGQTRARYKWTSDMNEFIIRTYLTTTELETKTRGYLDELHKRFINKYKDFNVSKQRVGDQRRAIVRNNLLSQNILNTITQDVKRNLHPDTFTQNDETNTQTYSNRVHAASSSSRIRWTDDINTAIMKAYFRITQLETNKTSYRRSLHAAIIEQFPQISHVSEQRIADQRRVIVNNRLLTAERIQEIRSEIEHSLIIQEHSASNNSLVIDNTIAEETNDPSTPSSGVETLLTTDTDRTLHTNPRNNTVTNTANHITLDLDLRKKIKETFENTYNKYKNSDPTQRPFIPKQKTSKRLSRIVNYINQNLLPQYTSVDQDFITTQTIIYCAAYTAAVCNGSKIKNTMGPNQEQCNQTVTPAWKKRIQSKIQSYRKSIGRLTEYIKGNRSQKLISHIAIIKDKYKIHSRYEEPNLSDEQYLDSLKQRLAATSSRLKRYGNCTLRKKQNIQFTHNEKLFYRQLNGTTRNIQVASNGSNNSLPSPEALYCYWSNIWANPVQHHHEADWIQSEVQHLHNTPLMKFDYIPIDVFINVIKKTHNWKAPGTDHIHNYWYKKFTTVHPILHNNINMFIKNPETMPIYITQGITYMIPKDNNDPQNPAKYRPITCLQTIYKILTACIALLIDRHISENNILAEEQKGCRKQSQGCKEQLIIDSVVMKQAHANKQDICTMYIDYSKAFDSVPHSWLIHILHIYKIHPTIIEYLRFSMQNWRTKLKAGSGSHFTETDNIPIRRGIFQGDALSPLWFCLALNPLSNLLNHTNLGIPTSNTQLISTFKLCHLMYMDDIKLYSNNISSLHQLADLTQQFSKDIYMTFSIDKCKTYTFKQGKLQLKDYMTHTGEQMEALNSGETYKYLGFQQDRQIREKYTKTELTRKFKHRLGSVLKTQLNSRNTVKAINSYAIPILTYSFGVVKWSQTELKNLQRIINTTMTKHRKHHPRSCTQRLTLPREEGGRGIIDVANLHNRQIIRLRNFFYDRAIDSTLHKHIVEADKQLTPINLYNRNSQNNERLTDNNEKIAAWTQKSLHGRHRHDLQQPHVDLVASNAWLRQGDLFPETVGFMLAIQDQVIDTKNYQKYIIHRPNIIDTCRHCHSSPETIQHITGACKSIAQSDYKHRHDQVAAIVHQNLAYQYKLVPEKLPYYKYKPESVLENNKCRIYWDRTIVTDKTIHNNRPDITVLDKETMTVYIIDIAICNTHNLNNTHTEKISKYTDLAIEIKTQWKINKTKTVPIILSSTGVIPHTLHNSLKILNMHESTYILLQKAVILNTCRLVRKFLSNNN

SEQ ID NO: 6519 - protein, 1412 aa, Hemaris fuciformis
MGFNVYIIFMKMKRIANPQVPGDSKRNANDGRQTPLRVRGEKNLRVAVSNHQTTHAVTTDYEINNERRNDESHLMISRPPRYNLRTRRKYCNSPNRALNVKSSSTIVTDQESTSSPIQSLFESPSSSRVSFEIHNTSDSSSGSSGPEDDVQVALATITAPANGQKRARYKWSSEMNEFILRTYLSITELETKTRGYLDILHKKFTDKYINFNISKQRIGDQRRAIVRNKLLPENVINAITEDVKNSLQSQSNLSHENINNARDSETSLPTSSRIRWTDDMNESIMREYYRITQLESNKTGYRKPLHTAIIEQFPQISHVSEQRIADQRRVIVNNKLISIVKLNEIRSQVEQIVTTQEHDNNERLPNRTLSTVTHDDISNSRHSNHTQHAETEKYNYTVLNTKIKDFFESTYSKYRNSMPTQRPFLPKQKTSRKLAYIVNYIDQHVLPQYISIDQDFITTQTLIYCAAYTAASCNGSRINETSNNQHQNKQSSTPSWKKRLQNKIQAYRKDIGRLTQYIQGNRSNRLISYIEVIKNKFKIHSRYEEPNLTNEQYLDSLKQRLSAASSRLRRYENCTLRKKQNSLFTQNEKLFYRQLGQITSNVQAANDTISKSLPSPQELHSYWSNIWANPVHHNTEADWILTEKQNHHETPQMIFDHIPLEIFMNVLYKAHNWKAPGTDRIHNYWYKKFTSTHPPLHNYINMFIQNPESMPVYLTEGTTFMIPKDMNDTQNPAKYRPITCLQTFYKLLTACISQLIDKHITNNNILAQEQKGCRKYSQGCKEQLIIDTVLMKKACNNKHTICTMYIDYSKAFDSVPHSWLLETLHIYKIHPTLIHYLNHTMQSWRTKLRVGYGTNVVETEDIQIRRGIFQGDALSPLWFCLSLNPLSNLLNRPNLGITTTTHNPLTPTSTHSHLMYMDDIKLYSNSIISLHRLADLTEQFSRDIHMAFGVDKCKTYTLEGGKLQLNDFHLSTGELIEAMDFNETYKYLGFQQDRQIHQKHTKTELTRKFKHRLGSVLKTQLNSQNTIKAINSYAVPILTYSFGVVTWSQTDLKNLQRIINTTMTKHRKHHPRSCIQRLTLPKEEGGRGIIDLTNLHNKQIAALRKFFHNRAKESSLHHHIVEADKLLTPLNLHDSNIQNSEKITDDKEKIATWIQKSLHGRHRHDLQQPHVDSSASNAWLRRGDLFPETVGFMLAIQDQVIETKNYQKHIIKRPDILDLCRHCNSNAETIQHITGACKSIAQSDYKHRHDQVAAIIHQNLAYHYKVIPQKIPYYKYKPEPVLENNKCRIYWDRTIVTDKTIHNNRPDITVLDKETMTVYIIDIAICNTHNLQSTHTEKISKYTDLAIEIKTQWKVNKTKTIPIILSTTGVIPNTLHNSLKILNIQPSTYILLQKAVILNTCRIVRKFLSNNN

SEQ ID NO: 6520 - protein, 1407 aa, Deilephila porcellus
MNMKPTANPQVPGDPERNANDGKQVPRRVRGEKNLRVAVSNHRTTQAMPVDSDTDHTRESDEKQEMSSRTIRYNLRARKTTGISNNQVIKPNSHTGLDASLSPSSTQSLFESPPSSPQLFESHDSPGSASISSGPEDDVQVAVARESASATGQNRVRYKWTSEMNEFIMRTYLTITELETKTRGYLDLLHKKFKDTYTNFNVSKQRIGDQRRAIVRNNLLSQTAINTITLEVKRSLQSNKLTHNDADYTEIGRETHIVPSSSRIRWTDDINESIMKEYYRITQLESNKTGYRKPLHAIITQKFPHIAHVSEQRISDQRRVIVNNRLLSTERLKEIRTEVERTLLTQENNFAVIDNPPPINVDQDINSSLQTLLNVDIDRSVHVNRTETIGINRINYIISESELNNKIKETFENAHSKYRNSDPTQRPFIPKQKTSRKFSHIVNYIDQNLLPQYISVEHDFVTTQTLIYCAAYTAAICNGSKINDISKNNQNQSDQTSIPAWKNGLQNKIQAYRRDIGRLTQYIHGNRSRRMIALINGIKDKFKIHSRYEEPNLTDEQYLDSLKQRLSAASSRLRRYNNCTLRKKQNAQFIHNEKIFYRQLNETTSNSRSISNTLPSAQDLHCYWSNIWANPVQHNQEANWIKEEMQNLRDIPEMAFDRIPLDVFVNVLKKTHNWKAPGTDHIHNYWYKKLTSVRPLLHNYINMFIENPESMPTYITQGRTFMIPKDCNDTQNPAKYRPITCLQTFYKIMTACISQLIDKHITDNNILAEEQKGCRKFCQGCKEQLIIDSVIMKEAHTNRNNICTMYIDYSKAFDSVPHSWLIQILQIYKIHTTLIEYLRNTMQTWRTKLKVGNKAHVIETEDIQIRRGIFQGDALSPLWFCLALNPLSNLLNRLNTGNTTIGSQLTPSHLLYMDDIKLYSNSETSLHLLADLTQQFSRDIHMAFGVDKCKTLTFIQGKLHLTDFTLSTGEQIEAMDRNETYKYLGFQQDRQIRQKDTKLALTRKFKHRLGSVLKTQLNSRNIIKAINSFAIPILTYSFGIISWSQTELKNLQRIINTTMTKHRKHHPRSCTQRLTLPREEGGRGIIDLVNLHNKQISTLRTFFHNRAIESNLHERIVITDKHFTPLNLHNRNTQTNEHITDNKEKIAAWAQKSLHGRHRHDLQQSHVDMSASNAWLRRGDLFPETVGFMLAIQDQIIDTKNYQKHIIHRPNVIDLCRHCHSSPETIQHITGACKSIAQSDYKHRHDQVAAIVHQNLAYKYKLISQKQPYYKYQPQSVLENNKCRIYWDRTIVTDKTIHNNRPDITVLDKETMIVYIVDIAVCNTHNLNSTFTEKISKYTDLAIEIKTQWKVNKTKTVPIVLSTTGVIPHTLHTSIKTLDMHKSTYILLQKAAILNTCRLVRKFLNNN

SEQ ID NO: 6521 - protein, 1407 aa, Deilephila porcellus
MNMKPTANPQVPGDPERNANDGKQVPRRVRGEKNLRVAVSNHRTTQAMPMDSDIDHTRESDEKQEMSSRTIRYNLRARKTTGVSNNQVIKPNSHTGLDASLSPSSTQSLFESPPSSPQLFESHDSPSSASISSGPEDDVQVAVARESASATGQNRVRYKWTSEMNEFIMRTYLTITELETKTRGYLDLLHKKFKDTYTNFNVSKQRIGDQRRAIVRNNLLSQTVINTITLEVKRSLQSNKLTHNDADYTEIGSETHLVPSSSRIRWTDDINDSIMKEYYRITQLESNKTGYRKPLHAIITQKFPHIAHVSEQRISDQRRVIVNNRLLSTERLKEIRTEVERTLLTQDNNFDVIDYPPPINVDQDINSSLQTLLNVDIDRSVHVNRTETIGINRSNYIISESELNNKIKETFENAHSKYRNSDPTQRPFIPKQKTSRKFSHIVNYIDQNLLPQYISVEHDFVTTQTLIYCAAYTAAICNGSKINDISKNNQNQSDQTSIPAWKNRLQKKIQAYRRDIGRLTQYIHGNRSRRMIALINGIKDKFRIHSRYEEPNLTDEQYLDSLKQRLSAASSRLRRYNNCTLRKKQNAQFIHNEKIFYRQLNETTSNSRSISNTLPSAQDLHCYWSNIWANPVQHNQEANWIKEEMQSLRDIPEMAFDRIPLDVFVNVLKKTHNWKAPGTDHIHNYWYKKLTSVHPLLHNYINMFIENPESMPTYITQGRTFMIPKDCNDTQNPAKYRPITCLQTFYKILTACISQLIDKHISDNNILAEEQKGCRKFCQGCKEQLIIDSVIMKEAHTNRNNICTMYIDYSKAFDSVPHSWLIQILQIYKIHTTLIEYLRNTMQTWRTKLKVGNKAHVIETEDIQIRRGIFQGDALSPLWFCLALNPLSNLLNRLNTGNTTIGSQLTPSHLLYMDDIKLYSDNETSLHLLADLTQQFSRDIHMAFGVDKCKTLTFIQGKLHLTDFTLSTGEQIEAMDRNESYKYLGFQQDRQIRQKDTKMALTRKFKHRLGSVLKTQLNSRNIIKAINSFAIPILTYSFGIISWSQTELKNLQRIINTTMTKHRKHHPRSCTQRLTLPREEGGRGIIDLVNLHNKQISTLRTFFHNRAIESNLHERIVILDKHFTPLNLHDRNTQTNEHITDNKEKIAAWAQKSLHGRHRHDLQQSHVDMSASNAWLRRGDLFPETVGFMLAIQDQIIDTKNYQKHIIHRPNVIDLCRHCHSSPETIQHITGACKSIAQSDYKHRHDQVAAIVHQNLAYKYKLISQKQPYYKYQPQSVLENNKCRIYWDRTIVTDKTIHNNRPDITVLDKETMIVYIVDIAVCNTHNLNSTFTEKISKYTDLAIEIKTQWKVNKTKTVPIVLSTTGVIPYTLHTSIKTLDMHKSTYILLQKAAILNTCRLVRKFLNNN

SEQ ID NO: 6522 - protein, 1407 aa, Deilephila porcellus
MNMKPTANPQVPGDPERNANDGKQVPRRVRGEKNLRVAVSNHRTTQAMPMDSDTDHTRESDEKQEMSSRTIRYNLRARKTTGISNNQVIKPNSHTGLDASLSPSSTQSLFESPPSSPQLFESHGSPGSASISSGPEDDVQVAVARESASATGQNRVRYKWTSEMNEFIMRTYLTITELETKTRGYLDLLHKKFKDTYTNFNVSKQRIGDQRRAIVRNNLLSQTVINTITLEVKRSLQSNKLTHNDADYTEIGSETHIVPSSSRIRWTDDINESIMKEYYRITQLESNKTGYRKPLHAIITQKFPHIAHVSEQRISDQRRVIVNNRLLSIERLKEIRTEVERTLLTQENNFAVIDYAPPINVDQDINSSLQTLLNVDIDRSVHVNRTETIGINRSNYIISESELNNKIKETFENAHSKYRNSDPTQRPFIPKQKTSRKFSHIVNYIDQNLLPQYISVEHDFVTTQTLIYCAAYTAAICNGSKINDISKNNQNQRDQTSIPAWKNRLQNKIQAYRRDIGRLTQYIHGNRSRRMIALINGIKDKFKIHSRYEEPNLTDEQYLDSLKQRLSAASSRLRRYNNCTLRKKQNAQFIHNEKIFYRQLNETTSNSRSISNTLPSAQDLHCYWSNIWANPVQHNQEANWIKEEMQNLRDIPEMAFDRIPLDVFVNVLKKTHNWKAPGTDHIHNYWYKKLTSVRPLLHNYINMFIENPESMPTYITQGRTFMIPKDCNDTQNPAKYRPITCLQTFYKIMTACISQLIDKHITDNNILAEEQKGCRKFCQGCKEQLIIDSVIMKEAHTNRNNICTMYIDYSKAFDSVPHSWLIQILQIYKIHTTLIEYLRNTMQTWRTKLKVGNKAHVIETEDIQIRRGIFQGDALSPLWFCLALNPLSNLLNRLNTGNTTIGSQLTPSHLLYMDDIKLYSNSETSLHLLADLTQQFSRDIHMAFGVDKCKTLTFIQGKLHLTDFTLSTGEQIEAMDRNETYKYLGFQQDRQIRQKDTKLALTRKFKHRLGSVLKTQLNSRNIIKAINSFAIPILTYSFGIISWSQTELKNLQRIINTTMTKHRKHHPRSCTQRLTLPREEGGRGIIDLVNLHNKQISTLRTFFHNRAIESNLHERIVITDKHFTPLNLHDRNTQTNEHITDNKEKIAAWAQKSLHGRHRHDLQQSHVDMSASNAWLRRGDLFPETVGFMLAIQDQIIDTKNYQKHIIHRPNVIDLCRHCHSSPETIQHITGACKSIAQSDYKHRHDQVAAIVHQNLAYKYKLISQKQPYYKYQPQSVLENNKCRIYWDRTIVTDKTIHNNRPDITVLDKETMIVYIVDIAVCNTHNLNSTFTEKISKYTDLAIEIKTQWKVNKTKTVPIVLSTTGVIPHTLHTSIKTLDMHKSTYILLQKAAILNTCRLVRKFLNNN

SEQ ID NO: 6523 - protein, 1407 aa, Deilephila porcellus
MNMKPTANPQVPGDPERNANDGKQVPRRVRGEKNLRVAVSNHRTTQAMPMDSDIDHTRESDEKQEMSSRTIRYNLRARKTTGVSNNQVIKPNSHTGLDASLSPSSTQSLFESPPSSPQLFESHDSPSSASISSGPEDDVQVAVARESASATGQNRVRYKWTSEMNEFIMRTYLTITELETKTRGYLDLLHKKFKDTYTNFNVSKQRIGDQRRAIVRNNLLSQTVINTITLEVKRSLQSNKLTHNDADYTEIGSETHLVPSSSRIRWTDDINESIMKEYYRITQLESNKTGYRKPLHAIITQKFPHIAHVSEQRISDQRRVIVNNRLLSTERLKEIRTEVERTLLTQDNNFDVIDYPPPINVDQDINSSLQTLLNVDIDRSVHVNRTETIGINRSNYIISESELNNKIKETFENAHSKYRNSDPTQRPFIPKQKTSRKFSHIVNYIDQNLLPQYISVEHDFVTTQTLIYCAAYTAAICNGSKINDISKNNQNQSDQTSIPAWKNRLQKKIQAYRRDIGRLTQYIHGNRSRRMIALINGIKDKFRIHSRYEEPNLTDEQYLDSLKQRLSAASSRLRRYNNCTLRKKQNAQFIHNEKIFYRQLNETTSNSRSISNTLPSAQDLHCYWSNIWANPVQHNQEANWIKEEMQSLRDIPEMAFDRIPLDVFVNVLKKTHNWKAPGTDHIHNYWYKKLTSVHPLLHNYINMFIENPESMPTYITQGRTFMIPKDCNDTQNPAKYRPITCLQTFYKILTACISQLIDKHISDNNILAEEQKGCRKFCQGCKEQLIIDSVIMKEAHTNRNNICTMYIDYSKAFDSVPHSWLIQILQIYKIHTTLIEYLRNTMQTWRTKLKVGNKAHVIETEDIQIRRGIFQGDALSPLWFCLALNPLSNLLNRLNTGNTTIGSQLTPSHLLYMDDIKLYSDNETSLHLLADLTQQFSRDIHMAFGVDKCKTLTFIQGKLHLTDFTLSTGEQIEAMDRNESYKYLGFQQDRQIRQKDTKLALTRKFKHRLGSVLKTQLNSRNIIKAINSFAIPILTYSFGIISWSQTELKNLQRIINTTMTKHRKHHPRSCTQRLTLPREEGGRGIIDLVNLHNKQISTLRTFFHNRAIESNLHERIVILDKHFTPLNLHDRNTQTNEHITDNKEKIAAWAQKSLHGRHRHDLQQSHVDMSASNAWLRRGDLFPETVGFMLAIQDQIIDTKNYQKHIIHRPNVIDLCRHCHSSPETIQHITGACKSIAQSDYKHRHDQVAAIVHQNLAYKYKLISQKQPYYKYQPQSVLENNKCRIYWDRTIVTDKTIHNNRPDITVLDKETMIVYIVDIAVCNTHNLNSTFTEKISKYTDLAIEIKTQWKVNKTKTVPIVLSTTGVIPHTLHTSIKTLDMHKSTYILLQKAAILNTCRLVRKFLNNN

SEQ ID NO: 6524 - protein, 1404 aa, Deilephila porcellus
MNMKPTANPQVPGDSERNANDGKQVPRRVRGEKNLRVAVSNHRTTQAMPMDSDIDHTRESDEKQEMSSRTIRYNLRARKTTGVSNNQVIKPNSHTGLDASLSPSSTQSLFESPPSSPQLFESHDSPSSASISSGPEDDVQVAVARESASATGQNRVRYKWTSEMNEFIMRTYLTITELETKTRGYLDLLHKKFKDTYTNFNVSKQRIGDQRRAIVRNNLLSQTVINTITLEVKRSLQSNKLTHNDADYTEIGSETHLVPSSSRIRWTDDINESIMKEYYRITQLESNKTGYRKPLHAIITQKFPHIAHVSEQRISDQRRVIVNNRLLSTERLKEIRTEVERTLLTQENNFDVIDYPPPINVDQDINSSLQTLLNVDIDRSVHVNRTETIGINRSNYIISESELNNKVKETFENAHSKYRNSDPTQRPFIPKQKTSRKFSYIVNYIDQNLLPQYISVEHDFVTTQTLIYCAAYTAAICNGSKINDISKNNQNQSDQTSIPAWKNRLQKKIQAYRRDIGRLTQYIHGNRSRRMIALINGIKDKFRIHSRYEEPNLTDEQYLDSLKQRLSAASSRLRRYNNCTLRKKQNAQFIHNEKIFYRQLNETTSNSRSISNTLPSAQDLHCYWSNIWANPVQHNQEANWIKEEMQNLRDIPEMAFDRIPLDVFVNVLKKTHNWKAPGTDHIHNYWYKKLTSVHPLLHNYINMFIEKPESMPTYITQGRTFMIPKDCNDTQNPAKYRPITCLQTFYKILTACISQLIDKHISDNNILAEEQKGCRKFCQGCKEQLIIDSVIMKEAHTNRNNICTMYIDYSKAFDSVPHSWLIQILQIYKIHTTLIEYLRNTMQTWRTKLKVGNKAHVIETEDIQIRRGIFQGDALSPLWFCLALNPLSNRLNTGNTTIGSQLTPSHLLYMDDIKLYSDSETSLHLLADLTQQFSRDIHMAFGVDKCKTLTFIQGKLHLTDFTLSTGEQIEAMDRNESYKYLGFQQDRQIRQKDTKLALTRKFKHRLGSVLKTQLNSRNIIKAINSFAIPILTYSFGIISWSQTELKNLQRIINTTMTKHRKHHPRSCTQRLTLPREEGGRGIIDLVNLHNKQISTLRTFFHNRAIESNLHERIVILDKHFTPLNLHDRNTQTNEHITDNKEKIAAWAQKSLHGRHRHDLQQSHVDMSASNAWLRRGDLFPETVGFMLAIQDQIIDTKNYQKHIIHRPNVIDLCRHCHSSPETIQHITGACKSIAQSDYKHRHDQVAAIVHQNLAYKYKLISQKQPYYKYQPQSVLENNKCRIYWDRTIVTDKTIHNNRPDITVLDKETMIVYIVDIAVCNTHNLNSTFTEKISKYTDLAIEIKTQWKVNKTKTVPIVLSTTGVIPHTLHTSIKTLDMHKSTYILLQKAAILNTCRLVRKFLNNN

SEQ ID NO: 6525 - protein, 1407 aa, Fabriciana adippe
MKMQPTAHPQVPGDSDRDANDGRQVPRGVRGEKNLRVAVSNHQTTFAMPMDADKENDRKNDEEQIISNQATRYNLRRRKIISHSEKNSTNELTENKEVLSSPISSSQISIPSPTSSIRLFDLYDRPNSSSTISDGPEDVVQMAPAVKAAPTTGQNRTRKKWSSDMNKFIWRTYLVVTEVETKIRGHLDILHKKFTDKYPNYDVSKQRIGDQRRAIVRNKLLPQNILDEIKEDVEKTLYSSSPVISLLTESAIPTTNSSSTRIKWTEDINEAIIRTYFKITRLDSNRTSYRKPLHATITELYPQISHVSEQRIADQRRVIINNRLLSPERIEEIRKEVEQTLVTSDEHARLTQTGQNSGYDNQSPLTATILSNSNAQHSNINYIKSHNTMNTFLNYQNSSDFNNKIQETFQTSLNNYKTTDPTKRPFIPKQKTSKRLTYIIHYLDKKILPQYISTNDDFNTLQTIIYCAAYSTAVCNGSKIKNTQSSPSNNKNIKIPSWKIRLQKKIKWLRADIGRMTQYIKGNRNNRLISQVAAIKEKFRVHSRYEEPNISNEQYLDSLKQRLSAKTSRLRRYETCTLRKTQNRQFANNQKNFYRNLNKDTNNIQQNTSSNRLPTKEQFQNYWSGIWANPVQHNKQADWIQTVSEEENNIPQMTFDAVPLEIFVQVLKKTHNWKTPGSDHIHNYWYKKFTTLHPLLLIHINRFIENPDSMPNYIIQGLTFMIEKDSCETQNPAMYRPITCLQTFYKLLTSCIAALINEHVTINNILANEQKGCRKNSQGCKEQLIIDSVIMKQAYANKQDIFTMYVDYKKAFDSVPHSWLLEVLHLYHINPTLITFLSHVMKQWRTKLIAGNEIETDEIIIRRGIFQGDALSPLWFCLALNPLSHLLNNNNFGITTATDQSYPTALISHLLYMDDIKLYSHSVNTLHQLANITTQFSNDICMEFGIEKCKTYSFCQGRLQLNDYILNTGETIDPLDQNNTYKYLGFQQDRQILQKHTKAELIRKFKHRLCSVLKTNLNSANTIKAINSYAIPILTYSFGIISWTKTDLIKLQRLISTSMTKQRKHHPRSCVQRMTLPREEEGRGLIDISNLHNKQITTLRHFFHEQAEQSKFHKSIVEADKHFTPLNLQDRRSQTSQTITQNKDKIAAWNEKSLHGRHRHDLQQPHVDLIASNAWLKRGDLFPETEGFMLAIQDQVIETKNYQKYIIRRPNIIDICRHCHSSSETIQHITGACKSIAQNDYKHRHDQVAAIIHQHLAFQNNLVPKKIPYYKYEPHSVLENNKCKIYWDRTIVTDKTIYYNRPDLTVLDKESNSVYLIDISICNTHNLASTYTEKIAKYTDLAIEIKTQWKVNSTKIIPIIISSTGVIPKTLHQSLKILNIHPSTYILLQKAVILNTCRLVRKFLSQS

SEQ ID NO: 6526 - protein, 892 aa, Fabriciana adippe
MTQYIKGNRNNRLISQVAAIKEKFRVHSRYEEPNISNEQYLDSLKQRLSAKTSRLRRYETCTLRKTQNRQFANNQKNFYRNLNKDTNNIQQNTSSNRLPTKEQFQNYWSGIWANPVQHNKQADWIQTVSEEENNIPQMTFDAIPLEIFVQVLKKTHNWKTPGSDHIHNYWYKKFTTLHPLLLIHINRFIENPDSMPNYIIQGLTFMIEKDSCETQNPAMYRPITCLQTFYKLLTSCIAALINEHVTINNILANEQKGCRKNSQGCKEQLIIDSVIMKQAYANKQDIFTMYVDYKKAFDSVPHSWLLEVLHLYHINPTLITFLSHVMKQWRTKLIAGNEIETDEIIIRRGIFQGDALSPLWFCLALNPLSHLLNNNNFGIATATDQSYPTALISHLLYMDDIKLYSHSVNTLHQLANITTQFSNDICMEFGIEKCKTYSFCQGRLQLNDYILNTGETIDPLDQNNTYKYLGFQQDRQILQKHTKAELIRKFKHRLCSVLKTNLNSANTIKAINSYAIPILTYSFGIISWTKTDLIKLQRLISTSMTKQRKHHPRSCVQRITLPREEGGRGLIDISNLHNKQITTLRHFFHEQAEQSKFHKSIVEADKHFTPLNLQDRRSQTSQTITQNKDKIAAWNEKSLHGRHRHDLQQPHVDLIASNAWLKRGDLFPETEGFMLAIQDQVIETKNYQKYIIRRPNIIDICRHCHSSSETIQHITGACKSIAQNDYKHRHDQVAAIIHQHLAFQNNLVPKKIPYYKYEPHSVLENNKCKIYWDRTIVTDKTIYYNRPDLTVLDKESNSVYLIDISICNTHNLASTYTEKIAKYTDLAIEIKTQWKVNSTKIIPIIISSTGVIPKTLHQSLKILNIHPSTYILLQKAVILNTCRLVRKFLSQS

SEQ ID NO: 6527 - protein, 1408 aa, Hestina assimilis
MKMKSTALPQVPGDSERNSDDGKQVLRGVRGEKNLRVAVSNHQTKHAMNSDTDLQHERIDERQEMTSRTSKYNLRSRKTTCNFTNHIQERTFSQPTTSKPQESPLSTYSLFDSPTSSPRVIQSQDSFGFSSYSSSLEDVVQVAHASISAPATGLNRARKKWTTEMNEFIWRNYLVLTKLETNLRGYLDLLHQKFKDKFKDFDVSKQRIGDQRRSIIRNKLLTQNTLDLIKQDVEKSLSYIESTASSSTDNNTIIPTSSSRIRWTNDINEAILKTYFTITELESNTTAYRRPLHKAITEQFPQISQVSEQRIADQRRVIVNNKLLTIEKIQEIKNEVQQILLTQANNIILTSNNTNTHTNQNSTHITTLTCDSDHNPSTHFIEYTPHQTLRNNNFPQIESDFKKTIDDVFKLNYEKFKNTKPTQRPFIPRQKTSRKLAQIVDYINNNILTQYITIDDDFITTQTVIYCAAYTTAICNGSKIKDSQINHLSPCDRRKIPAWKERLNNKIELLRRDIGRMTQFIRGNRSDRLISQIAAIKKKYNVHSRHEEPNVSDMQYLDSLKQRLSATSSRLRRYNNCTLRKNQNAQFYNNEKLFYRLINKQSSNTQQATSTPSPSAAKLLEYWSSVWANPVIHNNQADWLKTETEDSANIPEMAFEHIEMDSFIEVLKKTHNWKTPGSDNIHNYWYKKFTSVYPLLHKYLNIFIHNPSSMPSYITEGLTFMIPKDNNDTQNPAKYRPITCLQTIYKILTSCITQLINRHITNNNILTEEQKGCRKYTQGCKEQLIIDSIIMKKCYAQKQDICTMYIDYRKAFDFVPHSWLIHVLKLYKINSTLITFLSLTMHHWRTKLKIKHGYETIQTDEIPIKRGIFQGDALSPLWFCLALNPLSHQLNKPKSGLPITDDQLSGTLSHLLYMDDIKLYSNSIPSLHELADITQQFSQDIQMEFGIDKCKTYTIKQGKLQMNSYTINTGETMDPLDENDTYKYLGYQQDRQILQKFTKVELTNKFKHRLQSILKTQLNSGNTIKAINSYAVPILTYSFGIIAWSQTNLKNLQRIINTTMTKQRKHHPRSCVQRLTLPREEGGRGIIDILNLHNKQITNLRNYFYKRAETSQLHNSIVEADKHLTPLNLKDKNIQTNELIINNTDKIATWRQKSLHGRHRNDLQQQHVDISASNAWLKRGYLFPETEGFMIAIQDQVIDTKNYQKHIIRRPNILDNCRHCHNSSETIQHITGSCKSIAQTDYKHRHDQVAAILHQYLAFQYKLIPEKIPYYKYKPQSVLENSRYRIYWDRTIVTDKTIHNNRPDITILDKENSFVYLIDVAICNTHNLAATHTEKIAKYTDLAIEIKSQWKVDNTKTIPIVLSTTGVIPHTLHTSLKTLNIHASIYTLLQQAVILNTCRLVRKFLSNT

SEQ ID NO: 6528 - protein, 1408 aa, Hestina assimilis
MKMKSTALPQVPGDSERNSDDGKQVLRGVRGEKNLRVAVSNHQTKHAMNSDTDLQHERIDERQEMTSRTSKYNLRSRKTTCNFTNHIQEPTFSQPTTSKPQESPLSTYSLFDSPTSSPRVIQSPDSFGFSSYSSSLEDVVQVAHASISAPATGLNRARKKWTTEMNEFIWRNYLVLTKLETNIRGYLDLLHQKFKDKFKDFDVSKQRIGDQRRSIIRNKLLTQNTLDLIKQDVEKSLRYIESTASSSTDNNTIIPTSSSRIRWTNDINEAILKTYFTITELETNTTAYRRPLHKAITEQFPQISQVSEQRIADQRRVIVNNKLLTIEKIKEIKNEVQQILLTQANNIILTSNNTNTHTNQNSTHITTLTCDSDHNPSTHLIENTPHQTLRNNNFPQIESDFKKTIDDVFKLNYEKFKNTNPTQRPFIPRQKTSRKLAQIVDYINNNILTQYITIDDDFITTQTVIYCAAYTTAICNGSKIKDSQINHLSPCDRRKIPAWKERLNNKIELLRRDIGRMTQFIRGNRSDRLISQIAAIKKKYNVHSRHEEPNVSDMQYLDSLKQRLSATTSRLRRYNNCTLRKNQNAQFYNNEKLFYRLINKQSSNTQQATSTPSAPAAKLHEYWSSVWANPVIHNNQADWLKTETEDSANIPEMAFEHIEMDSFIEVLKKTHNWKTPGSDNIHNYWYKKFTSVYPLLHKYLNIFIHNPSSMPSYITEGLTFMIPKDNNDTQNPAKYRPITCLQTIYKILTSCITQLINRHITNNNILTEEQKGCRKYTQGCKEQLIIDSIIMKKCYAQKQDICTMYIDYRKAFDFVPHSWLIHVLKLYKINSTLITFLSLTMHHWRTKLKTKHGYETIQTDEIPIKRGIFQGDALSPLWFCLALNPLSHQLNKPKSGLPIADYQLSGTLSHLLYMDDIKLYSNSIPSLHELADITQQFSQDIQMEFGIDKCKTYTIKQGKLQMNSYTINTGETMDPLDENDTYKYLGYQQDRQILQKFTKVELTNKFKHRLQSILKTQLNSGNTIKAINSYAVPILTYSFGIIAWSQTNLKNLQRIINTTMTKQRKHHPRSCVQRLTLPREEGGRGIIDILNLHNKQITNLRKYFYNRAETSQLHNSIVEADKHLTPLNLKDKNIQTNELIINNIDKIATWRQKSLHGRHRNDLQQQHVDISASNAWLKHGYLFPETEGFMIAIQDQVIDTKNYQKHIIRRPNILDNCRHCHNSSETIQHITGSCKSIAQTDYKHRHDQVAAILHQYLAFQYKLIPEKIPYYKYKPQSVLENSRYRIYWDRTIVTDKTIHNNRPDITILDKENSFVYLIDVAICNTHNLAATHTEKIAKYTDLAIEIKSQWKVDNTKTIPIVLSTTGVIPHTLHTSLKTLNIHASIYTLLQQAVILNTCRLVRKFLSNT

SEQ ID NO: 6529 - protein, 744 aa, Boloria selene
MKFEAVPQETFEKVIKKTHNWKTPGSDHIHNFWYKKFSTLHPLLLIHINRFIKNPNSIPHFITQGVTFMIEKDSGETKNPAKYRPITCLQTFYKLLTSCIAALFNEHVTSNNILANEQKGCRKNSQGCKEQLIIDSVIMKQAYANKQDIFTMYVDYQKAFDSVPHSWLLEVLHLYHINPTLITFLSHVMKQWRTKLTVRNEIETDEIIIRRGIFQGDALSPLWFCLALNPLSHLLNKNNLGITTAANQSLSNPVLISHLLYMDDIKLYSHNINTLHQLANITKQFSNDICMEFGIEKCKTYSFCQGRLQLNDYVLNSEEKIDPLDQNDSYKYLGFQQDWQILQKHTKTELIRKFRHRLCSVLKTNLNSANTIKAINSYAIPVLTYSFGIISWTKTDLIKLQRLINTSMTKQRKHHPRSCTQRLTLPREEGGRGLIDISNLHNKQIATLRHFFHEQAEQSTNTLHKAIVEADKRFTPLNLQDRKSQTSQTITKNKDKIAAWNEKSLHGRHRHDLQQPHVDLIASNAWLKRGDLFPETEGFMIAIQDQVIDTKNYQKYIIRRPNITDICRHCHSSSETIQHITGACKSIAQHDYKHRHDQVAAIIHQNLAFQNNLLPKQVPYYKYEPQSVLENNKCKIYWDRTIVTDKTIHFNRPDITILDKERNSVYFIDISICNTHNLASTYTEKLAKYTDLEIEIKTQWKVNTTKIIPIGGFRGWRTGQSPGASLLQGPRAKTQANLKKNIDI

SEQ ID NO: 6530 - protein, 1183 aa, Hyles vespertilio
MEVKRNLEANKLTHNDVDNTEVQVDSEMPIIPSSSRIRWTDDINESIMKEYYRITQLESNKTGYRKPLHSVITQLFPHISHVSEQRISDQRRVIVNNRLFSAERLEEIRTEVERTLNTQENNFVTPDFPPPVNVHQDINASLQVLPNDNNDRSVQVSHTETTVNHTSNFIISESELNNKIKETFEHTYSKYIFSDPTQRPYIPKQKTSRKFSHIVNYIDQNLLPQYISVDHDFKTTQTIIYCAAYTAAICNGSKINDIVKNNQYQSNKPSIPAWKKRLQNKIQAYRKHIGRLTQYIRGNRSRRMIALIDSIKNKFRIHSRYEEPNLTDEQYLDSLKQRLSAASSRLRRYDNCTLRKKQNAQFIHNEKIFYRQLNETTCNSRVINNTLPSAEDLQCYWSNIWSNPVQHNQEADWIKKETQNLRDMPEMAFDRIRLDVFVNVLKKTHNWKAPGTDHIHNYWYKKFTSVHPLLHNYINSFIENPESMPTYITQGRTFMIPKDCNDTQNPAKYRPITCLQTFYKILTACISQIIDAHITDNKILAEEQKGCRKFSQGCKEQLIIDSVIMKEAHTNKNNICTMYIDYSKAYDSVPHSWLIQILQIYKIHTNLIEFLRKTMQTWRTKLKIGNRSHVIETEDIQIRRGIFQGDALSPLWFCLALNPLSNLLNRSNSTNTNTTIDGQLTPTHLLYMDDIKLYSNSVNSLHLLADLTQQFSKDIHMAFGVDKCKTLTFLQCKLQLTDYTLSTGEQIEAMDFNETYKYLGFQQDRQIRQKDTKIVLTRKFKHRLGSVLKTQLNSRNIIKAINSYSIPILTYSFGIISWSQTELKNLQRVINTTMTKHRKHHPRSCTQRLTLPREEGGRGIIDLVNLHNKQISKLRTFFHNRAIESNLHERVVKADRLFTPLNLHDRNTQSNEHITDNKMKIAAWAQKSLHGRHRHDLQQSHVDMLASNAWLRRGDLFPETVGFMLAIQDQIIETKNYQKHIIRRPNIIDLCRHCHSSPETIQHITGACKSIAQSDYKHRHDQVAAIIHQNLAYKYKLITQKQPYYKYEPQSVLENNKCRIYWDRTIVTDKTIHNNRPDITVLDKDTMTAYIVDIAVCNTHNLNSTLTEKISKYTDLAIEIKTQWKVSNTKIVPIVLSTTGVIPHTLHTSLKTLDMHKSTYILLQKAVILNTCRLVRKFLNNNS

SEQ ID NO: 6531 - protein, 1412 aa, Hyles vespertilio
MNMKPTANPQVPGDPERDAHDGRQVPQRVRGEKNLRVAVSNHQTTQAQPMDSDTDHNRINDEKQETTSRTRRYNLRTRKIKGISNSQVVKLTPDTRLNLPSSPSSTQSLFASPPSSPHLFEFNDRPGSSSCSSGPEDDVQVAIATVSASATGQNRARYKWTSEMNEFIMRTYLTITELETKTRGYLDLLHKKFTDTYTNFNVSKQRIGDQRRAIVRNNLLSKTVLNTTKMEVKRNLEANKLTHNDVDNTEVQVDSEMPIIPSSSRIRWTDDINESIMEEYYRITQLESNKTGYRKPLHSVITQLFPHISHVSEQRISDQRRVIVNNRLLSAERLEEIRTEVERTLNTQENNFVTPDFPPPVNVHQDKNASLQVLPNDNNDRSVQVSHTETTVNHTSNFIISESELNNKIKETFEHTYSKYIFSDPTQRPYIPKQKTSRKFSHIVNYIDQNLLPQYISVDHDFKTTQTIIYCAAYTAAICNGSKINDIVKNNQYQSNKPSIPAWKKRLQNKIQAYRKHIGRLTQYIRGNRSRRMIALIDSIKNKFRIHSRYEEPNLTDEQYLDSLKQRLSAASSRLRRYDNCTLRKKQNAQFIHNEKIFYRQLNETTCNSRVINNTLPSAEDLQCYWSNIWSNPVQHNQEADWIKKETQNLRDMPEMAFDRIRLDVFVNVLKKTHNWKAPGTDHIHNYWYKKFTSVHPLLHNYINSFIENPESMPTYITQGRTFMIPKDCNDTQNPAKYRPITCLQTFYKILTACISQIIDAHITDNKILAEEQKGCRKFSQGCKEQLIIDSVKMKEAHTNKNNICTMYIDYSKAYDSVPHSWLIQILQIYKIHTNLIEFLRKTMQTWRTKLKIGNRSHLIETEDIQIRRGIFQGDALSPLWFCLALNPLSNLLNRSNSTNTNTTIDGQLTPTHLLYMDDIKLYSNSVNSLHLLADLTQQFSKDIHMAFGVDKCKTLTFLQGKLQLTDYTLSTGEQIEAMDFNETYKYLGFQQDRQIRQKDTKMVLTRKFKHRLGSVLRTQLNSRNIIKAINSYSIPILTYSFGIISWSQTELNNLQRVINTTMTKHRKHHPRSCTQRLTLPREEGGRGIIDLVNLHNKQISKLRTFFHNRAIESNLHERVVKADRLFTPLNLHDRNTQSNEHITDNKMKIAAWAQKSLHGRHRHDLQLSHVDMSASNAWLRRGDLFPETVGFMLAIQDQIIETKNYQKHIIRRPNIIDLCRHCHSSPETIQHITGACKSIAQSDYKHRHDQVAAIIHQNLAYKYKLITQKQPYYKYEPQSVLENNKCRIYWDRIIVTDKTIHNNRPDITVLDKDTMTVYIVDIAVCNTHNLNSTLTEKISKYTDLAIEIKTQWKVSNTKIVPIVLSTTGVIPHTLHTSLKTLDMHKSTYILLQKAVILNTCRLVRKFLNNNC

SEQ ID NO: 6532 - protein, 1523 aa, Trachurus trachurus
MVSDKNPYLPYEYCIISKDEKIASQLTFDNNGSIIMSLPRFNYNCPSNCFNYKIGALDGLKSHMSRKHRHNKITFCCSLCGHTATNIRQFSQHFNTCLNPNSIKLSPETITSILINITGNEKLTVLPSPIESTNPYKAYSPYTSSSDSDDSHHSNINFSHAPIKRALPPKTSHPISNIISPSSLNPKSSNTYNDVPISTLNTSLNDSIHSILSDSLIINSPISFSHPNTSSTIINSGLFISSSPKHNTNVLSPSLLNFSKLNDLCQPKKRTLPTKISKPFSNLISPYSMNPKKLQFNNPPTPLKSTFIDTPNSSSLSSFINSSKSIIFCPPFKRSHPSKIGLPPSNIVSPSSISPKITQFFNTKPILLNPSFKLTSTNPTIPILSSLSSKLIPTNPTFPSIVKSPTKTIQSPSIHTILSSSNISTNSLHSSIIFNKSTHTSTIASSSSPIIIKTLTPIPTNKHSYPTFNDDNSDCILLDSPPPNLISNLLPGLIKNNLISHSKNTVKYNSIGTSCITYQSSTPPYNNHTVQIPINLFKSRMDLLSFEAHPIYPKLSPTLTSIPKPPHSSKKPSAELIIKKINNTQIIDDEDWFELISLIKSLPSANLNLKNPNQLTKAPIPSVYSKIRSKTNNNNIITIPSEPTVVNNPSHPHKNFHPNSIQNQYTNLFHKNPTKLFNILTNTSESPTNLPFESFHEHFLSIWNSSNTTPTIPPDIPLSHSIDLTTLNQPFSMQEIAAIIKGLPKNSSSGPDLIPFNFWIFIFNNYPTLLICLLNKFLLSKSIPPSLNKSITSLIPKTNDPNSTTPSNFRPISVTNTLYRIFTKSISYRILNFIGNILHPSQKGFLREDGCFINTTTLYEIIKNARGGKKAAILFIDLKAAFDRISHSYLINSCMKYLGPSFTSLYLNLISNSSTCLNPKHFSMIKTTPIKISSGIRQGCPLSPLIFNIAINDLLINLNLDSNGFNIPCLQNQYTFSTLAYADDLIIIKNSIENLQSTSHRVDQWLNLSNSCLNEKKCGFLPINFNSDEIFPYGPYSIPSINPEIGYKYLGIKFKISNLGFEDSMSIFNENILSLVEKITLNPHLHHAIKIRMLKMFIYPKFNHLIRLHRLPPLNLEPIDNKLRLLIKNSLDLPKPTNNHFFYTDSSFGGLGIPNLQLKSNLSIIINILLIFNNKDKFPFLFNLFIKKLSKSRNLSALNSSSPAEITSLLNSPPASNSNSFYPQEFSLLLKLNGIFFISDNNLISLSCQNINPPKLTHKSLSLMISNFHLDLWRRTSIQSVLIPITALKTLTSLTHSTKLSNFCFSWRLKAQLNLYTLKGCPLSTYINPDSRLCRKCHLHIETMGHVLNNCPFTLSYQKTLRHDLILNFIIKISNLPNSKFYIDKQFKETNLRPDLLIIFNDPNSPDILIDVSVPNPFTDPLNHIQSSYDRKIQKYSPLIEIHQQLNSKSLCILPFIIDALGTHHPNNSKILSQLNANPSRSILLTFSQIAIKGSMAIYNHFTLNSTTTINTSPNTILNTNSQ

SEQ ID NO: 6533 - protein, 947 aa, Plutella xylostella
MSNQQKGTCPHCHDTSRQFVVPHGLNVHIGRMHRDRASQPSTSGNVNSIQPVTDTNTANNSVNLGNISTLKKNVPILKHIPKGARSLAAGKLSQLIDQCLESNSTEDWYSLLTFSFTALRIPDKSDRRSLTSKVKENISGEVSVSTDECSAPHRSHSVYKTIETKVHDGDLRGAVRLLMSDCSLAPVNEETLNSLKNKHPAPSRPLFLPAEPNLSSISLSVTAIEVADAIASFYNGSAGGLDGLRPEHLKELTSLTAGDNGGKLLDSLTRLCNFLLKGLLNLEVCPYLYGASLCALTKKSGGIRPIAVGNLFRRLVAKLGCRSVKDGMAAYLQPRQLGFGTQLGCEAAIHATRAFVMAGDDTDHVAVKLDISNAFNTLERDTILGEVKEHVPTLFPFLNQCYSAPSNLFFESTPISSQVGVQQGDPLGPLIFSLAIHKIVSSLKSPLNVWYLDDGIIGGSPDIVLRDIEEIILKFKEIGLEVNTDKCELYFCGQVSTECLARFHNLIPGIKELNRETFTLLGAPIFPEAIPRIIEEKIRSLLLAQTHLNNLPAHIALTLFRHCLSMPKLTYTVRTAPVWHFSNEVSELDSCLKSTLEEILNINLSDEQWCQAGLPIRHGGLGIRRVKDTGLAAFLASSHGVVELVTHILNVNGDEFQLPFVDEALAAWSALCPGCDPPDQPKSQRGWDDVRAQIVFEDLERRSSGADLARIKASKIPESGAWLHALPSPQLGTLMDDDSLRIAAALRLGCNICEQHRCICGTLVDVKGYHGLNCLRCTGRYPRHHALNDIIRRALVSANIPCVLEPPGLSRTDGKRPDGLTLVPWERGRCMLWDATCVSTFAASHLPHTICSAGSAAEKAARQKHLKYDALKASYIFMPVAFEVTGVWGTEARLLIRAISRRLRDRGFDRRSGSYLSQRISVAIQRGNAASIMGTFEPGTTRGGLFY

SEQ ID NO: 6534 - protein, 947 aa, Plutella xylostella
MSNQQKGTCPHCHDTSRQFVVPHGLNVHIGRMHRDRASQPSTSGNVNSIQPVTDTNLANNSVQLGNISTLKKNVPILKHIPKGARSLAAGKLSQLIDQCLESNSTEDWYSLLTFSFTALRIPDKSDRRSLTSKVKENISGEVTVSTDECSAPHRSHSVYKTIETKVHDGDLRGAVRLLMSDCSLAPVNEETLNSLKNKHPAPSRPLFLPAEPNLSSISLSVTATDVADAIASFYNGSAGGLDGLRPEHLNELTSLTAGDNGGKLLDSLTRLCNFLLKGLLNLEVCPYLYGASLCALTKKNGGIRPIAVGNLFRRLVAKLGCRSVKDGMAAYLQPRQLGFGTQLGCEAAIHATRAFVMAGDDTDHVAVKLDISNAFNTVERDTILGEVKEHVPTLFPFLNQCYSAPSNLFFESTPISSQVGVQQGDPLGPLIFSLAIHKIVSSLKSPLNVWYLDDGIIGGSPDIVLRDIEEIILKFKEIGLEVNTDKCELYYCGQVSTECFDRFHNLIPGIKELNRETFTLLGAPIFPEAIPRIIEEKIRSLMLAQTHLNNLPAHIALTLFRHCLSMPKLTYTVRAAPVWHFSNEVSELDSCLKSTLEEILNISLSDDQWCQAGLPIRHGGLGIRRVKDTGLAAFLASSHGVVELFTHILNVNGDEFQLPFVDEALAAWSALCPGCDPPDQPKSQRGWDDVRAQIVFEDLEKRSSGADLARIKASKIPESGAWLHALPSPQLGTLMDDDSLRIAAALRLGCNICEQHRCICGTLVDVKGYHGLNCLRCTGRYPRHHALNDIIRRALVSANIPCVLEPPGLSRTDGKRPDGLTLVPWERGRCMLWDATCVSTFAASHLPHTICSAGSAAEKAARQKHLKYDVLKASYIFMPVAFEVTGVWGTEARLLIRAISRRLRDRGFDRRSGSYLSQRISVAIQRGNAASIMGTFEPGTTRGGLFY

SEQ ID NO: 6535 - protein, 947 aa, Plutella xylostella
MSNQQKGTCPHCHDTSRQFVVPHGLNVHIGRMHRDRASQPSTSGNVNSIQPVTDTNTANNSVHLGNISTLKKNVPILKHIPKGARSLAAGKLSQLIDQCLESNSTEDWYSLLTFSFTALRIPDKSDRRSLTSKVKENISGEVSVSTDECLAPHRSHSVYKTIETKVHDGDLRGAVRLLMSDCSLAPVNEETLNSLKNKHPAPSRPLFLPAEPNLSSISLSVTAIEVADAIASFYNGSAGGLDGLRPEHLKELTSLTAGDNGGKLLDSLTRLCNFLLKGLLNLEVCPYLYGASLCALTKKSGGIRPIAVGNLFRRLVAKLGCRSVKDGMAAYLQPRQLGFGTQLGCEAAIHATRAFVMAGDDTDHVAVKLDISNAFNTLERDTILGEVKEHVPTLFPFLNQCYSAPSNLFFESTPISSQVGVQQGDPLGPLICSLAIHKIVSSLKSPLNVWYLDDGIIGGSPDIVLRDIEEITLKFKEIGLEVNTDKCELYFCGQVSTECLARFHNLIPGIKELNRETFTLLGAPIFPEAIPRIIEEKIRSLLLAQTHLNNLPAHIALTLFRHCLSMPKLTYTVRTAPVWHFSNEVSELDSCLKSTLEEILNINLSDEQWCQAGLPIRHGGLGIRRVKDTGLAAFLASSHGVVELVTHILNVNGDEFQLPFVDEALAAWSALCPGCDPPDQPKSQRGWDDVRAQIVFEDLERRSSGADLARIKASKIPESGAWLHALPSPQLGTLMDDDSLRIAAALRLGCNICEQHRCICGTLVDVKGYHGLNCLRCTGRYPRHHALNDIIRRALVSANIPCVLEPPGLSRTDGKRPDGLTLVPWERGRCMLWDATCVSTFAASHLPHTICSAGSAAEKAARQKHLKYDALKASYIFMPVAFEVTGVWGTEARLLIRAISRRLRDRGFDRRSGSYLSQRISVAIQRGNAASIMGTFEPGTTRGGLFY

SEQ ID NO: 6536 - protein, 1476 aa, Trachelipus rathkii
MGRKILCPSVSQGEKTTNERMEKTKIKNTCQEIGRPGAGPSSLLERGERGRSSSERSKLSLQVTGSEKDPETDLPLSRLSGGCNTDPSLQEPSKSKRCYTSNLRGGKKIKWSEEEKLEILWCYTYSSHNKFPKKGTLERTKEMLLKRAIVDERKVETTPSSRFSSIATNIRIGKTPITEEQIKQIKEEVDEYIEGMNICEDRWIWTYERNEFLMESYFIGEFIPRKTNMSEIWKWVVKEKIFSPNDFMEYRFGEVYNQVSRKQMVNQKLAIQNYVKERKNQEQRKTKATLPSYEEIELIKGKALNIVENELELTTKEVEEIRKIRNKNTKKIQDDSVKGKKREMKTAGMPDNEKEKIHKLSEINCNLEENVEQEQEKPEEFEMIVFDEKYMNLGNEDQESGESSLSSEDEINYTDDEVETNPDEEQINDERENERIGNIQNPTQEEPNNNDESEEELLVKISHYREEDIHLGIEKRLRINKISNYRLLNKYAGIADRMLPRIIPPNCDITEINRLYYATARAIADTLGIKTKGTIKTNRTKQREIKPPWKIRMDKEIENLRKEISMLSAFQNGEVTATTTRRKVQNLLYRERVENGDPLVHAIRGRKLILAAMVKKRQRYEKTEKEKIQNRIFREDPAKLYRELRKDTIKVEKPPPKEEVERFWKEIYESEVNPNNEADWKREMVDNPQITAIIPMEGGRITENEVKSTIKRSGSWKAPGKDQVHNVWLKKLKVLIKPLTESFNKLIEKQEEIPEWLTSGITSLIPKNEETELASKYRPITCLPTIYKILTGVMTKRVATHLEVNDIINEEQKGCSKGSYGTKDQLLINKMIMENSRKGQKHLSMVWIDYKKAYDSVPHKWIKEVLKIYKINDLVVDFIDEAMKKWRTDLVLPYEKGQIKIEGIKIKRGIFQGDSISPLLFILALNPLSTLINNLENGYRINSMREKKARKISHLFYMDDIKLYAPNKKESEKQVEVVKRYSTDICMEFGLDKCAFVSLKKGRRTEAGNIRINDTEIRELEQGNTYKYLGIEESDEIESKKMKEKITKEYIKRMKSILESELKPRNKIIALRTLAVPVLTYSFGIIDWFQHEINGIDVKTRKMLHAHKIIYKNQCMPRIYVPRNEGGMGVPQMDRIYKTEIIGLSKYLESRESKFMRWVYEHEMMKPPTTSNTKKEKDYLEGVEIEVGEFRNITEVGKKIKDLKDKYKQARINNDITKWKEHVCGKHFRIDVLDQIYIDKEHTVEPLTGGYLKKEDERTLIAAQDQILRTKWFRKNIEKEEITEICRMCKDKTETVNHILTGCDTLIQMGLYTDRHNTICNMIHLKLCQKYNFEIDTDKYWQHKPAAIIENEEAIILYDHTIPTSIPTPHNRPDIIVREKRTQKCYIIEIGISRDNRVTLYEREKEVKYVRLKYDIRRMWGVEEVEIIPIVVGATGVVKKSMTTYAKKLPNIVVKDVVMEVIKKSLAILRLVLGST

SEQ ID NO: 6537 - protein, 1086 aa, Trachelipus rathkii
MNLGNEDQESGESSLSSEDEINYTDDEVETNPDEEQINDERENERIGNIQNPTQEEPNNNDESEEELLVKISHYREEDIHLGIEKRLRINKISNYRLLNKYAGIADRMLPRIIPPNCDITEINRLYYATARAIADTLGIKTKGTIKTNRTKQREIKPPWKIRMDKEIENLRKEISMLSAFQNGEVTATTTRRKVQNLLYRERVENGDPLVHAIRGRKLILAAMVKKRQRYEKTEKEKIQNRIFREDPAKLYRELRKDTIKVEKPPPKEEVERFWKEIYESEVNPNNEADWKREMVDNPQITAIIPMEGGRITENEVKSTIKRSGSWKAPGKDQVHNVWLKKLKVLIKPLTESFNKLIEKQEEIPEWLTSGITSLIPKNEETELASKYRPITCLPTIYKILTGVMAKRVATHLEVNDIINEEQKGCSKGSYGTKDQLLINKMIMENSRKGQKHLSMVWIDYKKAYDSVPHKWIKEVLKIYKINDLVVDFIDEAMKKWRTDLVLPYEKGQIKIEGIKIKRGIFQGDSISPLLFILALNPLSTLINNLENGYRINSMREKKARKISHLFYMDDIKLYAPNKKESEKQVEVVKRYSTDICMEFGLDKCAFVSLKKGRRTEAGNIRINDTEIRELEQGNTYKYLGIEESDEIESKKMKEKITKEYIKRMKSILESELKPRNKIIALRTLAVPVLTYSFGIIDWFQHEINGIDVKTRKMLHAHKIIYKNQCMPRIYVPRNEGGMGVPQMDRIYKTEIIGLSKYLESRESKFMRWVYEHEMMKPPTTSNTKKEKDYLEGVEIEVGEFRNITEVGKKIKDLKDKYKQARINNDITKWKEHVCGKHFRIDVLDQIYIDKEHTVEPLTGGYLKKEDERTLIAAQDQILRTKWFRKNIEKEEITEICRMCKDKTETVNHILTGCDTLIQMGLYTDRHNTICNMIHLKLCQKYNFEIDTDKYWQHNPATIIENEEAIILYDHTIPTSIPTPHNRPDIIVREKRTQKCYIIEIGISRDNRVTLYEREKEVKYVRLKYDIRRMWGVEEVEIIPIVVGATGVVKKSMTTYAKKLPNIVVKDVVMEVIKKSLAILRLVLGST

SEQ ID NO: 6538 - protein, 939 aa, Trachelipus rathkii
MSVMTREALKDTCLSIKIRIGNIQNPTQEEPNNNDESEEELLVKISHYREEDIHLGIEKRLRINKISNYRLLNKYAGIADKMLPQIIPPNCDITEINRLYYATARTIADTLGIKTKGTIKTNRTKQREIKPPWKIRMDKEIENLRKEISMLSAFQNGEVTATTTRRKVQNLLYRERVENGDPLVHAIRGRKLILAAMVKKRQRYEKTEKEKIQNRIFREDPAKLYRELRKDTIKVEKPPPKEEVERFWKEIYESEVNPNNEADWKREMVDNPQITAIIPMEGGRITENEVKSTIKRSGSWKAPGKDQVHNVWLKKLKVLIKPLTESFNKLIEKQEEIPEWLTSGITSLIPKNEETELASKYRPITCLPTIYKILTGVMAKRVATHLEVNDIINEEQKGCSKGSYGTKDQLLINKMIMENSRKGQKHLSMVWIDYKKAYDSVPHKWIKEVLKIYKINDLVVDFIDEAMKKWRTDLVLPYEKGQIKIEGIKIKRGIFQGDSISPLLFILALNPLSTLINNLENGYRINSMREKKARKISHLFYMDDIKLYAPNKKESEKQVEVVKRYSTDICMEFGLDKCAFVSLKKGRRTEAGNIRINDTEIRELEQGNTYKYLGIEESDEIESKKMKEKITKEYIKRMKSILESELKPRNKIIALRTLAVPVLTYSFGIIDWFQHEINRIDVKTRKMLHAHKIIYKNQCMPRIYVPRNEGGMGVPQMDRIYKTEIIGLSKYLESRESKFMRWVYEHEMMKPPTTSNTKKEKDYLEGVEIEVGEFRNITEVGKKIKDLKDKYKQARINNDITKWKEHVCGKHFRIDVLDQIYIDKEHTVEPLTGGYLKKEDERTLIAAQDQILRTKWFRKNIEKEEITEICRMCKDKTETVNHILTGCDTLIQMGLYTDRHNTICNMIHLKLCQKYNFEIDTDKYWQHKPAAIIENEEAI

SEQ ID NO: 6539 - protein, 1476 aa, Trachelipus rathkii
MGRKILCPSVSQGEKTTNERMEKTKIKNTCQEIGRPGAGPSSLLERGERGRSSSERSKLSLQVTGSEKDPETDLPLSRLSGGCNTDPSLQEPSKSKRCYTSNLRGGKKIKWSEEEKLEILWCYTYSSHNKFPKKGTLERTKEMLLKRAIVDERKVETTPSSRFSSIATNIRIGKTPITEEQIKQIKEEVDEYIEGMNICEDRWIWTYERNEFLMESYFIGEFIPRKTNMSEIWKWVVKEKIFSPNDFMEYRFGEVYNQVSRKQMVNQKLAIQNYVKERKRQEQRKTKATLPSYKEIELIKGKALNIVENELELTTKEVEEIRKIRNKNTKKIQDDSVKGKKREMKTAGMPDNEKEKIHKLSEINCNLEENVEQEQEKPEEFEMIVFDEKYMNLGNEDQESGESSLSSEDEINYTDDEVETNPDEEQINDERENERIGNIQNPTQEEPNNNDESEEELLVKISHYREEDIHLGIEKRLRINKISNYRLLNKYAGIADRMLPRIIPPNCDITEINRLYYATARAIADTLGIKTKGTIKTNRTKQREIKPPWKIRMDKEIENLRKEISMLSAFQNGEVTATTTRRKVQNLLYRERVENGDPLVHAIRRRKLILAAMVKKRQRYEKTEKEKIQNRIFREDPAKLYRELRKDTIKVEKPPPKEEVERFWKEIYESEVNPNNEADWKREMVDNPQITAIIPMEGGRITENEVKSTIKRSGSWKAPGKDQVHNVWLKKLKVLIKPLTESFNKLIEKQEEIPEWLTSGITSLIPKNEETELASKYRPITCLPTIYKILTGVMAKRVATHLEVNDIINEEQKGCSKGSYGTKDQLLINKMIMENSRKGQKHLSMVWIDYKKAYDSVPHKWIKEVLKIYKINDLVVDFIDEAMKKWRTDLVLPYEKGQIKIEGIKIKRGIFQGDSISPLLFILALNPLSTLINNLENGYRINSMREKKARKISHLFYMDDIKLYAPNKKESEKQVEVVKRYSTDICMEFGLDKCAFVSLKKGRRTEAGNIRINDTEIRELEQGNTYKYLGIEESDEIESKKMKEKITKEYIKRMKSILESELKPRNKIIALRTLAVPVLTYSFGIIDWFQHEINRIDVKTRKMLHAHKIIYKNQCIPRIYVPRNEGGMGVPQMDRIYKTEIIVLSKYLKSRKSKFMRWVYEHEMMKPPTTSNTKKEKDYLEGVEIEVGEFRNITEVGKKIKDLKDKYKQARINNDITKWKEHVCGKHFRIDVLDQIYIDKEHTVEPLTGGYLKKEDERTLIAAQDQILRTKWFRKNIEKEEITEICRMCKDKTETVNHILTGCDTLIQMGLYTDRHNTICNMIHLKLCQKYNFEIDTDKYWQHKPATIIENEEAIILYDHTIPTSIPTPHNRPDIIVREKRTQKCYIIEIGISRDNRVTLYEREKEVKYVRLKYDIRRMWGVEEVEIIPIVVGATGVVKKSMTTYAKKLPNIVVKDVVMEVIKKSLAILRLVLGST

SEQ ID NO: 6540 - protein, 1496 aa, Trachelipus rathkii
MLTHPKLFTVSLVGRLAGIKMGRKILCPSVSQGEKTTNERMEKTKIKNTCQEIGRPGAGPSSLLERGERGRSSSERSKLSLQVTGSEKDPETDLPLSRLSGGCNTDPSLQEPSKSKRCYTSNLRGGKKIQWSEEEKLEILWCYTYSSHNKFPKKGTLERTKEMLLKRAIVDERKVETTPSSRFSSIATNIRIGKTPITEEQIKQIKEEVDEYIEGMNICEDRWIWTYERNEFLMESYFIGEFIPRKTNMSEIWKWVVKEKIFSPNDFMEYRFGEVYNQVSRKQMVNQKLAIQNYVKERKNQEQRKTKATLPSYEEIELIKGKALNIVENELELTTKMVEEIRKIRNKNTKKIQDDSVKGKKREMKTAGMPDNEKEKIHKLSEINCNIEENVEQEQEKPEEFEMIVYDEKYMNLGNEDQESGESSLSSEDEINYTDDEVETNPDEEQINDERENERIGNIQNPTQEEPNNNDESEEELLVKISHYREEDIHLGIEKRLRINKISNYRLLNKYAGIADRMLPRIIPPNCDITEINRLYYATARAIADTLGIKTKGTIKTNRTKQREIKPPWKIRMDKEIENLRKEISMLSAFQNGEVTATTTRRKVQNLLYRERVENGDPLVHAIRRRKLILAAMVKKRQRYEKTEKEKIQNRIFREDPAKLYRELRKDTIKVEKPPPKEEVERFWKEIYESEVNPNNEAEWKREMVDNPQITAIIPMEGGRITENEVKSTIKRSGSWKAPGKDQVHNVWLKKLKVLIKPLTESFNKLIEKQEEIPEWLTNGITSLIPKNEETELASKYRPITCLPTIYKILTGVMAKRVATHLEVNDIINEEQKGCSKGSYGTKDQLLINKMIMENSRKGQKHLSMVWIDYKKAYDSVPHKWIKEVLKIYKINDLVVDFIDEAMKKWRTDLVLPYEKGQIKIEGIKIKRGIFQGDSISPLLFILALNPLSTLINNLENGYRINSMREKKARKISHLFYMDDIKLYAPNKKESEKQVEVVKRYSTDICMEFGLDKCAFVSLKKGRRTEAGNIRINDTEIRELEQGNTYKYLGIEESDEIESKKMKEKITKEYIKRMKSILESELKPRNKIIALRTLAVPVLTYSFGIIDWFQHEINGIDVKTRKMLHAHKIIYKNQCMPRIYVPRNEGGMGVPQMDRIYKTEIIGLSKYLESRESKFMRWVYEHEMMKPPTTSNTKKEKDYLEGVEIEVGEFRNITEVGKKIKDLKDKYKQARINNDITKWKEHVCGKHFRIDVLDQIYIDKEHTVEPLTGGYLKKEDERTLIAAQDQILRTNWFRKNIEKEEITEKCRMCKDKTETVNHILTECKTLLKMGLYTDRHNTICNMIHMKLCQKYNFETDTDKYWQHKPATIIENEEAMILYDHTIPTSIPTPHNRPDIIVREKRTQKCYIIEIGISRDNRVTLYEREKEVKYVRLKYDIRRMWGVEEVEIIPIVVGATGVVKKSMTTYAKKLPNIVVKDMVMEVIKKSLAILRLVLGST

SEQ ID NO: 6541 - protein, 1490 aa, Trachelipus rathkii
MFTVSLVGRLAVIKMGRKILCPSVSQGEKTTNERMEKTKIKNTCQEIGRPGAGPSSLLERGERGRSSSERSKLSLQVTGSEKDPETDLPLSRLSGGCNTDPSLQEPSKSKRCYTSNLRGGKKIKWSEEEKLEILWCYTYSSHNKFPKKGTLERTKEMLLKRAIVDERKVETTPSSRFSSIATNIRIGKTPITEEQIKQIKEEVDEYIEGMNICEDRWIWTYERNEFLMESYFIGEFIPRKTNMSEIWKWVVKEKIFSSNDFMEYRFGEVYNQVSRKQMVNQKLAIQNYVKERKNQEQRKTKATLPSYEEIELIKGKALNIVENELELTTKEVEEIRKIRNKNTKKIQDDSVKGKKREMKTAGMPDNEKEKIHKLSEINCNLEENVEQEQEKPEEFEMIVFDEKYMNLGNEDQESGESSLSSEDEINYTDDEVETNPDEEQINDERENERIGNIQNPTQEEPNNNDESEEELLVKISHYREEDIHLGIEKRLRINKISNYRLLNKYAGIADRMLPRIIPPNCDITEINRLYYATARAIADTLGIKTKGTIKTNRTKQREIKPPWKIRMDKEIENLRKEISMLSAFQNGEVTATTTRRKVQNLLYRERVENGDPLVHAIRGRKLILAAMVKKRQRYEKTEKEKIQNRIFREDPAKLYRELRKDTIKVEKPPPKEEVERFWKEIYESEVNPNNEADWKREMVDNPQITAIIPMEGGRITENEVKSTIKRSGSWKAPGKDQVHNVWLKKLKVLIKPLTESFNKLIEKQEEIPEWLTSGITSLIPKNEETELASKYRPITCLPTIYKILTGVMAKRVATHLEVNDIINEEQKGCSKGSYGTKDQLLINKMIMENSRKGQKNLSMVWIDYKKAYDSVPHKWIKEVLKIYKINDLVVDFIDEAMKKWRTDLVLPYEKGQIKIEGIKIKRGIFQGDSISPLLFILALNPLSTLINNLENGYRINSMREKKARKISHLFYMDDIKLYAPNKKESEKQVEVVKRYSTDICMEFGLDKCAFVSLKKGRRTEAGNIRINDTEIRELEQGNTYKYLGIEESDEIESKKMKEKITKEYIKRMKSILESELKPRNKIIALRTLAVPVLTYSFGIIDWFQHEINRIDVKTRKMLHAHKIIYKNQCMPRIYVPRNEGGMGVPQMDRIYKTEIIGLSKYLESRESKFMRWVYEHEMMKPPTTSNTKKEKDYLEGVEIEVGEFRNITEVGKKIKDLKDKYKQARINNDITKWKEHVCGKHFRIDVLDQIYIDKEHTVEPLTGGYLKKEDERTLIAAQDQILRTKWFRKNIEKEEITEICRMCKDKTETVNHILTGCDTLIQMGLYTDRHNTICNMIHLKLCQKYNFEIDTDKYWQHKPAAIIENEEAIILYDHTIPTSIPTPHNRPDIIVREKRTQKCYIIEIGISRDNRVTLYEREKEVKYVRLKYDIRRMWGVEEVEIIPIVVGATGVVKKSMTTYAKKLPNIVVKDVVMEVIKKSLAILRLVLGST

SEQ ID NO: 6542 - protein, 979 aa, Trachelipus rathkii
MLPRIIPPNCDITEINRLYYATARAIADTLGIKTKGTIKTNRTKQREIKPPWKIRMDKEIENLRKEISMLSAFQNGEVTATTTRRKVQNLLYRERVENGDPLVHAIRGRKLILAAMVKKRQRYEKTEKEKIQNRIFREDPAKLYRELRKDTIKVEKPPPKEEVERFWKEIYESEVNPNNEADWKREMVDNPQITAIIPMEGGRITENEVKSTIKRSGSWKAPGKDQVHNVWLKKLKVLIKPLTESFNKLIEKQEEIPEWLTSGITSLIPKNEETELASKYRPITCLPTIYKILTGVMAKRVATHLEVNDIINEEQKGCSKGSYGTKDQLLINKMIMENSRKGQKHLSMVWIDYKKAYDSVPHKWIKEVLKIYKINDLVVDFIDEAMKKWRTDLVLPYEKGQIKIEGIKIKRGIFQGDSISPLLFILALNPLSTLINNLENGYRINSMREKKARKISHLFYMDDIKLYAPNKKESEKQVEVVKRYSTDICMEFGLDKCAFVSLKKGRRTEAGNIRINDTEIRELEQGNTYKYLGIEESDEIESKKMKEKITKEYIKRMKSILESELKPRNKIIALRTLAVPVLTYSFGIIDWFQHEINRIDVKTRKMLHAHKIIYKNQCMPRIYVPRNEGGMGVPQMDRIYKTEIIGLSKYLESRESKFMRWVYEHEMMKPPTTSNTKKEKDYLEGVEIEVGEFRNITEVGKKIKDLKDKYKQARINNDITKWKEHVCGKHFRIDVLDQIYIDKEHTVEPLTGGYLKKEDERTLIAAQDQILRTKWFRKNIEKEEITEICRMCKDKTETVNHILTGCDTLIQMGLYTDRHNTICNMIHLKLCQKYNFEIDTDKYWQHKPAAIIENEEAIILYDHTIPTSIPTPHNRPDIIVREKRTQKCYIIEIGISRDNRVTLYEREKEVKYVRLKYDIRRMWGVEEVEIIPIVVGATGVVKKSMTTYAKKLPNIVVKDVVMEVIKKSLAILRLVLGST

SEQ ID NO: 6543 - protein, 900 aa, Trachelipus rathkii
MLIHQNIVQNLLYRERVENGDPLVHAIRGRKLILAAMVKKRQRYEKTEKEKIQNRIFREDPAKLYRELRKDTIKVEKPPPKEEVERFWKEIYESEVNPNNEADWKREMVDNPQITAIIPMEGGRITENEVKSTIKRSGSWKAPGKDQVHNVWLKKLKVLIKPLTESFNKLIEKQEEIPEWLTSGITSLIPKNEETELASKYRPITCLPTIYKILTGVMAKRVATHLEVNDIINEEQKGCSKGSYGTKDQLLINKMIMENSRKGQKHLSMVWIDYKKAYDSVPHKWIKEVLKIYKINDLVVDFIDEAMKKWRTDLVLPYEKGQIKIEGIKIKRGIFQGDSISPLLFILALNPLSTLINNLENGYRINSMREKKARKISHLFYMDDIKLYAPNKKESEKQVEVVKRYSTDICMEFGLDKCAFVSLKKGRRTEAGNIRINDTEIRELEQGNTYKYLGIEESDEIESKKMKEKITKEYIKRMKSILESELKPRNKIIALRTLAVPVLTYSFGIIDWFQHEINGIDVKTRKMLHAHKIIYKNQCMPRIYVPRNEGGMGVPQMDRIYKTEIIGLSKYLESRESKFMRWVYEHEMMKPPTTSNTKKEKDYLEGVEIEVGEFRNITEVGKKIKDLKDKYKQARINNDITKWKEHVCGKHFRIDVLDQIYIDKEHTVEPLTGGYLKKEDERTLIAAQDQILRTNWFRKNIEKEEITEKCRMCKNKTETVNHILTECKTLLKMGLYTDRHNTICNMIHMKLCQKYNFETDTDKYWQHKPATIIENEEAMILYDHTIPTSIPTPHNRPDIIVREKRTQKCYIIEIGISRDNRVTLYEREKEVKYVRLKYDIRRMWGVEEVEIIPIVVGATGVVKKSMTTYAKKLPNIVVKDVVMEVIKKSLAILRLVLGST

SEQ ID NO: 6544 - protein, 1414 aa, Trachelipus rathkii
MGRKILCPSVSQGEKTTNERMEKTKIKNTCQEIGRPGAGPSSLLERGERGRSSSERSKLSLQVTGSEKDPETDLPLSRLSGGCNTDPSLQEPSKSKRCYTSNLRGGKKIQWSEEEKLEILWCYTYSSHNKFPKKGTLERTKEMLLKRAIVDERKVETTPSSRFSSIATNIRIGKTPITEEQIKQIKEEVDEYIEGMNICEDRWIWTYERNEFLMESYFIGEFIPRKTNMSEIWKWVVKEKIFSPNDFMEYRFGEVYNQVSRKQMVNQKLAIQNYVKERKNQEQRKTKATLPSYEEIELIKGKALNIVENELELTTKEVEEIRKIRNKNTKKIQDDSVKGKKREMKTAGMPDNEKEKIHKLSEINCNLEENVEQEQEKPEEFEMIVFDEKYMNLGNEDQESGESSLSSEDEINYTDDEVETNPDEEQINDERENERIGNIQNPTQEEPNNNDESEEELLVKISHYREEDIHLGIEKRLRINKISNYRLLNKYAGIADRMLPRIIPPNCDITEINRLYYATARAIADTLGIKTKGTIKTNRTKQREIKPPWKIRMDKEIENLRKEISMLSAFQNGEVTATTTRRKVQNLLYRERVENGDPLVHAIRRRKLILAAMVKKRQRYEKTEKEKIQNRIFREDPAKLYRELRKDTIKVEKPPPKEEVERFWKEIYESEVNPNNEAEWKREMVNNPQITAIIPMEGGRITENEVKSTIKRSGSWKAPGKDQVHNVWLKKLKVLIKPLTESFNKLIEKQEEIPEWLTSGITSLIPKNEETELASKYRPITCLPTIYKILTGVMAKRVATHLEVNDIINEEQKGCSKGSYGTKDQLLINKMIMENSRKGQKHLSMVWIDYKKAYDSVPHKWIKEVLKIYKINDLVVDFIDEAMKKWRTDLVLPYEKGQIKIEGIKIKRGIFQGDSISPLLFILALNPLSTLINNLENGYRINSMREKKARKISHLFYMDDIKLYAPNKKESEKQVEVVKRYSTDICMEFGLDKCAFVSLKKGRRTEAGNIRINDTEIRELEQGNTYKYLGIEESDEIESKKMKEKITKEYIKRMKSILESELKPRNKIIALRTLAVPVLTYSFGIIDWFQHEINGIDVKTRKMLHAHKIIYKNQCMPRIYVPRNEGGMGVPQMDRIYKTEIIGLSKYLESRESKFMRWVYEHEMMKPPTTSNTKKEKDYLEGVEIEVGEFRNITEVGKKIKDLKDKYKQARINNDITKWKEHVCGKHFRIDVLDQIYIDKEHTVEPLTGGYLKKEDERTLIAAQDQILRTKWFRKNIEKEEITEICRMCKDKTETVNHILTGCDTLIQMGLYTDRHNTICNMIHLKLCQKYNFEIDTDKYWQHKPAAIIENEEAIILYDHTIPTSIPTPHNRPDIIVREKRTQKCYIIEIGISRDNRVTLYERKRVNIKREKRK

SEQ ID NO: 6545 - protein, 1476 aa, Trachelipus rathkii
MGRKILCPSVSQGEKTTNERMEKTKIKNTCQEIGRPGAGPSSLLERGERGRSSSERSKLSLQVTGSEKDPETDLPLSRLSGGCNTDPSLQEPSKSKRCYTSNLRGGKKIKWSEEEKLEILWCYTYSSHNKFPKKGTLERTKEMLLKRAIVDERKVETTPSSRFSSIATNIRIGKTPITEEQIKQIKEEVDEYIEGMNICEDRWIWTYERNESLMESYFIGEFIPRKTNMSEIWKWVVKEKIFSPNDFMEYRFGEVYNQVSRKQMVNQKLAIQNYVKERKNQEQRKTKATLPSYEEIELIKGKALNIVENELELTTKEVEEIRKIRNKNTKKIQDDSVKGKKREMKTAGMPDNEKEKIHKLSEINCNIEENVEQEQEKPEEFEMIVFDEKYMNLGNEDQESGESSLSSEDEINYTDDEVETNPDEEQINDERENERIGNIQNPTQEEPNNNDESEEELLVKISHYREEDIHLGIEKRLRINKISNYRLLNKYAGIADRMLPRIIPPNCDITEINRLYYATARAIADTLGIKTKGTIKTNRTKQREIKPPWKIRMDKEIENLRKEISMLSAFQNGEVTATTTRRKVQNLLYRERVENGDPLVHAIRRRKLILAAMVKKRQRYEKTEKEKIQNRIFREDPAKLYRELRKDTIKVEKPPPKEEVERFWKEIYESEVNPNNEADWKREMVDNPQITAIIPMEGGRITENEVKSTIKRSGSWKAPGKDQVHNVWLKKLKVLIKPLTESFNKLIEKQEEIPEWLTSGITSLIPKNEETELASKYRPITCLPTIYKILTGVMAKRVATHLEVNDIINEEQKGCSKGSYGTKDQLLINKMIMENSRKGQKHLSMVWIDYKKAYDSVPHKWIKEVLKIYKINDLVVDFIDEAMKKWRTDLVLPYEKGQIKIEGIKIKRGIFQGDSISPLLFILALNPLSTLINNLENGYRINSMREKKARKISHLFYMDDIKLYAPNKKESEKQVEVVKRYSTDICMEFGLDKCAFVSLKKGRRTEAGNIRINDTEIRELEQGNTYKYLGIEESDEIESKKMKEKITKEYIKRMKSILESELKPRNKIIALRTLAVPVLTYSFGIIDWFQHEINRIDVKTRKMLHAHKIIYKNQCMPRIYVPRNEGGMGVPQMDRIYKTEIIGLSKYLESRESKFMRWVYEHEMMKPPTTSNTKKEKDYLEGVEIEVGEFRNITEVGKKIKDLKDKYKQARINNDITKWKEHVCGKHFRIDVLDQIYIDKEHTVEPLTGGYLKKEDERTLIAAQDQILRTKWFRKNIEKEEITEICRMCKDKTETVNHILTGCDTLIQMGLYTDRHNTICNMIHMKLCQKYNFEIDTDKYWQHKPAAIIENEEAIILYDHTIPTSIPTPHNRPDIIVREKRTQKCYIIEIGISRDNRVTLYEREKEVKYVRLKYDIRRMWGVEEVEIIPIVVGATGVVKKSMTTYAKKLPNIVVKDVVMEVIKKSLAILRLVLGST

SEQ ID NO: 6546 - protein, 1476 aa, Trachelipus rathkii
MGRKILCPSVSQGEKTTNERMEKTKIKNTCQEIGRPGAGPSSLLERGERGRSSSERSKLSLQVTGSEKDPETDLPLSRLSGGCNTDPSLQEPSKSKRCYTSNLRGGKKIQWSEEEKLEILWCYTYSSHNKFPKKGTLERTKEMLLKRAIVDERKVETTPSSRFSSIATNIRIGKTPITEEQIKQIKEEVDEYIEGMNICEDRWIWTYERNEFLMESYFIGEFIPRKTNMSEIWKWVVKEKIFSPNDFMEYRFGEVYNQVSRKQMVNQKLAIQNYVKERKNQEQRKTKATLPSYEEIELIKGKALNIVENELELTTKEVEEIRKIRNKNTKKIQDDSVKGKKREMKTAGMPDNEKEKIHKLSEINCNLEENVEQEQEKPEEFEMIVFDEKYMNLGNEDQESGESSLSSEDEINYTDDEVETNPDEEQINDERENERIGNIQNPTQEEPNNNDESEEELLVKISHYREEDIHLGIEKRLRINKISNYRLLNKYAGIADRMLPRIIPPNCDITEINRLYYATARAIADTLGIKTKGTIKTNRTKQREIKPPWKIRMDKEIENLRKEISMLSAFQNGEVTATTTRRKVQNLLYRERVENGDPLVHAIRRRKLILAAMVKKRQRYEKTEKEKIQNRIFREDPAKLYRELRKDTIKVEKPPPKEEVERFWKEIYESEVNPNNEADWKREMVDNPQITAIIPMEGGRITENEVKSTIKRSGSWKAPGKDQVHNVWLKKLKVLIKPLTESFNKLIEKQEEIPEWLTSGITSLIPKNEETELASKYRPITCLPTIYKILTGVMAKRVATHLEVNDIINEEQKGCSKGSYGTKDQLLINKMIMENSRKGQKHLSMVWIDYKKAYDSVPHKWIKEVLKIYKINDLVVDFIDEAMKKWRTDLVLPYEKGQIKIEGIKIKRGIFQGDSISPLLFILALNPLSTLINNLENGYRINSMREKKARKISHLFYMDDIKLYAPNKKESEKQVEVVKRYSTDICMEFGLDKCAFVSLKKGRRTEAGNIRINDTEIRELEQGNTYKYLGIEESDEIESKKMKEKITKEYIKRMKSILESELKPRNKIIALRTLAVPVLTYSFGIIDWFQHEINGIDVKTRKMLHAHKIIYKNQCMPRIYVPRNEGGMGVPQMDRIYKTEIIGLSKYLESRESKFMRWVYEHEMMKPPTTSNTKKEKDYLEGVEIEVGEFRNITEVGKKIKDLKDKYKQARINNDITKWKEHVCGKHFRIDVLDQIYIDKEHTVEPLTGGYLKKEDERTLIAAQDQILRTKWFRKNIEKEEITEICRMCKDKTETVNHILTGCDTLIQMGLYTDRHNTICNMIHLKLCQKYNFEIDTDKYWQHKPAAIIENEEAIILYDHTIPTSIPTPHNRPDIIVREKRTQKCYIIEIGISRDNRVTLYEREKEVKYVRLKYDIRRMWGVEEVEIIPIVVGATGVVKKSMTTYAKKLPNIVVKDVVMEVIKKSLAILRLVLGST

SEQ ID NO: 6547 - protein, 1334 aa, Trachelipus rathkii
MLLKRAVVDERKVETTPSSRFSSIATNIRIGKTPITEEQIKQIKEEVDEYIEGMNICEDRWIWTYERNEFLMESYFIGEFIPRKTNMSEIWKWVVKEKIFSPNDFMEYRFGEVYNQVSRKQMVNQKLAIQNYVKERKNQEQRKTKATLPSYEEIELIKGKALNIVENELELTTKEVEEIRKIRNKNTKKIQDDSVKGKKREMKTAGMPDNEKEKIHKLSEINCNLEENVEQEQEKPEEFEMIVFDEKYMNLGNEDQESGESSLSSEDEINYTDDEVETNPDEEQINDERENERIGNIQNPTQEEPNNNDESEEELLVKISHYREEDIHLGIEKRLRINKISNYRLLNKYAGIADRMLPRIIPPNCDITEINRLYYATARAIADTLGIKTKGTIKTNRTKQREIKPPWKIRMDKEIENLRKEISMLSAFQNGEVTATTTRRKVQNLLYRERVENGDPLVHAIRRRKLILAAMVKKRQRYEKTEKEKIQNRIFREDPAKLYRELRKDTIKVEKPPPKEEVERFWKEIYESEVNPNNEAEWKREMVDNPQITAIIPMEGGRITENEVKSTIKRSGSWKAPGKDQVHNVWLKKLKVLIKPLTESFNKLIEKQEEIPEWLTSGITSLIPKNEETELASKYRPITCLPTIYKILTGVMAKRVATHLEVNDIINEEQKGCSKGSYGTKDQLLINKMIMENSRKGQKHLSMVWIDYKKAYDSVPHKWIKEVLKIYKINDLVVDFIDEAMKKWRTDLVLPYEKGQIKIEGIKIKRGIFQGDSISPLLFILALNPLSTLINNLENGYRINSMREKKAKKISHLFYMDDIKLYAPNKKESEKQVEVVKRYSTDICMEFGLDKCAFVSLKKGRRTEAGNIRINDTEIRELEQGNTYKYLGIEESDEIESKKMKEKITKEYIKRMKSILESELKPRNKIIALRTLAVPVLTYSFGIIDWFQHEINGIDVKTRKMLHAHKIIYKNQCMPRIYVPRNEGGMGVPQMDRIYKTEIIGLSKYLESRESKFMRWVYEHEMMKPPTTSNTKKEKDYLEGVEIEVGEFRNITEVGKKIKDLKDKYKQARINNDITKWKEHVCGKHFRIDVLDQIYIDKEHTVEPLTGGYLKKEDERTLIAAQDQILRTNWFRKNIEKEEITEKCRMCKNKTETVNHILTECKTLLKMGLYTDRHNTICNMIHMKLCQKYNFETNTDKYWQHKPATIIENEEAMILYDHTIPTSIPTPHNRPDIIVREKRTQKCYIIEIGISRDNRVTLYEREKEVKYVRLKYDIRRMWGVEEVEIIPIVVGATGVVKKSMTTYAKKLPNIVVKDMVMEVIKKSLAILRLVLGST

SEQ ID NO: 6548 - protein, 994 aa, Trachelipus rathkii
MKKYKLFKYAGIADRMLPRIIPPNCDITEINRLYYATARAIADTLGIKTKGTIKTNRTKQREIKPPWKIRMDKEIENLRKEISMLSAFQNGEVTATTTRRKVQNLLYRERVENGDPLVHAIRRRKLILAAMVKKRQRYEKTEKEKIQNRIFREDPAKLYRELRKDTIKVEKPPPKEEVERFWKEIYESEVNPNNEAEWKREMVNNPQITAIIPMEGGRITENEVKSTIKRSGSWKAPGKDQVHNVWLKKLKVLIKPLTESFNKLIEKQEEIPEWLTSGITSLIPKNEETELASKYRPITCLPTIYKILTGVMAKRVATHLEVNDIINEEQKGCSKGSYGTKDQLLINKMIMENSRKGQKNLSMVWIDYKKAYDSVPHKWIKEVLKIYKINDLVVDFIDEAMKKWRTDLVLPYEKGQIKIEGIKIKRGIFQGDSISPLLFILALNPLSTLINNLENGYRINSMREKKARKISHLFYMDDIKLYAPNKKESEKQVEVVKRYSTDICMEFGLDKCAFVSLKKGRRTEAGNIRINDTEIRELEQGNTYKYLGIEESDEIESKKMKEKITKEYIKRMKSILESELKPRNKIIALRTLAVPVLTYSFGIIDWFQHEINGIDVKTRKMLHAHKIIYKNQCMPRIYVPRNEGGMGVPQMDRIYKTEIIGLSKYLESRESKFMRWVYEHEMMKPPTTSNTKKEKDYLEGVEIEVGEFRNITEVGKKIKDLKDKYKQARINNDITKWKEHVCGKHFRIDVLDQIYIDKEHTVEPLTGGYLKKEDERTLIAAQDQILRTKWFRKNIEKEEITEICRMCKDKTETVNHILTGCDTLIQMGLYTDRHNTICNMIHLKLCQKYNFEIDTDKYWQHKPAAIIENEEAIILYDHTIPTSIPTPHNRPDIIVREKRTQKCYIIEIGISRDNRVTLYEREKEVKYVRLKYDIRRMWGVEEVEIIPIVVGATGVVKKSMTTYAKKLPNIVVKDVVMEVIKKSLAILRLVLGST

SEQ ID NO: 6549 - protein, 979 aa, Trachelipus rathkii
MLTHQNIPPNCDITEINRLYYATARAIADTLGIKTKGTIKTNRTKQREIKPPWKIRMDKEIENLRKEISMLSAFQNGEVTATTTRRKVQNLLYRERVENGDPLVHAIRGRKLILAAMVKKRQRYEKTEKEKIQNRIFREDPAKLYRELRKDTIKVEKPPPKEEVERFWKEIYESEVNPNNEADWKREMVDNPQITAIIPMEGGRITENEVKSTIKRSGSWKAPGKDQVHNVWLKKLKVLIKPLTESFNKLIEKQEEIPEWLTSGITSLIPKNEETELASKYRPITCLPTIYKILTGVMAKRVATHLEVNDIINEEQKGCSKGSYGTKDQLLINKIIMENRKGQKHLSMVWIDYKKAYDSVPHKWIKEVLKIYKINDLVVDFIDEAMKKWRTDLVLPYEKGQIKIEGIKIKRGIFQGDSISPLLFILALNPLSTLINNLENGYRINSMREKKARKISHLFYMDDIKLYAPNKKESEKQVEVVKRYSTDICMEFGLDKCAFVSLKKGRRTEAGNIRINDTEIRELEQGNTYKYLGIEESDEIESKRMKEKITKEYIKRMKSILESELKPRNKIIALRTLAVPVLTYSFGIIDWFQHEINGIDVKTRKMLHAHKIIYKNQCMPRIYVPRNEGGMGVPQMDRIYKTEIIGLSKYLESRESKFMRWVYEHEMMKPPTTSNTKKEKDYLEGVEIEVGEFRNITEVGKKIKDLKDKYKQARINNDITKWKEHVCGKHFRIDVLDQIYIDKEHTVEPLTGGYLKKEDERTLIAAQDQILRTKWFRKNIEKEEITEICRMCKDKTETVNHILTGCDTLIQMGLYTDRHNTICNMIHLKLCQKYNFEIDTDKYWQHKPAAIIENEEAIILYDHTIPTSIPTPHNRPDIIVREKRTQKCYIIEIGISRDNRVTLYEREKEVKYVRLKYDIRRMWGVEEVEIIPIVVGATGVVKKSMTTYAKKLPNIVVKDVVMEVIKKSLAILRLVLGST

SEQ ID NO: 6550 - protein, 1003 aa, Macrobrachium nipponense
MSHDNELHEDDLRDDAIEDDREDEVSNNDTRRNTDEVTERTEWVEKIRQWMELDTERTKIPSMKAYNTKKLREKTSEVNEIMGLIHTTSITETNNLTYAGARLVAELMGIRTPTPPSQPTQQKPKQQPPWKRRLEKQIMVMRSDLSKLKEMAEKRLRSKKTSEELNEKYKVQERGLNNTIEDVKQRLKAKAHKIQRYMNRNKGYQQNKLFGTNQKRLYSQLRGEDNHPEIPEAELSKRLWENIWSNPVSHNKHATWLQEVKEEETGRIKQRFTDITTDTVRHQLKKMPNWKAPGPDEVHGYWLKNFKALHPRLAEQLQHCISNHQAPKWMTTGRTSLVQKDKSKGNIASNYKPITCLPIMWKLLTGIISERLYNYLEETNTIPHQQKGCRRKCRGTKDQLLIDKMVMKNSKRRKTNLSMAWIDHKKAFDMIPHTWLIECLKIYGAEENTISFLKNTMRNWNTILTSSGIRLAEVNIRRGIFQGDSLSPLLFVVAMIPMTKVLQKMDAGYQLKKRGNKINHLMFMDDIKLYGKSIKEIDTLIQTVRIVSGDIRMEFGIEKCALVNIQKGKVTRTEGIKLPDGSNIKHIDETGYKYLGIMEGGDIKHQEMKDTIRKEYMQRFKAILKSKLNAGNMIKAINTWAVPVIRYSAGIVEWTKAELHSIDQKTRKQMTIHKALHPRANTDRLYITRKEGGRGLLSIEDCVNIENRALGQYLKTSEDEWLKSAWEEGLIQVDEDPEIYRDRRKTEKTEDWHNKPMHGQYMRQTKELASDDNWQWLQRGELKKKTEGMRTAAQDQALRTRYVQSTIDGNNISPICRKCNTKNETINHIASECPALAQNQYKKRHDSVAKALHWSLCKKHQLPCSNKWYEHQPEGVIENDQAKILWDYGIRTDRVIRANRPDVTLIDKVKKKVSLIDVAIPWDTRVEEKEREKLEKYQDLKIEIRRIWDMPVEIVPIIIGALGTIPRSLKRNLEKLEAEVAPGLRQKSVILETAHIVRKVMDS

SEQ ID NO: 6551 - protein, 894 aa, Macrobrachium nipponense
MSHDNELHEDELRDDVTEDDREDEVSNNDTRRNTDEVTERTEWVEKIRQWMEPDTERTKIPSMKAYNTKKLREKASEVNEILGIIQTTSITETNNLTYAGARLVAELMGIRTPTPPAQPTQQQPKQQPPWKRRLEKQIMVMRSDLSKLKEMAEKRLRSKKTREELNEKYKVQERGLNNTIEDVKQRLKAKAHKIQRYMNRNKGYQQNKLFGTNQKRLYSQLRGEDNHPEIPEAEPSKRLWENIWSNPVSHNKHATWLQEVKEEETGRIKQRFTEITTDTVRHQLKKMPNWKAPGPDEVHGYWLKNFKALHPRIAEQLQHCISNHQAPKWMTTGRTSLVQKDKSKGNIASNYRPITCLPIMWKLLTGIISERLYNYLEETNKTIPHQQKGCRRKSRGTKDQLLIDKMVMKNSRRRKTNLSMAWIDYKKAFDMIPHTWLIECLKIYGAEENTISFLKNTMRNWNTILTSSGIKLAEVNIRRGIFQGDSLSPLLFVVAMIPMTKVLQKMDAGYQLKKRGNRINHLMFMDDIKLYGKSIKEIDTLIQTVRIVSGDIRMEFGIEKCALVNIQKGKVTRTEGIKLPDGSNIKHIDETGYKYLGIMEGGDIKHQEMKDTIRKEYMQRLKAILKSKLNAGNMIKAINTWAVPVIRYSAGIVEWTKAELRSIDQKTRKHMTIHKALHPRANTDRLYITRKEGGRGLLSIEDCVNIENRALGQYLKTSEDEWLKSGMEEGLIKVDEDPEIYRDRRKTERTEDWHNKPMHGQYMKQTKELASDDNWQWLQRGELKKETEGMITAAQDQALRTRYVQSTIDGNNISPICRKCNTKSETINHIASECPALTQNQYKKRHDSVAKALHWSLCKKHQLPCSNKWYEHQPEGVIENDQAKILWDLWYQNG

SEQ ID NO: 6552 - protein, 974 aa, Macrobrachium nipponense
MDKRRNTDEVTQRTEWVEKIRQWMEPDAERTKIPSMKAYNTKKLREKTSEVNEIMGIIHTTSITETNNLTYAGARLVAELMGIRTPTPPAQPTQQKPKQQPPWKRRLEKQIMVMRSDLSKLKEMAEKRLRSKKTREELNEKYKVQERGLNNTIEDVKQRLKAKAHKIQRYRNKGYQQNKLFRTNQKRLYSQLRGEDNHPEIPEAEPSKRLWENIWSNPVSHNKHATWLQEVKEEETGRIKQRFTEITTDTVRQQLKKIPNWKAPGPDEVHGYWLKNFKALHPRIAEQLQHCISNHHTPKWMTTGRTSLVQKDKSKGNIASNYRPITCLPIMWKLLTGIISEMLYNYLEETNTIPHQQKGYRRKCRGTKDQLLIDKMVMKNRNRRKTNLSMAWIDYKKAFDMIPHTWLIECLKIYGAEENTISFLKNTMRNWNTILTSSGIRLAEVNIRRGIFQGDSLSPLLFVVAMIPMTKVLQKMDAGYQLKKRGNRINHLMFMDDIKLYGKSIKEIDTLIQTVRIVSGDIRMEFGIEKCALVNIQKGKVTRTEGIKLPDGSSIKHIDETGYKYLGIMEGGDIKHQEMKDTIRKEYMQRLKAILKSKLNSGNMIKAINTWAVPVIRYSAGIVEWTKAELRCIDQKTRKHMTIHKALHPRANTDRLYITRKEGGRGLLSIEDCVNIENRALGQYLKTSEDEWLKSAWEEGLIKVDEDPEIYRDRRMTDRTEDWHNKPMHGQYMRQTKELASDDTWQWLQRGELKKETEGMITAAQDQALRTRYIQRTIDGNNISPICRKCNTKNETINHIASECPALAQNQYKKRHDPVAKALHWSLCMKHQLPCSNKWYEHQPEGVIENDHAKILWDYGIRTDRVIRANRPDVTLIDKVKKKVSLIDVAIPWDTRVEEKEREKMDKYQDLKIEIRRIWDMPVEIVPIIIGALGTIPRSLKRNLEKLEAEVAPGLMQKSVILETAHIVRKVMDS

SEQ ID NO: 6553 - protein, 938 aa, Macrobrachium nipponense
MKAYNTKKLREKTSEVNEIMGIIHTTSITETNNLTYAGARLVAELMGIRTPTQPTQQKPKQQPPWKRRLEKQIMVMRSDLSKLKEMAEKRLRSKKTREELNEKYKVQERGLNNTIEDVKQRLKAKAHKIQRYMNRNKGYQQNKLFGTNQKRLYSQLRGEDNHPEIPETEPSKRLWENIWSNPVSHNKHATWLQEVKEEETGKIKQRFTEITTDTVRHQLKKMPNWKAPGPDEVHGYWLKNFKALHPRIAEQLQHCISNHHAPKWMTTGRTSLVQKDKSKGNIASNYRPITCLPIMWKLLTGIISERLYNYLEETNTIPHQQKGCRRKCRGTKDQLLIDKMVMKDSRRRKTNLSMAWIDYKKAFDMIPHTWLIECLKIYGAEENTISFLKNTMRNWNTILTSSGIRLAKVNIRRGIFQGDSLSPLLFVVAMIPMTKVLQKMDAGYQLKKRGNRINHLMFMDDIKLYGKSIKKIDTLIQTVRIVSGDIRMEFGIEKCALVNIQKGKVTRTEGIKLPDGSNIKHIDETGYKYLGIMEGGDIKHQEMKDTIRKEYMQRLKAILKSKLNAGNMIKAINTWAVPVIRYSAGIVEWTKAELRSIDQKTRKHMTIHKALHPRANTDRLYITRKEGGRGLLSIEDCVNIENRALGQYLKTSEDEWLKSAWEEGLIKVDEDPEIYRDRRKTDRTEDWHNKPMHGQYMRQTKELASDDNWQWLQRGELKKETEGMITAAQDQALRTRYVQRTIDGNNISPICRKCNTKNETINHIASECPALAQNQYKKRHDSVAKALHWSLCKKHQLPCSNKWYEHQPEGVIENDQAKILWDYGIRTDRVIRANRPDVTLIDKVKKKVSLIDVAIPWDTRVEEKEREKLDKYQDLKIEIRRIWDMPVKIVPIIIGALGTIPRSLKRNIEKLEAEVAPGLMQKSVILETAHIVRKVMDS

SEQ ID NO: 6554 - protein, 863 aa, Macrobrachium nipponense
MVMRSDLSKLKEMAEKRLRSKKTREELNEKYKVQERGLNNTIEDVKQRLKAKAHKIQRYMNRNKGYQQNKLFRTNQKRLYSQLRGEDNHPEIPEAEQSKRLWENIWSNPVSHNKHATWLQEVKEEETGRIKQRFTEITTDTVRHQLKKMPNWKAPGPDEVHGYWLKNFKALHPRIQLQHCISNHQAPKWMTTGRTSLVQKDKSKGNIASNYRPITCLPIMWKLLTSIISERLYNYLEETNTIPHQQKGCRRKCRGTKDQLLIDKMVMKNSRRRKTNLSMAWIDYKKAFDMIPHTWLIECLKIYGAEENTISFLKNTMHNWNTILTSSGIRLAEVKIRRGIFQGDSLSPLLFVVAMIPMTKVLQKMDAGYQLKKRGNRINHLMFMDDIKLYGKSIKEIDTLIQTVRIVSGDIRMEFGIEKCALVNIQKGKVTRTEGIKLPDGSNIKHIDETVYKYLGIVEGGDIKHQEMKDTIRKEYMQRLKAILKSKLNAGNMIKAINTWAVPVIRYSAGIVEWTKAELRTIDQKTRKHMTIHKALHPRANTDRLYITRKEGGRGLLSIEDCVNIENRALGQYLKTSEDEWLESAWEEGLIKVDEDPEIYRDRRKTDRTEDWHNKPMHGKYMRQTKELASDDNWQWLQRRELKKETEGMITAAQDQALRTRYVQRTIDGNNISPICRKCNTKNETINHIASECPALAQNQYKKRHDSVAKALHWSLCKKHQLPCSNKWYEHQPEGVIENDQAKILWDYGIRTDRVIRANRPDVTLIDKVKKKVSLIDVAIPWDTRVEEKEREKMDKYQDLKIEIRRIWDMPVEIVPIIIGALGTIPRSLKRNLEKLEAEVAPGLMQKSVILETAHIVRKVMDS

SEQ ID NO: 6555 - protein, 1003 aa, Macrobrachium nipponense
MSHDNELHEDELRDDATEDDRDDEVSNNDTRRNTDEVTERTEWVEKIRQWMEPDTERTKIPSMKAYNTKKLREKTSEVNEIMGIIHTTSITETNNLTYAGARLVAKLMGIRTPTPPAQPTQQKPKQQPPWKRRLEKQIMVMRSDLSKLKEMAEKRLRSKKTREELNEKYKVQERGLNNTIEDVKQRLKAKAHKIQRYTNRNKGYQQNKLFGTNQKRLYSQLRGEDNHPEIPEAEPSKRLWENIWSNPVSHNKHATWLQEVKEEETGRIKQRFTEITTDTVRHQLKKMPNWKAPGPDEVHGYWLKNFKALHPRIAEQLQHCISNHQAPKWMTTGRTSLVQKDKSKGNIASNYRPITCLPIMWKLLTGIISERLYNYLEETNTIPHKQKGCRRKCRGTKDQLLIDKMVMKNSRRRKTNLSMAWIDYKKAFDMIPHTWLIECLKIYGAEENNISFPSKIQCATGYNTYKLWNKTSRGYIRRGIFQGDSLSPLLFVVAMIPMTKVLQKMDAGYQLKKRGNRINHLMFMDDIKLYGKSIKEIDTLIQTVRIVSGDIRMEFGIEKCALVNIQKGKVTRTEGIKLPDGSNIKHIDETGYKYLGIMEGGDIKHQEMKDTIRKEYMQRLKAILKSKLNGGNMIKAINTWAVPVIRYSAGIVEWTKAELRSIDQKTRKHMTIHKALHPRANTDRLYITRKEGGRGLLSIEDCVNIENRALGQYLKTSEDEWLKSAWEEGLIKVDEDPEIYRDRRKTDRTEEWHNKPMHGQYMRQTKELASDDNWQWLQRGELKKETEGMITAAQDQALRTRYVQRTIDGNNISPICRKCNTKNETINHIASECSALAQNQYKKRHDSVAKALHWSLCKKHQLPCSNKWYEHQPEGVIENDQAKILWDYGIRTDRVIRANRPDVTLIDKVKKKVSLIDVAIPWDTRVEEKEREKMDKYQDLKIEIRRIWDMPVEIVPIIIGALGTIPRSLKRNLEKLEAEVAPGLMQKSVILETAHIVRKVMDS

SEQ ID NO: 6556 - protein, 949 aa, Macrobrachium nipponense
MKPDTERTKIPSMKAYNTKKLREKTSEVNEIMRLIHTTNITETNNLTYAGARLVAERMGTRTPTPPAQPAQQKPKQQPPWKRRLDKQIMVMRSDLSKLKEMAEKRLRSKKTREELNEKYKVHERGLNNTIEDVKQRLKAKAHKIQWYMNRNKGYQQNKLFGTNQKRRYSQLRGEDNHPEIPEAEPSKRLWENIWSNPVSHNKHATWLQEVKAEETGRIKQRFTDITTDTVRHQLKKMPNRKAPGPDEVHGYWLKNFKALHPRIAEQLQHCISNHHAPKWMTTGRTSLVQKDKSKGNIASNYRPITCLPIMWTLLTGIISERLYNYLEDTKTIPRQQKGCRRNCRGTKDQLLIDKMVMKNSKRRKTNLSMAWIDYRKAFDMIPHTWLIECLKIYGAEGNTISFLKNTMRNWNTILTSSGIRLAEVNIRRGIFQGDSLSPLLFVVAMIPMTKVLQKMDAGHQLKKRGNRINHLMFMDDIKLYGKSTKEIDTLIQTVRIVSGDIRMEFGIEKCALVNIQKGKVTWTEGIKLPDGSNIKHIDETGYKYLGIMEGGYIKHQEMKDTIRKEYIQILKAILKSKLKAGNMIKAINTWVVPVIRYSAGIVEWTKAELRNIGQKTRKHMTIHKALHPRANTDRLYITQKEGGRGLLSMEDCVNIENRALGQYLKTSEDEWLKSAWEEGLIKVDEDPEIYRDRRMTNRTEDCHNKPMHGQYMRQTKELASDDTCQWLQRGELKKQTEGMITAAQDQALRTRYIQRTIDGNKISPICKKCNTKNETINLIASECPALAQNQYKKRHDSVAKGLHWSLCKKHQLPCSNKWYEHQPEGMIENDQAKILWDYGIRTDRVIRANRPDVTLIEKIKTKVSLIPWDTRVEEKEREKMDKYQDLKIEIRRIWDMPVEIVPIIIGALGTIPRSLKRNLEKLDAEVAPELMQKSVILETAHIVRRVMDS

SEQ ID NO: 6557 - protein, 897 aa, Macrobrachium nipponense
MGIRTPTPPPSTTNPTETKQQPPWKRRLEKQIMVMRSDLSKLKEMAEKRLRSKKTREELNEKYKVQERGLNNTIEDVKQRLKAKAHKIQRYTNRNKGYQQNKLFGTNQKRLYSQLRGEDNHPEIPEAEPSKRLWENIWSNPVSHNKHATWLQEVKEEETGRIKQRFTEFTTDTVRHQLKKMPNWKAPGPDEVHGYWLKNFKALHPRIAEQLQHYISNHQAPKWMTTGRTSLVQKDKSKGNIASNYRPITCLPIMWKLLTGIISERLYNYLEETNTIPHQQKGCRRKCRGTKDQLLIDKMVMKNSRRRKTNLSMAWINYKKAFDMIPHTWLIECLKIYGAEENTISFLKNTKRNWNTILTSSGIRLAEVNIRRGIFQGDSLSPLLFVVAMIPMTKVLQKMDAGYQLKKRGNRINHLMFMDDIKLYGKSIKEIDTLIQTVRIVSGDIRMEFGIEKCALVNIQKAKITRTEGIKLPDGSNIKHIDETGYKYLGIMEGGDIKHQEMKDTIRKEYMQRLKAILKSKLNAGNMIKAINTWAVPVIRYSAGIVEWTKAKLRTIDQKTRKHMTIHKALHLRANTDRLYITRKEGGRGLLSIEDCVNIENRALGQYLKTSEDEWLKSAWEEGLIKVDEDPEIYRDRRKTDRTEDWHNKPMHGQYMRQTKELASDDNWQWLQRGELKKETEGMITATQDQALRTRYVQRTIDGNNISPICRKCNMKNETINHIVSECSALAQNQYKKRHDSVAKALHWSLCKKHQLPCSNKWYEHQPEGVIENDHAKILWDYGIRTDRVIPANRPDVTLIDKVKKKVSLIHVAIPWDTRVEEKEREKMDKYQDLKIEIRRIWDMPVEIVPIIIGALGTIPRSLKRNLEKLEAEVAPGLMQKSVILETAHIVRKVMDS

SEQ ID NO: 6558 - protein, 865 aa, Macrobrachium nipponense
MVMRSDLSKLKEMAEKRLRSKKTREELNEKYKVQERGLNNTIEDVKQRLKAKAHKIQRYMNRNKGYQQNKLFGTNQKRLYSQLRGEDNHPEIPEAEPSKRLWENIWSNPVSHNKHATWLQEVKEEETGRIKQRFTEITTDTVRHQLKKMPNWKAPGPDEVHGYWLKNFKALHPRIAEQLQHCISNHQAPKWMTTGRTSLVQKDKSKGNIASNYRPITCLPIMWKLLTGIISERLYNYLEETNTIPHQQKGCRRKCRGTKDQLLIDKMVMKNSRRRKTNLSMAWIDYKKAFDMIPHTWLIECLKIYGAEENTISFLKNTMRNWNTILTSSGIRLAEVNIRRGIFQGDSLSPLLFVVAMIPMTKVLQKMDAGYQLKKRGNKINHLMFMDDIKLYGKSIKEIDTLIQTVRIVSGDIRMEFGIEKCALVNIQKGKVTRTEGIKLPDGNNIKHIDETGYKYLGIMEGGDIKHQEMKDTIRKEYMQRLKAILKSKLNAGNMIKAINTWAVPVIRYSAGIVEWTKAELRSIDQKTRKQMTIHKALHPRVNTDRLYITRKEGGRGLLSIEDCVNIENRALGQYLKTSEDEWLKSAWEEGLIKVDEDPEIYRDRRKTERTEDWHNKPMHGQYMRQTKELASDDNWQWLQRGELKKETEGMITAAQDQALRTRYVQSMIDGNNISPICRKCNTKNETINHIASECPALAQNQYKKRHDSVAKALHWSLCKKHQLPCSNKWYEHQPEGVIENDQAKILWDYGIRTDRVIRANRPDVTLIDKVKKKVSLIDVAIPWDTRVEEKEREKMDKYQDLKIEIRRIWDMPVEIVPIIIGALGTIPRSLKRNLEKLEAEVAPGLMQKSVILETAHIVRRVMDS

SEQ ID NO: 6559 - protein, 1140 aa, Macrobrachium nipponense
MMERNEGINDNDVNGTSGNRGASSGHQVFNHIEGEDGQVLGGRHPATDHHNDSNQQPEIGATEAKRKKWTREENKEIWRCYIRSNPTERGYRRRLVNIWNERNNTPQTDQRLANQVRNVKKKNWLSPTEREELEREMSHDNELHEDELRDDATEDDREDEVSNNDTRRNTDEVTVRTEWVEKIRQWMEPDTERTKIPSMKAYNTKKLREKTSEVNEIMGIIHTTSITKTNNLVYAGARLVAELMGIRTPTPPAQPTQQKPKQQPTWKRRLEKQIMVMRSDLSKLKEMAEKRLRSKKTREELNEKYKVQERGLNNTIEDVKQRFKAKAHKIQRYMNRRNKGYQQNKLFGTNQKRLYSQLRGEDNHPEIPEAEPSKRLWKNIWSNPVSHNKHATWLQEVKEEETGRIKQRFAEITTDTVRHQLKKMPNWKAPGPDEVHGYWLKNFKALHPRIAEQLQHCISNRHAPKWMTTGRTSLVQKDKSKGNIASNYRPITCLPIMWKLLTGIISERLYNYLEETNTIPHQQKGCRRKCRGTKDQLLIDKMVMKNSRRRKTNLSMAWIDYKKAFDIIPHTWLIECLKIYGAEENTISFLKNTMHNWNTILTSSGIRLAEVNIRRGIFQGDSLSPLLFVVAMIPMTKVLQKMDAGYQLKKRDNRINHLMFMDDIKLYGKSIKEIDTLIQTVRIVSGDIRMEFGIEKCALVNIQKGKVTRTEGIKLPDGSNIKHIDETGYKYLGIMEGGDIKHQEMRTTIWKEYMQRLKAILKSKLNGGNMIKAINTWAVPVIRYSVGIVEWTKAELRSIDQKTRKHMTIHKALHPRANTDRLYITRKEGGRGLLSIEDCVNIENGALGQYLKTSEDEWLKSAWEEGLIKVDEDPQIYRDRRMTDRTEDWHNKPMHGQYMRQTKELASDDTWQWLQRGELKKETEGMITVAQDQALRTRYVQRTIDGNNISPICRKCNTKNETINHIASECPALAQNQYKKRHDSVAKALHWSLCKKHQLPCSNKWYEHQPEGVIENDHAKILWDYGIRTDRVIRANRPDVTLIDKVKKKVSLIDVAIPWDTRVEEKEREKMDKYQDLKIEIRRIWDMPVEIVPIIIGALGTIPRSLKRNLEKLEAEVAPGLMQRSVILETAHIVRKVMDS

SEQ ID NO: 6560 - protein, 953 aa, Macrobrachium nipponense
MEPDTERTKIPSMKAYNNKKLREKTSEVNEIMGLIHTTSITETNNLTYAGARLVAELIGIRTPTPPSQPTQQKPKQQPPWKRRLEKQIMVMRSDLSKLKEMAEKRLRSKKTREELNEKYKVQERGLNNTIEDVKQRLKAKAHKIQRYMNRNKGYQQNKLFGTNQKRLYSQLRGEDNHPEIPEAEPSKRLWENIWSNPVSHNKHATWLQEVKEEKTGRIKQRFTDSTTNTVRHQLKKMPNWKAPGPDEVHGYWLKNFKALHPRIAEQLQHCISNHQAPKWMTTGRTSLVQKDKSKGNIASNYRPITCLPIMWKLLTGIISERLYNYLEETNTIPHQQKGCRRKCRGTKDQLLIDKMVMKNSRRRKTNLSMAWIDYKKAFDMIPHTWLIECLKIYGAEENTISFLKNTMRNWNTILTSSGIRLAEVNIRRGIFQGDSLSPLLFVVAMIPMTKVLQKMDAGYQLKKRGNKINHLMFMDDIKLYGKSIKEIDTLIQTVRIVSGDIRMEFGIEKCALVNIQKGKVTRTEGIKLPDGSNIKHIDETGYKYLGIMEGGDIKHQEMKDTIRKEYMQRLKAILKSKLNAGNMIKAINTWAVPVIRNSAGIVEWTKAELRSIDQKTRKQMTIHKALHPRANTDRLYITRKEGGRGLLSIEDCVNIENRALGQYLKTSENKWLKSALEEGLIKVDEDPEIYRDRRKTERTEDWHNKPMHGQYMRQTKELSSDDNWQWLQRGELKKETEGMITAAQDQALRTRYVQSMIDGNNISPICRKCNTKNETINHIASECPALAQNQYKKRHDSVAKALHWSLCKKHQLPCSNKWYEHQPEGVIENDQAKILWDYGIRTDRVIRANRPDVTLIDKVKKKVSLIDVAIPWDTRVEEKEREKMDKYQDLKIEIRRIWDMPVEIVPIIIGALGTIPRSLKRNLEKLEAEVAPGLMQKSVILETAHIVRKVMDS

SEQ ID NO: 6561 - protein, 984 aa, Macrobrachium nipponense
MSHDNELHEDELRDDATEDDRDDEVSNNDTRRNTDEVTERTEWVEKIRQWMEPGTERTKIPSMKAYNTKKLREKTSEVNEITGIIHTTSITETNNLAYAGARLVAELMGIRTPTPPAQPTQQKPKQQPPWKRRLEKQILVMRSDLSKLKEMAEKRLRSKKTREELNEKYKVQERGLNNTIEDVKQRLQAKANKIQRYMNRNKGYQQNKLFATNQKRLYSQLRGEDNHKEIPEGDPSKRLWENIWSNPVSHNKHATWPQEVKEEETGRIKQRFTEITTDTVRHQLKKMPNWKAPGPDEVHGYWFKNLKALHPRIAEQLQHCISNHHAPKWMTTGRTSLVQKDKSKGNIASNYRPINCLPIMWKLLTGIISERLYNYLEETNTIPHQQKGCRRKCRGTKDQLLIDKMVMKNSRRRKTNLSMAWIDYKKAFDMIPHTWLIECLKIYGAENTISFLKNTMCNWNTILTSSGIRLAEVNIRRGIFQGDSVVAMIPMTKVLQKMDARYQLKKRGNRINHLMFMDDIKLYGKSIKEIDTLIQTVRIVSGDIRMEFGIEKCALVNIQKGKVTRTEGIKLPDGSNIKHIDETEYKYLGIMEGGDIKHQEMRDTIRKEYMQRLKAILKSKLNAGNMIKAINTWAVPVIRYSAGIVEWTKAELCSIDQKTRKHMTIHKALHPRANTDRLYITRKEGGRGLLSIEDCVNSENRALGQYLKTSEDEWLKSAWEEGLIKVDEDPEIYRDRRMTDRTEDWHNKPIHGQYMRQTKELASDDTWQWLQRGELKKETEGMITAAQDQALRTRYVQRTTDGNNISSICRKCNTKNETINHIASECPPLAQNQYKKRHGSVAKALHWSLCKKHQLPCSNKWYEHQPEGVIESDQAKILWDYGIRTDRAIRANRPDVTLIDKVKNKVSLIDVAIPWDTRVEEKERKKMDKYQDLKIEIRRIWDMPVEIVPTIIGALGTIPRSLKRNLEKLDAEVAPGLMQKSVHT

SEQ ID NO: 6562 - protein, 1110 aa, Macrobrachium nipponense
MMERNERINDNDVNGTSGNRGASSGNQVFNPIEGEDGQVLGGRHPATDHHIESNQQPEIGATEAKRKKWTREENKEIWRCYIRSNPTVRGYRRRLVNIWNERNNTPQTEQRLADQVMNIKKKNWLSPTEREELEREMSHDNELHEDELRDDATEDDRDDEVSNNDTRRNTDEVTERTEWVEKIRQWMEPDTERTKIPSMKAYNTKKLREKTSEVNEIMGIIHTTSITETNNLTYAGARLVAELMGIRTPTPPAQPTQQKPKQQPPWKRRLEKQIMVMRSDLSKLKEMAEKRLRSKKTREELNEKYKVQERGLNNTIEDVKQRLKAKAHKIQRYMNRNKGYQQNKLFGTNQKRLYSQLRGEDNHPEIPEAEPSKRLWENIWSNPISHNKHATWLQEVKEEETGRIKQRFTEITTDTVRHQLKKNAKLESPRSDEVHGYWLKNFKALHPRIAEQLQHCISNHQAPKWMTTGRTSLVQKDKSKGNIASNYRPITCLPIMWKLLTGIISERLYNYLEETNTIPHQQKGCRRKCRGTKDQLLIDKMVMKNSRRRKTNLSMAWIDYKKAFDMIPHTWLIECLKIYGAEENTISFLKNTMRNWNTILTSSGIRLAEVNIRRGIFQGDSLSPLLFVVAMIPMTKVLQKMDAGYQLKKRGNRINHLMFMDDIKLYGKSIKEIDTLIQTVRIVSGDIRMEFGIEKCALVNIQRGTEGINLPDGSNIKHIDETGYKYLGIMEGGDIKHQEMKDTIRKEYMQRLKAILKSKLNGGNMIKAINTWAVPVIRYSAGIVEWTKAELRSIDQKTRKHMTIHKALHPRANTDRLYITRKEGGRGLLSIEDCVNIENRALGQYLKTSEDEWLKSAWEEGLIKVDEDPEIYRDRRKTDRTEDWHNKPMHGQYMRQTKELASDDNWQWLQRGELKKETEGMITAAQDQALRTRYVQRTIDGNNISPICRKCNMKNETINHIASECSALAQNQYKKRHDSVAKALHWSLCKKHQLPCSNKWYEHQPEGVIENDQAKILWDYGIRTDRVIRANRPDVTLIDKVKKKVSLIDVAIPWDTRVEEKEKEKMDKYQDLKIEIRRIWDMPVEIVPIIIGALGTIPRSLKRNLEKTRG

SEQ ID NO: 6563 - protein, 1003 aa, Macrobrachium nipponense
MSHDNELHEDELRDDATEDDREDEVSNNDTRRNTDEVTERTEWVEKIRQWMEPDTERTKIPSMKAYNTKKLREKTSEVNEIMGIIYTTSITETNNLTYAGARLVAELMGIRTPTPPALPTQQKPKQQPPWKRRLEKQIMVMRSDLSKLKEMAEKRLRSKKTREELNEKYKVQERGLNNTIEDVKQRLKAKAHKIQRYMNRNKGYQQNKLFGTNQKRLYSQLRGEDNHPEIPEAEPSKRLWENIWSNPVSHNKHATWLQEVKEEETGRIKQRFTEITTDTVRHQLKKMPNWKAPGLDEVHGYWLKNFKALHPRIAEQLQHCISNHQAPKWMTTGRTSLVQKDKSKGNIASNYRPITCLPIMWKLLTGIISERLYNYLEETNTIHPHQQKGCRRKCRGTKDQLLIDKMVMKNSRRRKTNLSMAWIDYKKAFDMIPHTWLIECLKIYGAEENTISFLKNTMRNWNTILTSSGIRLAEVNIRRGIFQGDSLSPLLFVVAMIPMTKVLQKMDAGYQLKKRGNRINHLMFMDDIKLYGKSIKEIDTLIQTVRIVSGDIKMEFGIEKCALVNIQKGKVTRTEGIKLPDGSNIKHIDETGYKYLGIMEGGDIKHQEMKDTIRKEYMQRLKAILKSKLNAGNMIKAINTWQCSNQIQRRNSGMDEGRTPQHRSENQETYDNTQSTTPKSKYGQTIHNTKGGRERLLSIEDCVNIENRALGQYLKTSEDEWLKSAWEEGLKKADEDPEIYRDRRKTERTEDWHNKPMHGQYMRQTKELASDDSWQWLQRGELKKETEGMITAAQDQALRTRYVQSTIDGNNISPICRKCNTKSETINHIASECPALAQNQYKKRHDSVAKALHWSLCKKHQLPCSNKWYEHQPEGVIENDQAKILWDYGIRTDRVIRANRPDVTLIDKVKKKVSLIDVAIPWDTRVEEKEREKLDKYQDLKIEIRRIWDMPVEIVPIIIGALGTIPRSLKRNPEKLEAEVAPGLMQKSVILETAHIVRKVMDS

SEQ ID NO: 6564 - protein, 1371 aa, Ostrinia furnacalis
MANPSWRMSLRKYNLRPLPGGRRGAPGAVAGCLSMRTSGDEELSRRAPVDKNTTAETTDPSDTQSLFSDGSSVYQPDLYRPSSSNSSEQTEDVVQDVLDTAEPAPTPNKVCTRRRWTKDMNVFILRTYLMLTNMETDTKNYIGPLHNQFSEKFPDMQVTGQRLGDQRRAIIRNKLLPQHTIDTIYMEVQKDLNLTSPPTQSPNTQHTSISQVTSNTSQRMRWTNEHNEVIMRSYFRATNLERDITAYRTKIHEEFLNIFPNLGHISEQRIADQRRLIVMNKWISSARLKEIRQEVAEELQVARRNEETQDLEEHFSNINVGISQSTTQFDQDRTTLHTQPSPENHSHNEEIASDNNDNSTNPYILNLSQKIQKEFEYALDKFKDSTPTDRPYLPKQKISKQLNFIVNYLNTKILPKHVSAKQDFNNLHTLIYCAAYTAAICNGTIKHNSNNHSNHRINKPHWQQRLENKISKLRSDIGRLTQYMLGNRSARVISAVEDIKAKYKQHAQYDNVNADLTQFMDTLKQKLSTTASRLKRYLTCTKRKNQNKLFRSNEKSFYRNLGQPQTVNPTTETPTTQSLHHFWAQIWENPVSHNTEAEWIQKIDNTKITDMTFEHISVDTFIKVISRTHNWKAPGTDKIHNFWYKKLTYIYPYIHNHINNFIQYPDTIPEYLTHGITYMLPKDKDTKNPAKYRPITCLQTIYKIITACLSETIYNHLEENDILSEEQKGSRKYSQGCKEQLIIDAIAMKQAHTNRKNIHTMYVDYQKAFDSVPHSWLLSILETYKIHPLLVKFLETVMDKWQTVLNIRNSDIATEPIKIQRGIFQGDALSPLWFCLALNPLSQLLNDAHCGFKLKSNNSYFNLSHLLYMDDIKLYASNKNDLYKLADLTERFSHDIKMNFGVDKCKIFSVHRGKVENNSYMLQNQEIIESLGEHNTYKYLGFQQAKQINQKQTKIDLTQKFQRRVDLILRTELNSKNIIKAINTYAIPVLTYSFGIVNWSQTDLKKLQRSINTKLTKNRKHHPKSCVQRLSLPRKDGGRGIIDIQNLHNRQITTLRNFFHTKSQHSPLHHFSVCIDNNFTPLNLHDTNLQKNEHIVDNEQKFRAWAEKSLHGRHKADLDQEHIDKDASNKWLQIGDLFPETEAFMLAIQDQVIATRNYRKFIIKEPNLPTDSCRLCNSSSETIQHITSACKTLANTDYKHRHDQVAAIIHQDLAHQYNFINQKTPYYKYKPPPVLDNRKHKIYWDRTILTDRTTHYNRPDITIHDKEQNIVYLIDIAVPNTHNIQSTINEKLTKYTDLAIQLKIQWKVKSVHIIPIVLSATGVIPKSLIKNLDILKLKSNSYHLMQKAVILNSCRITRKFLADARSTCNEY

SEQ ID NO: 6565 - protein, 765 aa, Tuta absoluta
MAPHNDDTLGALRDKHPQPFRPISLPQAPSLLDPVLTVTRDDVFEAITSFYSGSAGGLDGLRPQHLKELISPTAGDGSVKLLESLTRLCNFLLSGRLNVGVCPFLYGGSLCALSKKDGGVRPIAVGSVLRRLVAKLGCRAVKDELSTYLHPHQLGFGTALGCEAAIHATRAFAMSSDGSDNVIVKLDVKNAFNCVERDKILMEVKERIPVLYPFLYQCYSAPSFLFYGEDSITSEVGAQQGDPLGPLIFSLAIHKVITEIKSPLNLWYLDDGTIGGDAVAVEEDLKVLFPKLKEVGLDINSNKCEIYFFNSANAPILLPKFEVLAPGIKVVKGDSFFLLGSPIFVSGVSATLEAKKMELSTIHVKLKDISAHVALILLRSYFSMPKLTYTVRTSPTWLFPQEVALLDALLKETLEGILNVSMDERQWCQAGLPVRHGGLGVRRVEGVGLPAFLASAHGVVGLVTQILSFNGDEVAIPFVTEAMSAWEVLCPGEALPEDRCRQKTWDDIYSRVTLNLLLDDASDLDSARLKASVCPESGAWLHALPSPQLGTFLDDDSLRVAAALRLGSTICEPHECVCGSRVEANGLHGLSCVRSAGRLSRHHALNDLIHRALVSAGIPCVLEPSGLSRSDGKRPDGLTLIPWERGRCLLWDSTCCCTFAACHLSGTKRTAGCAAESSARLKHSKYACLKPSYMFVPVAVETTGVWGSEAKKFIAEIGRRLREKGFDPRSGSYLAQRLSITIQRGNAASILGTFGRGMARGGLLD

SEQ ID NO: 6566 - protein, 943 aa, Tuta absoluta
MSTQSRAACPHCPDSTKQYVVPRGLNVHISYKHREVLSQPLPPPPSSSADLPQPDSLANLRSLPSLKSKVRVLKHIPKGARSLVAERLKSVIDNCLQSNSVEDWYSLLSFSFKYLGVPDPADPRSLTSKIKDRVVNEGEDIYTDDRVFRSRSLAQRIESKVHEGDLRGAVRLLVSDGSMAPHNDDTLGALRDKHPQPFRPISLPQAPSLLDPVLTVTRDDVFEAITSFYSGSAGGLDGLRPQHLKELISPTAGDGSVKLLESLTRLCNFLLSGRLNVGVCPFLYGGSLCALSKKDGGVRPIAVGSVLRRLVAKLGCRAVKDELSTYLHPHQLGFGTALGCEAAIHATRAFAMSSDGSDNVIVKLDVKNAFNCVERDKILMEVKERIPVLYPFLYQCYSAPSFLFYGEDSITSEVGAQQGDSLGPLIFSLAIHKVITEIKSPLNLWYLDDGTIGGDAVAVEEDLKVLFPKLKEVGLDINSNKCEIYFFNSANAPILLPKFEVLAPGIKVVKGDSFFLLGSPIFVSGVPATLEAKKMELSTIHVKLKDISAHVALILLRSCFSMPKLTYTVRTSPTWLFPQEVALLDGLLKETLEGILNVSMDERQWCQAGLPVRHGGLGVRRVEGVGLPAFLASAHGVVGLVTQILSFNGDEVAIPFVTEAMSAWEVLCPGEALPEDRCRQKTWDDIYSRVTLNLLLDDASDLDSARLKASVCPESGAWLHALPSPQLGTFLDDDSLRVAAALRLGSTICEPHECVCGSRVEANGLHGLSCVRSAGRLSRHHALNDLIHRALVSAGIPCVLEPSGLSRSDGKRPDGLTLIPWERGRCLLWDSTCCCTFAACHLSGTKRTAGCAAESSARLKHSKYACLKPSYMFVPVAVETTGVWGSEAKKFIAEIGRRLREKGFDPRSGSYLAQRLSITIQRGNAASILGTFGRGMARGGLLD

SEQ ID NO: 6567 - protein, 943 aa, Tuta absoluta
MSTQSRAACPHCPDSTKQYVVPRGLNVHISYKHRDVLSQPLPPPPSSSADLPQPDSLANLRSLPSLKSKVRVLKHIPKGARSLVAERLKSVIDNCLQSNSVEDWYSLLSFSFKYLGVPDPADPRSLTSKIKDRVVNEGEDIYTDDRVFRSRSLAQRIESKVHEGDLRGAVRLLVSDGSMAPHNDDTLGALRDKHPQPFRPISLPQAPSLLDPVLTVTRDDVFEAITSFYSGSAGGLDGLRPQHLKELISPTAGDGSVKLLESLTRLCNFLLSGRLNVGVCPFLYGGSLCALSKKDGGVRPIAVGSVLRRLVAKLGCRAVKDELSTYLHPHQLGFGTALGCEAAIHATRAFAMSSDGSDNVIVKLDVKNAFNCVERDKILMEVKERIPVLYPFLYQCYSAPSFLFYGEDSITSEVGAQQGDPLGPLIFSLAIQKVITEIKSPLNLWYLDDGTIGGDAVAVEEDLKVLFPKLKEVGLDINSNKCEIYFFNSANAPILLPKFEVLAPGIKVVKGDSFFLLGSPIFVSGVPATLEAKKMELSTIHVKLKDISAHVALILLRSCFSMPKLTYTVRTSPTWLFPQEVALLDGLLKETLEGILNVSMDERQWCQAGLPVRHGGLGVRRVEGVGLPAFLASAHGVVGLVTQILSFNGDEVAIPFVTEAMSAWEVLCPGEALPEDRCRQKTWDDIYSRVTLNLLLDDASDLDSARLKASVCPESGAWLHALPSPQLGTFLDDDSLRVAAALRLGSTICEPHECVCGSRVEANGLHGLSCVRSAGRLSRHHALNDLIHRALVSAGIPCVLEPSGLSRSDGKRPDGLTLIPWERGRCLLWDSTCCCTFAACHLSGTKRTAGCAAESSARLKHSKYACLKPSYMFVPVAVETTGVWGSEAKKFIAEIGRRLREKGFDPRSGSYLAQRLSITIQRGNAASILGTFGRGMARGGLLD

SEQ ID NO: 6568 - protein, 934 aa, Tuta absoluta
MSTQSRAACPHCPDSTKQYVVPRGLNVHISYKHRDVLSQPLPPPPSSSADLPQPDSLANSRSLPSLKSKVRVLKHIPKGARSLVAERLKSVIDNCLQSNSVEDWYSLLSFSFKYLGVPDPADPRSLTSKIKDRVVNEGEDIYTDDRVFRSRSHEGDLRGAVRLLVSDGSMAPHNDDTLGALRDKHPQPFHPISLPQAPSLLFPVLTVTRDDVFEAITSFYSGSAGGLDGLRPQHLKELISPTAGDGSVKLLESLTRLCNFLLSGRLNVGVCPFLYGGSLCALSKKDGGVRPIAVGSVLRRLVAKLGCRAVKDELSTYLHPHQLGFGTALGCEAAIHATRAFAMSSDGSDNVIVKLDVKNAFNCVERDKILMEVKERIPVLYPFLYQCYSAPSFLFYGEDSITSEVGAQQGDPLGPLIFSFAIHKVITEIKSPLNLWYLDDGTIGGDAVAVEEDLKVLFPKLKEVGLDINSNKCEIYFFNSANAPILLPKFEVLAPGIKVVKGDSFFLLGSPIFVSGVPATLEAKKMELSTIHVKLKDISVHVALILLRSCFSMPKLTYTVRTSPTWLFPQEVALLDGLLKETLEGILNVSMDERQWCQAGLPVRHGGLGVRRVEGVGLPAFLASAHGVVGLVTQILSFNGDEVAIPFVTEAMSAWEVLCPGEALPEDRCRQKTWDDIYSRVTLNLLLDDASDLDSARLKASVCPESGAWLHALPSPQLDTFLDDVSLRVAAALRLGSTICEPHECVCGSRVEANGLHGLSCVRSAGRLSRHHALNDLIHRALVSAGIPCVLEPSGLSRSDGKRPDGLTLIPWERGRCLLWDSTCCCTFAACHLSGTKRTAGCAAESSARLKHSKYACLKPSYMFVPVAVETTGVWGSEAKKFIAEIGRRLREKGFDPRSGSYLAQRLTITIQRGNAASILGTFGRGMARGGLLD

SEQ ID NO: 6569 - protein, 943 aa, Tuta absoluta
MSTQSRAACPHCPDSTKQYVVPRGLNVHISYKHRDVLSQPLPPPPSSSADLPQPDSLANLRSLPSLKSKVRVLKHIPKGARSLVAERLKSVIDNCLQSNSVEDWYSLLSFSFKYLGVPDPADPRSLTSKIKDRVVNEGEDIYTDDRVFRSRSLAQRIESKVHEGDLRGAVRLLVSDGSMAPHNDDTLGALRDKHPQPFRPISLPQAPSLLDPVLTVTRDDVFEAITSFYSGSAGGLDGLRPQHLKELISPTAGDGSVKLLESLTRLCNFLLSGRLNVGVCPFLYGGSLCALSKKDGGVRPIAVGSVLRRLVAKLGCRAVKDELSTYLHPHQLGFGTALGCEAAIHATRAFAMSSDGSDNVIVKLDVKNAFNCVERDKILMEVKERIPVLYPFLYQCYSAPSFLFYGEDSITSEVGAQQGDPLGPLIFSLAIHKVITEIKSPLNLWYLDDGTIGGDAVAVEEDLKVLFPKLKEVGLDINSNKCEIYFFNSANAPILLPKFEVLAPGIKVVKGDSFFLLGSPIFVSGVSATLEAKKMELSTIHVKLKDISAHVALILLRSCFSMPKLTYTVRTSPTWLFPQEVALLDALLKETLEGILNVSMDERQWCQAGLPVRHGGLGVRRVEGVGLPAFLASAHGVVGLVTQILSFNGDEVAIPFVTEAMSAWEVLCPGEALPEDRCRQKTWDDIYSRVTLNLLLDDASDLDSARLKASVCPESGAWLHALPSPQLGTFLDDDSLRVAAALRLGSTICEPHECVCGSRVEANGLHGLSCVRSAGRLSRHHALNDLIHRALVSAGIPCVLEPSGLSRSDGKRPDGLTLIPWERGRCLLWDSTCCCTFAACHLSGTKRTARCAAESSARLKHSKYACLKPSYMFVPVAVETTGVWGSEAKKFIAEIGRRLREKGFDPRSGSYLAQRLSITIQRGNAASILGTFGRGMARGGLLD

SEQ ID NO: 6570 - protein, 943 aa, Tuta absoluta
MSTQSRAACPHCPDSTKQYVVPRGLNVHISYKHRDVLSQPLPPPPSSSADLPQPDSLANLRSLPSLKSKVRVLKHIPKGARSLVAERLKSVIDNCLQSNSVEDWYSLLSFSFKYLGVPDPADPRSLTSKIKDRVVNEGEDIYTDDRVFRSRSLAQRIESKVHEGDLRGAVRLLVSDGSMAPHNDDTLGALRDKHPQPFRPISLPQAPSLLDPVLTVTRDDVFEAITSFYSGSAGGLDGLRPQHLKELISPTAGDGSVKLLESLTRLCNFLLSGRLNVGVCPFLYGGSLCALSKKDGGVRPIAVGSVLRRLVAKLGCRAVKDELSTYLHPHQLGFGTALGCEAAIHATRAFAMSSDGSDNVIVKLDVKNAFNCVERDKILMEVKERIPVLYPFLYQCYSAPSFLFYGEDSITSEVGAQQGDPLGPLIFSLAIHKVITEIKSPLNLWYLDDGTIGGDAVAVEEDLKVLFPKLKEVGLDINSNKCEIYFFNSANAPILLPKFEVLAPGIKVVKGDSFFLLGSPIFVSGVPATLEAKKMELSTIHVKLKDISAHVALILLRSCFSMPKLTYTVRTSPTWLFPQEVALLDGLLKETLEGILNVSMDERQWCQAGLPVRHGGLGVRRVEGVGLPAFLASAHGVVGLVTQILSFNGDEVAIPFVTEAMSAWEVLCPGEALPEDRCRQKTWDDIYSRVTLNLLLDDASDLDSARLKASVCPESGAWLHALPSPQLGTFLDDDSLRVAAALRLGSTICEPHECVCGSRVEANGLHGLSCVRSAGRLSRHHALNDLIHRALVSAGIPCVLEPSGLSRSDGKRPDGLTLIPWERGRCLLWDSTCCCTFAACHLSGTKRTAGCAAESSARLKHSKYACLKPSYMFVPVAVETTGVWGSEAKKFIAEIGRRLREKGFDPRSGSYLAQRLSITIQRGNAASILGTFGRGMARGGLLD

SEQ ID NO: 6571 - protein, 765 aa, Tuta absoluta
MAPHNDDTLGALRDKHPQPFRPISLPQAPSLLDPVLTVTRDDVFEAITSFYSGSAGGLDGLRPQHLKELISPTAGDGSVKLLESLTRLCNFLLSGRLNVGVCPFLYGGSLCALSKKDGGVRPIAVGSVLRRLVAKLGCRAVKDELSTYLHPHQLGFGTALGCEAAIHATRAFAMSSDGSDNVIVKLDVKNAFNCVERDKILMEVKERIPVLYPFLYQCYSAPSFLFYGEDSITSEVGAQQGDPLGPLIFSLAIHKVITEIKSPLNLWYLDDGTIGGDAVAVEEDLKVLFPKLKEVGLDINSNKCEIYFFNSANAPILLPKFEVLAPGIKVVKGDSFFLLGSPIFVSGVSATLEAKKMELSTIHVKLKDISAHVALILLRSCFSMPKLTYTVRTSPTWLFPQEVALLDALLKETLEGILNVSMDERQWCQAGLPVRHGGLGVRRVEGVGLPAFLASAHGVVGLVTQILSFNGDEVAIPFVTEAMSAWEVLCPGEALPEDRCRQKTWDDIYSRVTLNLLLDDASDLDSARLKASVCPESGAWLHALPSPQLGTFLDDDSLRVAAALRLGSTICEPHECVCGSRVEANGLHGLSCVRSAGRLSRHHALNDLIHRALVSAGIPCVLEPSGLSRSDGKRPDGLTLIPWERGRCLLWDSTCCCTFAACHLSGTKRTAGCAAESSARLKHSKYACLKPSYMFVPVAVETTGVWGSEAKKFIAEIGRRLREKGFDPRSGSYLAQRLSITIQRGNAASVLGTFGRGMARGGLLD

SEQ ID NO: 6572 - protein, 943 aa, Tuta absoluta
MSTQSRAACPHCPDSTKQYVVPRGLNVHISYKHRDVLSQPLPPPPSSSADLPQPDSLANLRSLPSLKSKVRVLKHIPKGARSLVAERLKSVIDNCLQSNSVEDWYSLLSFSFKYLGVPDPADPRSLTSKIKDRVVNEGEDIYTDDRVFRSRSLAQRIESKVHEGDLRGAVRLLVSDGFMAPHNDDTLGALRDKHPQPFRPISLPQAPSLLDPVLTVTRDDVFEAITSFYSGSAGGLDGLRPQHLKELISPTAGDGSVKLLESLTRLCNFMLSGRLNVGVCPFLYGGSLCALSKKDGGVRPIAVGSVLRRLVAKLGCRAVKDELSTYLHPHQLGFGTALGCEAAIHATRAFAMSSDGSDNVIVKLDVKNAFNCVERDKILMEVKERIPVLYPFLYQCYSAPSFLFYGEDSITSEVGAQQGDPLGPLIFSLAIHKVITEIKSPLNLWYLDDGTIGGDAVAVEEDLKVLFPKLKEVGLDINSNKCEIYFFNSANAPILLPKFEVLAPGIKVVKGDSFFLLGSPIFVSGVSATLEAKKMELSTIHVKLKDISAHVALILLRSCFSMPKLTYTVRTSPTWLFPQEVALLDALLKETLEGILNVSMDERQWCQAGLPVRHGGLGVRRVEGVGLPAFLASAHGVVGLVTQILSFNGDEVAIPFVTEAMSAWEVLCPGEALPEDRCRQKTWDDIYSRVTLNLLLDDASDLDSARLKASVCPESGAWLHALPSPQLGTFLDDDSLRVAAALRLGSTICEPHECVCGSRVEANGLHGLSCVRSAGRLSRHHALNDLIHRALVSAGIPCVLEPSGLSRSDGKRPDGLTLIPWERGRCLLWDSTCCCTFAACHLSGTKRTAGCAAESSARLKHSKYACLKPSYMFVPVAVETTGVWGSEAKKFIAEIGRRLREKGFDPRSGSYLAQRLSITIQRGNAASILGTFGRGMARGGLLD

SEQ ID NO: 6573 - protein, 943 aa, Tuta absoluta
MSTQSRAACPHCPDSTKQYVIPRGLNVHISYKHRDVLSQPLPPPPSSSADLPQPDSLANLRSLPSLKSKVRVLKHIPKGARSLVAERLKSVIDNCLQSNSVEDWYSLLSFSFKYLGVPDPADPRSLTSKIKDRVVNEGEDIYTDDRVFRSRSLAQRIESKVHEGDLRGAVRLLVSDGSMAPHNDDTLGALRDKHPQPFRPISLPQAPSLLDPVLTVTRDDVFEAITSFYSGSAGGLDGLRPQHLKELISPTAGDGSVKLLESLTRLCNFLLSGRLNVGVCPFLYGGSLCALSKKDGGVRPIAVGSVLRRLVAKLGCRAVKDELSTYLHPHQLGFGTALGCEAAIHATRAFAMSSDGSDNVIVKLDVENAFNCVERDKILMEVKERIPVLYPFLYQCYSAPSFLFYGEDSITSEVGAQQGDPLGPLIFSLAIHKVITEIKSPLNLWYLDDGTIGGDAVAVEEDLKVLFPKLKEVGLDINSNKCEIYFFNSANAPILLPKFEVLAPGIKVVKGDSFFLLGSPIFVSGVPATLEAKKMELSTIHVKLKDISAHVALILLRSCFSMPKLTYTVRTSPTWLFPQEVALLDGLLKETLEGILNVSMDERQWCQAGLPVRHGGLGVRRVEGVGLPAFLASAHGVVGLVTQILSFNGDEVAIPFVTEAMSAWEVLCPGEALPEDRCRQKTWDDIYSRVTLNLLLDDASDLDSARLKASVCPESGAWLHALPSPQLGTFLDDDSLRVAAALRLGSTICEPHECVCGSRVEANGLHGLSCVRSAGRLSRHHALNDLIHRALVSAGIPCVLEPSGLSRSDGKRPDGLTLIPWERGRCLLWDSTCCCTFAACHLSGTKRTAGCAAESSARIKHSKYACLKPSYMFVPVAVETTGVWGSEAKKFIAEIGRRLREKGFDPRSGSYLAQRLSITIQRGNAASILGTFGRGMARGGLLD

SEQ ID NO: 6574 - protein, 947 aa, Tuta absoluta
MGSPIRATCPHCPDSSRQYIVPRGLNVHISHRHGDIQSQPIQLPLAQPVVPVAAPDRPDPLSDLRGLSALKCKVPVLKHIPKGARNLVASKLKEIIDNCLQSNSLEDWYSLLSFSYRFLCVPDPEDPRSLTAKVKERVVKNDVDTLTADCTFHHRSVYKRIESKVHDGDLRGAVRLLLSDGSLAPNNDDTLNALREKHPQPSRSLLLPEEPGLSSPFLTVTPDDVLDALRSFYSGSAAGLDGIRPQHLIELVTPYAGDNSLSLLDSVTKLCNFLLRGMLNVEVCPFLYGGSLCALSKKDGGVRPIAVGCVWRRLVSKLGCHSVKSELANYLQPHQLGFGTALGCEAAIHSTRAFALSKEDSNNVIVKLDVKNAFNCVERDVILTEVKDRIPSLYPYLYQCYSSSSLLYYGENPIASVVGAQQGDPLGPLIFSLAIHKSISDIKSALNIWYLDDGTIGGDPMSVEDDIKLLFPKLQELGLVVNKGKCEIYFASGADAPVLLPRFDALIPGIKTVNKDRFSLLGSPVFSDGVPVTLDAKRSELSTIHDKLKNLSSHVALVLLRSCFSMPKLTYTIRTSPTWLFPQEVARVDGLLKETLERVLNVSLDEKQWRQAGLPIRHGGLGVRHVEGVGLAAFLASAHGVVNLVTRILSCDGDGVTIPFVNEALSAWEVLCANETLPEDKCSQRSWDDIQSKLMFNILREDASDLDLARLNASVKSESGAWLHALPSPHLGTFLDNDSLRVAAALRLGSKICEPHQCVCGSMVLANGLHGLSCSRSAGRLSRHHSLNDLIRRALVSVNVPCVLEPSGLSRSDGKRPDGLTLIPWERGRCLLWDATCCCTFAACHISGTKQCAGYAAESAARLKHSKYAALEQAYSFVPVAVETTGVWGSEAKKFIAGIGRRLREKGLDPRSGSYLVQRMSIAIQRGNAASILGTFGKGMSRGGLFD

SEQ ID NO: 6575 - protein, 447 aa, Tuta absoluta
MSVEDDIKLLFPKLQELGLVVNTGKCEIYFASGADASVLLPRFDALIPGIKTVNKDRFSLLGSPVFSDGVPVTLDAKRSELSTIHDKLKNLSSHVALVLLRSCFSMPKLTYTIRTSPTWLFPQEVARVDGLLKETLERVLNVSLDEKQWRQAGLPIRHGGLGVRHVEGVGLAAFLASAHGVVNLVTRILSCDGDGVTIPFVNEALSAWEVLCANETLPEDKCSQRSWDDIQSKLTFNILREDASDLDLARLNASVKSESGAWLHALPSPHLGTFLDNDSLRVAAALRLGSKICEPHQCVCGSMVLANGLHGLSCSRSAGRLSRHHSLNDLIRRALVSVNVPCVLEPSGLSRSDGKRPDGLTLIPWERGRCLLWDATCCCTFAACHISGTKQCAGYAAESAARLKHSKYAALEQAYSFVPVAVETTGVWGSEAKKFIAGIGRRLREKA

SEQ ID NO: 6576 - protein, 952 aa, Tuta absoluta
MGSPIRASCPHCPDSSKQFIVPRGLNVHISHRHRDIQSQSQSVPPPPPPPPPPPVGPTTTVQSDALENLRSLASLKNKVPVLKHIPKGARNLVAVKLKSVIDSCMQSNSVEDWYSLLSFAYRYLRVPDRTDPRSLTAKVKESVTIDRDDILEVVNVHRHSSICKRIESKVHEGDLRGAVRLLVSDSTLAPNNDDTLISLRAKHPQPSRPLLLPQAPGLSDPFLIVTPDDVLEAITSFYNGSAAGLDGLRPQHLKELVSPYAGDNSVSLLASLTSLCNFLLRGMLNVEVCPFMYGASLCALNKKDGGVRPIAVGCVLRRLVSKLGCRAVKNELASYLQPHQLGFGTALGCEAAIHATRSFAVRGEGSDNVIVKLDIRNAFNCVERDIILLEVKERIPSLYPFLFQCYSSSSLLFYGESPLDSEVGAQQGDPLGPLIFSLAIHKLISAVKSPLNLWYLDDGTIGGDPDTVEDDIKQLCPKLRDIGLEVNSTKCEIYFSSAADEASLLPRFNALVPGIKVINKDSFSLLGSPIFSNGVPGTLEAKRLQLTIIHDKLKSLSSHVALVLLRSCFSMPRLTYTIRTSPTWLFPQEVARLDDLLKSTLESVLNVSLDERQWHQAGLPIRHGGLGVRLVEGVGLPAFLASAHGVVNLVARIVPCDGGLVSIPFVNEALSAWEVLCPDEALPEDKDKQRSWDDILSRNTLKLLMEDASDLDLARLKASVSLEAGAWLHALPSPNLGTFLDNDSLRVAAALRLGCSMCEPHRCVCGTMVEANGLHGLSCIRSAGRLSRHHALNDLIRRALVSANIPCVLEPPGLSRTDGKRPDGLTLIPWERGRNLLWDATCCCTFAACHIPGTRQRAGYAAETAAKQKHVKYAALKQSYMFVPVAVETTGVWGTEAKKFIAGIGRRLTEKGLDPRSGSYLTQRISITIQRGNAASILGTFGQGVTRGGLFD

SEQ ID NO: 6577 - protein, 947 aa, Tuta absoluta
MGSPIRATCPHCPDSSRQYIVPRGLNVHISHRHRDIQSQPIQLPLAPPVVPVAAPDQPDPLSDLRGLSALKCKVPVLKHIPKGARNLVASKLKEIIDNCLQSNSLEDWYSLLSFSYRFLCVPDPEDPRSLTAKVKERVVKNDVDTLTADCTFHHRSVYKRIESKVHDGDLRGAVRLLLSDGSLAPNNDDTLNALREKHPQPSRSLLLPEEPGLSSPFLTVTPDDVLDALRSFYSGSAAGLDGIRPQHLIELVTPYAGDNSLSLLDSVTKLCNFLLRGMLNVEVCPFLYGGSLCALSKKDGGVRPIAVGCVWRRLVSKLGCHSVKSELANYLQPHQLGFGTALGCEAAIHSTRAFALSKEDSNNVIVKLDVKNAFNCVERDVILTEVKDRIPSLYPYLYQCYSSSSLLYYGENPIASVVGAQQGDPLGPLIFSLAIHKSISDIKSALNIWYLDDGTIGGDPMSVEDDIKLLFPKLQELGLVVNTGKCEIYFASGADASVLLPRFDALIPGIKTVNKDRFSLLGSPVFSDGVPVTLDAKRSELSTIHDKLKNLSSHVALVLLRSCFSMPKLTYTIRTSPTWLFPQEVARVDGLLKETLERVLNVSLDEKQWRQAGLPIRHGGLGVRHVEGVGLAAFLASAHGVVNLVTRILSCDGDGVTIPFVNEALSAWEVLCANETLPEDKCSQRSWDDIQSKLTFNILREDASDLDLARLNASVKSESGAWLHALPSPHLGTFLDNDSLRVAAALRLGSKICEPHQCVCGSMVLANGLHGLSCSRSAGRLSRHHSLNDLIRRALVSVNVPCVLEPSGLSRSDGKRPDGLTLIPWERGRCLLWDATCCCTFAACHISGTKQCAGYAAESAARLKHSKYAALEQAYSFVPVAVETTGVWGSEAKKFIAGIGRRLREKGLDPRSGSYLVQRMSIAIQRGNAASILGTFGQGMSRGGLFD

SEQ ID NO: 6578 - protein, 952 aa, Tuta absoluta
MGSPIRASCPHCPDSSKQFIVPRGLNVHISHRHRDIQSQSQSVPPPPPPPPPPPVGPTTTVQSDALENLRSLASLKNKVPVLKHIPKGARNLVAVKLKSVIDSCMQSNSVEDWYSLLSFAYRYLRVPDRTDPRSLTAKVKESVTIDRDDILEVVNVHRHSSICKRIESKVHEGDLRGAVRLLVSDSTLAPNNDDTLISLRAKHPQPSRPLLLPQAPGLSDPFLIVTPDDVLEAITSFYNGSAAGLDGLRPQHLKELVSPYAGDNSVSLLASLTSLCNFLLRGMLNVEVCPFMYGASLCALNKKDGGVRPIAVGCVLRRLVSKLGCRAVKNELASYLQPHQLGFGTALGCEAAIHATRSFAVRGEGSDNVIVKLDIRNAFNCVERDTILLEVKERIPSLYPFLFQCYSSSSLLFYGESPLDSEVGAQQGDPLGPLIFSLAIHKLISAVKSPLNLWYLDDGTIGGDPDTVEDDIKQLFPKLRDIGLEVNSTKCEIYFSSGADEASLHPRFNALVPGIKVTNKDSFSLLGSPIFSNGVPGTLEAKRLQLTIIHDKLKSLSSHVALVLLRSCFSMPRLTYTIRTSPTWLFPQEVARVDDLLKSTLESVLNVSLDERQWHQAGLPIRHGGLGVRLVEGVGLPAFLASAHGVVNLVARIVPCDGGLVSIPFVNEALSAWEVLCPDEALPEDKDKQRSWDDILSKNTIKLLMEDASDLDLARLKASVSLEAGAWLHALPSPNLGTFLDNDSLRVAAALRLGCSMCEPHRCVCGTMVEANGLHGLSCIRSAGRLSRHHALNDLIRRALVSANIPCVLEPSGLSRTDGKRPDGLTLIPWERGRNLLWDATCCCTFAACHIPGTRQRAGYAAETAAKQKHVKYAALKQSYMFVPVAVETTGVWGTEAKKFIAGIGRRLTEKGLDPRSGSYLTQRISITIQRGNAASILGTFGQGVTRGGLFD

SEQ ID NO: 6579 - protein, 952 aa, Tuta absoluta
MGSPIRASCPHCPDSSKQFIVPRGLNVHISHRHRDIQSQSQSVPPPPPPPPPPPVGPTTTVQSDALENLRSLASLKNKVPVLKHIPKGARNLVAVKLKSVIDSCMQSNSVEDWYSLLSFAYRYLRVPDRTDPRSLTAKVKESVTIDRDDILEVVNVHRHSSICKRIESKVHEGDLRGAVRLLVSDSTLAPNNDDTLISLRAKHPQPSRPLLLPQAPGLSDPFLIVTPDDVLEAITSFYNGSAAGLDGLRPQHLKELVSPYAGDNSVSLLASLTSLCNFLLRGMLNVEVCPFMYGASLCALNKKDGGVRPIAVGCVLRRLVSKLGCRAVKNELASYLQPHQLGFGTALGCEAAIHATRSFAVRGEGSDNVIVKLDIRNAFNCVERDIILLEVKERIPSLYPFLFQCYSSSSLLFYGESPLDSEVGAQQGDPLGPLIFSLAIHKLISAVKSPLNLWYLDDGTIGGDPDTVEDDIKQLFPKLRDIGLEVNSTKCEIYFSSAADNASLLPRFNALVPGIKVINKDSFSLLGSPIFSNGVPGTLEAKRLQLTIIHDKLKSLSSHVALVLLRSCFSMPRLTYTIRTSPTWLFPQEVARLDDLLKSTLESVLNVSLDERQWHQAGLPIRHGGLGVRLVEGVGLPAFLASAHGVVNLVARIVPCDGGLVSIPFVNEALSAWEVLCPDEALPEDKDKQRSWDDILSRNTLKLLMEDASDLDLARLKASVSLEAGAWLHALPSPNLGTFLDNDSLRVAAALRLGCSMCEPHRCLCGTMVEANGLHGLSCIRSAGRLSRHHALNDLIRRALVSANIPCVLEPPGLSRTDGKRPDGLTLIPWERGRNLLWDATCCCTFAACHIPGTRQRAGYAAETAAKQKHVKYAALKQSYMFVPVAVETTGVWGTEAKKFIAGIGRRLTEKGLDPRSGSYLTQRISITIQRGNAASILGTFGQGVTRGGLFD

SEQ ID NO: 6580 - protein, 947 aa, Tuta absoluta
MGSPIRATCPHCPDSSRQYIVPRGLNVHISHRHRDIQSQPIQLPLAPPVVPVAAPDQPDPLSDLRGLSALKCKVPVLKHIPKGARNLVASKLREIIDNCLQSNSLEDWYSLLSFSYRFLCVPDPDDPRSLTAKVKERVVKNDVDTLTADCTFHHRSVYKRIESKVHDGDLRGAVRLLLSDGSLAPNNDDTLNALREKHPQPSRPLLLPEEPGLSSPFLTVTPDDVLDALRSFYSGSAAGLDGIRPQHLIELVTPYAGDNSLSLLDSVTKLCNFLLRGMLNVEVCPFLYGGSLCALSKKDGGVRPIAVGCVWRRLVSKLGCHSVKSELANYLQPHQLGFGTALGCEAAVHSTRAFALSKEVSNNVIVKLDVKNAFNCVERDVILTEVKDRIPSLYPYLYQCYSSSSLLYYGENPIASVVGAQQGDPLGPLIFSLAIHKSISDIKSPLNIWYLDDGTIGGDPMSVEDDIKLLFPKLQELGLVVNTGKCEIYFASGADASVLLPRFDALIPGIKTVDKDKFSLLGSPVFSDGVPVTLDAKRSELSTIHDKLKNLSSHVALVLLRSCFSMPKLTYTIRTSPTWLFPQEVARVDGLLKETLERVLNVSLDEKQWRQAGLPIRHGGLGVRHVEGVGLAAFLASAHGVVNLVTRILSSDGDRVTIPFVNEALSAWEVLCANETLPEDKCSQRSWDDIQSKLTFNILREDASDLDLARLNASVKSKSGAWLHALPSPHLGTFLDNDSLRVAVALRLGSKICEPHQCVCGSMVLANGLHGLSCSRSAGRLSRHHSLNDLIRRALVSVNVPCVLEPSGLSRSDGKRPDGLTLIPWERGRCLLWDATCCCTFAACHISGTKQCAGYAAESAARLKHSKYAALEQAYSFVPVAVETTGVWGSEAKKFIAGIGRRLREKGLDPRSESYLVQRMSIAIQRGNAASILGTFGQGMSRGGLFD

SEQ ID NO: 6581 - protein, 947 aa, Tuta absoluta
MGSPIRATCPHCPDSSRQYIVPRGLNVHISHRHRDIQSQPIQLPLAQPVVPVAAPDRPDPLSDLRGLSALKCKVPVLKHIPKGARNLVASKLKEIIDNCLQSNSLEDWYSLLSFSYRFLCVPDPDDPRSLTAKVKERVVKNDVDTLTADCTFHHRSVYKRIESKVHDGDLRGAVRLLLSDGSLAPNNDDTLNALREKHPQPSRPLLLPEEPGLSSPFLTLTPDDVLDALRSFYSGSAAGLDGIRPQHLIELVTPYAGDNSLSLLDSVTKLCNFLLRGMLNVEVCPFLYGGSLCALSKKDGGVRPIAVGCVWRRLVSKLGCHSVKSELANYLQPHQLGFGTALGCEAAIHSTRAFALSKEVSNNVIVKLDVKNAFNCVERDVILTEVKDRIPSLYPYLYQCYSSSSLLYYGENPIASVVGAQQGDPLGPLIFSLAIHKSISDIKSPLNIWYLDDGTIGGDPMSVEDDIKLLFPKLQELGLVVNTGKCEIYFASGADASVLLPRFDALIPGIKTVDKDKFSLLGSPVFSDGVPVTLDAKRSELSTIHDKLKNLSSHVALVLLRSCFSMPKLTYTIRTSPTWLFPQEVARVDGLLKETLERVLNVSLDEKQWRQAGLPIRHGGLGVRHVEGVGLAAFLASAHGVVNLVTRILSSDGDGVTIPFVNEALSAWEVLCANETLPEDKCSQRSWDDIQSKLTFNILREDASDLDLARLNASVKSESGAWLHALPSPHLGTFLDNDSLRVAVALRLGSKICEPHQCVCGSMVLANGLHGLSCSRSAGRLSRHHSLNDLIRRALVSVNVPCVLEPSGLSRSDGKRPDGLTLIPWERGRCLLWDATCCCTFAACHISGTKQCAGYAAESAARLKHSKYAALEQAYSFVPVAVETTGVWGSEAKKFLAGIGRRLREKGLDPRSGSYLVQRMSIAIQRGNAASILGTFGQGMSRGGLFD

SEQ ID NO: 6582 - protein, 947 aa, Tuta absoluta
MGSPIRATCPHCPDSSRQYIVPRGLNVHISHRHRDIQSQPIQLPLAPPVVPVAAPDQPDPLSDLRGLSALKCKVPVLKHIPKGARNLVASKLKEIIDNCLQSNSLEDWYSLLSFSYRFLCVPDPEDPRSLTAKVKERVVKNDVDTLTADCTFHHRSVYKRIESKVHDGDLRGAVRLLLSDGSLAPSNDDTLNALREKHPQPSRSLLLPEEPGLSSPFLTVTPDDVLDALRSFYSGSAAGLDGIRPQHLIELVTPYAGDNSLSLLDSVTKLCNFLLRGMLNVEVCPFLYGGSLCALSKKDGGVRPIAVGCVWRRLVSKLGCHSVKSELANYLQPHQLGFGTALGCEAAIHSTRAFALSKEDSNNVIVKLDVKNAFNCVERDVILTEVKDRIPSLYPYLYQCYSSSSLLYYGENPIASVVGAQQGDPLGPLIFSLAIHKSISDIKSALNIWYLDDGTIGGDPMSVEDDIKLLFPKLQELGLVVNTGKCEIYFASGADASVLLPRFDALIPGIKTVNKDRFSLLGSPVFSDGVPVTLDAKRSELSTIHDKLKNLSSHVALVLLRSCFSMPKLTYTIRTSPTWLFPQEVARVDGLLKETLERVLNVSLDEKQWRQAGLPIRHGGLGVRHVEGVGLAAFLASAHGVVNLVTRILFCDGDGVTIPFVNEALSAWKVLCANETLPEDKCSQRSWDDIQSKLTFNILREDASDLDLARLNASVKSESGAWLHALPSPHLGTFLDNDSLRVAAALRLGSKICEPHQCVCGSMVLANGLHGLSCSRSAGRLSRHHSLNDLIRRALVSVNVPCVLEPSGLSRSDGKRPDGLTLIPWERGRCLLWDATCCCTFAACHISGTKQCAGYAAESAARLKHSKYAALEQAYSFVPVAVETTGVWGSEAKKFIAGIGRRLREKGLDPRSGSYLVQRMSIAIQRGNAASILGTFGQGMSRGGLFD

SEQ ID NO: 6583 - protein, 1136 aa, Protaetia brevitarsis
MRFSDDANGTVGSGQSQSARTNRDIARPEWTPEECRDLLDCYERSEPEKRGYMNRMHVLWCEIQPRFMQLTAQNLRDQAAALRRRGFHYEAPPPPVTCADNANTPKEPSEEMRNAFLSNLNETDFQRRKKIHYKQSIAEATLAELNIIIRDYLPLDASLEQIDQAVYAAAAAATIKKNKNPYFNNLEKRINQIEDKLKIERRQASQIQSVLDFIKSGAPFTRKIKQITRKIKKTHHTLTGNVLRLLKEQAVDKIRALKAGKIKLERTKKRISQNETFQTNPARLFKPRKEQEIYPEMDKIERYWKALYEQKANLNVDNRHLANFKRYCQPYLEDTNDETRKIKEQDISQAIRNKTNFSAPGPDLINNYWWKKFTTTHEHLARIFNAYLESPNIIPEWICRGRTILIYKKGDPKEANNYRPITCLNTIYKIFTSVLHTIIMERIEPIWESVYEQRGMKKGIAGVRENLLIDGCISQDAIQYKRNLMVAWIDFQKAFDSTSHQLVQMLLGYMGVPKQLITALESLMEKWKTVISIGPKNTAKVSSPITFKRGIFQGDSLSPILFCISLLPLSIALRGYPGYQAGKPNQRIHKITHLLYVDDLKIYSKNEKELLQMVNTTLEYAIDTGMSLGKDKCATYQLKRGRGNEDREDLQLIDGSIINKLRGEDTYSYLGIQQKHMHDVKLVKEKLISKYKTALHSIWSSELTGKNKVSATNVLAIPTISHTFATIKWNVNEILQIDRDTRKIMTTHRSHHPRASIQRLYIPRKDGGRGLLSIEQLHARAIAMAAVQIHQSTDPLLKIVQNHQNAGQGAFLYSGAERVCRQLDIYIDFLKRPPNRQDPLRQTPAAIAKAIKFKQQMSLLEEHTQKPLHGQYFKHLLEHKLSKPLTFTFLKSSSLRSETEGYIVAIQDGVFHTLSYQKNVLKINIIDTKCRACKTSEETIIHLLAACPKYAPNIYITRHNMALKILYYQLRHLYHIDDHVHPPYENKTIESVISNDKCKIFWNFPFHTTTRIEANKPDMVVLDYIRREMYVIEMSCPSETRVIQKEEEKATKYKDLIFQLKLTYSEYTIIFIPIIVGSMGGVSPSLPKHLAKLKILEQKHIHQLTYNIQKQVILGSLRVLRAHEASQTIRMGNAVC

SEQ ID NO: 6584 - protein, 1211 aa, Montipora capitata
MAATRAERSTSGRLKWTDRMCRDVLVSKTRAVELTNSENPPRLDSGRKKGYMYVMKELWDDLGYGELGLTAQNLRDQAARLEKSLGSVKGTMDRQIGRGNDTRIENKEESKTENNLCNGDRSQEVVEGTDLHTASDCVLNETESVLLDSANCILLSVSDNTGDFVKRSVDTRTKEKPTKTDLRNINTVIEVLMSRNKQVSPNENPFEYLWLVDCVLYSVVAAFLLLKGWKKETPGQSDCARNKPTAKWKRVHEEKVMETRKKISIAKAEMERIKVNRKLTKRGRKNRELLKMECKTLSVGELVNYMERNKAVLRKLKKGFVRRKKVEESRSFNRTYQVDPSRVYKGFNKLARDQGTDRPVYKRMEDVDKGSNTDELLDNIEEASGFWKELWETPGSGNASASWLEEMKDVIREHVPPPAEEEWDLEIDEVVKTVKKKKNWSAPGPDKISNYWWKHAEALHHGVMLCFKYISKLQGDFPAWFTGGKTTLIPKPGVVSSDNQRPITCLNTVYKWFTACLLRPMDQHLDVYGLMEAEQRGAKEGCSGTTDNLLIDRMVTQDCHRGRRNLSMAWVDVTKAYDSVDHEWLSEMMSIHRFPRWLARVVTKLSKTWNTMIVTRTKLGMEISEIIQFRRGLPQGDSLCPRLFTICLNPIAWKLKATEGYRLSKPIDTKVTHLLYIDDLKIFAASAPKLNTVMKSARSAMQDIGLDWNPKKCSVVHIKRGVKVEDAESLAFDEASVIKCLEEGAQYKFLGVLESTRQEDQIAFKLAAEMYLNRMSIIWSSPLSDFNRIVASNQYALPALTYLMWTQHLPITELQRIDREMRKIVVEQGGKHPLGSTALCHLTRQSGGRGLRSVEAEYKAIKIKGALNLFKNEDPTMELVRQFEDRSVRLGHCSIVKEALKYGQELGIKLNLVHPNPTCCTEDGDEIPGTKTKQQLKRAQQEKLKKDVRSQSWQGKLIASRWSDSELSNGCFDWLKWKSCPSYVIAGIYELYEQMLNTRIYQSKKTRTARERDVQCRLCGKAQESVAHILAGCSALAQSKYLHRHNCVLKILFFEILHDLELVDTVPPWYSPIEPKPVYESADAQAFWDVPMYADHVVVRANRIDARVVDHKRKNVTILEMSCPWVDNRAAKDQDKTEKYAPLRLELKQQFKGYSIDQHNIILDVLGGYSKGLERTVRVLVGRKSKEVLIKMQKSVLTSSLHIARHFKIMT

SEQ ID NO: 6585 - protein, 964 aa, Montipora capitata
MMCVNAAFSRMNNIDFIENNNNNNNNNNNNNNNKRGRKNRELLKMECKTLSVGELVNYMERNKAVLRKLKKGFVRRKKVEESRSFNRTYQVDPSRVYKGFNKLARDQGTDRPVYKRMEDVDKGSNTDELLDNIEEASGFWKELWETPGSGNASASWLEEMKDVIREHVPPPAEEEWDLEIDEVVKTVKKKKNWSAPGPDKISNYWWKHAEALHHGVMLCFKYISKLQGDFPAWFTGGKTTLIPKPGVVSSDNQRPITCLNTVYKWFTACLLRPMDQHLDVYGLMEAEQRGAKEGCSGTTDNLLIDRMVTQDCHRGRRNLSMAWLDVTKAYDSVDHEWLSEMMSIHRFPRWLARVVTKLSKAWNTMIVTRTKLGMEISEIIQFRRGLPQGDSLCPRLFTICLNPIAWKLKATEGYRLSKPIDTKVTHLLYIDDLKIFAASAPKLNTVMKSARSAMQDIGLDWNPKKCSVVHIKRGVKVEDAESLAFDEASVIKCLEEGAQYKFLGVLESTRQEDQIAFKLAAEMYLNRMSIIWSSPLSDFNRIVASNQYALPALTYLMWTQHLPITELQRIDREMRKIVVEQGGKHPLGSTALCHLTRQSGGRGLRSVEAEYKAIKIKGALNLFKNEDPTMELVRQFEDRSVRLGHCSIVKEALKYGQELGIKLNLVHPNPTCCTEDGDEIPGTKTKQQLKRAQQEKLKKDVRSQSWQGKLIASRWSDSELSNGCFDWLKWKSCPSYVIAGIYELYEQMLNTRIYQSKKTRTARERDVQCRLCGKAQESVAHILAGCSALAQSKYLHRHNCVLKILFFEILHDLELVDTVPPWYSPIEPKPVYESTDAQAFWDVPLYADHVLVRANRIDARGVDHKRKNVTILEMSCPWVDNRAAKDQDKTEKYAPLRLELKQQFKGYSIDQHNIILDVLGGYSKGLERTVRVLVGRKSKEVLIKMQKSVLTSSLHIARHFKIMT

SEQ ID NO: 6586 - protein, 1211 aa, Montipora efflorescens
MAATRAERSTSGRLKWTDRMCRDVLVSKTRAVELTNSENPPRLDSGRKKGYMYVMKELWDDLGYGELGLTAQNLRDQAARLEKSFGSVKGTMDRQIGRGNDTRIENKEESKTENNLCNGDRSQEVVEGTDLHTASDCVLNETESVLLDSANCILLSVSDNTGDFVKRSVDTRTKEKPTKTDLRNINTVIEVLMSRNKQVSPNENPFEYLWLVDCVLYSVVAAFLLLKGWKKETPGQSDCARNKPTAKWKRVHEEKVMETRKKISIAKAEMERIKVNRKLTKRGRKNRELLKMECKTLSVGELVNYMERNKAVLRKLKKGFVRRKKVEESRSFNRTYQVDPSRVYKGFNKLARDQETDRPVHESMEDVDKGSNTDELLDNIEEASGFWKELWETPGSGNASASWLEEMKDVIREHVPPPAEEEWDLEIDEVVKTVKKKKNWSAPGPDKISNYWWKHAEALHHGVMLCFKYISKLQGDFPAWFTGGKTTLIPKPGVVSSDNQRPITCLNTVYKWFTACLFRPMDQHLNVYGLMEAEQRGAKEGCSGTTDNLLIDRMVTQDCHRGRRNLSMAWVDVTKAYDSVDHEWLSEMMSIHRFPRWLTRVVTKLSKAWNTMIVTRTKLGMEISEIIQFRRGLPQGDSLCPRLFTICLNPIAWKLKATEGYRLSKPIDTKVTHLLYIDDLKIFAASAPKLNTVMKSARSAMQDIGLDWNPKKCSVVHIKRGVKVEDAESLAFDEASVIKCLEEGAQYKFLGVLESTRQEDQIAFKLAAEMYLNRMSIIWSSPLSDFNRIVASNQYALPALTYLMWTQHLPITELQRIDREMRKIVVEQGGKHPLGSTALCHLTRQSGGRGLRSVEAEYKAIKIKGALNLFKNEDPTMELVRQFEDRSVRLGHCSIVKEALKYGQELGIKLNFVHPNPTCCTEDRDEIPGTKTKQQLKRAQQEKLKKDVRSQSWQGKLIASRWSDSELSNGCFDWLKWKSCPSYVIAGIYELYEQMLNTRIYQSKKTRTARELDVQCRLCGKAQESVAHILAGCSALAQSKYLHRHNCALKILFFEMLHNLELVDTVPPWYSPIEPKPVYESADAQAFWDVPLYADHVVVRANRIDARVVDHKRKNVTILEMSCPWVDNRAAKDQDKTEKYAPLRLKLKQQFKGYSIDQHNIILDVPGGYSKGLERTVGVLVGRKSKEVLIKMQKSVLTSSLHIARHFKIMT

SEQ ID NO: 6587 - protein, 1232 aa, Montipora cactus
MASGSQTGRKNGRMKWTEEMTSVLLECKRKAVELTSSDNPPLQDNGRKKGYMCLMKELWEERGYEDLGLTAQNLRDQAARTEKTLGNVTLTMAGNVGTRNSGKREQVVVESYLLEADCSKNSEFETNLHIVERTESGDMQITEEDSVIVETTTIDDKERELLESASSILLSISNTQGDFTERHVDTRTKERPTMSDLKSINKVITALMSQSEISPGRDPFQYLWIANCVLYSVIVAFLLLKGWKKNTPDHSNNSRKPTPKWKIVYEKKVMETRKKISIAKAEMERIKENRKLTKRGRKNRAFLEKECRKISVPELVSYMDKNKMLLRKLKRGFCKKKVMEESRVLNRQFQEDPGRVYDGFNCMSKNIGNQTSERPKYKTRTDTSEENKQRFENIDEASGYWKELWETEGTGDKSAIWLQDVKRAIHGCVPPPDEGEWGLTDDETVKIIGKKRNWSAPGPDKLANYWWKKAEVLHNGVTASFKAISMAQTDFPIWFAGGKTSLIPKSGEFSSSNQRPITCLNTVYKWFTACLLVPMDEHLEEHGLMEAEQRGAKKGCSGTMDNLLIDKMVTQDCHRGKRNLSMAWVDVTKAYDSVDHDWLCEMMEVHRFPRWLERVVTKLCSTWNTKIVTTTKLGKEISETIQFKRGLPQGDSLCPRLFTICINPIAWSLKATEGYRLSKPLSTKVTDLLYIDDLKIYAASEKKLNTVLRSTRGKMQDIGLQWNPKKCSVVHVKRGVKVEDAEGVKFDESSVIQCLKEGKQYKFLGLLETSRQEDQLAFKVASEEYLKRLSVIWSSPLSDYHRVVASNQYALPVLSYLMWTQHLPVTDLQQIDREARKIVVSNGGKHPLGSTALCYLSRDQGGRGLRSVEEEYKAIKIKGALKLFKNTDPTMELVWKFEERSGVLGHSSLIKEATKFSRDLGLELSLTYPTPMCCTEEGEVVRESNIKQKLRSAQQKKLKDQVSGQAWQGNLIASRWEEEQEGSGTGDVRQSHSFSWLWQWRTCPTYVIAGVFELYEQLLPTRVYQSKKTRTGSDQIMCRLCGKAAETVAHVLAGCSALAQSKYLQRHNAVLKVIFFEMLFSLEVMDSVPPWYSLSEPKPVYQNDRAQAFWDVPVYADHVTVRANRIDARIVDSTAKFVILLEMSCPWMNNREICEKTEKYAPLRLELKRQFPGYQVKQFNIVMDVLGGYSEELVNTIRSLVGVKKGKEVLLKMQKVVLSESLHIARSFKVLT

SEQ ID NO: 6588 - protein, 967 aa, Tomocerus qinae
MDTNSHCTTCTICGKSYKGERGLKIHTSKAHGESFRNSITSHYSQSQLNLNESSSVIDSPIVITELDVAKEKLKQFEEKFDVFINDEDFDANAFLSLYDEFISALQDTQDKLPAPAHPAKRYYNIRKKSGFVKKPNNAGFSQSSNPTRSNRERRKRNRQDYQNQLIQHFYYFNRKKCVDILMNNKSKVKCNIPIEELQHSFSLRWSTANNHTRHEYESLPTFAEQNMLDNRFSAEICEQQIIEAMKGMNSDSSPGVDFIYTRTIKAADCPKTIAKIFSIILKYNIIPDSMKKAKTILVYKNGCEKDPKNWRPISICSTVRRLLERVIISIISRYYSTCPFQSGSAHCPGTFVNTSILDGCLKLAKSKRKDLVILFLDILKAYDMAGHKHLFLTLDSLHLPQMIRQILKNLIVNNTTRLEVNGNKSDDIEFSRGIFQGSPLSSLLFNMSIDHIIKQIAEVEVSQKFGFKINETLNNLAVLGFMDDTALLANSKTSAIFLFNMANNLFDEIGLSLNVEKTNVINIVNGKLVETNLDITCNQNIKSIHEGDVIKYLGVNFSNEIVLNKKNFLQVLTSCLNALVSTPLLFPNQKLSIVNTFIWPKFVYSIQSTPLCSLSKCFLEDIDKIIRSSVKEMLMLPSDFPNNCMYSSTKHKGLGIIRSLWEAPLQNFNISLTLLRFNNKYVVELRDLLKQQEKCLQRMDIEEEVQSIDIPSLSVRQVSQKIREILRNKEYVSWCSLNFHGKGISQFKQCEKINKSLFFKTGLTSTEWTHYLKMIPNVTASRSIPGRSQDGAHCRRCSETYETLPHILGFCPFGLQHRNNRHHQIRTIIANAFRNKGLDVFEEVQTVATNSSNRRVDIIVINHLEQTALILDPTVRFESTNDQATTVDLEKKSIYEDCILDLQRKYSINYQFEVIGLYVGARGTIPTFLEAFCKRFHLPPDILEQIAIAAVKGSSSILQNHLFKIPA

SEQ ID NO: 6589 - protein, 967 aa, Tomocerus qinae
MDTTTNDCVCSICGKSCKGERGLKIHTSKVHGESFRNSITSHYSQSQQTLNESTTITESPAVITELDKAKEKLKAFEERFQVFLNDEICDENGFLILYNEFICTLQESQDKLPAPSHPAKRYYNIRKKAGFVKKPNNTGLSQSSNPTRTNKERRNRNRQDYQNQLIQHYYYFNRKRCVDILMNTKSKIKCNIPIEELHRSFTLRWSTANNQTRPEYETGPTSSDQRNLDRYFPTEICKDQVIDALKGMNSDSSPGIDFIYTRTIKAADCPGTFAKIFTIMLKHNIVPDSMKRAKTILVYKNGCEKDPKNWRPISICSTLRRLFERVIISLINRYYSTCPFQSGSAHCPGTFVNTSILDGCLKLAKSKRNDLVILFLDILKAYDMAGHKHLLLTLDSLQIPALLRNILKNLIANNSTRLEVNGSRSDEILFVRGIFQGSPLSSLLFNMSIDHIIKQIAEVEISKTYGFKINDHLNNLSVLGFMDDTALLANSKNSAIVLFNMANNLFNEIGLSLNVDKTNAINIDKGKLMETNLDITFDHRITSIHGGNVIKYLGINFSNEIVLDKKTFLHDLASNLNALVSTPLLFPNQKLSIVNTFIWPKFVYSIQSTPLCNLSKCFLEDIDKIIRSAVKEMLMLPSDFPNNCMYSSTKHKGLGVIRATWEAPLQNFNISLTLLRFNNKYVFELRDLQKHQEKCVQRMDIVEEIKDIDIPSLSVRQVSQKIREILRNKEYSSWCSLSFHGRGVSQYKQCEKINKSLFFKTGLTSTEWTHYLKMIPNVTASRSIPGRSQDGAHCRRCNETNETLPHILGFCQFGLLLRNSRHHQIRTIFANAFRDKGLDVYEEVHTVAVNNSNRRVDILILNHLQRTALILDPTIRFELTTDQAILVDVEKKNIYTDCIPDLQHKYSIDYDFEVIGLFVGARGTISTFLESFCKRFNLPSGTLEQVAIAAVKGSATILQNHLFKIKC

SEQ ID NO: 6590 - protein, 968 aa, Tomocerus qinae
MDTNTQCSTCTICGKSCKGERGLKIHTSKVHGESFRNSITSQYSQSQQILNQSSSIFDSPVIITELDKAKEKLKHFEERFDAFINDDDSFDENGFLTLYDEFICTLRDTQDKLPAPTHPAKRYYNIRKKAGFVKKPNDIRFSQSSNPSRSNKERRNRNRQDYQNQLIQHFYYFNRKRCVDILMNNKSKVKCNIPIEELHRSFTLRWSTTNNQIRPEYEPMPTLFEQDRLDICFSTEICKDQVNEALKGMNSDSSPGIDFIYARTIKVADCPKTIAKIFTIMLKNNIIPNSMKKAKTILVYKSGCEKDPKNWRPISICSTLRRLYERVIISMVSRYYSTCSFQSGSAHSPGTFVNTSILDGCLKLAKSKRRDLVILFLDILKAYDMAGHKHLLLTLNSLHMPDILRRVLKNLIINNTTRLEVNGKRSDEISFFRGIFQGSPLSSLLFNMSIDHIIKQIAEVEVSKKFGFKVNEFLNNLSVLGFMDDTALLANSKTSATVLFNMANNLFNEIGLSLNVEKTNVINIENGKLIEKSLQITADQSITSIQEGTVIKYLGINFSNEIVLDKKAFLKELTSSLNALVSTPLLFPNQKLSIVNTFIWPKFVYSIQSTPLCNLSKCFLEDIDKIIRSSVKEMLMLPSDFPNNCMYSSTKHKGLGVIRSLWEAPLQNFNISLTLLRYNNKYVLELRDLNKHQEKCLERMDIIEEVKNIDIPSLSVRQVSQKIREILRNREFSSWCSLNFHGRGVSQFKQCEKINKSLFYKTGLTSTEWTHYLKMIPNVTASRSIPGRSQDGAHCRRCNEINETLPHILGFCPFGLQHRNTRHHQIRTIIANAFRNKGLDVYEEIHTIATNNSNRRVDILVLNHLEQSALILDPTIRFESNSDQATTVDLEKKSIYEDCVADLQRKYSINYRFEVIGLFIGARGTITTFLEDFCKRFKIPTEILEEVAITAIKGSTSILQNHLFKSQT

SEQ ID NO: 6591 - protein, 890 aa, Tomocerus qinae
MDTNSHCTTCTICGKSYKGERGLKIHTSKAHGESFRNSITSHYSQSQLNLNESSSVIDSPIVITELDVAKEKLKQFEEKFDVFINDEDFDANAFLSLYDEFISALQDTQDKLPAPAHPAKRYYNIRKKSGFVKKPNNAGFSQSSNPTRSNRERRKRNRQDYQNQLIQHFYYFNRKKCVDILMNNKSKVKCNIPIEELQHSFSLRWSTANNHTRHEYESLPTFAEQNMLDNRFSAEICEQQIIEAMKGMNSDSSPGVDFIYTRTIKAADCPKTIAKIFSIILKYNIIPDSMKKAKTILVYKNGCEKDPKNWRPISICSTVRRLLERVIISIISRYYSTCPFQSGSAHCPGTFVNTSILDGCLKLAKSKRKDLVILFLDILKAYDMAGHKHLFLTLDSLHLPQMIRQILKNLIVNNTTRLEVNGNKSDDIEFSRGIFQGSPLSSLLFNMSIDHIIKQIAEVEVSQKFGFKINETLNNLAVLGFMDDTALLANSKTSAIFLFNMANNLFDEIGLSLNVEKTNVINIVNGKLVETNLDITCNQKIKSIHEGDVIKYLGVNFSNEIVLNKKNFLQVLTSCLNALVSTPLLFPNQKLSIVNTFIWPKFVYSIQSTPLCSLSKCFLEDIDKIIRSSVKEMLMLPSDFPNNCMYSSTKHKGLGIIRSLWEAPLQNFNISLTLLRFNNKYVVELRDLLKQQEKCLQRMDIEEEVQSIDIPSLSVRQVSQKIREILRNKEYVSWCSLNFHGKGISQFKQCEKINKSLFFKTGLTSTEWTHYLKMIPNVTASRSIPGRSQDGAHCRRCSETYETLPHILGFCPFGLQHRNNRHHQIRTIIANAFRNKGLDVFEEVQTVATNSSNRRVDIIVINHLEQTALILDPTVRFESTNDQATTVDLE

SEQ ID NO: 6592 - protein, 967 aa, Tomocerus qinae
MDTTTNDCVCSICGKSCKGERGLKIHTSKVHGESFRNSITSHYSQSQQTLNESTTITESPAVITELDKAKEKLKAFEERFQVFLNDEICDENGFLILYNEFICTLQESQDKLPAPSHPAKRYYNIRKKAGFVKKPNNTGLSQSSNPTRTNKERRNRNRQDYQNQLIQHYYYFNRKRCVDILMNTKSKIKCNIPIEELHRSFTLRWSTANNQTRPEYETGPTSSDQRNLDRYFPTEICKDQVIDALKGMNSDSSPGIDFIYTRTIKAADCPGTFAKIFTIMLKHNIVPDSMKRAKTILVYKNGCEKDPKNWRPISICSTLRRLFERVIISLINRYYSTCPFQSGSAHCPGTFVNTSILDGCLKLAKSKRNDLVILFLDILKAYDMAGHKHLLLTLDSLQIPALLRNILKNLIANNSTRLEVNGSRSDEILFVRGIFQGSPLSSLLFNMSIDHIIKQIAEVEISKTYGFKINDHLNNLSVLGFMDDTALLANSKNSAIVLFNMANNLFNEIGLSLNVDKTNAINIDKGKLMETNLDITFDHRITSIHGGNVIKYLGINFSNEIVLDKKTFLHDLASNLNALVSTPLLFPNQKLSIVNTFIWPKFVYSIQSTPLCNLSKCFLEDIDKIIRSAVKEMLMLPSDFPNNCMYSSTKHKGLGVIRATWEAPLQNFNISLTLLRFNNKYVFELRDLQKHQEKCVQRMDIVEEIKDIDIPSLSVRQVSQKIREILRNKEYSSWCSLSFHGRGVSQYKQCEKINKSLFFKTGLTSTEWTHYLKMIPNVTASRSIPGRSQDGAHCRRCNETNETLPHILGFCQFGLLLRNLRHHQIRTIFANAFRDKGLDVYEEVHTVAVNNSNRRVDILILNHLQRTALILDPTIRFELTTDQAILVDVEKKNIYTDCIPDLQHKYSIDYDFEVIGLFVGARGTISTFLESFCKIFNLPSGTLEQVAIAAVKGSATILQNHLFKIKC

SEQ ID NO: 6593 - protein, 1315 aa, Sanderia malayensis
MELEREMALEMELERELEMDLGHPRDATDVETCEAFRRTSPTGLLGAYCGDVSAEVLVVPGAGEPTSPRPRPNDGNTPVGLTGSVNHRPLVAHLLSPRRTVWKVRSPVGKSPPRWHEGKSIAKRKWTDEEVSFLKEKLSQADPEADRRYLQKLCEAYRERFPHVQRTKVAIRARLCKLRQGLSPKEWVNRTRRQLAFDNGGEAALEVEEELVLEEETAQGGTEIRDPLMSGEVVEGDTEAAEPVECETQAGFPAIVEDHVRVRFASLCRLSQSLAQRKVTPKLRLTEPQLHVAQRLFEWGWDKLTDKSYWHFNCMVFALGHLFADTYPKLGTDRATETDAATNNTAAEPKRPCVQARTRDRIRALESTYREKSAEFRKQLNWVTVELARLKAGTPATIRQRKIIRRLKAKFHTLKPRSLIRKRIHLRDLVKRLKREHKQAIRKVRFQERNRQASAGTLARNLLRDKSGEQAKVKGPSKKAVWKFWSNIVGTAATYDPTSKTMRRWVRQVTPKVAMCEPDETARALVDDDMWKRVLCKLKAFKAPGPDCIRNSIYMQVPAVSNCLREFIVRMLDGEAEIPNWLMTGKTTLIHKGGETTDPANYRPIACLNTAYKIMTACLSDVLMRHTRTFGLLPCEQRSMRTGSWGTIECLLLDQTIEATSRSYKRPLSVAWVDFKKAFDLVPHEHLLCMLEAMKAPRVVTNTIRRVMPHWKTVFTFVSRGRPCHTEELSIVRGLFQGDSLSPLLFCLAIAPLSAAIRRRCAAYTIRDNETVSHLLYMDDLKVYSPTPKDLEKAIRVVERASRAIGMELGLRKCAIAHRNHRGQVEVHEEAESSYHGIPLLKEEDCYKYLGLQQLFRVNRSETGRQVLTKVNARVTELLKTDLNSANLTKALGCKIAGTMRYYIAAQVWTKGDMCTLDRQIRGQLRNTRYHDGASSTVRLYLPRRLGGRGIPLLEEVYCITILGLVDYLGKCLDGFGEQLWRCMYALETDRPGRRRQTVIGKARHVLSQLGLADDYLVEKQGLQLRRDDPDRKVSEYKAQIKRHFQAKAETELTGHVVHGRFYNLLKDERLERTLPHAWLVDGLLRPQTEGYIIAIQDGALLTKARRQVTTGRVATPRCRLCGEAPETISHIISSCSRHHHSAYKLRHDQALIPVLNALLQALGMGERICGERADPRPEYVCDRGSVLWDVMVQPDRKAYRPDMLVYDQEAKVITVVELTVPHDTRLEIARAEKLSKYRALVADLHKANADEGWRYELAVIVIGALGTMTVPMTADLKGHYLMGAEAIQMLKDVQRAALVGTQMVVKRHLANSSS

SEQ ID NO: 6594 - protein, 1315 aa, Sanderia malayensis
MELEREMALEMELERELEMDLGHPRDATDVETCEAFRRTSPTGLLGAYCGDVSAEVLVVPGAGEPTSPRPRPNDGNTPVGLTGSVNHRPLVAHLLSPRRTVWKVRSPVGKSPPRWHEGKSIAKRKWTDEEVSFLKEKLSQADPEADRRYLQKLCEAYRERFPHVQRTKVAIRARLCKLRQGLSPKEWVNRTRRQLAFDNGGEVALEVEEELVLEEETAQGGTEIRDPLMSGEVVEGDTEAAEPVECETQAGFPAIVEDHVRVRFASLCRLSQSLAQRKVTPKLRLTEPQLHVAQRLFEWGWDKLTDKSYWHFNCMVFALGHLFADTYPKLGTDRATETDAATNNTAAEPKRPCVQARTRDRIRALESTYREKSAEFRKQLNWVTVELARLKAGTPATIRQRKIIRRLKAKFHTLKPRSLIRKRIHLRDLVKRLKREHKQAIRKVRFQERNRQASAGTLARNLLRDKSGEQAKVKGPSKKAVWKFWSNIVGTAATYDPTSKTMRRWVRQVTPKVAMCEPDETARALVDDDMWKRVLCKLKAFKAPGPDCIRNSIYMQVPAVSNCLREFIVRMLDGEAEIPNWLMTGKTTLIHKGGETTDPANYRPIACLNTAYKIMTACLSDVLMRHTRTFGLLPCEQRSMRTGSWGTIECLLLDQTIEATSRSYKRPLSVAWVDFKKAFDLVPHEHLLCMLEAMKAPRVVTNTIRRVMPHWKTVFTFVSRGRPCHTEELSIVRGLFQGDSLSPLLFCLAIAPLSAAIRRRCAAYTIRDNETVSHLLYMDDLKVYSPTPKDLEKAIRVVERASRAIGMELGLRKCAIAHRNHRGQVEVHEEAESSYHGIPLLKEEDCYKYLGLQQLFRVNRSETGRQVLTKVNARVTELLKTDLNSANLTKALGCKIAGTMRYYIAAQVWTKGDMCTLDRQIRGQLRNTRYHDGASSTVRLYLPRRLGGRGIPLLEEVYCITILGLVDYLGKCLDGFGEQLWRCMYALETDRPGRRRQTVIGKARHVLSQLGLADDYLVEKQGLQLRRDDPDRKVSEYKAQIKRHFQAKAETELTGHVVHGRFYNLLKDERLERTLPHAWLVDGLLRPQTEGYIIAIQDGALLTKARRQVTTGRVATPRCRLCGEAPETISHIISSCSRHHHSAYKLRHDQALIPVLNALLQALGMGERICGERADPRPEYVCDRGSVLWDVMVQPDRKAYRPDMLVYDQEAKVITVVELTVPHDTRLEIARAEKLSKYRALVADLHKANADEGWRYELAVIVIGALGTMTVPMTADLKGHYLMGAEAIQMLKDVQRAALVGTQMVVKRHLANSSS

SEQ ID NO: 6595 - protein, 1031 aa, Sanderia malayensis
MSGEVVEGDTEAAEPVECETQAGFPAIVEDHVRVRFASLCRLSQSLAQRKVTPKLRLTEPQLHVAQRLFEWGWDKLTDKSYWHFNCMVFALGHLFADTYPKLGTDRATETDAATNNTAAEPKRPCVQARTRDRIRALESTYREKSAEFRKQLNWVTVELARLKAGTPATIRQRKIIRRLKAKFHTLKPRSLIRKRIHLRDLVKRLKREHKQAIRKVRFQERNRQASAGTLARNLLRDKSGEQAKVKGPSKKAVWKFWSNIVGTAATYDPTSKTMRRWVRQVTPKVAMCEPDETARALVDDDMWKRVLCKLKAFKAPGPDCIRNSIYMQVPAVSNCLREFIVRMLDGEAEIPNWLMTGKTTLIHKGGETTDPANYRPIACLNTAYKIMTACLSDVLMRHTRTFGLLPCEQRSMRTGSWGTIECLLLDQTIEATSRSYKRPLSVAWVDFKKAFDLVPHEHLLCMLEAMKAPRVVTNTIRRVMPHWKTVFTFVSRGRPCHTEELSIVRGLFQGDSLSPLLFCLAIAPLSAAIRRRCAAYTIRDNETVSHLLYMDDLKVYSPTPKDLEKAIRVVERASRAIGMELGLRKCAIAHRNHRGQVEVHEEAESSYHGIPLLKEEDCYKYLGLQQLFRVNRSETGRQVLTKVNARVTELLKTDLNSANLTKALGCKIAGTMRYYIAAQVWTKGDMCTLDRQIRGQLRNTRYHDGASSTVRLYLPRRLGGRGIPLLEEVYCITILGLVDYLGKCLDGFGEQLWRCMYALETDRPGRRRQTVIGKARHVLSQLGLADDYLVEKQGLQLRRDDPDRKVSEYKAQIKRHFQAKAETELTGHVVHGRFYNLLKDERLERTLPHAWLVDGLLRPQTEGYIIAIQDGALLTKARRQVTTGRVATPRCRLCGEAPETISHIISSCSRHHHSAYKLRHDQALIPVLNALLQALGMGERICGERADPRPEYVCDRGSVLWDVMVQPDRKAYRPDMLVYDQEAKVITVVELTVPHDTRLRLREPKSCLSTEPWLPTCTKLMQTRDGDTSWL

SEQ ID NO: 6596 - protein, 1109 aa, unidentified
MAYGSECPVCWCGRTFQSTRGLRIHQGKMKCYAVETLVEKNTFEGATSGEESIPALPNTSNQPTEADRTGESHQAPGQSRDSPGQVADHSTRVDPPQEKAEEVGGRKGKVKWPKMTDVKTWREFDEDTSKMLKKKLKGSAQEKLEMIGDLIYDIGEEKFGIDKPRKRGPVPKPSRRQQIIARLKKQLRSLKHRWKKAKLEEKPGLEELQGQVRLKLAALKRAERQRVKRKDREKARRSFFENPHRFTKKLFEQSKSGVLNIPQKDLEDHLRGVYSDEHREAPMPEIGGLIRPSQPGVKFDVSEPRLAEVASFINKARAASAPGPNGVPYKVYKKCEKLRNVLWRLLRVVWRKDVVPLSWNKADGVYIPKEENSSTIGQFRPISLLNVEGKIMLGVLAGRVASFLLENGLVNTSVQKAGIPGFSGCLEHSSIIWHTIQTAKRSRKSLSVVWLDLANAYGSVPHALIKFAMQFLWIPDKVTNYVLQYYDNFHMRFSTTQYTTRWQRLEVGIPMGCAISPILFVLAMEVITRAAERMGPGVSLEGSEELPPIRAFMDDLTLLNPNTKASQRILDRLDELMIWARMKFKTKKSRSLVLKQGKLADFHFSLSGEQIPTIQEQPVKSLGRWYTEDLKDTKRVQETAKLIREGLEAIDNSGLPGKLKLWCLQYGLMPMIMWPLTVYEVALSHVEAMERNINKYVKKWLGVPNSLTNIAIHSRKSKLNIPVRSLVEEFKVAKVRTFVTLGNSKDPVVKDIQPEMRSGRKWTASAAAEEAEARLKHKEVVGATQTGRQGLGLIRHKWWSSATEKERREMVVQEVREKEEEKRVAVAAGQAKQGRWTTWESVEQRNISFSVLWQMEPLRISFLWRSTYDLLPTPVNLSRWYDEQSDCCAACGRKGTLQHILSACPAALSSGKYTWRHNSVLRVIVDAIKGRVECVNAEEVPVRNKYFTSFLKEGSQPRKDTSSKCKPCILSAANDWKVKADLDGGGGFPEEIALTLQRPDIVIWSQRCREAVFGELSVPWEDNIEEAYERKLTRYAELVAACKDKGWRAACYPFEVGCRGFVAASLQKWLRKLGLSRREIMSTTRAAAEAAEAGSAWIWNKYMQEGRRK

SEQ ID NO: 6597 - protein, 1109 aa, unidentified
MAYGSECPVCWCGRTFQSTRGLRIHQGKMKCYAVETLVEKNTFEGVTSGEESIPALPNTSNQPTEADRTGESHQAPGQSRDSPGQVADHSTRVDPPQEKAEEVGGRKGKVKWPKMTDVKTWREFDEDTSKMLKKKLKGSAQEKLEMIGDLIYDIGEEKFGIDKPRKRGPVPKPSRRQQIIARLKKQLRSLKHRWKKAKLEEKPGLEELQGQVRLKLAALKRAERQRVKRKDREKARRSFFENPHRFTKKLFEQSKSGVLNIPQKDLEDHLRCVYSDEHREAPMPEIGGLIRPSQPGVKFDVSEPRLAEVASFINKARAASAPGPNGVPYKVYKKCEKLRNVLWRLLRVVWRKDVVPLSWNKADGVYIPKEENSSTIGQFRPISLLNVEGKIMLGVLAGRVASFLLENGLVNTSVQKAGIPGFSGCLEHSSMIWHTIQTAKRSRKSLSVVWLDLANAYGSVPHALIKFAMQFLWIPDKVTNYVLQYYDNFHMRFSTTQYTTRWQRLEVGIPMGCAISPILFVLAMEVITRAAERMGPGVSLEGSEELPPIRAFMDDLTLLNPNTKASQRILDRLDELMIWARMKFKTKKSRSLVLKQGKLADFHFSLSGEQIPTIQEQPVKSLGRWYTEDLKDTKRVQETAKLIREGLEAIDNSGLPGKLKLWCLQYGLMPRIMWPLTVYEVALSHVEAMERNINKYVKKWLGVPNSLTNIAIHSRKSKLNIPVRSLVEEFKVTKVRTFVTLGNSKDPVVKDIQPEMRSGRKWTASAAAEEAEARLKHKEVVGATQTGRQGLGLIRHKWWSSATEKERREMVVQEVREKEEEKRVAVAAGQAKQGRWTTWESVEQRNISFSVLWQMEPLRISFLWRSTYDLLPTPVNLSRWYDEQSDCCAACGRKGTLQHILSACPAALSSGKYTWRHNSVLRVIVDAIKGRVECVNAEEVPVRNKYFTSFLKEGSQPRKDTSSKCKPCILSAANDWKVKADLDGGGGFPEEIALTLQRPDIVIWSQRCREAVFGELSVPWEDNIQEAYERKLTRYAELVAACKDKGWRAACYPFEVGCRGFVAASLQKWLRKLGLSRREIMSTTRAAAEAAEAGSAWIWNKYMQEGRRK

SEQ ID NO: 6598 - protein, 1109 aa, Branchiostoma belcheri
MAYGSECPVCWCGRTFQSTRGLRIHQRKLRCYAVKTVVETSEAVTPREESIPDLPNIYNQPIEADRTGGNYPGQSRDNLGQVADHSTQVNPPQVSAGEVRGRKGKVKWPKMADEKTWREFDEDTSKMLKKKLKGSAKEKLEVIGDLIYNFGEERFGVDKPRERDPVSKPSRRQRIIARLKKELRCLKHKWRKAVSDEKPGLEALQRQVRQKLDSLKRAERQRVKRKDREKARRAFFQNPHRFTKKLFEQSKSGTLNIQKKDLEGHLRGVYSDEHRDAPMPDIGGLVRPPQPGVEFDVSEPRFKEVDSFIEKARAASAPGPNGVPYKVYKKCEKLKRVLWRLLKVVWRKDVVPLSWNKADGVYIPKEENSSTIGQFRPISLLNVEGKIMLGVLASRVTSFLLENGLVNTSVQKAGVPGFSGCLEHSSMIWHTIQSAKKSRKSLSVVWLDLANAYGSVPHALIKFAMQFLWIPDKVTNYVMQYYDNFHMRFSTTQYTTEWQRLEVGIPMGCAISPILFVLAMEVMTRSAERMGPGVSLEGSEELPSIRAFMDDLTLLNPNTTASQRILDRLDELMVWARMKFKTKKSRSLVLKQGTLADYHFNLSGEQIPTIQEQPVKSLGRWYTEDLKDTKRVQETAKLIREGLEAIDNSGLPGKLKLWCLQYGLMPRIMWPLTVYEVALSHVEAMERNINTYVKKWLGVPNSLTNIAIHSRKAKLNIPVRSLVEEFKVAKVRTSMTLSNSKDPVIRNFQPDLRSGRKWRVSAAVEEAEARLRHKEVVGATQTGRQGLGLIRHKWWSSATEKERREMVVQEVREQEEEKRVAVAAGQAKQGMWTTWESVEQRNISFNVLWQMEPLRISFLWRSTYDLLPTPANLSKWYEERSDCCAACGQKGTLQHILSACPSALSSGKYTWRHNNVLRVIVDAIKGRVECVNAEEVPAGNQYFTPFLKEGSQPRKDTSSKRKPSILSAANDWKVKADLDGEGGFPQEIALTLLRPDIVIWSESSREVVFGELSVPWEGNIEEAYERKLTRYAELEAVCRDKGWRSSCYPFELGCRGFVAASLHKWLNKMGLSRKEIKSTTRAAAEAAEAGSAWIWNKYLLEERRKRSDR

SEQ ID NO: 6599 - protein, 626 aa, Hyalomma asiaticum
MLDFTNAYGSVPHQALLAALRGAGAGEVFIEVVSDLYRDNRTRLMAAEGESAPISISAGIRQGCPLSGLLFNLVVDPIIRAVQGDDRSHNILAYADDLTPLASSPAQLQDRIDRIEEMATSIGLSLNPAKCCSIHLSGKTPVGTRPTQFAVAGVTIKSLADFESQRFLGRPVGFRILASDNKTVDEAIAKGRALLTSMLAPWQRLDAVRTFVFPALNFAMWSGDLGKSEWKRLDEALRPLLKRTLYLPDNATNDYLYGSARSGAAAIPVAAELSDACRIDNAFKLLTTADRELRDIAFQDLHSLVAKRLNRDVAQVDVEGYLNGEVEGDFRAPSTQLRSVWTEARNASRRVQAAWGLDPENVRLTCGDITLTSNRRREVVRALRAVLSARRDRSLHDRPNQGKVMACVAADPASSHFMLSGAFTRFADWRFVHRARLNLLPVNGACMWGPNRDQRCRTCGYARETLPHVLCHCMAHSASYTARHNAIVARVRAASLRSFTVAYENRPVGATTLRPDLVLVRGEEAVIIDVACPFENAPDALVAVRREKVAKYDAVRRYLSRRYQRVSVEAVVVGALGTWDAANDRVMRRFASNAYLRLFKRLCVSDVVAVSRDIYAAHVGGGAAGS

SEQ ID NO: 6600 - protein, 627 aa, Hyalomma asiaticum
MLDFTNAYGSVPHQALLTALRGAGAGEVFTEVVSDLYRDNRTRLMAAEGESAPISISAGIRQGCPLSGLLFNLVVDPIVRAVQGDDRSHNILAYADDLTPLASSPAQLQDRIDRIEAMATSIGLCLNPAKCCSIHLSGRTPVGTRPTRFAVAGVSIKSLADFESQRFLGRPVGFRILASDNKTVDEAIAKGRALLTSMLAPWQRVDAVRTFVFPALNFTMRSGDLGKSEWKRLDEALQPLLKRTLYLPDNATNDYLYGRAKSGAAAIPVAAELSDACRIDNAFKLLTTADRELRDLAFEDLYSLVAKRLNRDVAQVDVEGCYLNGDVEGDFRAPATQLRSVWTEARNASRRVQAAWGLDPENVRLTCGDVTLTSNRRREVVRALRAVLSARRDRSLPGRPNQGKVMACVAADPASSHFMVSGTFTRFADWRFVHRARLNLLPVNGACMWGSNRDQRCRICGYARETLPHVLCHCMTHSTSYTARHNAIVARVRTAALRSFTVAYENRPVGATALRPDLVLVRGEEAVIIDVACPFENAPDALVAVRREKVAKYDAVRRYLSRRYQRVSMEVVVVGALGTWDAANDRVMRRFASNAYLRLFKRLCVSDVIAASRDIYTAHVGGGATGS

SEQ ID NO: 6601 - protein, 1165 aa, Macropis europaea
MANELDWTLNDAPGTKSTNLIMDLSIDEVEASDVGAPGLGTPAVEYSTKDKGTSGNNPSTKKDHETNLTIVLPLEGHEICKVCETAGTHKGFLNDKNLSEHMHGLHPRTNISWKCRHCGKAFEKLHGLKCHFPKCKGEAQMNIEKAFKCEECGESFETERGRSMHERHRHPNIRNLKRMQPTKRPTKPNSKQIWSEEETKLLIELNERFKSDRYPNKKILEFLPGKTTKQISDKRRLITTLQGTDKIVEPEIDSVSEISAAEATETDSDNDGYLSAESTDFVTNISWKHHLKETINKQDLNNVNSELNRVNNLANYIAGSDNDEALKIEELIEEFTKFLKEGENIKPKKRRKVEGGGDRANKKPLSKRSRFKKYTYSRYQETFKKCPKKLVDLAIAGKLIETEHNNSQTEIPEKQDIEQLYNSMWGTTGPTSGIPKFNRPNTDIPLENIFTPMTAEEIVQKLARLKKDTAGGVDNIKKIHIRKKGAVLALAKIFNLLMLKEYYPEQWKINRTVLIPKPGKDCKDAKNWRPITIGSLMGRMFSALLDARIRRNIAQHIRQKGFTKQDGCKHNITLLKTAIAKMKEDQGGIITVVDISKAFDTVPHAAIKGGLTSKGIPAKAASYITKMYNGCKTKIETKEDAINVTLKRGVKQGDPLSPLLFNLILDPIIEEINNSTEGIKIGEEDISILAFADDMVLIGKNKKEASEQINLLNKYLQKLGMELSIPKCSSFEIVHKNKTWFIRNPELEIGKQTIPESKPEDLISYLGATFDPWRGLNRKLDLTSIHTAISTIQRMGLKPHQKIDLIRIYLLPRFIHRLVATPPPSKTLETIDKEIKLAIKQILHLHPTTTDGIIYCDKSHGGLGVPRIENIVKLAVLRGGTKMKESQDESVKYAANEQDKTYMKYAQSINLKWPATLEEVEEARKALKKSETNRWKQLISQGQGVSDFANDDIGNAWLYRPELLKPSRFLDALKFRTNTFGTKVALRRARKNLDVTCRRCKAQVETLGHILGSCIHTKPMRIRRHDDIKKLIENRAAKKAIVFEEPTVNVLGELRRPDLVIKDQERIIVVDVTVRYEDKINLRNAFTEKIDKYRDTAEYIKLKTNSTEAIILPVVVGSRGAMPKDTVKNLRLLGVTKSEMITISMIALRSSLEIANAFLDYDKIT

SEQ ID NO: 6602 - protein, 1077 aa, Bradysia coprophila
MGNSYASNEKTCICLENVDTDDRIICENCQHWYHPKCVFSSMDEFHAISANNEKWICTACMFERSSLDSPIMNVSPIKKEIQKNRERLPRKCKDSISQQIIPEKANTEKTIKPKMKIESKNSLSDRVTCKCGFIAKNNVGLRIHVSKKKKLSDAQGATLGPPVVLTGTFEDSDVKAMMDDFNLLLGKCKSFIPVTRIIQKSVRIVVCQELLSLVNDAVSKNDFPSWMRLLSFPYLVLNSVNKSSGKGTNYIRSNLKDFQGIKDVREALRQLLLNYGGTQYKRSKVSEDLIVKTATRKVGEGDIRGAIRVLSSNETIAEATPETKAKLKSKHPHDEEVVEAFTDAVKLKVTQVEEVVEAIRDFPVSSSSGIDGLRPRHLKDLTSFTCGESANKLLKAIASFSDLAKSGKICKDVLSVFYGASLLAFDKKKIDVRPIAVGITWRRVAGKIVCYHVRDELSKVLAPIQIGFGVKGGAEALIHAVRCFAIAGHEKAMAIIKFDFKNAFNMLFRKLLLSEVEEICPEMSPMIRQAYSRYSNLIYDEEMFLSKRGVQQGDPLGPPAFCIGIMKMTHSLVSKLNGWYLDDGTIGDELEALLSDIRRILEFCDYSGMELNTEKCEVFFVNASVEEEDEMYREISGLLPGIRKVDKVSFELLGAPIFGEGVHGMFSTKVESVELLSKRLQLLDVHPALCVFKSSLSAPRFNYLLRTCKSFLVPEVLNRVDEMFRTTLEIITNTKLGVVPWKQASLPLSFGGLGITKSSELAYPAYLSSVHQSSKLSDEILSKFGLKVLNGDVLSVLQSLPSEYSLLSEKSKSIQKEWDLVGVRKVFDELLASSSPVDRARLLASSTKESSKWLQVIPSSNLGLLLDNNAARIAVALRLGCKVCEEHRCVCGKLVDEYGRHGLSCKNSKGWIPGHDEVNNIFSHAFSSAGVPNVLQPPGISRDDGKRPDGMTLIPWSRGKSLTWDVTVRDTLAQSYLSISSTKAGAVADQAERRKHNHYVGLKENHLFKPIAFESLGSCGPETKAFLVVLGKMMKKASGEKKSLDYLLQKISISIQRRNAACILGTFGKRVDDFYLL

SEQ ID NO: 6603 - protein, 1075 aa, Bradysia coprophila
MGNSYATNEKTCICLENVDTDDRIICENCQHWYHPKCVFSSMDEFHAISANNEKWICTACMFERSSLDSPIMNVSPIKKEIQKNRERLPRKCKDSISQPNIPEKANTEKIIKPKMKIEGKNSLSDRVTCKCGFIAKNNVGLRIHVSKKKKLSDAQGATLGPPVVLTGTFEDSDVKAIMDDFNLLLGKCKSFIPVTRIIQKSVRVVVCQELLSLVNDAVSKNDLPSWMRLLSFPYLVLNSVNKSSGKGTNYIRSNLKDFQGIKDVREALRQLLLNYGGTQYKRSKVSEDLIVKTATRKVGEGDIRGAIRVLSSNETIAEATPETKAKLKCKHPHDEEVVEAFTNTVKLKVTQVEEVVEAIRDFPVSSSSGIDGLRPRHLKDLTSFTCGESANKLLKAIASFSDLAKSGKICKDVLSVFYGASLLAFDKKKIDVRPIAVGITWRRVAGKIVCYHVRDELSKVLAPIQIGFGVKGGAEALIHAVRCFATAGHEKAMAIIKFDFKNAFNMLFRKLLLSEVEEICPEMSPMIRQAYSRYSNLIYDEEIFLSKRGVQQGDPLGPPAFCIGIMKMTHSLVSKLNGWYLDDGTIGDELEALLSDIRRILEFCDYSGMELNTEKCEVFFVNASVEEEDEMYREISGLLPGIRKVDKVSFELLGAPIFGEGVHGMFSTKVESVELLSKRLQLLDVHPALCVFKSSLSAPRFNYLLRTCKSFLVPEVLNRVDEMFRTTLEIITNTKLGVVPWKQASLPLSFGGLGIRKSSELAYPAYLSSVHQSSKLSDEILSKFGLKVLNGDVLSVLQSLPSEYSLLSEKSKSIQKEWDLVGVRKVFDELLASSSPVDRARLLASSTKESSKWLQVIPSSNLGLLLDNNAARIAVALRLGCKVCEEHRCVCGKVVDEYGRHGLSCKNSKGWIPGHDDVNNIFSHAFSSAGVPNVLQPPGISRDDGKRPDGMTLIPWSRGKSLIWDVTVRDTLAQSYLSISSTKAGAVADQAERRKHNHYVGLKENHLFKPIAFESLGSCGSETKAFLVVLGKMMKKASGEKKSLDYLLQKISISIQRRNAACISGTFGKRVDVRQ

SEQ ID NO: 6604 - protein, 1077 aa, Bradysia coprophila
MGNSYATNEKTCICLENVDTDDRIICENCQHWYHPKCVFSSMDEFHAISANNEKWICTACMFERSSLDSPIMNVSPIKKEIQKNRERLPRKCKDSISQPNIPERANTEKIIKPKMKIEGKNSLSDRVTCKCGFIAKNNVGLRIHVSKKKKLSDTQGATLGPPVVLTGTFEDSDVKAIMDDFNLLLGKCKSFIPVTRIIQKSVRIVVCQELLSLVNDAVSKNDLPSWMRLLSFPYLVLNSVNKSSGKGTNYIRSNLKDFQGKKDVREALRQLLLNYGGTQYKRSKVSEDLIVKTATRKVGEGDIRGAIRVLSSNETIAEATPETKAKLKSKHPHDEEVVEAFTNTVKLKVTQVEEVVEGIRDFPVSSSSGIDGLRPRHLKDLTSFTCGESANKLLKAIASFSDLAKSGKICKDVLSVFYGASLLAFDKKKIDVRPIAVGITWRRVAGKIVCYHVRDELSKVLAPIQIGFGVKGGAEALIHAVRCFATAGHEKAMAIIKFDFKNAFNMLFRKLLLSEVEEICPEMSPMIRQAYSRYSNLIYDEEIFLSKRGVQQGDPLGPPAFCIGIMKMTHSLVSKLNGWYLDDGTIGDKLEALLSDIRRILEFCDYSGMELNTEKCEVFFVNASVEEEDEMYREISGLLPDIRKVDKVSFELLGAPIFGEGVHGMFSTKVESVELLSKRLQLLDVHPAFCVFKSSLSAPRFNYLLRTCKSFLVPEVLNRVDEMFRTTLEIITNTKLGVVPWKQASLPLSFGGLGIRKSSELAYPAYLSSVHQSSKLSDEILSKFGLKVLNGDVLSVLQSLPSEYSLLSEKSKSIQKEWDLVGVRKVFDELLASSSPVDRARLLASSTKESSKWLQVIPSSNLGLLLDNNTARIAVALRLGCKVCEEHRCVCGKLVDEYGRHGLSCKNSKGWIPGHDDVNNIFSHAFSSAGVPNVLQPPGISRDDGKRPDGMTLIPWSRGKSLIWDVTVRDTLAQSYLSISSTKAGAVADQAERRKHNHYVGLKENHLFKPIAFESLGSCGPETKAFLVVLGKMMKKASGEKKSLDYLLQKISISIQRRNAACILGTFGKRVDDFYLL

SEQ ID NO: 6605 - protein, 1078 aa, Bradysia odoriphaga
MGNSLTTDDKVCTCLDRIENDKWIICDECLKWFHPACTFSSPDEFDRLLNNSEKWFCKNCAPNDSISDSHNLNQMCANDDVQIVRNRLPRNCKKSKREAQSITFVDVPDNVPQYNNSKTDDISDRVTCKCGFIAKNERGLRIHLSKKKKCVRPDLDDVTYRNVLESHQSYGDKSINIDEFNLLLGKCKQFIPVTRIIQKSVRIIVCQELTSLLNEVVSKNDLISWMRLLAFPFLVLNSTNKSNSNGKNYIRSNLENFKKTANVDIALRQLLLKYGNTHYKKSKASDDLLIKTATRKVGEGDIRGAIRVLTSNETIAEANQETKAKLLSKHPDEAEVGNAFVPMEYELKSTQIKEVEEAIRDFPISTSSGVDGLRPRHLKDLTSFTCGESASGLLKAIVSLSNLAKAGKICEEVLPIFYGASLIAFDKKKIDVRPIAIGITWRRVSGKIVCYHIKDNLSSVLAPVQLGSGVKGGAEALIHAVRCFATADHNKAMAIIKFDFKNAFNMLFRKLLLSEVAEICPEMYPMIHQAYNRHSNLIYDEELFLSKRGVQQGDPLGPPAFCIGILKLTHSLRSKLNGWYLDDGTIGDDLEAILADINRILEFCESSGMELNTCKCEVFFINTSEEEEAEMYEEISKLLPGIRIVDETTFELLGAPIFEKGTQRMLSSKIESVELLSSRLKLLDVHPALCIFKSSLSTPRFNYLLRTCKTFLVPGLLESVDEMFRSTLEIITNTKLNVISWNQASLPLSFGGLGIRKASDIAHPAYLSSVHQSSSLSNAILVKFGLNILNNDISSIVESLPSEFSSLDENSRKVQKKWDLIGVQKRFDNLLASSEPVDRARLLASSKKESSKWLQVIPSSNLGLLLDNNAARIAVALRLGCNICEEHNCLCGKLVNKNGLHGLSCKFSKGWTPRHNMVNNIYSHAFSSADIPNIIQPPGISRVDGKRPDGMTLIHWSRVKSLIWDVTIRDTLAPSYLKMSSSKAGSVAEQAERKKHNHYINLKENHIFTPISFESLGVCGPETKLFMNTLGKLLKKATGKKRALDYLYQKVSIAIQRGNAACILGTFEKKKLDDFYLL

SEQ ID NO: 6606 - protein, 1077 aa, Bradysia coprophila
MGNSYATNEKTCICLENVDTDDRIICENCQHWYHPKCVFSSMDEFHAISANNEKWICTACMFERSSLDSPIMNVSPIKKEIQKNRERLPRKCKDSISQPNIPEKANTEKIIKPKMKIEGKNSLSDRVTCKCGFIAKNNVGLRIHVSKKKKLSDAQGATLGPPVVLTGTFEDSDVKAIMDDFNLLLGKCKSFIPVTRIIQKSVRIVVCQELLSLVNDAVSKNDLPSWMRLLSFPYLVLNSVNKSSGKGTNYIRSNLKDFQGIKDVREALRQLLLNYGGTQYKRSKVSEDLIVKTATRKVGEGDIRGAIRVLSSNETIAEATPETKAKLKCKHPHDEEVVEAFTNAVKLKVTQVEEVVEAIRDFPVSSSSGIDGLRPRHLKDLTSFTCGESANKLLKAIASFSDLAKSGKICKDVLSVFYGASLLAFDKKKIDVRPIAVGITWRRVAGKIVCYHVRDELSKVLAPIQIGFGVKGGAEALLHAVRCFATAGHEKAMAIIKFDFKNAFNMLFRKLLLSEVEEICPEMSPMIRQAYSRYSNLIYDEEIFLSKRGVQQGDPLGPPAFCIGIMKMTHSLVSKLNGWYLDDGTIGDELEALLSDIRRILEFCDYSGMELNTEKCEVFFVSASVEEEDEMYREISGLLPGIRKVDKVSFELLGAPVFGEGVHGMFSTKVESVELLSKRLQLLDVHPALCVFKSSLSAPRFNYLLRTCKSFLVPEVLNRVDEMFRTTLEIITNTKLGVVPWKQASLPLSFGGLGIRKSSELAYPAYLSSVHQSSKLSDEILSKFGLKVLNGDVLSVLQSLPSEYSLLSEKSKSIQKEWDLVGVRKVFDELLASSSPVDRARLLASSTKESSKWLQVIPSSNLGLLLDNNAARIAVALRLGCKVCEEHRCVCGKLVDEYGRHGLSCKNSKGWIPGHDDVNNIFSHAFSSAGVPNVLQPPGISRDDGKRPDGMTLIPWSRGKSLIWDVTVRDTLAQSYLSVSSTKAGAVADQAERRKHNHYVGLKEDHLFKPIAFESLGSCGPETKAFLVVLGKMMKKASGEKKSLDYLLQKISISIQRRNAACILGTFGKRVDDFYLL

SEQ ID NO: 6607 - protein, 1101 aa, Bradysia odoriphaga
MMGNAQGMDEKVCICSNHSKTDKWIICDVCLKWFHPECVLSSIDEYEIILKNNEKWKCPHCEVNGSIIGFVETSAAPLQSNDENMRNIDNLNEVIDDLCPSKGDQSQGRTRLPRNCKKPGKTLNNSSTNYGERNGKAKKGKIDCAERVTCKCGFIAKNSQGLRIHWGKQKKSATQKMNNDNIQLNFSEEFQKKTDMKECIDDFNILLSKCKNFISVTRIIQKSVRIVVCQELTLLIKNVVSRNDIVSWLRLLSFPYLVLNSASKSENRGKNYIRSNLEVFKQTVDVKEALQQLLLKYGGTQYKKTKITEDLVIKTATRKVGEGDIRGAIRVLSSNETIAEATPETKEKLRLKHPHDDEVALVRSTVKELKPTKVEEIFEAIKDFPISSSSGVDGLRPRHLKDLTSFTCGDAATNLLKAIATLSDLAKAGGIEDNILPIFYGAGLIAFDKKKVDVRPIAVGITLRRVAGKTVCYHIKDDLAAVLAPKQLGFGVKGGAEALVHAVRCFVKSDHEKAMAIIKFDFKNAFNMLFRKLLLSEIEEICPEMSPMIRQAYGRYSNLIFDEEIYHSKRGVQQGDPLGPPAFCIGIMKMTHSLVSRLNGWYLDDGTIGDELEALLKDINKILEFCKSSGMEMNSEKCEVFFINATEEEENFMLDEISKLLPGIRKVDESTFELLGSPIFEKGLERMMSSKTESVKLLTDRLKLLDVHPALCIFKSSLSAPRFNYLLRTSKSFLIPSHLESVDEMFRSTLEIITNTKLNVISWRQASSPLSFGGLGIRKATDIAYPAYLSSLHQSAGLSNEILEKFGLKILNNEVSSIINSLPEEYAQLDDVSKKSQKKWDLIGVRKSFADLLASSEPVDRARLLASSTKESSKWLQVIPSSQLGLLLDNNAARIAVALRLGCQINEEYNCICGALVHKDGRHGLSCKYSKGWVPRHNDLNNIFSHAFSSAGIPNILQPPGISRVDGKKPDGMTLIPWSRGKSLLWDVTVRDTFASSYITLASSKAGAVAELAERKKHNHYISMKENHIFTPIAFESSGSCGPETKIFMERLGKLLKRATGEKRSLDYLFQKISIAIQRGNAACIFGTFPNRRELEDFYVL

SEQ ID NO: 6608 - protein, 1262 aa, Acropora yongei
MADGVTQQPVSTNETTRGRRRRGRVIWTVQMNRDLLECKEMAQQLVASVEPPLYPNGRKKGYMRVMWEKWNEKGYAGLDFSNQNLRDQAGHLEKSKGNVRDTIIRSLESPNNEQSEEGNFILQPEIMSSNMQQSTQNAEVDLHITSSTQTPLRPDNASINTSTGSDTSIDEVPSELAQLAAQFLASVKQSPGDFSGRSYDTRTKQKPTGNDIDNVNTAVSELLKCNTIPEPSVDPFGYLWMANCVLYSVIIAFYVCKGWKKRESNKDGAGRSKFNEMAKEKYESQASEIRVKLSKAKAEIERIKTNGKITKKGKRNRAKLMRECKKLTVANLVAYMEKEKSYLRRLKRGYWSRKKQHEARQINRQFQLDPRRVYGNLKEMVEAQGDSDKPEYDHGLQDNRRQDRMFTNIEEAASFWRSLWEAEGTGDTGAEWLEEVRCAIREKVPEPTEETFALSEARAAKVIGKKRNWSAPGPDRLANCWWKKAKCLHEGIAISFEAIARSYQEIPMWFAEGKSSLIPKPGEFTSANQRPITCLNTMYKWFSSCLLKPVDQHLDTYGLMEGEQRGAKENCSGTMDNLLVDRMVCQDSQRGRRNLSMAWVDVRKAYDSVDHKWLKEMFALHRFPTWIGNLIARLCGRWNTKITAVTKQGVEISERIAFRKGLPQGDALCPRLFTLCLNPIAWKLKASEGYRLSKPISAKITDLLYIDDLKIYAASEAKLEWIMKGVRNAMEDVGLQWNERKCAVVHVRRGRLQESEENRIGAGEAIASLREDAQYKFLGVLENVKQQDGLALEQAKKEYMKRLSVVWSSPLSDYYKVLATNQFALPVMSYFMWTQVWPIADLQRIDRETRKIMVENGARHPLASTDQLYIPRSSGGRGLKSVESEYKLIKIKAAVKLFANTDSTLKLVREFEERAVEKGRRSILKDMSGFARELGIELELEYPEPVGRTEHGELIDKKKIGMFAKKALYTKRRQGIEEQSWQGKLVANRWQDEQLDRSCFSLLCEWRTAPTYTIAALEELYQQLLPTKVYSTKKAKTSSDLDVRCRLCGKGQESVAHVLAGCSALAQTAYLTRHNAAFKILFFELLRDHGLVETVPPWYSPTQPKPIYEGDRVTAYWDVPVFADQTEVRANRIDGRIVNKARRTVTLLEMSCPWVDNRDHKDGEKTMKYAPLRLELKRQYPGFNSVQYNIIIDVLGGYSKDLKKSVRELVGSERSTAVLGRMQKSVVSEVHSRLQDLLKSWVEDFILAMYYFVVVFFFFLRH

SEQ ID NO: 6609 - protein, 1211 aa, Acropora yongei
MNRDLLECKEMAQQLVASVEPPLYPNGRKKGYMRVMWEKWNENGYAGLDFSSQNLRDQAGHLEKSKGNVRDTIIRSLESPNNEQSEEGNFILQPEIMSSNMQQSTQNAEVDLHITSSTQTPLRPDNASINTSAGSDTSIDEVPSELAQLAAQFLASVKQSPGDFSGRSYDTRTKQKPTGNDIDNVNTAVIELLKCNTIPEPSVDPFGYLWMANCVLYSVIIAFYVCKGWKKRESNKDGAGRSKFNEMAKEKYESQASEIRAKLSKAKAEIERIKTNGKITKKGKRNRAKLMRECKKLTVANLVAYMEKEKSNLRRLKRGYWSRKKQHEARQINRQFQLDPRRVYGNLKEMVEAQGDSDKPKYDHGLQDNRRQDRMFTNIEEAASFWRSLWEAEGTGDTGAEWLEEVRCAIREKVPEPTEENFALSEARAAKVIGKKRNWSAPGPDRLANYWWKKAKCLHEGIAISFEAIARSYQEIPMWFAEGKSSLIPKPGEFTSANQRPITCLNTMYKWFSSCLLKPVDQHLDTYGLMEGEQRGAKENCSGTMDNLLVDRMVCQDSQRGRRNLSMAWVDVRKAYDSVDHKWLKEMFALHRFPTWIGNLIARLCGRWNTKITAVTKQGVEISERIAFRKGLPQGDALCPRLFTLCLNPIAWKLKASEGYRLSKPISAKITDLLYIDDLKIYAASEAKLEWIMKGVRNAMEDVGLQWNERKCAVVHVRRGRLQESEENRIGAGEAIASLREDAQYKFLGVLENVKQQDGLVLEQAKKEYMKRLSVVWSSPLSDYYKVLATNQFALPVMSYFMWTQVWPIADLQRIDRETRKIMVENGARHPLASTDQLYIPRSSGGRGLKSVESEYKLIKIKAAVKLCANTDPTLKLVREFEERAVEKGRRSILKDASGFARELGIELELEYPEPVGRTEHGELIDKKKIGVFAKKALYTKRRQGIEEQSWQGKLVANRWQDEQLDRSCFSLLCEWRTAPTYTIAALEELYQQLLPTKVYRTKKAKTSGDLDVRCRLCGKGQESVAHVLAGCSALAQTAYLTRHNAAFKILFFELLRDHGLVETVPPWYSPTQPKPIYEGDRVTAYWDVPVFADQTEVRANRIDGRIVNKARKTVTLLEMSCPWVDNRDHKDGEKTMKYAPLRLELKRQYPGFNIVQYNIIIDVLGGYSKDLKKSVRELVGSERSTAVLGRMQKSVVSSSLKIARSLKIMG

SEQ ID NO: 6610 - protein, 1201 aa, Acropora awi
MAQQLVASVEPPLYPNGRKKGYMRVMREKWNEKGYAGLDFSSQNLRDQAGHLEKSKGNVRDTIIRSLENPNNEQSEEGNFILQSEIMSSNMQQSTQNAEVDLHITSSTQTPVGPDNASINTSTGSDTSIDEVPSELAQLAAQFLASVKQSPGDFSGRSYDTRTKQKPTGNDIDNVNTAVRELLKCNTVPDPSEDPFGYLWMANCVLYSVIIAFYVCKGWKKRESNKDGAGRSKFNEMAKEKYEGQASEIRAKLSKAKAEIERIKTNGKITKKGKRNRAKFMRECKKLTVANLVAYMEKEKSNLRRLKRGYWSRKKQHEARQINRQFQLDPRRVYGNLKEMVEAQGDSDKPKYDHGLQDNRRQDRMFTNIEEAASFWRSLWEAEGTGDTGADWLEEVRCAIREKVPEPTEENFALSEARAAKVIGKKRNWSAPGPDRLANYWWKRAKCLHEGIAISFEAIARSYQEIPMWFAEGKSSLIPKPGEFTSANQRPITCLNTMYKWFSSCLLKPVDQHLDTYGLMEGEQRGAKENCSGTMDNLLVDRMVCQDSQRGRRNLSMAWVDVRKAYDSVDHKWLKEMFALHRFPTWIGNLIARLCGRWNTKITAVTKQGVEISERIAFRKGLPQGDALCPRLFTLCLNPIAWKLKASEGYRLSKPISAKITDLLYIDDLKIYAASEAKLEWIMKGVRNAMEDVGLQWNERKCAVVHVRRGRLQESEENRIGAGEAIASLREDAQYKFLGVLENVKQQDGLVLEQAEKEYLKRLSVVWSSPLSDYYKVLATNQFALPVMSYFMWTQVWPIADLQRIDRETRKIMVENGARHPLASTDQLYIPRSSGGRGLKSVESEYKLIKIKAAVKLCANTDPTLKLVREFEERAVEKGRRSMLKDASGFARELGIELELEHPEPVGRTENGELIDKKKIGVFAKKALYTKRRQGIEEQSWQGKLVANRWQDDQLDRSCFSLLCEWRTAPTYTIAALEELYQQLLPTKVYSTKKAKTSGDSDVRCRLCGKGQESVAHVLAGCSALAQTAYLTRHNAAFKILFFELLRDHGLVETVPPWYSPTQPKPIYEGDRVTAYWDVPVFADQTEVRANRIDGRIVNKARKTVTLLEMSCPWVDNRDHKDEEKTMKYAPLRLELKRQYPGFNIVQYNIIIDVLGGYSKDLKKSVRELVGSERSTAVLGRMQKSVVISSLKIARSLKIMG

SEQ ID NO: 6611 - protein, 1135 aa, Acropora tenuis
MSSNMQQSTQNAEVDLHITSSTQTPLRPDNASINTSTGSDTSIDEVPSELAQLAAQFLASVKQSPGDFSGRSYDTRTKQKPTGNDIDNVNTAVIELLKCNTIPEPSVDPFGYLWMANCVLYSVIIAFYVCKGWKKRESNKDGAGRSKFNEMAKEKYESQASEIRAKLSKAKAEIERIKTNGKITKKGKRNRAKLMRECKKLTVANLVAYMEKEKSNLRRLKRGYWSRKKQHEARQINRQFQLDPRRVYGNLKEMVEAQGDSDKPKYDHGLQDNRRQDRMFTNIEEAASFWRSLWEAEGTGDTGAEWLEEVRCAIREKVPEPTEENFALSEARAAKVIGKKRNWSAPGPDRLANYWWKKAKCLHEGIAISFEAIARSYQEIPMWFAEGKSSLIPKPGEFTSANQRPITCLNTMYKWFSSCLLKPVDQHLDTYGLMEGEQRGAKENCSGTMDNLLVDRMVCQDSQRGRRNLSMAWVDVRKAYDSVDHKWLKEMFALHRFPTWIGNLIARLCGRWNTKITAVTKQGVEISERIAFRKGLPHGDALCPRLFTLCLNPIAWKLKASEGYRLSKPISAKITDLLYIDDLKIYAASEAKLEWIMKGVRNAMEDVGLQWNERKCAVVHVRRGRLQESEENRIGAGEAIASLREDAQYKFLGVLENVKQQDGLVLEQAKKEYMKRLSVVWSSPLSDYYKVLATNQFALPVMSYFMWTQVWPIADLQRIDRETRKIMVENGARHPLASTDQLYIPRSSGGRGLKSVESEYKLIKIKAAVKLCANTDPTLKLVREFEERAVEKGRRSILKDASGFARELGIELELEYPEPVGRTEHGELIDKKKIGVFAKKALYTKRRQGIEEQSWQGKLVANRWQDEQLDRSCFSLLCEWRTAPTYTIAALEELYQQLLPTKVYRTKKAKTSGDLDVRCRLCGKGQESVAHVLAGCSALAQTAYLTRHNAAFKILFFELLRDHGLVETVPPWYSPTQPKPIYEGDRVTAYWDVPVFADQTEVRANRIDGRIVNKARKTVTLVEMSCPWVDNRDHKDGKKTMKYAPLRLELKRQYPGFNIVQYNIIIDDMLTTAPSTRIRIFLNLQHFLSGYGYRPHAYGEICKQIRKFLNPPSRVEIFESDNISDSCGRSNPDIF

SEQ ID NO: 6612 - protein, 965 aa, Acropora yongei
MAKEKYESQASEIRAKLSKAKAEIERIKTNGKITKKGKRNRAKLMRECKKLTVANLVAYMEKEKSNLRRLKRGYWSRKKQHEARQINRQFQLDPRRVYGNLKEMVEAQGDSDKPKYDHGLQDNRRQGRMFTNIEEAASFWRSLWEAEGTGDTGAEWLEEVRCAISEKVPEPTEENFALSEARAAKVIGKKRNWSAPGPDRLANYWWKKAKCLHEGIAISFEAIARSYQEIPMWFAEGKSSLIPKPGEFTSANQRPITCLNTMYKWFSSCLLKPVDQHLDTYGLMEGEQRGAKENCSGTMDNLLVDRMVCQDSQRGRRNLSMAWVDVRKAYDSVDHKWLKEMFALHRFPTWIGNLIARLCGRWNTKITAVTKQGVEISERIAFRRGLPQGDALCPRLFTLCLNPIAWKLKASEGYRLSKPITAKITDLLYIDDLKTYAASEAKLEWIMKGVRNAMEDVDLQWNERKCAVVHVRRGRLQESEENRIGAGEAIASLREDAQYKFLGVLENVKQQDGLVLEQAKKEYMKRLSVVWSSPLSDYYKVLATNQFALPVMSYFMWTQVWPIADLQRIDRETRKIMVENGARHPLASTDQLYIPRSSGGRGLKSVESEYKLIKIKAAVKLCANTDPTLNLVREFEERAVEKGRRSILKDASGFARELGIELELEYPEPVGRTEHGELIDKKKIGVFAKKALYTKRRQGIEEQSWQGKLVANRWQDEQLDRSCFSLLCEWRTAPTYTIAALEELYQQLLPTKVYRTKKAKTSGDLDVRCRLCGKGQESVAHVLAGCSALAQTAYLTRHNAAFKILFFELLRDHGLVETVPPWYSPNQPKPIYEGDRVTAYWDVPVFADQTEVRANRIDGRIVNKARKTVTLLEMSCPWVDNRDHKDGEKTMKYAPLRLELKRQYPGFNIVQYNIIIDVLGGYSKDLKKSVRELVGSERSTAVLGRMQKSVVSSSLKIARSLKIMG

SEQ ID NO: 6613 - protein, 1241 aa, Acropora tenuis
MADGVTQQPVSINETTRGRRRRGRVIWTVQMNRDLLECKEMAQQLVASVEPPLYPNGRKKGYMRVMWEKWNEKGYAGLDFSSQNLIDQAGHLENSKGNVRDTIIRSLESLNNEQSEEGNFILQPEIMSSNMQQSTQNAEVDLHITSSTQTPLRPDNASINTSTGSDTSIDEVPSELAQLAAQFLASVKQSPGDFSGRSYDTRTKQKPTGNDIDNVNTAVIELLKCNTIPEPSVDPFGYLWMANCVLYSVIIAFYVCKGWKKRESNKDGAGRSKFNEMAKEKYESQASEIRAKLSKAKAEIERIKTNGKITKKGKRNRAKLMRECKKLTVANLVAYMEKEKSNLRRLKRGYWSRKKQHEARQINRQFQLDPRRVYGNLKEMVEAQVDSDKPKYDHGLQDNRRQDRMFTNIEEAASFWRSLWEAEGTGDTGAEWLEEVRCAIREKVPEPTEENFALSEARAAKVIGKKRNWSAPGPDRLANYWWKKAKCLHEGIAISFEAIARSYQEIPMWFAEGKSSLIPKPGEFTSANQRPITCLNTMYKWFSSCLLKPVDQHLDTYGLMEGEQRGAKENCSGTMDNLLVDRMVCQDSQRGRRNLSMAWVDVRKAYDSVDHKWLKEMFALHRFPTWIGNLIARLCGRWNTKITAVTKQGVEISERIAFRKGLPQGDALCPRLFTLCLNPIAWKLKASEGYRLSKPISAKITDLLYIDDLKIYAASEAKLEWIMKGVRNAMEDVGLQWNERKCAVVHVRRGRLQESEENRIGAGEAIASLREDAQYKFLGVLENVKQQDGLVLEQAKKEYMKRLSVVWSSPLSDYYKVLATNQFALPVMSYFMWTQVWPIADLQRIDRETRKIMVENGARHPLASTDQLYIPRSSGGRGLKSVESEYKLIKIKAAVKLCANTDPTLKLVREFEERAVEKGRRSILKDASGFARELGIELELEYPEPVGRTEHGELIDKKKIGVFAKKALYTKRRQGIEEQSWQGKLVANRWQDEQLDRSCFSLLCEWRTAPTYTIAALEELYQQLLPTKVYRTKKAKTSGDLDVRCRLCGKGQESVAHVLAGCSALAQTAYLTRHNAAFKILFFELLRDHGLVETVPPWYSPTQPKPIYEGDRVTAYWDVPVFADQTEVRANRIDGRIVNKARKTVTLLEMSCPWVDNRDHKDGEKTMKYAPLRLELKRQYPGFNIVQYNIIIDVLGGYSKDLKKSVRELVGSERSTAVLGRMQKSVVSSSLKIARSLKIMG

SEQ ID NO: 6614 - protein, 1241 aa, Acropora tenuis
MADGVTQQPVSTNETTRGRRRRGRVIWTVQMNRDLLECKEMAQQLVASVEPPLYPNGRKKGYMRVMWEKWNEKSYAGLDFSSQNLRDQAGHLEKSKGNVRGIIIRSLESPNNEHSEERNFILQPEIMSSNMQQSTQNAEVDLLITSSTQTPLRPDNASINTSTGSDTSIDEVPSELAQLAAQFLASVKQSPGDFSGRSYDTRTKQKPTGNDIDNVNTAVIELLKCNTIPEPSVDPFGYLWMANCVLYSVIIAFYVCKGWKKRESNKDGAGRSKFNEMAKEKYESQASEIRAKLSKAKAEIERIKTNGKITKKGKRNRAKLMRECKKLTVANLVAYMEKEKSNLRRLKRGYWSRKKQHEARQINRQFQLDPRRVYGNLKEMVEAQGDSDKPKYDHGLQDNRRQDRMFTNIEEAASFWRSLWEAEGTGDTGAEWLEEVRCAIREKVPEPTEENFALSEARAAKVIGKKRNWSAPGPDRLANYWWKKAKCLHEGIAISFEAIARSYQEIPMWFAEGKSSLIPKPGEFTSANQRPITCLNTMYKWFSSCLLKPVDQHLDTYGLMEGEQRGAKENCSGTMDNLLVDRMVCQDSQRGRRNLSMAWVDVRKAYDSVDHKWLKEMFALHRFPTWIGNLIARLCGRWNTKITAVTKQGVEISERIAFRKGLPQGDALCPRLFTLCLNPIAWKLKASEGYRLSKPISAKITDLLYIDDLKIYAASEAKLEWIMKGVRNAMEDVGLQWNERKCAVVHVRRGRLQESEENRIGAGEAIASLREDAQYKFLGVLENVKQQDGLVLEQAKKEYMKRLSVVWSSPLSDYYKVLATNQFALPVMSYFMWTQVWPIADLQRIDRETRKIMVENGARHPLASTDQLYIPRSSGGRGLKSVESEYKLIKIKAAVKLCANTDPTLKLVREFEERAVEKGRRSILKDASGFARELGIELELEYPEPVGRTEHGELIDKKKIGVFAKKALYTKRRQGIEEQSWQGKLVANRWQDEQLDRSCFSLLCEWRTAPTYTIAALEELYQQLLPTKVYRTKKAKTSGDLDVRCRLCGKGQESVAHVLAGCSALAQTAYLTRHNAAFKILFFELLRDHGLVETVPPWYSPTQPKPIYEGDRVTAYWDVPVFADQTEVRANRIDGRIVNKARKTVTLLEMSCPWVDNRDHKDGEKTMKYAPLRLELKRQYPGFNIVQYNIIIDVLGGYSKDLKKSVRELVGSERSTAVLGRMQKSVVSSSLKIARSLKIMG

SEQ ID NO: 6615 - protein, 1230 aa, Acropora intermedia
MADGVTQQPVSTNETTRGRRRRGRVIWTVQMNRDLLECKEMAQQLVASVEPALYPNGRKKGYMRVMWEKWNEKGYAGLDFSSQNLRDQAGHLEKSKGNVRDTIIRSLESPNNEQSEEGNFILQSEIMSSNMQQSTQNAEVDLHITSSTQTPVGPDNASINTSTGSDTSIDEVPSELAQLAAQFLASVKQSPGDFSGRSYDTRTKQKPTGNDIDNVNTAVRELLKCNTVPDPSEDPFGYLWMANCVLYSVIIAFYVCKGWKKRESNKDGAGRSKFNEMAKEKYEGQASEIRAKLSKAKAEIERIKTNGKITKKGKRNRAKLMRECKKLTVANLVAYMEKEKSNLRRLKRGYWSRKKQHEARQINRQFQLDPRRVYGNLKEMVEAQGDSDKPKYDHGLQDNRRQDRMFTNIEEAASFWRSLWEAEGTGDTGADWLEEVRCAIREKVPEPTEENFALSEARAAKVIGKKRNWSAPGPDRLANYWWKRAKCLHEGIAISFEAIARSYQEIPMWFAEGKSSLIPKPGEFTSANQRPITCLNTMYKWFSSCLLKPVDQHLDTYGLMEGEQRGAKENCSGTMDNLLVDRMVCQDSQRGRRNLSMAWVDVRKAYDSVDHKWLKEMFALHRFPTWIGNLIARLCGRWNTKITAVTKQGVEISERIAFRKGLPQGDALCPRLFTLCLNPIAWKLKASEGYRLSKPISAKITDLLYIDDLKIYAASEAKLEWIMKGVRNAMEDVGLQWNERKCAVVHVRRGRLQESEENRIGAGEAIASLREDAQYKFLGVLENVKQQDGLVLEQAEKEYLKRLSVVWSSPLSDYYKVLATNQFALPVMSYFMWTQVWPIADLQRIDRETRKIMVENGARHPLASTDQLYIPRSSGGRGLKSVESEYKLIKIKAAVKLCANTDPTLKLVREFEERAVEKGRRSMLKDASGFARELGIELELEHPEPVGRTENGELIDKKKIGVFAKKALYTKRRQGIEEQSWQGKLVANRWQDDQLDRSCFSLLCEWRTAPTYTIAALEELYQQLLPTKVYSTKKAKTSGDSDVRCRLCGKGQESVAHVLAGCSALAQTAYLTRHNAAFKILFFELLRDHGLVETVPPWYSPTQPKPIYEGDRVTAYWDVPVFADQTEVRANRIDGRIVNKARKTVTLLEMSCPWVDNRDHKDEEKTMKYPGFNIVQYNIIIDVLGGYSKDLKKSVRELVGSERSTAVLGRMQKSVVSSSLKIARSLKIMG

SEQ ID NO: 6616 - protein, 1269 aa, Acropora tenuis
MVNNNNNNNNYYYYYYYYYYYFNLFNLENGDGVTQQPVSTNETTRGRRRRGRVIWTVQMNRDLLECKEMAQQLVASVEPPLYPNGRKKGYMRVMWEKWNEKGYAGLDFSSQNLRDQAGHLEKSKGNVRDTIIRSLESPNNEQSEEGNFILQPEIMSSNMQQSTQNAEVDLHITSSTQTPLRPDNASINTSTGSDTSIDEVPSELAQLAAQFLASVKQSPGDFSGRSYDTRTKQKPTGNDIDNVNTAVIELLKCNTIPEPSVDPFGYLWMANCVLYSVIIAFYVCKGWKKRESNKDGAGRSKFNEMAKEKYESQASEIRAKLSKAKAEIERIKTNGKITKKGKRNRAKLMRECKKLTVANLVAYMEKEKSNLRRLKRGYWSRKKQHEARQINRQFQLDPRRVYGNLKEMVEAQGDSDKPKYDHGLQDNRRQDRMFTNIEEAASFWRSLWEAEGTGDTGAEWLEEVRCAIREKVPEPTEENFALSEARAAKVIGKKRNWSAPGPDRLANYWWKKAKCLHEGIAISFEAIARSYQEIPMWFAEGKSSLIPKPGEFTSANQRPITCLNTMYKWFSSCLLKPVDQHLDTYGLMEGEQRGAKENCSGTMDNLLVDRMVCQDSQRGRRNLSMAWVDVRKAYDSVDHKWLKEMFALHRFPTWIGNLIARLCGRWNTKITAVTKQGVEISERIAFRKGLPQGDALCPRLFTLCLNPIAWKLKASEGYRLSKPISAKITDLLYIDDLKIYAASEAKLEWIMKGVRNAMEDVGLQWNERKCAVVHVRRGRLQESEENRIGAGEAIASLREDAQYKFLGVLENVKQQDGLVLEQAKKEYMKRLSVVWSSPLSDYYKVLATNQFALPVMSYFMWTQVWPIADLQRIDRETRKIMVENGARHPLASTDQLYIPRSSGGRGLKSVESEYKLIKIKAAVKLCANTDPTLKLVREFEERAVEKGRRSILKDASGFARELGIELELEYPEPVGRTEHGELIDKKKIGVFAKKALYTKRRQGIEEQSWQGKLVANRWQDEQLDRSCFSLLCEWRTAPTYTIAALEELYQQLLPTKVYSTKKAKTSGDLDVRCRLCGKGQESVAHVLAGCSALAQTAYLTRHNAAFKILFFELLRDHGLVETVPPWYSPTQPKPIYEGDRVTAYWDVPVFADQTEVRANRIDGRIVNKARKTVTLLEMSCPWVDNRDHKDGEKTMKYAPLRLELKRQYPGFNIVQYNIIIDVLGGYSKDLKKSVRELVGSERSTAVLGRMQKSVVSSSLKIARSLKIMG

SEQ ID NO: 6617 - protein, 1115 aa, Acropora awi
MSSNMQQSTQNAEVDLHITSSTQTPLGPANASINTSTGLDTSIDEVPSELAQLAAQFLASVKQSPGDFSGRSYDTRTKQKPTGNDIDNVNTAVRELLKCNTVPEPSEDPFGYLWMANCVLYSVIIAFYVCKGWKKRESNKDGAGRSKFNEMAKEKYEGQASEIRAKLSKAKAEIERIKTNGKITKKGKRNRARLMRECKKLTVANLVAYMEKEKSNLRRLKRGYWSRKKQHEARQINRQFQLDPRRVYGNLKEMVEAQGDSDKPKYVHRLQDNRRQDRMFANIEEAASFWRSLWEAEGTGDTGAEWLEEVRCAIREKVPEPTEENFALSEARAAKVIGKKRNWSAPGPDHLANYWRKKAKCLHEGIAISFEAIARSYQEIPMWFAEGKSLLIPKPGEFTSANQRPITCLNTMYKWFSSCLLKPVDQHLDTYGLMEGEQRGAKENCSGTMDNLLVDRMVCQDSKRGRRNLSMAWVDVRKAYDSVDHKWLKEMFALHRFPTWIGNLIARLCGRWNTKIMAVTKQGVEISERIAFRKGLPQGDALCPRLFTLYLNPIAWKLKASEGYRLSKPISAKITDLLYIDDLKIYAASQAKLERIMKGVRNAMEDVGLQWNERKCAVVHVRRGRLQESEENRIGAGEAIASLREDAQYKFLGVLENVKQQDGLVLEQAEKEYLNRLSVVWSSPLSDYYKVLATNQFALLVMSYFMWTQVWPIADLQRIDRETRKIMVENGARHPLASTDQPYIPRSSGGRGLKSVESEYKLIKIKSAVKLCANTDPTLKLVREFEERAVEKGRRSMLKDASDFARELGIELELEHPEPVGRTENGELIDKKKIRVFAKKALYTKRRQGIEEKSWQGKLVANRWQDEQLDRSCFSLLCEWRTAPTYTIAALEQLYQQLLPTKVYSTKKAKTSGDLDVRCRLCGKGQESVAHVLAGCSALAQTAYLTRHNAAFKILFFELLRDHGLIETVPPWYSPTQPKPIYEGDRVTAYWDVPVFADQTEVRANRIDGRIVNKARKTVTLLEMSCPWVDNRDHKDEEKTMKYAPLRLELKRQYPGFNIVQYNIIIDVLRGYSKDLKKSVRELVGSARSTAVLGRMQKSVVSSSLKIARSLKIMG

SEQ ID NO: 6618 - protein, 921 aa, Acropora nasuta
MRECKKLTVANLVAYLEKEKSYLKRLKRGYWSRKKQHEARQINRQFQLDPRRVYGNLKEMVEAQGDSDKPKYDHGLQDNRRQDRMFTNIEEAASFWRSLWEAEGTGDTGAEWLEEVRCAIREKVPEPTEENFALSEARAAKVIGKKRNWSAPGPDRLANYWWKRAKCLHEGIAISFEAIARSYQEIPMWFAEGKSSLIPKPGEFTSVNQRPITCLNTMYKWFSSCLLKPVDQHLNTYGLMEGEQRGAKENCSGTMNNLLVDRMVCQDSQRGHRNLSMAWVDVRKAYDSVDHKWLKEMFALHRFPSWIGNLIARLCGRWNTKITAITKQRVEISERIAFRKGLPQGDALCPRLFTLCLNPIAWKIKASEGYRLSKPISAKITDLLYIDDLKIYAASEAKLEWIMKGVRNAMEDVGLQWNERKCAVVHVRRGRLQESEENRIGAGEAIASLREDAQYKFLGVLENVKQQDGLVLEQAEKEYLKRLSVVWSSPLSDYYKVLATNQFALPLMSYFMWTQVWPIADLQRIDRETRKIMVENGARHPLASTNQLYIPRSSGGRGFKSVESEYKLIKIKAAVKLCANTDPTLKLVREFEERAVEKGRRSMLKDASGFARELGIELELEHPEPVGRTENGELIDKKKIGVFAKKALYIKRRQGIEEQSWQGKLVASRWQGEKLDRSCFSLLCEWRTAPTYTIAALEELYQQLPPTKIYSTKKAKTSGDSDVRCRLCGKGQESVAHVLAGCSALAQTAYLTRHNAAFKILFFELLRDHGLVETVPPWYSPTQPKPIYEGDRVTAYWDVPVFADQTEVRANRIDGRIVNKARKTVTLLEMSCPWVDNRDHKDEEKTMNYAPLRLELKRQYPGFNIVQYNIIIDVLGGYSKDLKKSVRELVGSERSTEVLGRMQKSVVSSSIKIARSLKIMG

SEQ ID NO: 6619 - protein, 991 aa, Montipora capitata
MANCVLYSVIIAFYVCKGWKKRESNKDGAGRSKFNEMAKEKYEGQASEIRAKLSKAKAEIERIKTNGKITKKGKRNRAELKKECKTLTVANLVAYMEKEKSNLRRLKRGYWSRKKQHEARQINRQFQLDPRRVYGNLKEMVEAQGDSDKPKYDHGLQDNRRQDRMFTNIEEAASFWRSLWETEGTGDTGANWLEEVRCAIREKVPEPTEENFTLSEARAAKVIGKKRNWSAPGPDRLANYWWKRAKCLHEGIAISFEAIARSDQEIPMWFAEGKSSLIPKPGEFTSANQRPITCLNTMYKWFSSCLLKPVDQHLDTYGLMEGEQRGAKEKCSGTMDNLLVDRMVCQDSQRGRRNLSMAWVDVRKAYDSVDHKWLKEMFALHRFPTWIGNLIARLCGRWNTKITAVTKQGVEISERIAFRKGLPQGDALCPRLFTLCLNPIAWKLKASEGYRLSKPISAKITDLLYIDDLKIYAASEAKLEWIMKGVRNAMEDVGLQWNERKCAVVHVGRGRLQESEENRIGAGEAIASLREDAQYKFLGVLENVKQQDGLVLEQAEKEYLKRLSVVWSCPLSDYYKVLATNQFALPVMSYFMWTQVRPIADLQRIDRETRKIMVENGARHPLASTDQLYIPRCSGGRGLKSVESEYKLIKIKAAVKLCANTDPTLKLVREFEERAVEKGRRSMLKDASGFARELGIELELEHPEPVGRTENGELVDKKKIGVLAKKALYTKRRQGIEEQNWQGKLVANRWQDDQLDRSCFSLLCEWRTAPTYTIAALEELYQQLLPTKVYSTKKAKTSGDSDVRCRLCGKGQESVAHVLAGCSALAQTAYLTRHNAAFKILFFELLRDHGLVETVPPWYSPTQPKPIYEGERVTAYWDVPVFADQTEVRANRIDGRIVNKARKTVTLLEMSCPWVDNRDHKDEEKTMKYAPLRLELKYNIIIDVLGGYSKDLKKSVTELVGSERSTAVLGRMQKSVVSSSLKIARSLKIMG

SEQ ID NO: 6620 - protein, 862 aa, Acropora intermedia
MVEAQGDSDKPKYDHGLQDNRRQDRMFTNIEEAASFWRSLWEAEGTGDTGADWLEEVRCAIREKVPEPTEENFALSEARAAKVIGKKRNWSAPGPDRLANYWWKRAKCLHEGIAISFEAIARSYQEIPMWFAEGKSSLIPKPGEFTSANQRPITCLNTMYKWFSSCLLKPVDQHLDTYGLMEGEQRGAKENCSGTMDNLLVDRMVCQDSQRGRRNLSMAWVDVRKAYDSVDHKWLKEMFALHRFPTWIGNLIARLCGRWNTKITAVTKQGVEISERIAFRKGLPQGDALCPRLFTLCLNPIAWKLKASEGYRLSKPISAKITDLLYIDDLKIYAASEAKLEWIMKGVRNAMEDVGLQWNERKCAVVHVRRGRLQESEENRIGAGEAIASLREDAQYKFLGVLENVKQQDGLVLEQAEKEYLKRLSVVWSSPLSDYYKVLATNQFALPVMSYFMWTQVWPIADLQRIDRETRKIMVENGARHPLASTDQLYIPRSSGGRGLKSVESEYKLIKIKAAVKLCANTDPTLKLVREFEERAVEKGRRSMLKDASGFARELGIELELEHPEPVGRTENGELIDKKKIGVFAKKALYTKRRQGIEEQSWQGKLVANRWQDDQLDRSCFSLLCEWRTAPTYTIAALEELYQQLLPTKVYSTKKAKTSGDSDVRCRLCGKGQESVAHVLAGCSALAQTAYLTRHNAAFKILFFELLRDHGLVETVPPWYSPTQPKPIYEGDRVTAYWDVPVFADQTEVRANRIDGRIVNKARKTVTLLEMSCPWVDNRDHKDEEKTMKYAPLRLELKRQYPGFNIVQYNIIIDVLGGYSKDLKKSVRELVGSERSTAVLGRMQKSVVSSSLKIARSLKIMG

SEQ ID NO: 6621 - protein, 901 aa, Acropora acuminata
MADGVTQQPVSTNETTRGRRRRGRVIWTVQMNRDLLECKEMAQQLVASVEPPLYPNGRKKGYMRIMWEKWNEKGYAGLDFSSQNLRDQAGHLEKSKGNVRDTIIRSLESPNNEQSEEGNFILQPEIMSSNMQQSTQNAEVDLHITSFTQTPLRPDNASINTSTGSDTSIDEVPSELAQLAAQFLASVKQSPGDFSDFNTMYKWFSSCLLKPVDQHLDTYGLMEGEQRGAKENCSRTMDNLLVDRMVCQDSQRGRRNLSMAWVDVRKAYDSVDHKWLKEMFALHRFPTWIGNLIARLCGRWNTKITAVTKQGVELSERIAFRKGLPQGDALCPRLFTLCLNPIAWKLKASEGYCLSKPISAKITDLLYIDDLKIYAASEAKLEWIMKGVRNAMEDVGLQWNERKCAVVHVRRGRLQESEENRIGAGEAIASLREDAQYKFLGVLEHVKQQDGLVLEQAEKEYLKRLSVVWSSPLSDYYKVLATNQFALPVMSYFMWTQVWPIADLQRIDRETRKIMVENGARHPLASTDQLYIPRSSGGRGLKSVESEYKLIKIKAAVKLCANTDPTLKLVREFEEMAVKKGRRSMLRDASGFARELGIELELEHPEPVGRTENGELIDKMKIGVFAKKALYTKRRKGIEEQSWQGKLVANRWQDEQLDRSCFSLLCEWRTAPTYTIAALEELYQQLLPTKVYSTKKAKTSGDLDVRCRLCGKGQESVAHVLAGCSALAQTAYLTRHNAAILFFELLRDHGLVETVPPWYSPTQPKPIYEGDRVTAYWDVPVFADQTEVRANRIDGRKVNMARKTVILLEMSCPWVDNRDHKDEEKTIKYAPLRLELKRQYPGFNIAQYNIIIDVLGGYSKDLKKSVRELVGSERSTAVLGRMQKSVVSSSLKIARSLKIMG

SEQ ID NO: 6622 - protein, 921 aa, Acropora awi
MRECKKLTVANLVAYMEKEKSNLRRLKRGYWSRKKQHEARQINRQFQLDPRRVYGNLKEMVEAQGDSDKPKYDHGLQDNRRQDRMFTNIEEAASFWRSLWEAEGTGDTGADWLEEVRCAIREKVPEPTEENFALSEARAAKVIWKKRNWSAPGPDRLANYWWKRAKCLHEGIAISFEAIARSYQEIPMWFAEGKSSLIPKPGEFTSANQRPITCLNTMYKWFSSCLLKPVDQHLDTYGLMEGEQRGAKENCSGTMDNLLVDRMVCQDSQRGRRNLSMAWVDVRKAYDSVDHKWLKEMFALHRFPTWIGNLIDRLCGRWNTKITAVTKQGVEISERIAFRKGLPQGDALCPRLFTLCLNPIAWKLKASEGYRLSKPISAKITDLLYIDDLKIYAASEAKLEWIMKGVRNAMEDVGLQWNERKCAVVHVRRGRLQESEENRIGAGEAIASLREDAQYKFLGVLENVKQQDGLVLEQAEKEYLKRLSVVWSSPLSDYYKVLATNQFALPVMSYFMWTQVWPIADLQRIDRETRKIMVENGARHPLASTDQLYIPRSSGARGLKSVESEYKLIKIKAAVKLCANTDPTLKLVREFEERAVEKGRRSMLKDASGFARELGIELELEHPEPVGRTENGELIDKKKIGVFAKKALYTKRRQGIEEQSWQGKLVANRWQDDQLDRSCFSLLCEWKTAPTYTIAALEELYQQLLPTKVYSTKKAKTSGDSDVRCRLCGKGLESVAHVLAGCSALAQTAYLTRHNAAFKILFFELLRDHGLVETVPPWYSPTQPKPIYEGDRVTAYWDVPVFADQTEVRANRIDGRIVNKARKTVTLLEMSCPWVDNRDHKDEEKTMKYAPLRLELKRQYPGFNIVQYNIIIDVLGGYSKDLKKSVRELVGSERSTAVLGRMQKSVVSSSLKIARSLKIMG

SEQ ID NO: 6623 - protein, 992 aa, Acropora microphthalma
MTERPPLPKITVNRKAELLIKQANQAIQLEIAEETPDLNNINLLKYVTAYVISEKLGKTPKPPKRRSNTQLQPKWKTRIENQIKGMRADLSILSDMAQKSEIQKISKKKQKIKRKYKITTNQDLQTTRESLKMKILAKAQRIRRYEKRSKQYKQNQMFANNRKKFFRNLGKEQVPVEKPPKKEATETFWRNILANDREHNHSAEWIKREELKYIDTECQPWEDITQDELQTALMKTSNWKSPGPDAVPNFWLKQLTALHQHLLNAYNQAIEHPESLPNWFTTAQTYLLPKCKDTENPKNYRPIACLSTSYKVLTSILTERSYTHITKNNILPEEQRGCIRNSYGCKDQLLINKMIIEDCKKKKKNLSMSWIDYRKAYDSVPHSWILKTLQMYRFNEKLVKFMETSMRNWKTTMKLCYNDGCITTDQIKIKRGIFQGDSFSPLLFCLALVPLTSELATSGYGYKISNTSAPISHLFYMDDLKLYSKNDQEQVGELKIVKQFSDDIGMEFGLEKCAKASFKKGKLASTGNIIIDEYTAIEELNQEGIYKYLGVDESDGIQHSKMKEKIRKEYLRRVRLILRTELNGKNKIEAVNSLAVPVVQYSFGIIDWKISELKKIDTKTRKLLNMHKMLHPKADVERLYIPRKDGGRGLIEVETAFKIATIGLDHYLKNKDGQYPKQVLEHDTSKAKNSVNKNAIKFKGEVPISEFENKEDKSASENAKSLKNMIKSKMKSVKKEKWKNKALHGQYPKLLEKPHVDIVTTNKWLSSNLKGETEGLLVAAQDQALNTRNYQKVICGQKVESKCRMCSQYEETVDHIVSGCEVLAKTEYISRHDKAAAYLHWNICQDHDIEVIDKWYEHKPESVTHNKDSKITIMWDMPVNTDRTITANRPDIIIKDSVNSTCKLIDMSIPSDRNIALKEIEKKSKYKDLELEIQRMWQMKTEVIPVVVGALGTIKKGMVENIKRVSERANVTETQKISMLGSARILRKVLNV

SEQ ID NO: 6624 - protein, 1202 aa, Acropora microphthalma
MSSRNIRNSYRIARRAGQQGARPSVSDQAEVEKLSTDLPSQPSVEANPNESLSQQGPSTLERPATNVDRRSTRQKWTREDYIEVMFCYYMAKADPSEGVTKDTYRIWRGRNPNQRPNLTDNALMNQRRFIEKQNKLTGIEIDEIKQRIESELNVQNSQTDTEVDDVAVEEANNAIEETKVDEVDPSQNPSVIEDLAKEIRRARAEWENTSMTERPPLPKITVNRKAELLIKQANQAIQLEIAEETPDLNNINLLQYVTAYVISEKLGKTPKPPKRRSNTQLQPKWKTRIENQIKGMRADLSILSDMAQKSEIQKISKKKQKIKRKYKITTNQDLQTTRESLKMKILAKAQRIRRYEKRSKQYKQNQMFANNRKKFFRNLGKEQVPVEKPPKKEATETFWRNILANDREHNHSAEWIKREELKYIDTECQPWEDITQDELQTALMKTSNWKSPGPDAVPNFWLKQLTALHQHLLNAYNQAIEHPESLPNWFTTAQTYLLPKCKDTENPKNYRPIACLSTSYKVLTSILTERSYTHITKNNILPEEQRGCIRNSYGCKDQLLINKMIIEDCKKKKKNLSMSWIDYRKAYDSVPHSWILKTLQMYRFNEKLVKFMETSMRNWKTTMKLCYNDGCITTDQIKIKRGIFQGDSFSPLLFCLALVPLTSELATSGYGYKISNTSAPISHLFYMDDLKLYSKNDQEQVGELKIVKQFSDDIGMEFGLEKCAKASFKKGKLASTGNIIIDEYTAIEELNQEGIYKYLGVDESDGIQHSKMKEKIRKEYLRRVRLILRTELNGKNKIEAVNSLAVPVVQYSFGIIDWKISELKKIDTKTRKLLNMHKMLHPKADVERLYIPRKDGGRGLIEVETAFKIATIGLDHYLKNKDGQYPKQVLEHDTSKAKNSVNKNAIKFKGEVPISEFENKEDKSASENAKALKNMIKSKMKSVKKEKWKNKALHGQYPKLLEKPHVDIVTTNKWLSSNLKGETEGLLVAAQDQALNTRNYQKVICGQKVESKCRMCSQYEETVDHIVSGCEVLAKTEYISRHDKAAAYLHWNICQDHDIEVIDKWYEHKPESVTHNKDSKITIMWDMPVNTDRTITANRPDIIIKDSVNSTCKLIDMSIPSDRNIALKEIEKKSKYKDLELEIQRMWQMKTEVIPVVVGALGTIKKGMVENIKRVSERANVTETQKISMLGSARILRKVLNV

SEQ ID NO: 6625 - protein, 1202 aa, Acropora florida
MSSRNIRNSYRIARRAGQQGARPPVSDQAEAEKLSTDLPSQPSVEANPNESLSQQGPSTLERPATNVDRRSTRQKWTREDYIEVMFCYYMAKADPSEGVTKDTYRIWRGRNPNQRPNLTDNALMNQRRFIEKQNKLTGIEIDEIKQRVESELNVQNSQTDTEVDDVAVEEANNAIEETKVDEVDPSQNPSVIEDLAKEIRRARAEWENTSMTGRPPLPKITVNRKAELLIKQANQAIQLEIAEETPDLNNINLLQYVTAYVISEKLGKTPKPPKRRSNTQLQPKWKTRIENQIKGMRADLSILSDMAQKSEIQKISKKKQKIKRKYKITTNQDLQTTRESLKMKILAKAQRIRRYEKRSKQYKQNQMFANNRKKFFRNLGKEQVPVEKPPKKEATETFWRNILANDREHNHSAEWIKREELKYIDTECQPWEDITQDELQIALMKTSNWKSPGPGAVPNFWLKQLTALHQHLLNAYNQAIEHPESLPNWFTTAQTYLLPKCKDTENPKNYRPIACLSTSYKVLTSILTERSYTHITKNNILPEEQRGCIRNSYGCKDQLLINKMIIEDCKKKKKNLSMSWIDYRKAYDSVPHSWILKTLQMYRFNEKLIKFMETSMRNWKTTMKLFYNDGCITTDQIKIKRGIFQGDSFSPLLFCLALVPLTSELATSGYGYKVSNTSAPISHLFDMDDLKLYSKNDQEQVGELKIVKQFSDDIGMEFGLEKCAKASFKKGKLASTGNIIIDEYTAIEELNQEGIYKYLGVDESDGIQHSKMKEKIRKEYLRRVRLILRTELNGKNKIEAVNSLAVPVVQYSFGIIDWKISELKKIDTKTRKLLNMHKMLHPKADVERLYIPRKDGGRGLIEVETAFKIATIGLDHYLKNKDGQYPKQVLEHDTSKAKNSVTKNAIKFKGEVLISEFENKDDKSASENAKALKIMIKSKMKSVRKEKWKNKALHGQYPKHLEKPHVDIVTTNKWLSSNLKGETEGLLVAAQDQALNTRNYQKVICSQKVESKCRMCSQYEETVDHIVSGCEVLAKTEYISRHDKAAAYLHWNICQDHDIEVIDKWYDHKPESVTHNKDSKITIMWDMPVNTDRTITANRPDIIIKDSVNSTCKLIDMSIPSDRNIALKEIEKKSKYKDLELEIQRMWQMKTEVIPVVVGALGTIKKGMVENIKRVLERDNVTETQKISMLGSARILRKVLNV

SEQ ID NO: 6626 - protein, 1202 aa, Acropora nasuta
MSSRNIRNSYRIARRAGQQGARPSVSDQAEVEKLYTDLPSQPSVEANPNESLSQQGPSTLERPATNVDRRSTIQKWTREDYIEVMFCYYMAKADPSEGVTTDTYRIWRRRNPNQRPNLTDNALMNQRRFIEKQNKLTGIEIDEIKQRIESELNVQNSQTDTEVDDVAVEEANNAIEETKVDEVDPSQNPSVNEDLAKEIRRARAEWENTSMTERPPLPKITVNRKAELLIKQANQAIQLEIAGETPDLNNINLLQYVTAYVISEKLGKTPKPPKRRSNTQLQPKWKTRIENQIKGMRADLSILSDMAQKSEIQKISKKKQKIKRKYKITTNQDLQTTRESLKMKILAKAQKIRRYEKRSKQYKQNQMFANNRKKFFRNLGKEQVSVEKPPKKEATETFWRNILANDREHNHSAEWIKREELKYIDTECQPWEDITQDELQTALMKTSNWKSPGPDAVPNFWLKQLTALHQHLLNAYNQAIEHPKSLPNWFPTAQTYLLPKCKDTENPKNYRPIACLSTSYKVLTSILTERSYTHITKNNILPEEQRGCIRNSYGCKDQLLINQMIIEDCKKKKKNLGMSWIDYRKAYDSVPHSWILKTLQMYRFNKKLIKFMETSMRNWKTTMKLCYNDGCITTDQIKIKRGIFQGDSFSPLLFCLALVPLTSELATSGYGYKISKTSAPISHLFYMDDLKLYSKNDQEQVGELKIVKQFSDDIGMEFGLEKCAKASFKKGKLASTGNIIIDEYTAIEELNQEGIYKYLGVDESDGIQHSKMKEKIRKEYLRRVRLILRTELNGKNKIEAVNSLAVPVVQYSFGIIDWKISELKKIDTKTRKLLNMHKMLHPKADVERLYIPRKDGGRGLIEVETAFKIATIGLDHYLKNKDGQYPKQVLKHDTSKAKNSVNKNAIKFKGEVPISEFENKEDKSASENAKALKNMIKSKMKSVKKEKWKNKALHGQYPKLLEKPHVDIVTTNKWLSSNLKGETEGLLVAAQDQALNTRNYQKVICGQKVESKCRMCSQYEETVDHIVSGCEVLAKTEYISRHDKAAAYLHWNICQDHDIEVIDKWYEHKPESVTHNKDSKITIMWDMPVNTDRTITANRPDIIIKDSVNSTCKLIDMSIPSDRNIALKEIEKKSKYKDLELEIQRMWQMKTEVIPVVVGALGTIKKGMVENIKRVSERANVTETQKISMLGSARILRKVLNV

SEQ ID NO: 6627 - protein, 1158 aa, Bemisia tabaci
MARRPTNNTNPAPSVSSTSQPTTTKAGKLRQRMAWTLSMNQHVMRCYYLASKMETIPGYRAEMRKLFLDRFPDCKNVSEQRLMDQKRVILKSCKMSADDLQNIKDEVQLEISRGECEDEENLLEADPASVSCTDGPVKQRDIVPGLHTDEGIVHAEHDECATDTADENVIKADTLEVAFIAEMIKWQGVSPNLRQSLPKLPYTPKLFACIERMNRIIPAHIREESTLEEVHCIIYCAAQAITQAVKGPTNHGRRGIKLNAPRWQLRIERKVANLRQEIGRVTQCVKGNTSKRLRAKMAHVNEENILTHLDTLKQKLKVQAARLRRYKKSYQRHLDNALFQRNERAFYRRMGNAADVRNAPEEIPSKDDVTRFWRSIWSEAKEHNSTAPWIEQETVRHAHITHEGEVEITKEDVRRATLHIHNWKAPGPDKVHNFWLKKLTCVHTQLSRSIQDIITHPDKMPIFLTEGVTFAKHKGGDSKDPSEYRPITCLSTLYKVITSIVTRLIGRHVAKWKILCEEQKGCRKGSFGCKELLIIDSVVLKQAVKERRNLHVGYIDYKKAFDSMPHSWLIHVLNIYRVHPVIVHFLKSILASWRTRIIIQGSASELETEVIHILRGIFQGDSLSALWFCLGLNPLSNCIREMKVGFPLRRNRQVLHVINHLAYLDDIKIYASQRDQLHQLFKVIEEVSDDIGMMLGVPKCATLHIENGVIVREDGFVTNSGDVINSLTMEDAYKYLGMWQSSSIQKVRVKEHLVNTFVDRLSAILKTSLNSKHTTKAINTFAIPALAYSVGVVPWSDTELEGLNRKVRTLMTKWNKHHPRAAKERIHIPRKQGGRGILDVKEVCHSQVRNLRNYFLSRNDSTLHAAVNAIDKSYTPLRLACHDLNEEQPSDPVAGQLEAWASKPLHGRFYHSVAQDHVSEGKSFLWLSKGQLYPETEGFVLAIQDQVISTRNYKRYILKEKIESDKCRKCNAASETIDHITSGCALLAGKEYTERHNNMAKIIHLALANDRELCDTAEPYYKYCPATVLENQRFRLYWDNPILTDKTIMANRPDIVLVDKRDRTAYIIDISIPNNHNLELKYQEKMVKYLPLAAEMKRLWNLNIVCIKPLIMSVTGIVPKSLVQHLRDLGINSYLLHSMQKSVVISTSSIVRSFLNIE

SEQ ID NO: 6628 - protein, 1158 aa, Bemisia tabaci
MARRPTNNTNPAPSVSSTSQPTTTKAGKLRQRMAWTLSMNQHVMRCYYLASKMETIPGYRAEMRKLFLDRFPDCKNVSEQRLMDQKRVILKSCKMSADDLQNIKDEVQLEISRGECEDEENVLEAEPASVSCTDGPVEQRDIVPGLHTDEGIVHAEHDECATDTADENFIKADTLEVAFIAEMIKWQGVSPNLRQSLPKLPYTPKLFACIERMNRIIPAHIREESTLEEVHCIIYCAAQAITQAVKGPTNHGRRGIKLNAPRWQLRIERKVANLRQEIGRVTQCVKGNTSKRLRAKMAHVNEENLLTHLDTLKQKLKVQAARLRRYKKSYQRHLDNALFQRNERAFYRRMGNAADVRNAPEEIPSKDDVTRFWRSIWSEAKEHNSTAPWIEQETVRHAHITHEGEVEITKEDVRRATLHIHNWKAPGPDKVHNFWLKKLTCVHTQLSRSIQDIITHPDKMPIFLTEGVTFAKHKGGDSKDPSEYRPITCLSTLYKVITSIVTRLIGRHVAKWKILCEEQKGCRKGSFGCKELLIIDSVVLKQAVKERRNLHVGYIDYKKAFDSMPHSWLIHVLNIYRVHPVIVHFLKSILASWRTRIIIQGSASELETEVIHILRGIFQGDSLSALWFCLGLNPLSNCIREMKVGFPLRRNRQVLHVINHLAYLDDIKIYASQRDQLHQLFKVIEEVSDDIGMMLGVPKCATLHIENGVIVREDGFVTNSGDVINSLTMEDAYKYLGMWQSSSIQKVRVKEHLVNTFVDRLSAILKTSLNSKHTTKAINTFAIPALAYSFGVVPWSDTELEGLNRKVRTLMTKWNKHHPRAAKERIHIPRKQGGRGILDVKEVCHSQVRNLRNYFLSRNDSTLHAAVNAIDKSYTPLRLACHDLNEEQPSDPVAGQLEAWASKPLHGRFYHSVAQDHVSEGKSFLWLSKGQLYPETEGFVLAIQDQVISTRNYKRYILKEKIESDKCRKCNAASETIDHITSGCALLAGKEYTERHNNMAKIIHLALANDRELCDTAEPYYKYCPATVLENQRFRLYWDNPILTDKTIMANRPDIVLVDKRDRTAYIIDISIPNNHNLELKYQEKMVKYLPLAAEMKRLWNLNIVCIKPLIMSVTGIVPKSLVQHLRDLGINSYLLHSMQKSVVISTSSIVRSFLNIE

SEQ ID NO: 6629 - protein, 949 aa, Girardia tigrina
MLSSFTSHIYQNKDLHVRRIYRGSNRYKGKPTLPIRTTYITRPKKAVSSILHRNTEAPVIPSINEIKSFFKEAGKQPPTFAGARLLLDEWFPENQNLPAFEFRIPSAQQIAKYIKFCGKSAAGIDLISFMDLKNADYEGHLLQPIFKFIIENQISPTDWKTSRTIMIPKPGKDDYSVISAWRPITITSTIYRLLMKYLTWEMYQWILFNNLISIGQKSMGKFEGCHDHNAMLNLLIQDVRRFNWKKSKAIRMKKQLLIVFLDFTNAFGSVPINTLIHVLRRFNVGESAIKLINHLYQKNSTNVTCGTTKIDNLPIRRGVKQGCPLSMLLFNLFINIILRAIESLPGKMGYELGSDDIRILAYADDIALISESGDNLQTMIHLAQSIGDTLGMKFNPPKCALLPVPFNKEIVPPKVNGQKIGLVSKGKPYKYLGTKRTFFRNIDIKDILQKCLKETKLIVESDLHPHQKVHAYNTFIHSQLPFHLRHGRIPLANFTTNSTNAPAYDPAVRQLLVRNFGLIKGAPVDFFYASKEAGGAQIASALDEYIIQSIVYIMRLINNNDPRLVSAIKNDLIKHLGTKNLNFSGFESAIRFINTDQTHFTHLSKSEWVRIQIARQQLRKLYEIETTVTYSADNLTICFKMGNDTLVISSASKAQMKSIHESLAGFIRLAHLIKLQKHGWAKLTFVNSTHHAALNKRIINGHVSYAIWFFIHRARLGYLPTKHLLCLEENLCRKCGSKKETMSHALVSCTMMCPMVNARHDQMCDTLERLILNRFKFTMEREFVDKTVTTSKLRPDFILHLPEKVVLLEVKCPFDSNLSLSLRLGQIQEKYSRLIPDYEKKYPGKEILIMSFVVGVLGSWGPCNSDTLTLIGYSVAEIENLKTQLMLQNITSSMHQWAAFVAKQAVPPTAADDPDDNMEDEADDNLPILSDDEEIAFLLKIEDDLAGRF

SEQ ID NO: 6630 - protein, 951 aa, Girardia tigrina
MLSTFTSSIYQRKELHVRRIYKGTNSYKGRPTLPIRTTYITRPKKAVSAILRRKTETATTPSEKEVKSFFKDAGKKQRKFVNGNLLLSDWFPDVQSTPTFEFRTPTAQQIAKYIKFCGKSAAGMDLISFADLKNSDFEGHLLQPIFAFIIQNQICPTDWKTSRTIMIPKPGKDDYSVISAWRPITITSTVYRVLMKYLTWELYQWILFNNLISIGQKSMGKFEGCHDHNAMLNLLIQDARRFNWKKSKAIQRKKQLLIVFLDFTNAFGSVPISTLLHVLRRFNVGESAIKLIEHLYLNNYTNVTCGATKIDNLPIRRGVKQGCPLSMLLFNLFINIILRAIEALPGRMGYQLGTDDIRILAYADDIAIVSESESDLQSMIYLAQSIGDTLGMKFNPPKCALLPVPFSKDIKPPKVNGQTIGLVTKGKPYKYLGTKRTFFRNIDIKDILKKCLKETETIIESELHPHQKVHAYNMFIHSQLSFHLRHGRIPLANFTTNNKYSQAYDPAIRQLFVKNFGLLKGAPVDFFYVSKEAGGAQIACALDEYLIQSIVYIFRLVNNNDPRLVSAIKNDLIHHLGTKNIVFDNFQSAVRFLNTDKDNFTHLSKTEWVRIQIARQQLSKLYGIETTISFSVDNLTISFKLENDVLIINSANRGQMNSIHESLAGFIRLAHLIRLQKHSWAKITFINSTHNAALNKRIINGHISYGIWFFIHRARLGYLPTKHLLGLEENLCRKCGQKKETMSHALVSCTVMCPMVNARHDQMCDSLERLILNRFPYTMEREFVDKTVTSSKLRPDFILHLPEKVVLLEVKCPFDSNLSLSLRLEQIQTKYSNLIPDYQRKYPSKEVIIMSFCVGVLGSWGPCNSDTLNLIGYSDAEIENLKTQLMLQNINSSMRQWAAFVAQQPVNPIVAVAPDDDMEEEITDESPIFSDDEEIAFLLKIEDELAGQFHS

SEQ ID NO: 6631 - protein, 1306 aa, Coccinella septempunctata
MKMVITRSLGNKSLPGDRQGMSGAGAGHDSMRDVGGRMLRKRAPAAKEATAPKQQQQPTSPIQLPTRTAEGAAQDIQPVLTQAGLVRKRMKWTTSMNETIVRIYNSITGQGQNTNNYRKRLHEEFCIAYPNLNVTEQRVADQYRVILRNELIPTARIDAIKRELQHPLAIENNTNTSDEIHIPGQQHPEDIDTESPSCKANEPEHQDDREDHRQVDSDMRKYFAELEGTDPLHRVAPPRLNTSKKLSLIIDILNKDVLPEYLQNGSSLEYLHLVFHCAALTTAKTMLAKIRQTNNDGPKLHKLHAPAWQKRLQHKTERLRRDIGRLTEYLNGNRGRKVVKAAKDIMDRNRTHTERETENATAHHCLDTLKQKLSLYAERLRRYKSNYSRKRDNNSFEKSEESFYRSLTSSDGENGKLPPKEAIEQFWTEQLSTKPQFNGDTGWIEDEKSEAIKYEPMQHDMITIEEVKSAIRGLHNWKAPGPDGLQNFWIKKLWIMHDKLTSAINDVIVNPERMPVFLTHGTTYLLPQDQRNTEDPSKYRPITCLPTMYKLITSCISNRIHNHCERNNIIAMQQKGCTKDSRGCKEQLIIDSVICNQAFSKRRNLYAAYIDYKKAFDSIPHEWLLTILKIYKVDPNIVKFLKNAMSTWRTSLQMKAADCSITTAPIPIRRGIFQGDSLSPLWFCMALNPLSHRLNSTDYGFSIKSGSRTMMKLNHLLYMDDLKLFASTKKQMQLMLKMVEGFSEDIKMKFGLEKCRLQNITRGKIEDGTFKLKEGAEIEALKEGDTYKYLGIKQARKINQTQMKKELTEEFTRRLRRIMRTGLNSKNLIKAINTYACSALSYSFGIISWTTTDLAALQRKIRTMLTKHNKHHPKSSIERTELPRHLGGRGIVDLSNRMSQEIEGLRNYFLSKAASSELHRVVCVADTSTPLKLHQDHLETVEHYAESKMQKLIGKSLHGRHQKEVNDDYVDISASNYWLTSGRLFPETEGFMLAIQDQVIPTRNYMRYIAKDASVADDSCRYGCATHETIQHITGGCQKFAGTEYKNRHDAVAKILHQELALKHQLLTSKRVPYYNYHPDAVLENEHHKLYWDRTVLTDRKITHNRPDLILLNKDEDTALFIDVAIPNNNNLLDRHTEKISKYRDLEEQTRRQWKLKDIKTIPIVISSTGLIPKKLLENLRKLQLDENVIIKSCRRRYCSERRELYASTWGMQRNTVCSDRKCGWSRNPTYSREPRSDPNPTTTTSPKTWKGLQQSLILLISEISGISEFSSGEECESRKAKVIIKFINPFRHLKMYRSSHLKYYT

SEQ ID NO: 6632 - protein, 1188 aa, Coccinella septempunctata
MLRKRAPAAKESTAPKQQQQPTSSIQLPTRTAEGAAQDIQPVLTQAGLVRKRMKWTTSMNETIVRIYNSITGLGQNTNNYRKRLHEEFCNAYPNLNVIEQRVADQYRVILRNELIPMARIDAIKQELQRPPVTESDTNTSDEIHMPGQQQPEEIDAESPSCNPSEAEHQDDREELHRQIDSEMRRYFAELEGTYPLHRIAPPRLNTSKKLSLIIDILNKDVLPEYLQNGSSLEYLHLVFYCAALTTAKTIGVKIRRTNNDGPKLHKLHTPAWQKRLQHKTERLRRDIGRLTEYVNGNRGRKVVKAAKEIMDRNRTHTERETENATAHHCLDTLKQKLSLYAERLRRYKSNYSRKRDNNSFEKSEETFYQSLTSSDGENGKLPPKEAIEQFWTEQLSTKPQFNGDTGWIEDEKSEAVKYEPMQHDIITIEEVKSAIRGLHNWKTPGPDGLQNFWIKKLWIMHDKLTSAINDVIENPERMPIFLTHGTTYLLPKGQRNTEDPSKYRPITCLPTMYKLITSCISNRIHNHCERNNIIAMQQKGCTKESRGCKEQLIIDSVICNQAFSKRRNLYAAYIDYKKAFDSIPHEWLLTILNIYKVDPNIVKFLKNAMSTWRTSLQMKAADGSITTGPIPIRRGIFQGDSLSPLWFCMALNPLSHRLNSTDYGFAIKSGSRTMMKLNHLLYMDDLKLFASTKKQMQQMLKMVEGFSEDIKMKFGLEKCRLLNITRGKIEDGTFKLREGAEIEALKEGDTYKYLGIKQARKINQSQMKKELTEEFTRRLRRIMRTGLNNKNLIKAINTYACSALSYSFGIISWTTTDLAALQRKIRTMFTKHNKHHPKSSIERTELPRYLGGRGIVDLSNRMSQEIEGLRKYFLSKAASSELHRVVCVADSSTPLKLQQDHLETVEHSAESKMQKLIGKPLHGRHQNEVNHDYVDISASNYWLTSGRLFPETEGFMLAIEDQVIPTKNYMKYIAKDASVADDSCRYGCATHETIQHITGGCQKFEGTEYKNRHDAVAKILHQELALKHQLLTSKKVPYYNYHPDAVLENEHYKLYWDRTVLTDRKITHNRPDLILLNKDEDRALFIDVAIPNNNNLLDRHTEKISKYRDLEEQTRRQWKLKDIKTIPIVISSTGLIPKKLLENLRKLQLDENIYRVMQKAVLLGTARTVRKYMGNAEEHRLLRQEVQV

SEQ ID NO: 6633 - protein, 1258 aa, Coccinella septempunctata
MKMVITRSLGNKSLPGDRQGMSGAGAGHDSMRDVGGRMLRKRAPAAQEATAPKQQQQPTSPIQLPTRTAEGAAQDIQPVLTQAGLVRKRMKWTTSMNETIVRIYNSITGLGQNTKRLHEEFCIAYPNLNVTEQRVADQYRVILRNELIPTERIEAIKRELQRPPTIENNTNTSDEILMPGQQQAEETDTETPSCNASEPEHQDDREELHRQVDSDMRRYFAELEGTDPLHRVAPPRLNTSKKLSLIIDILNKDVLPEYLQNGSSLEYLHLVFHCAALTTAKTIGAKIRRTNNDGQKLHKLHAPAWQKRLQHKTERLRRDIGLLTEYLNGNRGRKVVKAAKEIMDRNRTHTERETENATAHHCLDTLKQKLSLYAERLRRYKSNYSRKRDNNSFENSEESFYRSLTSSDGENGKLPPKEAIEQFWTEQLSTKPQFNGDTGWIEDEKSEAIKYEPMQHDMITIEEVKSAIRGLHNWKAPGPDGLQNFWIKKLWIMHEKLTSAINDVIENPERMPVFLTHGTTYLLPKDQRNTEDPSKYRPITCLPTMYKLITSCISNRIHNHCERNNIIAMQQKGCTKDSRGCKEQLIIDSVICNQAFSKRRNLYAAYIDYKKAFDSIPHEWLLTILKIYKVDPNIVKFLKNAMSTWRTSLQMKAADCSITTGPIPIRRGIFQGDSLSPLWFCMALNPLSHRLNSTDYGFSIKSGSRTMMKLNHLLYMDDLKLFASTKKQMQLMLKMVEGFSEDIKMKFGLEKCRLLNITRGKIEDGTFKLKEGAEIEALKEGDTYKYLGIKQARKINQTQMKKELTEEFTRRLRRIMRTGLNSKNLIKAINTYACSALSYSFGIISWTTTDLAALQRKIRTMLTKHNKHHPKSSIERTELPRHLGGRGIVDLSNRMSQEIEGLRNYFLSKAASSELHRVVCVADTSTPLKLHQDHLETVEHSAESKMQKLIGKPLHGRHQNEVNHDYVDISASNYWLTSGRLFPETEGFMLAIQDQVIPTRNYMRYIAKDASVADDSCRYGCATHETIQHITGGCQKFAGTEYKNRHDAVAKILHQELALKHQLLTSKRVPYYNYHPDAVLENEHHKLYWDRTVLTDRKITHNRPDLILLNKDEDTALFIDVAIPNNNNLLDRHTEKISKYRDLEEQTRRQWKLKDINTIPIVISSTGLIPKKLLENLRKLQLDENIYKVMQKAVLLGTARTVRKYMGNAEEHRLLRQEVRVEQESNLQQGAEERPEPDHHHEPENLERAPTELNPFDI

SEQ ID NO: 6634 - protein, 1174 aa, Coccinella septempunctata
MKWTTSMNETIVRIYNSITGQGQNTNNYRKRLHEEFCIAYPNLNVTEQRVADQYRVILRNELIPTARIDAIKRELQHPLAIENNTNTSDEIHIPGQQHPDDIDTESPSCKANEPEHQDDREELHRQVDSDMRKYFAELEGTDPLHRVAPPRLNTSKKLSLIVDILNKDVLPEYLQNGSSLEYLHLVFHCAALTTAKTIGAKIRQTNNDGPKLHKLHAPAWQKRLQHKTERLRRDIGRLTEYLNGNRGRKVVNAAKDIMDRNRTHTERETENATAHHCLDTLKQKLSLYAERLRRYKSNYSRKRDNNSFEKSEESFYRSLTSSDGENGKLPPKEAIEQFWTEQLSTKPQFNGDTGWIEDEKSEALKYEPMQHDMITIEEVKSAIRGLHNWKAPGPDGLQNFWIKKLWIMHDKLTSAINDVIVNPERMPVFLTHGTTYLLPKDQRNTEDPSKYRPITCLPTMYKLITSCISNRIHNHCERNNIIAMQQKGCTKDSRGCKEQLIIDSVICNQAFSKRRNLYAAYIDYKKAFDSIPHEWLLTILKIYKVDPNIVKFLKNAMSTWRTSLQMKAADCSITTGPIPIRRGIFQGDSLSPLWFCMALNPLSHRLNSTDYGFFIKSGSRTMMKLNHLLYMDDLKLFASTKKQMQLMLKMVEGFSEDIKMKFGLEKCRLLNITRGKIEDGTFKLKEGAEIEALKEGDTYKYLGIKQARKINQTQMKKELTEEFTRRLRRIMRTGLNSKNLIKAINTYACSALSYSFGIISWTTTDLAALQRKIRTMLTKHNKHHPKSSIERTELPRHLGGRGIVDLSNRMSQEIEGLRNYFLSKAASSELHRVVCVADTSTPLKLHQDHLETVEHYAESKMQKLIGKSLHGRHQKEVNHDYVDISASNYWLTSGRLFPETEGFMLAIQDQVIPTRNYVRYIAKDASVADDSCRYGCATHETIQHITGGCQKFAGTEYKNRHDAVAKILHQELALKHQLLTSKRVPYYNYHPDAVLENEHHKLYWDRTVLTDRKITHNRPDLILLNKDENTALFIDVAIPNNNNLLDRHTEKISKYRDLEEQTRRQWKLKDIKTIPIVISSTGLIPKKVLENLRKLQLDENIYKVMQKAVLLGTARTVRKYMGNAEEHRLLRQEVRVEQESNLQQGAEERPEPDHHHHEPENLERAPTELIPFDI

SEQ ID NO: 6635 - protein, 1262 aa, Coccinella septempunctata
MEMVITRSLGNKSLPGDRQGMSGAGAGHDSMRDVGGRMLRKRAPAAKEATAPKQQQQPTSPIQLPTRTAEGAAQDIQPVLTQAGLVRKRMKWTTSMNETIVRIYNSITGLGQNTNNYRKRLHEEFCNAYPNLNVTEQRVADQYRVILRNQLIPTARIDAIKRELQRPLAIENNTNTSDEIHMPGQQHLEDIDTESPSCNPSEPELQDDREELHRQVHSDMRRYFAELEGTDPLHRITPPRLNTSKKLSLIIDILNKDVLPVYLQNGSSLEYLHLVFYCAALTTAKTIGAKIRGTNNNGPKLHKLYAPAWQKRLQHKTERLRRDIGRLTEYLNGNRGRKVVKAVKEIMDRNRTHTERETENATAHHCLDTLKQKLSLYAERLRRYKSNYSRKRDNNSFEKSEESFYRSLTSSDGENGKLPPKEAIEQFWTEQLSTKPHFNGDTGWIEDEKSEAIKYEPMKHDMITIEEVKSAIRGLHNWKAPGPDGLQNFWIKKLWIMHDKLTSAINDVIENPERMPVFLTHGTTYLLPKDQRNTEDPSKYRPITCLPTMYKLITSCISNRIHNHCERNNIIAMQQKGCTKDSRGCKEQLIIDSVICNQAFSKRRNLYAAYIDYKKAFDSIPHEWLLTILKIYKVDPNIVKFLKNAMSTWRTSLQMKAADCSITTGPIPIRRGIFQGDSLSPLWFCMALNPLSHRLNSTDYGFSIKNGSRTMMKLNHLLYMDDLKLFASTKKQMQLMLKMVEGFSEDIKMKFGLEKCRLLNITRGKIEDGTFKLKEGAEIEALKEGDTYKYLGIKQARKINQTQMKKELTEEFTRRLRRIMRTGLNSKNLIKAINTYACSALSYSFGIISWTTTDLAALQRKIRTMLTKHNKHHPKSSIERTELPRHLGGRGIVDLSNRMSQEIEGLRKYFLSKAASSELHRVVCVADSSTPLKLQQDHLETVEHSAESKMQKLIGKPLHGRHQNEVNHDYVDISASNYWLTSGRLFPETEGFILAIQDQVIPTRNYMKYIAKDASVADDSCRYGCATHETIQHITGGCQKFAGTEYKNRHDAVAKILHQELAVKHQLLASKKVPYYNYHPDAVLENEHHKLYWDRTVLTDRKITHNRPDLILLNKDEDRALFIDVAIPNNTNLLDRHTEKISKYRDLEEQTRRQWKLKDIKTIPIVISSTGLIPKKLLENLRKLQLDANIYRVMQKAVLLGTARTVRKYMGNAEEHRLLRQEVRVEQESNLQQGGEERPGPDHHHEPENLERAPTELNPFDI

SEQ ID NO: 6636 - protein, 1262 aa, Coccinella septempunctata
MKMVITRSLGNKSLPGDRQGMSGAGAGHDSMRDVGGRMLRKRAPAAKEATAPKQQQQPSSPIQLPTRTAEGAAQDIQPVLTQAGLVRKRMKWTTSMNETIVRIYNSITGLGQNTNNYRKRLHEEFCIAYPNLNVTEQRVADQYRVILRNELIPTARIDAIKRELQRPLAIENNTNTSDEIHIPGQQHPEDIDTESPSCKANEPEHQDDREELHRQVDSDMRRYFAELEGTDPLHRVAPPRLNTSKKLSLIIDILNKDVLPEYLQNGSSLEYLHLVFHCAALTTAKIMGAKIRRTNNDGPKLHKLHAPPWQKRLQHKTERLRRDIGRMTEYLNGNRGRKVVKAATEIMDRNRTHTERETENATAHHCLDTLKQKLSLYAERLRRYKSNYNRKRDNNSFEKSEESFYRSLTSSDRENGKLPPKEAIEQFWTEQLSTKPQFNGDTGWIEDEKSEAIKYEPMQHDMITIEEVKSAIRGLHNWKAPGPDGLQNFWIKKLWIMHDKLTSAINDVIENPERMPVFLTHGTTYLLPKDQRNTEDPSKYRPITCLPTMYKLITSCISNRIHNHCERNNIIAMQQKGCTKDSRGCKEQLIIDSVICNQAFSKRRNLYAAYIDYKKAFDSIPHEWLLTILKIYKVDPNIVKFLKNAMSTWRTSLQMKAADCSITRGPIPIRRGIFQGDSLSPLWFCMALNPLSHRLNSTDYGFSIKSGSRTMMKLNHLLYMDDLKLFASTKKQMQLMLKMVEGFSEDIKMKFGLDKCRLLNITRGKIEDGTFKLKEGAEIEALKEGDTYKYLGIKQARKINQTQMKKELTEEFTRRLRRIMRTGLNSKNLIKAINTYACSALSYSFGIISWTTTDLAALQRKIRTMLTKHNKHHPKSSIDRTELPRHLGGRGIVDLSNRMSQEIEGLRNYFSSKAASSELHRVVCVADTSTPLKLHQDHLETVEHSAESKMQKLIGKPLHGRHQNEVNHDYVDISASNYWLTSGRLFPETEGFMLAIQDQVIPTRNYMRYIAKDASVADDSCRYGCATHETIQHITGGCQKFAGTEYKNRHDAVAKILHQELALKHQLLTSKRVPYYNYHPDAVLENEHHKLYWDRTVLTDRKITHNRPDLILLNKDEDTALFIDVAIPNNNNLLDRHTEKISKYRDLEEQTRKQWKLKDIKTIPIVISSTGLIPKRLLENLRKLQLDENIYRVMQKAVLLGTARTVRKYMGNAEEHRLLRQEVRVEQESNLQQGGEERPGPDHHHEPENLERAPTELNPFDI

SEQ ID NO: 6637 - protein, 1260 aa, Coccinella septempunctata
MEMVITRSLGNKSLPGDRQGMSGAGAGHDSMRDVGGRMLRKRAPAAKEATAPKQQQQPTSPIQLPTQTAEGAAQDIQPVLTQAGLVRKRMKWTTSMNETIVRIYNSITGLGQNTNNYRKRLHEEFCNAYPNLNVTEQRVADQYRVILRNKLIPTARIDAIKRELQRPLAIENNTNTSDEIHMPGQQHLEDIDTESPSCNPSEPELQDDREELHRQVHSDMRRYFAELEGTDPLHRITPPRLNTSKKLSLIIDILNKDVLPEYLQNGSSLEYLHLVFYCAALTTAKTIGAKIRNNNGPKLHKLHAPAWQKRLQHKTERLRRDIGRLTEYLNGNRGRKVVKAAKEIMDRNRTHTERETENATAHHCLDTLKQKLSLYAERLRRYKSNYSRKRDNNSFEKSEESFYRSLTSSDGENGKLPPKEAIEQFWTEQLSTKPHFNGDTGWIEDEKSEAIKYEPMQHDMITIEEVKSAIRGLHNWKAPGPDGLQNFWIKKLWIMHDKLTSAINDVIENPERMPVFLTHGTTYLLPKDQRNTEDPSKYRPITCLPTMYKLITSCISNRIHNHCERNNIIAMQQKGCTKDSRGCKEQLIIDSVICNQAFSKRRNLYAAYIDYKKAFDSIPHEWLLTILKIYKVDPNIVKFLKNAMSTWRTSLQMKAADCSITTGPIPIRRGIFQGDSLSPLWFCMALNPLSHRLNSTDYGFSIKCGSRTMMKLNHLLYMDDLKLFASTEKQMQLMLKMVEGFSEDIKMKFGLEKCRLLNITRGKIEDGTFKLKEGAEIEALKEGDTYKYLGIKQARKINQTQMKKELTEEFTRRLRRIMRTGLNSKNLKKAINTYACSALSYSFGIISWTTTDLAALQRKIRTMLTKHNKHHPKSSIERTELPRHLGGRGIVDLSNRMSQEIEGLRKYFLSKAASSELHRVVCVADSSTPLKLQQDHLETVEHSAESKMQKLIGKPLHGRHQNEVNHDYVDISASNYWLTSGRLFPETEGFMLAIQDQVIPTRNYMKYIAKDASVADDSCRYGCATHETIQHITGGCQKFAGTEYKNRHDAVAKILHQELALKHQLLTSKKVPYYNYHPDAVLENEHHKLYWDRTVLTDRKITHNRPDLILLNKDEDRALFIDVAIPNNTNLLDRHTEKISKYRDLEEQTRRQWKLKDIKTIPIVISSTGLIPKKLLENLRRLQLDENIYRVMQKAVLLGTARTVRKYMGNAEEHRLLRQEVRVEQESNLQQGGEERPGPDHHHEPENLERAPTELNPFDI

SEQ ID NO: 6638 - protein, 1262 aa, Coccinella septempunctata
MEMVITRSLGNKSLPGDRQGMSGAGAGHDSMRDVGGRMLRKRAPAAKEATAPKQQQQPTSPIQLPTRTAEGAAQDIQPVLTQAGLVRKRMKWTTSMNETIVRIYNSITGLGQNTNNYRKRLHEEFCNAYPNLNVTEQRVADQYRVILRNQLIPTARIDAIKRELQRPLAIENNTNTSDEIHMPGQQHLEDIDTESPSCNPSEPELQDDREELHRQVHSDMRRYFAELEGTDPLHRITPPRLNTSKKLSLIIDILNKDVLPEYLQNGSSLEYLHLVFYCAALTTAKTLGAKIRGTNNNGPKLHKLYAPAWQKRLQHKTERLRRDIGRLTEYLNGNRGRKVVKAVKEIMDSNRTHTERETENATAHHCLDTLKQKLSLYAERLRRYKSNYSRKRDNNSFEKSEESFYRSLTSSDGENGKLPPKEAIEQFWTEQLSTKPHFNGDTGWIEDEKSEAIKYEPMQHDMITIEEVKSAIRGLHNWKAPGPDGLQNFWIKKLWIMHDKLTSAINDVIENPERIPVFLTHGTTNLLPKDQRNTEDPSKYRPITCLPTMYKLITSCISNRIHNHCERNNIIAMQQKGCTKDSRGCKEQLIIDSVICNQAFSKRRNLYAAYIDYKKAFDSIPHEWLLTILKIYKVDPNIVKFLKNAMSTWRTSLQMKAADCSITTGPIPIRRGIFQGDSLSPLWFCMALNPLSHRLNSTDYGFSIKSGSRTMMKLNHLLYMDDLKLFASTKKQMQLMLKMVEGFSEDIKMKFGLEKCRLLNITRGKIEDGTFKLKEGAEIEALKEGDTYKYLGIKQARKINQTQMKKELTEEFTRRLRRIMRTGLNSKNLIKAINTYACSALSYSFGIISWTTTDLAALQRKIRTMLTKHNKHHPKSSIERTELPRHLGDRGIVDLSNRMSQEIEGLRKYFLSKAASSELHRVVCVADSSTPLKLQQDHLETVEHSAESKMQKLIGKPLHGRHQNEVNHDYVDISASNYWLTSGRLFPETEGFMLAIQDQVIPTRNYMKYIAKDASVADDSCRYGCATHETIQHITGGCQKFAGTEYKNRHDAVAKILHQELALKHRLLASKKVPYYNYHPDAVLENEHHKLYWDRTVLTDRKITHNRPDLILLNKDEDRALFIDVAIPNNTNLLDRHTEKISKYRDLEEQARRQWKLKDIKTIPIVISSTGLIPKKLLENLRKLQLDENIYRVMQKAVLLGTARTVRKYMGNAEEHRLLRQEVRVEQESNLQQGDEERPGPDHHHEPENLERAPTELNPFDI

SEQ ID NO: 6639 - protein, 1340 aa, Coccinella septempunctata
MQIIIIIIIIIIMSGLPGSFLVDGPPGSHRNDVDGAASHACCPQSHSFSSLFHILHRGALSTLISLPLTQTEKGEHKPMKMVITRSLGNKSLPGDRQGMSGACAGHDSMRDVGGRMLRKRAPAAKEATAPKQQQQPTSPIQLPTRTAEGAAQDIQPVLTQAGLVRKRMKWTTSMNETIVRIYNSITGLGQNTNNYRKRLHEEFCNAYPNLNVTEQRVADQYRVILRNELIPTARIDAIKRELQRPPAIENNTNTSDEIHMPGQQQAEKTDTESPSYNASEPEHQDDREELSRQVDSDMRRYFAELKGTDPLHRVAPPRLNTSKKLSLIIDILNKDVLPEYLLNGSSLEYLHLVFHCAALTTAKTMGAKIRRTNNDGPKLHKLHAPAWQKRLQHKTERLRRDIGRLTEYLNGNRGRKVVKAAKEIMDRNRTHTERETENATAHHCLDTLKQKLSLYAERLRRYKSNYSRKRDNNSFEKSEESFYRSLTSSDGEHGKLPPKEAIEQFWTEQLSTKPQFNGDTGWIEDEKSEAIKYEPMQHDMITIEEVKSAIRGLHNWKAPGPDGLQNFWIKKLWIMHDKLTSAINDVIENPDRMPVFLTHGTTYLLPKDQRNTEDPSKYRPITCLPTMYKLITSCISNRIHNHCERNNIIAMQQKGCTKDSRGCKEQLIIDSVICNQAFSKRRNLYAAYIDYKKAFDSIPHEWLLTILKIYKVDPNIVKFLKNAMSTWRTSLQMKAADCSITTGPIPIRRGIFQGDSLSPLWFCMALNPLSHRLNSTDYGFSIKSGSRTMMKLNHLLYMDDLKLFASTKKQMQLMLKMVEGFSEDIKMKFGLEKCRLLNITRGKLEDGTFKLREGAEIEALKEGDTYKYLGIKQARKINQTQMKKELTEEFTRRLRRIMRTGLNSKNLIKAINTYACSALSYSFGIISWTTTDLADLQRKIRTMLTKHNKHHPKSSIERTELPRHLGGRGIVDLSNRVSQEIEGLRKYFLDKAASSELHRVVCVADSSTPLKLQQDHLETVEHSAESKMQKLIGKPLHGRHQNEVNHDYVDISASNYWLTSGRLFPETEGFMLAIQDQVIPTRNYMKYIAKDASVADDSCRYGCATHETIQHITGGCQKFAGTEYKNRHDAVAKILHQELALKHQLLTSKKVPYYNYHPDALLENKQHKLYWDRTVLTDRKITHNRPDLILLNKDEDRALFIDVAIPNNNNLLDRHTEKISKYRDLEEQTRRQWKLKDIKTIPIVISSTGLIPKKLLENLRKLQLGENIYRVMQKAVLLGTARTVRKYMGNAEEHRLRRQEVRVEQESSLQRGGEERPGPDHHREPDNLERAPSELNPFDI

SEQ ID NO: 6640 - protein, 1262 aa, Coccinella septempunctata
MKMVITRSLGNKSLPGDRQGMSGAGAGHDSMRDVGGRMLRKRAPAAKEATAPKQQQQPTSPIQLPTRTAEGAAQDIQPVLTQAGLVRKRMKWTTSMNETIVRIYNSITGLGQNTNKYRKRLHEEFCNAYPNLNVTEQRVADQYRVILRNELIPTARIDAIKRELQRPPATENNTNTSDEIHMLGQQQAEETDTESPSCNASEPEHQDDREELHRQVDSDMRRYFAELEGTDPLHRVAPPRLNTSKKLSLIIDILNKDVLPEYLQNGSSLEYLHLVFHCAALTTAKTIGAKIRQTNNDGPKLHKLHAPAWQERLQHKTERLRRDIGRLTEYLNGNRGRKVVKAAKEIMDRNRTHTERETENATAHHCLDTLKQKLSLYAERLRRYKSNHSRKRDNNSFEKSEESFYRSLTSSDGENGKLPPKEAIEQFWTEQLSTKPHFNGDTGWIEDEKSEAIKYEPMQHDMITIEEVKSAIRGLHNWKAPGPDGLQNFWIKKLWIMHDKLTSAINDVIENPERLPVFLTHGTTYLLPKDQRNTEDPSKYRPITCLPTMYKLITSCISNRIYNHCERNNIIAMQQKGCTKDSRGCKEQLIIDSVICNQAFSKRRNLYAAYIDYKKAFDSIPHEWLLTILKIYKVDPNIVKFLKNAMSTWRTSLQMKAADCSITTGPIPIRRGIFQGDSLSPLWFCMALNPLSHRLNSTDCGFSIKSGSRTMMKLNHLLYMDDLKLFASTKKQMQLMLKMVEGFSEDIKMKFGLEKCRLLNITRGKIEDGTFKLKEGAEIEALKEGDTYKYLGIKQAKKINQTQMKKELTEEFTRRLRRIMRTGLNSKNLIKAINTYACSALSYSFGIISWTTTDLAALQRKIRTMLTKHNKHHPKSSIERTELPRHLGGRGIVDLSNRMSQEIEGLRKYFLSKAASSELHRVVCAADSSTPLKLQQDHLETVEHSAESKMQKLIGKPLHGRHQNEVNHDYVDMSASNYWLTSGRLFPETEGFMLAIQDQVIPTRNYMKYIAKDFSVADDSCRYGCATHETIQHITGGCQKFAGTEYKNRHDAVAKILHQELALKHQLLTSKKVPYYNYHPDAVLENEHHKLYWDRTVLTDRKITHNRPDLILLNKDEDRALFIDVAIPNNTNLLDRHTEKISKYRDLEEQTRRQWKLKDIKTIPIVISSTGLIPKKLLENLRKLQLDENIYKVMQKAVLLGTARTVRKYMGNAEEHRLRRQEVRVEQESNLQQGGEERPGPDHHHEPENLERAPTELNPFDI

SEQ ID NO: 6641 - protein, 1043 aa, Coccinella septempunctata
MRRYFAELEGTDPLHRVAPPRLNTSKKLSLIIDILNKDVLPEYLQNGSSLEYLHLVSHCAALTTAKIMGAKIRRTNNDGPKLHKLHAPPWQKRLQHKTERLRRDIGRMTEYLNGNRGRKVVKAATEIMDRNRTHTERETENATAHHCLDTLKQKLSLYAERLRRYKSNYSRKRDNNSFEKSEESFYRSLTSSDRENGKLPPKEAIEQFWTEQLSTKPQFNGDTGWIEDEKSEAIKYEPMQHDMITIEEVKSAIRGLHNWKAPGPDGLQNFWIKKLWIMHDKLTSAINDVIENPERMPVFLTHGTTYLLPKDQRNTEDPSKYRPITCLPTMYKLITSCISNRIHNHCERNNIIAMQQKGCTKDSRGCKEQLIIDSVICNQAFSKRRNLYAAYIDYKKAFDSIPHEWLLTILKIYKVDPNIVKFLTNAMSTWRTSLQMKAADCSITTGPIPIRRGIFQGDSLSPLWFCMALNPLSHRLNSTDYGFSIKSGSRTMMKLNHLLYMDDLKLFASTKKQMQLMLKMVEGFSEDIKMKFGLDKCRLLNITRGKIEDGTFKLKEGAEIEALKEGDTYKYLGIKQARKINQTQMKKELTEELTRRLRRIMRTGLNSKNLIKAINTYACSALSYSFGIISWTTTDLAALQRKIRTMLTKHNKYHPKSSIERTELPRHLGGRGIVDLSNRMSQEIEGLRNYFLSKAASSELHRVVCVADTSTPLKLHQDHLETVEHSAESKMQKLIGKPLHGRHQNEVNHDYVDISASNYWLTSGRLFPETEGFMLAIQDQVIPTRNYMRYIAKDASVADDSCRYGCATHETIQHITGGCQKFAGTEYKNRHDAVAKILHQELALKHQLLTSKRVPYYNYHPDAVLENEHHKLYWDRTVLTDRKITHNRPDLILLNKDEDTALFIDVAIPNNNNLLDRHTEKISKYRDLEEQTRRQWKLKDIKTIPIVISSTGLIPKKLLENSRKLQLDENIYRVMQKAELLGTARTVRKYMGNAEEHRLLRQEVRVEQESNLQQGGEERPGPDHHHEPENLERAPTELNPFDI

SEQ ID NO: 6642 - protein, 1262 aa, Coccinella septempunctata
MKMVITRSLGNKSLPGDRQGMSGAGAGHDSMRDVGGRMLRKRAPAAKEATAPKQQQQPTSPIQSPTRTAESAAQDIHPVLTQAGLVRKRMKWTTSMNETIVRIYNSITGLGQNTNNYRKRLHEEFCNAYPNLNVTEQRVADQYRVILRNELIPTARTDAIKRELQRPPTIENNTNTSDEIHMPGQQQAEETDTESPSCNASEPEHQDDREELHRQVDSDMRRYFAELEGTDPLHRVAPPRLNTSKKLSLIIDILNKDVLPEYLQNGSSLEYLHLVFHCAALTTAKIMGAKIRRTNNDGPKLHKLHAPAWQKRLQHKTERLRRDIGRLTEYLNGNRGRKVVKAAKEIIDRNRTHTERETENATAHHCLDTLKQKLSLYAERLRRYKSNYSRKRDNNSFEKSEESFYRSLTSSDGENGKLPPKEAIEQFWTEQLSTKPQFNGNTGWIEDEKSEAIKYEPMQHDMITIEEVKSAIRGLHNWKAPGPDGLQNFWIKKLWIMHDKLTSAINDVIENPERMPVFLTHGTTYLLPKDQRNTENPSKYRPITCLPTMYKLITSCISNRIYNHCERNNIIAMQQKGCTEDSRGCKEQLIIDSVICNQAFSKRRNLYAAYIDYKKAFDSIPHEWLLTILKIYKVDPNIVKFLKNAMSTWRTSLQMKAADCSITTGPIPIRRGIFQGDSLSPLWFCMALNPLSHRLNSTDYGFSIKSGSRTMMKLNHLLYMDDLKLFASTKKQMQLMLKMVEGFSEDIKMKFGLEKCRLLNITRGKMEDGTFKLKEGAEIEALKEGDTYKYLGIKQARKINQTQMKKELTEEFTRRLRRIMRTGLNSKNLIKAINTYACSALSYSFGIISWTTTDLAALQRKIRTMLTKHNKHHPKSSIERTELPRHLGGRGIVDLSNRMSQEIEGLRKYFLSKAASSELHRVVCVADTSTPLKLHQDHLETVEHSAESKMQKLIGKPLHGRHQNEVNHDYVDISASNYWLTSGRLFPETEGFMLAIQDQVIPTRNYMKYIAKDASVADDSCRYGCATHETIQHITGGCQKFAGTEYKNRHDAVAKILHQELALKHQLLSSKKVPYYNYHPDAVLENEHHKLYWDRTVLTDRKITHNRPDLILLNKDEDRALFIDVAIPNNNNLLDRHTEKISKYRDLEEQTRRQWKLKDIKTIPIVISSTGLIPKKLLENLKKLQLDENIYKVMQKAVLLGTARTVRKYMGNSEEHRLLRQEVRVEQESNLQQGGEERPGPDHHHEPENLERAPTELNPFDI

SEQ ID NO: 6643 - protein, 1262 aa, Coccinella septempunctata
MKMVITRSLGNKSLPGDRQGMSGAGAGHDSMRDVGGRMLRKRAPAAKEATAPKQQQQPTSPIQLPTRTAEGAAQDIQPVLTQAGLVRKRMKWTTSMNETIVRIYNSITGLGQNTNNYRKRLHEEFCNAYPNLNVTEQRVADQYRVILRNELIPTARIDAIKRELQRPPATENNTNTSDEIHMLGQQQAEETDTESPSCNASEPEHQDDREELHRQVDSDMRRYFAELEGTDPLHRVAPPRLNTSKKLSLIIDILNKDVLPEYLQNGSSLEYLHLVFHCAALTTAKTIGAKIRQTNNDGPKLHKLHAPAWQKRLQHKTERLRRDIGRLTEYLNGNRGRKVVKAAKEIMDRNRTHTERETENATAHHCLDTLKQKLSLYAERLRRYKSNHSRKRDNNSFEKSEESFYRSLTSSDGENGKLPPKETIEQFWTEQLSTKPQFNGDTGWIEDEKSEAIKYEPMQHDMITIEEVKSAIRGLHNWKAPGPDGLQNFWIKKLWIMHDKLTSAINDVIENPERLPVFLTHGTTYLLPKDQRNTEDPSKYRPITCLPTMYKLITSCISNRIHNHCERNNIIAMQQKGCTKDSRGCKEQLIIDSVICNQAFSKRRNLYAAYIDYKKAFDSIPHEWLLTILKIYKVDPNIVEFLKNAMSTWRTSLQMKAADCSITTGPIPIRRGIFQGDSLSPLWFCMALNPLSHRLNSTDCGFSIKSSSRTMMKLNHLLYMDDLKLFASTKKQMQLMLKMVEGFSEDIKMKFGLEKCRLLNITRGKIEDGTFKLKEGAEIEALKEGDTYKYLGIRQAKKINQTQMKKELTEEFTRRLRRIMRTGLNSKNLIKAINTYACSALSYSFGIISWTTTDLAALQRKIRTMLTKHNKHHPKSSIERTELPRHLGGRGIVDLSNRMSQEIEGLRKYFLSKAASSELHRVVCVADSSTPLKLQQDHLETVEHSAESKMQKLIGKPLHGRHQNEVNHDYVDMSASNYWLTSGRLFPETEGFMLAIQDQVIPTRNYMKYIAKDSSVADDSCRYGCATHETIQHITGGCQKFAGTEYKNRHDAVAKILHQELALKHQLLTSKKVPYYNYHPDAVLENEHHKLYWDRTVLTDRKITHNRPDLILLNKDEDRALFIDVAIPNNTNLLDRHTEKISKYRDLEEQTRRQWKLKDIKTIPIVISSTGLIPKKLLENLRKLQLDENIYKVMQKAVLLGTARTVRKYMGNAEEHRLRRQEVLVEQESNLQQGGEERPGPDHHHEPENLERAPTELNPFDI

SEQ ID NO: 6644 - protein, 968 aa, Coccinella septempunctata
MGAKIRRTNNDGPKLHKLHAPAWQKRLQHKTERLRRDIGRLTEYLNGNRGRKVVKAAKEIIDRNRTHTERETENATAHHCLDTLKQKLSLYAERLRRYKSNYSRKRDNNSFEKSEESCYRSLTSPDGENGKLPPKEAIEQFWTEQLSTKPQFNGNTGWIEDEKSEAIKYEPMQHDMITIEEVKSAIRGLHNWKAPGPDGLQNFWIKKLWIMHDKLTSAINDVIENPERMPVFLTHGTTYLLPKDQRNTEDPSKYKYKLITSCISNRIYNHCERNNIIAMQQKGCTKDSRGCKEQLIIDSVICNQAFSKRRNLYAAYIDYKKAFDSIPHEWLLTILKIYKVDPNIVKFLKNAMSTWRTSLQMKAADCSITTGPIPIRRGIFQRDSLSPLWFCMALNPLSHRLNSTDYGFSIKSGSGTMMKLNHLLYMDDLKLFASTKKQMQLMLKMVEGFSEDIKMKFGLEKCRLLNITRGKMEDGTFKLKEGAEIEALKEGDTYKYLGIKQARKINQTQMEKELTEEFTRRLRRIMRTGLNSKNLIKAINTYACSALSYSFGIISWTTTDLAALQRKIRTMLTKHNKHHPKSSIERTELPRHLGGRGIVDLSNRMSQEIEGLRKYFLSKAASSELHRVVCVADTSTPLKLHQDHLETVEHSAESKMQKLIGKPLHGRHQNEVNHDYVDISASNYWLTSGRLFPETEGFMLAIQDQVIPTRNYMKYIAKDASVADDSCRYGCATHETIQHITGGCQKFAGTEYKNRHDAVAKILHQELALKHQLLSSKKVPYYNYHPDAVLENEHHKLYWDRTVLTDRKITHNRPDLILLNKDEDRALFIDVAIPNNNNLLDRHTEKISKYRDLEEQTRRQWKLKDIKTIPIVISSTGLIPKKLLENLKKLQLDENIYKVMQKAVLLGTARTVRKYMGNSEEHRLLRQEVRVEQESNLQQGGEERPGPDHHHEPENLERAPTELNPFDI

SEQ ID NO: 6645 - protein, 1176 aa, Coccinella septempunctata
MKWTTSMNETIVRIYDSITGLGQNTNNYRKRLHEEFCNAYPNLNVTEQRVADHYRVILRNQLIPTARIDAIKRELQRPLAIENNTNTSDEIHMPGQQHLEDIDTESPSCNPSEPELQDDREELHRQVHSDMRRYFAELEGTDPLHRITPPRLNTSKKLSLIIDILNKDVLPEYLQNGSSLEYLHLVFYCAALTTAKTIGAKIRGTNNSGPKLHKLHAPAWQKRLQHKTERLRRDIGRLTEYLNGNRGRKVVKAVKEIMDRNRTHTERETENATAHHCLDTLKQKLSLYAERLRRYKSNYSRKRDNNSFEKSEEYFYRSLTSSDGENGKLPPKEAIEQFWTEQLSTKPHFNGDTGWIEDEKSEAIKYEPMQHDMITIEEVKSAIRGLHNWKAPGPDGLQNFWIKKLWIMHDKLTSAINDVIENPERMPLFLTHGTTYLLPKDQRNTEDPSKYRPITCLPTMYKLITSCISNRIHNHCERNNIIAMQQKGCTKDSRGCKEQLIIDSVICNQAFSKRRNLYAAYIDYKKAFDSIPHEWLLTILKIYKVDPNIVKFLKNAMSTWRTSLQMKAADCSITTGPIPIRRGIFQGDSLSPLWFCMALNPLSHRLNSTDYGFSIKNGSRTMMKLNHLLYMDDLKLFASTKKQMQLMLKMVEGFSEDIKMKFGLEKCRLLNITRGKIEDGTFKLKEGAEIEALKEGDTYKYLGIKQARKINQTQMKKELTEEFTRRLRRIMRTGLNSKNLIKAINTYACSALSYSFGIISWTTTDLAALQRKIRTMLTKHNKHHPKSSIERTELPRHLGGRGIVDLSNRMSQEIEGLRKYFLSKAASSELHRVVCVADSSTPLKLQQDHLETVEHSAESKMQKLIGKPLHGRHQNEVNHDYVDISASNYWLTSGRLFPETEGFMLAIQDQVIPTRNYMKYIAKDASVADDSCRYGCATHETIQHITGGCQKFAGTEYKNRHDAVAKILHQELALKHQLLASKKVPYYNYHPDAVLENEHHKLYWDRTVLTDRKITHNRPDLILLNKDEDRALFIDVAIPNNTNLLDRHTEKISKYRDLEEQTRRQWKLKDIKTIPIVISSTGLIPKKLLENLRKLQLDENIYRVMQKAVLLGTARTVRKYMGNTEEHRLLRQEVRVEQESNLQQGGEERPGPDHHHEPENLERAPTELNPFDIWDK

SEQ ID NO: 6646 - protein, 1043 aa, Coccinella septempunctata
MRRYFAELEGTDPLHRVAPPRLNTSKKLSLIIDILNKDVLPEYLQNGSSLEYLHLVFHCAALTTAKTIGAKIRRTSNDGPKLHKLHAPAWQKRLQHKTERLRRDIGRLTEYLNGNRGRKVVKAAKEIMDRNRTHTERETENATAHHCLDTLKQKLSLYAERLRRYKSNYSRKRDNNSFEKSEESFYRSLTSSDGENGKLPPKEAIEQFWTEQLSTKPHFNGDTGWIEDEKSEAIKYEPMQHDMITIEEVKSAIRGLHNWKAPGPDGLQNFWIKKLWIMHDKLTSAINDVIENPERMPVFLTHGTTFLLPKDQRNTEDPSKYRPITCLPTMYKLITSCISNRIHNHCERNNIIAMQQKGCTKDSRGCIEQLIIDSVICNQAFSKRRNLYAAYIDYKKAFDSIPHEWLLTILKIYKVDPNIVKFLKNATSTWRTSLQMKAADCSITTGPIPIRRGIFQGDSLSPLWFCMALNPLSYRLNSADYGFSIKSGSRTMMKLNHLLYMDDLKLFASTKKQMQLMLKMVEGFSEDIKMKFGLEKCRVLNITRGKIEDGSFKLKEGAEIEALKEGDTYKYLGIKQARKINHTQMKKELAEEFTRRLRRIMRTGLNSKNLIKAINTYACSALSYSFGIISWTTTDLAALQRRIRTMLTKHNKHHPKSSIERTELPRHLGGRGIVDLSNRMSQEIEGLRKYFLSKAASSELHRVVCVADSSTPLKLQQDHSETVEHSAESKMQKLIGKPLHGRHQNEVNHDYVDISASNYWLTSGRLFPETEDFMLAIQDQVIPTRNYMKYIAKDASVADDSCRYGCETHETIQHITGGCQKFAGTEYKNRHDAVAKILHQELALKHQLLTSKKVPYYNYHPDAVLENDHHKLYWDRTVLTDRKITHNRPDFILLNKDEDRALFIDVAIPNNNNLLDRHTEKISKYRDLEEQTRRQWKLKDIKTIPIVISSTGLIPKKLLENLRKLQLDENIYRVMQKAVLLGTARTVRKYMGNAEEHRLLRQEVRVEQKSSLQQGGEERPGPDHHHEPDNLERAPTELNPFDI

SEQ ID NO: 6647 - protein, 1285 aa, Coccinella septempunctata
MGVLFLLPFLYPSPKPRKGEHKPMEMVITRSLGNKSLPGDRQGMSGAGAGHDSMRDVGGRMLRKRAPAAKEAAAPKQQQQPASPIQLPTRTAEGAAQDIQPVLTQAGLVRKRMKWTTSMNETIVRKYNSITGLGQNTNNYRKRLHEEFCNAYPNLNVTEQRVADQYRVILRNELIPTARIDAIERELQHPLAIENNTNTSDEIHMPGQQHPEDIDTESPSCKENEPEHQDDRDELHRQVDSEMRRYFAELEGTDPLHRIAPPRLNTSKKLSLIIDILNKDVLPEYLQNGSSLEYLHLVFYCAALTTVKTIGAKIRRKNNDGPKLHKLHAPPWQKRLQHKTERLRRDIGRLTEYLNGNRGRKVVKTAKEIMDRNRTHTERETENATAHHCLDTMKQKLSLYAERLRRYKSNYSRKRDNNSFEKSEETFYRSLTSSDVENGKLPPKEAIEQFWTEQLSTKPQFNGDTGWIEDEKSEAKKYEPMQHDKITIEEVKSGIRGLHNWKAPGPDGLQNFWIKKLWIMHDKLTSAINDVIENPERMPIFLTHGTTYLLPKDQRNTEDPSKYRPITCLPTMYKLITSCISNRIHNHCERNNIIAMQQKGCTKDSRGCKEQLIIDSVICNQAFSKQRNLYAAYIDYKKAFDSIPHEWLLTILKIYKVDPNIVKFLKNAMSTWRTSLQMKAADCSITTGPIPIRRGIFQGDSLSPLWFCMALNPLSHRLNSTNYGFSIKSGSRTMMKLNHLLYMDDLKLFASTKKQMQQMLKMVEGFSEDIKMKFGLEKCRLLNITRGKIKDGTFELKEGAEIEALKEGDTYKYLGIKQARKINQTQMKQELTEEFTRRLRRIMRTGLNSKNLIKAINTYACSALSYSFGIISWTTTDLAALQRKIKTMLTKHNKHHPKSSIERTELPRHLGGRGIVDLSNRMSQEIEGLRNYFLSKATSSELHQVVCVADTSTPLKLQQDHLETVKHSAEIKMQKLIGKPLHGRHQNEVNHDYVDISASNYWLTSGRLFPETEGFMLAIQDQVIPTRNHMKYIAKDASVADDSCRYGCATHETIQHITGGCQKFAGTEYKNRHDAVAKILHQELALKHQLQTSKKVPYYNYHPDAVLENEHHKLYWDRTVLTDRKITHNRPDLILFNKDEDRAIFIDVAIPNNNNLLDRHTEKISKYRDLEEQTRRQWKLKDIKTIPIVISSTGLIPKKLLENLRKLQLDENIYRVMQKAVLLGTARTVRKYMGNAEERRLRLQEVRVEQESNLQQGGEERPEPDHHHKPENLERAPTELNPFDI

SEQ ID NO: 6648 - protein, 916 aa, Coccinella septempunctata
MDRNRTHTERETENATAHHCLDTLKQKLSLYAERLRRYKSNYSRKRDNNSFEKSEESFYRSLTSSDGENEKLPPKEAIEQFWTEQLSTKPHFNGDTGWIEDEKSEAIKYEPMQHDMITIEEVKSAIRGLHNWKAPGPDGLQNFWIKKLWIMHDKLTSAINDVIENPERMPVFLTHGTTYLLPKDQRNTEDPSKYRPITCLPTMYKLITSCISNRIHNHCERNIIIAMQQKGYTKDSRGCKEQLIIDSVICNQAFSKRRNLYAAYIDYKKAFDSIPHEWLLTILKIYKVDPNIVKFLKNAMSTWRTSLQMKAADCSITTGPIPIRRGIFQGDSLSPLWLCMALNPLSHRLNSTDYGFSIKNGSRTMMKLNHLLYMDVLKHFASTKKQMQLMLKMVEGFSEDIKMKFGLEKCRLLNITRGKIEDGTFKLKEGAEIEALKEGDTYKYLGIKQARKINQTQMKKKLTEEFTRRLRRIMRTGLNSKNLIKAINTYACSALGYSFGIISWTTTDLAALQRKIRTMLTKHNKHHPKSSIERTELPRHLGGRGIVDLSNRMSQEIEGLRKYFSSKAASSELHRVVCVADSSTPLKLQQDHLETVEHSAESKMQKLIGKPLHGRHQNEVNHDYVDISASNYWLTSGRLFPETEGFMLAIQDQVIPTRNYMKYIAKDASVADDSCRYGCATHETIQHITGGCQKFAGTEYKNRHDAVAKILHQELALKHQLLASKKVPYYNYHPDAVLENEHHKLYWDRTVLTDRKITHNRPDLILLNKDEDRALFIDVAIPNNTNLLDRHTEKISKYRDLEEQTRRQWKLKDIKTIPIVISSTGLIPKKLLENLRKLQLDENIYRVMQKAVLLGTARTVRKYMGNAEEHRLLRQEVRVEQESNLQQGGEERPGPDHHHEPENLERAPTELNPFDI

SEQ ID NO: 6649 - protein, 1262 aa, Coccinella septempunctata
MKMVITRSLGNKSLPGDRQGMSGAGAGHDSMRDVGGRMLRKRAPAAKEATAPKQQQQPTSPIQLSTRTAEGAAQDIQPVLTQAGLVRKRMKWTTSMNETIVRIYNSITGLGQNTNNYRKRLHEEFCNAYPNLNVTEQRVADQYRVILRNELIPTARIDAIKRELQRPPTIENNTNTSDEIHMPGQQQAEETDTESPSCNASEPEHQDDREELHRQVDSDMRRYFAELEGTDPLHRVAPPRLNTSKKLSLIIDILNKDVLPEYLQNGSSLEYLHLVFHCAALTTAKTMGAKIRRTNNDGPKLHKLHAPAWQKRLQQKTERLRRDIGRLTEYLNGNRGRKVVKAAQEIIDGNRTHTERETENATAHHCLDTLKQKLSLYAERLRRYKSNYSRKRDNNSFEKSEESFYRSLTSSDGENGKLPPKEAIEQFWTEQLSTKPQFNGNTGWIEDEKSEAIKYEPMQHDMITIEEVKSAIRGLHNWKAPGPDGLQNFWIKKLWIMHDKLTSAINDVIENPERMPVFLTHGTTYLLPKDQRNTEDPSKYRPITCLPTMYKLITSCISNRIYNHCERNNIIAMQQKGCTKDSRGCKEQLIIDSVICNQAFSKRRNLYAAYIDYKKAFDSIPHEWLLTILKIYKVDPNIVKFLKNAMSTWRTSLQMKAADCSITTGPIPIRRGIFQGDSLSPLWFCMALNPLSHRLNSTDYGFSIKSGSRTMMKLNHLLYMDDLKLFASTKKQMQLMLKMVEGFSEDIKMKFGLEKCRLLNITRGKIEDGTFKLKEGAEIEALKEGDTYKYLGIKQARKINQTQMKKELTEEFTRRLRRIMRTGLNSKNLIKAINTYACSALSYSFGIISWTTTDLAALQRKIRTMLTKHNKHHPKSSIERTELPRHLGGRGIVDLSNRMSQEIEGLRNYFLSKAASSELHRVVCVADTSTPLKLHQDHLETVEHSAESKMQKLIGKPLHGRHQNEVNHDYVDISASNYWLTSGRLFPETEGFMLAIQDQVIPTRNYMKYIAKDASVADDSCRYGCATHETIQHITGGCQKFAGTEYKNRHDAVAKILLQELALKHQLLSSKKVPYYNYHPDAVLENEHHKLYWDRTVLTDRKITHNRPDLILLNKDEDRALFIDVAIPNNNNLLDRHTEKISKYRDLEEQTRRQWKLKDIKTIPIVISSTGLIPKKLLENLRKLQLDENIYKVMQKAVLLGTARTVRKYMGNSEEHRLLRQEVRVEQESNLQQGGEERPGPDHHHEPENLERAPTELNPFDI

SEQ ID NO: 6650 - protein, 1179 aa, Coccinella septempunctata
MKWTTSMNETIVRIYNSITGLGQNTNNYRKRLHEEFCIAYPNVNVTEQRVADQYRVILRNELVPTARIDAIKRELQRPLAMENNTNTSDEVHIPGQQHPEDIDTESPSCKANEPEHQDDREELHRQVDSDMRRYFAELEGTDPLHRVAPPRLNTSKKLSLIIDILNKDVLPEYLQNGSSLEYLHLVFHCAALTTAKTMGAKIRRTNNDGPKLHKLHAPAWQKRLQHKTERLRRDIGRLTEYLNGNRGKKVVKAAKEIMDRNRTHTERETENATAHHCLDTLKQKLSLYAERLRRYKSNYSRKRDNNSFEKSEESFYRSLTSSDGENGKLPPKEAIEQFWTEQLSTKPHFNGDTGWIEDEKSEAIKYEPMQHDMITIEEVKSAIRGLHNWKAPGPDGLQNFWIKKLWIMHDKLTSAINDVIENPERMPVFLTHGTTYLLSKDQRNTEDPSKYRPITCLPTMYKLITSCISNRIHNHCERNNIIAMQQEGCTKDSRGCKEQLIIDSVICNQAFSKRRNLYAAYIDYKKAFDSIPHEWLLTILKIYKVDPNIVKFLKNAMSTWRTSLQMKAADCSITTGPIPIRRGIFQGDSLSPLWFCMALNPLSHRLNSTDYGFSIKSGSRTMMKLNHLLYMDDLKLFASTKKQMQLMLKMVERFSEDIKMKFGLEKCRLLNITRGKIEDGTFKLKEGAEIEALKEGDTYKYLGIKQARKINQTQMKKELTEEFTRRLRRIMRTGLNSKNLIKAINTYACSALSYSFGIISWTTTDLAALQRKIRTMLTKHNKHHPKSSIERTELPRHLGGRGIVDLSNRMSQEIEGLRNYFLSKAASSELHRVVCVADTSTPLKLHQDHLETVEHSAESKMQKLIGKPLHGRHQNEVNHDYVDISASNYWLTSGRLFPETEGFMLAIQDQVIPTRNYMRYIAKDASVADDSCRYGCATHETIQHITGGCQKFAGTEYKNRHDAVAKILHQELALKHQLLTSKRIPYYNYHPDAVLENEHHKLYWDRTVLTDRKITHNRPDLILLNKDEDTALFIDVAIPNNNNLLDRHTEKISKYRDLEEQTRRQWKLKDIKTIPIVISSTGLIPKKLLENLRKLQLDENIYKVMQKAVLLGTARTVRKYMGNAEEHRLLRQEVRVEQESNLQQEAEERPEPHHHHEPENLERAPTELNPFDISDIWDK

SEQ ID NO: 6651 - protein, 1262 aa, Coccinella septempunctata
MKMVITRSLGNKSLPGDRQGMSGAGAGHDSMRDVGGRMLRKRAPAAKEATAPKQQQQPTSPIQLPTRTAEGAAQDIQPVLTQAGLVRKRMKWTTSMNETIVRIYNSITGLGQNTNNYRKRLHEEFCIAYPNLNVTEQRVADQYRVIMRNELIPTARIDAIKRELQHPLAIENNTNTSDEIHIPGQQHPEDIDTESPSCKANEPEHQDDREELHRQVDSDMRKYFAELEGTDPLHRVAPPRLNTSKKLSLIIDILNKDVLPEYLQNGSSLEYLHLVFHCAALTTAKTMGAKIRQTNNDGPKLHKLHAPAWQKRLQHKTERLRRDIGRLTEYLNGNRGRKVVKAAKDIMDRNRTHTERETENATAHHCLDTLKQKLSRYAERLRRYKSNYSRKRDNNSFEKSEESFYRSLTSSDGENGKLPPKEAIEQFWTEQLSTKPQFNGDTGWIEDEKSEAIKYEPMQHDMITIEEVKSAIRGLHNWKAPGPDGLQNFWIKKLWIMHDKLTSAINDVIVNPERMPVFLTHGTTYLLPKDQRNTEDPSKYRPITCLPTMYKLITSCISNRIHNHCERNNIIAMQQKGCTKDSRGCKEQLIIDSVICNQAFSKRRNLYAAYIDYKNAFDSIPHEWLLTILKIYKVDPNIVKFLKNAMSTWRTSLQMKAADCSITTGPIPIRRGIFQGDSLSPLWFCMALNPLSHRLNSTDYGFSIKSGSRTMMKLNHLLYMDDLKLFASTKKQMQLMLKMVKGFSEDIKMKFGLEKCRLLNITRGKIEDGTFKLKEGAEIEALKEGDTYKYLGIKQARRINQTQMKKELTEEFTRRLRRIMRTGLNSKNLIKAINTYACSALSYSFGIISWTTTDLAALQRKIRTMLTKHNKHHPKSSIERTELPRHLGGRGIVDLSNRMSQEIEGLRNYFLSKAASSELHRVVCVADTSTPLKLHQDHLETVEHSAESKMQKLIGKSLHGRHQKEVKHDYVDISASNYWLTSGRLFPETEGFMLAIQDQVIPTRNYMRYIAKDASVADDSCRYGCATHETIQHITGGCQKFAGTEYKNRRDAVAKILHQELALKHQLLTSKRVPYYNYHPDAVLENEHHKLYWDRTVLTDRKITHNRPDLILLNKDEDTALFIDVAIPNNNNLLDRHTEKISKYRDLEEQTRRQWKLKDIKTIPIVISSTGLIPKKLLENLRKLQLDENIYKVMQKAVLLGTARTVRKYMGNAEEHRLLRQEVRVEQESNLQQGAEERPEPDHHYEPENLERAPTELNPFDI

SEQ ID NO: 6652 - protein, 1262 aa, Coccinella septempunctata
MKMVITRSLGNKSLPGDRQGMSGAGAGHDSMRDVGGRMLRKRAPAAKEATAPKQQQQPTSPIQLPTRTAEGAAQDIQPVLTQAGLVRKRMKWTTSMNETIVRIYNSITVLGQNTNNYRKRLHEEFCIAYPNVNVTEQRVADQYRVILRNELVPTARIDAIKRELQRPLAMENNTNTSDEVHIPGQQHPEDIDTESPSCKANEPEHQDDREELHRQVDSDMRRYFAELEGTDPLHRVAPPRLNTSKKLSLIIDILNKDVLPEYLQKGSSLEYLHLVFHCAALTTAKTMGAKIRRTNNDGPKLHKLHAPAWQKRLQHKTERLRRDIGRLTEYLNGNRGRKVVKAAKEIMDRNRTHTERETENATAHHCLDTLKQKLSLYAERLRRYKSNYSRKRDNNSFEKSEESFYRSLTSSDGENGKLPPKEAIEQFWTEQLSTKPQFNGDTGWIEDEKSEAIKYEPMQHDMITIEEVKSAIRGLHNWKAPGPDGLQNFWIKKLWIMHEKLTSAINDVIENPERMPVFLTHGTTYLLPKDQRNTEDPSKYRPITCLPTMYKLITSCISNRIHNHCERNNIIAMQQKGCTKDSRGCKEQLIIDSGICNQAFSKRRNLYAAYIDYKKAFDSIPHEWLLTILKIYKVDPNIVDFLKNAMSTWRTSLQMKAADCSITTGPIPIRRGIFQGDSLSPLWFCMALNPLSHRLNSTDYGFSIKSGSKTMMKLNHLLYMDDLKLFASTKKQMQLMLKMVEGFSEDIKMKFGLEKCRLLNITRGKIEDGTFKLKEGAEIEALKEGDTYKYLGIKQARKINQTQMKKELTEEFTQRLRRIMRTGLNSKNLIKAINTYACSALSYSFGIISWTTTDLAALQRKIRTMLTKHNKHHPKSSIERTELPRHLGGRGIVDLSNRMSQEIEGLRNYFLSKAASSELHRVVCVADTSTPLKLHQDHLETVEHSAESKMQKLIGKPLHGRHQNEVNHDYVDISASNYWLTSGRLFPETEGFMLAIQDQVIPTRNYMRYIAKDASVADDSCRYGCATHETIQHITGGCQKFAGTEYKNRHDAVAKILHQELALKHQLLTSKRIPYYNYHPDAVLENEHHKLYWDRTVLTDRKITHNRPDLILLNKDEDTALFIDVAIPNNNNLLDRHTEKISKYRDLEEQTRRQWKLKDIKTIPIVISSTGLIPKKLLENLRKLQLDENIYKVMQKAVLLGTARTVRKYMGNAEEHRLLRQEVRVEQESNLQQEAEERPGPDHHHEPENLERAPTELNPFDI

SEQ ID NO: 6653 - protein, 1262 aa, Coccinella septempunctata
MKMVITRSLGNKSLPGDRQGMSGAGAGHDSMRDVGGRMLRKRAPAAKEATAPKQQQQPTSPIQLPTRTAEGAAQDIQPVLTQAGLVRKRIKWTTSMNETIVRIYNSITGQGQNTNNYRKRLHEEFCIAYPNLNVTEQRVADQYRVILRNELIPTARIDAIKRELQHPLAIENNTNTSDEIHIPGQQHPEDIDTESPSCKANEPEHQDDREELHRQVDSDMRKYFAELEGTDPLHRVAPPRLNTSKKLSLIIDILNKEVLPEYLQNGSSLEYLHLVFHCAALTTAKTMGAKIRQTNNDGPKLHKLHAPAWQKRLQHKTERLRRDIGRLTEYLNGNRGRKVVKAAKDIMDRNRTHTERETENATAHHCLDTLKQKLSLYAERLRRYKSNYSRKRDNNSFEKSEESFYRSLTSSDGENGKLPPKEAIEQFWTEQLSTKPQFNGDTGWIEDEKSEAIKYEPMQHDMITIEEVKSAIRGLHNWKAPGPDGLQNFWIKKLWIMHDKLTSAINDVIVNPERMPVFLTHGTTYLLPKDQRNTEDPSKYRPITCLPTMYKLITSCISNRIHNHCERNNIIAMQQKGCTKDSRGCKEQLIIDSVICNQAFSKRRNLYAAYIDYKKAFDSIPHEWLLTILKIYKVDPNIVKFLKNAMSTWRTSLQMKAADCSITTAPIPIRRGIFQGDSLSPLWFCMALNPLSHRLNSTDYGFSIKSGSRTMMKLNHLLYMDDLKLFASTKKQMQLMLKMVEGFSEDIKMKFGLEKCRLLNITRGKIEDGTFKLKEGAEIEALKEGDTYKYLGIKQARKINQTQMKKELTEEFTRRLRRIMRTGLNSKNLIKAINTYACSALSYSFGIISWTTTDLAALQRKIRTMLTKHNKHHPKSSIERTELPRHLGGRGIVDLSNRMSQEIEALRNYFLSKAASSELHRVVCVADTSTPLKLHQDHLETVEHYAESKMQKLIGKSLHGRHQKEVNHDYVDISASNYWLTSGRLFPETEGFMLAIQDQVIPTRNYMRYIAKDASVADDSCRYGCATHETIQHITGGCQKFAGTEYKNRHDAVAKILHQELALKHQLLTSKRVPYYNYHPDAVLENEHHKLYWDRTVLTDRKITHNRPDLILLNKDEDTALFIDVAIPNNNNLLDRHTEKISKYRDLEEQTRRQWKLKDIKTIPIVISSTGLIPKKLLENLRKLQLDENIYKVMQKAVLLGTARTVRKYMGNAEEHRLLRQEVRVEQESNLQQGAEERPEPDHHHEPENLERAPTELNPFDI

SEQ ID NO: 6654 - protein, 1262 aa, Coccinella septempunctata
MKMVITRSLGNKSLPGDRQGMSGAGAGHDSMRDVGGRMLRKRAPAAKEATAPKQQQQPTSPIQLSTRTAEGAAQDIQPVLTQAGLVRKRMKWTTSMNETIVRIYNSITGLGQNTNNYRKRLHEEFCNAYPNLNVTEQRVADQYRVILRNELIPTARIDAIKRELQRPPTIENNTNTSDEIHMPGQQQAEETDTESPSCNASEPEHQDDRKELHRQVDSDMRRYFAELEGTDPLHRVAPPRLNTSKKLSLIIDILNKDVLPEYLQNGSSLEYLHLVFHCAALTTAKTMGAKIRRTNNDGPKLHKLHAPAWQKRLQHKTERLRRDIGRLTEYLNGNRGRKVVKAAKEIIDRNRTHTERETENATAHHCLDTLKQKLSLYAERLRRYKSNYSRKRDNNSFEKSEESFYRSLTSLNGENGKLPPKEAIEQFWTEQLSTKPQFNGNTGWIEDEKSEAIKYEPMQHDMITIEEVKSAIRGLHNWKAPGPDGLQNFWIKKLWIMHDKLTSAINDVIENPERMPVFLTHGTTYLLPKDQRNTEDPSKYRPITCLPTMYKLITSCISNRIYNHCERNNIIAMQQKGCTKDSRGCKEQLIIDSVICNQAFSKRRNLYAAYIDYKKAFDSIPHEWLLTILKIYKVDPNIVKFLKNAMSTWRTSLQMKAADCSITTGPIPIRRGIFQGDSLSPLWFCMALNPLSHRLNSTDYGFSIKSGSRTMMKLNHLLYMDDLKLFASTKKQMQLMLKMVEGFSEDIKMKFGLEKCRLLNITRGKMEDGTFKLKEGAEIEALKEGDTYKYLGIKQARKINQTQMKKELTEEFTRRLRRIMRTGLNSKNLIKAINTYACSALSYSFGIISWTTTDLAALQRKIRTMLTKHNKHHPKSSIERTELPRHLGGRGIVDLSNRMSQEIEGLRKYFLSKAASSELHRVVCVADTSTPLKLHQDHLETVEHSAESKMQKLIGKPLHGRHQNEVNHDYVDISASNYWLTSGRLFPETEGFMLAIQDQVIPTRNYMKYIAKDASVADDSCRYGCATHETIQHITGGCQKFAGTEYKNRHDAVAKILHQELALKHQLLSSKKVPYYNYLPDAVLENEHHKLYWDRTVLTDRKITHNRPDLILLNKDEDRALFIDVAIPNNNNLLDRHTEKISKYRDLEEQTRRQWKLKDIKTIPIVISSTGLIPKKLLENLRKLQLDESIYKVMQKAVLLGTTRTVRKYMGNSEEHRLLRQEVRVEQESNLQQGGEERPGSDRHHEPENLERAPTELNPFDI

SEQ ID NO: 6655 - protein, 916 aa, Coccinella septempunctata
MDRNRTHTERETENATAHHCLDTLKQKLSLYAERLRRYKSNYSRKRDNNSFEKSEESFYRSLTSSDGENGKLPPKEAIEQFWTEQLSTKPHFNGDTGWIEDEKSEAIKYEPMQHDMITIEEVKSAIRGLHNWKAPGPDGLQNFWIKKLWIMHDKLTSAINDVIENPERMPVFLTHGTTYLLPKDQTNTEDPSKYRPITCLPTMYKLITSCISNRIHNHCERNNIIAMQQKGCTKDSRGCKEQLIIDSVICNQAFSKRRNLYAAYIDYKRAFDSIPHEWLLTILKIYKVDPNIVKFLKNAMSTWRTSLQMKAADCSITTGPIPIRRGIFQGDSLSPLWFCMALNPLSHRLNSTDYGFSIKNGSRTMMKLNHLLYMDDLKLFASTKKQMQLMLKMVEGFSEDIKMKFGLEKCRLLNITRGKIEDGTFKLREGAEIEALKEGDTYKYLGIKQARKINQSQMKKELTEEFTRRLRRIMRTGLNSKNLIKAINTYACSALSYSFGIISWTTTDLAALQRKIRTMLTKHNKHHPKSSIERTELPRHLGGRGIVDLSNRMSQEIEGLRKYFLSKAASSELHRVVCVADSSTPLKLQQDHLETVEHSAESKMQKLIGKPLHGRHQNEVNHDYVDISASNYWLTSGRLFPETEGFMLAIQDQVIPTRNYMKYIAKDASVADDSCRYGCATHETIQHITGGCQKFAGTEYKNRHDAVAKILHQELALKHQLLSSKKVPYYNYHPDAVLENEHHKLYWDRTVLTDRKITHNRPDLILLNKDEDRALFIDVAIPNNTNLLDRHTEKISKYRDLEEQTRRQWKLKDIKTIPIVISSTGLIPKKLLENLRKLQLDENIYRVMQKAVLLGTARTVRKYMGNAEEHRLLRQEVRVEQESNLKQGGEERPGPDHHHEPENLERAPTELNPFDI

SEQ ID NO: 6656 - protein, 1290 aa, Coccinella septempunctata
MGALSALISLPLTQTEKREHKPMKMVITRSLGNKSLPGDLQGMSGAGAGHDSMRDVGGRMLRKRAPTAKQATAPKQQQQPTSPIQLPTRTAEGAAQDIQPVLTQAGLVRKRMKWTTSMNETIVRIYNSITGLGQNTNNYRKRLHEEFCIAYPNVNVTEQRVADQYRVILRNELVPTARIDAIKRELQRPLAMENNTNTSDEVHIPGQQHPEDIDTESPSCKANEPEHQDDREELHRQVDSDMRRYFAELEGTDPLHRVAPPRLNTSKKLSLIIDILNKDVLPEYLQNGSLLEYLHLVFHCAALTTAKTMGAKIRRTNNDGPKLHKLHAPAWQKRLQHKTERLKRDIGRLTEYLNGNRGRKVVKAAKEIMDRNRTHTERETENATAHHCLDTLKQKLSLYAERLRRYKSNYSRKRDNNSFEKSEESFYRSLTSSDGENGKLPPKEAIEQFWTEQLSTKPQFNGDTGWIEDEKSEAIKYEPMQHDMITIEEVKSAIRGLHNWKAPGPDGLQNFWIKKLWIMHDKLTSAINDVIENPERMPVFLTHGTTYLLPKDQRNTEDPSKYRPITCLPTMYKLITSCISNRIHNHCERNSIIAIQQEGCTKDSRGCKEQLIIDSVICNQAFSKRRNLYAACIDYKKAFDSIPHEWLLTILKIYKVDPNIVKFLKNAMSTWRTSLQMKEADCSITTGPIPIRRGIFQGDSLSPLWFCMALNPLSHRLNSTDYGFSIKSGSRTMMKLNHLLYMDDLKLFASTKKQMQLMLKMVEGFSEDIKMKFGLEKCRLLNITRGKIEDGTFKLKEGAEIEALKEGDTYKYLGIKQARKINQTQMKKELTEEFTRRLRRIMRTGLNSKNLIKAINTYARSALSYSFGIISWTTTDLTALQRRIRTMLTKHNKHHPKSSIERTELPRHLGGRGIVDLSNRMSQEIEGLRKYFLSKAASSELHRVVCVADTSTPLKLHQNHLGTVEHSVESKMQKLIGKPLHGRHQNEVNHDYVDISASNYWLTSGRLFPETEGFMLAIQDQVIPTRNYMRYIAKDASVADDSCRYGCATHETIQHITGGCQKFAGTEYKNRHDAVAKILHQELALKHQLLTSKRIPYYNYHPDAVLENEHHKLYWDRTVLTDRKITHNRPDLILLNKDEDTALFIDVAIPNNNNLLDRHTEKISKYRDLEEQTRRQWKLKDIKTIPIVISSTGLIPKKLLENLRKLQLDENIYKVMQKAVLLGTARTVRKYMGNAEEHRLLRQEVRVEQESNLQQEAEERPEPHHHHEPENLERAPTELNPFDISDIWDK

SEQ ID NO: 6657 - protein, 1242 aa, Coccinella septempunctata
MSGAGAGHDSMRDVGGRMLRKRAPAAKEATAPKQQQQPTSPIQLPTRTAEGAAQDIQPVLTQAGLVRKRMKWTTSMNETIVRIYNSITGLGQNTNNYRKRLHEEFCNAYPNLNVTEQRVADQYRVILRNELIPTARIDAIKRELQRPPAIENNTNTSDEIHMPGQQQAEETDTESPSCNASKPEHQDDREELLRQVDSDMRRYFAELEGTDPLHRVAPPRLNTSKKLSLIIDILNKDVLPGYLQNGSSLEYLHLVFYCAALTTAKTIGAKIRRTNNDGPKLHKLHAPAWQKRLQHKTERLRRDIGRLTEYLNGNRGRKVVKAAKEIMDRNRTHTERETENATAHQCLDTLKQKLSLYAERLRRYKSNYSRKRDNNSFEKSEETFYRSLTPSDGENGKLPPKEAIEQFWTEQLSTKPQFNGDTGWIEDEKSEARKYEPMQHDMITIEEVKSAIRGLHNWKAPGPDGLQNFWIKKLWIMHDKLTSAINDVIENPERMPVFLTHGTTYLLPKDQRNTEDPSKYRPITCLPTMYKLITSCISNRIYNHCERNNIIAMQQKGCTKDSRGCKEQLIIDSVICNQAFSKRRNLYAAYIDYKKAFDSIPHEWLLTILKIYKVDPNIVEFLKSAMSTWRTSLQMKAADCSITTGPIPIRRGIFQGDSLSPLWFCMALNPLSHRLNSTDYGFSIKSGSRTMMKLNHLLYMDDLKLFASTKKQMQLMLKMVEGFSEDIKMKFGLEKCRLLNITRGKIEDGTFKLKEGAEIEALKEGDTYKYLGIKQARKINQTQMKKELTEEFTRRLRRIMRTGLNSKNLIKAINTYACSALSYSFGIISWTTTDLAALQRKIRTMLTKHNKHHPKSSIERTELPRHLGGRGIVDLSNRMSQEIEGLRKYFLSKAASSELHRVVCVADSSTPLKLQQDHLETVEHSAESKMQKLIGKPLHGRHQNEVNHDYVDISASNYWLTSGRLFPETEGFMLAIQDQVIPTRNYMKYIAKDASVADDSCRYGCATHETIQHITGGCQKFAGTEYKNRHDAVAKILHQELALKHQLLTSKKVPYYNYHPDAVLENEHHKLYWDRTVLTDRKITHNRPDLILLNKDEDTALFIDVAIPNNNNLLDRHTEKISKYRDLEEQTRRQWKLKDIKTIPIVISSTGLIPKKLLENLRKLQLDENIYRVMQKAVLLGTARTVRKYMGNAEEHRLLRQEARVEQESNLQQGAEERPGPDHHHEPENLERAPTELNPFDI

SEQ ID NO: 6658 - protein, 805 aa, Coccinella septempunctata
MQHDMITIEEVKSAIRGLHNWKAPGPDGLQNFWIKKLWIMHDKLTSAINDVIENPERMPVFLTHGTTYLLPKDQRNTEDPSKYRPITCLPTMYKLITSCISNRIHNHCERNNIIAMQQKGCTKDSRGCKEQLIIDSVICNQAFSKRRNLYAAYIDYKKAFDSIPHEWLLTILKIYKVDPNIVKFLKNAMSTWRTSLQMKAADCSITTGPIPIRRGIFQGDSLSPLWFCMALNPLSHRLNSTDYGFSIKSGSRIMMKLNHLLYMDDLKLFASTKKQMQLMLKMVEGFSEDIKMKFGLEKCRLLNITRGKIEDGTFKLKEGAEIEALKEGDTYKYLGIKQARKINQTQMKKELTEEFTRRLRRIMRTGLNSKNLIKAINTYACSALSYSFGIISWTTTDLAALQRKIRTMLTKHNKHHPKSSIERTELPRHLGGRGIVDLSNRMSQEIEGLRKYFLSKAASSELHRVVCVADSSTPLKLQQDHLETVEHSAESKMQKLIGKPLHGRHQNEVNHDYVDISASNYWLTSGRLFPETEGFMLAIQDQVIPTRNYMKYIAKDASVADDSCRYGCATHETIQHITGGCQKFAGTEYKNRHDAVAKILHQELALKHQLLSSKKVPYYNYHPDAVLENEHHKLYWDRTVLTDRKITHNRPDLILLNKDEDRALFIDVAIPNNNNLLDRHTEKISKYRDLEEQTRRQWKLKDIKTIPIVISSTGLIPKKLLENLRKLQLDENIYRVMQKAVLLGTARTVRKYMGNAEEHRLRRQEVRVEQESNLQQGGEERPGPDHHHEPENLERAPTELNPFDI

SEQ ID NO: 6659 - protein, 1154 aa, Coccinella septempunctata
MKMVITRSLGNKSLPGDRQGMSGAGAGHDSMRDVGGRMLRKRAPAAKEATAPKQQKQPASPIQLPTRTAEGAAQDIQPVLTQAGLVRKRMKWTTSMNETIVRIYNSITGLGQNTNNYRKRLHEEFCNAYPNLNVTEQRVADQYRVILRNELIPTARIDAIKRELQRPPTIENNTNTSDEIHMPGQQQAEETDTESPSCNASEPEHQDDREELHRQVDSDMRRYFAELEGTDPLHRVASPRLNTSKKLSLIIDILNRDVLPEYLQNGSSLEYLHLVFYCAALTTAKTIGAKIRRTNNDGPKLHKLHAPAWQKRLQHKTERLRRDIGRLTEYLNGNRGRKVVKAAKEIMDRNRTHTERETKNATAHHCLDTLKQKLSLYAERLRRYKSNYSRKRDNNSFEKSEETFYRSLTSSDGENGKLPPKEAIEQFWTEQLSTKPQFNGDTGWTEDEKSEARKYEPMQHDMITIEEVKSAIRGLHNWKAPGPDGLQNFWIKKLWIMHDKLTSAINDVIENPERMPVFLTHGTTYLLPKDQRNTEDPSKYRPITCLPTMYKLITSCISNRIHNHCERNNIIAMQQKGCTRDSRGCKDQLIIDSVICNQAFSKRRNLYAAYIDYKKAFDSIPHERLLTILKIYKVDPNIVEFLKNAMSTWRTSLQMKAADCSITTGPIPIRRGIFQGDSLSPLWFCMALNPLSHRLNSTDYGFSIKSGSRTMMKLNHLLYMEDLKLFASTKKKMQLMLKMVEGYSEDIKMKFGLEKCRLLNITRGKIEDGTFKLKEGAEIEALKEGDTYKYLGIKQARKIYQTQMKKELTEEFTRRLRRIMRTGLNSKNLIKAINTYACSALSYSFGIISLTTTDLAALQRKIRTMLTKHNKHHPKSPIERTELPRHLGGRGIVYLSNRMSQEIEGLRKYFLRKAASSELHRVVCVADSSTPLKLQQDHLETVEHSAESKMQKLIGKPLHGRHQSGVNHDYVDISASNYWLTSGRLFPETEGFMLAIQDQVIPTRNYMKYIAKDASVADDSCRYGCATHETIQHITGGCQKFAGTEYKNRHDAVAKILHQEWALKHQLLTSKKVPYYNYHPDAVLENEHHKLYWDRTVLTDRKITHNRPDLILLNKDEDTALFIDVAIPNNNNLLDGHTEKISKYRDLEEQTRRQ

SEQ ID NO: 6660 - protein, 1047 aa, Coccinella septempunctata
MCEGFLVSSQTRSRSLTLPRVRTLWVPIKGFPLTRRKKKKNNNNKDDREELHRQVDSDMRNHCAAPTTAKTIGAKIRQTNNDGPKLHKLHAPAWQKRLQHKTERLRRDIGRLTEYLNGNRGRKVVKAAKDIMDRNRTHTERETENATAHHCLDTLKQKLSLYAERLRRYKSNYSRKRDNNSFEKSEESFYRSLTSSDGENEKLPPKEAIEQFWTEQLSTKPQFNGDTGWIEDEKSEAIKYEPMQHDMITIEEVKSAIRGLHNWKAPGPDGLQNFWIKKLWIMHDKLTSAINDVIVNPERMPVFLTHGTTYLLPKDQRNTEDPSKYRPITCLPTMYKLITSCISNRIHNHCERNNIIAMQQKGCTKDSRGCKEQLIIDSVICNQAFSKRRNLYAAYIDYKKAFDSIPHEWLLTILKIYKVGPNIVKFLKNAMSTWRTSLQMKAADCSITTGPIPIRRGIFQGDSLSPLWFCMVLNPLSHRLNSTDYGFSIKSGSRTMMKLNHLLYMDDLKLFASTKKQMQLMLKMVEGFSEDIKMKFGLEKCRLLNITRGKIEDGTFKLKEGAEIEALKEGDTYKYLGIKQARKINQTQMKKELTEEFTRRLRRIMRTGLNSKNLIKAINTYACSALSYSFGIISWTTTDLAALQRKIRTMLTKHNKHHPKSSIERTELPRHLGGRGIVDLSNRMSQEIERLRNYFLSKAASSELHRVVCVADTSTPLKLYQDHLETVEHSAESKMQKLIGKSLHGRHQNEVNHDYVDISASNYWLTSGRLFPETEGFMLAIQDQVIPTRNYMRYIAKDASVADDSCRYGCATHETIQHITGGCQKFAGTEYKNRHDAVAKILHQELALKHQLLTSKRVPYYNYHPDAVLENEHLKLYWDRTVLTNRKITHNRPDLILLNKDEDTALFIDVAIPNNNNLLDRHTEKISKYRDLEEQTRRQWKLKDIKTIPIVISSTGLIPKKLLENLRKLQLDENIYKVMQKAVLLGTARTVRKYMGNAEEHRLLRQEVRVEQESNLQQGAEERPEPDHHHEPENLERAPTELNPFDI

SEQ ID NO: 6661 - protein, 1242 aa, Coccinella septempunctata
MSGAGAGHDSMRDVGGRMLRKRAPAAKEATAPKQQQQPTSPIQLPTRTAEGAAQDIQPVLTQAGLVRKRMKWTTSMNETIVRIYNSITGLGQNTNNYRKRLHEEFCNAYPNINVTEQRVADQYRVILRNELIPMARIDAIKQELQRPPVTESDTNTSDEIHMPGQQQPEEIDAESPSCNPSEAEHQDDREELHRQIDSEMRRYFAELEGTDPLHRIAPPRLNTSKKLSLIIDILNKDVLPEYLQNGSSLEYLHLVFYCAALTTAKTIGAKIRRTNNDGPKLHKLYAPPWQKRLQHKTERLRRDIGRLTEYVNGNRGRKVVKAAKEIMDRNRTHTERETENATAHHCLDTLKQKLSLYAERLRRYKSDYSRKRDNNSFEKSEESFYRSLTSSDGENGKLPPKEAIEQFWTEQLSTKPQFNGDTGWIEDEKSEAVKYEPMQHDIITIEEVKSAIRGLHNWKTPGPDGLQNFWIKKLWIMHDKLTSAINDVIENPERMPIFLTHGTTYLLPKGQRNTEDPSKYRPITCLPTMYKLITSCISNRIHNHCERNNIIAMQQKGCTKESRGCKEQLIIDSVICNQAFSKRRNLYAAYIDYKKAFDSIPHEWLLTILNIYKVDPNIVKFLKNAMSTWRTSLQMKAADGSITTGPIPIRRGIFQGDSLSPLWFCMALNPLSHRLNSTDYGFAIKSGSRTMMKLNHLLYMDDLKLFASTKKQMQQMLKMVEGFSEDIKMKFGLEKCRLLNITRGKIEDGTFKLREGAEIEALKEGDTYKYLGIKQARKINQSQMKKELTEEFTRRLRRIMRTGLNSKNLIKAINTYACSALSYSFGIISWTTTDLAALQRKIRTMLTKHNKHHPKSSIERTELPRHLGGRGIVDLSNRMTQEIEGLRKYFLSKAASSELHRVVCVPDTSTPLKLQQDHLETVEHSAESKMQKLIGKPLHGRHQNEVNHDHVDISASNYWLTSGRLFPETEGFMLAIQDQVIPTRNYMKYIAKDASVADDSCRYGCATHETIQHITGGCQKFAGTEYKNRHDAVAKILHQELALKHQLLSSKKVSYYNYHPDAVLENEHHKLYWDRTVLTDRKITHNRPDLILLNKDEDTALFIDVAIPNNNNLLDRHTEKISKYRDLEEQTRRQWKLKDVKTIPIVISSTGLIPKKLLENLRKLQLDENIYRVMQKAVLLGTARTVRKYMGNSEEHRLLRQEVRTEQESNLQQGAEERPEPDQHHEPENLERAPTELNPFDI

SEQ ID NO: 6662 - protein, 1262 aa, Coccinella septempunctata
MEMVITRSLGNKSLPGDRQDMSGAGAGHDSMRDVGGRMLRKRTLAAKEATAPKQQQQPTSPIQLPTRTAEGAAQDIQPVLTQAGLVRKRMKWTTSMNETIVRIYNSITGLGQNTNNYRKRLHEEFCNAYPNLNVTEQRVADQYRVILRNELIPTARIDAIKRELQRPLAIENNTNTSDEIHMPGQQHLEDIDTESPSCNPSEPKLQDDREELHRQVHSDMRRYFAELEGTDPLHRITPPRLNTSKKLSLIIDILNKDVLPEYLQNGSSLEYLHLVFHCAALTTAKTIGAKIRGTNNNGPKLHKLHAPAWQKRLQHKTERLRRDIGRLTEYLNGNRGRKVVKAAKEIMDRNRTHTERETENATAHHCLDTLKQKLSLYAERLKRYKSNYSRKRDNNSFEKSEESFYRSLTSSDGQNGKLPPKEAIEQFWTEQLSTKPHFNGDTGWIEDEKSEAIKYEPMQHDMITIEEVKAAIRVLPNWKAPGTDGLQNFWIKKLWIMHDKLTSAINDVIENPERMPVFLTHGTTYLLPKDQRNTEDPSKYRPITCLPTMYKLITSCISNRIHNHCERNNIIAMQQKGCTKDSRGCKEQLIIDSVICNQAFSKRRNLYAAYMDYKKAFDSIPHEWLLTILKIYKVDPNIVKFLKNAMSTWRTSLQMKAADCSITTGPIPIRRGIFQGDSLSPLWFCMALNPLSHRLNSTDYGFSIKSGSRTMMKLNHLLYMDNLKLFASTKKQMQLMLKMVEGFSEDIKMKFGLEKCRLLNITRGKIEDGTFKLKEGAEIEALKEGDTYKYLGTKQAREINQTQMKKELTEEFTRRLRRIMRTGLNSKNLIKAIYTYACSALSYSFGIISWTTTDLAALQRKIRTMLTKHNKHHPKSSIKRTELPRHLGGRGIVDLSNRMSQEIEGLRKYFLSKAASLELHRVVCVADSSTPLKLQQDHLETVQHSAESKMQKLIGKPLHGRHQNEVNHDYVDISASKYWLTSGRLFSETEGFMLAIQDQVIPTRNYMKYIAKDASVADDSCRYGCATHETIQHITGGCQKFAGTEYKNRHDAVAKILHQELALKHQLLTSKKVPYYNYHPDAVLENEHHKLYWDRTVLTDRKITHNRPDLILLNKDEDRALFIDVAIPNNTNLLNRHTEKILEYRDLEEQTRRQWKLKDIKTIPIVISSTGLIPKKLLDNLRKLQLNENIYRVMQKAVLLGTARTVRKYMGNAEEHRLLRQEVRVEQESNLQQGGEERPGPDHHHEPENLERAPTELNPFDI

SEQ ID NO: 6663 - protein, 1259 aa, Coccinella septempunctata
MEMVITRSLGNKSLPGDRQGMSGAGAGHDSMRDVGGRMLRKRAPAAKEATAPKQQQQPTSPIQLPTRTAEGAAQDIQPVLTQAGLVRKRMKWTTSMNETIVRIYNSITGLGQNTNNYRKRLHEEFCNAYPNLNVTEQRVADQYRVILRNELIPTARIDEIKRELQRPPAIENNTSTSDEIHMHGQQQAEETDTSCNASEPEHQDDRKELHRQVDSDMRRYFAELEGTDPLHRVAPPRLNTSKKLSVIIDILNKDVLPEYLQNGSSLEYLHLVFHCAALTTAKTMGAKIRRTNNDGPKLHKLHAPAWQKRLQHKTERLRRDIGRLTEYLSGNRGRKVVKAAKDIMDRNRTHTERETENATAHHCLDTLKQKLSLYAERLRRYKSNYSRKRDNNSFEKSEESFYRSLTSSDGENGKLPPKEAIEQFWTEQLSTKPQFNGDTGWIDDEKSEAIKYEPMQHDKITIEEVKSAIRGLHNWKAPGPDGLQNFWIKKLWIMHDKLTSAINDVIENPERMPVFLTHGTTYLLPKDQRNTEDPSKYRPITCLPTMYKLITSCISNRIHNHCERNNIIAMQQKGCTKDSRGCKEQLIIDSVICNQAFSKRRNLYAAYIDYKKAFDSIPHEWLLTILKIYKVDPNIVKFLKNAMSTWRTSLQMKAADCSITTGPIPIRRGIFQGDSLSPLWFCMALNPLSHRLNSTDYGFSIKSGSRTMMKLNHLLYMDDLKLFASTKKQMQLMLKMVEGFSEDIKMKFGLEKCRLLNITRGKIEDGTFKLKEGAEIEALKEGDTYKYLGIKQARKINQTQMKKELTEEFTRRLRRIMRTGLNSKNLIKAINTYACSALSYSFGIISWTTTDLAALQRKIRTMLTKHNKHHPKSSIERTELPRHLGGRGIVDLSNRMSQEIEGLRKYFLSKAASSELHRVVCVADSSTPLKLQEDHLETVEHSAESKMQKLIGKPLHGRHQNDVNHDYVDISASNYWLTSGRLFPETEGFMLAIQDQVIPTRNYMKYIAKDASVADDSCRYGCATHETIQHITGGCQKFAGTEYKNRHDAVAKILHQELALKHQLLTSKKVPYYNYHPDAVLENEHHKLYWDRTVLTDRKITHNRPDLILLNKDEDRALFIDVAIPNNTNLLDRHTEKISKYRDLEEQTRRQWKLKDIKTIPIVISSTGLIPKKLLENLRKLQLDENIYRVMQKAVLLGTARTVRKYMGNAEEHRLLRQEVRVEQESNLQQGGEERPGPDHHHEPENLERAPTELNPFDI

SEQ ID NO: 6664 - protein, 1262 aa, Coccinella septempunctata
MKMVITRSLGNKSLPGDRQGMSGAGAGHDSMRDVGGRMLRKRAPAAKEATAPKQQQQPTSPIQLPTRTAEGAAQDIQPVLTQAGLVRKRMKWTTSMNETIVRIYNSITGLGQNTSNYRKRLHEEFCNAYPNLNVTEQRVADQYRVILRNELIPTARIDAIKRELQRPPATENNTNTSDEIHMLGQQQAEETDTESPSCNASEPEHQDDREELHRQVDSDMRRYFAELEGTDPLHRVAPPRLNTSKKLSLIIDILNKDVLPEYLQNGSSLEYLHLVFHCAALTTAKTIGAKIRQTNNDGPKLHKLHAPAWQKRLQHKTERLRRDIGRLTEYLNGNRGRKVVKAAKEIMDRNRTHTERETENATAHHCLDTLKQKLSLYAERLRRYKSNHSRKRDNNSFEKSEESFYRSLTSSDGENGKLPPKEAIEQFWTEQLSTKPHFNGDTGWIEDEKSEAIKYEPMQHDMITIEEVKSAIRGLHNWKAPGPDGLQNFWIKKLWIMHDKLTSAINDVIENPERLPVFLTHGTTYLLPKDQRNTGDPSKYRPITCLPTMYKLITSCISNRIHNHCERNNIIAMQQKGCTKDSRGCKEQLIIDSVICNQAFSKRRNLYAAYIDYKKAFDSIPHEWLLTILKIYKVDPNIVEFLKNAMSTWRTSLQMKAADCSITTGPIPIRRGIFQGDSMSPLWFCMALNPLSHRLNSTDCGFSIKSGSRTMMKLNHLLYMDDLKLFASTKKQMQLMLKMVEGFSEDIKMKFGLEKCRLLNITRGKIEDGTFKLKEGAEIEALKEGDTYKYLGIKQAKKINQTQMKKELTEEFTRRLRRIMRTGLNSKNLIKAINTYACSALSYSFGIISWTTTDLAALQRKIRTMLTKHNKHHPKSSIERTELPRHLGGRGIVDLSNRMSQEIEGLRKYFLSKAASSELHRVVCVADSSTPLKLQQDHLETVEHSAESKMQKLIGKPLHGRHQNEVNHDYVDMSASNYWLTSGRLFPETEGFMLAIQDQVIPTRNYMKYIAKDSSVADDSCRYGCATNETIQHITGGCQKFAGTEYKNKHDAVAKILHQELALKHQLLTSKKVPYYNYHPDAVLENDHHKLYWDRTVLTDRKITHNRPDLILLNKDEDRALFIDVAIPNNTNLLDRHTEKISKYRDLEEQTRRQWKLKDIKTIPIVISSTGLIPKKLVENLRKLQLDENIYKVMQKAVLLGTARTVRKYMGNAEEHRLRRQEVRVEQESNLQQGGEERPGPDHHHEPENLERAPTELNPFDI

SEQ ID NO: 6665 - protein, 1043 aa, Coccinella septempunctata
MRRYFAELEGTDPLHRITPPRLNTSKKLSLIIDILNKDVLPEYLQNGSSLEYLHLVFYCAALTTAKTIGAKIRGTNNNGPKLHKLYAPPWQKRLQHKTERLRRDIGRLTEYLNGNRGRKVVKAVKEIMDRNRTHTERETENATAHHCLDTLKQKLSLYAERLRRYKSNYSRKRDNNSFEKSEESFYRSLTSSDGENGKLPPKEAIEQFWTEQLSTKPHFNGDTGWIEDEKSEAIKYEPMQHDMITIEEVKSAIRGLHNWKAPGPDGLQNFWIKKLWIMHDKLTSAINDVIENPERMPVFLTHGTTYLLPKDQRNTEDPSKYRPITCLPTMYKLITSCISNRIHNHCERNNIIAMQQKGCTKDSRGCKEQLIIDSVICNQAFSKRRNLYAAYIDYKKAFDSIPHEWLLTILKIYKVDPNIVKFLKNAMSTWRTSLQMKAADCSITTGPIPIRRGIFQGDSLSPLWFCMALNHLSHRLNSTDYGFSIKNGSRTMMKLNHLLYMDDLKLFASTKKQMQLMLKMVEGFSEDIKMKFGLEKCRLLNITRGKIEDGTFKLKEGAEIEALKEGDTYKYLGIKQARKINQTQMKKELTEEFTRRLRRIMRTGLNSKNLIKAINTYACSALSYSFGIISWTTTDLAALQRKIRTMLTKHNKHHPKSSIERTELPRHLGGRGIVDLSNRMSQEIEGLRKYFLSKAASSELHRVVCVADSSTPLKLQQDQLETVEHSVESKMQKLIGKPLHGRHQNEVNHDYVDISASNYWLTSGRLFPETEGFMLAIQDQVIPTRNYMKYIAKDASVADDSCRYGCATHETIQHITGGCQKFAGTEYKNRHDAVAKILHQELALKHQLLASKKVPYYNYHPDAVLENEHHKLYWDRTVLTDRKITHNRPDLILLNKNEDRALFIDVAIPNNTNLLDRHTEKISKYRDLEEQTRRQWKLKDIKTIPIVISSTGLIPKKLLENLRKLQLDENIYRVMQKAVLLGTARTVRKYMGNAEEHRLLRQEVRVEQESNLQQGGEERPGPDHHHEPENLERAPTELNPFDI

SEQ ID NO: 6666 - protein, 1260 aa, Coccinella septempunctata
MKMVITRSLGNKSLPGDRQGMSGAGAGHDSMRDVGGRMLRKRAPAAKEATAPKQQQQPTSPIQLPTRTAEGAAQDIQPVLTQAGLVRKRMKWTTSMNETIVRIYNSITGLGQNTNNYRKRLHEEFCIAYPNLNVTEQRVADQYRVILRNELIPTARIDAIKRELQRPLAIENNTSDEIHIPGQQHPEDIDTESPSCKANEPEHQDDREELHRQVDSDMRRYFAELEGTDPLHRVAPPRLYTSKKLSLIIDILNKDVLPEFLQNGSSLEYLHLVFHCAALTTAKTMGAKIRRTNNDGPKLHKLHAPAWQKRLQHKTERLRRDIGRLTEYLNGNRGRKVVKAAKEIMDRNRTHTERETENATAHHCLDTLKQKLSLYAERLRRYKSNYSRKRDNNSFEKSEESFYGSLTSSDGENGKLPPKEAIEQFWTEQLSMKPQFNGDTGWIEDEKSEAIKYEPMQHDKITIEEVKSAIRGLHNWKAPGPDGLQNFWIKKFWIMHDKLTSAINDVIENPERMPVFLTHGTTYLLPKDQRNTEDPSKYRPITCLPTMYKLITSCISNRIHNHCERNNIIAMQQKGCTKDSRGCKEQLIIDSVICNQAFSKRRNLYAAYIDYKKAYDSIPHEWLLTILKIYKVDPNIVKFLKNAMSTWRTSLQMKAADCFITTGPIPIRRGIFQGDSLSPLWFCMALNPLSHRLNSTDYGFSIKSGNRTMMKLNHLLYMDDLKLFASTKKQMQLMLKMVEGFSEDIKMKFGLEKCRLLNITRGKIEDGTFKLKEGAEIEALKEGDTYKYLGIKQARKINQTQMKKELTEEFTRRLRRIMRTGLNSKNLIKAINTYDCSALSYSFGIISWTTTDLAALQRKIRTMLTKHNKHHPKSSIERTELPRHLGGRGIVDLSNRISQEIEGLRNYFLSKAASSEIHRVVCVADTSTPLKLHQDHLETVEHSAESKMQKLIGKPLHGRHQNEVNHDYVDISASNYWLTSGRLFPETEGFMLAIQDQVIPTRNYIRYIAKDASVADDSCRYGCATHETIQHITGGCQKFAGTEYKNRHNAVAKILHQELALKHQLLTSKRIPYYNYHPDAVLENEHHKLYWDRTVLTDRKITHNRPDLILLNKDEDTALFIDVAIPNNNNLLDRHTEKISKYRDLEEQTRRQWKLKDIKTIPIVISSKGLIPKKLLENLRKLQLDENIYKVMQKAVLLGTARTVRKYMGNAEEHRLLRQEVRVEQESNLKQEAEERPEPDHHHEPENLERAPTELNPFDI

SEQ ID NO: 6667 - protein, 1171 aa, Coccinella septempunctata
MKWTTSMNETIVRIYNSITGLGQNTNNYRKRLHEEFCNAYPNLNVTEQRVADQYRVILRNELIPTARIDAIKRELQRPPTIENNTNTSDEIHMPGQQQAEETDTESPSCNASEPEHQDDRKELHRQVDSDMRRYFAELEGTDPLHRVEPPRLNTSKKLSLIIDILNKDVLPEYLQNGSSLEYLHLVFHCAALTTAKTMGAKIRRTNNDGPKLHKLHAPVWQKRLQHKTERLRRDIGRLTEYLNGNRGRKVVKAAKEIIDRNRTHTERETENATAHHCLDTLKQKLSLYAERLRRYKSNYSRKRDNNSFEKSEESFYRSLTSLNGENGKLPPKEAIEQFWTEQLSTKPQFNGNTGWIEDEKSEAIKYEPMQHDMITIEEVKSAIRGLHNWKAPGPDGLQNFWIKKLWIMHDKLTSAINDVIENPERMPVFLTHGTTYLLPKDQRNTEDPSKYRPITCLPTMYKLITSCISNRIYNHCERNNIIAMQQKGCTKDSRGCKEQLIIDSVICNQAFSKRRNLYAAYIDYKKAFDSIPHEWLLTILKIYKVDPNIVKFLKNAMSTWRTSLQMKAADCSITTGPIPIRRGIFQGDSLSPLWFCMALNPLSHRLNSTDYGFSIKSGSRTMMKLNHLLYMDDLKLFASTKKQMQLMLKMVEGFSEDIKMKFGLEKCRLLNITRGKMEDGTFKLKEGAEIEALKEGDTYKYLGIKQARKINQTQMKKELTEEFTRRLRRIMRTGLNSKNLIKAINTYACSALSYSFGIISWTTTDLAALQRKIRTMLTKHNKHHPKSSIERTELPRHLGGRGIVDLSNRMSQEIEGLRKYFLSKAASSELHRVVCVADTSTPLKLHQDHLETVEHSAESKMQKLIGKPLHGRHQNEVNHDYVDISASNYWLTSGRLFPETEGFMLAIQDQVIPTRNYMKYIAKDASVADDSCRYGCATHETIQHITGGCQKFAGTEYKNRHDAVAKILHQELALKLLSSKKVPYYNYHPDAVLENEHHKLYWDRTVLTDRKITHNRPDLILLNKDEDRALFIDVAIPNNNNLLDRHTEKISKYRDLEEQTRRQWKLKDIKTIPIVISSTGLIPKKLLENLRKLQLDENIYKVMQKAVLLGTTRTVRKYMGNSEEHRLLRQEVRVEQESNLQQGGEERPGSDHHHEPENLERAPTELNPFDI

SEQ ID NO: 6668 - protein, 1173 aa, Coccinella septempunctata
MKWTTSMNETIVRIYNSITGLGQNTNNYRKRLHEEFCNAYPNLNVTEQRVADQYRVILRNELIPTARIDAIKRELQSPPAIENNTNISDEIHMPGQQQAEETDTESPSCNASEPEHQDDREELRRQVDSDMGRYFAELEGTDPLHRVASPRLNTSKKLSLIIDILNKDVLPEYLQNGSSLEYLHLVFHCAALTTAKTIGAKIRRTSNDGPKLHKLHAPAWQKRLQHKTERLRRDIGRLTEYLNGNRGRKVVKAAKEIMDRNRTLTERETENATAHHCLDTLKQKLSLYAERLRRYKSNYSRKRDNNSFEKSEESFYRSLTSSDGENGKLPPKEAIEQFWTEQLSTKPHFNGDTGWIEDEKSEAIKYEPMQHDMITIEEVKSAIRGLHNWKAPGPDGLQNFWIKKLWIMHDKLTSAINDVIENPGRMPVFLTHGTTFLLPKDQRNTEDPSKYRPITCLPTMYKLITSCISNRIHNHCERNNINAMQQKGCTKDSRGCKEQLIIDSVICNQAFSKRRNLYAAYIDYKKAFDSIPHEWLLTILKIYKVDPNIVKFLKNAMSTWRTSLQMKAADCSITTGLIPIRRGIFQGDSLSPLWFCMALNPLSHRFNSTDYGFSIKSGSRTMMKLNHLLYMDDLKLFASTKKQMQLMLKMVEGFSEDIKMKFGLEKCRLLNITRGKIEDGSFKLKEGAEIEALKEGDTYKYLGIKQARKINHTQMKEELAEEFTRRLRRIMRTGLNSKNLIKAIITYACSALSYSFGIISWTTTDLAALQRRIRTMLTKHNKHHSKSSIERTELPRHLGGRGIVDLSNRISQEIEGLRKYFLSKAASSELHRVVCVADSSTPLKLQQDHLETVEHSAESKMQKLIGKPLHGRHQNEVNHDYVDISASNYWLTSGRLFPETEGFMLAIQDQVIPTRNYMKYIAKDASVADDSCRYGCETHETIQHITGGCQKFAGTEYKNRHDAVAKILHQELALKHQLLTSKKVPYYNYHPDAVLENDHHKLYWDRTVLTDRKITHNRPYLILLNKDEDRALFIDVAIPNNSNLLDRHTEKISKYRDLEEQTRRQWKLKDIKTIPIVISSTGLIPKKLLENLRKLQLDENIYRVMQKAVLLGTARTVRKYMGNAEEHRLLRQELRVEQESSLQQGGEERPGPDHHHEPDNLERAPTELNPFDI

SEQ ID NO: 6669 - protein, 1262 aa, Coccinella septempunctata
MKMVITRSLGNKSLPGDRQGMSGAGAGHDSMRDVGGRMLRKRAPAAKEATAPKQQQQPTSPIQSPTRTAEGAAQDIQPVLTQAGLVRKRMKWTTSMNETIVRIYNSITGLGQNTNNYRKRLHEEFCNAYPNLNVTEQRVADRYRVILRNELIPTARIDAIKRELQSPPAIENNTNISDEIHMPGQQQAKETDTESPSCNASEPEHQDDREELRRQVDSDMRRYFAELEGTDPLHRVAPPRLNTSKKLSLIIDILNKDVLPEYLQNGSSLEYLHLIFHCAALTTAKTIGEKIRRTSNDGPKLHKLHAPAWQKRLQHKTERLRRDIGRLTEYLNGNRGRKVVKAAKEIMDRNRTHTERETENATAHHCLDTLKQKLSLYAERLRRYKSNYSRKRDNNSFEKSEESFYRSLTSSDGENGKLPPKEAIEQFWTEQLSTKPHFNGDTGWIEDEKSEAIKYEPMQHDMITIEEVKSAIRGLHNWKAPGPDGLQNFWIKKLWIMHDKLTSAINDVIENPERMPVFLTHGTTFLLPKDQRNTEDPSKYRPITCLPTMYKLITSCISNRIHNHCEKNNIIAMQQKGCTKDSRGCKEQLIIDSVICNQAFSKRRNLYAAYIDYKKAFDSIHHEWLLTILKIYKVDPNIVKFLKNAMSTWRISLQMKAEDCFITTGPIPIRRGIFQGDSLSPLWFCMALNPLSHRLNSTDYGFSIKSGSRTMMKLNHLLYMDDLKLFASTKKQMQLMLKMVEGFSEDIKMKFGLENCRLLNITRGKIEDGSFKLKEGAEIEVLKEGDTYKYLGIKQARKINHTQMKKELAEEFTRRLRRIMRTGLNSKNLIKAINTYACSALSYSFGIISWTTTDLAALQRRIRTMLTKHNKHHPKSSIERTELPRHLGGRGIVDLSNRMSQEIEGLRKYFLSKAASSELHRVVCVADSSTPLKLQQDHLETVEHSAESKMLKLIGKPLHGRHQNEVNHDYVDISASNYWLTSGRLFPETEGFMLAIQDQVIPTRNYMKYIAKDASVADDSCRYGCETHKTIQHITRGCQKFAGTEYKNRHDAVAKILHQELALKHQHLTSKKVPYYNYHPDAVLENDHHKLYWDRTVLTDRKITHNRPDLILLNKDEDRALFIDVAIPNNNNLLDRHTEKISKYRDLEEQTRRQWKLKDIKTIPIVISSTGLIPKKLLENLRKLQLDENIYRVMQKAVLLGTARTVRKYMGNAEEHRLLRQEVRVEQESSLQQGGEERPGPDHHHEPDNLERAPTELNPFDI

SEQ ID NO: 6670 - protein, 1260 aa, Coccinella septempunctata
MKMVITRSLGNKSLPGDRQGMSGAGAGHDSMRDVGGRMLRKRAPAAKEATAPKQQQQPTSPIQLSTRTAESAAQDIQPVLTQAGLVRKRMKWTTSMNETIVRIYNSITGLGQNTNNYRKRLHEEFCNAYPNLNVTEQRVADQYRVILRNELIPTARIDAIKRELQRPPTIENNTNTSDEIHMPGQQQAEETDTESPSCNASEPEHQDDREELHRQVDSDMRRYFAELEGTDPLHRVAPPRLNTSKKLSLDILNKDVLPEYLQYGSSLEYLHLVFHCAALTTAKTMGAKIRRTNNDGPKLHKLHAPAWQKRLQHKTERLRRDIGRLTEYLNGNRERKVVKAAKEIIDRNRTHTERETENATAHHCLDTLKQKLSLYAERLRRYKSNHSRKRDNNSFEKSEESFYRSLTSSDGENGKLPPKEAIEQFWTEQLSTKPQFNGNTGWIEDEKSEAIKYEPMQHDMITIEEVKSAIRGLHNWKAPGPDGLQNFWIKKLWIMHDKLTSAINDVIENPERMPVFLTHGTTYLLPKDQRNTEDPSKYRPITCLPTMYKLITSCISNRIYNHCERNNIIAMQQKGCTKDSRGCKEQLIIDSVICNQAFSKRRNLYAAYIDYKKAFDSIPHEWLLTILKIYKVDPNIVKFLKNAMSTWRTSLQMKAADCSITTGPIPIRRGIFQGDSLSPLWFCMALNPLSHRLNSSDYGFSIKSGSRTMMKLNHLLYMDDLKLFASTKKQMQLMLKMVEGFSEDIKMKFGLEKCRLLNITRGKMEDGTFKLKEGAEIEALKEGDTYKYLGIKQARKINQTQMKKELTEEFTRRLRRIMRTGLNSKNLIKAINTYACSALSYSFGIISWTTTDLAALQRKIRTMLTKHNKHHPKSSIERTELPRHLGGRGIVDLSNRMSQEIEGLRKYFLSKAASSELHRVVCVADTSTPLKLHQDHLETVEHSAESKMQKLIGKPLHGRHQNEVNHDYVDMSASNYWLTSGRLFPETEGFMLAIQDQVIPTRNYMKYIAKDASVADDSCRYGCPTHETIQHITGGCQKFAGTEYKNRHDAVAKILHQELALKHQLLSSKKVPYYNYHPDAVLENEHHKLYWDRTVLTDRKITHNRPDLILLNKDEDRALFIDVAIPNNNNLLDRHTEKISKYRDLEELTRRQWKLKDIKTIPIVISSTGLIPKKLLENLRKLQLDENIYKVMQKAVLLGTARTVRKYMGNSEEHRLLRQEVRVEQESNLQQGGEERPGPDHHHEPENLERAPTELNPFDI

SEQ ID NO: 6671 - protein, 947 aa, Coccinella septempunctata
MTERLRRDIGRLTEYLNGNRGRKVVKAAKEIIDGNRTHTERETENATAHHCLDTLKQKLSLYAERLRRYKSNYSRKRDNNLFEKSEESFYRSLTSSDGENGKLPPKEAIEQFWTEQLSTKPQFNGNTGWIEDEKSEAIKYEPMQHDMITIEEVKSAIRGLHNWKAPGPDGLQNFWIKKLWIMHDKLTSAINDVIENPERMPVFLTHGTTYLLPKDQRNTEDPSKYRPITCLPTMYKLITSCISNRIYNHCERNNIIAMQQKGCTKDSRGCKEQLIMDSVICNQAFSKRRNLYAAYIDYKKAFDSIPHEWLLTILKIYKVDPNIVKFLKNAMSTWRTSLQMKAADCSITTGPIPIRRGIFQGDSLSPLWFCMALNPLSHRLNSTDYGFSIKSGSRTMMKLNHLLYMDDLKLFASTKKQMQLMLKMVEGFSEDIKMKFGLEKCRLLNITRGKIEDGTFKLKEGAEIEALKEGDTYKYLGIKQARKINQTQMKKELTEEFTRRLRRIMRTGLNSKNLIKAINTYACSALSYSFGIISWTTTDLAALQRKIRTMLTKHNKHHPKSSIERTELPRHLGGRGIVDLSNRMSQEIEGLRNYFLSKAASSELHRVVCVADTSTPLKLHQDHLETVEHSAESKMQKLIGKPLHGRHQNEVNHDYVDISASNYWLTSGRLFPETEGFMLAIQDQVIPTRNYMKYIAKDASVADDSCRYGCATHETIQHITGGCQKFAGTEYKNRHDAVAKILHQELALKHQLLSSKKVPYYNYHPDAVLENEHHKLYWDRTVLTDRKITHNRPDLILLNKNEDRALFIDVAIPNNNNLLDRHTEKISKYRDLEEQTRRQWKLKDIKTIPIVISSTGLIPKKLLENLRKLQLDENIYKVMQKAVLLGTARTVRKYMGNSEEHRLLRQEVRVEQESNLQQGGEERPGPDHHHEPENLERAPTELNPFDI

SEQ ID NO: 6672 - protein, 1262 aa, Coccinella septempunctata
MKMVITRSLGNKSLPGDRQGMSGAGAGHDSMRDVGGRMLRKRAPAAKEATAPKQQQQPSSPIQLPTRTAEGAAQDIQPVLTQAGLVRKRMKWTTSMNETIVRIYNSITGLGQNTNNYRKRLHEEFCIAYPNLNVTEQRVADQYRVILRNELIPTARIDAIKRELQRPLAIENNTNTSDEIHIPGQQHPEDIDTESPSCKANEPEHQDDREELHRQVDSDMRRYFAELEGTDPLHRVAPPRLNTSKKLSLIIDILNKDVLPEYLQNGSSLEYLHLVFHCAALTTAKIMGAKIRRTNNDGPKLHKLHAIPWQKRLQHKTERLRRDIGRMTEYLNGNRGRKVVKAATEIMDRNRTHTERETENATAHHCLDTLKQKLSLYAERLRRYKSNYSRKRDNNSFEKSEESFYRSLTSSDRENGKLPPKEAIEQFWTEQLSTKPQFNGDTGWIEDEKSEAIKYEPMQHDMITIEEVKSAIRGLHNWKAPGPDGLQNFWIKKLWIMHDKLTSAINDVIENPERMPVFLTHGTTYLLPKDQRNTENPSKYRPITCLPTMYKLITSCISNRIHNHCERNNIIAMQQKGCTKDSRGCKEQLIIDSVICNQAFSKRRNLYAAYIDYKKAFDSIPHEWLLTILKIYKVDPNIVKFLKNAMSTWRTSLQMKAADCSITTGPIPIRRGIFQGDSLSPLWFCMALNPLSHRLNSTDYGFSIKSGSRTMMKLNHLLYMDDLKLFASTKKQMQLMLKMVEGFSEDIKMKFGLDKCRLLNITRGKIEDGTFKLKEGAEIEALKEGDTYKYLGIKQARKINQTQMKKELTEEFTRRLRRIMRTGLNSKNLIKAINTYACSALSYSFGIISWTTTDLAALQRKIRTMLTKHNKHHPKSSIERTELPRHLGGRGIVDLSNRMSQEIEGLRNYFLSKAASSELHRVVCVADTSTPLKLHQDHLETVEHSAESKMQKLIGKPLHGRHQNEVNHDYVDISASNYWLTSGRLFPETEGFMLAIQDQVIPTRNYMRYIAKDASVADDSCRYGCATHETIQHITGGCQKFAGTEYKNRHDAVAKILHQELALKYQLLTSKRVPYYNYHPDAVLENEHHKLYWDRTVLTDRKITHNRPDLILLNKDEDTALFIDVAIPNNNNLLDRHTEKISKYRDLEEQTRRQWKLKDIKTIPIVISSTGLIPKKLLENLRKLQLDENIYRVMQKAVLLGTARTVRKYMGNAEEHRLLRQEVRVEQESNLQQGGEERPGPDHHHEPENLERAPTELNPFDI

SEQ ID NO: 6673 - protein, 1262 aa, Coccinella septempunctata
MKMVITRSLGNKSLPGDRQGMSGAGAGHDSMRDVGGRMLRKRAPAAKEATAPKQQQQPTSPIQLSTRTAESAAQDIQPVLTQAGLVRKRMKWTTSMNETIVRIYNSITGLGQNTNNYRKRLHEEFCNAYPNLNVTEQRVADQYRVILRNELIPTARIDAIKRELQRPPTIENNTNTSDEIHMPGQQQAEETDTESPSCNASEPEHQDDREELHRQVDSDMRRYFAELEGTDPLHRVAPPRLNTSKKLSLIIDILNKDVLPEYLQNGSSLEYLHLVFHCAALTTAKTMGAKIRRTNNDGPKLHKLHAPAWQKRLQHKTERLRRDIGRLTEYLNGNRGRKVVEAAKEIIDRNRTHTERETENATAHHCLDTLKQKLSLYAERLRRYKSNYSRKRDNNSFEKSEESFYRSLTSSDGENGKLPPKEAIEQFWTEQLSTKPQFNGNTGWIEDEKSEAIKYEPMQHDMITIEEVKSAIRGLHNWKAPGPDGLQNFWIKKLWIMHDKLTSAINDVIENPERMPVFLTHGTTYLLPKDQRNTEDPSKYRPITCLPTMYKLITSCISNRIYNHCERNNIIAMQQKGCTKDSRGCKEQLIIDSVICNQAFSKRRNLYAAYIDYKKAFDSIPHEWLLTILKIYKVDPNIVKFLKNAMSTWRTSLQMKAADCSITTGPIPIRRGIFQGDSLSPLWFCMALNPLSHRLNSTDYGFSIKSGSRTMMKLNHLLYMDDLKLFASTKKQMQLMLKMVEGFSEDIKMKFGLEKCRLLNITRGKMEDGTFKLKEGAEIEALKEGDTYKYLGIKQLRKINQTQMKKELTEEFIRRLRRIMRTGLNSKNLIKAINTYACSALSYSFGIISWTATDLAALQRKIRTMLTKHNKHHPKSSIERTELPRHLGGRGIVDLSNRMSQEIEGLRKYFLSKAASSELHRVVCVADTSTPLMLHQDHLETVEHSAESKMQKLIGKPLHGRHQNEVNHDYVDISASNYWLTSGRLFPETEGFMLAIQDQVIPTRNYMKYIAKDASVADDSCRYGCATHETIQHITGGCQKFAGTEYKNRHDAVAKILHQELALKHQLLSSKKVPYYNYHPDAVLENEHHKLYWDRTVLTDRKITHNRPDLILLNKDEDRALFIDVAIPNNNNLLDRHTEKISKYRDLEEQTRRQWKLKDIKTIPIVISSTGLIPKKLLENLRKLQLDENIYKVMQKAVLLGTARTVRKYMGNSEEHRLLRQEVRVEQESNLQQGGEERSGPDHHHEPENLERAPTELNPFDI

SEQ ID NO: 6674 - protein, 1261 aa, Coccinella septempunctata
MEMVITRSLGNKSLPGDRQGMSGAGAGHDSMRDVGGRMLRKRAPAAKQATAPKQQQQPTSPIQLPTRTAEGAAQDIQPVLTQAGLVRKRMKWTTSMNETIVRIYNSITGLGQNTNNYRKRLHEEFCIAYPNVNVTEQRVADQYRVILRNELVPTARIDAIKRELQRPLAMENNTNTSDEVHIPGQQHPEDIDTESPSCKANEPEHQDDREELHRQVDSDMRRYFAELEGTDPLHRVAPPRLNTSKKLSLIIDILNKEVLPEYLQNGSSLEYLHLVFHCAALTTAKTMGAKIRRTNNDGPKLHKLHAPAWQKRLQHKTERLRRDIGRLTEYLNGNRGRKVVKAAKEIMDRNRTHTERETENATAHHCLDTLKQKLSLYAERLRRYKSNYSRKRDNNSFEKSEESFYRSLTSSDGENGKLPPKEAIEQFWTVQLSTKPQFNGDTGWIEDEKSEAIKYETMQHDMITIEEVKSAIRGLHNWKAPGPDGLQNFWIKKLWIMHDKLTSAINDVIENPERMPVFLTHGTTYLLPKDQRNTEDPSKYRPITCLPTMYKLITSCISNRIHNHCERNNIIAMQQEGCTKDSRGCKEQLIIDSVICNQAFSKRRNLYAAYIDYKKAFDSIPHEWLLTILKIYKVDPNIVKFLKNAMSTWRTSLRIKAADCSITTGPIPIRRGIFQGDSLSPLWFCMALNPSSHRLNSTDYGFSIKSGSRTMMKLNHLLYMDDLKLFASTKKQMQLMLKMVEGFSEDIKMKFGLEKCRLLNITRGIIEDGSFKLKEGAEIEALKEGDTYKYLGIKQARKINQTQMKKELAEEFTRRLRRIMRTGLNSKNLIKAINTYACSALSYSFGIISWTTTDLAALQRRIRTMLTKHNKHHPKSSIERTELPRHLGGRGIVDLSNRMSQEIEGLRKYFLSKAASSELHRVVCVADSSTLLKLQQDHLETVEHSAESRMQKLIGKPLHGRHQNEVNHDYFDISASNYWLTSGRLFPETKGFMLAIQNQVIPTRNYMKYIAKDASVANDSCRYGCETHETIQHITGGCQKFAGTEYKNRHDAVAKILHQELALKHLPTSKKVPYYNYHPDAVLENDHHKLYWDRTVLTDRKITHNRPDLILLNKDEDRALFIDVAIPNNNNLLDRHTEKISKYRDLEEQTRRQRKLKDIKTIPIVISSTGLIPKKLLENLRKLQLDENIYRVMQKAVLLGTARTVRKYMGNAEEHRLRRQEVRVEQESSLQQGGEERPGPDHHHEPDNLERAPTELNPFDI

SEQ ID NO: 6675 - protein, 1262 aa, Coccinella septempunctata
MKMVITRSLGNKSLPGDRQGMSGAGAGHDSMRDVGGRMLRKRTPAAKEATAPKQQQQPTSPIQSPTRTAEGAAQDIQPVLTQAGLVRKRMKWTTSMNETIVRIYNSITGLGQNTNNYRKRLHEEFCNAYPNLNVTEQRVADQYRVILRNELIPTAQIDAIKRELQSPPAIENNNNISDEIHMPGQQQAEETDTESPSCNAIEPEHQDDREELRRQIDSDMRRYFAELEGTDPLHRVAPPRLNTSKKLSLIIDILNKDVLPEYLQNGSSLEYLHLVFHCAALTTAKTIGAKIRRTSNDGPKLHKLHAPAWQKRLQHKTERLRRDIGRLTEYLNGNRGRKVVKAAKEIMDRNRTHTERETKNASAHHCLDTLKQKLSLYAERLRRYKSNYSRKRDNNSFEKSEESFYRSLTSSDGENGKLPPKEAIEQFWTEQLSTKSHFNGDTGWIEDEKSEAIKYEPMQHDMITIEEVKSAIRGLHNWKAPGPDGLQNFWIKKLWIMHDKLTSAINDVIENPERMPVFLTHGTTFLLPKDQRNTEDPSKYRPITCLPTMYKLITSCISNRIHNHCERNNIIAMQQKGCTKDSRGCKEQLIIDSVICNQAFSKRRNLYAAYIDYKKAFDSIPHEWLLTILKIYKVDPNIVKFLKNAMSTWRTSLQMKAADCSITTGPIPIRRGIFQGDSLSPLWFCMALNPLSHRLNSTDYGFSIKSGSRTMMKLNHLLYMDDLKLFASTKKQMQLMLKMVEGFSEDIKMKFGLEKCRLLNITRGKIEDGTFKLREGAEIEALKEGDTYKYLGIKQARKINQTQMKKELTEEFTRRLRRIMRTGLNSKNLIKAINTYACSALSYSFGIISWTTTDLAALQRKIRTMLTKHNKHHPKSSIERTELPRHLGGRGIVDLSNRMSQEIEGLRKYFLSKAASSEVHRVVCVADSSTPLKLQQDHLETVEHSAESKMQKLIGKPLHGRHQNEVNHDYVDISASNYWLTSGRLFPETEGFMLAIQDQVIPTRNYMKYIAKDASVADDSCRYGCATHETIQHITGGCQKFAGTEYKNRHDAVAKILHQELALKHQLLTSKKVPYYKYHPDAVLENEHHKLYWDRTVLTDRKITHNRPDLILLNKDEDRALFIDVAIPNNTNLLDRHTEKISKYRDLEEQTRRQWKLKDIKTIPIVISSTGLIPKKLLENLRKLQLDENIYRVMQKAVLLGTARTVRKYMGNAEEHRLLRQEVRVEQESNLQQGGEERPGPDHHHEPENLERAPTELNPFDI

SEQ ID NO: 6676 - protein, 1043 aa, Coccinella septempunctata
MRRYFAELEGTDPLHRVAPPRLNTSKKLSLIIDILNKDVLPEYLQNGSSLEYLHLVFHCAALTTAKTIGAKIRRTNNDGPKLHKLHAPAWQKRLQHKTERLRRDIGRLTEYLNGNRGRKVVKAAKEIMDRNRTHTERETENATAHHCLDTLKQKLSLYAERLRRYKSNYSRKKDNNSFEKSEESFYRSLTSSDGENGKLPPKEAIEQFWTEQLSTKPQFNGDTGWIEDEKSEAIKYEPMQHDMITIEEVKSAIRGLNNWKAPGPDGLQNFWIKKLWIMHDKLTSAINDVIENPERMPVFLTHGTTYLLPKDQRNTEDPSKYRPITCLPTMYKLITLCISNRIHNHCERNNIIAMQQKGCTNDSRGCKEQLIIDSVICNQAFSKRRNLYAAYIDYKKAFDSIPHEWLLMILKIYKVDPNIVKFLKNAMSTWRTSLQMKAADCSITTGPIPIRRGIFQGDSLSPLWFCMALNPLSHRLNSTDYGFSIKSGSRTMMKLNHLLYMDDLKLFASTKKQMHLMLKMVEGFSEDIKMKFGLEKCRLLNITRGKIEDGTFKLKEGAEIEALKEGDTYKYLGIKQARKINQTQMKKELTEEFTRRLRRIMRTGLNSKNPIKAINTYACSAQSYSFGIISWTTTDLAALQRKIRTMLTKHNKHHPKSSIERTELPRHLGGRGIVDLSNRMSQEIEGLRNYFLSKEASLELHRVVCVAETSTPLKLHQDHLETVEHSAESKMQKLIGKPLHGRHQNEVNHDYVDISASNYWLTSGRLFPETEGFMLAIQDQVIPTRNYMRYIAKDASVADDSCRYGCATHETIQHITGGCQKFAGTEYKNRHDAVAKILHQELALKHQLLTSKRVPYYNYHPDAVLENGHHKLYWDRTVLTDRKITHNRPDLILLNKDEDTALFIDVAIPNNNNLLDRHTEKISKYRDLEEQTRRQWKLKDTKTIPIVISSTGLIPKKLLENLRKLQLDENIYKVMQKAVLLGTARTVRKYMGNAEEHRLRRQEVRVEQESNLQQGAEERPEPDHHHEPENLERAPTELNPFDI

SEQ ID NO: 6677 - protein, 1167 aa, Coccinella septempunctata
MEMVITRSLGNKSLPGDRQGMSGAGAGHDSMRDVGGRMLRKRAPAAKEATAPKQQQQPTSPIQLPTRTAEGAAQDIQPVLTQAGLVRKRMKWTTSMNETIVRIYNSITGLGQNTNNYRRRLHEEFCNAYPNLNVTEQRVADQYRVILRNKLILTARIDAIKRELQRPLAIENNTNTSDEIHMPGQQHLEDIDTESPSCNPSEPELQDDREELHRQVHSDMRRYFAELEGTDPLHRITPPRLNTSKKLSLIIDILNKDVLPEYLQNGSSLEYLHLVFYCAALTTAKTIGAKVRRTNNDGPKLNKLHAPPWQKRLQHKTERLRKDIGRLTEYLNGNRGRKVVKAAKEIMDRNRRHTERETENATAHHCLDTLKQKLSLYAERLRRYKSNYIRKRDNNSFEKSEETFYRSLTSSDVENGKLPPKEAIEQFWTEQLSTKPQFNGDTGWTEDEKSEALKYEPMQHDKITIEEVKSAIRGLHNWKAPGPDGLQNFWIKKLWIMHDKLTSAINDVIENPERMPIFLTHGTTNLLPKDQRNTEDPSKYRPITCLPTMYKLITSCISNRIHNHCERNNIIAMQQKGCTKDSRGCKEQLIIDSVICNEAFSKRRNLYAAYIDYKKAFDSIPHEWLLTILKIYRVDPNIVKFLKNAMSTWRTSLQMKAGDCSITTGPIPIRRGIFQGDSLSPLWFCMALNPLSRRLNSTDYGFSIKSGSRTMIKLNHLLYMDDLKLFASTKKQMQQMLKIVEGFSEDIKMKFGLEKCRLLNITRGKIEDGTFKLKEGAEIEALKEGDTYKYLGIKQARKINQTQMKKELTEEFTRRLRRIMRTGLNSKNLIKAINTYACSALSYSFGIISWTTTDLAALQRKIRTMLTKHNKHHPKSSIERTELPRHLGGRGIVDLSNRMSLEIEGLRKYFLSKAASSELHRVVCVADSSTPLKLQQDHLETVEHSAESKMQKLIGKPLHGRHQNEVNHDYVDISSSNYWLTSGWLFPETEGFMLAIQDQVIPTRNYMKYIAKDASVADDSCRYGCATHETIQHITGGCQKFAGTEYKNRHDAVAKILHQELALRHQLLSSKKVPYYNYHPDAVLENEHHKLYWDRTVLTDRKITHNRPDLILLNKDEDRALFIDVAIPNNNNLLDRHTEKISKYRDLEEQTRRQWKLKDIKTIPIVI

SEQ ID NO: 6678 - protein, 1005 aa, Coccinella septempunctata
MNHLKSLLQYQLTKDYSSIIIIIIIIIIIIIIIIIIIITIITKLHKLHAPAWQKRLQHKTERLRRDIGRLTEYLNGNRGRKVVKAVRGIMDGSRTHTERETENATAHHCLDTLKQKLSLYAERLRRYKSNYSRKRDNNSFEKSEESFYRSLTSSDGENGKLPPKEAIEQFWTEQLSTKPHFNGDTGWIEDEKSEAIKCEPMQHDMITIEEVKSAIRGLHNWKAPGPDGLQNFWIKKLWIMHDKLTSAINDVIENPERMPVFLTHGTTYLLPKDQRNTEDPSKYRPITCLPTMYKLITSCISNRIHNHCERNNIIAMQQKGCTKDSRGCKEQLIIDSVVCNQAFSKRRNLYAAYIDYKKAFDSIPHEWLLTILKIYKVDPNIVKFLKNAMSTWRTSLQMKAADCSITTGPIPIRRGIFQGDSLSPLWFCMALNPLSHRLNSTDYGFSIKNGSRTMMKLNHLLYMDDLKLFASTKKQMQLMLKMVEGFSEDIEMKFGLEKCRLLNVTRGKIEDGTFKLKEGAQIEALKEGDTYKYLGIRQARKINQTQMKKELTEEFTRRLRRIMRTGLNSKNLIKAINTYACSALSYSFGIISWTTTDLAALQRKIRTMLTRHNKHHPKSSIERTELPRHLGGRGIVDLSNRMSQEIEGLRKYFLSKAASSELHRVVCVADSSTPLKLQQDHLETVEHSAESKMQKLIGKPLHGRHQNEVNHDYVDISASNYWLTSGRLFPETEGFMLAIQDQVIPTRNYMKYIAKDASVADDSCRYGCATHETIQHITGGCQKFAGTEYKNRHDAVAKILHQELALKHQLLAPKKVPYYNYHPDAVLENEHHKLYWDRTVLTDRKITHNRPDLILLNKNEDRVLFIDVAIPNNTNLLDRHTEKISKYRDLEEQTRKQWKLKDIKTIPIVISSTGLIPKKLLENLRKLQLDENIYRVMQKAVLLGTARTVRKYMGNAEEHRLLRQEVRVEQESNLQQGGEERPGPDHHHEPENLERAPTELNPFDI

SEQ ID NO: 6679 - protein, 1232 aa, Coccinella septempunctata
MRDVGGRMLRKRAPAAKEATAPKQQQQPTSPIQLPTRTAEGAAQDIQPVLTQAGLVRKRMKWTTSMNETIVRIYNSITGLGQNTNNYRKRLHEEFCNAYPNINVTEQRVADQYRVILRNELIPMARIDAIKQELQRPPVTESDTNTSDEIHMPGQQQPEEIDAESPSCNPSEAEHQDDREELHRQIDSEMRRYFAELEGTDPLHRIAPPRLNTSKKLSLIIDILNKDVLPEYLQNGSSLEYLHLVFYCAALTTAKTIGAKIRRTNNDGPKLHKLYAPPWQKRLQHKTERLRRDIGRLTEYVNGNRGRKVVKAAKEIMDRNRNHTERETENATAHHCLDTLKQKLSLYAERLRRYKSNYSRKRDNNSFEKSEETFYRSLTSSDGENGKLPPKEAIEQFWTEQLSTKPQFNGDTGWIEDEKSEAVKYEPMQHDIITIGEVKSAIRGLHNWKTPGPDGLQNFWIKKLWIMHDKLTSAINDVIENPERMPIFLTHGTTYLLPKDQRNTEDPSKYRPITCLPTMYKLITSCISNRIHNHCERNNIIAMQQKGCTKESRGCKEQLIIDSVICNQAFSKRRNLYAAYIDYKKAFDSIPHEWLLTILNIYKVDPNIVKFLKNAMSTWRTSLQMKAADGSITTGPIPIRRGIFQGDSLSPLWFCMALNPLSHRLNSTDYGFAIKSGSRTMMKLNHLLYMDDLKLFASTKKQMQQMLKMVEGFSEDIKMKFGLEKCRLLNITRGKIEDGTFELREGAEIEALKEGDTYKYLGIKQARKINQSQMKKELTEEFTRRLRRIMRTGLNSKNLIKAINTYACSALSYSFGIISWTTTDLAALQRKIRTMLTKHNKHHPKSSIERTELPRHLGGRGIVDLSNRMTQEIEGLRKYFLSKAASSELYREVCVADTSTPLKLQQDHLETVEHSAESKMQKLIGKPLHGRHQNEVNHDYVDISASNYWLTSGRLFPETEGFMLAIQDQVIPTRNYMKYIAKDASVADDSCRYGCATHETIQHITGGCQKFAGTEYKNRHDAVAKILHQELALKHQLLSSKKVSYYNYHPDAVLENEHHKLYWDRTVLTDRKITHNRPDLILLNKDEDTALFIDVAIPNNNNLLDRHTEKISKYRDLEDQTRRQWKLKDVKTIPIVISSTGLIPKKLLENLRKLQLDENIYRVMQKAVLLGTARTVRKYMGNSEEHRLLRQEVRTEQESNLQQGAEERPEPDQHHEPENLERAPTELNPFDI

SEQ ID NO: 6680 - protein, 1262 aa, Coccinella septempunctata
MEMVITRSLGNKSLPGDRQGMSGAGAGHDSMRDVGGRMLRKRAPAAKEATAPKQQQQPTSPIQLPTRTAEGAAQDIQPVLTQAGLVRKRMKWTTSMNETIVRIYNSITGLGQNTNNYRKRLHEEFCNAYPNLNVTEQRVADQYRVILRNKLIPTARIDAIKRELQRPLAIENNTNTSDEIHMPGQQHLEDIDTESPSCNPSEPELQDDREELHRQVHSDMRRYFAELEGTDPLHRITPPRLNTSKKLSLIIDILNKDVLPEYLQNGSSLEYLHLVFYCAALTTAKTIGAKIRGTNNNGPKLHKLHAPAWQKRLQHKTERLRRDIGRLTEYLNGNRGRKVVKAAKEIMDRNRTHTERETENATAHHCLDTLKQKLSLYAERLRRYKSNYSRKRDNNSFEKSEESFYRSLTSSDGENGKLPPKEAIEQFWTEQLSTKPHFNGDTGWIEDEKSEAIKYEPMQHDMITIEEVKAAIRVLHNWKAPGPDGLQNFWIKKLWIMHDKLTSAINDVIENPERMPVFLTHGTTYLLPKDQRNTEDPSKYRPITCLPTMYKLITSCISNRIQNHCERNNIIAMQQKGCTKDSRGCKEQLIIDSVICNQAFSKRRNLYAAYIDYKKAFDSIPHEWLLTILKIYKVDPNIVKFLKNAMSTWRTSLQMKAADCSITTGPIPIRRGIFQGDSLSPLWFCMALNPLSHRLNSTDYGFSIKSDSRTMIKLNHLLYMDDLKLFASTKKQMQLMLKMVEGFSEDIKMKFGLEKCRLLNITRGKIEDGTFKLKEGAEIEALKEGDTYKYLGIKQARKINQTQMKKELTEEFTRRLRRIMRTGLNSKNLIKAINTYACSALSYSFGIISWTITDLAALQRKIRTMLTKHNKHHPKSSIERTELPRHLGGRGIVDLSNRMSQEIEGLRKYFLSKAASSELHRVVCVADSSTPLKLQQDHLETVEHSAESKMQKLIGKPLHGRNQNEVNHDYVDISASNYWLTSGRLFPETEGFMLAIQDQVIPTRNYMKYIAKDASVADDSCRYGCATHETIQHITGGCQKFAGTEYKNRHDAVAKILHQELALKHQLLTSKKVPYYNYHPDAVLENEHHKLYWDRTVLTDRKITHNRPDLILLNKDEDRALFIDVAIPNNTNLLDRHTEKISKYRDLEEQIRRQWKLKDIKTIPIVISSTGLIPKKLLENLRKLQLDENIYRVMQKAVLLGTARTVRKYMGNAEEHRLRRQKVRVEQESNLQQGGEERPGPDHHHEPENLERVPTELNPFDI

SEQ ID NO: 6681 - protein, 1223 aa, Coccinella septempunctata
MEIVITRSLGNKSLPGDRQGMSGAGAGHDSMRDVGGRMLRKRAPAAKEATAPKQQQQPSSPIQLPTRTAEGAAQDIQPVLTQAGLVRNRMKWTTSMNETIVRIYSITGLGQNTNNYRKRLHEEFCNAYPNLNVTEQRVADQYRVILRNELIPTARIDAIKRELQHPLAIENNTNTSDEIHMPGQQQAEETDTESPSCKANEPEHQDDRDELHRQVDSEMRRYFAELEGTDPLHRIAPPRLYTSKKLSLIIDILNKDVLPEYLQNGSSLEYFHLVFYCAALTTTKTIGAKIHRTNNDGPKLHKLHAPPWQKRLQHKTERLRRDIGRLTENLNGNRGRKVVKAAKEIMDRNRTHTERETENATAHHCLDTLKQKLSLYAERLRRYKSNYSRKRDNNSFEKSEETFYRSLTSSDVENGKLPPKEAIEQFWTEQLSTKPQFNGDTGWIEDEKSEAIKYDPMQHDKITIEEVKSAIRGLHNWKAPGPDGLQNFWIKKLWIMHDKLTSAINDVIENPERMPIFLTHGTTYLLPKDQRNTEDPSKYRPITCLPTMYKLITSCISNRIHNHCERNNIIAMQQKGCTKDSRGCKEQLIIDSVICNQAFSKRRNLYAAYIDYKKAFDSIPHEWLLTILKIYKVDPNIVKFLKNAMPTWRTSLQMKAADCSITTGPIPIRRGIFQGDSLSPLWFCMALNPLSHRLNSTDYGFSIKSGSRTMMKLNHLLYMDDLKLFASTKKQMQQMLKMVEGFSEDIKMKFGLEKCRRLNIPRGETEDGTFKLQEGAEIKALKEGDTYKYLGIKQARKINHTQMKKELTEEFNRRLRRIMRTGRNSKNLIKAINPYACSALSYSFGIISWTTTDLAALQRKTRTMLTKHNKHHPKSSIERTELPRHLGGRGIVDLSNRMSQEIEGLRKYFLSKAASSELHRVVCVADSSTPLKLQQDHLETVEHSAESKMQKLISKPLHGRHQNEVNHDYVDISASNYWLNSGRLFPETEGFMLAIQDQVIPTRNYMKYIAKDASVTDDSCRHGCATHETIQHITGGCQKFAGTEYKNRHDAVAKILHQELALKHQLLSSKKVPYYNYHPDAVLENEHHKLYWDRTDLTDRKITHNRPDLILPKKNEDRSLFIDVAIPNNNNLLDSHTEKISKYRDLEEQTRRQWKLKDIKTIPIVISSTGLIPKKLLENLRKLQLDENIYRVIRDNNESVNSFTKFVRFRLCQSSLSISLKIT

SEQ ID NO: 6682 - protein, 1262 aa, Coccinella septempunctata
MKMVITRSLGNKSLPGDRQGMSGAGAGHDSMRDVGGRMLRKRAPAAKEATAPKQQQQPSSPIQLPTRTAEGAAQDIQPVLTQAGLVRKRMKWTTSMNETIVRIYNSITGLGQNTNNYRKRLHEEFCNAYPNLNVTEQRVADQNRVILRNELIPTARIDAIKRELQRPPAIENNTNTSDEIHMPGQQYPEDIDTESPSCKANEPKHQDDRDELHRQVDSEMRRYFAELEGTDPLHRIAPPRLNTSKKLSLIIDILNKDVLPEYLQNGSSLEYLHLVFYCAALTTAKIIGAKIRRTNNDGPKLHKLHAPPWQKRLQHKTERLRRDIGRLTEYLNGNRGRKVVTAAKEIMDRNRTHTERETENATAHHCLDTLKQKLSLYAERLRRYKSNYSRKRDNNSFEKSEETFYRSLTSSDVENAKLPPKEAIEQFWTEQLSTKPQFNGDTGWIEDEKSEAIKYEPMQHDKITIEEVKSAIRGLHNWKAPGPDGLQNFWIKKLWIMHDKLTSAINDVIDNPERMPIFLTHGTTYLLPKDQRNTEDPSKYRPITCLPTMYKLITSCISHRIHNHCERNNIIAMQQKGCTKDSRGCKEQLIIDSVICNQAFSKRRNLYAAYIDYKKAFDSIPHEWLLTILKIYKVDPNIVKFLKNAMSTWRTSLQMKATDCSITTGPIPIRRGIFQGDSLSPLWFCMALNPLSHRLNSTDYGFSIKSGSRTMMKLNHLLYMDDLKLFASTKKQMQHMLKMVEGFSEDIKMKFGLEKCRLLNITRGKIEDGTFKLKEGAEIEALKEGDTYKYLGIKQARKVNQTQMKKELTEEFTRRLRRIMRTGLNSKNLIKAINTYACSALSYSFGIISWTTTDLAALQRKIRTMLTKHNKHHPKSSIERTELPRHLGGRGIVDLSNRMSQEIEGLRKYFLTKAASSELHRVVCVADSSTPLKLQQDHLETVEHSAESKMQKLIGKPLHGRHQNEVNHDYVDISASNYWLTSGRLFPETEGFMLAIQDQVIPTRNYMKYIAKDASVADDSCRYGCATHETIQHITGGCQKFAGTEYKNRHDAVAKILHQELALKHQLLSSKKVPYYNYHPDAVLENEHHKLYWDRTVLTDRKITHNRPDLILLNKDEDRALFIDVAIPNNNNLLDRHTEKISKYRDLEEQTRRQWKLKDIKIIPIVISSTGLIPKKLLENLRKLQLDENIYRVMQKAVLLGTARTVRKYMGNAEEHRLRRQEVRVEQESNLQRGGEERPGPDHHHEPENLERVPTELNPFDI

SEQ ID NO: 6683 - protein, 982 aa, Coccinella septempunctata
MGAKIRRTNNDGPKLHKLHAPAWQKRLQHKTERLRRDIGRLTEYLNGNRGRKVVKAAKEIMDRNRTHTERETENATAHHCLDTLKQKLSLYAERLRRYKSNYSRKRDNNSFEKSEESFYRLLTSSDGENGKLPPKEAIERFWTKQLSTKPQFNGDTGWIEDEKSEAIKYEPMQHDMITIEEVKSAIRGLHNWKAPGPDGLQNFWIKKLWIMHDKLTSAINDVIENPERMPVFLTHGTTYLLPKDQRNTEDPSKYRPITCLPTMYKLITSCISNRIHNHCERNNIIAMQQEGCTKDSRGCKEQLIIDSVICNQAFSKRRNLYAAYIDYKKAFDSIPHEWLLTILKIYKVDPNIVKFLKNAMSTWRTSLQMKAADCSITTGPIPIRRGIFQGDSLSPLWFCMALNPLSHRLNSTDYGFSIKSGSRTMMKLNHLLYMDDLKLFASTEKQMQLMLKMVEGFSEDIKMKFGLEKCRLLNITRGKIEDGTFKLKEGAEIEALKEGDTYKYLGIKQARKINQTQMKKELTEEFTRRLRRIMRTGLNSKNLIKAINTYACSALSYSFGIISWTTTDLAALQRKIRTMLTKHNKHHPKSSIERTELPRHLGGRGIVDLSNRMSQEIEGLRNYFLSKAASSELHRVVCVADTSTPLKLHQDHLETVEHSAESKMQKLIGKPLHGRHQNEINHDYVDISASNYWLTSGRLFPETEGFMLAIQDQVIPTRNYMRYIAKDASVADDSCRYGCATHETIQHITGGCQKFAGTEYKNRHDAVAKILHQELALKHQLLTSKRIPYYNYHPDAVLENEHHKLYWDRTVLTDRKITHNRPDLILLNKDEDTALFIDVAIPNNNNLLDRHTEKISKYRDLEEQTRRQWKLKDIKTIPIVISSTGLIPKKLLENLRKLQLDENIYKVMQKAVLLGTARTVREYMGNAEEHRLLRQEVRVEQESNLQRGAEERPEPHHHHEPENLERAPTELNPFDISDIWDK

SEQ ID NO: 6684 - protein, 1173 aa, Coccinella septempunctata
MKWTTSMNETIVRIYNSITGQGQNTNNYRKRLHEEFCIAYPNLNVTEQRVADQYRVILRNELIPTARIDAIKRELQHPLAIENNTNTSDEIHIPGQQHPEDIDTESPSCKANEPEHQDDREELHRQVDSDMRKYFAELEGTDPLHRVAPPRLNTSKKLSLIIDILNEDVLPEYLQNGSSLEYLHLVFHCAALTTAKTIGAKIRQTNNDGPKLHKLHAPAWQKRLQHKTERLRRDIGRLTEYLNGNRGRKVVKAAKDIMDRNRTHTERETENAIAHHCLDTLKQKLSLYAERLRRYKSNYSRKRDNNSFEKSEESFYRSLTSSDGENGKLPPKEAIEQFWTEQLSTKPQFNGDTGWIEDEKSEAIKYEPMQHDMITIEEVKSAIRGLHNWKAPGPDGLQNFWIKKLWIMHDKLTSAINDVIVNPERMPVFLTHGTTYLLPKDQRNTEDPSKYRPITCLPTMYKLITSCISNRIHNHCERNNIIAMQQKGCTKDSRGCKEQLIIDSVICNQAFSKRRNLYAAYIDYKKAFDSIPHEWLLTILKIYKVDPNIVKFLKNAMSTWRTSLQMKAADCSITTGPIPIRRGIFQGDSLSPLWFCMALNPLSHRLNSTDYGFSIKSGSRTMMKLNHLLYMDDLKLFASTKKQMQLMLKMVEGFSEDIKMKFGLEKCRLLNITRGKIEDGTFKLKEGAEIEALKEGDTYKYLGIKQARKINQTQMKKELTEEFTRRLRRIMRTGLNSKNLIKAINTYACSALSYSFGIISWTTTDLAALQRKIRTMLTKHNKHHPKSSIERTELPRHLGGRGIVDLSNRMSQEIEGLRNYFSSKAASSELHRVVCVADTSTPLKLHQDHLETVEHSAESKMQKLIGKSLHGRHQNEVNHDYVDISASNYWLTSGRLFPETEGFMLAIQDQVIPTRNYMRYIAKDASVADDSCRYGCATHETIQHITGGCQKFAGTEYKNRHDAVAKILHQELALKHQLLTSKRVPYYNYHPDAVLENEHHKLYWDRTVLTDRKITHNRPDLILLNKDEDTELFIDVAIPNNNNLLDRHTEKISKYRDLQEQTRRQWKLKDIKTIPIVISSTGLIPKKLLENLRKLQLDENIYKVMQKAVLLGTARTVRKYMGNAEEHRLLRQEVRVEQESNLQQGAEERPEPDQHHEPENLERAPTELNPFDI

SEQ ID NO: 6685 - protein, 1262 aa, Coccinella septempunctata
MEMVITRSLGNKSLPGDRQGMSGAGAGHDSMRDVGGRMLRKRAPAAKEATAPKQQRQPTSPIQLPTRTAEGAAQDIQPVLTQAGLVRKRMKWTTSMNETIVRIYNSITGLGQNTNNYRKRLHEEFCNAYPNLNVTEQRVADQYRVILRNKLIPTARIDAIKRELQRPLAIENNTNTSDEIHMPGQQHLEDIDTESPSCNPSEPELKDDREELHRQVISDMRRYFAELEGTDPLHRITPPRLNTSKKLSLIIDILNKDVLPEYLQNESSLEYLHLVFYCAALTTAKTIGAKIRGTNNNGPKLHKLHAPAWQKRLQHKTERLRRDIGRLTEYLNGNRGRKVVKAAKEIMDRNRTHTERETENATAHHCLDTLKQKLSLYAERLRRYKSNYSRKRDNNSFEKSEESFYRSLTSSDGENGKLPPKEAIEQFWTEQLSTKPHFNGDTGWIEDEKSEAIKYEPMQHDMITIEEVKSAIRGLHNWKAPGPDGLQNFWIKKLWIMHDKLTSAINDVIENPERMPVFLTHGTTYLLPKDQRNTEDPSKYRPITCLPTMYKLITSCISNRIHNHCERNNIIAMQQKGCTKDSRGCKEQLIIDSVICNQAFSKRRNLYAAYIDYKKAFDSIPHEWLLTILKIYKVDPNIVKFLKNAMSTWRTSLQMKAADCSITTGAIPIRRGIFQGDSLSPLWFCMALNPLSHRLHSTDYGFSIKSGSRTMMKLNHLLYMDDLKLFASTKKQMQLMLKMVEGFSEDIKMKFGLEKCRLLNITRGKIEDGTFKLKEGAEIEALKEGDTYKYLGIKQARKINQTQMKKELTEEFTRRLRRIMRTGLNSKNLIKAINTYACSALSYSFGIISWTTTDLAALQRKIRTMLTKHNKHHPKSSIERTELPRHLGGRGIVDLSNRMSQEIEGLRKYFLSKAASSELHRVVCVADSSTPLKLQQDHLETVEHSAESKMQKLIGKPLHGRHQNEVNHDYVDISASNYWLTSGRLFPETEGFMLAIQDQVIPTRNYMKYIAKDASVADDSCRYGCATHETIQHITGGCQKFAGTEYKNRHDAVAKILHQELALKHQLLTSKKVPYYNYHPDAVLENEHHKLYWDRTVLTDRKITHNRPDLILLNKDEDRALFIDVAIPNNTNLLDRHTEKISKYRDLEEQTRRQWKLKDIKTIPIVISSTGLIPKKLLENLRKLRLDENIYRVMQKAVLLGTARTVRKYMGNAEEHRLLRQEVRVEQESNLQQGGEERPGPDHHHEPENLERAPTELNPFDI

SEQ ID NO: 6686 - protein, 1262 aa, Coccinella septempunctata
MKMVITRSLGNKSLPGDRQGMSGAGAGHDSMRDVGGRMLRKRAPAAQEATAPKQQQQPTSPIQLPTRTAEGAAQDIQPVLTQAGLVRKRMKWTTSMNETIVRIYNSITGLGQNTNNYRKRLHEEFCIAYPNLNVTEQRVADQYRVILRNELIPTARIEAIKRELQRPPTIENNTNTSDEILMPGQQQAEETDTETPSCNASEPEHQDDREELHRQVDSDMRRYFAELEGTDPLHRVAPPRLNTSKKLSLIIDILNKDVLPEYLQNGSSLEYLHLVFHCAALTTAKTIGAKIRRTNNDGQKLHKLHAPAWQKRLQHKTERLRRDIGRLTEYLNGNRGRKVVKAAKEIMDRNRTHTERETENATAHHCLDTLKQKLSLYAERLRRYKSNYSRKRDNNSFEKSEESFYRSLTSSDGENGKLPPKEAIEQFWTEQLSTKPQFNGDTGWIEDEKSEAIKYEPMQHDMITIEEVKSAIRGLHNWKAPGPDGLQNFWIKKLWIMHEKLTSAINDVIENPERMPVFLTHGTTYLLPKDQRNTEDPSKYRPITCLPTMYKLITSCISNRIHNHCERNNIIAMQQKGCTKDSRGCKEQLIIDSVICNQAFSKRRNLYAAYIDYKKAFDSIPHEWLLTILKIYKVDPNIVKFLKNAMSTWRTSLQMKAADCSITTGPIPIRRGIFQGDSLSPLWFCMALNPLSHRLNSTDYGFSIKSGSRTMMKLNHLLYMDDLKLFASTKKQMQLMLKMVEGFSEDIKMKFGLEKCRLLNITRGKIEDGTFKLKEGAEIEALKEGDTYKYLGIKQARKINQTQMKKELTEEFTRRLRRIMRTGLNSKNLIKAINTYACSALSHSFGIISWTTTDLAALQRKIRTMLTKHNKHHPKSSIERTELPRHLGGRGIVDLSNRMSQEIEGLRNYFLSKAASSELHRVVCVADTSTPLKLHQDHLETVEHSAESKMQKLIGKPLHGRHQNEVNHDYVDISASNYWLTSGRLFPETEGFMLAIQDQVIPTRNYMRYIAKDASVADDSCRYGCATHETIQHITGGCQKFAGTEYKNRHDAVAKILHQELALKHQLLTSKRFPYYNYHPDAVLENEHHKLYWDRTVLTDRKITHNRPDLILLNKDEDTALFIDVAIPNNNNLLDRHTEKISKYRDLEEQTRRQWKLKDINTIPIVISSTGLIPKKLLENLRKLQLDENIYKVMQKAVLLGTARTVRKYMGNAEEHRLLRQEVRVEQESNLQQGAEERPEPDHHHEPENLERAPTELNPFDI

SEQ ID NO: 6687 - protein, 987 aa, Coccinella septempunctata
MDNMDPAGIGLYGASDKYILRLVKVPWFSRYNNINNNNNTKTERLRRDIGRLTEFLNGNRGRKVVKAAKEIIDRNRTHTERETENATAHHCLDTLKQKLSLYAERLRRYKSNYSRKKDNNSFEKSEESFYRSLTSSDGENGKLPPKEAIEQFWTEQLSTKPQFNGNTGWIEDEKSEAIKYEPMQHDMITIEEVKSAIRGLHNWKAPGPDGLQNFWIKKLWIMHDKLTSAINDVIENPERMPVFLTHGTTYLLPKDQRNTEDPSKYRPITCLPTMYKLITSCISNRIYNHCERNNIIAMQQKGCTKDSRGCKEQLIIDSVICNQAFSKRRNLYAAYIDYKKAFDSIPHEWLLTILKIYKVDPNIVKFLKNAMSTWRTSLQMKAADCSTTTGPIPIRRGIFQGDSLSPLWFCMALNPLSHRLNSTDYGFSIKSGSRTMMKLNHLLYMDDLKLFASTKKQMQLMLKMVEGFSEDIKMKFGLEKCRLLNITRGKMEDGTFKLKEGAEIEALKEGDTYKYLGIKQARKINQTQMKKELTEEFTRRLRRIMRTGLNSKNLIKAINTYACSALSYSFGIISWTTTDLAALQRKIRTMLTKHNKHHPKSSIERTELPRHLGGRGIVDLSNRMSQEIEGLRKYFLSKAASSELHRVVCVADTSTPLKLHQDHLETVEHSAESKMQKLIGKPLHGRHQNEVNHDYVDISASNYWLTSGRLFPETEGFMLAIQDQVIPTRNYMKYIAKDASVADDSCRYGCATHETIQHITGGCQKFAGTEYKNRHDAVAKILHQELALKHQLLSSKKVPYYNYHPDAVLENEHHKLYWDRTVLTDRKITHNRPDLILLNKDEDRALFIDVAIPNNNNLLDRHTEKISKYRDLEEQTRRQWKLKDIKTIPIVISSTGLIPKKLLENLRKLQLDENIYKVMQKAVLLGTARTVRKYMGNSEEHRLLRQEVRVEQESNLQQGGEERPGPDHHHEPENLERAPTELNPFDI

SEQ ID NO: 6688 - protein, 1262 aa, Coccinella septempunctata
MEMVITRSLGNKSLPGDRQGMSGAGAGHDSMRDVGGRMLRKRAPAAKEATAPKQQQQPTSPIQLPTRTAEGAAQDIQPVLTQAGLVRKRMKWTTSMNETIVRIYNSITGLGQNTNNYRKRLHEEFCNAYPNINVTEQRVADQYRVILRNELIPMARIDAIKQELQRPPVTESDTNTSDEIHMPGQQQPEEIDAESPSCNPSEAEHQDDREELHRQIDSEMRRYFAELEGTDPLHRIAPPRLNTSKKLSLIIDILNKDVLPEYLQNGSSLEYLHLVFYCAALTTAKTIGAKIRRTNNDGPKLHKLYAPPWQKRLQHKTERLRRDIGRLTEYVNGNRGRKVVKAAKEIMDRNRTHTERETENATAHHCLDTLKQKLSLYAERLRRYKSNYSRKRDNNSFEKSEESFYRSLTSSDGENGKLPPKEAIEQFWTEQLSTKPQFNGDTGWIEDEKSEAVKYEPMQHDIITIEEVKSAIRGLHNWKTPGPDGLQNFWIKKLWIMHDKLTSAINDVIENPERMPIFLTHGTTYLLPKGQRNTEDPSKYRPITCLPTMYKLITSCISNRIHNHCERNNIIAMQQKGCTKESRGCKEQLIIDSVICNQAFSKRRNLYAAYIDYKKAFDSIPHEWLLTILNIYKVDPNIVKFLKNAMSTWRTSLQMKAADGSITTGPIPIRRGIFQGDSLSPLWFCMALNPLSHRLNSTDYGFAIKSGSRTMMKLNHLLYMDDLKLFASTKKQMQQMLKMVEGFSEDIKMKFGLEKCRLLNITRGKIEDGTFKLREGAEIEALKEGDTYKYLGIKQARKINQSQMKKELTEEFTRRLRRIMRTGLNSKNLIKAINTYACSALSYSFGIISWTTTDLAALQRKIRTMLTKHNKHHPKSSIERTELPRHLGGRGIVDLSNRMTQEIEGLRKYFLSKAASSELHRVVCVADTSTPLKLQQDHLETVEHSAESKMQKLIGKPLHGRHQNEVNHDYVDISASNYWLTSGRLFPETEGFMLAIQDQVIPTRNYMKYIAKDASVADDSCRYGCATHETIQHITGGCQKFAGTEYKNRHDAVAKILHQELALKHQLLSSKKVSYYNYHPDAVLENEHHKLYWDRTVLTDRKITHNRPDLILLNKDEDTALFIDVAIPNNNNLLDRHTEKISKYRDLEEQTRRQWKLKDVKTIPIVISSTGLIPKKLLENLRKLQLDENIYRVMQKAVLLGTARTVRKYMGNSEEHRLLRQEVRTEQESNLQQGAEERPEPDQHHEPENLERAPTELNPFDI

SEQ ID NO: 6689 - protein, 1173 aa, Coccinella septempunctata
MKWTTSMNETIVRIYNSITGLGQNTNNYRKRLHEEFCNAYPNLNVTEQRVADQYRVILRNELIPTARIDAIKRELQRPPTIENNTNTSDEIHMPGQQQAEETDTESPSCNASEPEHQDDRKELHRQVDSDMRRYFAELEGTDPLHRVAPPRLNTSKKLSLIIDILNKDVLPEYLQNGSSLEYLHLVFHCAALTTAKTMGAKIRRTNNDGPKLHKLHAPAWQKRLQHKTERLRRDIGRLTEYLNGNRGRKVVKAAKEIIERNRTHTERETENATAHHCLDTLKQKLSLYAERLRRYKSNYSRKRDNNSFEKSEESFYRSLTSLNGENGKLPPKEAIEQFWTEQLSTKPQFNGNTGWIEDEKSEAIKYEPMQHDMITIEEVKSAIRGLHNWKAPGPDGLQNFWIKKLWIMHDKLTSAINDVIENPERMPVFLTHGTTYLLPKDQRNTEDPSKYRPITCLPTMYKLITSCISNRIYNHCERNNIIAMQQKGCTKDSRGCKEQLIIDSVICNQAFSKRRNLYAAYIDYKKAFDSIPHEWLLTILKIYKVDPNIVKFLKNAMSTWRTSLQMKAADCSITTGPIPIRRGIFQGDSLSPLWFCMALNPLSHRLNSTDYGFSIKSGSRTMMKLNHLLYMDDLKLFASTKKQMQLMLTMVEGFSEDIKMKFGLEKCRLLNITRGKMEDGTFKLKEGAEIEALKEGDTYKYLGIKQARKINQTQMKKELTEEFTRRLRRIMRTGLNSKNLIKAINTYACSALSYSFGIISWTTTDLAALQRKIRTILTKHNKHHPKSSIERTELSRHLGGRGIVDLSNRMSQEIEGLRKYFLSKAASSELHRVVCVADTSTPLKLHQDHLETVEHSAESKMQKLIGKPLHGRHQNEVNHDYVDISASNYWLTSGRLFPETEGFMLAIQDQVIPTRNYMKYIAKDASVADDSCRYGCATHETIQHITGGCQKFAGTEYKNRHDAVAKILHQELALKHQLLSSKKVPYYNYHPDAVLENEHHKLYWDRTVLTDRKITHNRPDLILLNKDEDRALFIDVAIPNNNNLLDRHTEKISKYRDLEEQTRRQWKLKDIKTIPIVISSTGLIPKKLLENLRKLQLDENIYKVMQKAVLLGTTRTVRKYMGNSEEQGLLRQEVRVEQESNLQQGGEERPGSDHHHEPENLERAPTELNPFDI

SEQ ID NO: 6690 - protein, 922 aa, Coccinella septempunctata
MDRNRTHTERETENATAHHCLDTLKQKLSLYAESLRRYKSNYSRKRDNNSFEKSEESFYRSLTSSDGENGKLPPKEAIEQFWTEQLSTKPQFNGVTGWIEDEKSEAIKYEPMQHDMITIEEVKSAIRGLHNWKAPGPDGLQNFWIKKLWIMHDKLTSAINDVIENPERMPVFLTHGTTYLLPKDQRNTEDPSKYRPITCLPTMYKLITSCISNRIHNHCERNNIIAMQQGGCTKDSRGCKEQLIIDSVICNQAFSKRRNLYAAYIDYKKAFDSIPHEWLLTILKIYKVDPNIVKFLKNAMSTWRTSLQMKAADCSITTGPIPIRRGIFQGDSLSPLWFCMALNPLSHRLNSTDYGFSIKSGSRTMMKLNHLLYMDDLKLFASTKKQMQLMLKMVEGFSEDIKMKFGLEKCRLLNITRGKIEDGTFKLKEGAEIEALKEGDTYKYLGIKQARKINQTQMKKELTEEFTRRLRRIMKTGLNSKNLIKAINTYACSALSYSFGIISWTTTDLAALQRKIRTMLTKHNKHHPKSSIERTELPRHLGGRGIVDLSNRMSQEIEGLRNYFLSKAASSELHRVVCVADTSTPLKLHQDHLETVEHSAESKMQKLIGKPLHGRHQNEDNHDYVDISASNYWLTSGRLFPETEGFMLAIQDQVIPTRNYMRYIAKDASVADDSCRYGCATHETIQHITGGCQKFAGTEYKNRHDAVAKILHQELALKHQLLTSKRIPYYNYHPDAVLENEHHKLYWDRTVLTDRKITHNRPDLILLNKDEDTALFIDVAIPNNNNLLDRHTEKISKYRDLEEQTRRQWKLTDIKTIPIVISSTGLIPKKLLENLRKLQLDENIYKVMQKAVLLGTARTVRKYMGNAEEHRLLRQEVRVEQESNLQQEAEERPEPHHHHEPENLERAPTELNPFAISDIWDK

SEQ ID NO: 6691 - protein, 1262 aa, Coccinella septempunctata
MEMVITRSLGNKSLPGDRQGMSGAGAGHDSMRDVGGRMLRKRAPAAKEATAPKQQQQPTSPIQLPTRTAEGAAQDIQPVLTQAGLVRKRMKWTTSMNETIVRIYNSIMGLGQNTNNYRKRLHEEFCNAYPNLNVTEQRVADQYRVILRNQLIPTARIDAIKRELQRPLAIENNTNTSDEIHMPGQQHLEDIDTENPSCNPSEPELQDDREELHRQVHSDMRRYFAELEGTDPLHRITPPRLNTSKKLSLIIDILNKDVLPEYLQNGSSLEYLHLVFYCAALTTAKTIGAKIRGTNNNGPKLHKLYAPAWQKRLQHKTERLRRDIGRLTEYLNGNRGRKVVKAVKEIMDRNRTHTERETENATAHHCLDTLKQKLSLYAERLRRYKSNYSRKRDNNSFEKSEESFYRSLTSSDGENGKLPPKEAIEQFWTEQLSTKPHFNGDTGWIEDEKSEAIKYEPMQHDMITIEEVKSAIRGLHNWKAPGPDGLQNFWIKKLWIMHDKLTSAINDVIENPERMPVFLTHGTTYLLPKDQRNTEDPSKYRPITCLPTMYKLITSCISNRIHNHCERNNIIAMQQKGCTKDSRGCKEQLIIDSVICNQAFSKRRNLYAAYIDYKKAFDSIPHEWLLTILKIYKVDPNIVKFLKNAMSTWRTSLQMKAADCSITTGPIPIRRGIFQGDSLSPLWFCMALNPLSHRLNSTDYGFSIKNGSRTMMKLNHLLYMDDLKLFASTKKQMQLMLKMVEGFSEDIQMKFGLEKCRLLNITRGKIEDGTFKLKEGAEIEALKEGDTYKYLGIKQARKINQTQMKKELTEEFTRRLRRIMRTGLNSKNLIKAINTYACSALSYSFGIISWTTTDLAALQRKIRTMLTKHNKHHPKSSIERTELPRHLGGRGIVDLSNRMSQEIEGLRKYFLSKAASSELHRVVCVADGSAPLKLQQDHLETVEHSAEGKMQRLIGKPLHGRHQNEVNHDYVDISASNYWLTSGRLFPETEGFMLAIQDQVIATRNYMKYIAKDASVADDSCRYGCATHETIQHITGGCQKFAGTEYKNRHDAVAKILHQELALKHQLLASKKVPYYNYHPDAVLENEHHKLYWDRTVLTDRKITHNRPDLILLNKDEDRALFIDVAIPNNTNLLDRHTEKISKYRDLEEQTRRQWKLKDIKTIPIVISSTGLIPKKLLENLRKLQLDENIYRVMQKAVLLGTARTVRKYMGNAEEHRLLRQEVRVEQESNLQQGGEERPGPDHHHEPENLERAPTELNPFDI

SEQ ID NO: 6692 - protein, 1043 aa, Coccinella septempunctata
MRKYFAELEGTDPLHRVAPPRLNTSKKLSLIIDILNKDVLPEYLQNGSSLEYLHLVFHCAALTTAKTIGAKIRQTNNDGPKLHKLHAPAWQKRLQHKTERLRRDIGRLTEYLNGNRGRKVVKAAKDIMDRNRTHTERETENATAHHCLDTLKQKLSLYAERLRRYKSNYSRKRDNNSFEKSEESFYRSLTSSDGENGKLPPKEAIEQFWTEQLSTKPQFNGDTGWIDDEKSEAIKYEPMQHDMITIEEVKSAIIGLHNWKAPGPDGLQNFWIKKLWIMHDKLTSAINDVIVNPERMPVFLTHGTTYLLPKDQRNTEDPSKYRPITCLPTMYKLITSCISNRIHNHCERNNIIAMQQKGCTKDSRGCKEQLIIDSVICNQAFSKRRNLYAAYIDYKKAFDSIPHEWLLTILKIYKVDPNIVKFLKNAMSTWRTSLQMKAADCSITTLPIPIRRGIFQGDSLSPLWFCMALNPLSHRLNSTDYGFSIKSGSRTMMKLNHLLYMDDLKLFASTKKQMQLMLKMVEGFSEDIKMKFGLEKCRLLNITRGKIEDGTFKLKEGAEIEALKEGDTYKYLGIKQARKINQTQMKRELTEEFTRRLRRIMRTGLNSKNLIKAINTYACSELSYSFGIISWTTTDLAALQRKIRTMLTKHNKHHPKSSIERTELPRHLGGRGIVDLSNRMSQEIEGLRNYFLSKAASSELHRVVCVADTSTPLKLHQDHLETVEHSAESKMQKLIGKSLHGRHQNEVNHDYVDISASNYWLTSGRLFPETEGFMLAIQDQVIPTRNYMRYIAKDASVADDSCRYGCAIHETIQHITGGCQKFAGTEYKNRHDAVAKILHQELALKHQLLTSKRVPYYNYHPDAVLENEHHKLYWDRTVLTDRKITHNRPDLILLNKDEDTALFIDVAIPNNNNLLDRHTEKISKYRDLEEQTRRQWKLKDIKTIPIVISSTGLIPKKLLENLRKLQLDENIYKVMQKAVLLGTARTVRKYMGNAEEHRLLRQEVRVEQESNLQQGAEERPEPDHHHEPENLERAPTELNPFDI

SEQ ID NO: 6693 - protein, 1087 aa, Coccinella septempunctata
MPGQQQAEVTDTESPSCNASEPEHQDDREELRRQVDSDMRRYFAELEGTDPLHRVAPPRLNTSKKLSLIIDILNKDVLPEYLQNGSSLEYLHLVFHCAALTTAKTIGAKIRRTSNDGPKLHKLHAPAWQKRLQHKTERLRRDIGRLTEYLNGNRGRKVVKAAKEIMDRNRTHTERETENATAHHCLDTLKQKLSLYAERLRRYKSNYSRKRDNNSFEKSEESFYRSLTSSDGENGKLPPKEAIEQFWTEQLSTKPHFNGDTGWIEDEKSEAIKYEPMQHDMITIEEVKSAIRGLHNWKAPGPDGLQNFWIKKLWIMHDKLTSAINDVIENPERMPVFLTHGTTFLLPKDQRNTEDPSKYRPITCLPTMYKLITSCISNRIHNHCERNNIIAMQQKGCTKDSRGCKEQLIIDSVICNQAFSKRRNLYAAYIDYKKAFDSIPHEWLLTILKIYKVDPNIVKFLKNAMSTWRTSLQIKAADCSITTGPIPIRRGIFQGDSLSPLWFCMALNPLSHRLNSTDYGFSIKSGSRTMMKLNHLLYMDDLKLFASTKKQMQLMLKMVEGFSEDIKMKFGLEKCRLLKITRGKIEDGSFKLKEGAEIEALKERDTYKYLGIKQARKINQTQMKKELAEEFTRRLRRIMRTGLNSKNLIKAINTYACSALSYSFGIISWTTTDLAALQRSIRTMLTKHNKHHPKSSIERTELPRHLGGRGIVDLSNRMSQEIEGLRKYFLSKAASSELHRVVCVADSSTPLKLQQDHSETVEHSAESKMQKLIGKPLHGRHQNEVNNDYFDISASNYWLTSGRLFPETEGFMLAIQDQVIPTRKYMKYIAKDASVANDSCRYGCETHETIQHITGGCQKFAGTEYKNRHDAVAKILHQELALKHQLLTSKKVPYYNYHPDAVLENDHHKLYWDRTVLTDRKITHNRPDLILLNKDEDRALFIDVAIPNNNNLLDRHTEKISKYRDLEEQTRRQWKLKDIKTIPIVISSTGLIPKKLLENLRKLQLDENIYRVMQKAVLLGTARTVRKYMGNAEEHRLRRQEVRVEQESSLQQGGEERPGPDHHHEPDNLERAPTELNPFAISDIWDK

SEQ ID NO: 6694 - protein, 1262 aa, Coccinella septempunctata
MKMVITRSLGNKSLPGDRQGMSGAGAGHDSMRDVGGRMLRKRAPAAKEATAPKQQQQPTSPIQSPTRTAESAAQDIHPVLTQAGLVRKRMKWTTSMNETIVRIYNSITGLGQNTNNYRKRLHEEFCNAYPNLNVTEQRVADQYRVILRNELIPTARTDAIKRELQRPPTIENNTNTSDEIHMPGQQQAEETDTESPSCNASEPEHQDDREELHRQVDSDMRRYFAELEGTDPLHRVAPPRLNTSKKLSLIIDILNKDVLPEYLQNGSSLEYLHLVFHCAALTTAKIIGAKIRRTNNDGPKLHKLHAPAWQKRLQHKTERLRRDIGRLTEYLNGNRGRKVVKAAKEIIDRNRTHTERETENATAHHCLDTLKQKLSLYAERLRRYKSNYSRKRDNNSFEKSEESFYRSLTSSDGENGKLPPKEAIEQFWTEQLSTKPQFNGNTGWIEDEKSEAIKYEPMQHDMITIEEVKSAIRGLHNWKAPGPDGLQNFWIKKLWIMHDKLTSAINDVIENPERMPVFLTHGTTYLLPKDQRNTENPSKYRPITCLPTMYKLITSCISNRIYNHCERNNIIAMQQKGCTKDSRGCKEQLIIDSVICNQAFSKRRNLYAAYIDYKKAFDSIPHEWLLTILKIYKVDPNIVKFLKNAMSTWRTSLQMKAADCSITTGPIPIRRGIFQGDSLSPLWFCMALNPLSHRLNSTDYGFSIKSGSRTMMKLNHLLYMDDLKLFASTKKQMQLMLKMVEGFSEDIKMKFGLEKCRLLNITRGKMEDGTFKLKEGAEIEALKEGDTYKYLGIKQARKINQTQMKKELTEEFTRRLRRIMRTGLNSKNLIKAINTYACSALSYSFGIISWTTTDLAALQRKIRTMLTKHNKHHPKSSIERTELPRHLGGRGIVDLSNRMSQEIEGLRKYFLSKAASSELHRVVCVADTSTPLKLHQDHLETVEHSAESKMQKLIGKPLHGRHQNEVNHDYVDISASNYWLTSGRLFPETEGFMLAIQDQVIPTRNYMKYIAKDASVADDSCRYGCATHETIQHITGGCQKFAGTEYKNRHDAVAKILHQELALKHQLLSSKKVPYYNYHPDAVLENEHHKLYWDRTVLTDRKITHNRPDLILLNKDEDRALFIDVAIPNNNNLLDRHTEKISKYRDLEEQTRRQWKLKDIKTIPIVISSTGLIPKKLLENLKKLQLDENIYKVMQKAVLLGTARTVRKYMGNSEEHRLLRQEVRVEQESNLQQGGEERPGPDHHHEPENLERAPTELNPFDI

SEQ ID NO: 6695 - protein, 806 aa, Coccinella septempunctata
MQHDMITIEEVKSAIRGLHNWKAPGPDGLQNFWIKKLWIMHDKLTSAINDVIENPERMPVFLTHGTTYLLPKDQRNTEDPSKYRPITCLPTMYKLITSCISNRIYNHCERNNIIAMQQKGCTKDSRGCKEQLIIDSVICNQAFSKRRNLYAAYIDYKKAFDSIPHEWLLTILKIYKVDPNIVKFLKNAMSTWRTSLQMKAADCSITTGPIPIRRGIFQGDSLSPLWFCMALNPLSHRLNSTDYGFSIKNGSRNMMKLNHLLYMDDLKLFASTKKQMQLMLKMVEGFSEDIKMKFGLEKCRLLNITRGKIEDGTFKLKEGAEIEALKEGDTYKYLGIKQARKINQTQMKKELTEEFTRRLRRIMRTGLNSKNLIKAINTYACSALSYSFGIISWTTTDLAALQRKIRTMLTKHNKHHPKSSIERTELPRHLGGRGIVDLSNLMSQEIEGLREYFLSKAASSELHRVVCVADSSTPLKLQQDHLETVEHSAESKMQKLIGTPLHGRHQNEVNHDYVDISASNYWLTSGRLFPETEGFMLAIQDQVIPTRNYMKYIAKDASVADDSCRYGCATHETIQHITGGCQKFAGTEYKNRHDAVAKILHQELALKHQLLAPKKVPYYNYHPDAVLENEHHKLYWDRTVLTDRKITHNRPDLILLNKDEDRGALFIDVAIPNNTNLLDRHTEKISKYRDLEEQTRRQWKLKDIKTIPIVISSTGLIPKKLLENLRKLQLDENIYRVMQKAVLLGTARTVRKYMGNAEEHRLLRQEVRVEQESNLQQGGEERPGPDHHHEPENLERAPTELNPFDI

SEQ ID NO: 6696 - protein, 1268 aa, Coccinella septempunctata
MKMVITRSLGNKSLPGDRQGMSGAGAGHDSMRDVGGRMLRKRAPAAKQATAPKQQQQPTSPIQLPTRTAEGAAQDIQPVLTQAGLVGKRMKWTTSMNETIVRIYNSITGLGQNTNNYRKRLHEEFCIAYPNVNVTEQRVADQYRVILRNELVPTARIDAIKRELQRPLAMENNTNTSDEVHIPGQQHPEDIDTESPSCKANEPEHQDDREELHRQVDSDMRRYFAELEGTDPLHRVAPPRLNTSKKLSLIIDILNKDVLPEYLQNGSSLEYLHLVFHCAALTTAKTMGAKIRRTNNDGPKLHKLHAPAWQKRLQHKTERLRRDIGRLTEYLNGNRGRKVVKAAKEIMDRNRTHTERETENATAHHCLDTLKQKLSLYAERLRRYKSNYSRKRDNNSFEKSEESFYRSLTSSDGENGKLPPKEAIEQFWTEQLSTKPQFNGDTGWIEDEKSEAIKYEPMQHDMITIEEVKSAIRGLQNWKAPGPDGLQNFWIKKLWIMHDKLTSAINDVIENPERMPVFLTHGTTYLLPKDQRNTEDPSKYRPITCLPTMYKLITSCISNRIHNHCERNNIIAMQQEGCTKDSRGCKEQLIIDSVICNQAFSKRRNLYAAYIDYKKAFDSIPHEWLLTILKIYKVDPNIVKFLKNAMSTWRTSLQMKAADCSITTGPIPIRRGIFQGDSLSPLWFCMALNPLSHRLNSTDYGFSIKSGSRTMMKLNHLLYMDDLKLFASTKKQMQLMLKMVEGFSEDIKMKFGLEKCRLLNITRGKIEDGTFKLKEGAEIEALKEGDTYKYLGIKQARKINQTQMKKELTEEFTRRLRRIMRTGLNSKNLIKGINTYACSALSYSFGIISWTTTDLAALQRKIRTMLTKHNKHHPKSSIERTELPRHLGGRGIVDLSNRMSQEIEGLRNYFLSKAASSELHRVVCVADTSTPLKLHQDHLETVEHSAESKMQKLIGKPLHGRHQNEVNHDYVDISASNYWLTSGRLFPETEGFMLAIQDQVIPTRNYMRYIAKDASVADDSCRYGCATHETIQHITGGCQKFAGTEYKNRHDAVAKILHQELALKHQLLTSKRIPYYNYHPDAVLENEHHKLYWDRTVLTDRKITHNRPDLILLNKDEDTALFIDVAIPNNNNLLDRHTEKISKYRDLEEQTRRQWKLKDIKTIPIVISSTGLIPKKLLENLRKLQLDENIYKVMQKAVLLGTARTVRKYMGNAEEHRLLRQEVRVEQESNLQQEAEERPEPHHHHEPENLERAPTELNPFDISDIWDK

SEQ ID NO: 6697 - protein, 1172 aa, Coccinella septempunctata
MNGVFHIFVAILASIATRKNNITPFQVFTYNHNCHFVYCRGVELAFMCSNRSFICTMNYELIPTARIDAIKRELQRPPTIENNTNTSDEIHMPGQQQAEETDTESPSCNESEPEHQDDREELHRQVDSDMRRYFAELEGTDPLHRVAPPRLNTSKKLSLIIDILNKDVLPEYLQNGSSLEYLHLVFHCAALTTAKTMGAKIRQTNNDGPKLHKLHAPAWQKRLQHKTERLRRDIGRLTEYLNGNRGRKVVKAAKEIIDRNRTHTERETENATAHHCLDTLKQKLSLYAERLRRYKSNYSRKRDNNSFEKSEESFYRSLTSSDGENGKLPPKEAIEQFWTEQLSTKPQFNGNTGWIEDEKSEAIKYEPMQLDMITIEEVKSAIRGLQNWKAPGPDGLQNFWIKKLWIMHDKLTSAINDVIENPERMPVFLTHGTTYLLPKDQRNTEDPSKYRPITCLPTMYKLITSCISNRIYNHCERNNIIAMQQKGCTKDSRGCKEQLIIDSVICNQAFSKRRNLYAAYIDYQKAFDSIPHEWLLTILKIYKVDPNIVKFLKNAMSTWRTSLQMKAADCSITTGPIPIRRGIFQGDSLSPLWFCMALNPLSHRLNSTDYGFSIKSSSRTMMKLNHLLYMDDLKLFASTKKQMQLMLKMVEGFSEDIKMKFGLEKCRLLNITRGKMEDGTFKLKEGAEIEALKEGDTYKYLGMKQARKINQTQMKKELTEEFTRRLRRIMRTGLNSKNLIKAINTYACSALSYSFGIISWTTTDLAALQRKIRTMLTKHNKHHPKSSLERTELPRHLGGRGIVDLSNRMSQEIEGLRKYFLSKAASSELHRVVCVADTSTPLKLHQDHLETVEHSAESKMQKLIGKPLHGRHQNEINHDYVDISASNYWLTSGRLFPETEGFMLAIQDQVIPTRNYMRYIAKDASVADDSCRYGCATHETIQHITGGCQKFAGTEYKNRHDAVAKILHQELALKHQLLSSKKVPYYNYHPDAVLENEHHKLYWDRTVLTDRKITHNRPDLILLNKDEDRALFIDVAIPNNNNLLDRHTEKISKYRDLEEQTRRQWKLKDIKTIPIVISSTGLIPKKLLENLRKLQLDENIYKVMQKAVLLGTARTVRKYMGNSEEHRLLRQEVRVEQESNLQQGGEERPGPDHHHEPENLERAPTELNPFDI

SEQ ID NO: 6698 - protein, 1093 aa, Coccinella septempunctata
MENNTNTSDEVHIPGQQHPEDIDTESPSCKANEPEHQDDREELHRQVDSDMRRYFAELEGTDPLHRVAPPRLNTSKKLSLIIDILNKDVLPEYLQNGSSLEYLHLVFHCAALTTAKTMGAKIRRTNNDGPKLHKLHAPAWQKRLQHKTERLRRDIGRLTEYLNGNRGRKVVKAAKEIMDRNRTHTERETENATAHHCLDTLKQKLSLYAERLRRYKSNYSRKRDNNSFEKSEESFYRSLTSSDGENGKLPPKEAIEQFWTEQLSTKPQFNGDTGWIEDEKSEAIKYEPMQHDMITIEEVKSAIRGMHNWKAPGPDGLQNFWIKKLWIMHDKLTSAINDVIENPERMPVFLTHGTTYLLPKDQRNTEDPSKYRPITCLPTMYKLITSCISNRIHNHCERNNIIAMQQKGCTKDSRGCKEQLIIDSVICNQAFSKRRNLHAAYIDYKKAFDSIPHEWLLTILKIYKVDPNIVKFLKNAMSTWRTSLQMKAADCSITTGPIPIRRGIFQGDSLSPLWFCMALNPLSHRLNSTDYGFSIKSGSRTMMKLNHLLYMDDLKLFASTKKQMQLMLKMVEGFSKDIKMKFGLEKCRLLNITRGKIEDGTFKLKEGAEIEALKEGDTYKYLGIKQARKINQTQMKKELTEEFTRRLRRIMRTGLNSKNLIKAINTYACSALSYSFGIISWTTTDLAALQRKIRTMMTKHNKHYPKSSIERTELPRHLGGRGIVDLSNRMSQEIEGLRNYFLSKAASSELHRVVCVADTSTPLKLHQDHLETVEHSAESKMQKLIGKPLHGRHQNEVNHDYVDISASNYWLTSGRLFPETEGFMLAIQDQVIPTRNYMRYIAKDASVADDSCRYGCATHETIQHITGGCQKFAGAEYKNRHDAVAKILHQELALKHQLLTSKRIPYYNYHPDAVLENEHHKLYWDRTVLTDRKITHNRPDLILLNKDEDTALFIDVAIPNNNNLLDRHTEKISKYRDLEEQTRRQWKLKDIKTIPIVISSTGLIPKKLLENLRKLQLDENIYKVMQKAVLLGTARTVRKYMGNSEEHRLLRQVVRVEQESNLQQGGEERPGPDHHHEPENLERAPTELNPFDI

SEQ ID NO: 6699 - protein, 982 aa, Coccinella septempunctata
MGAKIRRTNNDGPKLHKLHAPAWQKRLQHKTERLRRDIGRLTEYLNGNRGRKVVKAAKEIRDRNRTHTERETENATAHHCLDTLKQKLSLYAERFRRYKSNYSRKRDNNSFEKSEESFYRSLTSSDGENGKLPPKEAIEQFWTEQLSTKPQFNGDTGWIEDEKSEAIKYEPMQHDMITIEEVKSAIRGLHNWKAPGPDGLQNFWIKKLWIMHDKLTSAINDVIENPERMPVFLTHGTTYLLPKDQRNTEDPSKYRPITCLPTMYKLITSCISNRIHNHCERNNIIAMQQEGCTKDSRGCKEQLIIDSVICNQAFSKRRNLYAAYIDYKKAFDSIPHEWLLTILKIYKVDPNIVKFLKNAMSTWRTSLQMKAADCSITTGPIPIRRGIFQGDSLSPLWFCMALNPLSHRLNSTDYGFSIKSGSRTMMKLNHLLYMDDLKLFASTKKQMQLMLKMVEGFSEDIKMKFGLEKCRLLNITRGKIEDGTFKLKEGAEIEALKEGDTYKYLGIKQARKINQTQMKKELTEEFTRRLRRIMRTGLNSKNLIKGINTYACSALSYSFGIISWTTTDLAALQRKIRTMLTKHNKHHPKSSIERTELPRHLGGRGIVDLSNRMSQEIEGLRNYFLSKAASSELHRVVCVADTSTPLKLHQDHLETVEHSAESKMQKLIGKPLHGRHQNEVNHDYVDISASNYWLTSGRLFPETEGFMLAIQDQVIPTRNYMRYIAKDASVADDSCRYGCATHETIQHITGGCQKFAGTEYKNRHDAVAKILHQELALKHQLLTSKRIPYYNYHPDAVLENEHHKLYWDRTVLTDRKITHNRPDLILLNKDEDTALFIDVAIPNNNNLLDRHTEKISKYRDLEEQTRRQWKLKDIKTIPIVISSTGLIPKKLLENLRKLQLDENIYKVMQKAVLLGTARTVRKYMGNAEEHRLLRQEVRVEQESNLQQEAEERPEPHHHHEPENLERAPTELNPFDISDIWDK

SEQ ID NO: 6700 - protein, 1150 aa, Coccinella septempunctata
MEMVITRSLGNKSLPGDRQGMSGAGAGHDSMRDVGGRMLRKRAPAAKQATAPKQQQQPTSPIQLPTRTAEGAAQDIQPVLTQAGLVRKRMKWTTSMNETIVRIYNSITGLGQNTNNYRKRLHEEFCIAYPNVNVTEQRVADQYRVILRNELVPTARIDAIKRELQRPLAMENNTNTSDEVHIPGQQHPEDIDTESPSCKANEPEHQDDREELHRQVDSDMRRYFAELEGTDPLHRVAPPRLNTSKKLSLIIDILNKDVLPEYLQNGSSLEYLHLVFHCAALTTAKTMGAKIRRTNNDGPKLHKLHAPAWQKRLQHKTERLRRDIGRLTEYLNGNRGRKVVKAAKEIMDRNRTHTERETENATAHHCLDTLKQKLSLYAERLRRYKSNYSRKRDNNSFEKSEESFYRSLTSSDGENGKLPPKEAIEQFWTEQLSTKPQFNGDTGWIEDEKSEAIKYETMQHDMITIEEVKSAIRGLHNWKAPGPDGLQNFWIKKLWIMHDKLTSAINDVIENPERMPVFLTHGTTYLLPKDQRNTEDPSKYRPITCLPTMYKLITSCISNRIHNHCERNNIIAMQQEGCTKDSRGCKEQLIIDSVICNQAFSKRRNLYAAYIDYKKAFDSIPHEWLLTILKIYKVDPNIVKFLKNAMSTWRTSLRIKAADCSITTGPIPIRRGIFQGDSLSPLWFCMALNPSSHRLNSTDYGFSIKSGSRTMMKLNHLLYMDDLKLFASTKKQMQLMLKIVEGFSEDIKMKFGLEKCRLLNITRGIIEDGSFKLKEGAEIEALKEGDTYKYLGIKQARKINQTQMKKELAEEFTRRLRRIMRTGLNSKNLIKAINTYACSALSYSFGIISWTTTDLAALQRRIRTMLTKHNKHHPKSSIERTELPRHLGGRGIVDLSNRMSQEIEGLRKYFLSKAASSELHRVVCVADSSTLLKLQQDHLETVEHSAESRMQKLIGKPLHGRHQNEVNHDYFDISASNYWLTSGRLFPETKGFMLAIQDQVIPTRNYMKYIAKDASVANDSCRYGCETHETIQHITGGCQKFAGTEYKNRHDAVAKILHQELALKHLLTSKKVPYYNYHPDAVLENDHHKLYWDRTVLTDRKITHNRPDLILLNKDEDRALFIDVAIPNNNNLLDRHTEKISKYRDLEEQT

SEQ ID NO: 6701 - protein, 1268 aa, Coccinella septempunctata
MKMVITRSLGNKSLPGDRQGMSGAGAGHDSMRDVGGRMLRKRAPAAKQATAPKQQQQPTSPIQLPTRTAEGAAQDIQPVLTQAGLVRKRMKWTTSMNETIVRIYNSITGLGQNTNNYRKRLHEEFCIAYPNVNVTEQRVADQYRVILRNELVPTARIDAIKRELQRPLAMENNTNTSDEVHIPGQQHPEDIDTESPSCKANEPEHQDDREELHRQVDSDMRRYFAELEGTDPLHRVAPPRLNTSKKLSLIIDILNKDVLPEYLQNGSSLEYLHLVFHCAALTTAKTMGAKIRRTNNDGPKLHKLHAPAWQKRLQHKTERLRRDIGRLTEYLNGNRGRKVVKAAKEIMDRNRTHTERETENATAHHCLDTLKQKLSLYAERLRRYKSNYSRKRDNNSFEKSEESFYRSLTSSDGENGKLPPKEAIEQFWTEQLSTKPQFNGDTGWIEDEKSEAIKYEPMQHDMITIEEVKSAIRGLHNWKAPGPDGLQNFWIKKLWIMHDKLTSAINDVIENPERMPVFLTHGTTYLLPKDQRNTEDPSKYRPITCLPTMYKLITSCISNRIHNHCERNNIIAIQQEGCTKDSRGCKEQLIIDSVICNQAFSKRRNLYAAYIDYKKAFDSIPHEWLLTILKIYKVDPNIVKFLKNAMSTWRTSLQMKAADCSITTGPIPIRRGIFQGDSLSPLWFCMALNPLSHRLNSTDYGFSIKSGSRTMMKLNHLLYMDDLKLFASTKKQMQLMLKMVEGFSEDIKMKFGLEKCRLLNITRGKIEDGTFKLKEGAEIEALKEGDTYKYLGIKQARKINQTQMKKELTEEFTRRLRRIMRTGLNSKNLIKAINTYACSALSYSFGIISWTTTDLTALQRKIRTMLTKHHKHHPKSSIERTELPRHLGGRGIVYLSNRMSQEIEGLRNYFLSKAASSELHRVVCVADTSTPLKLHQDHLETVEHSAESKMQKLIGKPLHGRHQNEVNHDYVDISASNYWLTSGRLFPETEGFMLAIQDQVIPTRNYMRYIAKDASVADDSCRYGCATHETIQHITGGCQKFAGTEYKNRHDAVAKILHQELALKHQLLTSKRIPYYNYHPDAVLENEHHKLYWDRTVLTDRKITHNRPDLILLNKDEDTALFIDVAIPNNNNLLDRHTEKISKYRDLEEQTRRQWKLKDIKTIPIVISSTGLIPKKLLENLRKLQLDENIYKVMQKAVLLGTARTVRKYMGNAEEHRLLRQEVRVEQESNLQQEAEERPEPHHHHEPENLERAPTELNPFDISDIWDK

SEQ ID NO: 6702 - protein, 1173 aa, Coccinella septempunctata
MKWTTSMNETIVRIYNSITGLGQNTNNYRKRLHEEFCNAYPNLNVTEQRVADQYRVILRNKLIPTARIDAIKREFQRPLAIENNTNTSDEIHMPGQQHLEDIDTESPSCNPSEPEFQDDREELHRQVHSDMRRYFAELEGTDPLHRITPPRLNTSKKLSLIIDILNKDVLPEYLQNGSSLEYLHLVFYCAALTTAKTIGAKIRGTNNNGPKLHKFHAPAWQKRLQHKTERLRRDIGRLTEYLNGNRGRKIVKAAKEIMDRNRTHTERETENASAHHCLDTLKQKLSLYAERLRRYKSNYSRKRDNNSFEKSEETFYRSLTSSDGENGKLPPKETIEQFWTEQLSTKPQFNGVTGWIDDEKSEAIKYEPMQHDMITIEEVKSAIRGLHNWKTPGPDGLQNFWIKKLWIMHDKLTSAINDVIQNPERMPVFLTHGTTYLLPKDQRNTEDPSKYRPITCLPTIYKLITSCISNRIYSHCERNNIIAMQQKGCTKDSRGCKEQLIIDSVICNQAFSKRRNLYAAYIDYKKAFDSIPHEWLLTILKIYKVDPNIVEFLKNAMSTWRTSLQMKAADCSITTGPIPIRRGIFQGDSLSPLWFCMALNPLSHRLNSTDYGFPIKSGSRTMMKLNHLLYMDDLKLFASTKKQMQQMLKMVEGFSEDIKMKFGLEKCRLLNITRGKIEDGTFKLKEGAEIEALKEGDTYKYLGIKQARKIKQTQMKKELTEEFTRRLRRVMRTGLNGKNLIKAINTYACSALSYSFGIISWTTTDSAALQRKIRTMLTKHNKHHPKSSIERTELPRHLGGRGIVDLSNRMFQEIEGLRKYFLSKAASSELHRVVCVADTSTPLKLQQDHLETVEHSAESKMQKLIGKPLHGRHQNEVNHDYVDISASNYWLTSGRLFPETEGFMLAIQDQVIPTRNYMKYIAKDASVADDSCRYGCATHETIQHITGGCQKFAGTEYKNRHDAVAKILHQELALKHQLLTSKKVPYYNYHPDAVLENEHHKLYWDRTVLTDRKITHNRPDLILLNKDEDTALFIDVAIPNNNNLLDRHTEKISKYRDLEEQTRKQWKLKDIKTIPIVISSTGLIPKRLLENLRKLQLDENIYRVMQRAVLLGTARTVRKYMGNAEEHRLLRQEVRVEQESNLQQGGEERPGPDHHHEPENLERAPTELNPFDI

SEQ ID NO: 6703 - protein, 922 aa, Coccinella septempunctata
MDRNRTHTERETENATAHHCLDTLKQKLSLYAERLRRYKSNYSRKRDNNSFEKSEESFYRSLTSSDGENGKLPPKEAIEQFWTEQLSTKPQFNGDTGWIKDEKSEAIKYEPMQHDMITIEEVKSAIRGLHNWKAPGPDGLQNFWIKKLWIMHDKLTSAINDVIENPERMPVFLTHGTTYLLPKDQRNTEDPSKYRPITCLPTMYKLITSCISNRIHNHCERNNIIAMQQEGCTKDSRGCKEQLIIDSVICNQAFSKRRNLYAAYIDYKKAFDSIPHEWLLTILKIYKVDPNIVKFLKNAMSTWRTSLQMKAADCSITTGPIPIRREIFQGDSLSPLWFCMALNPLSHRLNSTDYGFSIKSGSRTMMKRNHLLYMDDLKLFASTKKQMQLMLKMVEGFSEDIKMKFGLEKCRLLNITRGKIEDGTFKLKEGAEIEALKEGDTYKYLGIKQARKINQTQMKKELTEEFTRRLRRIMRTGLNSKNLIKAINTYACSALSYSFGIISWTTTDLAALQRKIRTMLTKHNKHHPKSSIERTELTRHLGGRGIVDLSNRMSQEIEGLRNYFLSKAASSELHRVVCVADTSTPLKLHQDHLETVEHSAESKMQKLIGKPLHGRHQNEVNHDYVDISASSYWLTSGRLFPETEGFMLAIQDQVIPTRNYMRYIAKDASVADDSCRYGCATHETIQHITGGCQKFAGTEYKNRHDAVAKILHQELALKHQLLTSKRIPYYNYHPDAVLENEHHKLYWDRTVLTDRKITHNRPDLILLNKDEDTALFIDVAIPNNNNLLGRHTEKISKYRDLEEQTRRQWKLKDIKTIPIVISSTGLIPKKLLENLRKLQLDENIYKVMQKAVLLGTARTVRKYMGNAEEHRLLRQEVRVEQESNLQQEAEERPEPHHHHEPENLERAPTELNPFDISDIWDK

SEQ ID NO: 6704 - protein, 1262 aa, Coccinella septempunctata
MEMVITRSLGNKSLPGDRQGMSGAGAGHDSMRDVGGRMLRKRAPAAKEATAPKQQQQPTSPIQLPTRTAEGAAQDIQPVLTQAGLVRKRMKWTTSMNETIVRIYNSITGLGQNTNNYRKRLHEEFCNAYPNLNVTEQRVADQYRVILRNELIPTARIDAIKRELQRPPAIENNTNTSDEIHMPGQQQAEETDTESPSCNASEPEHQDDREELHRQVDSDMRRYFAELEGTDPLHRVAPPRLNTSKKLSLIIDILNKDVLPGYLQNGSSLEYLHLVFYCAALTTAQTIGAKIRRTNNDGPKLHKLHAPAWQKRLQHKTERLRRDIGRLTEYLNGNRGRKVVKAAKEIMERNRTHTERETENATAHQCLDTLKQKLSLYAERLRRYKSNYSRKRDNNSFEKSEETFYRSLTSSDGENGKLPPKEAIEQFWTEQLSTKPQFNGDTEWIEDEKSEARKYEPMQHDMITIEEVKSAIRGLHNWKAPGPDGLQNFWIKKLWIMHDKLTSAINDVIENPERMPVFLTHGTTYLLPKDQRNTEDPSKYRPITCLPTMYKLITSCISNRIYNHCERNNIIAMQQKGCTKDSRGCKEQLIIDSVICNQAFSKRRNLYAAYIDYKKAFDSIPHEWLLTILKIYKVDPNIVEFLKNAMSTWRTSLQMKAADCSITTGPIPIRRGIFQGDSLSPLWFCMALNPLSHRLNSTDYGFSIKSGSRTMMKLNHLLYMDDLKLFASTKKQMQLMLKMVEGFSEDIKMKFGLEKCRLLNITRGKIEDGTFKLKEGAEIEALKEGDTYKYLGIKQAKKINQTQMKEELTEEFTRRLRRIMRTGLNSKNLIKAINTYACSALSYSFGIISWTTTDLAALQRKIRTMLTKHNKHHPKSSIERTELPRHLGGRGIVDLSNRMSQEIEGLRKYFLSKAASSELHRVVCVADSSTPLKLQQDHLETVEHSAESKMQKLIGKPLHGRHQNEVNHDYVDISASNYWLTSGRLFPETEGFMLAIQDQVIPTRNYMKYIAKDASVADDSCRYGCATHETIQHITGGCQKFAGTEYKNRHDAVAKILHQELALKHQLLSSKKVPYYNYHPDAVLESEHHKLYWDRTVLTDRKITHNRPDLILLNKDEDTALFIDVAIPNNNNLLDRHTEKISKYRDLEEQTRRQWKLKDIKTIPIVISSTGLIPKKLLENLRKLQLDENIYKVMQKAVLLGTARTVRKYMGNAEEHRLLRQEVRVEQESNLQQGPEERPGPDHHHEPENLERAPTELNPFDI

SEQ ID NO: 6705 - protein, 1043 aa, Coccinella septempunctata
MRRYFAELEGTDPLHRVAPPRLNTSKKLSLIIDILNKDVLPEYLQNGSSLEYLHLVFHCAALTTAKTMGAKIRRTNNDGPKLHKLHAPAWQKRLQHKTERLRRDIGRLTEYLNGNRGRKVVKAAKEIMDRNRTHTERETENATAHHCLDTLKQKLSLYAERLRRYKSNYSRKRDNDSFEKSEESFYRSLTSSDGENGKLPPKEAIEQFWTEQLSTKPQFNGDTGWIEDEKSEAKKYEPMQHDMITIEEVKSVIRGLHNWKAPGPDGLQNFWIKKLWIMHDKLTSAINDVIENPERMPVFLTHGTTYLLPKDQRNTEDPSKYRPITCLPTMYKLITSCISNRIHNHCERNNIIAMQQEGCTKDSRGCKEQLIIDSVICNQAFSKRRNLYAAYIDYKKAFDSNPHEWLLTILKIYKVDPNIVKFLKNAMSTWRTSLQMKAADCSITTGPIPIRRGIFQGDSLSPLWFCMALNPLSHRLNSTDYGFSIKSGSRTMMKLNHLLYMDDLKLFASTKKQMQLMLKMVEGFSEDIKMKFGLEKCRLLNITRGKIEDGTFKLKEGAEIEALKEGDTYKYLGIKQARKINQTQMKKELTEEFTRRLRRIMRTGLNSKNLIKAINTYACSALSYSFGIISWTTTDLAALQRKIRTMMTKHNKHHPKSSIERTELPRHLGGRGIVDLSNRMSQEIEGLRNYFLSKAASSELHRVVCVADTSTPLKLHQDHLETVEHSAESKMQKLIGKPLHGRHQNEVNHDYVDISASNYWLTSGRLFPETEGFMLAIQDQVIPTRNYMRYIAKDASVADDSCRYGCATHETIQHITGGCQKFAGTEYKNRHDAVAKILHQELALKHQLLTSKRIPYYNYHPDAVLENEHHKLYWDRTVLTDRKITHNRPDLILLNKDEDTALFIDVAIPNNNNLLDRHTEKISKYRDLEEQIRRQWKLKDIKTIPIVISSTGLIPKKLLENLRKLQLDENIYKVMQKAVLLGTARTVRKYMENAEEHRLLRQEVRVEQESNLQQEAEERPEPHHHHEPENLERAPTELNPFDI

SEQ ID NO: 6706 - protein, 1173 aa, Coccinella septempunctata
MKWTTSMNETIVRIYNSITGLGQNTNNYRKRLHEEFCNAYPNLNVTEQRVADQYRVILRNKLIPTARIDAIKREFQRPLAIENNTNTSDEIHMPGQQHLEDIDTESPSCNPSEPEFQDDREELHRQVHSDMRRYFAELEGTDPLHRITPPRLNTSKKLSLIIDILNKDVLPEYLQNGSSLEYLHLVFYCAALTTAKTIGAKIRGTNNNGPKLHKFHAPAWQKRLQHKTERLRRDIGRLTEYLNGNRGRKIVKAAKEIMDRNRTHTERETENGRAHHCLDTLKQKLSLYAERLRRYKSNYSRKRDNNSFEKSEESFYRSLTSSDGENGKLPPKEAIEQFWTEQFSTKPHFNGDTGWIEDEKSEAIKYEPMQHDMITIEEVKSAIRGLHNWKSPGPDGLQNFWIKKLWIMHDKLTSAINDVIENPERMPVFLTHGTTYLLPKDQRNTEDPSKYRPITCLPTMYELITSCISNRIYNHCERNNIIAMQQKGCTKDSRGCKEQLIIDSVICNQAFSKRRNLYAAYIDYKKAFDSTPHEWLLTILKIYKVDPNIVKFLKNAMSTWRTSLQMKAADCSITTGPIPIRRGIFQGDSLSPLWFCMALNPLSHRLNSTDYGFSIKNGSRTMMKLNHLLYMDDLKLFASTKKQMQLMLKMVEGFSEDIKMKFGLEKCRLLNITRGKIEDGTFKLKEGAEIEALKEGDTYKYLGIKQARKINQTQMKKELTEEFTRRLRRIMRTGLNSKNLIKAINTYACSALSYSFGIISWTTTDLAALQRKIRTMLTKHNKHHPKSSIERTELPRHLEGRGIVDLSNRMSQEIEGLRKYFLSKAASSELHRVVCVADSSTPLKLQQDHLETVEHSAESKMQKLIGKPLHGRHQNEVNHDYVDISASNYWLTSGRLFPETEGFMLAIQDQVIPTRNYMKYIAKDASVADDSCRYGCATHETIQHITGGCQKLAGTEYKNRHDAVAKILHQELALKHQLLASKKVPYYNYHPDAVLENEHHKLYWDRTVLTDRKITHNRPDLILLNKDEDRALFIDVAIPNNNNLLDRHTEKISKYRDLEEQTRRQWKLKDIKTIPIVISSTGLIPKKLLENLRKLQLDENIYKVMQKAVLLGTARTVRKYMGNSEEHRLLRQEVRVEQESNLQQGGEERPGPDHHHEPENLERAPTELNPSDI

SEQ ID NO: 6707 - protein, 922 aa, Coccinella septempunctata
MDRNRTHTERETENATAHHCLDTLKQKLSLYAERLRRYKSNYSRKRDNNSFEKSEESFYRSLTSSDGENGKLPPKEAIEQFWNEQLSTKPQFNGDTGWIEDEKSEAIKYEPMQHDMIKIEEVKSAIRGLHNWKAPGPDGLQNFWIKKLWIMHDKLTSAINDVIENPERMPVFLTHGTTYLLPKDQRNTEDPSKYRPITCLPTMYKLITSCISNRIHNHCERNNIIAMQQEGCTKDSRGCKEQLIIDSVICNQAFSKRRNLYAAYIDYKKAFDSIPHEWLLTILKIYKVDPNIVKFLKNATSTWRTSLQMKAADCSITTGPIPIRRGIFQGDSLSPLWFCMALNPLSHRLNSTDYGFSIKSGSRTMMKLNHLLYMDDLKLFASTKKQMQLMLKMVEGFSEDIKMKFGLEKCRLLNITRGKIEDGTFKLKEGAEIEALKEGDTYKYLGIKQARKINQTQMKKELTEEFTRRLRRIMRTGLNSKNLIKAINTYACSALSYSFGIISWTTTDFAALQRKIRTMLTKHNKHHPKSSIERTELPRHLGGRGIVDLSNRMSQEIEGLRNYFLSKAASSELHRVVCVADTSTPLKLHQDHLETVEHSAESKMQKLIGKPSHGRHQNEVNHDYVDISASNYWLTSGRLFPETEGFMLAIQDQVIPTRNYMRYIAKDASVADDSCRYGCATHETIQHITGGCQKFAGTEYKNRHDAVAKILHQELALKHQLLTSKRIPYYNYHPDAVLENEHHKLYWDRTVLTDRKITHNRPDLILLNKDEDTALFIDVAIPNNNNLLDRHTEKISKYRDLEEQTRRQWKLKDIKTIPIVISSTGVIPKKLLENLRKLQLDENIYKVMQKAVLLGTARTVRKYMGNAEEHRLLRQEVRVEQESNLQQEAEERPEPHHHHEPENLERAPTELNPFDISDIWDK

SEQ ID NO: 6708 - protein, 982 aa, Coccinella septempunctata
MGAKIRRTNNDGPKLHKLHAPAWQKRLQHKTERLRRDIGRLTEYLNGNRGRKVVKAAKEIMDRNRTHTERETENATAHHCLDTLKQKLSLYAERLRRYKSNYSRKRDNNSFEKSEESFYRLLTSSDGENGKLPPKEAIEQFWTKQLSTKPQFNGDTGWIEDEKSEAIKYEPMQHDMITIEEVKSAIRGLHNWKAPGPDGLQNFWIKKLWIMHDKLTSAINDVIENPERMPVFLTHGTTYLLPKDQRNTEDPSKYRPITCLPTMYKLITSCISNRIHNHCERNNIIAMQQEGCTKDSRGCKEQLIIDSVICNQAFSKRRNLYAAYIDYKKAFDSIPHEWLLTILKIYKVDPNIVKFLKNAMSTWRTSLQMKAADCSITTGPIPIRRGIFQGDSLSPLWFCMALNPLSHRLNSTDYGFSIKSGSRTMMKLNHLLYMDDLKLFASTEKQMQLMLKMVEGFSEDIKMKFGLEKCRLLNITRGKIEDGTFKLKEGAEIEALKEGDTYKYLGIKQARKINQTQMKKELTEEFTRRLRRIMRTGLNSKNLIKAINTYACSALSYSFGIISWTTTDLAALQRKKRTMLTKHNKHHPKSSIERTELPRHLGGRGIVDLSNRMSQEIEGLRNYFLSKAASSELHRVVCVADTSTPLKLHQDHLETVEHSAESKMQKLIGKPLHGRHQNEFNHDYVDISASNYWLTSGRLFPETEGFMLAIQDQVIPTRNYMRYIAKDASVADDSCRYGCATHETIQHITGGCQKFAGTEYKNRHDAVAKILHQELALKHQLLTSKRIPYYNYHPDAVLENEHHKLYWDRTVLTDRKITHNRPDLILLNKDEDTALFIDVAIPNNNNLLDRHTEKISKYRDLEEQTRRQWKLKDIKTIPIVISSTGLIPKKLLENLRKLQLDENIYKVMQKAVLLGTARTVREYMGNAEEHRLLRQEVRVEQESNLQRGAEERPEPHHHHEPENLERAPTELNPFDISDIWDK

SEQ ID NO: 6709 - protein, 1262 aa, Coccinella septempunctata
MKMVITRSLGNKSLPGDRQGMSGAGAGHDSMRDVGGRMLRKRAPAAKEATAPKQQQQPTSPIQLPTRTAEGAWQDIQPVLTQAGSVRKRMKWTTSMNETIVRIYNSITGLGQNTNNYRKRLHEEFCIAYPNVNVTEQRVADQYRVILRNELVPTARIDAIKRELHRPLAMENNTNTSDEVHIPGQQHPEDIDTESPSCKANEPEHQDDREELHRQVDSDMRRYFAELEGTDPLHRVAPPRLNTSKKLSLIIDILNKDVLPEYLQNGSSLEYLHLVFHCAALTTAKTMGAKIRRTNNDGPKLHKLHAPAWQKRLQHKTERLRRDIGRLTEYLNGNRGRKVVKAAKEIMDRNRTHTERETENATAHHCLDTLKQKLSLYAERLRRYKSNYSRKRDNDSFEKSEESFYRSLTSSDGENGKLPPKEAIEQFWTEQLSTKPQFNGDTGWIEDEKSEAIKYEPMQHDMITIEEVKSAIRGLHNWKAPGPDGLQNFWIKKLWIMHDKLTSAINDVIENPERMPVFLTHGTTYLLPKDQRNTEDPSKYRPITCLPTMYKLITSCISNRIHNHCERNNIIAMQQKGCTKDSRGCKEQLIIDSVICNQAFSKRRNLYAAYIDYKKAFDSIPHEWLLTILKIYKVDPNIVKFLKNAMSTWRTSLQMKAADCSITTGPIPIRRGIFQGDSLSPLWFCMALNPLSHRLNSTDYGFSIKSGSRTMMKLNHLLYMDDLKLFASTKKQMQLMLKMVEGFSEDIKMKFGLEECRLLNITRGKIEDGTFKLKEGAEIEALKEGDTYKYLGIKQARKINQTQMKKELTEEFTRRLRRIMRTGLNSKNLIKAINTYACSALSYSFGIISWTTTDLAALQRKIRTMMTKHNKHHPKSSIERTELPRHLGGRGIVDLSNRMSQEIEGLRNYFLSKAASSELHRVVCVADTSTPLKLHQDHLETVEHSAESKMQKLIGKPLHGRHQNEVNHDYVDISASNYWLTSGRLFPETEGFMLAIQDQVIPTRNYMRYIAKDASVADDSCRYGCATHETIQHITGGCQKFAGTEYKNRHDAVAKILHQELALKHQLLTSKRIPYYNYHPDAVLENEHHKLYWDRTVLTDRKITHNRPDLILLNKDEDTALFIDVAIPNNNNLLDRHTEKISKYRDLEEQIRRQWKLKDIKTIPIVISSTGLIPKKLLENLRKLQLDENIYKVMQKAVLLGTARTVRKYMENAEEHRLLRQEVRVEQESNLQQEAEERPEPHHHHEPENLERAPTELNPFDI

SEQ ID NO: 6710 - protein, 1208 aa, Coccinella septempunctata
MSQPLTSSPVGSVTFQANWAPPHLKETSDLGWMAAAVHDYSSYGSSSVSNALIIIIIIIIIIIMITRSLGNKSLPGDRQGMSGAGAGHDSMRGVGGRMLRKRAPAAKEATAPKQQQQPTSPIQLPTRTAEGAAQDIQPVLTQAGLVRKRMKWITSMNETIVRIYNSITGLGQNTNNYRKRLHEEFCNAYPNLNVTEQRVADQYRVILRNQLIPTARIDAIKRELQRPLAIENHTNTSDEIHMPGQQHLEDIDTESPSCNPSEPELQDDREELHRQVHSDMRRYFAELEGTDPLHRITPPRLNTSKKLSLIIDILNKDVLPEYLQNGSSLEYLHLVFYCAALTTAKTIGAKIRGTNNNGPKLHKLHAPAWQKRLQHKTERLRRDIGRLTEYLNGNRGRKVVKAVKEIMDRNRTHTERETENGRAHHCLDTLKQKLSLYAERLRRYKSNYSRKRDNNSFEKSEESFYRSLTSSDGENGKLPPKEAIEQFWTEQFSTKPHFNGDTGWIEDEKSEAIKYEPMQHDMITIEEVKSAIRGLHNWKSPGPDGLQNFWIKKLWIMHDKLTSAINDVIENPERMPVFLTHGTTYLLPKDQRNTEDPSKYRPITCLPTMYKLITSCISNRIYNHCERNNIIAMQQKGCTKDSRGCKEQLIIDSVICNQAFSKRRNLYAAYIDYKKAFDSTPHEWLLTILKIYKVDPNIVKFLKNAMSTWRTSLQMKAADCSITTGPIPIRRGIFQGDSLSPLWFCMALNPLSHRLNSTDYGFSIKNGSRTMMKLNHLLYMDDLKLFASTKKQMQLMLKMVEGFSEDIKMKFGLEKCRLLNITRGKIEDGTFKLKEGAEIEALKEGDTYKYLGIKQARKINQTQMKKELTEEFTRRLRRIMRTGLNSKNLIKAINTYACSALSYSFGIISWTTTDLAALQRKIRTMLTKHNKHHPKSSIERTELPRHLEGRGIVDLSNRMSQEIEGLRKYFLSKAASSELHRVVCVADSSTPLKLQQDHLETVEHSAESKMQKLIGKPLHGRHQNEVNHDYVDISASNYWLTSGRLFPETEGFMLAIQDQVIPTRNYMKYIAKDASVADDSCRYGCATHETIQHITGGCQKLAGTEYKNRHDAVAKILHQELALKHQLLASKKVPYYNYHPDAVLENEHHKLYWDRTVLTDRKITHNKVNVPIADTVPISDRINSSEHNNESVQGNDRVYALKTSTVII

SEQ ID NO: 6711 - protein, 1268 aa, Coccinella septempunctata
MKMVNTRSLGNKSLPGDRQGMSGAGAGHDSMRDVGGRMLRKRAPAAKQATAPKQQQQPTSPIQLPTRTAEGAAQDIQPVLTQAGLVRKRMKWTTSMNETIVRIYNSITGLGQNTNNYRKRLHEEFCIAYPNVNVTEQRVADQYRVILRNELVPTARIDAIKRELQRPLAMENNTNTSDEVHIPGQQHPEDIDTESPSCKANEPEHQDDREELHRQVDSDMRRYFAELEGTDPLHRVAPPRLNTSKKLSLIIDILNKDVLPEYLQNGSSLEYLHLVFYCAALTTAKTMGAKIRRTNNDGPKLHKLHAPAWQKRLQHKTERLRRDIGRLTEYLNGNRGRKVVKAAKEIMDKNRTHTERETENATAHHCLDTLKQKLSLYAERLRRYKSNYSRKRDNNSFEKSEESFYRSLTSSDGENGKLPPKEAIEQFWTEQLSTKPQFNGDTGWIEDEKSEAIKYEPMQHDMITIEEVKSAIRVLHNWKAPGPDGLQNFWIKKLWIMHDKLTSAINDVIENPERMPVFLTHGTTYLLPKDQRNTEDPSKYRPITCLPTMYKLITSCISNRIHNHCERNNIIAMQQEGCTKDSRGCKEQLIIDSVICNQAFSKRRNLYAAYIDYKKAFDSIPHEWLLTILKIYKVDPNIVKFLKNAMSTWRTSLQMKAADCSITTGPIPIRRGIFQGDSLSPLWFCMALNPLSHRLNYTDYGFSIKSGSRTMMKLNHLLYMDDLKLFASTKKQMQLMLKMVEGFSEDIKMKFGLEKCRLLNITRGKIEDGTFKLKEGAEIEALKEGDTYKYLGIKQARKINQTQIKKELTEEFTRRLRRIMRTGLNSKNLIKAINTYACSALSYSFGIISRTTTDLAALQRKIRTMLTKHNKHHPKSSIERTELPRHLGGRGIVDLSNRMSQEIEGLRNYFLSKAASSELHRVVCVADTSTPLKLHQDHLETVEHSAESKMQKLIGKPLHGRHQNEVNHDYVDISASNYWLTSGRLFPETEGFMLAIQDQVIPTRNYMRYIAKDASVADDSCRYGCATHETIQHITGGCQKFAGTEYKNRHDAVAKILHQELALKHQLLTSKRIPYYNYHPDAVLENEHHKLYWDRTVLTDRKITHNRPDLILLNKDEDTALFIDVAIPNNNNLLDRHTEKISKYRDLEEQTRRQWKLKDIKTIPIVISSTGLIPKKLLENLRKLQLDENIYKVMQKAVLLGTARTVRKYMRNAEEHRLLRQEVRVEQESNLQQEAEERPEPHHHHEPENLERAPTELNPFDISDIWDK

SEQ ID NO: 6712 - protein, 1173 aa, Coccinella septempunctata
MKWTTSMNETIVRIYNSITGLGQNTNNYRKRLHEEFCNAYPNLNVTEQRVADQYRVILRNQLIPTARIDAIKRELQRPLAIENNTNTSDEIHMPGQQHLEDIDTESPSCNPSEPELQDDREELHRQVHSDMRRYFAELEGTDPLHRITPPRLNTSKKLSLIIDILNKDVLPEYLQNGSSLEYLHLVFYCAALTTAKTIGAKIRGTNNNGPKLHKLYAPAWQKRLQHKTERLRRDIGRLTEYLNGNRGRKVVKAVKEIMDRNRTHTERETENATAHHCLDTLKQKLSLHAERLRRYKSNYSRKRDNNSFEKSEESFYRSLTSSDGENGKLPPKEAIEQFWTEQLSTKPHFNGDTGWIEDEKSEAIKYEPMQHDMITIEEVKSAIRGLHNWKAPGPDGLQNFWIKKLWIMHDKLTSAINDVIENPERMPVFLTHGTTYLLPKDQRNTEDPSKYRPITCLPTMYKLITSCISNRIHNHCERNNIIAMQQKGCTKDSRGCKEQLIIDSVICNQAFSKRRNLYAAYIDYKKAFDSIPHEWLLTILKIYKVDPNIVKFLKNAMSTWRTSLQMKAADCSITTGPIPIRRGIFQGDSLSPLWFCMALNPLSHRLNSTDYGFSIKNGSRTMMKLNHLLYMDDLKLFASTKKQMQLMLKMVEGFSEDIKMKFGLEKCRLLNITRGKIEDGTFKLKEGAEIEALKEGDTYKYLGIKQARKINQTQMKKELTEEFTRRLRRIMRTGLNSKNLIKAINTYACSALSYSFGIISWTTTDLAALQRKIRTMLTKHNKHHPKSSIERTELPRHLGGRGIVDLSNRMSQEIEGLRKYFLSKAASSELHRVVCVADSSTPLKLQQDHLETVEHSAESKMQKLIGKPLHGRHQNEVNHDYVDISASNYWLTSGRLFPETEGFMLAIQDQVIPTRNYMKYIAKDASVADDSCRYGCATHETIQHITGGCQKFAGTEYKNRHDAVAKILHQELALKHQLLASKKVPYYNYHPDAVLENEHHKLYWDRTVLTDRKITHNRPDLILLNKDEDRALFIDVAIPNNTNLLDRHTEKISKYRDLEEQTRRQWKLKDIKTIPIVISSTGLIPKKLLENLRKLQLDENIYRVMQKAVLLGTARTVRKYMGNAEEHRLLRQEVRVEQESNLQQGGEERPGPDHHHEPENLERAPTELNPFDI

SEQ ID NO: 6713 - protein, 1262 aa, Coccinella septempunctata
MKMVITRSLGNKSLPGDRQGMSGAGAGHDSMRDVGGRMLRKRAPAAKEATAPKQQQQPTSPIQLPTRTAEGAAQDIQPVLTQAGLVRKRMKWTTSMNETIVRIYNSITGQGQNTNNYRKRLHEEFCIAYPNLNVTEQRVADQYRVILRNEQIPTARIDAIKRELQHPLAIENNTNTSDEIHIPGQQHPEDIDTESPSCKANEPEHQDDREELHRQVDSDMRKYFAELEGTDPLHRVAPPRLNTSKKLSLIIDILNKDVLPEYLQNGSSLEYLHLVFHCAALTTAKTIGAKIRQTNNDGPKLHKLHAPAWQKRLQHKTERLRRDIGRLAEYLNGNRGRKVVKAAKDIMDRNRTHTERETENATAHHCLDTLKKKLSLYAERLRRYKSNYSRKRDNNSFEKSEESFYRSLTSSDGENGKLPPKEAIEQFWTEQLSTKPQFNGDTGWIEDEKSEAIKYEPMQHDMITIEEVKSAIRGLHNWKAPGPDGLQNFWIKKLWIMHDKLTSAINDVIVNPERMPVFLTHGTTYLLPKDQRNTEDPSKYRPITCLPTMYELITSCISNRIHNHCERNNIIAMQQKGCTKDSRGCKEQLIIDSVICNQAFSKRRNLYAAYIDYKKAFDSIPHEWLLTILKIYKVDPKIVKFLKNAMSTWRTSLQMKAADCSITTGPIPIRRGIFQGDSLSPLWFCMALNPLSHRLNSTDYGFSIKSGSRTMMKLNHLLYMDDLKLFASTKKQMQLMLKMVEGFSEDIKMKFGLEKCRLLNITRGKIEDGTFKLKEGAEIEALKEGDTYKYLGIKQARKINQTQMKKELTEEFTRRLRRIMRTGLNSKNLIKAINTYACSALSYSFGIISWTTTDLAALQRKIRTMLTKHNKHHPKSSIERTELPRHLGGRGIVDLSNRMSQEIEGLRNYFLSKAASSELHRVVCVADTSTPSKLHQDHLETVEHYAESKMQKLIGKSLHGRHQKEVNHDYVDISASNYWLTSGRLFPETEGFMLAIQDQVISTRNYMRYIAKDASVADDSCRYGCATHETIQHITGGCQKFAGTEYKNRHDAVAKILHQELALKHQLLTSKRVPYYNYHPDAVLENEHHKLYWDRTVLTDRKITHNRPDLILLNKDEDTALFIDVAIPNNNNLLDRHTEKISKYRDLEEQTRRQWKLKDIKTIPIVISSTGLIPKKLLENLRKLQLDENIYKVMQKAVLLGTARTVRKYMGNAEEHRLLRQEVRVEQESNLQQGAEERPEPDHHHEPENLERAPTELNPFDI

SEQ ID NO: 6714 - protein, 1262 aa, Coccinella septempunctata
MKMVITRSLGNKSLPGDRQGMSGAGAGHDSMRDVGGRMLRKRAPAAKEATAPKQQQQPSSPIQLPTRTAEGAAQDIQPVLKQAGLVRKRMKWTTSMNETIVRIYNSITGLGQNTNNYRKRLHEEFCIAYPNLNVTEQRVADQYRVILRNELIPTARIDAIKRELQRPLAIENNTNTSDKIHIPGQQHPEDIDTESPSCKANEPEHQDDREELHRQVDSDMRRYFAELEGTDPLHRVAPPRLNTSNKLSLIIDILNKDVLPEYLQNRSSLEYLHLVFHCAALTTAKTIGAKIRRTNNDGPKLHKLHAPAWQKRLQHKTERLRRDIGRLTEYLNGNRGRKVVKAAKEIMDRNRTHTERETENATAHHCLDTLKQKLSLYAERLRRYKSNYSRKRDNNSFEKSKESFYRSLTLSDGENGKLPPKEAIEQFWTEQLSTKPQFNGATEWIEDEKSEATKYEPMQHDMITIEEVKSAIRGLHNWKAPGPDGLQNFWIKKLWIMHDKLTSAINDVIENPERMPVFLTHGTTYLLPKDQRNTEDPSKYRPITCLPTMYKLITSCISNRIHNHCERNNIIAMQQKGCTKDSRGCKEQLIIDSVICNQAFSKRRNLYAAYIDYKKAFDSIPHEWLLTILKIYKVDPNIVKFLKNAMSTWRTSLQMKAADCSITTGPIPIRRGIFQGDSLSPLWFCMALNPLSHRLNSTDYGFSIKSGSRTMMKLNHLLYMDDLKLFASTKKQMQLMLKMVEGFSEDIKMKFGLEKCRLLNISRGRIEDGTFKLKEGAEIEALKEGDTYKYLGIKQARKINQTQMKKELTEEFTRRLRRIMRTGLNSKNLIKAINTYACSALSYSFGIISWTTTDLAALQRKIRTMLTKHNKHHPKSSIERTELPRHLGGRGIVDLSNRMSQEIEGLRNYFLGKAASSELHRVVCVADTSTPLKLHQDHLETVEHSAESKMQKLIGKPLHGRHQNEVNHDYVDISASNYWLTSGRLFPETEGFMLAIQDQVIPTRNYMRYIAKDASVADDSCRYGCATHETIQHITGGCQKFAGTEYKNRHDAVAKILHQELALKHQLLTSKRVPYYNYHPDAVLENEHHKLYWDRTVLTDRKITHNRPDLILLNKDEDTALFIDVAIPNNNNLLDRHTEKISKYRDLEEQTRRQWELKDIKTIPIVISSTGLIPKKLLENLRKLQLDENIYKVMQKAVLLGTVRTVRKYMGNAEEHRLLRQEVRVEQESNLQQGAEDRPEPDHHHEPENLERAPTELNPFDV

SEQ ID NO: 6715 - protein, 1262 aa, Coccinella septempunctata
MKMVITRSLGNKSLPGDRQGMSGAGAGHESMRDVGGRMLRKRAPAAQEATAPKQQQQPTSPIQLPTRTAEGAAQDIQPVLTQAGLVRKRMKWTTSMNETIVRIYNSITGLGQNTNNYRKRLHEEFCIAYPNLNVTEQRVADQYRVILRNELIPTARIEAIKRELQRPPTIENNTNTSDEILMPGQQQAEETDTETPSCNASEPEHQDDREELHRQVDSDMRRYFAELEGTDPLHRVAPPRLNTSKKLSLIIDILNKDVLPEYLQNGSSLEYLHLVFHCAALTTAKTIGAKIRQTNNDGPKLHKLHAPAWQKRLQHKTERLRRDIGRLTEYLNGNRGRKVVKAAKEIMDRNRTHTERETENATAHHCLDTLKQKLSLYAERLRRYKSNYRRKRDNNSFEKSEESFYRSLTSSDGENGKLPPKEAIEQFWTEQLSTKPQFNGDTGWIEDEKSEAIKYEPMQHDMITIEEVKSAIRGLHNWKAPGPDGLQNFWIKKLWIMHEKLTSAINDVIENPERMPVFLTHGTTYLLPKDQRNTEDPSKYRPITCLPTMYKLITSCISNRIHNHCERNNIIAMQQKGCTKDSRGCKEQLIIDSVICNQAFSKRRNLYAAYIDYKKAFDSIPHEWLLTILKIYKVDPNIVKFLKNAMSTWRTSLQMKAADCSITTGPIPIRRGIFQGDSLSPLWFCMALNPLSHRLNSTDYGFSIKSGSRTMMKLNHLLYMDDLKLFASTKKQMQLMLKMVEGFSEDIKMKFGLEKCRLLNITRGKIEDGTFKLKEGAEIEALKEGDTYKYLGIKQARKINQTQMKKELTEEFTRRLRRIMRTGLNSKNLIKAINTYACSALSYSFGIISWTTTDLAALQRKIRTMLTKHNKHHPKSSIERTELPRHLGGRGIVDLSNRMSQEIEGLRNYFLSKAASSELHRVVCVADTSTPLKLHQDHLETVEHSAESKMQKLIGKPLHGRHQNEVNHDYVDISASNYWLTSGRLFPETEGFMLAIQDQVIPTRNYMRYIAKDASVADDSSRYGCATHETIQHITGGCQKFAGTEYKNRHDAVAKILHQELALKHQLLISKRVPYYNYHPDAVLENEHHKLYWDRTVLTDRKITHNRPDLILLNKDEDTALFIDVAIPNNSNLLDRHTEKISKYRDLEEQTRRQWKLKDINTIPIVISSTGLIPKKLLENLRKLQLDENIYKVMQKAVLLGTARTVRKYMGNAEEHRLLRQEVRVEQESNLQQGAEERPEPDHHHEPENLERAPTELNPFDI

SEQ ID NO: 6716 - protein, 1262 aa, Coccinella septempunctata
MKMVITRSLGNKSLPGDRQGMTGAGAGHDSMRDVGGRMLRKRAPAAKEATAPKQQQQPTSPIQLSTRTAESAAQDIQPVLTQAGLVRKRMKWTTSMNETIVRIYNSITGLGQNTNNYRKRLHEEFCNAYPNLNVTEQRVADQYRVILRNELIPTARIDAIKRELQRPPTIENNTNTSDEIHMPGQQQAEETDTESPSCNESEPEHQDDREELHRQVDSDMRRYFAELEGTDPLHRVAPPRLNTSKKLSLIIDILNKDVLPEYLQNGSSLEYLHLVFHCAALTTAKTMGAKIRRTNNDGPKLHKLHAPAWQKGLQHKTERLRRDIGRLTEYLNGNRGRKVVKAAKEIIDRNRTHTKRETENATAHHCLDTLKQKLSLYAERLRRYKSNYSRKRDNNSFEKSEESFYRSLTSSDGENGKLPPKEAIEQFWTEQLSTKPQFNGNTGWIEDEKSEAIKYEPMQHDMITIEEVKSAIRGLQNWKAPGPDGLQNFWIKKLWIMHDKLTSAINDVIENPERMPVFLTHGTTYLLPKDQRNTEDPSKYRPITCLPTMYKLITSCISNRIYNHCERNNIIAMQQKGCTKDSRGCKEQLIIDSVICNQAFSKRRNIYAAYIDYQKAFDSIPHEWLLTILKIYKVDPNIVKFLKNAMSTWRTSLQMKAADCSITTGPIPIRRGIFQGDSLSPLWFCMALNPLSHRLNSTDYGFSIKSGSRTMMKLNHLLYMDDLKLFASTKKQMQLMLKMVEGFSEDIKMKFGLEKCRLLNITRGKMEDGTFKLKEGAEIEALKEGDTYKYLGMKQARKINQTQMKKELTEEFTRRLRRIMRTGLNSKNLIKAINTYACSALSYSFGIISWTTTDLAALQRKIRTMLTKHNKHHPKSSIERTELPRHLGGRGIVDLSNRMSQEIEGLRKYFLSKAASSELHRVVCVADTSTPLKLHQDHLETVEHSAESKMQKLIGKPLHGRHQNEVNHDYVDISASNYWLTSGRLFPETEGFMLAIQDQVIPTRNYMKYIAKDASVADDSCRYGCATHETIQHITGGCQKFAGTEYKNRHDAVAKILHQELALKHQLLSSKKVPYYNYHPDAVLENEHHKLYWDRTVLTDRKITHNRPDLILLNKDEDRALFIDVAIPNNNNLLDRHTEKISKYRDLEEQTRRQWKLKDIKTIPIVISSTGLIPKKLLENLRKLQLDENIYKVMQKAVLLGTARTVRKYMGNSEEHRLLRQEVRVEQESNLQQGGEERPGPDHHHEPENLERAPTELNPFDI

SEQ ID NO: 6717 - protein, 1262 aa, Coccinella septempunctata
MEMVITRSLGNKSLPGDRQGMSGAGAGHDSMRDVGGRMLRKRAPAAKEATAPKQQQQPTSPIQLPTRTAEGAAQDIQPVLTQAGLVRKRMKWTTSMNETIVRIYNSITGLGQNTNNYRKRLHEEFCNAYPNLNVTEQRVADQYRVILRNQLIPTARIDAIKRELQRPPAIENNTNTSDEIHMPGQQHLEDIDTESPSCNPSEPELQDDREELHRQVHSDMRRYFAELEGTDPLHRITPPRLNTSKKLSLIIDILNKDVLPEYLQNGSSLEYLHLVFYCAALTTAKTIGAKIRGTNNNGPKLHKLHAPAWQKRLQHKTERLRRDIGRLTEYLNGNRGRKVVKAAKEIMDRNRTHTERETENATAHHCLDTLKQKLSLYAERLRRYKSNYSRKRDNNSFEKSEESFYRSLTSSDGENGKLPPKEAIEQFWTEQLSTKPHFDGDTGWIEDEKSEAIKYEPMQHDMITMEEVKSAIRGLHNWKAPGPDGLQNFWIKKLWIMHDKLTSAINDVIENPERMPVFLTKGTTYLLPKDQRNTEDPSKYRPITCLPTMYKLITSCISNRIHNHCERNNIIAMQQKGCTKDSRGCKEQLIIDSVICNQAFSKRRNLYAAYIDYKKAFDSIPHEWLLTILKIYKVDPNIVKFLKNAMSTWRTSLQMKAADCSITTGPIPIRRGIFQGDSLSPLWFCMALNPLSHRLNSTDYGFSIKSGSRTMMKLNHLLYMDDLKLFASTKKQMQLMLKMVEGFSEDIKMKFGLEKCRLLNITRGKIEDGTFKLKEGAEIEALKEGDTYKYLGIKQARKINQTQMKKELTEEFTRRLRRIMRTGLNSKNLIKAINTYACSALSYSFGIISWTTTDLAALQRKIRTMLTKHNKHHPKSSIERTELPRHLGGRGIVDLSNRMSQEIEGLRKYFLSKAASSELHRVICAADSSTPLKLQQDNLETVEHSAESKMQKLIGKPLHGRHQNEVNHDYVDISASNYWLTSGRLFPETEGFMLAIQDQVIPTRNYMKYIAKDASVADDSCRYGCATHETIQHITGGCQKFAGTEYKNRHDAVAKILHQELALKHQLLTSKKVPYYNYHPEAVLENEHHKLYWDRTVLTDRKITHNRPDLILLNKDEDRALFIDVAIPNNNNLLDRHTEKISKYRDLEEQTRRQWKLKDIKTIPIAISSTGLIPKKLLENLRKLQLDENIYRVMQKAVLLGTARTVRKYMGNAEEHRLRRQEVRVQQESNLQQGGEERPGPDHHHEPENLERAPTELNPFDI

SEQ ID NO: 6718 - protein, 1262 aa, Coccinella septempunctata
MKMVITRSLGNKSLPGDRQGMSGAGAGHDSMRDVGGRMLRKRAPAAKEATAPKQQQQPTSPIQLSTRTAEGAAQDIQPVLTQAGLVRKRMKWTTSMNETIVRIYNSITGLGQNTNNYRKRLHEEFCNAYPNLNVTEQRVADQYRVILRNELIPTARIDAIKRELQRPPTIGNNTNTSDEIHMPGQQQAEETDTESPSCNASEPEHQDDRKELHRQVDSDMRRYFAELEGTDPLHRVAPPRLNTSKKLSLIIDILNKDVLPEYLQNGSSLEYLHLVFHCAALTTAKTMGAKIRRTNNDGPKLHKLHAPAWQKRLQHKTERLRRDIGRLTEYLNGNRGRKVVKAAKEIIDRNRTHTERETENATAHHCLDTLKQKLSLYAERLRRYKSNYSRKRDNNSFEKSEESFYRSLTSLNGENGKLPPKEAIEQFWTEQLSTKPQFNGNTGWIEDEKSEAIKYEPMQHDMITIEEVKSAIRGLHNWKAPGPDGLQNFWIKKLWIMHDKLTSAINDVIENPERMPVFLTHGTTYLLPKDQRNTEDPSKYRPITCLPTMYKLITSCISNRIYNHCERNNIIAMQQKGCTKDSRGCKEQLIIDSVICNQAFSKRRNLYAAYIDYKKAFDSIPHEWLLTILKIYKVDPSIVKFLKNAMSTWRTSLQMKAADCSITTGPIPIRRGIFQGDSLSPLWFCMALNPLSHRLNSTDYEFSIKSGSRTMMKLNHLLYMDDLKLFASTKKQMQLMLKMVEGFSEDIKMKFGLEKCRLLNITRGKMEDGTFKLKEGAEIEALKEGDTYKYLGIKQARKINQTQMKKELTEEFTRRLRRIMRTGLNSKNLIKAINTYACSALSYSFGIISWTTTDLAALQRKIRTMLTKHNKHHPKSSIERTELPRHLGGRGIVDLSNRMSQEIEGLRKYFLSKAASSELHRVVCVADTSTPLKLHQDHLETVEHSAESKMQKLIGKPLHGRHQNEVNHDYVDISASNYWLTSGRLFPETEGFMLAIQDQVIPTRNYMKYIAKDASVADDSCRYGCATHETIQHITGGCQKFAGTEYKNRHDAVAKILHQELALKHQLLSSKKVPYYNYHPDAVLENEHHKLYWDRTVLTDRKITHNRPDLILLNKDEDRALFIDVAIPNNNNLLDRHTEKISKYRDLEEQTRRQWKLKDIKTIPIVISSTGLIPKKLLENLRKLQLDENIYKVMQKAVLLGTTRTVRKYMGNSEEHRLLRQEVRVEQESNLQQGGEERPGSDHHHEPENLERAPTELNPFDI

SEQ ID NO: 6719 - protein, 1261 aa, Coccinella septempunctata
MEMVITRSLGNKSLPGDRQGMSGAGAGHDSMRDVGGRMLRKRAPAAKQATAPKQQQQPTSPIQLPTRTAEGAAQDIQPVLTQAGLVRKRMKWTTSMNETIVRIYNSITGLGQNTNNYRKRLHEEFCIAYPNVNVTEQRVADQYRVILRNELVPTARIDAIKRELQRPLAMENNTNTSDEVHIPGQQHPEDIDTESPSCKANEPEHQDDREELHRQVDSDMRRYFAELEGTDPLHRVAPPRLNTSKKLSLIIDILNKDVLPEYLQNGSSLEYLHLVFHCAALTTAKTMGAKIRRTKNDGPKLHKLHAPAWQKRLQHKTERLRRDIGRLTEYLNGNRGRKVVKAAKKIMDRNRTHTERETENATAHHCLDTLKQKLSLYAERLRRYKSNYSRKRDNNSFEKSEESFYRSLTSSDGENGKLPPKEAIEQFWTEQLSTKPQFNGDTGWIEDEKSEAIKYETMQHDMITIEEVKSALRGLHNWKAPGPDGLQNFWIKKLWIMHDKLTSAINDVIENPERMPVFLTHGTTYLLPKDQRNTEDPSKYRPITCLPTMYKLITSCISNRIHNHCERNNIIAMQQEGCTKDSRGCKEQLIIDSVICNQAFSKRRNLYAAYIDYKKAFDSIPHEWLLTILKIYKVDPNIVKFLKNAMSTWRTSLRIKAADCSITTGPIPIRRGIFQGDSLSPLWFCMALNPSSHRLNSTDYGFSIKSGSRTMMKLNHLLYMDDLKLFASTKKQMQLMLKIVEGFSEDIKMKFGLEKCRLLNITRGIIEDGSFKLKEGAEIEALKEGDTYKYLGIKQARKINQTQMKKELAEEFTRRLRRIMRTGLNSKNLIKAINTYACSALSYSFGIISWTTTDLAALQRRIRTMLTKHNKHHPKSSIERTELPRHLGGRGIVDLSNRMSQEIEGLRKYFLSKAASSELHRVVCVADSSTLLKLQQDHLETVEHSAESRMQKLIGKPLHGRHQNEVNHDYFDISASNYWLTSGRLFPETKGFMLAIQDQVIPTRNYMKYIAKDASVANDSCRYGCETHETIQHITGGCQKFAGTEYKNRHDAVAKILHQELALKHLLTSKKVPYYNYHPDAVLENDHHKLSWDRTVLTDRKITHNRPDLILLNKDEDRALFIDVAIPNNNNLLDRHTEKISKYRDLEEQTRRQWKLKDIKTIPIVISSTGLIPKKLLENLGKLQLDENIYRVMQKAVLLGTARTVRKYMGNAEEHRLRRQEVRVEQESSLQQGGEERPGPDHHHEPDNLERAPTELNPFDI

SEQ ID NO: 6720 - protein, 1266 aa, Coccinella septempunctata
MVITRSLGNKSLPGDRQGMSGAGAGHDSMRDVGGRMLRKRAPAAKQATDPKQQQQPTSPIQLPTRTAEGAAQDIQPVLTQAGLVRKRMKWTTSMNETTVRIYNSITGLGQSTNNYRKRLHEEFCIAYPNVNVTEQRVADQYRVILRNELVPTARIDAIKRELQRPLAMENNTNTSDEVHIPGQQHPEDIDTESPSCKANEPEHQDDREELHRQVDSDMRRYFAELEGTDPLHRVAPPRLNTSKKLSLIIDILNKDVLPEYLQNGSSLEYLHLVFHCAALTTAKTMGAKIRRTNNDGLKLHKLHAPAWQKRLQHKTERLRRDIGRLTEYLNGNRGRKVVKAAKEIMDRNRTHTERETENATAHHCLDTLKQKLSLYAERLRRYKSNYSRKRDNNSFEKSEESFYRSLTSSDGENGKLPPKEAIEQFWTEQLSTKPQFNGDTGWIEDEKSEAIKYEPMQHDMITIEEVKSAIRGLHNWKAPGPDGLQNFWIKKLWIMHDKLTSAINDVIENPERMPVFLTHGTTYLLPKDQRNTEDPSKYRPITCLPTMYKLITSCISNRIHNHCERNNIIAMQQEGCTKDSRGCKEQLIIDSVICNQAFSKRRNLYAAYIDYKKAFDSIPHEWLLTILKIYKVDPNIVKFLKNAMSTWRTSLQMKAADCSITTGPIPIRRGIFQGDSLSPLWFCMALNPLSHRLNSTDYGFSIKSGSRTMMKLNHLLYMDDLKLFASTKKQMQLMLKMVERFSEDIKVKFGLEKCRLLNITRGKIEDGTFKLKEGAEIEALKEGDTYKYLGIKQARKINQTQMKKELTEEFTRRLRRIMRTGLNSKNLIKAINTYACSALSYSFGITSWTTTDLAALQRKIRTMLTKHNKHHPKSSIERTELPRHLGGRGIVDLSNRMSQEIEGLRNYFLSKAASSELHRVVCVADTSTPLKLHQDHLETVEHSAESKMQKLIGKPLHGRHQNEVNHDYVDISASNYWLTSGRLFPETERFMLAIQDQVIPTRNYMRYIAKDASVADDSCRYGCATHETIQHITGGCQKFAGTEYKNRHDAVAKILHQELALKHQLLTSKRIPYYNYHPDAVLKNEHHKLYWDRTVLTDRKITHNRPDLILLNKDEDTALFIDVAIPNNNNLLDRHTEKISKYRDLEEQTRRQWKLKDIKTIPIVISSTGLIPKKLLENLRKLQLDKNIYKVMQKAVLLGTARTVRKYMGNAEEHRLLRQEVRVEQESNLQQEAEERPEPHHHHEPENLERAPTELNPFDISDIWDK

SEQ ID NO: 6721 - protein, 1061 aa, Coccinella septempunctata
MARIDAIKRELQRPLAMENNTNTSDEVHIPGQQHPEDIDTESPSCKANEPEHQDDREELHRQVDSDMRRYFAELEGTDPLHRVAPPRLNTSKKLSLIIDILNKDVLPEYLQNGSSLEYLHLVFHCAALTTAKTMGAKIRRTNNDGPKLHKLHAPAWQKRLQHKTERLRRDIGRLTEYLNGNRGRKVVKAAKEIMDRNRTHTERETENATAHHCLDTLKQKLSLYAERLRRYKSNYSRKRDNNSFEKSEESFYRSLTSSDGENGKLPPKEAIEQFWTEQLSTKPQFNGDTGWIEDEKSEAIKYEPMQHDMITIEEVKSAIRGLHNWKAPGPDGLQNFWIKKLWIMHDKLTSAINDVIENPERMPVFLTHGTTYLLPKDQRNTEDPSKYRPITCLPTMYKLITSCISNRIHNHCERNNIIAMQQKGCTKDSRGCKEQLIIDSVVCNQAFSKRKNLYAAYIDYKKAFDSIPHEWLLTILKIYKVDPNIVKFLKNAMSTWRTSLQMKAADCSITTGPIPIRRGIFQGDSLSPLWFCMALNPLSHRLNSTDYGFSIKSGSRTMMKLNHLLYMDDLKLFASTKKQMQLMLKMVEGFSEDIKMKFGLEKCRLLNITRGKVEDGTFKLKEGAEIEALKEGDTYKYLGIKQARKINQTQMKKELTEEFTRRLRRIMRTGLNSKNLIKAINTYACSALSYSFGIISWTTTDLAASKRKIRTMLTKHNKHHPKSSIERTELPRHLGGRGIVDLSNRMSQEIEGLRNYFLSKAASSELHRVVCVADTSTPLKLHQDHLKTVEHSAESKMQKLIGKPLHGRHQNEVNHDYVDISASNYWLTSGRLFPETEGFMLAIQDQVIPTRNYMRYIAKDASVADDSCRYGCATHETIQHITGGCQKFAGTEYKNRHDAVAKILHQELALKHQLLTSKRIPYYNYHPDAVLENEHHKLYWDRTVLTDRKINHNRPDLILLNKDEDTALFIDVAIPNNNNLLDRHTEKISKYRDLEEQTRRQWKLKDIKTIPIVISSTGLIPKKLLENLRKLQLDENIYKVMQKAVLLGTARTVRKYMGNAE

SEQ ID NO: 6722 - protein, 1178 aa, Coccinella septempunctata
MLLELRRLMFSRIGSTSGRQVLFRIFQHILEIFLFFLFFFPCHWVNIAYFYYVSFSRGEHKPMKMVITRSLGNKSLPGDRQGMSGAGAGHDSMRDVGGRMLRKRAPAAKEATAPKQQQQPTSPIQLPTRTAEGAAQDIQPVLTQAGLVRKRMKWTTSMNETIVRIYNSITGLGQNTNNYRKRLHEEFCIAYPNLNVTEQRVADQYRVILRNELIPTARIDAIKRELQRPLAIENNTNTSDEIHIPGQQHPEDIDTESPSCKANEPEHQDDREELHRQVDSDMRRYFAELEGTDPLYRVAPPRLNTSKTLSLIIDILNKDVLPEYRLRRDIGRLTEYLNGNRGRKVVKAAKEIMDRNRTHAERETENTTAHHCLDTLKQKLSLYAERLRRYKSNYSRKRNNNSFEKSEESFYRSLTSSDGENGKLPPKEAIEQFWTEQLSTKPQFNGDTGWIEDEKSEAIKYEPMQHDMITIEEVKSAIRGLHNWEAPGPDGLQNFWIKKLWIMHDKLTSAINDVIENPERMPVFLTHGTTYLLPKDERNTEDPSKYRPITCLPTMYKLITLCISNRIHNHCERNNIIAMQQKGCTKDSRGCKEQLIIDSVICNQAFSKRRNLYAAYIDYKIAFDSIPHEWLLTILKIYKVDPNIVKFLKNAMSTWRTSLQMKAADCSITTGRIPIRRGIFQGDSLSPLWFCMALNPLSHRLNSTDYGFSIKSGSRTMIKLNHLFYMDDFKLFASTKKQMQLMLKMVKGFSEDIKMKFGLEKCRLLNITRGKIEDGTFKLKEGAEIEALKEGDTYKYLGIKQARKINQTQMKKELTEEFTRRLRRIMRTGLNSKNLMKAINTYACSALSYSFGIISWTTTDLAALQRKIRSMLTKHNKHHPKSSIERTELPRHLGGRGIVDLSNRMSQEIEELRNYFLSKAASSEIHRVVCAADTSTPLKLHQDQLETVEHSAESKMQKLIGKPLHGRHQNEVNHDYVDISASNYWLTSGRLFPETEGFMLAIQDQVISTRNYMRYIAKDASVADDSCRYGCATRETIQHITGGCQKFAGTEYKNRHDAVAKILQQELALKHQLLTSKRVPYYNNHPDAVLENEHHKLYWDRTVLTDRKITYNRPDLILLNKDEDTALFIDVAIPNNNNLLDRYTEKISKYRDLEEQTRRQWKLKDIKTVMLYYLFDLI

SEQ ID NO: 6723 - protein, 1262 aa, Coccinella septempunctata
MKMVITRSLGNKSLPGDRQGMSGAGAGHDSMRDVGGRMLRKRAPAAQEATAPKQQQQPTSPIQLPTRTAEGAAQDIQPVLTQAGLVRKRMKWTTSMNETIVRIYNSITGLGQNTNNYRKRLHEEFCIAYPNLNVTEQRVADQYRVILRNELIPTARIEAIKRELQRPPTIENNTNTSDEILIPGQQQAEETDTETPSCNASEPEHQDDREELHRQVDSDMRRYFAELEGTDPLHRVAPPRLNTSKKLSLIIDILNKDVLPEYLQNGSSLEYLHLVFHCAALTTAKTIGAKIRRTNNDGQKLHKLHAPAWQKRLQHKTERLRRDIGRLTEYLNGNRGRKVVKAAKEIMDRNRTHTERETENATAHHCLDTLKQKLSLYAERLRRYKSNYSRKRDNNSFEKSEESFYRSLTSSDGENGKLPPKEAIEQFWTEQLSTKPQFNGDTGWIEDEKSEAIKYEPMQHDMITIEEVKSAIRGLHNWKAPGPDGLQNFWIKKLWIMHEKLTSAINDVIENPERMPVFLTHGTTYLLPKDQRNTEDPSKYRPITCLPTMYKLITSCISNRIHNHCERNNIIAMQQKGCTKDSRRCKEQLIIDSVICNQAFSKRRNLYAAYIDYKKAFDSIPHEWLLTILKIYKVDPNIVKFLKNAMSTWRTSLQMKAADCSITTGPIPIRRGIFQGDSLSPLWFCMALNPLSHRLNSTDYGFSIKSGSRTMMKLNHLLYMDDLKLFASTKKQMQLMLKMVEGFSEDIKMKFGLEKCRLLNITRGKIEDGTFKLKEGAEIEALKEGDTYKYLGIKQARKINQTQMKKELTEEFTRRLRRIMRTGLNSKNLIKAINTYACSALSYSFGIISWTTTDLAALQRKIRTMLTKHNKHHPKSSIERTELPRHLGGRGIVDLSNRMSQEIEGLRNYFLSKAASSELHRVVCVADTSTPLKLHQDHLETVEHSAESKMQKLIGKPLHGRHQNEVNHDYVDISASNYWLTSGRLFPETEGFMLAIQDQVIPTRNYMRYIAKDASVADDSCRYGCATHETIQHITGGCQKFAGTEYKNRHDAVAKILHQELALKHQLLTSKRVPYYNYHPDAVLENEHHKLYWDRTVLTDRKITHNRPDLILLNKDEDTALFIDVAIPNNNNLLDRHTEKISKYRDLEEQTRRQWKLKDINTIPIVISSTGLIPKKLLENLRKLQLDENIYKVMQKAVLLGTARTVRKYMGNAEEHRLLRQEVRVEQESNLQQGAEERPEPDHHHEPENLERAPTELNPFDI

SEQ ID NO: 6724 - protein, 916 aa, Coccinella septempunctata
MDRNRTHTERETENATAHHCLDTLKQKLSLYAERLRRYKSNYSRKRDNNSFEKSEETFYRSLTSSDGENGKLPPKEAIEQFWTEQLSTKPQFNGDTGWIEDEKSEAVKYEPMQHDIITIEEVKSAIRGLHNWKTPGPDGLQNFWIKKLWIMHEKLTSAINDVIENPERMPIFLTHGTTYLLPKGQRNTEDPSKYRPMTCLPTMYKLITSCISNRIHNHCERNNIIAMQQKGCTKESRGCKEQLIIDSVICNQAFSKRRNLYAAYIDYKKAFDSIPHEWLLTILNIYKVDPNIVKFLKNAMSTWRTSLQMKAADGSITTGPIPIRRGIFQGDSLSPLWFCMALNPLSHRLNSTDYGFAIKSGSRTMMKLNHLLYVDDLKLFASTKKQMQQMLKMVEGFSEDNKMKFGLEKCRLLNITRGKIEDGTFKLREGAEIEALKEGDTYKYLGIKQARKINQSQMKKELTEEFTRRLRRIMRTGLNSKNLMKAINTYACSALSYSFGIISWTTTDLAALQRKIRTMLTKHNKHHPKSSIERTELPRHLGGRGIVDLSNRMTQEIEGLRKYFLSKAASSELHRVVCVADTSTPLKLQQDHLETVEHSAESKMQKLIGKPLHGRHQNEVNHDYVDISASNYWLTSGRLFPETEGFMLAIQDQVIPTRNYMKYIAKDASVADDSCRYGCATHETIQHITGGCQKFAGTEYKNRHDAVAKILHQELALKHQLVSSKKVSYYNYHPDAVLENEHHKLYWDRTVLTDRKITHNRPDLILLNKDEDTALFIDVAIPNNNNLLDRHTEKISKYRDLEEQTRRQWKLKDVKTIPIVISSTGLIPKKLLENLRKLQLDENIYRVMQKAVLLGTARTVRKYMGNSEEHRLLRQEVRTEQESNLQQGAEERPEPDQHHEPENLERAPTELNPFDI

SEQ ID NO: 6725 - protein, 1262 aa, Coccinella septempunctata
MKMVITRSLGNKSLPGDRQGMSGAGAGHDSMRDVGGRMLRKRAPAAQEATAPKQQQQPTSPIQLPTRTAEGAAQDIQPVLTQAGLVRKRMKWTTSMNETIVRIYNSITGLGQNTNNYRKRLHEEFCIAYPNLNVTEQRVADQYRVILRNELIPTARIEAIKRELQRPPTIENNTNTSDEILMPGQQQAEETDTETPSCNASEPEHQDDREELHRQVDSDMRRYFAELEGTDPLHRVAPPRLNTSKKLSLIIDILNKDVLPEYLQNGSSLEYLHLVFHCAALTTAKTIGAKIRRTNNDGQKLHKLHAPAWQKRLQHKTERLRRDIGRLTEYLNGNRGRKVVKAAKEIMDRNRTHTERETENATAHHCLDTLKQKLSLYAERLRRYKSNYSRKRDNNSFEKPEESFYRSLTSSDGENGKLPPKEAIEQFWTEQLSTKPQFNGDTGWIEDEKSEAIKYEPMQHDMITIEEVKSAIRGLHNWKAPGPDGLQNFWIKKLWIMHEKLTSAINDVIENPERMPVFLTNGTTYLLPKDQRNTEDPSKYRPITCLPTMYKLITSCISNRIHNHCERNNIIAMQQKGCTKDSRGCKEQLIIDSVICNQAFSKRRNLYAAYIDYKKAFDSIPHEWLLTILKIYKVDPNIVKFLKNAMSTWRTSLQMKAADCSITTGPIPIRRGIFQGDSLSPLWFCMALNPLSHRLNSTDYGFSIKSGSRTMMKLNHLLYMDDLKLFASTKKQMQLMLKMVEGFSEDIKMKFGLEKCRLLNITRGKIEDGTFKLKEGAEIEALKEGDTYKYLGIKQARKINQTQMKKELTEEFTRRLRRIMRTGLNSKNLIKAINTYACSALSYSFGIISWTTTDLAALQRKIRTMLTKHNKHHPKSSIERTELPRHLGGRGIVDLSNRMSQEIEGLRNYFLSKAASSELHRVVCVADTSTPLKLHQDHLETVEHSAESKMQKLIGKPLHGRHQNEVNHDYVDISASNYWLTSGRLFPETEGFMLAIQDQVIPTRNYMRYIAKDASVADDSCRYGCATHETIQHITGGCQKFAGTEYKNRHDAVAKILHQELALKHQLLTSKRFPYYNYHPDAVLENEHHKLYWDRTVLTDRKITHNRPDLILLNKDEDTALFIVVAIPNNNNLLDRHTEKISKYRDLEEQTRRQWKLKDINTIPIVISSTGLIPKKLLENLRKLQLDENIYKVMQKAVLLGTARTVRKYMGNAEEHRLLRQEVRVEQESNLQQGAEERPEPDHHHEPENLERAPTELNPFDI

SEQ ID NO: 6726 - protein, 1094 aa, Coccinella septempunctata
MKWTTSMNETIVRIYNSITGLRQNTNNYRKRLHEEFCNAYPNLNVTEQRVADQYRVILRNKLIPTARIDAIKRELQRPLAIENNTNTSDEIHMPGQQHLEDIDTESPSCNPSEPELQDDREELHRQVHSDMRRYFAELEGTDPLHRITPPRLNTSKKLSLIIDILNKDVLPEYLQNGSSLEYLHLVFYCAALTTAKTIGAKIRGTNNNGPKLHKLHAPAWQKRLQHKTERLRRDIGRLTEYLNGNRGRKLPPKEAIEQFWTEQLSTKPHFNGDTGWIEDEKSEAIKYEPMQHDMITIEEVKSAIRGLHNWKAPGPDGLQNFWIKKLWIMHDKLTSAINDVIENPERMPVFLTHGTTYLLPKDQRNTEDPSKYRPITCLPTMYKLITSCISNRIHNHCERNNIIAMQQKGCTKDSRGCKEQLIIDSVICNQAFSKRRNLYAAYIDYKKAFDSIPHEWLLTILKIYKVDPNIVKFLKNAMSTWRTSLQMKAADCSITTGPIPIRRGIFQGDSLSPLWFCMALNPLSHRLNSTDYGFSIKIGSRTMMKLNHLLYMDDLKLFASTKKQMQLMLKMVEGFSEDIKMKFGLEKCRLLNITRGKIEDSTFKLKEGAEIEALKEGDTYKYLGIKQARKINQTQMKKELTEEFTRRLRRIMRTGLNSKNLIKAINTYACSALSYSFGIISWTTTDLAALQRKIRTMLTKHNKHHPKSSIERTELPRHLGGRGIVELSNRMSQEIEGLRKYFLSKAASSELHRVVCVADSSTPLKLQQDHLETVEHSAESKMQKLIGKPLHGRHQNEVNHDYVDISASNYWLTSGRLFPETEGFMLAIQDQVIPTRNYMKYIAKDASVADDSCRYGCATHETIQHITGGCQKFAGTEYKNRHDAVAKILHQELALKHQLLTSKMVPYYNYHPDAVLENEHHKLYWDRTVLTDRKITHNRPDLILLNKDEDRALFIDVAIPNNTNLLDRHTEKISKYRDLEEQTRRQWKLKDIKTIPIVISSTGLIPKKLLENLRKLQLDENIYRVMQKAVLLGTARTVRKYMGNAEEHRLLRQEVRVEQESNLQQGGEERPGPDHHHEPENLERAPTELNPFDI

SEQ ID NO: 6727 - protein, 976 aa, Coccinella septempunctata
MGAKIRRTNNDGPKLHKLHAPEWQKRLQHKTERLRRDIGRLTEYLNGNRGRKVVEAAKEIIDRNRTHTERETENATAHHCLDTLKQKLSLYAERLRRYKSNYSRKRDNNSFEKSEESFYRSLTSSDGENGKLPPKEAIEQFWTEQLSTKPQFNGNTGWIEDEKSEAIKYEPMQNDMITIEEVKSAIRGLHNWKAPGPDGLQNFWIKKLWIMHDKLTSAINDVIENPERMPAFLTHGTTYLLPKDQRNTEDPSKYRPITCLPTMYKLITSCISNRIHNHCERNNIIAMQQKGCTKDSRGCKEQLIIDSVICNQAFSKRRNLYAAYIDYKKAFDSIPHEWLLTILKIYKVDPNIVKFLKNALSTWRTSLQMKAADCSITTGPIPIRRGIFQGDSLSPLWFCMALNPLSHRLNSTEYGFSIKSGSRTMMKLNHLLYMDDLKLFASTKKQMQLMLKMVEGFSEDIKMKFGLEKCRLLNITRGKIEDGTFKLKEGAEIEALKEGDTYKYLGIKQARKINQTQMKKELTEEFTRRLRRIMRTGLNSKNLIKAINTYACSALSYSFGIISWTTTDLAALQRKIRTMLTKHNKHHPKSSIERTELPRHLGGRGIVDLSNRMTQEIEGLRKYFLSRAASSELHRVVCVADTSTPLKLHQDHLETVEHSAESKMQKLIGKPLHGRHQNEVNHDYVDISASNYWLTSGRLFPETESFMLAIQDQVIPTRNYMKYIAKDASVADDSCRYGCATHETIQHITGGCQKFAGTEYKNRHDAVAKILHQELALNHQLLSSKKVPYYNYHPDAVLENDHHKLYWDRTVLTDRKITHNRPDLILLNKDEDTALFIDVAIPNNNNLLDRHTEKISKYRDLEEQTRRQWKLKDIKTIPIVISSTGLIPKKLLENLRNLQLDENIYRVMQKAVLLGTARTVRKYMGNAEEHRLLRQEVRVEQESSLQQGGEERPGPDHHHEPENLERAPTELNPFDI

SEQ ID NO: 6728 - protein, 1172 aa, Coccinella septempunctata
MKWTTSMNETIVRIYNSITGLGQNTNNYRKRLHEEFCNAYPNLNVTEQRVADQYRVILNELIPTARIDAIKRELQRPPTIENNTNTSDEIHMPGQQQAEETDTESPSCNASEPEHQDDREELHRQVDSDMRRYFAELEGTDPLHRVAPPRLNTSRKLSLIIDILNKDVLPEYLQNGSSLEYLHLVFHCAALTTAKTMGAKILRTNNDGPKLHKLHAPAWQKRLQHKTERLRRDIGRLTEYLNGNRGRKVVKAAKEIMDRNWTHTERETENATAHHCLDTLKQKLSLYAERLRRYKSNYSRKRDNNSFEKSEESFYRSLTSSDGENEKLPPKEAIEQFWTEQLSTKPQFNGNTGWIEDEKSEAIKYEPMQHDMITIEEVKSAIRGLHNWKAPGPDGLQNFWIKKLWIMHDKLTSAINDVIENPERMPVFLTHGTTYLLPKDQRNTEDPSKYRPITCLPTMYKLITSCISNRIHNHCERNNIIAMQQKGCTKDSRGCKEQLIIDSVICNQAFSKRRNLYAAYIDYKKAFDSIPHEWLLTILKIYKVDPNIVKFLKNAMSTWRTSLQMKAADCFITTGPIPIRRGIFQGDSLSPLWFCMALNPLSHRLNSTDYGFSIKSGSRTMMKLNHLLYMDDLKLFASTKKQMQLMLKMVEGFSEDIKMKFGLEKCRLLNITRGKIEDGTFKLKEGAEIEALKEGDTYKYLGIKQARKINQTQMKKELTEEFTRRLRRMMRTGLNSKNLIKAINTYACSALSYSFGIISWTTTDLAALQRKIRTMLTKHNKHHPKSSIERTELPRHLGGRGIVDLSNRMSQEIEGLRKYFLSKAASSELHRVVCVADSSTPLKLQQDHLETVEHSAESKMQKLIGKPLHGRHQNEVKHDYVDISASNYWLTSGRLFPETEGFMLAIQDQVIPTRNYMKYIAKDASVADDSCRYGCATHETIQHITGGCQKFAGTEYKNRHDAVAKILHQELALKHQLLTSKKVPYYNYHPDAVLENEHHKLYWDRTVLTDRKITHNRPDLILLNKDEDRALFIDVAIPNNNNLLDRHTEKISKYRDLEEQTRRQWKLKDIKTIPIVISSTGLIPKKLLENLRKLQLDENIYRVMQKAVLLGTARTVREYMGNAEEHRLLRQEVRVEQESNLQQGGEERPGPDHHHEPENLERAPTELNPFDI

SEQ ID NO: 6729 - protein, 1285 aa, Coccinella septempunctata
MKMVITRSLGNKSLPGDRQGMSGAGAGHDSMRDVGGRMLRKRAPAAKEATAPKQQQQPTSPIQLSTRTAEGAAQDIQPVLTQAGLVRKRMKWTTSMNETIVRIYNSITGLGQNTNNYRKRLHEEFCNAYPNLNVTEQRVADQYRVILRNELIPKARIDAIKRELQRPPTIENNTNTSDEIHMPGQQQAEETDTESPSCNASEPEHQDDREELHRQVDSDMRRYFAELEGTDPLHRVAPPRLNTSKKLSLIIDILNKDVLPEYLQNGSSLEYLHLVFHCAALTTAKTMGAKIRRTNNDGPKLHKLHAPAWQKRLQHKTERLRRDIGRLTEYLNGNRGRKVVKAAKEIIDRNRTHTERETENATAHHCLDTLKQKLSLYAERLRRYKTNYSRKRDNNSFEKSEESFYRSLTSSDGENGKLPPQEAIEQFRTEQLSTKPQFNGNTGWIEDEKSEAIKYEPMQHDMITIEEVKSAIRGLHNWKAPGPDGLQNFWIKKLWIMHDKLTSAINDVIENPERMPVFLTHGTTYLLPKDQRNTEDPSKYRPITCLPTMYKLITSCISNRIYNHCERNNIIAMQQKGCTKDSRGCKEQLIIDSVICNQAFSKRRNLYAAYIDYKKAFDSIPHEWLLTILKIYKVDPNIVKFLKNAMSTWRTSLQMKAADCSITTGPIPIRRGIFQGDSLSPLWFCMALNPLSHRLNSTDYGFSIKSGSRTMMKLNHLLYMDDLKLFASTKKQMQLMLKMVEGFSEDIKMKFGLEKCRLLNITRGKMEDGTFKLKEGAEIEALKEGDTYKYLGIKQARKINQTQMKKELTKEFTRRLRRIMRTGLNSKNLIKAINTYACSALSYSFGIISWTTTDLAALQRKIRTMLTKHNKHHPKSSIERTELPRHLGGRGIVDLSNRMSQEIEGLRKYFLSKAASSELHRVVCVADTSTPLKLHQDHLETVEHSAESKMQKLIGKPLHGRHQNEVNHDYVDISASNYWLTSRRLFPETEGFMLAIQDQVIPTRNYMKYIAKDASVADDSCRYGCATHETIQHITKGCQKFAGTEYKNRHDAVAKILHQELALKHQLLSSKKVPYYNYHPDAVLENEHHKLYWDRTVLTDRKITHNRPDLILLNKDEDRALFIDVAIPNNNNLLDRHTEKISKYRDLEEQTRRQWKLKDIKTIPIVISSTGLIPKKLLENLRKLQLDENIYKVMQKAVLLGTARLYASTWEIQRNTVCSDRKCGWSRNPTYSREARSDPDPTTTTSPKTWKGLQQSLILLISEISGISEFSSGEECESRKAKVII

SEQ ID NO: 6730 - protein, 1262 aa, Coccinella septempunctata
MKMVITRSLGNKSLPGDRQGMSGAGAGHDSMRDVGGRMLRKRAPAAQEATAPKQQQQPTSPIQLPTRTAEGAAQDIQPVLTQAGLVRKRMKWTTSMNETIVRIYNSITGLGQNTNNYRKRLHEEFCIAYPNLNVTEQRVADQYRVILRNELIPTARIEAIKRELQRPPTIENNTNTSDEILMPGQQQAEETDTETPSCNASEPEHQDDREELHRQVDSDMRRYFAELEGTDPLHRVAPPRLNTSKKLSLIIDILNKDVLPEYLQNGSSLEYLHLVFHCAALTTAKTIGAKIRRTNNDGQKLHKLHAPAWQKRLQHKTERLRRDIGRLTEYLNGNRGRKVVKAAKEIMDRNRTHTERETENATAHHCLDTLKQKLSLYAERLRRYKSNYSRKRDNNSFEKSEESFYRSLTSSDGENGKLPPKEAIEQFWTEQLSTKPQFNGDTGWIEDEKSEAIKYEPMQHDMITIEEVKSAIRGLHNWKAPWPDGLQNFWIKKLWIMHEKLTSAINDVIENPERMPVFLTHGTTYLLPKDQRNTEDPSKYRPITCLPTMYKLITSCISNRIHNHCERNNIIAMQQKGCTKDSRGCKEQLIIDSVICNQAFSKRRNLYAAYIDYKKAFDSIPHEWLLTILKIYKVDPNIVKFLKNAMSTWRTSLQMKAADCSITTGPIPIRRGIFQGDSLSPLWFCMALNPLSHRLNSTDYGFSIKSGSRTMMKLNHLLYMDDLKLFASTKKQMQLMLKMVEGFSEDIKMKFGLEKCRLLNITRGKIEDGTFKLKEGAEIEALKEGDTYKYLGIKQARKINQTQMKKELTEEFTRRLRRIMRTGLNSKNLIKAINTYACSALSYSFGIISWTTTDLAALQRKIRTMLTKHNKHHPKSSIERTELPRHLGGRGIVDLSNRMSQEIEGLRNYFLSKAASSELHRVVCVADTSTPLKLHQDHLETVEHSAESKMQKLIGKPLHGRHQNEVNHDYVDISASNYWLTSGRLFPETEGFMLAIQDQVIPTRNYMRYIAKDASVADDSCRYGCATHETIQHITGGCQKFAGTEYKNRHDAVAKILHQELALKHQLLTSKRVPYYNYHPDAVLENEHHKLYWDRTVLTDRKITHNRPDLILLNKDEDTALFIDVAIPNNNNLLDRHTEKISKYRDLEEQTRRQWKLKDINTIPIVISSTGLIPKKLLENLRKLQLDENIYKVMQKAVLLGTARTVRKYMGNAEEHRLLRQEVRVEQESNLQQGAEERPEPDHHHEPENLERAPTELNPFDI

SEQ ID NO: 6731 - protein, 1206 aa, Coccinella septempunctata
MTIIGGRMLRKRAPAAKEATASKQQQQPTSPIQLPTRTAEGAAQDIQPVLTQAGLVRKRMKWTTSMNETIVRIYNSITGLGQNTNNYRKRLHEEFCNAYPNINVTEQRVADQYRVILRNELIPMARIDAIKQELQRPPVTESDTNTSDEIHMPGQQQPEEIDAESPSCNPSEAEHQYDREELHRQIDSEMRRYFAELEGTDTLHRIAPPRLNTSKKLSLIIDILNKDVLPEYLQNGSSLEYLHLVFYGAALTTAKTIGAKIRRTNNDGPKLHKLYAPPWQKRLQHKTERLRRDIGRLTEYVNGNRGRKVVKAAKEIMDRNRNHTERETENATAHHCLDTLKQKLSLYAERLRRYKSNYSRKRDNNSFEKSEETFYRSLTSSDGENGKLPPKEAIEQFWTVQLSTKPQFNGDTGWIEDEKSEAVKYEPMQHDIITIEEVKSAIRGLHNWKTPGPDGLQNFWIKKLWIMNDKLTSAINDVIENPERMPIFLTHGTTYLLPKDQRNTEDPSKYRPITCLPTMYKLITSCISNRIHNHCERNNIIAMQQKGCTKESRGCKEQLIIFSVICNQAFFKRRNLYAAYIDYKKAFDSIPHEWLLTILNIYKVDPNIVKFLKNAMSTWRTSLQMKAADGSITTGPIPIRRGIFQGDSLSPLWFCMALNPLSHRLNSTDYGFAIKSGSRTMMNLNHLLYMDDLKLSASTKKQMQQMLKMVEGFSEDIKMKFGLEKCRLLNITRGKIEDGTFELREGAEIEALKEGDTYKYLGIKQARKINQSQMKKELTEEFTRRLRRIMRTGLNSKNLIKAINTYACSALSYSFGIISWTTTDLAALQRKIRTMLTKHNKHHPKSSIERTELPRHLVGRGIVDLSNRMTQEIEGLRKYFLSKAASSELYRVVCVADTSTPLKLQQDHLETVEHSAESKMQKLIGKPLHGRHQNEVNHDYVDISASNYWLTSGRLFPETEGFMLAIQDQVIPTRNYMKYIAKDASVADDSCRYGCATHETIQHITGGCQKFAGTEYKNRHDAVAKILHQELALKHQLLSSKKVSYYNYHPDAVLENEHHRLYWDCTVLTDRKITHNRPDLILLNKDEDTALFIDVAISNNNNLLDRHTEKISKYRDLEDQTRRQWKLKDVKTIPIVISSTGLIPKKLLENLRKLQLDENIYRVMQKAVLLGTARTVRKYMGNSEEHRLLRQEVRTEQESNLQQGAE

SEQ ID NO: 6732 - protein, 982 aa, Coccinella septempunctata
MGAKIRRTNNDGPKLHKLHAPAWQKRLQHKTERLRRDIGRLTEYLNGNRETKVVKAAKEIMDRNRTHTERETENATAHHCLDTLKQKLSLYAERLRRYKSNYSRKRDNNSFEKSEESFYRSLTSSDGENGKLPPKEAIEQFWTEQLSTKPQFNGDTGWIEDEKSEAIKYEPMQHDMITIEEVKSAIRGLHNWKAPGPDGLQNFWIKKLWIMHDKLTSTINDVIENPERMPVFLTHGTTYLLPKDQRNTEDPSKYRPITCLPTMYKLITSCISNRIHNHCERNNIIAMQQEGCTKDSRGCKEQLIIDSVICNQAFSKRRNLYAAYIDYKKAFDSIPHEWLLTILKIYKVDPNIVKFLKNAMPTWRTSLQMKAADCSITTGPIPIRRGIFQGDSLSPLWFCMALNPLSHRLNSTDYGFSIKSGSRTMMKLNHLLYMDDLKLFASTKKQMQLMLKMVERFSEDIKMKFGLEKCRLLNITRGKIEDGTFKLKEGAEIEALKEGDTYKYLGIKQARKINQTQMKKELTEEFTRRLRRIMRTGLNSKNLIKAINTYACSALSYSFGIISWTTTDLAALQRKIRTMLTKHNKHHPKSSIERTELPRHLGGRGIVDLSNRMSQEIEGLRNYFLSKAASSELHRVVCVADTSTPLKLHQDHLETVEHSAESKMQKLIGKPLHGRHQNEVNHDYVDISASNYWLTSGRLFPETEGFMLAIQDQVIPTRNYMRYIAKDASVADDSCRYGCATHETIQHITGGCQKFAGTEYKNRHDAVAKILHQELALKHQLLTSKRIPYYNYHPDAVLKNEHHKLYWDRTVLTDRKITHNRPDLILLNKDEDTALFIDVAIPNNNNLLDRHTEKISKYRDLEEQTRRQWKLKDIKTIPIVISSTGLIPKKLLENLRNLQLDKNIYKVMQKAVLLGTARTVRKYMGNAEEHRLLRQKVRVEQESNLQQEAEERPEPHHHHEPENLERAPTELNPFDISDIWDK

SEQ ID NO: 6733 - protein, 916 aa, Coccinella septempunctata
MDRNRTHTERETENATAHHCLDTLKQKLSLYAERLRRYKSNYSRKRDNNSFEKSEESFYRSLTSSDGENGKLPPKEAIEQFWTEQLSTKPQFNGDTGWIEDEKSEAVEYEPMQHDMITIEEVKSAIRGLHNWKAPGPDGLQNFWIKKLWIMHDKLTSAINDVIENPERMPVFLTHGTTYLLPKDQRNTEDPSKYRPITCLPTMYKLITSCISNRILNHCERNNIIAMQQKGCTKDSRGCKEQLIIDSVICNQAFSKRRNLYAAYIDYKKAFDSIPHEWLLTILKIYKVDPNIVKFLKNAMSTWRTSLQMKAADCSITTGPIPIRRGIFQGDSLSPLWFCMALNPLSHRLNSTDYGFSIKSGSRTMMKLNHLLYMDDLKLFASTKKQMQLMLKMVEGFSEDIKMKFGLEKCRLLNITRGKIEDGTFKLKEGAEIEALKEGDTYKYLGIKQARKINPTQMKKELTEEFTRRLRRIMRTGLNSKNLIKAINTYACSALSYSFGIISWTTTDLAALQRKIRTMLTEHNKHHPKSSIERTELPRHLGGRGIVDLSNRMSQEIEGLRNYFLSKAASSELHRVVCVADTSTPLKLHQDHLEAVEHSAESKMQKLIGKPLHGRHQNEVNHDYVDISASNYWLTTGRLFPETEGFMLAIQDQVIPTRNYMRYIAKDASVADDSCRYGCATHETIQHITGGCQKFAGTEYKNRHDAVAKILHQELALKHQLLTSKRIPYYNYHPDAVLENEHHKLYWDRTVLTDRKIAHNRPDLILLNKDENTALFIDVAIPNNNNLLDRHTEKISKYRDLEEQTRRQWKLKDIKTIPIVISSTGLIPKKLLENLRKLQLDENIYKVMQKAVLLGTARTVRKYMGNAEEHRLRRQEVRVEQESNLQQGGEERPGPDHHHEPENLERAPTELNPFDI

SEQ ID NO: 6734 - protein, 1262 aa, Coccinella septempunctata
MEMVITRSLGNKSLPGDRQGMSGAGAGHDSMRDVGGRMLRKRAPAAKEATAPKQQQQPTSPIQLPTRTAEGAAQDIQPVLTQAGLVRKRMKWTTSMNETIVRIYNSITGLGQNTNNYRKRLHEEFCNAYPNINVTEQRVADQYRVILRNELIPMARIDAIKQELQRPPVTESDTNTSDETHMPGQQQPEEIDAESPSCNPSEAEHQDDREELHRQIDSEMRRYFAELEGTDPLHRIAPPRLNTSKKLSLIIDILNKDVLPEYLQNGSSLEYLHLVFYCAALTTAKTIGAKIRRTNNDGPKLHKLYAPPWQKRLQHKTERLRRDIGRLTEYVNGNRGRKVVKAAKEIMDRNRTHTERETENATAHHCLDTLKQKLSLYAERLRRYKSNYSRKRDNNSFEKSEESFYRSLTSSDGENGKLPPKEAIEQFWTEQLSTKPQFNGDTGWIEDEKSEAVKYEPMQHDIITIEEVKSAIRGLHNWKTPGPDGLQNFWIKKLWIMHDKLTSAINDVIENPERMPIFLTHGTTYLLPKGQRNTEDPSKYRPITCLPTMYKLITSCISNRIHNHCERNNIIAMQQKGCTKESRGCKEQLIIDSVICNQAFSKRRNLYAAYIDYKKAFDSIPHEWLLTILNIYKVDPNIVKFLKNAMSTWRTSLQMKAADGSITTGPIPIRRGIFQGDSLSPLWFCMALNPLSHRLNSTDYGFAIKSGSRTMMKLNHLLYMDDLKLFASTKKQMQQMLKMVEGFSEDIKMKFGLEKCRLLNITRGKIEDGTFKLREGAEIEALKEGDTYKYLGIKQARKINQSQMKKELTEEFTRRLRRIMRTGLNSKNLIKAINTYACSALSYSFGIISWTTTDLAALQRKIRTMLTKHNKHHPKSSIERTELPRHLGGRGIVDLSNRMTQEIEGLRKYFLSKVASSELHRVVCVADTSTPLKLQQDHLETVEHSAESKMQKLIGKPLHGRHQNEVNHDYVDMSASNYWLTSGRLFPETEGFMLAIQDQVIPTRNYMKYIAKDASVADDSCRYGCATHETIQHITGGCQKFAGTEYKNRHDAVAKILHQELALKHQLLSSKKVSYYNYHPDAVLENEHHKLYWDRTVLTDRKITHNRPDLILLNKDEDTALFIDVAIPNNNNLLDRHTEKISKYRDLEEQTRRQWKLKDVKTIPIVISSTGLIPKKLLENLRKLQLDENIYRVMQKAVLLGTARTVRKYMGNSEEHRLLRQEVQTEQESNLQQGAEKRPEPDQHHEPENLERAPTELNPFDI

SEQ ID NO: 6735 - protein, 1262 aa, Coccinella septempunctata
MEMVITRSLGNKSLPGDRQGMSGAGAGHDSMRDVGGRMLRKRAPAAKEATAPKQQRQPKSPIQLPTRTAKGAAQDIQPVLTQAGLVRKRMKWTTSMNETIVRIYNSITGLGQNTNNYRKRLHEEFCNAYPNLNVTEQRVADQYRVILRNKLILTARIDAIKRELQRPLAIENNTNTSDEIHMPGQQHLEDIDTESPSCNPSEPELKDDREELHRQVISDMRRYFAELEGTDPLHRITPPRLNTSKKLSLIIDILNKDVLPEYLQNGSSLEYLHLVFYCAALTTAKTIGAKIRGTNNNGPKLHKLHAPAWQKRLQHKTERLRRDIGRLTEYLNGNRGRKVVKAAKEIMDRNRTHTERETENATAHHCLDTLKQKLSLYAERLRRYKSNYSRKRDNNSFEKSEESFYRSLTSSDGENGKLPPKEAIEQFWTEQLSTKPHFNGDTGWIEDEKSEAIKYEPMQHDMITIEEVKSAIRGLHNWKAPGPDGLQNFWIKKFWIMHDKLTSAINDVIENPERMPVFLTHGTTYLLPKDQRNTEDPSKYRPITCLPTMYKLITSCISNRIHNHCERNNIIAMQQKGCTKDSRGCKEQLIIDSVICNQAFSKRRNLYAAYIDYKKAFDSIPHEWLLTILKIYKVDPNIVKFLKNAMSTWRTSLQMKAADCSITTGAIPIRRGIFQGDSLSPLWFCMALNPLSHRLNSTDNGFSIKSGSRTMMKLNHLLYMDDLKLFASTKKQMQLMLKMVEGFSEDIKMKFGLEKCRLLNITRGKIEDGTFKLKEGAEIEALKEGDTYKYLGIKQARKINQTQMKKELTEEFTRRLRRIMRTGLNSKNLIKAINTYACSALSYSFGIISWTTTDLAALQRKIRTMLTKHNKHHPKSSIERTELPRHLGGRGIVDLSNRMSQEIEGLRKYFLSKAASSELHRVVCVADSSTPLKLQQDHLETVEHSAESKMQKLIGKPLHGRHQNEVNHDYVDISASNYWLTSGRLFPETEGFMLAIQDQVIPTRNYMKYIAKDASVADDSCRYGCATHETIQHITGGCQKFAGTEYKNRHDAVAKILHQELALKHQLLTSKKVPYYNYHPDAVLENEHHKLYWDRTVLTDRKITHNRPDLILLNKDEDRALFIDVAIPNNTNLLDRHTEKISKYRDLEEQTRRQWKLKDIKTIPIVISSTGLIPKKLLENLRKLQLDENIYRVMQKAVLLGTARTVRKYMGNAEEHRLLRQEVRVEQESNLQQGGEERPGPDHHHEPENLERAPTELNPFDI

SEQ ID NO: 6736 - protein, 805 aa, Coccinella septempunctata
MQHDMITIEEVKSAIRGLHNWKAPGPDGLQNFWIKKLWIMHDKLTSAINDVIENPERMPVFLTYGTTYLLPKDQRNTEHPSKYRPITCLPTMYKLITSCISNRIHNHCERNNIIAMQQKGCTKDSRGCKEQLIIDSVICDQAFSKRRNLYAAYIDYKKAFDSIPHEWLLTILKIYKVDPNIVKFLKNAMSTWRTSLQMKAADCSITTGPIPIRRGIFQGDSLSPLWFCMALNPLSHRLNSTDYGFSIKSGSRTMMKLNHLLYMDDLKLFASTKKQMQLMLKMVEGFSEDIKMKFGLEKCRLLNITRGKIEDGTFKLKEGAEIEALKEGDTYKYLGIKQARKINQTQMKKELTEEFTRRLRRIMRTGLNSKNLIKAINTYACSALSYSFGIISWTTTDLAALQRKIRTMLTKHNKHHPKSSIERTELPRHLGGRGIVDLSNRMSQEIEGLRKYFLSKADSSELHRVVCVADSSTPLKLQQDHLETVEHSAESKMQKLIGKPLHGRHQNEVNHDYVDISASNYWLTSGRLFPETEGFMLAIQDQVIPTRNYMKYIAKDASVADDSCRYGCATHETIQHITGGCQKFAGTEYKNRHDAVAKILHQELALKHQLLTSKKVPYYNYHPDAVLENEHHKLYWDRTVLTDRKITHNRPDLILLNKDEDRALFIDVAIPNNNNLLDRHTEKISKYRDLEEQTRRQWKLKDIKTIPIVISSTGLIPKKLLENLRKLQLDENIYRVMQKAVLLGTARTVRKYMGNAEEHRLLRQEVRVEQESNLQQGGEERPGPDHHHEPDNLERAPTELNPFDI

SEQ ID NO: 6737 - protein, 1262 aa, Coccinella septempunctata
MKMVITRSLGNKSLPGDRQGMSGAGAGHDSMRDVGGRMLRKRAPAAKEATAPKQQQQPTSPIQLPTRTAEGAAQDIQPVLTQAGLVRKRMKWTTSMNETIVRIYNSITGQGQNTNNYRKRLHEEFCIAYPNLNVTEQRVADQYRVILRNELIPTARIDAIKRELQRPPTIENNTNTSDEIHIPGQQHPEDIDTESPSCKANEPEHQDDREELHRQVDSDMRKYFAELEGTDPLHRVAPPRLNTSKKLSLIIDILNKDVLPEYLQNGSSLEYLHLVFHCAALTTAKTIGAKIRQTNNDGPKLHKLHAPAWQKRLQHKTERLRRDIGRLTEYLNGNRGRKVVKAAKDIMDRNRTHTERETENATAHHCLDTLKQKLSLYAERLRRYKSNYSRKRDNNSFEKSEESFYRSLTSSNGENGKLPPKEAIEQFWTEQLSTKPQFNGDTGWIEDEKSEAIKYEPMQHDMITIEEVKSAIRGLHNWKAPGPDGLQNFWIKKLWIMHDKLTSAINDVIVNPERMPVFLTHGTTYLLPKDQRNTEDPSKYRPITCLPTMYKLITSCISNRIHNHCERNNIIAMQQKGCTKDSRGCKEQLIIDSVICNQAFSKRRNLYAAYIDYKKAFDSIPHEWLLTILKIYKVDPNIVKFLKNAMSTWRTSLQMKAADCSITTGPIPIRRGIFQGDSLSPLWFCMALNPLSHRLNSTDYGFSIKSGSRTMMKLNHLLYMDDLKLFASTKKQMQLMLKMVEGFSEDIKMKFGLEKCRLLNITRGKIEDGTFKLKEGAEIEALKEGDTYKYLGIKQARKINQTQMKKELTEEFTRRLRRIMRTGLNSKNLIKAINTYACSALSYSFGIISWTTTDLAALQRKIRTMLTKHNKHHPKSSIERTELPRHLGGRGIVDLSNRMSQEIEGLRNYFLSKAASSELHRVVCVADTSTPLKLHQDHLETVEHSAESKMQKLIGKSLHGRHQNEVNHDYVDISASNYWLTSGRLFPKTEGFMLAIQDQVIPTRNYMRYISKDASVADDSCRYGCATHETIQHITGGCQKFAGTEYKNRHDAVAKILHQELALKHQLLTSKRVPYYNYHPDAVLENEHHKLYWDRTVLTDRKITHNRPDLILLNKDEDTALFIDVAIPNNKNLLDRHTEKISKYRDLEEQTRRQWKLKDIKTIPIVISSTGLIPKKLLENLRKLQLDENIYKVMQKAVLLGTARTVLKYMGNAEEHRLRRQEVWVEQESNLQQGAEERPEPDHHHEPENLERAPTELNPFDI

SEQ ID NO: 6738 - protein, 916 aa, Coccinella septempunctata
MDRNRTHTERETENATAHHCLDTLKQKLSLYAERLRRYKSNYSRKRDNNSFEKSEETFYRSLTSSDGENGKLPPKEAIEQFWTEQLSTKPQFNGDTGWIEDEKSEAVKYEPMQHDIITIEEVKSAIRGLHNWKTPGPDGLQNFWIKKLWIMHEKLTSAINDVIENPERMPIFLTHGTTYLLPKGQRNTEDPSKYRPITCLPTMYKLITSCISNRIHNHCERNNIIAMQQKGCTKESRGCKEQLIIDSVICNQAFSKRRNLYAAYIDYKKAFDFIPHEWLLTILNIYKVDPNIVKFLKNAMSTWRTSLQMKAADGSITTGPIPIRRGIFQGDSLSPLWFCMALNPLSHRLNSTDYGFAIKSGSRTMMKLNHLLYMDDLKLFASTKKQMQQMLKMVEGFSEDNKMKFGLEKCRLLNITRGKIEDGTFKLREGAEIEALKEGDTYKYLGIKQARKINQSQMKKELTEEFTRRLRRIMRTGLNSKNLMKAINTYACSALSYSFGIISWTTTDLAALQRKIRTMLNKHNKHHPKSSIERTELPRHLGGRGIVDLSNRMTQEIEGLRKYFLSKAASSELHRVVCVADTSTPLKLQQDHLETVEHSAESKMQKLIGKHLHGRHQNEVNHDYVDISASNYWLTSGRLFPETEGFMLAIQDQVIPTRNYMKYIAKDASVADDSCRYGCATHETIQHITGGCQKFAGTEYKNRHDAVAKILHQELALKHQLLSSKKVSYYNYHPDAVLENEHHKLYWDRTVLTDRKITHNGPDLILLNKDEDTALFIDVAIPNNNNLLDRHTEKISKYKDLEEQTRRQWKLKDVKTIPIVISSTGLIPKKLLGNLRKLQLDENIYRVMQKAVLLGTARTVRKYMGNSEEHRLLRQEVRTEQESNLQQGAEERPEPDQHHEPENLERAPTELNPFDI

SEQ ID NO: 6739 - protein, 1364 aa, Coccinella septempunctata
MNFIFKVLTGKPKSFEYIIIIIIIIIIIMSGLPGSYLVDGLPGSHRNDVDGAASHACCPQAIPIPSSSLFHILHRGALSALISLPLTQTEKGEHKPMKMVITRSLGNKSLPGDRQGMSGAGAGHDSMRDVGGRMLRKRAPAAKQATAPKQQQQPTSPIQLPTRTAEGAAQDIQPVLTQAGLVRKRMKWTTSMNETIVRIYNSITGLGQNTNNYRKRLHEEFCIAYPNVNVTEQRVADQYRVILRNELVPTARIDAIKRELQRPLAMENNTNTSDEVHIPGQQHPEDIDTESPSCKANEPEHQDDREELHRQVDSDMRRYFAELEGTDPLHRVAPPRLNTSKKLSLIIDILNKEVLPEYLQNGSSLEYLHLVFHCAALTTAKTMGAKIRRTNNDGPKLHKLHAPAWQKRLQHKTERLRRDIGRLTEYLNGNRGRKVVKAAKEIMDRNRTHTERETENATAHHCLDTLKQKLSLYAERLRRYKSNYSRKRDNNSFEKSEESFYRSLTSSDGENGKLPPKEAIEQFWTEQLSTKPQFNGDTGWIEDEKSEAIKYEPMQHDMITIEEVKSAIRGLHNWKAPDPDGLQNFWIKKLWIMHDKLTSAINDVIENPERMPVFLTHGTTYLLPKDQRNTEDPSKYRPITCLPTMYKLITSCISNRIHNHCERNNIIAIQQEGCTKDSRGCKEQLIIDSVICNQAFSKRRNLYAAYIDYKKAFDSIPHEWLLTILKIYKVDPNIVKFLKNAMSTWRTSLQMKAADCSITTGPIPIRRGIFQGDSLSPLWFCMALNPLSHRLNSTDYGFSIKSGSRTMMKLNHLLYMDDLKLFASTKKQMQLMLKMVEGFSEDIKMKFGLEKCRLLNITRGKIEDGTFKLKEGAEIEALKEGDTYKYLGIKQARKINQTQMKKELTEEFTRRLRRIMRTGLNSKNLIKAINTYACSALSYSFGIISWTTTDLAALQRKIGTMLTKHNKHHPKSSIERTELPRHLWGRGIVDLSNRMSQEIEGLRNYFLSKAASSELHRVVCVADTSTPLKLHQGHLETVEHSAESKMQKLIGKPLHGRHQNGVNHDYVDISASNYWLTSGRLFPETEGFMLAIQDQVIPTRNYMRYIAKDASVADDSCRYGCATHETIQHITGGCQKFAGTEYKNRHDAVAKILHQELALKHQLLTSKRIPYYNYHPDAVLENEHHKLYWDRTVLTDRKITHNRPDLILLNKDEDTALFIEMAISNNNNLLDRHTEKISKYRDLEEQTRRQWKLKDIKNIPIVISSTGVIPKKLLENLRKLQLDENIYKVMQKAVLLGTARTVRKYMRNAEEHRLLRQEVRVEQESNLQQEAEERPEPHHHHEPENLERAPTELNPFDISDIWDK

SEQ ID NO: 6740 - protein, 982 aa, Coccinella septempunctata
MGAKIRRTNNDGPKLHKLHAPAWQKRLQHKTERIRRDIGRLTEYLNGNRGRKVVKAAKEIMDRNRTHTERETENATAHHCLDTLKQKLSLYAERLRRYKSNYSRKRDNNSFEKSEESFYRLLTSSDGENGKLPPKEAIEQFWTKQLSTKPQFNGDTGWIEDEKSEAIKYEPMQHDMITIEEVKSAIRGLHNWKAPGPDGLQNFWIKKLWIMHDKLTSAINDVIENPERMPVFLTHGTTYLLPKDQRNTEDPSKYRPITCLPTMYKLITSCISNRIHNHCERNNIIAMQQEGCTKDSRGCKEQLIIDSVICNQAFSKRRNLYAAYIDYKKAFDSIPHEWLLTILKIYKVDPNIVKFLKNAMSTWRTSLQMKAADCSITTGPIPIRRGIFQGDSLSPLWFCMALNPLSHRLNSTDYGFSIKSGSRTMMKLNHLLYMDDLKLFASTKKQMQLMLKMVEGFSEDIKMKFGLEKCRLLNITRGKIEDGTFKLKEGAEIEALKEGDTYKYLGIKQARKINQTQMKKELTEEFTRRLRRIMRTGLNSKNLIKAINTYACSALSYSFGIISWTTTDLAALQRKIRTMLTKHNKHHPKSSIERTELPRHLGGRGIVYLSNRMSQEIEGLRNYFLSKAASSELHRVVCVADTSTPLKLHQDHLETVEHSAESKMQKLIGKPLHGRHQNEINHDYVDISASNYWLTSGRLFPETEGFMLAIQDQVIPTRNYMRYIAKDASVADDSCRYGCATHETIQHITGGCQKFAGTEYKNRHDAVAKILHQELALKHQLLTSKRIPYYNYHPDAVLENEHHKLYWDRTVLTDRKITHNRPDLILLNKDEDTALFIDVAIPNNNNLLDRHTEKISKYRDLEEQTRRQWKLKDIKTIPIVISSTGLIPKKLLENLRKLQLDENIYKVMQKAVLLGTARTVREYMGNAEEHRLLRQEVRVEQESNLQRGAEERPEPHHHHEPENLERAPTELNPFDISDIWDK

SEQ ID NO: 6741 - protein, 1206 aa, Coccinella septempunctata
MTIIGGRMLRKRAPAAKEATAPKQQQQPTSPIQLPTRTAEGAAQDIQPVLTQAGLVRKRMKWTTSMNETIVRIYNSITGLGQNTNNYRKRLHEEFCNAYPNINVTEQRVADQYRVILRNELIPMARIDAIKQELQRPPVTESDTNTSDEIHMPGQQQPEEIDAESPSCNPSEAEHQDDREELHRQIDSEMRRYFAELEGTDPLHRIAPPRLNTSKKLSLIIDILNKDVLPEYLQNGSSLEYLHLVFYCAALTTAKTIGAKIRRTNNDGPKLHKLYAPPWQKRLQHKTERLRRDIGRLTEYVNRNRGRKVVKAAKEIMDRNRNHTERETENATAHHCLDTLKQKLSLYAERLRRYKSNYSRKRDNNSFEKSEETFYRSLTSSDGENGKLPPKEAIEQFWTEQLSTKPQFNGDTGWIEDEKSEAVKYEPMQHDIITIEEVKSAIRGLHNWKTPGPDGLQNFWIKKLWIMHDKLTSAINDVIENPERMPIFLTHGTTYLLPKDQRNTEDPSKYRPITCLPTMYKLITSCISNRIHNHCERNNIIAMQQKGCTKESRGCKEQLIIFSVICNQAFSKRRNLYAAYIDYKKAFDSIPHEWLLTILNIYKVDPNIVKFLKNAMSTWRTSLQMKAADGSITTGPIPIRRGIFQGDSLSPLWFCMALNPLSHRLNSTDYGFAIKSGSRTMMKLNHLLYMDDLKLFASTKKQMQQMLKMVEGFSEDIKMKFGLEKCGLLNITRGKIEDGTFELREGAEIEALKEGDTYKYLGIKQARKINQSQMKKELTEEFTRRLRRIMRTGLNSKNLIKAINTYACSALSYSFGIISWTTTDLAALQRKIRTMLTKHNKHHPKSSIERTELPRHLGGRGIVDLSNRMTQEIEGLRKYFLSKAASSELYRVVCVADTSTPLKLQQDHLETVEHSAESKMQKLIGKPLHGRHQNEVNHDYVDISASNYWLTSGRLFPETEGFMLAIQDQVIPTRNYMKYIAKDASVADDSCRYGCATHETIQHITGGCQKFAGTEYKNRHDAVAKILHQELALKHQLLSSKKVSYYNYHPDAVLENEHHKLYWDRTVLTDRKITHNRPDLILLNKDEDTALFIDVAISNNNNLLDMHTEKISKYRFLEDQTRRQWKLKDVKTIPIVISSTGLIPKKLLENLRKLQLDENIYRVMQKAVLLGTARTVRKYMGNSEEHRLLRQEVRTEQESNLQQGAE

SEQ ID NO: 6742 - protein, 987 aa, Coccinella septempunctata
MNFIFKVLTGKPKSFEYIIIIIIIIIIIIIIIIIIIIIIIIIIIIRRDIGRLTEYLNGNRGRKVVKAAKEIIDRNRTHTERETENATAHHCLDTLKQKLSLYAERLRRYKSNYSRKRDNNSFEKSEESFYRSLTSLNGENGKLPPKEAIEQFWTEQLSTKPQFNGNTGWIEDEKSEAIKYEPMQHDMITIEEVKSAIRGLHNWKAPGPDGLQNFWIKKLWIMHDKLTSAINDVIENPERMPVFLTHGTTYLLPKDQRNTEDPSKYRPITCLPTMYKLITSCISNRIHNHCERNNIIAIQQEGCTKDSRGCKEQLIIDSVICNQAFSKRRNLYAAYIDYKKAFDSIPHEWLLTILKIYKVDPNIVKFLKNAISTWRTSLQMKAADCSITTGPIPIRRGIFQGDSLSPLWFCMALNPLSHRLNSTDYGFSIKSGSRTMMKLNHLLYMDDLKLFASTKKQMHLMLKMVEGFSEDIKMKFGLEKCRLLNITRGKIEDGTFKLKEGAEIEALKEGDTYKYLGIKQARKINQTQMKKELTEEFTRRLRRIMRTGLNSKNLIKAINTYACSALSYSFGIISWTTTDLAALQRKIRTMLTKHNKHHPKSSIERTELPRHLGGRGIVDLSNRMSQEIEGLRKYFLSKAASSELHRVVCVADTSTPLKLHQDHLETVEHSAESKMQKLIGKPLHGRHQNEVNHDYVDISASNYWLTSGRLFPETEGFMLAIQDQVIPTRNYMKYIAKDASVADDSCRYGCATHETIQHITGGCQKFAGTEYKNRHDAVAKILHQELALKHQLLSSKKVPYYNYHPDAVLENEHHKLYWDRTVLTDRKITHNRPDLILLNKDEDRALFIDVAIPNNNNLLDRHTEKISKYRDLEEQTRRQWKLKDIKTIPIVISSTGLIPKKLLENLRKLQLDENIYKVMQKAVLLGTTRTVRKYMGNSEEHRLLRQEVRVEQESNLQQGGEERPGSDHHHEPENLERAPTELNPFDI

SEQ ID NO: 6743 - protein, 1262 aa, Coccinella septempunctata
MEMVITRSLGNKSLPGDRQGMSGAGAGHDSMRDVGGRMLRKRAPAAKEATAPKQQQQPTSPIQLPTRTAEGAAQDIQPVLTQAGLVRKRMKWTTSMNETIVRIYNSITGLGQNTNNYRKRLHEEFCNAYPNLNVTEQRVADQYRVILRNELIPMTRIDAIKQELQRPPVTESDTNTSDEIHMPGQQQPEEIDAESPSCNPSEAEHQDDREELHRQIDSEMRRYFAELEGTDPLHRIAPPRLNTSKKLSLIIDILNKDVLPEYLQNGSSLEYLHLVFYCAALTAAKTIGAKIHRTNNDGPKLHKLYAPPWQKRLQHKTERLRRDIGRLTEYVNGNRGRKVVKAAKEIMDRNRTHTERETENATAHHCLDTLKQKLSLYAERLRRYKSNYSRKRDNNSFEKSEETFYRSLTSSDGENGKLPPKEAIEQFWTEQLSTKPQFNGDTGWIEDEKSEAVKYEPMQHDIITIEEVKSAIRGLHNWKTPGPDGLQNFWIKKLWIMHDKLTSAINDVIENPERMPIFLTHGTTYLLPKGQRNTEDPSKYRPITCLPTMYKLITSCISNRIHNHCERNNIIAMQQKGCTKESRGCKEQQIIDSVICNQAFSKQRNLYAAYIDYKKAFDSIPHEWLLTILNIYKVDPNIVKFLKNAMSTWRTSLQMKAADGSITTGPIPIRRGIFQGDSLSPLWFCMALNPLSHRLNSTDYGFAIKSGSRTMMKLNHLLYMDDLKLFASTKKQMQQMLKMVEGFSEDIKMKFGLEKCRLLNITRGKIEDGTFKLREGAEIEALKEGDTYKYLGIKQARKINQSQMKKELTEEFTRRLRRIMRTGLNSKNLIKAINTYACSALSYSFGIISWTTTDLAALQRKIRTMLTKHNKHHPKSSIERTELPRHLGGRGIVDLSNRMTQEIEGLRKYFLSKAASSELHRVVCVADTSTPLKLQQDHLETVEHSAESKMQKLIGKPLHGRHQNEVNHDYVDISASNYWLTSGRLFPETEGFMLAIQDQVIPTRNYMKYIAKDASVADDSCRYGCATHENIQHITGGCQKFAGTEYKNRHDAVAKILHQELALKHQLLSSKKVSYYNYHPDAVLENEHHKLYWDRTVLTDRKITHNRPDLILLNKDEDTALFIDVAIPNNNNLLDRHTEKISKYRDLEEQTRRQWKLKDVKTIPIVISSTGLIPKKLLENLRKLQLDENIYRVMQKAVLLGTARTVRKYMGNSEEHRLLRQEVRTEQESNLQQGAEERPEPDQHHEPENLERAPTELNPFDI

SEQ ID NO: 6744 - protein, 1306 aa, Coccinella septempunctata
MQPATPAVRSPIPFSSLFHILYRGALSALISLPLTQTEKGEHKPMKMVITRSLGNKSLPGDRQGMSGAGAGHDSMRDVGGRMLRKRAPAAKEATAPKQQQQPTSPIQLSTRTAESAAQDIQPVLTQAGLVRKRMKWTTSMNETIVRIYNSITGLGQNTNNYRKRLHEEFCNAYPNLNVTEQRVADQYRVILRNELIPTARIDAIKRELQRPPTIENNTNTSDEIHMPGQQQAEETDTESPSCNASEPEHQDDREELHRQVDSDMRRYFAELEGTDPLHRVAPPRLNTSKKLSLIIDILNKDVLPEYLQNGSSLEYLHLVFHCAALTTAKTMGAKIRRTNNDGPKLHKLHAPAWQKRLQHKTERLRRDIGRLTEYLNGNRGRKVVKAAKEIIDRNRTHTERETENATAHHCLDTLKQKLSLYAERLRRYKSNYSRKRDNNSFEKSEESFYRTLTSSDGENGKLPPKEAIEQFWTEQLSTKPQFNGNTGWIEDEKSEAIKYEPMQHDMITIEEVKSAIRGLHNWKAPGPDGLQNFWIKKLWIMHDKLTSAINDVIENPERMPVFLTHGTTYLLPKDQRNTEDPSKYRPITCLPTMYKLITSCISNRIYNHCERNNIIAMQQKGCTKDSRGCKEQLIIDSVICNQAFSKRRNLYAAYIDYKKAFDSIPHEWLLTILKIYKVDPNIVKFLKNAMSTWRTSLQMKAADCSITTGPIPIRRGIFQGDSLSPLWFCMALNPLSHRLNSTDYGFSIKSGSRTMMKLNHLLYMDDLKLFASTKKQMQLMLKMVEGFSEDIKMKFGLEKCRLLNITRGKMEDGTFKLKEGAEIEALKEGDTYKYLGIKQARKINQTQMKKELTEEFTRRLRRIMRTGLNSKNLIKAINTYACSALSYSFGIISWTTTDLAALQRKIRTMLTKHNKHHPKSSIERTELPRHLGGRGIVDLSNRMSQEIEGLRKYFLSKAASSELHRVVCVADTSTPLKLHQDHLETVEHSAESKMQKLIGKPLHGRHQNEVNHDYVDMSASNYWLTSGRLFPETEGFMLAIQDQVIPTRNYMKYIAKDASVADDSCRYGCATHETIQHITGGCQKFAGTEYKNRHDAVAKILHQELALKHQLLSSKKVPYYNYHPDAVLENEHHKLYWDRTVLTDRKITHNRPDLILLNKDEDRALFIDVAIPNNNNLLDRHTEKVSKYRDLEEQTRRQWKLKDIKTIPIVISSTGLVPKKLLENLRRLQLDENVYKVVQKAVLLGTARTVRKYMGNSEEHRLLRQEVRVEQESNLQQGGEERPGPDHHHEPENLERAPTELNPFDI

SEQ ID NO: 6745 - protein, 1262 aa, Coccinella septempunctata
MEMVITRSLGNKSLPGDRQGMSGAGAGHDSMRDVGGRMLRKRAPAAKEATAPKQQQQPTSPIQLPTRTAEGAAQDIQPVLTQAGLVRKRMKWTTSMNETIVRIYNSITGLGQNTNNYRKRLHEEFCNAYPNLNVTEQRVADQYRVILRNQLIPTARIDAIKRELQRPLAIENNTNTSDEIHMPGQQHLEDIDTESPSCNPSEPELQDDREELHRQVHSDMRRYFAELEGTDPLHRITPPRLNTSKKLSLIIDILNEDVLPEYLQNGSSLEYLHLVFYCAALTTAKTKGAKIRGTNNNGPKLHKLHAPAWQKRLQHKTERLRRDIGRLTEYLNGNRGRKVVKAVKEIMDRNRTHTERETENATAHHCLDTLKQKLSLYAERLRRYKSNYSRKKDNNSFEKSEESFYRSLTSSDGENGKLPPKEAIEQFWTEQLSTKPHFNGDTGWIEDEKSEAIKYEPMQHDMITIEEVKSAIRGLHNWKAPGPDGLQNFWIKKLWIMHDKLTSAINDVIENPERMPVFLTHGTTYLLPNDQRNTEDPSKYRPITCLKTMYKLITSCISNRIHNHCERNNIIAMQQKGCTKDSRGCKEQLIIDSVICNQAFSKRRNLYAAYIDYKKAFDSIPHEWLLTILKIYKVDPNIVKFLKNAMSTWRTSLQMKAADCSITTGPIPIRRGIFQGDSLSPLWFCMALNPLSHRLNSTDYGFSIKNGSRTMMKLNHLLYIDDLKLFASTKKQMQLMLKMVEGFSEDIKMKFGLEKCRLLNITRGKIEDGTFKLKEGAEIEALKEGDTYKYLGIKQARKINQTQMKKELTEEFTRRLRRIMRTGLNSKNLIKAINTYACSALSYSFGIISWTTTDLAALQRKIRTMLTKHNKHHPKSSIERTELPRHLGGRGIVDLSNRMSQEIEGLRKYFLSKAASSELHRVVCVADSSTALKLQQDHLETVEHSAESKMQKLIGKPLHGRHQNEVKHDYVDISASNYWLTSERLFPETEGFMLAIQDQVIPTRNYMKYIAKDASVADDSCRYGCATHETIQHITGGCQKFAGTEYKNRHDAVAKILHQELALKHQLLASKKVPYYNYHPDAVLENEHHKLYWDRTVLTDRKITHNRPDLILLNKDEDRALFIDVAIPNNTNLLDRHTEKISKYRDLEEQTRRQWKLKDIKTIPIVISSTGLIPKKLLENLRKLQLDENIYRVMQKAVLLGTARTVRKYMGNAEEHCLLRQEVRVEQESNLQQGGEERPGPDHHHEPENLERAPTELNPFDI

SEQ ID NO: 6746 - protein, 1260 aa, Coccinella septempunctata
MKMVITRSLGNKSLHGDRQGMSGAGAGHDSMRDVGGRMLRKRAPAAKEATAPKQQQQPTSPIQLPTRTAEGAAQDIQPVLTQAELVKKRMKWTTSMNETIERIYNSITGLGQNTNNYRKRLHEEFCNAYPNLNVTEQRVADQYRVILRNELIPTARIDAIKRELQRPPAIENNTFDEIHMLGQQQAEETDTESPSCNASEPEHQDDRGELHRQVDSDMRRYFAELEGTDPLHRVAPPRLNTSKKLSLIIDILNKDVLPEYLQNGSSLEYLHLVFHCAALTTAKTIGAKIRQTNNDGPKLHKLHAPAWQKRLQHKTERLRRDIGRLTEYLNGNRGRKVVKAAKEIMDRNRTHTERETENAIAHHCLDTLKQKLSLYAERLRRYKSNYSRKRDNNSFEKSEESFYRSLTSSDGENGKLPPKEAIEQFWTEQLSTKPHFNGDTGWIEDEKSEAIKYEPMQHDMITIEEVKSAIRGLHNWKAPGPDGLQNFWIKKLWIMHDTLTSAINDVIENPERMPVFLTHGTTYLLPKDQRNTEDPSKYRPITCLPTMYKLITSCISNRIHNHCERNNIIAMQQKGCTKNSRGCKEQLIIDSVICNQAFSKRRNLYAAYIDYKKAFDSIPHEWLLTILKNYKVDPNIVKFLKNAMSTWRTSLQMKAADCSITTGPIPIRRGIFQGDSLSPLWFCMALNPLSHRLNSTDYGFSIKSGSRTMMKLNHLLYMDDLKLFASTKKQMQLMLKMVEGFSEDIKMKFGLEKCRLLNITRGKIEDGTFKLKEGAEIEALKEGDTYKYLGIKQARKINQTQMKKELTEEFTRRLRRIMRTGLNSKNLIKAINTYACSALSYSFDIISWTTTDLAALHRKIRTMLTKHNKHHPKSSIERTELPRHLGGRGIVDLSNRMSQEIEGLRKYFLSKAASSELYRVVCVADSSTPLKLQQDHLETVEHSAESKMQKLIGKPLHGRHQNEVNHDYDDISASNYWLTSGRLFPETEGFMLAIQDQLIPTRNYMKYIAKDASVADDSCRYGCATHETIQHITGGCQKFAGTEYKNRHDAVAKILHQELALKHQLLTSKKVPYYNYHPDAVLENEHHKLYWDRTVLTDRKITHNRPDPILLNKVEGRALFIDVAIPNNNNLLDRHTEKISKYRDLEEQTRRQWKLKDVKTIPIVISSTGLIPKKLLENLRKLQLDENIYRVMQKAVLLGTARTVRKYMGNAEEHRLRRQEVPVEQESNVEQGGEELPGPDHHHEPENLERAPTELNPFDI

SEQ ID NO: 6747 - protein, 1262 aa, Coccinella septempunctata
MKMVITRSLGNKSLPGDRQGMSGAGAGHDSMRDVGGRMLRKRAPAAKEATAPKQQQQPTSPIQLSTRTAESAAQDIQPVLTQAGLVRKRMKWTTSMNETIVRIYNSITGLGQNTNNYRKRLHEEFCNAYPNLNVTEQRVADQYRVILRNELIPTARIDSIKRELQRPPTIENNTNTSDEIHMPGQQQAEETNTESPSCNASEPEHQDDREELHRQVDSDMRRYFAELEGTDPLHRVAPPRLNTSKKLSLIIDILNKDVLPEYLQNGSSLEYLHLVFHCAALTTAKTMGAKIRRTNDDGPKLHKLHAPAWQKRLQHKTERLRRDIGRLTEYLNGNRGRKVVKAAKEIIDRNRTHTERETENATAHHCLDTLKQKLSLYAERLRRYKSNYSRKRDNNSFEKSEESFYRSLTSSDGENGKLPPKEAIEQFWTEQLSTKPQFNGNTGWIEDEKSEAIKYEPMQHDMITIEEVKSAIRGLHNWKAPGPDGLQNFWIKKLWIMHDKLTSAINDVIENPERMPVFLTHGTTYLLPKDQRNTEDPSKYRPITCLPTMYKLITSCISNRIYNHCERNNIIAMQQKGCTKDSRGCKEQLIIDSVICNQAFSKRRNLYAAYIDYKKAFDSIPHEWLLTILKIYKVDPNIVKFLKNAMSTWRTSLQMKAADCSITTGPIPIRRGIFQGDSLSPLWFCMALNPLSHRLNSTDYGFSIKSGSRTMMKLNHLLYMDDLKLFASTKKQMQLMLKMVEGFSEDIKMKFGLEKCRLLNITRGKMEDGTFKLKEGAEIEALKEGDTYKYLGIKQARKINQTQMKKELTEEFTRRLRRIMRTGLNSKNLIKAINTYACSALSYSFGIISWTTTDLAALQRKIRTMLTKHNKHHPKSSIERTELPRHLGGRGIVDLSNRMSQEIEGLRKYFLSKAASSELHRVVCVADTSTPLKLHQDHLETVEHSAESKMQKLIGKPLHGRHQNEVNHDYVDISASNYWLTSGRLFPETEGFMLAIQDQVIPTRNYMKYIAKDASVTDDSCRYGCATHETIQHITGGCQKFAGTEYKNRHDAVAKILHQELALKHQLLSSKKIPYYNYHPDAVLENEHHKLYWDRTVLTDRKITHNRPDLILLNKDEDRALFIDVAIPNNNNLLDRHTEKISKYRDLEEQTRRQWKLKDIKTIPIVISSTGLIPKKLLENLRKLQLDENIYKVMQKAVLLGTARTVRKYMGNSEEHRLLRQEVRVEQESDLQQGGEERPGPDHHHEPENLERAPTELNPFDI

SEQ ID NO: 6748 - protein, 1268 aa, Coccinella septempunctata
MKMVITRSLGNKSLPGDRQGMSGAGAGHDSMRDVGGRMLRKRAPAAKQATAPKQQQQPTSPIQLPTRTAEGAAQDIQPVLTQAGLVRKRMKWTTSMNETIVRIYNSITGLGQNTNNYRKRLHEEFCIAYPNVNVTEQRVADQYRVILRNELVPTARIDAIKRELQRPLAMENNTNTSDEVHIPGQQHPEDIDTESPSCKANEPEHQDDREELHRQVDSDMRRYFAELEGTDPLHRVAPPRLNTSKKLSLIIDILNKDVLPEYLQNGSSLEYLHLVFHCAALTTAKTMGAKIRRENNDGPKLHKLHAPAWQKRLQHKTERLRRDIGRLTEYLNGNRGRKVVKAAKEIMDRNRTHTERETENATAHHCLDTLKQKLSLYAERLRRYKSNYSRKRDNNSFEKSEESFYRSLTSSDGENGKLPPKEAIEQFWTEQLSTKPQFNGDTGWIEDEKSEAIKYEPMQHDMITIEEVKSAIRGLHNWKAPGPDGLQNFWIKKLWIMHDKLTSAINDVIENPERMPVFLTHGTTYLLPKDQRNTEDPSKYRPITCLPTMYKLITSCISNRIHNHCERNNIIAMQQEGCTKDSRGCKEQLIIDSVICNQAFSKRRNLYAAYIDYKKAFDSIPHEWLLTILKIYKVDPNIVKFLKNAMSTWRTSLQMKAADCSITTGPIPIRRGIFQGDSLSPLWFCMALNPLSHRLNSTDYGFSIKSGSRTMMKLNHLLYMDDLKLFASTKKQMQLMLKMVEGFSEDIKMKFGLEKCRLLNITRGKIEDGTFKLKEGAEIEALKEGDTYKYLGIKQARKINQTQMKKELTEEFTRRLRRIMRTGLNSKNLIKAINTYACSALSYSFGIISWTTTDLTALQRKIRTMLTKHNKHHPKSSIERTELPRHLGGRGIVYLSNRMSQEIEGLRNYFLSKAASSELHRVVCVADTSTPLKLHLDHLETVEHSAESKMQKLIGKPLHGRHQNEVNHDYVDISASNYWLTSGRLFPETEGFMLAIQDQVIPTRNYMRYIAKDASVADDSCRYGCATHETIQHITGGCQKFAGTEYKNRHDAVAKILHQELALKHQLLTSKRIPYYNYHPDAVLENEHHKLYWDRTVLTDRKITHNRPDLILLNKDEDTALFIDVAIPNNNNFLDRHTEKISKYRDLEEQTRRQWKLKDIKTIPIVISSTGLIPKKLLENLRKLQLDENIYKVMQKAVLLGTARTVRKYMGNAEEHRLLRQEVRVEQESNLQQEAEERPEPHHHHEPENLERAPTELNPFDISDIWDK

SEQ ID NO: 6749 - protein, 1239 aa, Coccinella septempunctata
MEMVITRSLGNKSLPGDRQGMSGAGAGHDSMRDVGGRMLRKRAPAAKEATAPKQQQQPTSPIQLPTRTAEGAAQDIQPVLTQAGLVRKRMKWTTSMNETIVRIYNSITGLGQNTNNYRKRLHEEFCNAYPNLNVTEQRVADQYRVILRNQLIPTARIDAIKRELQRPLAIENNTNTSDEIHMPGQQHLEDIDTESPSCNPSEPELQDDREELHRQVHSDMRRYFAELEGTDPLHRITPPRLNTSKKLSLIIDILNKDVLPEYLQNGSSLEYLHLVFYCAALTTAKTIGAKIRGTNNNGPKLHKLYAPAWQKRLQHKTERLRRDIGRLTEYLNGNRGRKVVKAVKEIMDRNRTHTERETENATAHHCLDTLKQKLSLYAERLRRYKSNYSRKRDNNSFEKSEESFYRSLTSSDGENGKLPPKEAIEQFWTEQLSTKPHFNGDTGWIEDEKSEAIKYEPMQHDMITIEEVKSAIRGLHNWKAPGPDGLQNFWIKKLRIMHDKLTSAINDVIENPERMPVFLTHGTTYLLPKDQRNTEDPSKYRPITCLPTMYKLITSCISNRIHNHCERNNIIAMQQKGCTKDSRGCKEQLIIDSVICNQAFSKRRNLYAAYIDYKKAFDSIPHEWLLTILKIYKVDPNIVKFLKNAMSTWRTSLQMKAADCSITTGPIPIRRGIFQGDSLSPLWFCMALNPLSHRLNSTDYGFSIKNGSRTMMKLNHLLYMDDLKLFASTKKQMQLMLKMVEGFSEDIQMKFGLEKCRLLNITRGKIEDGTFKLKEGAEIEALKEGDTYKYLGIKQARKINQTQMKKELTEEFTRRLRRIMRTDLNSKNLIKAINTYACSALSYSFGIISWTTTDLAALQRKIRTMLTKHNKHHPKSSIERTELPRHLGGRGIVDLSNRMSQEIEGLRKYFLSKAASSELHRVVCVADSSTPLKLQQDHLETVEHSAESKMQKLIGKPLHGRHQNEVNHDYVDISASNYWLTSGRLFPETEGFMLAIQDQVIATRNYMKYIAKDASVADDSCRYGCATHETIQHITGGCQKFAGTEYKNRHDAVAKILHQELALKHQLLASKKVPYYNYHPDAVLENEHHKLYWDRTVLTDRKITHNRPDLILLNKDEDRALFIDVAIPNNTNLLDRHTEKISKYRDLEEQTRRQWKLKDIKTIPIVISSTGLIPKKLLENLRKLQLDENIYLQQSLILLISEISGISEFSSGEECESRKAKVITFILPNRKFPNNRVTY

SEQ ID NO: 6750 - protein, 1173 aa, Coccinella septempunctata
MKWTTSMNETIVRIYNSITGLGQNTNNYRKRLHEEFCNAYPNLNVTEQRVADQYRVILRNELIPTARIDAIKRELQRPPTIENNTNTSDEIHMPGQQQAEETDTESPSCNASEPEYQDDREELHRQVDSDMRRYFAELEGTDPLHRVAPPRLNTSKKLSLIIDILNKDVLPEYLQNGSSLEYLHLVFHCAALTTAKTMGAKIRRTNNDGPKLHKLHAPAWQKRLQHKTERLRRDIGRLTEYLNGNRGRKVVKAAKEIIDRNRTHTERETENATAHHCLDTLKQKLSLYAERLRRYKSNYSRKRDNNSFEKSEESFYRSLTSSDGENGKLPPKEAIEQFWTEQLSTKPQFNGNTGWIEDEKSEAIKYEPMQHDMITIEEVKSAIRGLHNWKAPGPDGLQNFWIKKLWIMHDKLTSAINDVIENPERMPVFLTHGTTYLLPKDQRNTEDPSKYRPITCLPTMYKLITSCISNRIYNHCERNNIIVMQQKGCTKDSRGCKEQLIIDSVICNQAFSKRRNLYAAYIDYKKAFDSIPHEWLLTILKIYKVDPNIVKFLKNAMSTWRTSLQMKAADCSITTGPIPIRRGIFQGYSLSPLWFCMALNPLSHRLNSTDYGFSIKSGSRTMMKLNHLLYMDDLKLFASTKKQMQLMLKMVEGFSEDIKMKFGLEKCRLLNITRGKMEDGTFKLKEGAEIEALKEGDTYKYLGIKQARKINQTQMKKELTEEFTRRFRRIMRTGLNSKNLIKAINTYACSALSYSFGIISWTTTDLAALQRKIRTMLTKHNKHHPKSSIERTELPRHLGGRGIVDLSNRMSQEIEGLRKYFLSKAASSELHRVVCVADTSTPLKLHQDHLETVEHSAESKMQKLIGKPLHGRHQNEVNHDYVDISASNYWLTSGRLFPETEGFMLAIQDQVIPTRNYMKYIAKDASVADDSCRYGCATHETIQHITGGCQKFAGTEYKNRHDAVAKILHQELALKHQLLSSKKVPYYNYHPDAVLENEHHKLYWDRTVLTDRKITHNRPDLILLNKDEDRALFIDVAIPNNNNLLDRHTEKISKYRDLEEQTRRQWKLKDIKTIPIVLSSTGLIPKKLLENLRKLQLDENIYKVMQKAVLLGTARTVRKYMGNSEEHRLLRQEVRVEQESNLQQGGEERPGPDHHHEPENLERAPTELNPFDI

SEQ ID NO: 6751 - protein, 1262 aa, Coccinella septempunctata
MEMVITRSLGNKSLPGDRQGMSGAGAGHDSMRDVGGRMLRKRAPAAKEATAPKQQQQPTSPIQLPTRTAEGAEQDIQPVLTQAGLVRKRMKWTTSMNENIVRIYNSITGLGQNTNNYRKRLHEEFCNAYPNLNVTEQRVADQYRVILRNQLIPTARIDAIKRELQRPLAIENNTNTSDEIHMPGQQHLEDIATESPSCNPSEPELQDDREELHRQVHSDMRRYFAELEGTDPLHRITPPPLNTSKKLSLIIDILNKDVLPEYLQNGSSLEYLHLVFYCAALTTAKTIGAKIRGTNNNGPKLHKLHAPAWQKRLQHKTERLRRDIGRLTEYLNGNRGRKVVKAVKEIMDRNRTHTERETENATAHHCLDTLKQKLSLYAERLRRYKSNYSRKRDNNSFEKSEESFYRSLTSSDGENGKLPPKEAIEQFWTEQLSTKPHFNGDTGWIEDEKSEAIKYEPMQHDMITIEEVESAIRGLHNWKAPGPDGLQNFWIKKLWIMHDKLTSAINDVIENPERMPVFLTHGTTYLLPKDQRNTEDPSKYRPITCLPTMYKLITSCISNRIHNHCERNNIIAMQQKGCTKDSRGCKEQLIIDSVICNQAFSKRRNLYAAYIDYKKAFDSIPHEWLLTILKIYKVDPNIVKFLKNAMSTWRTSLQMKAADCSITTGPIPIRRGIFQGDSLSPLWFCMALNPLSHRLNSTDYGFSIKNGSRTMMKLNHLLYMDDLKLFASTKKQMQLMLKMVEGFSEDIKMKFGLEKCRLLNITRGKIEDGTFKLKEGAEIEALKEGDTYKYLGIKQARKINQTQMKKELTEEFTRRLRRIMRTGLNSKNLMKAINTYACSALSYSFGIISWTTTDLAALQRKIRTMLIKHNKHHPKSSIERTELPRHLGGRGIVDLSNRMSQEIEGLRKYFLSKAASSELHRVVCVADSSTPLKLQQDHLETVEHSAESKMQKLIGKPLHGRHQNEVNHDYVDISASNYWLTSGRLFPETEGFMLAIQDQVIPTRNYMKYIAKDASVADDNCRYGCATHETIQHITGGCQKFAGTEYKNRHDAVAKILHQELALKHLLLASKKVPYYNYHPDAVLENEHHKLYWDRTILTDRKITHNRPDLILLNKDEDRALFIDVAIPNNTNLLDRHTEKISKYRDLEEQIRRLWKLKDIKTIPIVISSTGLIPKKLLENLRKLQLDENIYRVMQKAVLLGTARTVRKYMGNAEEHRLLRQEVRLEQESNLQQGGEERPGPDHHHEPENLERAPTELNPFDI

SEQ ID NO: 6752 - protein, 1185 aa, Coccinella septempunctata
MKMVITRSLGNKSLPGDRQGMSGAGAGHDSMRDVGGRMLRKRAPAAKQATAPKQQQQPTSPIQLPTRTAEGAAQDIQPVLTQAGLVRKRMKWTTSMNETIVRIYNSITGLGQNTNNYRKRLHEEFCIAYPNVNVTEQRVADQYRVILRNELVPTARIDAIKRELQRPLAMENNTNTSDEVHIPGQQHPEDIDTESPSCKANEPEHQDDREELHRQVDSDMRRYFAELEGTDPLHRVAPPRLNTSKKLSLIIDILNKDVLPEYLQNGSSLEYLHLVFHCAALTTAKTMGAKIRRENNDGPKLHKLHAPAWQKRLQHKTERLRRDIGRLTEYLNGNRGRKVVKAAKEIMDRNRTHTERETENATAHHCLDTLKQKLSLYAERLRRYKSNYSRKRDNNSFEKSEESFYRSLTSSDGENGKLPPKEAIEQFWTEQLSTKPQFNGDTGWIEDEKSEAIKYEPMQHDMITIEEVKSAIRGLQNWKAPGPDGLQNFWIKKLWIMHDKLTSAINDVIENPERMPVFLTHGTTYLLPKGQRNTEDPSKYRPITCLPTMYKLITSCISNRIYNHCERNNIIAMQQKGCTKDSRGCKEQLIIDSVICNQAFSKRRNLYAAYIDYQKAFDSIPHEWLLTILKIYKVDPNIVKFLKNAMSTWRTSLQMKAADCSITTGPIPIRRGIFQGDSLSPLRFCMALNPLSHRLNSTDYGFSIKSGSRTMMKLNHLLYMDDLKLFASTKKQMQLMLKMVEGFSEDIKMKFGLEKCRLLNITRGKIEDGTFKLKEGAEIEALKEGDTYKYLGIKQAKKINQTQMKKELTEEFTRRLRRIMRTGLNSKNLIKAINTYACSALSYSFGIISWTTTDLTALQRKIRTMLTKHNKHHPKSSIERTELPRHLGGRGIVDLSNRMSQEIEGLRKYFLSKAASSELHRVVCVADTSTPLKLHQDHLETVEHSAESKMQKLIGKPLHGRHQNEVNHDYVDISASNYWLTSGRLFPESEGFMLAIQDQVIPTRNYMRYIAKDASVADDSCRYGCATHETIQHITGGCQKFAGTEYKNRHDAVAKILHQELALKHQLLTSKRIPYYNYHPDAVLENEHHKLYWDRTVLTDRKITHNRPDLILLNKDEDTALFIDVAIPNNNNLLDRHTEKISKYRDLEEQTRRQWKLKDIKTIPIVISSTGLIPKKLLENLRKLQ

SEQ ID NO: 6753 - protein, 1076 aa, Coccinella septempunctata
MPGQQQAEVTDTESPSCNASEPEHQDDREELRRQVDSDMRRYLAELEGTDPLHRVAPPRLNTSKKLSLIIDILNKDVLPEYLQNGSSLEYLHLVFHCAALTTAKTIGSKIRRTSNDGPKLHKLHAPAWQKRLQHKTERLRRDIGRLTEYLNGNRGRKVVKAAKEIMDRNRTHTERETENATAHHCLDTLKQKLSLYAERLRRYKSNYSRKRDNNSFEKSEESFYRSLTSSDGENGKLPPKEAIEQFWTEQLSTKPHFNGDTGWIEDEKSEAIKYEPMQHDMITIEEVKSAIRGLHNWKAPGPDGLQNFWIKKLWIMHDKLTSAINDVIENPERMPVFLTHGTTFLLPKDQRNTEDPSKYRPITCLPTMYKLITSCISNRIHNHCERNNIIAMQQKGCTKDSRGCKEQLIIDSVICNQAFSKRRNLYAAYIDYKKAFDSIPHEWLLTILKIYKVNPNIVKFLKNAMSTWRTSFQIKAADCSITTGPIPIRRGIFQGDSLSPLWFCMALNPLSHRLNSTDYGFSIKSGSRTMMKLNHLLYMDDLKLFASTKKQIQLMLKMVEGFSEDIKMKFGLEKCRLLNITRGKIEDGSLKLKEGAEIEALKEGDTYKYLGIKQARKINQTQMKKELTEEFTRRLRRIMRTGLNSKNLIKAINTYACSALSYSFGIISWTTTDLAALQRRIRTMLTKHNKHHPKNSIERTELPRHLGGRGIVDLSNRMSQEIEGLRKYFLSKAASSELHRVVCVADSSTPLKLQQDHLETVEHSAESKMQKLIGKPLHGRHQNEVNHDYFDISASNYWLTSGRLFPETEGFMLAIQDRVIPTRNYRKYIAKDASVANDSCRYGCETHETIQHITGGCQKFAGTEYKNRHDAVAKILHQELALKHQLLTSKKVPYYNYHPDAVLENDHHKLYWDRTVLTDRKITHNRPDLILLNKDEDRALFIDVAIPNNNNLLDRHTEKISKYRDLEEQTRRQWKLKDIKTIPIVISSTGLIPKKLLENLRKLQLDENIYRVMQKAVLLGNGENCTQVHGECRGTPSAPTGSAGGAGIQPTAGRRGATRTRPPPRARQPGKGSNRA

SEQ ID NO: 6754 - protein, 899 aa, Coccinella septempunctata
MDRNRTHTERETENATAHHCLDTLKQKLSLYAERLRRYKSNYSRKRDNNSFEKSEESFYRSLTSSDGENGKLPPKEAIEQFWTEQLSTKPHFNGDTGWIEDEKSEASKYDPMQHDMITIEEVKSAIRGLHNWKAPGPDGLQNFWIKKLWIMHDRLTSAINDVIENPERMPVFLTHGTTYLLPKDQMNTEDPSKYRPITCLPTMYKLITSCISNRIHNHCERNNIIAMQQKGCTKDSRGCKEQLIIDSVICNQAFSKRRNLYAAYIDYKKAFDSIPHEWLLTILKIYKVDPNIVEFLKNAMSTWRTSLQMKAADCSITTGPIPIRRGIFQGDSLSPLWFCMVLNPLSHRLNSTDYGFSIKSGSRTMMKLNHLLYMDDLKLFASTKKQMQRMLKMVEGFSEDIKMKFGIDKCRLLNITRGKIEDGTFKLKEGAEIEALKEGDTYKYLGIKQARKINQTQMKKELTEEFTRRLRRIMRTGLNSKNLIKAINTYACSALSYSFGIISWTTTDLAALQRKIRTMLTKHNKHHPKSSIERTELPRHLGGRGIVDLSNRMSQEIEGLRKYFLNKAAPSELHRVVCVADSSTPLKLQQDHLETVEHSAESKMQKLIGKPLHGRHQNEVNHDYVDISASNYWLTSGRFFPETEGFMLAIQDQVIPTRNYMKYIAKDASVADDSCRYGCATHETIQHITGGCQKFAGTEYKNRHDAVAKILHQELALKHQLLTSKKVPYYNYHPDAVLENEHHKLYWDRTVLTDRKITHNRPDLILLNKYEDRALFIDVAIPNNTNLLDRHTEKISKYRDLEEQTRRQWKLKDIKTIPIVISSTGLIPKKLLENLRKLQLDENIYRVMQKAVLLGTARTVRKYMGNAEEHRLLRQEVRVEQESNLQQGGEERPGPDRHH

SEQ ID NO: 6755 - protein, 1293 aa, Coccinella septempunctata
MEMVITRSLGNKSLPGDRQGMSGAGAGHDSMRDVGGRMLRKRAPAAKEATAPKQQQQPTSPIQLPTRTAEGAAQDIQPVLTQAGLVRKRMKWTTSMNETIVRIYKSITGLGQNTNNYRKRLHEEFCNAYPNLNVTEQRVADQYRVILRNQLIPTARIEAIKRELQRPLAIENNTNTSDEIHMPGQQHLEDIDTESPSCNPSEPELQDDREELHRQVHSDMRRYFAELEGTDPLHRITPPRLNTSKKLSLIIDILNKDVLPEYLQNGSSLEYLHLVFYCAALTTAKTIGAKIRGTNNNGPKLHKLHAPAWQKRLQHKTERLRRDIGRLTEYLNGNRGRKVVKAVKEIMDRNRTHTERETENATAHHCLDTLKQKLSLYAERLRRYKSNYSRKRDNNSFEKSEESFYRSLTSSDGENGKLPPKEAIEQFWTEQLSTKPHFNGDTRWIEDEKSEAIKYEPMQHDMITIEEVKSAITGLHNWKAPGPDGLQNFWIKKLWIIHDKLTSAINDVIENPERMPVFLTHGTTYLLPKDQRNTEDPSKYRPITCLPTMYKLITSCISNRIHNHCERNNIIAMQQKGCTKDSRGCKEQLIIDSVICNQAFSKRRNLYAAYIDYKKAFDSIPHEWLLTILKIYKVDPNIVKFLKNAMSTWRTSLQMKAADCPITTGPIPIRRGIFQGDSLSPLWFCMALNPLSHRLNSTDYGFSIKNGSRTMMKLNHLLYMDDLKLFASTKKQMQLMLKIVEGFSEDIKMKFGLEKCRLLNITRGKIEDGTFKLKEGAEIEALKEGDTYKYLGIKQARKINQTQMKKELTEEFTGRLRRIMRTGLNSKNLIKAINTYACSALSYSFGIISWTTTDLAALQRKIRTMLTKHNKHHPKSSIERTELPRHLGGRGIVDLSNRMSQEIEGLRKYFLSKAASSELHRVVCVADSSTPLKLQQDHLETVEHSAESKMQKLIGKPLHGRHQNEVNHDYVDISASNYWLTSGRLFPETEGFMLAIQDQVIPTRNYMKYIAKDASVADDRCRYGCATHETIQHITGGCQKFAGTDYKNRHDAVAKILHQELALKHQLLASKKVPYYNYHPDAVLENEHHKLYWDRTVLTDRKITHNRPDLILLNKDEDRALFIDVAIPNNSNLLDRHTEKISKYRDLEEQTRRQWKLKDIKTIPIVISSTGLIPKKLLENLRKLQLDENIYRVMQKAVLLGTARTVRKYMGNAEEHRLLRQEVRVEQESNLQQGGEERPGPDHHHEPENVERLQQSLILLISEISGISEFSSGEECEKVIKFALDILDRQCLC

SEQ ID NO: 6756 - protein, 1179 aa, Coccinella septempunctata
MKWITSMNETIVRIYNSITGLGQNTNNYRKRLHEEFCNAYPNLNVTEQRVADQYRVILRNELVPTARISAIKRELQRPPAIENNTNTSDEIHMPGQQQAEETDTESPSFNASEPEHQDDREELHRQVDSDMRRYFAELEGTDPLHRVAPPRLNTSKKLSLIIDILNKDVLPEYLQNGSSLEYLHLVFHCAALTTAKTMGAKIRRTNNDGPKLHKLHAPAWQKRLQHKTERLRRDIGRLTEYLNGNRGRKVVKAAKEIIDRNRTHTERETENGTAHHCLDTLKQKLSLYAERLRRYKSNYSRKRDNNSFEKSEESFYRSLTSSDGENGKLPPKEAIEQFWTEQLSTKPHFNGDTGWIEDEKSEAIKYEPMQHDMITIEEVKSAIRGLHNWKAPGPDGLQNFWIKKLWIMHDKLTSAINDVIENPERMPVFLTHGTTYLLPKDQRNTEDPSKYRPITCLPTMYKLITSCISNRIHNHCERNNIIAMQQKGCTKDSRGCKEQLVIDSVICNQAFSKRRNLYAAYIDYKKAFDSIPHEWLLTILKIYKVDPNIVKFLKNAMSTWRTSLQMKAADCSITTGPIPIRRGIFQGDSLSPLWFCMALNPLSHRLNSMDYGFSIKSGSRTMMKLNHLLYMDDLKLFASTKKQMQLMLKMVEGFSEDIKMKFGLEKCRLLNITRGKIEDGTFELKEGAEIEALKEGDTYKYLGIKQARKINQTPMKKELTEEFTRRLRRIMRTGLNSKNLIKAINTYACSALSYSFGIISWTTTDLAALQRKIRTMLTKHNKHHPKSSIERTELPRHLGGRGIVDLFNRMSQEIEGLRKYFLSKAASSELHRVVCVADSSTPLKLQQDHLETVEHSAESKMQKLIGKPLHGRHQNEVNHDYVDISASNYWLTSGRLFPETEGFMLAIQDQVIPTRNYMKYIAKDASVADDSCRYGCGTHETIQHITGGCQKLAGTEYKNRHDAVAKILHQELALKHQLLTSKKVPYYNYHPDAVLENEHHKLYWDRTVLTDRKITHNRPDLILLNKDEDRALFIDVAIPNNNNLLDRHTEKISKYRDLEEQTRRQWKLKDIKTIPIVISSTGLIPKKLLENLRKLQLDENIYRVMQKAVLLGTARTVRKYMGNAEEHRLLRQEVRVEQESNLQQGGEERPGPDHHHELDNLERAPTELNPFDIWDIWDK

SEQ ID NO: 6757 - protein, 1086 aa, Coccinella septempunctata
MNEIHIPGQQHPEDIDTESPSCKANEPEHQDDREELHRQVDSDMRKYFAELEGTDPLHRVAPPRLNTSKKLSLTIDILNKDVLPEYLQNGSSLEYLHLVFHCAALTTAKTIGAKIRQTNNDGPKLHKLHAPAWQKRLQHKTERLRRDIGRLTEYLNGNRGRKVVKAAKDIMDRNRTHTERETENATAHHCLDTLKQKLSLYAERLRRYKSNYSRKRDNNSFEKSEESFYRSLTSSDGENGKLPPKEAIEQFWTEQLSTKPQFNGDTGWIEDEKSEAIKYEPMQHDMITIEEVKSAIRGLHNWKAPGPDGLQNFWIKKLWIMHDKLTSAINDVIVNPERMPVFLTHGTTYLLPKDQRNTEDPSKYRPITCLPTMYKLITSCISNRIHNHCERNNIIAMQQKGCTKDSRGCKEQLIIDSVIYNQAFSKRRNLYAAYIDYKKAFDSIPHEWLLTILKIYKVDPNIVKFLKNAMSTWRTSLQMKAADCSITTAPIPIRRGIFQGDSLSPLWFCMALNPLSHRLNSTDYGFSIKSGSRTMMKLNHLLYMDDLKLFASTKKQMQLMLKMVEGFSEDIKMKFGLEKCRLLNITRGKIEDGTFKLKEGAEIEALKEGDTYKYLGIKQARKINQTQMKKELTEEFTRRLRRIMRTGLNSKNLIKAINTYACSALSYSFGIISWTTTDLAALQRKIRTMLTKHNKHHPKSSIERTELPRHLGGRGIVDLSNRMSQEIEGLRNYFLSKAASSELHRVVCVADTSTPLKLHQDHLETVEHYAESKMQKLIGKSLHGRHQKEVNHDYVDISASNYWLTSGRLFPETEGFMLAIQDQVIPTRNYMRYIAKDASVADDSCRYGCATHETIQHITGGCQKFAGTEYKNRHDAVAKILHQELALKHQLLTSKRVPYYNYHPDAVLENEHHKLYWDRTVLTDRKITHNRPDLILLNKDEDTALFIDVAIPNNNNLLDRHTEKISKYRDLEEQTRRQWKLKDIKTIPIVISSTGLIPKKLLENLRKLQLDENIYKVMQKAVLLGTARTVRKYMGNAEEHRLLRQEVRVEQESNLQQGAEERPEPDHHHEPENLERAPTELNPFDI

SEQ ID NO: 6758 - protein, 1173 aa, Coccinella septempunctata
MKWTTSMNETIVRIYNSITGLGQNTNNYRKRLHEEFCNAYPNLNVTEQRVADQYRVILRNELIPTARIDAIKRELQRPPTIENNTNTSDEIHMPGQQQAEETDTESPSCNASEPEHQDDREELHRQVDSDMRRYFAELEGTDPLHRVAPPRLNTSKKLSLIIDILNKDVLPEYLQNGSSLEYLHLVFHCAALTTAKTMGAKIRRTNNDGPKLHKLHAPAWQKRLQHKTERLRRDIGRLTEYLNGNRGRKVVKAAKEIIDRNRTHTERETENATAHHCLDTLKQKLSLYAERLRRYKSNYSRKRDNNSFEKSEESFYRSLTSSDGENGKLPPKEAIEQFWTEQLSTKPQFNGNTGWIEDEKSEAIKYEPMQHDMITIEEVKSAIRGLHNWKAPGPDGLQNFWIKKLWIMHDKLTSAINDVIENPERMPVFLTHGTTYLLPKDQRNTEDPSKYRPITCLPTMYELITSCISNRIYNHCERNNIIAMQQKGCTKDSRGCKEQLIIDSVICNQAFSKRRNLYAAYIDYKKAFDSIPHEWLLTILKIYKVDPNIVKFLKNAMSTWRTSLQMKAADCSITTGPIPIRRGIFQGDSLSPLWFCMALNPLSHRLNSTDYGFSIKSGSRTMMKLNHLLYMDDLKLFASTKKQMQLMLKMVEGFSEDIKMKFGLEKCRLLNITRGKMENGTFKLKEGAEIEALKEGDTYKYLGIKQARKINQTQMKKELTEEFTRRLRRIMRTGLNSKNLIKAINTYACSALSYSFGIISWTTTDLAALQRKIRTMLTKHNKHHPKSSIQRTELPRHLGGRGIVDLSNRMSQEIEGLRKYFLSKAASSELHRVVCVADTSTPLKLHQDHLETVEHSAESKMQKLIGKPLHRRHQNEVNHDYVDISASNYWLTSGRLFPETEGFMLAIQDQVIPTRNYMKYIAKDASVADDSCRYGCATHETIQHITGGCQKFAGTEYKNRHDAVAKILHQELALKHQLLSSKKVPYYNYHPDAVLENEHHKLYWDRTVLTDRKITHNRPDLILLNKDEDRALFIDVAIPNNNNLLDRHTEKISKYRDLEEQTRRQWKLKDIKTIPIVISSTGLIPKKLLENLRKLQLDENIYKVMQKAVLLGTARTVRKYMGNSEEHRLLRQEVRVEQESNLQQGGEERPGPDHHHEPENLERAPTELNPFDI

SEQ ID NO: 6759 - protein, 1262 aa, Coccinella septempunctata
MKMVITRSLGNKSLPGDRQGMSGAGAGHDSMRDVGGRMLRKRAPAAKEATAPKQQQQPTSPIQLSTRTAESAAQDIHPVLTQAGLFRKRMKWTTSMNESIVRIYNSITGLGQNTNNYRKRLHEEFCNAYPNLNVTEQRVADQYRVILRNELIPTARIDAIKRELQRPPTIENNTNTSDEIHMPGQQQAEETDTESPSCNASEPEHQDDREELHRQVDSDMRRYFAELEGTDPLHRVAPPRLNTSKKLSLIIDILNKDVLPEYLQNGSSLKYLHLVFHCAALTTAKTMGAKIRRTNNDGPKLHKLHAPAWQKRLQHKTERLRRDIGRLTEYLNGNRGRKVVKAAKEIIDRNRTHTERETENATAHHCLDTLKQKLSLYAERLRRYKSNYSRKRDNNSFEKSEESFYRSLTSSDGENGKLPPKEAIEQFWTEQLSTKPQFNGNTGWIEDEKSEAIKYEPMQHDMITIEEVKSAIRGLHNWKAPGPDGLQNFWIKKLWIMHDKLTSAINDVIENPERMPVFLTHGTTYLLPKDQRNTEDPSKYRPITCLPTMYKLITSCISNRIYNHCERNNIIAMQQKGCTKDSRGCKEQLIIDSVICNQAFSKRRNLYAAYIDYKKAFDSIPHEWLLTILKIYKVDPNIVKFLKNAMSTWRTSLQMKAADCSITTGPIPIRRGIFQGDSLSPLWFCMALNPLSHRLNSTDYGFSIKSGSRTMMKLNHLLYMDDLKLFASTKKQMQLMLKMVEGFSEDIKMKFGLEKCRLLNITRGKMEDGTFKLKEGAEIEALKEGDTYKYLGIKQARKINQTQMKKELTEEFTRRLRRIMRTGLNSKNLIKAINTYACSALSYSFGIISWTTTDLAALQRKIRTMLTKHNKHHPKSSIERTELPRHLGGRGIVDLSNRMSQEIEGLRKYFLSKAASSELHRVVCVADTSTPLKLHQDHLETVEHSAESKMQKLIGKPLHGRHQNEVNHDYVDISASNYWLTSGRLFPETEGFMLAIQDQVIPTRNYMKYIAKDASVADDSCRYGYATHETIQHITGGCQKFAGTEYKNRHDTVAKILHQELALKHQLLSSKKVPYYNYHPDAVLENEHHKLYWDRTVLTDRKITHNRPDLILLNKDEDRALFIDVAIPNNNNLLDRHTEKISKYRDLEEQTRRQWKLKDIKTIPIVISSTGLIPKKLLENLKKLQLDENIYKVMQKAVLLETARTVRKYMGNSEEHRLLRQEVRVEQESNLQQGGEERPGPDQHHEPENLERAPTELNPFDI

SEQ ID NO: 6760 - protein, 1262 aa, Coccinella septempunctata
MKMVITRSLGNKSLPGDRQGMSGAGAGHDSMRDVGGRMLRKRAPAAKEATAPKQQQQPTSPIQLSTRTAESAAQDIQPVLTQAGLVRKRMKWTTSMNETIVRIYNSITGLGQNTNNYRKRLHEEFCNAYPNLNVTEQRVADQYRVILRNELIPTARIDAIKRELQRPPTIENNTNTSDEIHMPGQQQAEETDTESPSCNASEPEHQDDREELHRQVDSDMRRYFAELEGTDPLHRVAPPRLNTSKKLSLIIDILNKDVLPEYLQNGSSLEYLHLVFHCAALTTAKTMGAKIRRTNNDGPKLHKLHAPAWQKRLQHKTEKLRRDIGRLTEYLNGNRGRKVVKAAKEIIDRNRTHTERETENATAHHCLDTLKQKLSLYAERLRRYKSNYSRKRDNNSFEKSEESFYRSLTSSDGENGKLPPKEAIEQFWTEQLSTKPQFNGNTGWIEDEKSEAIKYEPMQHDMITIEEVKSAIRGLHNWKAPGPDGLQNFWIKKLWIMHDKLTSAINDVIENPERMPVFLTHGTTYLLPKDQRNTEDPSKYRPITCLPTMYKLITSCISNRIYNHCERNNIIAMQQKGCTKESRGCKEQLIIDSVICNQAFSKRRNLYAAYIDYKKAFDSIPHEWLLTILKIYKVDPNIVKFLKNAMSTWRTSLQMKAADCSITTGPIPIRRGIFQGDSLSPLWFCMALNPLSHRLNSTDYGFSIKSGSRTMMKLNHLLYMDDLKLFASTKKQMQLMLKMVEGFSEDIKMKFGLEKCRLLYITRGKMEDGTFKLKEGAEIEALKEGDTYKYLGIKQARKINQTQMKKELTEEFTRRLRRIMRTGLNSKNLIKAINTYACSALSYSFGIISWTTTDLAALQRKIRTMLTKHNKHHPKSSIERTELPRHLGGRGIVDLSNRMSQEIEGLRKYFLSKAASSELHRVVCVADTSTPLKLHQDHMETVEHSAESKMQKLIGKPLHGRHQNEVNHDYVDISASNYWLTSGRLFPETEGFMLAIQDQVIPTRNYMKYIAKDASVTDDSCRYGCATHETIQHITGGCQKFAGTEYKNRHDAVAKILHQELALKHQLLSSKKIPYYNYHPDAVLENEHHKLYWDRTVLTDRKITHNRPDLILLNKDEDRALFIDVAIPNNNNLLDRHTEKISKYRDLEEQTRRQWKLKDIKTIPIVISSTGLIPKKLLENLRKLQLDENIYKVMQKAVLLGTAGTVRKYMGNSEEHRLLRQEVRVEQESNLQQGGEERPGPDHHHEPENLERAPTELNPFDI

SEQ ID NO: 6761 - protein, 1173 aa, Coccinella septempunctata
MKWTTSMNETIVRIYNSITGLGQNTNNYRKRLHEEFCNAYPNLNVTEQRVADQYRVILRNELIPTARIDAIKRELQRPPTIENNTNTSDEIHMPGQQQAEETDTESPSCNESEPEHQDDREELHRQVDSDMRRYFAELEGTDPLHRVAPPRLNTSKKLSLIIDILNKDVLPEYLQNGSSLEYLHLVFHCAALTTAKTMGAKIRRTNNDGPKLHKLHAPAWQKRLQHKTERLRRDIGRLTEYLNGNRGRKVVKAAKEIIDRNRTHTERETENATAHHCLDTLKQKLSLYAERLRRYKSNYSRKRDNNSFEKSEESFYRSLTSSDGENGKLPPKEAIEQFWTEQLSTKPQFNGNTGWIEDEKSEAIKYEPMQHDMITIEEVKSAIRGLQNWKAPGPDGLQNFWIKKLWIMHDKLTSAINDVIENPERMPVFLTHGTTYLLPKDQRNTEDPSKYRPITCLPTMYKLITSCISNRIYNHCERNNIIAMQQKGCTKDSRGCKEQLIIDSVICNQAFSKRRNLYAAYIDYQKAFDSIPHEWLLTILKIYKVDPNIVKFLKNAMSTWRTSLQMKAADCSITTGPIPIRRGIFQGDSLSPLWFCMALNPLSHRLNSTDYGFSIKSGSRTMMKLNHLLYMDDLKLFASTKKQMQLMLKMVEGFSEDIKMKFGLEKCRLLNITRGKMEDGTFKLKEGAEIEALKEGDTYKYLGMKQARKINQTQMKKELTEEFTRRLRRIMRTGLNSKNLIKAINTYACSALSYSFGIISWTTTDLAALQRKIRTMLTKHNKHHPKSSIERTELPRHLGGRGIVDLSNRMSQEIEGLRKYFLSKAASSELHRVVCVADTSTPLKLHQDHLETVEHSAESKMQRLIGKPLHGRHQNEVNHDYVDISASNYWLTSGRLFPETEGFMLAIQDQVIPTRNYMKYIAKDASVADDSCRYGCATHETIQHITGGCQKFAGTEYKNRHDAVAKILHQELALKHQLLSSKKVPYYNYHPDAVLENEHHKLYWDRTVLTDRKITHNRPDLILLNKDEDRALFIDVAIPNNNNLLDRHTEKISKYRDLEEQTRRQWKLKDIKTIPIVISSTGLIPKKLLENLRKLQLDENIYKVMQKAVLLGTARTVRKYMGNSEEHRLLRQEVRVEQESNLQQGGEERPGPDHHHEPENLERAPTELNPFDI

SEQ ID NO: 6762 - protein, 1262 aa, Coccinella septempunctata
MKMVITRSLGNKSLPGDRQGMSGAGAGHDSMRDVGGRMLRKRAPAAKEATAPKQQQQPTSPIQLPTRTAEGAAQDIQPVLTQAGLVRKRMKWTTSMNETIVRIYNSITGLGQNTNNYRKRLHEEFCIAYPNVNVTEQRVADQYRVILRNELVPTARIDAIKRELQHPLAIENNTNTSDEIHIPGQQHPEDIDTESPSCKANEPEHQDDREELHRQVDSDMRKYFAELEGTDPLHRVAPPRLNTSKKLSLIIDILNKDVLPEYLQNGSSLEYLHLVFHYAALTTAKTMGAKIRQTNNDGPKLHKLHAPAWQKRLQHKTERLRRDIGRLTVYLNGNRGRKVVKAAKDIMDRNRTHTERETENATAHHCLDTLKQKLSLYAERLRRYKSNYSRKRDNNSFEKSEESFYRSLTSSDGENGKLPPKEAIEQFWTEQLSTKPQFNGDTGWIEDEKSEAIKYEPMQHDMITIEEVKSAIRGLHNWKAPGPDGLQNFWIKKLWIMHDKLTSAINDVIVNPERMPVFLTHGTTYLLPKDQRNTEDPSKYRPITCLPTMYKLITSCISNRIHNHCERNNIIAMQQKGCTKDSRGCKEQLIIDSVICNQAFSKRRNLYAAYIDYKKAFDSIPHEWLLTILKIYKVDPNIVKFLKNAMSTWRTSLQMKAADCSITTGPIPIRRGILQGDSLSPLWFCMALNPLSHRLNSTDYGFSIKSGSRTMMKLNHLLYMDDLKLFASTKKQMQLMLKMVEGFSEDIKMKFGLEKCRLLNITKGKIEDGTFKLKEGAEIEALKEGDTYKYLGIKQARKINQTQMKKELTEEFTRRLRRIMRTGLNSKNLIKAINTYACSALSYSFGIISWTTTDLAALQRKIRTMLTKHNKHHPKSSIERTELPRHLGGRGIVDLSNRMSQEIEGLRNYFLSKAASSELHRVVCVADTSTPLKLHQDHLETVEHYAESKMQKLIGKSLHGRHQKEVNHDYVDISASNYWLTSGRLFPETEGFKLAIQDQVIPTRNYMRYIAKDASVADDSSRYGCATHATIQHITGGCQKFAGTEYKNRHDAVAKILHQELALKHQLLTSKRVPYYNYHPDAVLENEHHKLYWDRTILTDRKITHNRPDLILLNKDEDTALFIDVAIPNNNNLLDRHTVKISKYRDLEEQTRRQWKLKDIKTIPIVISSTGLIPKKLLENLRKLQLDENIYKVMQKAVLLGTARTVRKYMGNAEEHRLLRQEVRVEQESNLQQGAEERPEPDHHHEPENLERAPTELNPFDI

SEQ ID NO: 6763 - protein, 1262 aa, Coccinella septempunctata
MKMLITRSLGNKSLPGDRQGMSGAGAGHDSMRDVGGRMLRKRAPAAKEATAPKQQQQPTNPIQLPTRTAEGAAQDIQPVLTQAGLVRKRMKWTTSMNETIVRIYNSITGLGQNTNNYRKRLHEEFCNAYPNLNVTEQRVADQYRVILRNELIPTARIDAIKRELQRPPAIENNTNTSDEIHMLGQQQAEETDTESPSCNASEPEHQDDREELRRQVDSDMRRYFAELEGTDPLHRVAPPRLNTSKKLSLIIDILNKDVLPEYLQNGSSLEYLHLVFHCAALTTAKTMGAKIRQTNNDGPKLHKLHAPAWQKRLQHKTERLRRNIGRLTEYVNGNRGRKVVKAAKEIMDRNRTHTERETENATAHHCLDTLKQKLSLYAERLRRYKSNYSRKRDNNSFEKSEESFYRSLTSSDGENGKLPPKEAIEQFWTEQLSTKPHFNGDTGWIEDEKSEAIKYEPMQHDMITIEEVKSAIRGLHNWKAPGPDGLQNFWIKKLWIMHDKLTSAINDVIENPERMPVFLTHGTTYLLPKDQRNTEDPSKYRPITCLPTMYKLITSCISNRIHNHCERNNIIAMQQKGCTKDSRGCKEQLIIDSVICNQAFSKRRNLYDAYIDYKKAFDSIPHEWLLTILKIYKVDPNIVKFLKNAMSTWRTSLQMKAADCSITTGSIPIRRGIFQGDSLSPLWFCMALNPLSHRLNSTDYGFSIKSGSRTMMKLNHLLYMDDLKLFASTKKQMQLMLKMVEGFSEDIKMKFGLEKCRLLNITRGKIEDGTFKLKEGAEIEALKEGDTYKYLGIKQARKINQTQMKKELTEEFTRRLRRIMRTGLNSKNLIKAINTYACSALSYSFGIISWTTTDLAALQRKIRTMLTKHNKHHPKSSIERRELPRHLGGRGIVDLSNRMSQEIEGLRKYFLSKAASSELHRVVCVADSSTPLKLQQDHLETVEHSAESKMQKLIGKHLHGRHQNEVNHDYVDISASNYWLTSGRLFPETEGFMLAIQDQVIPTRNYMKYIAKDASVADDSCRYGCATHETIQHITGGCQKFAGTEYKNRHDAVAKILHQELALKHQLLTSKKVPYYNYHPDAVLENEHHKLYWDRTVLTDRKITHNRPDLILLNKDEDRALFIDVAIPNNTNLLDRHTEKISKYRDLEEQTRRQWKLKDIKTIPIVISSTGLIPKKLLENLRKLQLDDNIYRVIQKAVLLGTARTVRKYMGNAEEHRLLRQEVRVEQESKLQQGGEERPGPDHHHEPENLERAPTELNPFDI

SEQ ID NO: 6764 - protein, 1268 aa, Coccinella septempunctata
MKIVITRSLGNKSLPGDRQGMSGAGAGHDSMRDVGGRMLRKRAPAAKEATAPKQQQQPTSPIQSPTRTAEGAAQDIQPVLTQAGLVRKRMKWTTSMNETIVRIFNSITGLGQNTNNYRKRLHEEFCNAYPNLNVTEQRVADQYRVILRNELIPTARIDAIKRELQSPPAIENNTNISDEIHMPGQQQAEETDTESPSCNASEPEHQDDREELRRQVDSDMRRYFAELEGTDPLHRVAPPRLNTSKKLSLIIDILNKDVLPEYLQNGSSLEYLHLVFHCAALTTAKTIGAKIRRTSNDGPKLHKLHAPAWQKRLQHKTERLRRDIGRLTEYLNGNRGRKVVKAAKEIMDRNRTHTERETENATAHHCLDTLKQKLSLYAEHLRRYKSNYSRKRDNNSFEKSEESFYRSLTSSDGENGKLPPKEAIEQFWTEQLSTKPHFNGDTGWIEDEKSEAIKYEPMQHDMITIEEVKSAIRGLHNWKAPGPDGLQNFWIKKLWIMHDKLTSAINDVIENPERMPVFLTHGTTFLLPKDQRNTEDPSKYRPITCLPTMYKLITSCISNRIHNHCERNNIIAMQQKGCTKDSRGCKEQLIIDSVICNQAFSKRRNLYAAYIDYKKAFDSIPHEWLLTILKIYKVDPNIVKFLKNATSTWRTSLQMKAADCSITTGPIPIRRGIFQGDSLSPLWFCMALNPLSYRLNSADYGFSIKSGSRTMMKLNHLLYMDDLKLFASTKKQMQLMLKMVEGFSEDIKMKFGLEKCRVLNITRGKIEDGSFKLKEGAEIEALKEGDTYKYLGIKQARKINHTQMKKELAEEFTRRLRRIMRTGLNSKNLIKAINTYACSALSYSFGIISWTTTDLAALQRRIRTMLTKHNKHHPKSSIERTELPRHLGGRGIVDLSNRMSQEIEGLRKYFLSKAASSELHRVVCVADSSTPLKLQQDHLETVEHSAESKMQKLIGKPLHGRHQNEVNHDYVDISASNYWLTSGRLFPETEGFMLAIQDQVIPTRNYMKYIAKDASVADDSCRYGCETHETIQHITGGCQKFAGTEYKNRHDAVAKILHQELALKHQLLTSKRIPYYNYHPDAVLENEHHKLYWDRTVLTDRKITHNRPDLILLNKDEDTALFIDVAIPNNNNLLDRHTEKISKYRDLEEQTRRQWKLKDIKTIPIVISSTGLIPKKLLENLRKLQLDENIYKVMQKAVLLGTARTVRKYMGNAEEHRLLRQEVRVEQESNLQQEAEERPEPHHHHEPENLERAPTELNPFDISDIWDK

SEQ ID NO: 6765 - protein, 1260 aa, Coccinella septempunctata
MKMVITRSLGNKSLPGDRQGMSGAGAGHDSMRDVGGRMLRKRAPAAKEATAPKQQQQPTSPIQLPTRTAEGAAQDIQPVLTQAGLVRKRMKWTTSMNETIVRIYNSITGQGQNTNNYRKRLHEEFCIAYPNLNVTEQRVADQYRVILRNELIPTARIDAIKRELQHPLAIENNTNTSDEIHIPGQQHPEDIDTESPSCKANEPEHQDDREELHRQVDSDMRKYFAELEGTDPLHRVAPPRLNTSKKLSLIIDILNKDVLPEYLENGSSLEYLHLVFHCAALTTAKTIGAKIRQTNNDGPKLHKLHAPAWQKRLQHKTERLRRDIGRLTEYLNGNRGRKVVKAAKDIMDRNRTHTERETENATAHHCLDTLKQKLSLYAERLRRYKSNYSRKRDNNSFEKSEESFYRSLTSSDGENGKLPPKEAIEQFWTEQLSTKPQFNGDTGWIEDEKSEAIKYEPMQHDMITIEEVKSAIRGLHNWKAPGPDGLQNFWIKKLWIMHDKLTSAINDVIVNPERMPVFLTHGTTYLLPKDQRNTEDPSKYRPITCLPTMYKLITSCISNRIHNHCERNNIIAMQQKGCTKDSRGCKEQLIIDSVICNRAFSKRRNLYAAYIDYKKAFDSIPHEWLLTILKIYKVDPNIVKFLNNAMSTWRTSLRMKAADCSITTGPIPIRRGIFQGDSLSPLWFCMALNPLSHRLNSTDYGFSIKSGSRTMMKLNHLLYMDDLKLFASTKKQMQLMLKMVEGFSEDIKMKFGLEKCRLLNITRGKIEDGTFKLKEGAEIEALKEGDTYKYLGIRRKINQTQMKKELTEEFTRRLRRIMRTGLNSKNLIKAINTYACSALSYSFGIISWTTTDLAALQRKIRTMLTKHNKHHPKSSIERTELPRHLGGRGIVDLSNRMSQEIEGLRNYFLSKAASSELHRVVCVADTSTPLKLHQDHLETVEHSAESKMQKLIGKSLHGRHQNEVNHDYVDISASNYWLTSGRLFPETEGFKLAIQDQVIPTRNYMRYIAKDASVADDSYRYGCATHETIHHITRGCQKFAGTEYKNRHDAVAKILHQELALKHQLLTSKRVPYYNYHPDAVLENEHHKLYWDRTVLTDRKITHNRPDLILLNKDEDTALFIDVAIPNINNLLDRHTEKISKYRDLEEQTRRQWKLKDIKTIPIVISSTGLIPKKLLENLRKLQLDENIYKVMQKAVLLGTARTVRKYMGNAEEHRLLRQEVRVEQESNLQQGAEERPEPDHHHEPENLERAPTELNPFDI

SEQ ID NO: 6766 - protein, 1264 aa, Coccinella septempunctata
MKMVITRSLGNKSLPGDLQGMSGAGAGHDSMRDVGGRMLRKRAPTAKQATAPKQQQQPTSPIQLPTRTAEGAAQDIQPVLTQAGLVRKRMKWTTSMNETIVRIYNSITGLGQNTNNYRKRLHEEFCIAYPNVNVTEQRVADQYRVILRNELVPTARIDAIKRELQRPLAMENNTNTSDEVHIPGQQHPEDIDTESPSCKANEPEHQDDREELHRQVDSDMRRYFAELEGTDPLHRVAPPRLNTSKKLSLIIDILNKDVLPEYLQNGSLLEYLHLVFHCAALTTAKTMGAKIRRTNNDGPKLHKLHAPAWQKRLQHKTERLRRDIGRLTEYLNGNRGRKVVKAAKEIMDRNRTHTERETENATAHHCLDTLKQKLSLYAERLRRYKSNYSRKRDNNSFEKSEESFYRSLTSSDGENGKLPPKEAIEQFWTEQLSTKPQFNGDTGRIEDEKSEAIKYEPMQHDMITIEEVKSAIRGLHNWKAPGPDGLQNFWIKKLWIMHDKLTSAINDVIENPERMPVFLTHGTTYLLPKDQRNTEDPSKYRPITCLPTMYKLITSCISNRIHNHCERNNIIAIQQEGCTKDSRGCKEQLIIDSVICNQAFSKRRNLYAAYIDYKKAFDSIPHEWLLTILKIYKVDPNIVKFLKNAMSTWRTSLQMKAADCSITTGPIPIRRGIFQGDSLSPLWFCMALNPLSHRLNSTDYGFSIKSGSRTMMKLNHLLYMDDLKLFASTKKQMQLMLKMVEGFSEDIKMKFGLEKCRLLNITRGKIEDGTFKLKEGAEIEALKEGDTYKYLGIKQARKINQTQMKKELTEEFTRRLRRIMRTGLNSKNLIKAIYTYACSALSYSFGIISWTTTDLTALQRKIRTMLTKHNKHHPKSSIERTELPRHLGGRGIVYLSNRMSQEIEGLRNYFLSKAASSELHRVVCVADTSTPLKLHQNHLGTVEHSAESKMQKPLHGRHQNEVNHDYVDISASNYWLTSGRLFPETEGFMLAIQDQVIPTRNYMRYIAKDASVADDSCRYGCATHETIQHITGGCQKFAGTEYKNRHDAVAKILHQELALKHQLLTSKRIPYYNYHPDAVLENEHHKLYWDRTVLTDRKITHNRPDLILLNKDEDTALFIDVAIPNNNNLLDRHTEKISKYRDLEEQTRRQWKLKDIKTIPIVISSTGLIPKKLLENLRKLQLDENIYKVMQKAVLLGTARTVRKYMGNAEEHRLLRQEVRVEQESNLQQEAEERPEPHHHHEPENLERAPTELNPFDISDIWDK

SEQ ID NO: 6767 - protein, 1083 aa, Coccinella septempunctata
MPGQQHLEDIDTESPSCNPSEPELQDDREELHRQVHSDMRRYFAELEGTDPLHRITPPRLNTSKKLSLIIDILNKDVLPEYLQNGSSLEYLHLVFYCAALTTAKTIGAKIRGTNNNGLKLHKLHAPAWQKRLQHKTERLRRDIGRLTEYLNGNRGRKVVKAAKEIMDRNRTHTERETENATAHYCLDTLKQKLSLYAERLRRYKSNYSRKRDNNSFEKSEESFYRSLTSSDGEHGKLPPKEAIEQFWTEQLSTKPHFNGDTGWIEDEKSEAIKYEPMQHDMITIEEVKAAIRVLQNWKAPGPDGLQNFWIKKLWIMHDKLTSAINDVIENPERMPVFLTHGTTYLLPKDQRNTEDPSKYRPITCLPTMYKLITSCISNRIHNHCERNNIIAMQQKGCTKDSRGCKEQLIIDSVICNQAFSKRRNLYAAYIDYKKAFDSIPHEWLLTILKIYKVDPNIVKFLKNAMSTWRTSLQMKAADCSITTGPIPIRRGIFQGDSLSPLWFCMALNPLSHRLNSTDYGFSIKSGSRTMIKLNHLLYMDDLKLFASTKKQMQLMLKMVEGFSEDIKMKFGLEKCRLLNITRGKIEDGTFKLKEGAEIEALKEGDTYKYLGIKQARKINQTQMKKELTEEFTRRLRRIMRTGLNSKNLIKAINTYACSALSYSFGIISWTITDLAALQRKIRTMLTKHINNKHHPKSSIERTELPRHLGGRGIVDLSNRMSQEIEGLRKYFLSKAASSELHRVVCVADSSTPLKLQQDHLETVEHSAESKMQKLIGKPLHGRHQNEVNHDYVDISASNYWLTSGRLFPETEGFMLAIQDQVIPTRNYMKYIAKDASVADDSCRYGCATHETIQHITGGCQKFAGTEYKNRHDAVAKILHQELALKHQLLTSKKVPYYNYHPDAVLENEHHKLYWDRTVLTDRKITHNRPDLILLNKDEDRALFIDVAIPNNTNLLDRHTEKISKYRDLEEQTRRQWKLKDIKTIPIVISSTGLIPKKLLENLRKLQLDENIYRVMQKAVLLGTARTVRKYMGNAEEHRLRGQEVRVEQESNLQQGGEERPGPDHHHEPENLERVPTELNPFDI

SEQ ID NO: 6768 - protein, 1001 aa, Coccinella septempunctata
MRRYFAELEGTDPLHRVAPPRLNTSKKLSLIIDILNKDVLPEYLQNGSSLENLHLVFHCAALTTAKTMGAKIRRTNNDGPKLHKLHAPAWQKRLQHKIERLRRDIGRLTEYLNGNRGRKNVKAAKEIMDRNRTHTERETENATAHHCLDTLKQKLSLYEERLRRYKSNYSRKRDNNSFEKSEESFYRSVTSSDGENGKLPPKEAIEQFWTEQLSTKPQNFWIKKLWIMHDKLTSAINDVIENPERMPVFLTHGTTYLLPKDQRNTEDPSQYRPITCLPTMYKLITSCISNRIHNHCERNNIIAMQQKGCTKDSRGCKEQLIIDSVICNQAFSKRRNLYAAYIDYKKAFDSIPHEWLLTILKIYKVDPNIAKFLKNAMSTWRTSLQMKAADCSITTGPIPIRRGIFQGDSLSPLWFCMALNPLSHRLNSTDYGFSIKSGSRTMMKLNHLFYMDDLKLFASTKKQMQLMLKMVEGFSEDIKMKFGLEKCRLLNITRGKIEDGTFKLKEGAEIEALKEGDTYKYLGIKQRRTRKINQTQMKKELTEEFTGRLRRIMRTGLNSKNLIKAINTYACSALSYSFGIISWTTTDLAALQRKIRTMLTKHNKHHPKSSIERTELPRHLWGRGIVDLSNCMSQEIEGLRNYFLSKAASSELHRVVCVADTSTPLKLHQDHLETVEHSAESKMQKLIGKPLHGRHQNEVNHDNVDISASNYWLTSGRLFPETEGFMLAIQDQVISTRNYMRYIAKDASVADDSCRYGCATHETIQHITGECQKFAGTEYKIRHDAVAKILHQELALKHQLLTSKRIPYYNYHPDAVLENEHHKLYWDRTVLTEGKITHNRPDLILLNKDEDTALFIDVAIPNNNNLLDRHTEKISKYRDLEKQTRRQWKLKDIKTIPIVISSTGLIPKKLLENLRKLQLDENIYKVMQKAVLLGTARTVRKYMRNAEEHRLLRQEVRVEQECNLQQEAEERPEPDHHHEPENLERAPTELNPFDIRDIWDK

SEQ ID NO: 6769 - protein, 913 aa, Coccinella septempunctata
MDRNRTHTERETENATAHHCLDTLKQKLSLYAERLRRYKSNYSRKRDNNSFEKSEESFYLSLTSSDGENGKLPPKEAIEQFWTEQLSTKPHSNGDTGWIEDEKSEAIKYEPMQHDMITIEEVKSAIRGLHNWKAPGPDGLQNFWIKKLWIMHDKLTSAINEVIENPKRMPVFLTHGTTYLLPKDHRNTEDPSKYRPITCLPTMYELITSCISNRIHNHCERNNIIAMQQKGCTKDSRGCKEQLIIDSVICNQAFSKRRNFYASYIDYKTAFDSIPHEWLLTILKIYKVDPNIVKFLKNAMSTWRTSLQMKAADCSITTGLIPIRRGIFQGDSLSPLWFCMALNPLSHRLNSTDYGFSIKSGSSTMMKLNHLLYMDDLKLFASTKKQMQLMLNMVEGFIKMKFGLEKCRLLNITRGKIEDGTFKLKEGAEIEALKEEDTYKYLGIKQARKINQTQMKKELTEEFTRRLRRIMRTVLNSKNLIKAINTYACSALSYSFGIFSWTTTDLAALQRKIRTMLTKHNKHHPKSSIERTELPRHLGGRGIVDLSNRMSKEIEGLRKYFLSKAASSELHRVVCVAGTSTPLKLHQDHLETVEHSAESKMQKLIGKTLHGRHQKEVNHDYVDISASNYWLTSGRLFPETEGFMLAIQDQVIPTRNYMKYIAKDASVADDSCRYGCATHETIQHITGGCQKFAGTEYKNRHDAVAKILHQELALKHQLLTSKKVPHYNYHPDAVLENEHHKLYWDRTVLKDRKITHNRPDLILLNKDEDTALFIDVAIPNNNNLLDRHTEKISEYRDLEEQIRRQWKLKDIKTIPIVISSTGLIPKKLLENLRELQLDENIYKVMQKAVLLGTARTVRKYMGNAEEHRLLRQEVRVEQESNLQQGAEERPGPDHQHEPENLERAPTELNTFDI

SEQ ID NO: 6770 - protein, 1204 aa, Coccinella septempunctata
MVITRSLGNKSLPGDRQGMSGAGAGHDSMRDVGGRMLRKRAPAAKEATAPKQQQQPTSPIQLPTRTAEGAAQDIQPLLTQAGLVRKRMKWTTSMNETIVRIYNSITGLGQNTNNYRKRLHEEFCSAYPNLNVTEQRVADQYRGFLRNELTPTARFDAIKRELQRPPTIENNTNTSDEIHMPGQQQAEETDTESPSCVASEPEHQDDREQLHRQVDSEMRRYFAELEGTDPLHRVAPPRLNTSKKLSLIIDILNKDVLPEYLQNGSSLEYLHLVFHCAALTTAKTIGAKIRRTNNDGPKLHKLHAPAWQKRLQHKTERLRRDIGRLTEYLNGNRGRKVVKATKEIMDRNRTHTERETENATAHHCLDTLKQKLSLYAERLRRYKSNYSRKRDNNSFEKSEESFYRSLTSSDGEDGKLPPKEAIEQFWTEQLSTKPQFNGDTGWIEDEKSEAIKYEPMQHDMITIEEVKSAIRGLHNWKAPGPDGLQNFWIKKLWIMHDKLTSAINDVIENPERMLVFLTHGTTYLLPKDQRNTEDPSKYRPITCLPTMYKLITSCISNRIHNHCERNNIIAMQQKGCTKDSRGCKEQLIIDSVICNQAFSKRRNLYAAYIDYKKAFDSIPHEWLLTILKIYKVDPNIVKFLKNAMSTWRTSLQMKAADCSITTGPIPIRRGIFQGDSLSPLWFCMALNPLSHRLNSTDYGFSIKSGSRTMMKLNHLLYVDDLKLFASAKKQMQLMLKMVEGFSEDIKMKFGLEKCRLLNITRGKIEDGTFKLKEGAEIEALKEGDTYKYLGIKQARKINQMKKELTEEFTRRLRRIMRTGLNSKNLIKAINTYACSALSYSFGIISWTTTDLAALQRKIRTMLTKHNKHHPKSSIERTELPRHLGGRGIVDLSNRMSQEIEGLRKYFLSKAASSELHRVVCVADTSTPLKLHQDHLETIEHSAESKMQKLIGKPLHGRHQNEVNHDYVDISASNYWLTSGRLFPETEGYMLAIQDQVIPTRNYMKCIAKDASVADDSCRYGCATHETIQHISGGCQKFAGTEYKNRHDAVAKILHQELALKHQLLTSKKVPHYNYHPDAVLENEHHKLYWDRTVLTDRKITHNRPDLILLNKDEDTALFIDVAIPNNNNLLDRHTEKISKYRDLEEQTRRQWKLKDIKTIPIVISSTGLIPKKLLENLRKLQLDENIYKVMQKAVLLGTARTVRK

SEQ ID NO: 6771 - protein, 952 aa, Coccinella septempunctata
MAETSSTQNRKAKKRHWTTDGVLERERGRKVVKAAKEIIDRNRTHTERETENATAHHCLDTLKQKLSLHAERLGRYKSNYSRKRDSNSFEKSEESFYRSLTSSDGENGKLPPKEAIEQFWTEQLSTKPQFNGDTGWIEEEKSEAIKYEPMQHRKITIEEVKSAIRGLHNWKAPGPDGLQNFWIKKLWIMHDKLTSAINDVIENPERMPVFLTHGTTYLLPKDKRNTEDPSKYRPITCLPTMYKLITSCISNRIHNHCERNNIIAMQQKGCTKDSRGCKEQLIIDSVICNQAFSKRRNLYAAYIDYKKAFDSIPHEWLLTILKIYKVDPNIVKFLKNAMSTWRTSLQMKAADCSITTGPIPIRRGIFQGDSLSPLWFCMALNPLSHRLNSTDYGFSIKIGSRTMMKLNHLLYMDDLKLFASTKKQMQLMLKMVEGFSEDIKMKFGLEKCRLLNITRGKIEDGTFKLREGAEIEALKEGDTYKYLGIKQARKINQMKKELTEEFTRRLRRIMRTGINSKNLIKAINTYACSALSYSFGVISWTTTDLAALQRKIRTMLTKHNKHHPKSSIERTELPRHLGGRGIVDLSNRMSQEMEGLRKYFLSKAASSELHRVVCVADSSTPLKLQQDHLETVEHSAENKMQKLIGKSLHGRHQNEVNHDYVDISASNYWLTSGRLFPETEGFMLAIQDQVIPTRNYMKYIAKDASVADDSCRYGCATHETIQHITGGCQKFAGTEYKNRHDAVAKILHQELALKHQLLTSKKVPYYNYHPNAVLENEHHKLYWDRTVLTDRKIAHNRPDLILLNKDEDRALFIDVAIPNNNNLLDRHTEKMSKYRDLEEQTRRQWKLKDIKTIPIVISSTGLIPKKLLENLRKLQLDENIYRVMQKVVLLGTARTVRKYMGNAEEHRLLRQEVRVEQESNLQQGGEERPGPDHHHEPENLERAPTALNPFDI

SEQ ID NO: 6772 - protein, 1257 aa, Coccinella septempunctata
MKMVITRSLGNKSLPGDRQGMSGAGAGHDSMRDVGGRMLRKRAPAAKEATAPKQQQQPTSPIQLSTRTAESAAQDIQPVLTQAGLVRKRMKWTTSMNETIVRIYNSITGLGQNTNNYRKRLHEEFCNAYPNLNVTEQRVADQYRVILRNELIPTARIDAIKRELQRPPTIENNTNTSDEIHMPGQQQAEETDTENPSCNASEPEHQDDREELHRQVDSDMRRYFAELEGTDPLHRVAPPRLNISKKLSLIIDILNKDFLPEYLQNGSSLEYLHLVFHCAALTTAKTMGAKIRRTNNDGPKLHKLHAPAWQKRLQHKTERLRRDIGRLTEYLNGNRGRKVVKAAKEIIDRNRTHTERETENATAHHCSDTLKQKLSLYAERLRRYKSNYSRKRDNNSFEKSEESFYRSLTSSDGENGKLPPKEAIEQFWTEQLSTKPQFNGNTGWIEDEKSEAIKYEPMQHDMITIEEVKSAIRGLHNWKAPGPDGLQNFWIKKLWIMHDKLTSAINDVIENPERMPVFLTHGTTYLLPKDQRNTEDPSKYRPITCLPTMYKLITSCISNRIYNHCERNNIIAMQQKGCIKDSRGCKEQLIIDSVICNQAFSKRRNLYAAYIDYKKAFDSIPHEWLLTILKIYKVDPNKNAMSTWRTSLQMKAADCSITTGPIPIRRGIFQGDSLSPLWFCMALNPLSHRLNSTDYGFSIKSGNRTMMKLNHLLYMDDLKLFASTKKQMQLMLKMVEGFSEDIKMKFGLEKCRLLNITRGKMEDGTFKLKEGAEIEALKEGDTYKYLGIKQARKINQTQMKKELTEEFTRRLRRIMRTGLNSKNLIKAINTYACSALSYSFGIISWTTTDLAALQRKIRTMLTKHNKHHPKSSIERTELPRHLGGRGIVDLSNRLSQEIEGLRKYFLSKAASSELHRVVCVADTSTPLKLHQDHLETVEHSAESKMQKLIGKPLHGRHQNEVNHDYVDISASNYWLTSGRFFPETEGFMLAIQDQVIPTRNYMKYIAKDASVADDSCRYGCATHETIQHITGGCQKFAGTEYKNRHDTVAKILHQELALKHHFLSSKKVPYYNYHPDAVLENEHHKLYWDRTVLTDRKITHNRPDLILLNKDEDRALFIDVAIPNNNNLLDRHTEKISKYRDLEEQTRRQWKLKDIKTIPIVISSTGLIPKKLLENLKKLQLDENIYKVMQKAVLLGTARTVRKYMGNSEEHRLLRQEVRVEQESNLQQGGEERPGPDQHHEPENLERAPTELNPFDI

SEQ ID NO: 6773 - protein, 1257 aa, Coccinella septempunctata
MKMVITRSLGNKSLPGDRQGMSGAGAGHDSMRDVGGRMLRKRAPAAKEATAPKQQQQPTSPIQLSTRTAESAAQDIHPVLTQAGLVRKRMKWTTSMNETIVRIYNSITGLGQNTNNYRKRLHEEFCNAYPNLNVTEQRVADQYRVILRNELIPTARIDAIKRELQRPPTIENNTNTSDEIHMPGQQQAEETDTENPSCNASEPEHQDDREELHRQVDSDMRRYFAELEGTDPLHRVAPPRLNISKKLSLIIDILNKDFLPEYLQNGSSLEYLHLVFHCAALTTAKTMGAKIRRTNNDGPKLHKLHAPAWQKRLQHKTERLRRDIGRLTEYLNGNRGRKVVKAAKEIIDRNRTHTERETENATAHHCSDTLKQKLSLYAERLRRYKSNYSRKRDNNSFEKSEESFYRSLTSSDGENGKLPPKEAIEQFWTEQLSTKPQFNGNTGWIEDEKSEAIKYEPMQHDMITIEEVKSAIRGLHNWKAPGPDGLQNFWIKKLWIMHDKLTSAINDVIENPERMPVFLTHGTTYLLPKDQRNTEDPSKYRPITCLPTMYKLITSCISNRIYNHCERNNIIAMQQKGCIKDSRGCKEQLIIDSVICNQAFSKRRNLYAAYIDYKKAFDSIPHEWLLTILKIYKVDPNKNAMSTWRTSLQMKAADCSITTGPIPIRRGIFQGDSLSPLWFCMALNPLSHRLNSTDYGFSIKSGNRTIMKLNHLLYMDDLKLFASTKKQMQLMLKMVEGFSEDIKMKFGLEKCRLLNITRGKMEDGTFKLKEGAEIEALKEGDTYKYLGIKQARKINQTQMKKELTEEFTRRLRRIMRTGLNSKNLIKAINTYACSALSYSFGIISWTTTDLAALQRKIRTMLTKHNKHHPKSSIERTELPRHLGGRGIVDLSNRMSQEIEGLRKYFLSKAASSELHRVVCVADTSTPLKLHQDHLETVEHSAESKMQKLIGKPLHGRHQNEVNHDYVDISASNYWLTSGRFFPETEGFMLAIQDQVIPTRNYMKYIAKDASVADDSCRYGCATHETIQHITGGCQKFAGTEYKNRHDTVAKILHQELALKHHFLSSKKVPYYNYHPDAVLENEHHKLYWDRTVLTDRKITHNRPDLILLNKDEDRALFIDVAIPNNNNLLDRHTEKISKYRDLEEQTRRQWKLKDIKTIPIVISSTGLIPKKLLENLKKLQLDENIYKVMQKAVLLGTARTVRKYMGNSEEHRLLRQEVRVEQESNLQQGGEERPGPDQHHEPENLERAPTELNPFDI

SEQ ID NO: 6774 - protein, 1096 aa, Coccinella septempunctata
MVMRAHYIASELAQSTDRRYRQILDDIWKDICPLRPAYAQLLSNRVRWIIDNLKLSQAELNAIKMSCFPRVIAQEEVLETEIETRRSSLRRKSSGILPRDVRQEEIKEAFFKNYIKYSGMLPQERPRVPRVQYTRHTLDSVRAVNAILEQQLLGVERLEEIVDSVYAGAVTVCEVLGLEILDQPGRATPTVTPPWRKRLEQKISCMRRKIGVIYAYLNASSPSGRVLKAVRRVASEFKIKRRDPNFRDQISFRCDVLKQKIKALGGRIRRYNERVKRYKNNRLYAKDQKRFFRQLEEQKNTSEKEQLNPVRAHRFWTDVWGTEVSYDEKAYWIEDVRASLPGDQMNEVEISMEDIKGALKYSKNWAAPGVDKLQNYWWKNFTSVHNCLARLFRKALDDPTIIPEYFTLGRTFLVPKGGDSTDPENYRPITCLSSIYKILTAVLAGKISEHLKRSNMVSREQGGCRKKSKACKELLIIDHILTKQAKKKLRNISVAWIDYKKAFDSVPHAWLLKVLEMHGIPAQVVRFLGYLMKNWRTCILLEMEDGIRNCGLVNICRGIFQGDTLSPIWFCLALNPLSYLLNKSGYGYVIDKNRNIRINHQLYIDDLKLFAASRDQLRRLLELVASFTDSINMQMGVEKCATLEVRRGKIQETEENRVLMNAVSIPALGQHETYKYLGIRQALDIRMAEMKDSFKNKLYRRVNTLLKSKLNSKFLFDAINIWAIPSMTFSFGVLTWSVTDLREMDTAIRTMLTKFGMHHPHSSVIRLYLPRQQGGRGLVNLERAHGSIVSKLREYFLSQHSPFFQALRYADQNISALKLTEQSIQESTLSIDELVDKWKSKALHGRYPGHLEEKEVNKYESLTYLRAGYLFPETEARLIAIQDQVMPTRMYLKHIAKQDIPSDRCRRCSGAPESIQHLTSSCPILAPRDYLDRHNAMGKIYHQQLALKLGLLKDEIQQHLYEPKILLQSQRYKLYWDATLITDRGVAHNRPDMALFDLEKKTCLLVDFTIPADENLLRAYTEKVTKYGDLALQMREMYELRTISILPLIISVNGLVEAHLIENTERLCLDRSVISRAQKQVVLGTIRIVRKVLQGM

SEQ ID NO: 6775 - protein, 1096 aa, Coccinella septempunctata
MVMRAHYIASELAQSTDRRYRQILDDIWKDICPLRPAYAQLLSNRVRWIIDNLKLSQAELNAIKMSCFPRVIAQEEVLETEIETRRSSLRRKSSGILPRDVRQEEIKEAFFKNYIKYSGMLPQERPRVPRVQYTRHTLDSVRAVNAILEQQLLGVERLEEIVDSVYAGAVTVCEVLGLEILDQPGRATPTVTPPWRKRLEQKISCMRRKIGVIYAYLNASSPSGRVLKAVRRVASEFKIKRRDPNFRDQISFRCDVLKQKIKALGGRIRRYNERVKRYKNNRLYAKDQKRFFRQLEEQKNTSEKEQLNPVRAHRFWTDVWGTEVSYDEKAYWIEDVRASLPGDQMNEVEISMEDIKGALKYSKNWAAPGVDKLQNYWWKNFTSVHNCLARLFRKALDDPTIIPEYFTLGRTFLVPKGGDSTDPENYRPITCLSSIYKILTAVLAGKISEHLKRSNMVSREQGGCRKKSKACKELLIIDHILTKQAKKKLRNISVAWIDYKKAFDSVPHAWLLKVLEMHGIPAQVVRFLGYLMKNWRTCILLEMEDGIRNCGLVNICRGIFQGDTLSPIWFCLALNPLSYLLNKSGYGYVIDKNRNIRINHQLYIDDLKLFAASRDQLRRLLELVASFTDSINMQMGVEKCATLEVRRGKIQETEENTVLMNAVSIPALGQHETYKYLGIRQALDIRMAEMKDSFKNKLYRRVNTLLGSKLNSKFLFDAINIWAIPSMTFSFGVLTWSVTDLREMDTAIRTMLTKFGMHHPHSSVIRLYLPRQQGGRGLVNLERAHGSIVSKLREYFLSQHSPFFQALRYADQNISALKLTEQSIQESTLSIDELVDKWKSKALHGRYPGHLEEREVNKYESLTYLRAGYLFPETEARLIAIQDQVMPTRMYLKHIAKQDIPSDRCRRCSGAPESIQHLTSSCPILAPRDYLDRHNAMGKIYHQQLALKLGLLKDEIQQHLYEPKILLQSQRYKLYWDATLITDRGVAHNRPDMALFDLEKKTCLLVDFTIPADENLLRAYTEKVTKYGDLALQMREMYELRTISILPLIISVNGLVEAHLIDNTERLCLDRSVISRAQKQVVLGTIRIVRKVLQGM

SEQ ID NO: 6776 - protein, 1097 aa, Coccinella septempunctata
MVMRAHYIAWELAQSSDRTYRQILVDIWKDMYPSRPAYAQLLSNRVRWITGNKKLSEAELNSIKINCFPRVALGEEVLEPLRSEARRSSLRVRRSGLFLRDRQRDEIEEAFTRNFLKYSGIALQNRPQIPKLQYSRMALDTLSVMNALLGKQVENMETFEGVMDIVYAGAVSVCEVLGQQLSDEPGRPKPTSAPPWKKRLENKITGIRKKIGVMHAYLSSPAPSTRQVKAVRRVASEFKIKRRDPEFRDLISYRCDVLKQKIKALGSRIRRYNDRVKRYRNNQLYIKNQRQFFRDIEQQDNTQKDHRPNPRDIRQFWKNVWGKPVSYDRGAYWMGESRSSLPDDQMADVEVTTECVADALKGSRNWASPGVDKIQNYWWKHFTSVHEILARLFKKALVDPAIIPEYFTMGRTFLIFKKGDPKNPENYRPITCLPSIYKMITAVLTKKISEHLKRNNMVAREQGGCRRKTKACKELLIVDHIITKQAKKKLRNISVAWIDYKKAYDSVPHSWLLEVLRMHGIPAQVVNFLSYLMKNWRTSLLLRNDDEMRECGVVNICRGIFQGDTLSPIWFCLAMNPLSCLLRNSGYGYVIDKSRNIRVSHQLYIDDLKLYAASKDQLKRLLELVASYSDSINMQIGVEKCAVLEVRRGKIQETETNTVLMNTIAIPQLGNHESYKYLGVRQALDIKTAEMKNHFKEKLYSRVNMLLKSKLNSRSLFNAINTWAIPVMTFSFGILTWSATDLRGMDTAIRTMLTKFGMHHPHSSIIRLYLPRHQGGRGLVNLERAHGESVDDLREYFFAQNSPFFQAVREADQNISALKLNEPESRDPCVSVDELMEQWKAKALHGRYPGHLESREVNKQESLTYLRAGYLFPETEARLIAIQDQVMPTRAYLKHIAGVDIPTDRCRRCSQAPESIQHLTSSCSILAPTDYLERHNAMGRIYHQQIALKLGLISEEVQQHLYKPKILLQNQRYKLYWDATLITDRGVANNRPDIALFDKEKKTCLLVDFTVPADDNLARAYTEKVTKYGSLALQMKEIYGLENVSVLPLIISVNGLVEAHLIENTDKLCLDRSVISSAQKQVVLGTIRTVRKVLQGL

SEQ ID NO: 6777 - protein, 949 aa, Zygaena filipendulae
MSSPPRSTCPHCPSSSRLFVVPRGLNVHISHVHRDVRSQPLPQRDPPSPQGDAGRARDTRTLTGGINLDSLAAFKKNVAVLKHIPKGARNQVAGKLCSVIDGCLYTNSKEDWLALLTFAFTVLRVPDRGDPRPLTAKVKENVDRACDCLPTEVRYSPSSVIRRIESKVHDGDLRGAVRLVVSGSPPAPNSGETVAALRDKHPTPSRQLSFPPAPGLGCPLLVVREEDVMAAVGSFYNGSAGGLDGLRPEHLKELLSPSAGDNGPRLLVALTRLCNFMLRGMVNVEVCPFLYGGSLCALAKKDGGVRPIAVGGVLRRLVAKLGCRSVRNDMANLLKPHQLGFGVAQGCEAAIHATRAFALHRADEEFVILKLDVKNAFNCAERDVILSEVKENIPSLYPFLYQCYSAPSKLFYDNTAILSEVGAQQGDPLGPLIFSLAINKIIRDIRSPLNLWYLDDGTIGGPPDLVFDDVQTLFPKLRDIGLEVNSGKCEIYLPNGSSAALLPRFDALVPGIKLLDRSDFSLLGSPIFEDGVPCALNAKKQSLESIHRDLKQLSAHVALILLRGCFSMPKLTYFVRTSPSWLFPREVGSLDNLVKFTLEDLLNVSLNGEQWSQAALPVRHGGLGVRRIEGTGVAAFLSSASGVVDLVTQILCNNGDEVAIPYYEEALSAWSALCPGESLPESKCCQRAWDDVLSRVSLNSLIGSAAGKDLARLNAVSRPESGAWLHALPSPKLGTFLDDGSLRVAVALRLGCTMCEPHRCVCGARVDADGLHGLSCIRSAGRFSRHHALNDIIRRALVAAGVPSVLEPPGLCRTDGKRPDGLTMIPWERGRCLLWDATCCCTFATSHLAGSRQRAGSAAEASAKLKHDKYAALKASYSFVPVAVETAGTWGTEAVQFVAEIGRRLHQKTGDARSRTYLAQRISLAIQRGNVASIMGTFERGELRGGFFD

SEQ ID NO: 6778 - protein, 949 aa, Zygaena filipendulae
MSSPPRSTCPHCPSSSRLFVVPRGLNVHISHVHRDVRSQPLPQRDPPSPQGDAGRARDTRTLTGGINLDSLAAFKKNVAVLKHIPKGARNQVAGKLCSVIDGCLYTNSKEDWLALLTFAFTVLRVPDRGDPRPLTAKVKENVDRACDCLPTEVRYSPSSVIRRIESKVHDGDLRGAVRLVVSGSPPAPNSGETVAALRDKHPTPSRQLSFPPAPGLGCPLLVVREEDVMAAVGSFYNGLAGGLDGLRPEHLKELLSPSAGDNGPRLLVALTRLCNFMLRGMVNVEVCPFLYGGSLCALAKKDGGVRPIAVGGVLRRLVAKLGCRSVRNDMANLLKPHQLGFGVAQGCEAAIHATRAFALHRADEEFVILKLDVKNAFNCAERDVILSEVKENIPSLYPFLYQCYSAPSKLFYDNTAILSEVGAQQGDPLGPLIFSLAINKIIRDIRSPLNLWYLDDGTIGGPPDLVFDDVQTLFPKLRDIGLEVNSGKCEIYLPNGSSAALLPRFDALVPGIKLLDRSDFSLLGSPIFEDGVPCALNAKKQSLESIHRDLKQLSAHVALILLRGCFSMPKLTYFVRTSPSWLFPREVGSLDNLVKFTLEDLLNVSLNGEQWSQAALPVRHGGLGVRRIEGTGVAAFLSSASGVVDLVTQILCNNGDEVAIPYYEEALSAWSALCPGESLPESKCCQRAWDDVLSRVSLNSLIGSAAGKDLARLKAVSRPESGAWLHALPSPKLGTFLDDGSLRVAVALRLGCTMCEPHRCVCGARVDADGLHGLSCIRSAGRFSRHHALNDIIRRALVAAGVPSVLEPPGLCRTDGKRPDGLTMIPWERGRCLLWDATCCCTFATSHLAGSRQRAGSAAEASAKLKHDKYAALKASYSFVPVAVETAGTWGTEAVQFVAEIGRRLHQKTGDARSRTYLAQRISLAIQRGNVASIMGTFERGELRGGFFD

SEQ ID NO: 6779 - protein, 949 aa, Zygaena filipendulae
MSSPPRSTCPHCPSSSRLFVVPRGLNVHISHVHRDVRSQPLPQRDPPSPQGDAGRARDTRTLTGGINLDSLAAFKKNVAVLKHIPKGARNQVAGKLCSVIDGCLYTNSKEDWLALLTFAFTVLRVPDRGDPRPLTAKVKENVDRACDCLPTEVRYSPSSVIRRIESKVHDGDLRGAVRLVVSGSPPAPNSGETVAALRDKHPTPSRQLSFPPAPGLGCPLLVVREEDVMAAVGSFYNGSAGGLDGLRPEHLKELLSPSAGDNGPRLLVALTRLCNFMLRGMVNVEVCPFLYGGSLCALAKKDGGVRPIAVGGVLRRLVAKLGCRSVRNDMANLLKPHQLGFGVAQGCEAAIHATRAFALHRADEEFVILKLDVKNAFNCAERDVILSEVKENIPSLYPFLYQCYSAPSKLFYDNTAILSEVGAQQGDPLGPLIFSLAINKIIRDIRSPLNLWYLDDGTIGGPPDLVFDDVQTLFPKLRDIGLEVNSGKCEIYLPNGSSAALLPRFDALVPGIKLLDRSDFSLLGSPIFEDGVPCALNAKKQSLESIHRDLKQLSAHVALILLRGCFSMPKLTYFVRTSPSWLFPREVGSLDNLVKFTLEDLLNVSLNGEQWSQAALPVRHGGLGVRRIEGTGVAAFLSSASGVVDLVTQILCNNGDEVAIPYYEEALSAWSALCPGESLPESKCCQRAWDDVLSRVSLNSLIGSAAGKDLARLKAVSRPESGAWLHALPSPKLGTFLDDGSLRVAVALRLGCTMCEPHRCVCGARVDADGLHGLSCIRSAGRFSRHHALNDIIRRALVAAGVPSVLEPPGLCRTDGKRPDGLTMIPWERGRCLLWDATCCCTFATSHLAGSRQRAGSAAEASAKLKHDKYAALKASYSFVPVAVETAGTWGTEAVQFVAEIGRRLHQKTGDARSRTYLAQRISLAIQRGNVASIMGTFERGELRGGFFD

SEQ ID NO: 6780 - protein, 949 aa, Zygaena filipendulae
MSSPPRSTCPHCPSSSRLFVVPRGLNVHISHVHRDVRSQPLPQRDPPSPQGDAGRARDTRTLTGGINLDSLAAFKKNVAVLKHIPKGARNQVAGKLCSVIDGCLYTNSKEDWLALLTFAFTVLRVPDRGDPRPLTAKVKENVDRACDCLPTEVRYSPSSVIRRIESKVHDGDLRGAVRLVVSGSPPAPNSGETVAALRDKHPTPSRQLSFPPAPGLGCPLLVVREEDVMAAVGSFYNGSAGGLDGLRPEHLKELLSPSAGDNGPRLLVALTRLCNFMLRGMVNVEVCPFLYGGSLCALAKKDGGVRPIAVGGVLRRLVAKLGCRSVRNDMANLLKPHQLGFGVAQGCEAAIHATRAFALHRADEEFVILKLDVKNAFNCAERDVILSEVKENIPSLYPFLYQCYSAPSKLFYDNTAILSEVGAQQGDPLGPLIFSLAINKIIRDIRSPLNLWYLDDGTIGGPPDLVFDDVQTLFPKLRDIGLEVNSGKCEIYLPNGSSAALLPRFDALVPGIKLLDRSDFSLLGSPIFEDGVPCALNAKKQSLESIHRDLKQLSAHVALILLRGCFSMPKLTYFVRTSPSWLFPREVGSLDNLVKFTLEDLLNVSLNGEQWSQAALPVRHGGLGVRRIEGTGVAAFLSSASGVVDLVTQILCNNGDEVAIPYYEEALSAWSALCPGESLPESKCCQRAWDDVLSRVSLNSLIGSAAGKDLARLKAVSRPESGAWLHALPSPKLGTFLDDGSLRVAVALRLGCTMCEPHRCVCGARVDADGLHGLSCIRSAGRFSRHHALNDIIRRALVAAGVPSVLEPPGLCRTDGKRPDGLTMIPWERGRCLLWDATCCCTFATSHLAGSRQRAGSAAEASAKLKHDKYAALKASYSLVPVAVETAGTWGTEAVQFVAEIGRRLHQKTGDARSRTYLAQRISLAIQRGNVASIMGTFERGELRGGFFD

SEQ ID NO: 6781 - protein, 949 aa, Zygaena filipendulae
MSSPPRSTCPHCPSSSRLFVVPRGLNVHISHVHRDVRSQPLPQRDPPSPQGDAGRARDTRTLTGGINLDSLAAFKKNVAVLKHIPKGARNQVAGKLCSVIDGCLYTNSKEDWLALLTFAFTVLRVPDRGDPRPLTAKVKENVDRACDCLPTEVRYSPSSVIRRIESKVHDGDLRGAVRLVVSGSPPAPNSGETVAALRDKHPTPSRQLSFPPAPGLGCPLLVVREEDVMAAVGSFYNGSAGGLDGLRPEHLKELLSPSAGDNGPRLLVALTRLCNFMLRGMVNVEVCPFLYGGSLCALAKKDGGVRPIAVGGVLRRLVAKLGCRSVRNDMANLLKPHQLGFGVAQGCEAAIHATRAFALHRADEEFVILKLDVKNAFNCAERDVILSEVKENIPSLYPFLYQCYSAPSKLFYDNTAILSEVGAQQGDPLGPLIFSLAINKIIRDIRSPLNLWYLDDGTIGGPPDLVFDDVQTLFPKLRDIGLEVNSGKCEIYLPNGSSAALLPRFDALVPGIKLLDRSDFSLLGSPIFEDGVPCALNAKKQSLESIHRDLKQLSAHVALILLRGCFSMPKLTYFVRTSPSWLFPREVGSLDNLVKFTLEDLLNVSLNGEQWSQAALPVRHGGLGVRRIEGTGVAAFLSSASGVVDLVTQILCNNGDEVTIPYYEEALSAWSALCPGESLPESKCCQRAWDDVLSRVSLNSLIGSAAGKDLARLKAVSRPESGAWLHALPSPKLGTFLDDGSLRVAVALRLGCTMCEPHRCVCGARVDADGLHGLSCIRSAGRFSRHHALNDIIRRALVAAGVPSVLEPPGLCRTDGKRPDGLTMIPWERGRCLLWDATCCCTFATSHLAGSRQRAGSAAEASAKLKHDKYAALKASYSFVPVAVETAGTWGTEAVQFVAEIGRRLHQKTGDARSRTYLAQRISLAIQRGNVASIMGTFERGELRGGFFD

SEQ ID NO: 6782 - protein, 1031 aa, Armadillidium nasatum
MAEAVVDFACDFCPRRFGTKTGLGVHVQRAHKQQHDERAQAIRVDRKMRWSNEEIFLMADKEAEFELAGVRFINAELLPLFPGRSLEAIKGRRRQREYKQMVAELRARRLEIEQPVAVENQVQVEEPERENIRGRLRPRRAVAQRIVQDVALERPDSDLDESIEQPDSASDEDISWEQPVEQIDSTDEEQEVEVVEGPHLGGPLLQRQRVARPGPEQRVAEDHGDPQAEFQAFKDQLHRLGMRCRSPRRRDDRPPPQVDPRRPRNRAARKKYEYAKQQNMYKRDKAECLKYITDKGGYVERVHPARNIRDEWERYFTQNPQLGRVQDGGILMEGQDRDLLEQLDSPIRIQEVEMALKATNASTARGLDGLSLRDLEALDKQQLVEVLNGMLEWVPEELYRGRITLIPKINNPQAFGDYRPICVMPLIVRILHRILAKRLSIVKHHKFQAGFSENRSTSENVWLLNAIMGSAGSGGSSAYLALLDFQKAFDSVSHTTMVGLLYDLGLPPRLVAYISTVYARAQLTLGDGWFRQGRGVLQGDPLSPFIFNISIDYILKGLTNRIGIEYEGERINALAYADDVVLMASTRQGMNHLLSTFVERAAKLGLTLGLRKCVTSGRRWMGRQKKLVVDNVPFRLGEEELPTLQWGSVAKYLGITISPSGSTKWAGARLREALRQVAGAYLKPQQKLMLIRSYLIPKYYYAMLHQKLSLGILRSLDKTVRTALRKVLHLPEDTPVPMFHEHPGAGGLGVPELEVTIISLREKMKQRLEVKGGLWVSVAQSIALPVSARPRRRLVTDFCDGLGLAESCRQPGCHSWLRGGSLLMKGATFVDAIKIRLGVQHTREREKRGRPHDREEVLCDLGCPRVETLGHILQECPHLAAHRTSRHNAVASVLKSAFERRGWESIAEPTIPTPAGIRRPDLVAWKGSFAAVIDTSICSDANGARLNAVFHLKVRYYNTPDIKNWVLARSGATTLEVSALIMNWRGDLSPLSHRFLKRHNLTSFIALMEVRNLEGSARALRFFRAASGRWD

SEQ ID NO: 6783 - protein, 1169 aa, Schistocephalus solidus
MTLTDEFSCVLFCEKCVRQCSAAHLRSGCSGVVAGPSSGRSTPSSVSHSDGTLPPRGTPGEADGPSHTDVDSVFLQTCAGSPGVSDPEVHSNDPGPSAVGERPVSTGLFASRLPPCPGCDRILRSAAGLKLHVRSAHPELLSQINQSDVTRSAAILRTTNVSDVVQCQYCVRQFQTARGCSMHTKSAHSDEYHRSRVPLASGRRVWTPQEDNLLCSRAAALLVDGLLSLRELARKLQGAFPGRSAEAIYKRLSKLEKDELLSRNLVTVIPTPVVGSPPNSASNPPTNQPEEEESTPDYRSQLLRTAATQLEASPCQALVTEEIVSIAIDLLMGEIGIADAQQKMEAHAKKVFPHRWRPGVNRRPKMERPCTRRQLRKAQYAEVQARLAKRPKLAAQFVLSGDWRSASSEEPPRPAGTLDYWKAISETPSGKDQRPVPSVVKHWSLIDPILSTDVTRELRRMRGSAAGVDGLNVSEVSTWPPAAIAGYLNVILAVGQLPGQHCVSRTTLIPKVPIPQTPSQYRPISVSNVLPRLLNRVLALRWSRCCPSARFQFGFQERDGTAEATGLLHGMLRYAVTAPKSVAVAVLDVSKAFDSVNHETILRAATSGGAPAPLLSFLESTYSRQKTCISDTAVKCLRGVRQGDPLSPLLFSLALSEALTHSNRQLGMDIANTTVDSIAYADDLVLFAETPFRLQERLNGLVTGLSKAGMVLNPAKCLSFYIQALGKAKSSCLSPCSVCIGGEPLRVLGPTDAFTYLGVPFTYRGKQPIRHRPLLYKMLTEISQAPLKPPQRITLLKRHCVPKIMHDLVLGSVYRQTLKRLDIQIRQAVRAWLRLPTDTPTSFFYASLRDGGIGLPCLLTSVPLMKRKRLDAQLSSTEEAVRVASALPEALTALQQASRPVLIHQAVINSKEDAKKMWREQLYRSVDGRPLAHIGTSASVHHWLSSPDRLFPWLYLRGIQLRAGVLSTKARRSRRKRLSDVLCHGRCGQIETLPHILQCCQVTKEARIWRHNSIMKSITAKMRRGKADVLLEPHVPEGSSYCKPDVVVCMKGSIQVMDVAVAGEMNMDRVYTGKVNRYCTEEVANNLRAIFRKPSDYPVLHKPVIFSSRGGLLRKSELNLKSVGLTDFDVSDLCVLAIRGSLKAYDVYTRGSNDRRGRQAPAVRSNRML

SEQ ID NO: 6784 - protein, 1157 aa, Camponotus floridanus
MLSEDEEASDAGAPGLGTPVAEISAMDRETTNDGNGMNQANDLDYEIIVPLDQPTIGCRICANRGSTLEFLNVKSLSSHLEEQHPRIGAIWKCRGCSKAFGRLHGMQCHYPKCKGGVNQPKKHRCIVCSESFDTLVGLSMHERHRHPDIRNRKRKEAAERPGGKPGRVLSVWTEAEVAKLQELNDQFKNEKFPNVRIQEFLPGKTLKQISDKRRTLIKAICHHSNAEDTYKAPDENIEVNEILNMAFAADEGNIYTEMEINKNWKADLKSAIMQIKCENEEFDMLNDKLNNITEEEQLEEAIHMLQKVLLQGNESKKERDNNTSTSNKRIQEKDKKEKKDKKDNNKDKRNNINNNKNRNKKQYNHNRRAKYNYARYQELYNKCPQKLIDVAMSGEDANLQKFDLPIAEEVKNLYSSLWGSRASEVTLLDAECEQMNIENVFAPIMVQEIVERMKRIKANTAAGVDGIRKSHLRKAGALAILAKLYNLLLAFEYYPIEWKKNRTTLIPKVGKDGTDVRNWRPITIGSLLGRIFSGILDARLRTFVKQSNRQKGFTAEDGCKANINLLAGALTRMKETVGGVVTVVDISKAFDTVPHSMIKSCMMRKGVPAVVANYIRGMYEGCMTSIRARGGQEVEIGLKRGVKQGDPLSPLLFNLILDPIIEEINKNTKGIQIQEENVAVLAFADDMILIGKDKEIAKAQLRLLDIYLNGLGMGLSIEKCSTFEIRTKDKTWYLKDPQIQIRDGLIPCSKPEQIIAYLGARVTPWKGFLKGADIPTITRAINNIKRMKLKPHQKIDLIRIYLLPKFIHGLVASPPPIWMLEHIDEEVRRVIKQILHLHPSTTDGILYTSKSYGGLGIPRVENIVKLATIRSGIKMLESTDLALKEAMKELDGRYVRYATSIGLRWPATLEEVEEVRVRLKRQETERWRQLKSQGQGVAEFSRDQIGNAWLYNPALLKPSRFLDALKLRTNTFGTRIVLRRANQQLSTQCRRCEAELETLGHILGICTHTKPQRIRRHDEIKNYIAEKISKRCTVFIEPTVRVNKELKKPDLVIKDQERLLVVDVTIRYEDRDNLRDAFREKVSKYKETSEVIKAKVGCISAEVVPIVVGSRGAMPAQTRANLKKLKFTRQEMITISMIALRSSLEIANDFIDYDRIN

SEQ ID NO: 6785 - protein, 1049 aa, Leptotrombidium deliense
MSIRVHAAKCKGPTVPPPQKEFLCADCPENKAASFDTFIGLQVHRRSQHQNEFEACAAEKHTPVRARWTEGDVHYLAVAEAKYIEQHGKPPTSRALHAAVEHDMDRSYHSIVKARTRPEYAQHLIKATEELKISPYLVHSLSVPSSAPSTESQPGTEIRPQDLCNTAAENLQVMPSGKASNRVRSMECAPPSDLKRAILQLVDEVSLLGFSALPNSALDLIANKATIDDVFQSYITDHFRTDRKLDTRKRPSRSSKHKRCARKPDAGEFARTQHMFRHDRSTLLKEIQLGYKASRDYPLNLSETTVYWKNQFTATEPPNFQIPQYTENTELEHIWLQITQSELEKSLKELRGKAPGPDKLTTAALTKVPFAATLCVLNCILFSRTMPAVLKESRTTLIAKTKTPVCDPSQYRPITIASVFVRCLHKIISWRVSSCVNFAATQRGFIPDADGTFENTMILDWLLRRARSEGHNMYIALLDIRKAFDSVSWNAIVECLTNRGFPRAFIEYMISSYSNSTTKVTVNNTPGELFTISRGVKQGDPLSPFIFNLVLDDLLRTLPESYGLDLGLCRITNLAFADDTILVANSRPALQALLDQTSKFLKDKGMSLNPQKCNTVSICYDGKRKRAYCNETDFLRLNSTYIRSISPTEMFKYLGILFNTNGRLKPNIERLSEHLENLKKAKLKCNQKLVMLKYYVVPGFVHEMSLGRVTAGLLNEFDKTLRQWVKKQLQLPHWTPDSALCSPVKQGGLGLPSLRESIPPSLISRFGKAQSNGSPVFAAYAASNYGLKFNETTLKLCANPRNFVREARSLPSLKGFSSFAEYPPSTNCMLGFAPHPGGKQYRELVKLRFNLLRCRANDQRGRPDVPCRFGCYEPGTKRVYNETLPHILQKCQKTRPLIQIRHNQLLRAIEQKIGEVGHRVVHEPLIKATAPGRDFRPDLVVATEECYYILDVAVPYENEKPLSAVSHAKRRYYEQADVINWVRQHFKDDEDSSTRPVVVRGIIFGSRGSVEAETARILATLGLQQKHILDMALNTANESLRIHRYFHAC

SEQ ID NO: 6786 - protein, 974 aa, Blattella germanica
MSEIYSAGMSSLPTASGQNNSSCPYCGKYYRRLSTHITKSHPEQHRKSIVMRNTSSVSPVVQTASKDDNVSNSSANTNSDVGHLHEIRSEVMSFREKFSSLLLSDPCPSKFNEIYNDFTDTLVTINSKLPGPKNPSVRYYELRQRNKNIFAANDRKYKDSSNPQKKSKRDRAKRREKFQYELLQYQFYNERKKCVNSLLNDNKRNEPCKIPIGVLKEAMEEKWGTLNTSMLDHYNNSMSPHSQQNDLDQLFTIPVEVIQQSLNKMRTDSAPGPDRILVRTLKLTECSPVIAVILKIMLQWGMVPDRMREARTILIYKGKGERCSVSSWRPISVCSVIRRLTERALDSVLRQYLTLNNNQRGFVSQLGTSINTSLVDGCLKKAKLEQRNVSIVMLDVAQAFDSVGLDHLEKCLDSQFLPTSLCTLIKTLTRGNFTRIHNGKQISEPIELKRGVFQGSPLSPILFNLSIDFIIKELSEKQITDKYGFKISNNLDHLSVAAFADDLVVIGQNMHAARELVMMTKYLLQQIGLQLNIAKSVSINIEHGKLQDKELLLYSGYAIRGITKEEKIKYLGVSFNDEIIFDRESFITSLRNDLQILVSTPMLRPDQKLNIVNQYIWPKFIYALQMVPVHKLPLTFLEDVDKLIRSAVKEMLLLPSDVPNSMLYSAKQFRGLGLVRASWEAFLQNCNTVINLLLADNAYVNAVRPLITELQSSCKHLDMVFPSELRKSITRSFREKLRHREFEFWSNLPGKGRGVVLYSEVPKANKWIANKSGLSTSEWVSSLKMNVNVAAVRAIPGRSLDGSRCRYGCPETETLAHVQGQCDHGLLLRNARHHQVRSLIASALRKKGWEVEEEISCIATNGSTRRVDILAYSKTTRIGYIIDPTIRYEKNADQSEEVDQEKKIIYEPTIPYFKTKYDLNSLEVIGLLIGARGVIPNFFSNFLKQFDLPKTLLEDIVVIVLKRSCQILSNHLRF

SEQ ID NO: 6787 - protein, 974 aa, Blattella germanica
MSEIHSAGMSSLPTASGQNNSSCPYCGKYYRRLSTHITKSHPEQHRKSIVMRNTSSVSPVVQTASKDDNVSNSSANTNSDVGHLHEIRSEVMSFREKFSSLLLSDPCPSKFNEIYNDFTDTLVTINSKLPGPKNPSVRYYELRQRNKNIFAANDRKYKDSSNPQKKSKRDRAKRREKFQYELLQYQFYNERKKCVNSLLNDNKRNEPCNIPIGVLKEAMEEKWGTLNTSMLDHCNNSMSPHSQQNDLDQLFTIPVEVIQQSLNKMRTDSAPGPDRILVRTLKLTECSPVIAVILKIMLQWGMVPDRMREARTILIYKGKGERCSVSSWRPISVCSVIRRLIERALDSVLRQYLTLNNNQRGFVSQLGTSINTSLVDGCLKKAKLEQRNVSIVMLDVAQAFDSVGLDHLEKCLDSQFLPTSLCTLIKTLTRGNFTRIHNGKQISEPIELKRGVFQGSPLSPILFNLSIDFIIKELSEKQITDKYGFKISNNLDHLSVAAFADDLVVIGQNMHAARELVMMTKYLLQQIGLQLNIAKSVSINIEHGKLQDKELLLYSGYAIRGITKEEKIKYLGVSFNDEIIFDRESFITSLRNDLQILVSTAMLRPDQKLNIVNQYIWPKFTYALQMVPVHKLPLTFLEDVDKLIRSAGKEMLLLPSDVPNSMLYSAKQFRGLGLVRASWEAFLQNCNTVINLLLADNAYVNAVRPLITELQSSCKHLDMVFPSELRKSITRSFREKLRHREFEFWSNLPGKGRGVVLYSEVPKANKWIANKSGLSTSEWVSSLKMNVNVAAVRAIPGRSLDGSRCRYGCLETETLAHVQGQCDHGLLLRNARHHQERSLIASALRKKGWEVEEEISCIATNCSTRRVDILAYSKTTRIGYIIDPTIRYEKNADQSEEVDQEKKIIYEPTIPYFKTKYDLNSLEVIGLLIGARGVIPIFFSNFLKQFDLPKTLLEDIVVIVLKRSCQILSNHLRF

SEQ ID NO: 6788 - protein, 974 aa, Blattella germanica
MSEIHSAGMSSLPTASSQNNSSCPYCGKYYRRLSTHITKSHPEQHRKSIVMRNTSSVSPVVQTASKDDNVSNSSANTNSDVGHLHEIRSEVMSFREKFSSLLLSDPCPSKFNEIYNDFTDTLVTINSKLPGPKNPSVRYYELRQRNKNIFAANDRKYKDSSNPQKKSKRDRAKRREKFQYELLQYQFYNERKKCVNSLLNDNKRNEPCNIPIGVLKEAMEEKWGTLNTSMLDHYNNSMSPHSQQNDLDQLFTIPVEVIQQSLNKMRTDSAPGPDRILVRTLKLTECSPVIAVILKIMLQWGMVPDRMRGARTILIYKGKGERCSVSSWRPISVCSVIRRLIERALDSVLRQYLTLNNNQRGFVSQLGTSINTSLVDGCLKKAKLEQRNVSIVMLDVAQAFDSVGLDHLEKCLDSQFLPTSLCTLIKTLTRGNFTRIHNGKQISEPIELKRGVFQGSPLSPILFNLSIDFIIKELSEKQITDKYGFKISNNLDHLSVAAFADDLVVIGQNMHAARELVMMTKYLLQQIGLQLNIAKSVSINIEHGKLQDKELLLYSGYAIRGITKEEKIKYLGVSFNDEIIFDRESFITSLRNDLQILVSTPMLRPDQKLNIVNQYIWPKFIYALQMVPVHKLPLTFLEDVDKLIRSAVKEMLLLPSDVPNSMLYSAKQFRGLGLVRASWEAFLQNCNTVINLLLADNAYVNAVRPLLTELQSSCKHLDMVFPSELRKSITRSFREKLRRREFELWSNLPGKGRGVVLYSEVPKANKWIANKSGLSTSEWVSSLKMNVNVAAVRAIPGRSLDGSRCRYGCPETETLAHVQGQCDHGLLLRNARHHQVRSLIASALRKKGWEVEEEISCIATNGSTRRVDILAYSKTTRIGYIIDPTIRYEKNADQSEEVDQEKKIIYEPTIPYFKTKYDLNSLEVIGLLIGARGVIPNFFSNFLKQFDLPKTLLEDIVVIVLKRSCQILSNHLRF

SEQ ID NO: 6789 - protein, 948 aa, Dermanyssus gallinae
MLNSQADIRRWFPPAQAQSAAPAAHSTSNNPHLANQSALQRAPTGSDLARLVLKVAQIKASVKMLSCIPRSLRNSVSVELAKTIDGVSHSGTRECWERLLTFSTTVFSIPAKKEKGRTLTSVVRENLLRFQRGASITDNPHTTRRHTRTNPAADSDRCRAISAQAKLAQGDVSAAARTLLSTDTIAPLDSQTRRSLLEKHPQHPSNSSFPPAPTPTPSVSEIVVTPTEIRNAVRRFPNSSSGGPDGLRPRHLKDLIGTHEDDSNPLLQALVRFVTLAVNGRLPEFILPIFYGANLIALRKKDGGIRPIAVGFTLRRLVGKILIKKSLPSILELVAPMQLGCGIRGGAEAAVHATRGFLETRCGQEGVLVKLDFQNAFNSMRRDHLLNAVKSKVPGLFPAVYQMYRFPTNLLWQAETIHSCCGVQQGDPCGPALFCIGISDLQARLVSELRPWYLDDATLAGDSLTVIEDIKRVRAFEAESGLRLNDDKCEVFWLSQDTRTKSSTFVRKQLPNFREVTDDSLELLGAPLTEAAVEGALRKKLADTNRWCRRLKVLDAHPALYLLRHSLSTPRLMYQLRCSPAFRRRDLLHCFDEILRETLQSLLNVDLKDRSWTQAALPVSAGGLGVRRSVDIALSCYLGSLSEVKKLVVAIGAPSTDSWIADSTQAALANFRDQWDSVPEHIAQGSLDRIVVSRLQRDLENQVPDSSGKARLKACFDQISGKWLQALPSPQLGTMLDNNTLRIVSGLRLGEVVCAPHPCSLCRAPVSATGEHALSCRYSAGRHSRHFAINDVIFRALHSAHIPAVKEPVGLSQNSQLRPDGKTLTPWARGRLLVWDVTVSCTLAKSYVQNTSREVGACARLAENRKVTKYQELASQFIVQPIAIETFGPIGPESMKFIKELGRKVIAATQDPRASEYLLQRISIEVQRGNAAAVEGSLPSAAGLPEIP

SEQ ID NO: 6790 - protein, 948 aa, Dermanyssus gallinae
MLNSQADIRRWFPPAQAQSVAPAAHSTSNNPHLANQSALQRAPTGSDLARLVLKVAQIKASVKMLSCIPRSLRNSVSVELAKTIDGVSHSGTRECWERLLTFSTTVFSIPAKKEKGRTLTSVVRENLLRFQRGASITDNPHTTRRHTRTNPAADSDRCRAIRAQAKLAQGDVSAAARTLLSTDTIAPLDSQTRRSLLEKHPQHPSNSSFPPAPTPSPSVSEIVVTPTEIRNAVRRFPNSSSGGPDGLRPRHLKDLIGTHEDDSNPLLQALVRFVTLAVNGRLPEFILPIFYGANLIALRKKDGGIRPIAVGFTLRRLVGKILIKKSLPSILELVAPMQLGCGIRGGAEAAVHATRGFLETRCGQEGVLVKLDFQNAFNSMRRDHLLNAVKSKVPGLFPAVYQMYRFPTNLLWQAETIHSCCGVQQGDPCGPALFCIGISDLQARLVSELRPWYLDDATLAGDSLTVIEDIKRVRAFEAESGLRLNDDKCEVFWLSQDTRTKSSTFVRKQLPNFREVTDDSLELLDAPLTEAAVEGALRKKLADTNRWCRRLKVLDAHPALYLLRHSLSTPRLMYQLRCSPAFRRRDLLHCFDEILRETLQSLLNVDLKDRSWTQAALPVSAGGLGVRRSVDIALSCYLGSLSEVKKLVVAIGAPSTDSWIADSTQAALANFRDQWDSVPEHITQGSLDRIVVSRLQRDLENQVPDSSGKARLKACFDQISGKWLQALPSPQLGTMLDNNTLRIVSGLRLGEVVCAPHPCSLCRAPVSATGEHALSCRYSAGRHSRHFAINDVIFRALHSAHIPAVKEPVGLSQNSQLRPDGKTLTPWARGRLLVWDVTVSCTLAKSYVQNTSREVGACARLAENRKVTKYQKLASQFIVQPIAIETFGPIGPESMKFIKELGRKVIAATQDPRASEYLLQRISIEVQRGNAAAVEGSLPSAAGLPEIP

SEQ ID NO: 6791 - protein, 948 aa, Dermanyssus gallinae
MLNSQADIRRWFPPAQAQSAAPAAHSTSNNPHLANQSALQRAPTGSDLARLVLKVAQIKASVKMLSCIPRSLRNSVSVELAKTIDGVSHSGTRECWERLLTFSTTVFSIPAKKEKGRTLTSIVRENLLRFQRGASITDNPHTTRRHTRTNPAADSDRCRAISAQAKLAQGDVSAAARTLLSTDTIAPLDSQTRRSLLEKHPQHPSNSSFPPAPTPTPSVSEIVVTPTEIRNAVRRFPNSSSGGPDGLRPRHLKDLIGTHEDDSNPLLQALVRFVTLAVNGRLPEFILPIFYGANLIALRKKDGGIRPIAVGFTLRRLVGKILIKKSLPSILELVAPMQLGCGIRGGAEAAVHATRGFLKTRCGQEGVLVKLDFQNAFNSMRRDHLLNAVKSKVPGLFPAVYQMYRFPTNLLWQAETIHSCCGVQQGDPCGPALFCIGISDLQARLVSELRPWYLDDAILAGDSLTVIEDIKRVRAFEAESGLRLNDDKCEVFWLSQDTRTKSSTFVRKQLPNFREVTDDSLELLGAPLTEAAVEGALRKKLADTNRWCRRLKVLDAHPALYLLRHSLSTPRLMYQLRCSPAFRRRDLLHCFDEILRETLQSLLNVDLKDRSWTPAALPVSAGGLGVRRSVDIALSCYLGSLSEVKELVVAIGAPSTDSWIADSTQAALANFRDQWDSVPEHIAQGSLDRIVVSRLQRDLENQVPDSSGKARLKACFDQISGKWLQALPSPQLGTMLDNNTLRIVSGLRLGEVVCAPHPCSLCRAPVSATGEHALSCRYSAGRHSRHFAINDVIFRVLHSAHIPAVKEPVGLSQNSQLRPDGKTLTPWARGRLLVWDVTVSCTLAKSYVQNTSREVGACARLAENRKVTKYQELASQFIVQPIAIETFGPIGPESMKFIKELGRKVIAATQDPRASEYLLQRISIEVQRGNAAAVEGSLPSAAGLPEIP

SEQ ID NO: 6792 - protein, 948 aa, Dermanyssus gallinae
MLNSQADIRRWFPPAQAQSAAPAAHSTSNNPHLANQSALQRAPTGSDLARLVLKVAQIKASVKMLSCIPRSLRNSVSVELAKTIDGVSHSGTRECWERLLTFSTTVFSIPAKKEKGRTLTSVVRENLLRFQRGASITDNPHTTRRHTRTNPAADSDRCRAISAQAKLAQGDVSAAARTLLSTDTIAPLDSQTRRSLLEKHPQHPSNSSFPPAPTPSPSVSEIVVTPTEIRNAVRRFPNSSSGGPDGLRPRHLKDLIGTHEDDSNPLLQALVRFVTLAVNGRLPEFILPIFYGANLIALRKKDGGIRPIAVGFTIRRLVGKILIKKSLPSILELVAPMQLGCGIRGGAEAAVHATRGFLETRCGQEGVLVKLDFQNAFNSMRRDHLLNAVKSKVPGLFPAVYQMYRFPTNLLWQAETIHSCCGVQQGDPCGPALFCIGISDLQARLVSELRPWYLDDATLAGDSLTVIEDIKRVRAFEAESGLRLNDDKCEVFWLSQDTRTKSSTFVRKQLPNFREVTDDSLELLGAPLTEAAVEGALRKKLADTNRWCRRLKVLDAHPALYLLRHSLSTPRLMYQLRCSPAFRRRDLLHCFDEILRETLQSLLNVDLKDRSWTQAALPVSAGGLGVRRSVDIALSCYLGSLSEVKKLVVAIGAPSTDSWIADSTQAALANFRDQWDSVPEHIAQRSLDRIVVSRLQRDLENQVPDSSGKARLKACFDQISGKWLQALPSPQLGTMLDNNTLRIVSGLRLGEVVCAPHPCSLCRAPVSATGEHALSCRYSAGRHSRHFAINDVIFRALHSAHIPAVKEPVGLSQNSQLRPDGKTLNPWARGRLLVWDVTVSCTLAKSYVQNTSREVGACARLAENRKVTKYQELASQFIVQPIAIETFGPIGPESMKFIKELGRKVIAATQDPRATEYLLQRISIEVQRGNAAAVEGSLPSAAGLPEIP

SEQ ID NO: 6793 - protein, 948 aa, Dermanyssus gallinae
MLNSQADIRRWFPPAQAQSAAPAAHSTSNNPHLANQSALQRAPTGSDLARLVLKVAQIKASVKMLSCIPRSLRNSLSIELAKTIDGVSHSGTREYWERLLTFSTTVFSIPAKKEKGRTLTSVVRENLLRFQRGASITDNPHTTRRHTRTNPAADSDRCRAISAQAKLAQGDVSAAARTLLSTDTIAPLDSQTRRSLLEKHPQHPSNSSFPPAPTPTPSVSEIVVTPTEIRNAVRRFPNSSSGGPDGLRPRHLKDLIGTHEDDSNPLLQALVQFVTLAVNGRLPEFILPIFYGANLIALRKKDGGIRPIAVGFTLRRLVGKILIKKSLPSILELVAPMQLGCGIRGGAEAAVHATRGFLETRCGQEGVLVKLGFQNAFNSMRRDHLLNAVKSKVPGLFPAVYQMYRFPTNLLWQAETIHSCCGVQQGDPCGPALFCIGISDLQARLVSELRPWYLDDATLAGDSLTVIEDIKRVRAFEAESGLRLNDDKCEVFWLSQDTRMKSSTFVRKQLPNFREVTDDSLELLGAPLTEAAVEGALRKKLADTNRWCRRLKVLDAHPALYLLRHSLSTPRLMYQLRCSPAFRRRDLLHCFDEILRETLQSLLNVDLKDRSWTQAALPVSAGGLGVRRSVDIALSCYLGSLSEVKKLVVAIGAPSTDSWIADSTQAALANFRDQWDSVPEHIAQGSLDRIVVTRLQRDLENQVPDSSGKARLKACFDQISGKWLQALPSPQLGTMLDNNTLRIVSGLRLGEVVCAPHPCSLCRAPVSATGEHALSCRYSAGRHSRHFAINDVIFRALHSAHIPAVKKPVGLSPNSQLRPDGKTLTPWARGRLLVWDVTVSCTLAKSYVQNTSREVGACARLAENRKVTKYQELASQFIVQPIAIETFGPIRPESMKFIKELGRKVIAATQDPRASEYLLQRISIEVQRGNAAAVEGSLPSAAGLPEIP

SEQ ID NO: 6794 - protein, 948 aa, Dermanyssus gallinae
MLNSQADIRRWFPPAQAQSAAPAAHSTSNNPHLANQSALQRAPTGSDLARLVLKVAQIKASVKMLSCIPRSLRNSVSVELAKTIDGVSHSGTRDCWERLLTFSTTVFSIPAKKEKGRTLTSVVRENLLRFQRGASITDNPHTTRRHTRTNPAADSNRCRAISAQAKLAQGDVSAAARTLLSTDTIAPLDSQTRRSLLEKHPQHLSNSSFPPAPTPTPSVSEIVVTPTEIRNAVRRFPNSSSGGPDGLRPRHLKDLIGTHEDDSNPLLQALVRFVTLAVNGRLPEFILPIFYGANLIALRKKDGGMRPIAVGFTLRRLVGKILIKKSLPSILELVAPMQLGCGIRGGAEAAVHATRGFLETRCGQEGVLVKLDFQNAFNSMRRDHLLNAVKSKVPGLFPAVYQMYRFPTNLLWQAETIHSCCGVQQGDPCGPALFCIGISDLQARLVSELRPWYLDDATLAGDSLTVIEDIKQVRAFEDESGLRLNDDKCEVFWLSQDTRPKSSTFVRKQLPNFREVTDDSLELLGAPLTEAAVEGALRKKLADTNRWCRRLKVIDAHPALYLLRHSLSTPRLMYQLRCSPAFRRRDLLHCFDEILRETLQSLLNVDLKDRSWTQAALPVSAGGLGVRRSVGIALSCYLGSLSEVKKLVVAIGAPSTDSWIADSTQAALANFRDQWDSVPEHIAQGSQDRIVVSRLQRDLENQVPDSSGKARLKACFDQISGKWLQALPSPQLGTMLDNNTLRIVSGLRLGEVVCAPHPCSLCRAPVSATGEHALSCRYSAGRHSRHFAINDVIFRALHSAHIPAVKEPVGLSQNSQLRPDGKTLTPWARGRLLVWDVTVSCTLAKSYVQNTSREVGACARLAENRKVTKYQELASQFIAQPIAIETFGPIGPESMKFIKELGRKVIAATQDPRASEYLLQRISLEVQRGNAAAVEGSLPSAAGRPEIP

SEQ ID NO: 6795 - protein, 948 aa, Dermanyssus gallinae
MLNSQADIRRWFPPAQAQSAAPAAHSTSNNPHLANQSALQRAPTGSDLARLVLKVAQIKASVKMLSCIPRSLRNSVSVELAKTIDGVSHSGTRECWERLLTFSTTVFSIPAKKEKGRTLTSVVRENLLRFQRGASITDNPHTTRRHTRTNPAADSDRCRAISAQAKLAQGDVSAAARTLLSTDTIAPLDSQTRRSLLEKHPQHPSNSSFPPAPTPSPSVSEIVVTPTEIRNAVRRFPNSSSGGPDGLLPRHLKDLIGTHEDDSNPLLQALVRFVTLAVNGRLPEFILPIFYGANLIALRKKDGGIRPIAVGFTLRRLVGKILIKKSLPSILELVASMQLGCGIRGGAEAAVHATRGFLETRCGQEGVLVKLDFQNAFNSMRRDHLLNAVKSKVPGLFPAVYQMYRFPTNLLWQAETIHSCCGVQQGDPCGPALFCIGISDLQARLVSELRPWYLDDATLAGDSLTVIEDIKRVRAFEAESGLRLNDDKCEVFWLSQDTRTKSSTFVRKQLPNFREVTGDSLELLGAPLTEAAVEGALRKKLADTNRWCRRLKVLDAHPALYLLRHSLSTPRLMYQLRCSPAFRRRDLLHCFDEILRETLQSLLNVDLKDRSWTQAALPVSAGGLGVRRSVDIALSCYLGSFSEVKKLVVAIGAPSTDSWIADSTQAALANFRDQWDSVPEHIAQGSLDRIVVSRLQRDLENQVPDSSGKARLKACFDQISGKWLQALPSPQLGTMLDNNTLRIVSSLRLGEVVCAPHPCSLCRAPVSATGEHALSCRYSAGRHSRHFAINDVIFRALHSAHIPAVKEPVGLSQNSQLRPDGKTLTPWARGRLLVWDVTVSCTLAKSYVQNTSREVGACARLAENRKVTKYQELASQFIVQPIAIETFGPIGPESMKFIKELGRKVIAATQDPRASEYLLQRISIEVQRGNAAAVEGSLPSAAGLPEIP

SEQ ID NO: 6796 - protein, 948 aa, Dermanyssus gallinae
MLNSQADIRRWFPPAQAQSAAPAAHSTSNNPHLANQSALQRAPTGSDLARLVLKVAQIKASVKMLSCIPRSLRNSVSVELAKTIDGVSHSGTRECWERLLTFSTTVFSIPAKKEKGRTLTSVVRENLLRFQRGASITDNPHTTRRHTRTNPAADSDRCRAISAQAKLAQGDVSAAARTLLLTDTIAPLDSQTRRSLLEKHPQHPSNSSFPPAPTPTPSVSEIVVTPTEIRNAVRRFPNSSSGGPDGLRPRHLKDLIGTHEDDSNPLLQALVRFVTLAVNGRLPEFILPIFYGANLIALRKKDGGIRPIAVGFTLRRLVGKILIKKSLPSILELVAPMQLGCGIRGGAEAAVHATRGFLETRCGQEGVLVKLDFQNAFNSMRRDHLLNAVKSKVPGLFPAVYQMYRFPTNLLWQAETIHSCCGVQQGDPCGPAFFCIGISDLQARLVSELRPWYLDDATLAGDSLTVIEDIKRVRAFEAESGLRLNDDKCEVFWLSQDTRTKSSTFVRKQLPNFREVTDDSLELLGAPLTEAAVEGALRKKLADTSRWCRRLKVLDAHPALYLLRHSLSTPRLMYQLRCSPAFRRRDLLHCFDEILRETLQSLLNVDLKDRSWTQAALPVSAGGLGVRRSVDIALSCYLGSLSEVRKLIVAIGAPSTDSWIADSTQAALANFRDQWDSVPEHIAQGSLDRIVVSRLQRDLENQVPDSSGKARLKACVDQISGKWLQALPSPQLGTMLDNNTLRIVSGLRLGEVVCAPHPCSLCRAPVSATGEHALSCRYSAGRHSRHFAINDVIFRALHPAHIPAVKEPVGLSQNSQLRPDGKTLTPWARGRLLVWDVTVSCTLAKSYVQNTSREVGACARLAENRKVTKYQELASQFIVQPIAIETFGPIGPESMKFIKELGRKVIAATQDPRASEYLLQRISIEVQRGNAAAVEGSLPSAAGLPEIP

SEQ ID NO: 6797 - protein, 948 aa, Dermanyssus gallinae
MLNSQADIRRWFPPAQAQSAAPAAHSTSNNPHLANQSALQRASTGSDLGRLVLKVAQIKASVKMLSCIPRSLRNSVSVELAKTIDGVSHSVTRECWERLLTFSTTVFSIPAKKEKGRTLTSVVRENLLRFQRGASITDNPHTTRRHTRTNPAADSDRCRAISAQAKLAQGDVSAAARTLLSTDTIAPLDSQTRRSLLEKHPQHPSNSSFPPAPTPSPSVSEIVVTPTEIRNAVRRFPNSSSGGPDGLRPRHLKDLIGTHEDDSNPLLQALVRFVTLAVNGRLPEFILPIFYGANLIALRKKDGGIRPIAVGFTLRRLVGKILIKKSLPSILELVAPMQLGCGIRGGAEAAVHATRGFLEARCGQEGVLVKLDFQNAFNSMRRDHLLNAVKSKIPGLFPAVYQMYRFPTNLLWQAETIHSRCGVQQGDPCGPALFCIGISDLQARLVSELRPWYLDDATLAGDSLTVIEDIKRVRAFEAESGLRLNDDKCEVFWLSQDTRTKSSTFVRKQLPNFREVTGDSLELLGAPLTEAAVEGALRKKLADTNRWCRRLKVLDAHPALYLLRHSLSTPRLMYQLRCSPAFRRRDLLHCFDEILRETLQSLLNVDLKDRSWTQAALPVSTGGLGVRRSVDIALSCYLGSLSEVKKLVVAIGAPSTDSWIADSTQAALANFRDQWDSVPEHIAQGSLDRIVVSRLQRDLENQVPDSSGKARLKACFDQVSGKWLQALPSPQLGTMVDNNTLRIVSGLRLGEVVCAPHPCSLCRAPVSATGEHALSCRYSAGRHSRHFAINDVIFRALHSAHIPAVKEPVGLSQNSRLRPDGKTLTPWARGRLLVWDVTVSCTLAKSYVQNTSREVGACARLAENRKVTKYQELASQFIVQPIAIETFGPIGPESMKFIKELGRKVIAATQDPRASEYLLQRISIEVQRGNAAAVEGSLPSAAGLPEIP

SEQ ID NO: 6798 - protein, 885 aa, Dermanyssus gallinae
MLSCIPRSLRNSVSVELAKTIDGVSHSGTRNVGKGYSPFRRRCFSISAKKEKGRTLTSVVRENLLRFQRGASITDNPHTTRRHTRTNPAADSDRCRAISAQAKLAQGDVSAAARTLLSTDTIAPLDSQTRRSLLEKHPQHPSNSSFPPAPTPSPSVSEIVVTPTEIRNAVRRFPNSSSGGPDGLRPCHLKDLIGTHEDDSNPLLQALVRFVTLAVNGRLPEFILPIFYGANLIALRKKNGGIRPIAVGFTLRRLVGKILIKKSLPSILELVAPMQLGCGIRGGAEAAVHATRGFLETRCGQEGVLVKLDFQNAFNSMRRDHLLNAVKSKVPGIFPAVYQMYRFPTNLLWQAETIHSCCGVQQGDPCGPALFCIGISDLQARLVSELRPWYLDDATLAGDSLTVIEDIKRVRAFEAESGLRLNDDKCEVFWLSQDTRTKSSTFVRKQLPNFREVTDDSLELLGAPLTEAAVKGALRKKLADTNRWCRRLKVLDAHPALYLLRHSLSTPRLMYQLRCSPAFRRRDLLHCFDEILRETLQSLLNVDLKDRSWTQAALPVSAGGLGVRRSVDIALSCCLGSLSEVKKLVVAIGAPSTDSWIADSTQAALANFRDQWDSVPEHIAQGSLDRIVVSRLQRDLENQVPDSSGKARLKTCFDQISGKWLQALPSPQLGTMLDNNTLRIVSGLRLGKVVCAPHPCSLCRAPVSATGEHALSCRYSAGRHSRHFAINDVIFRALHSAHIPAVKEPVGLSQNSQLRPDGKTLTPWARGRLLVWDVTVSCTLAKSYVQNTSREVSACARLAENRKVTKCQELASQFIIQPIAIETFGPIGPESMKFIKELGRKVIAAIQDPRASEYLLQRISIEVQRGNAAAVEGSLPSAAGLPEIP

SEQ ID NO: 6799 - protein, 885 aa, Dermanyssus gallinae
MLSCIPRSLRNSVSVELAKTIDGVSHSGTRECWERLLTFSTTVFSIPAKKEKGRTLTSVVRENLLRLQRGASISDNPYTTRRHTRTNPAADSDRRRAISAQAKLAQGDVSAAARTLLSTDTIAPLDSQTRRSLLEKHPQHPSNSSFPPVPTPTPSVSEIVVTPTEIRNAVRRFPNSSSGGPDGLRPRHLKDLIGTHEDDSNPLLQALVRFVTLAVNGRLPEFILPIFYGANLIALRKKDGGIRPIAVGFRLWRLVGKILIKKSLPSILELVAPMQLGCGIKGGAEAAVHATRSFLETRCGQEGVLVKLDFQNAFNSMRRDHLLNVVKSKVPGLFPAVYQMYRFPTNLLWQAETIQSCCGVQQGDPYGPALFCIGISDLQARLVAELRPWYLDDATLAGDSLTVIEDIKRVRAFEAESGLRLNNDKCEVFWLSQDTRTKSSAFVKKQLPNFREVTDDSLELLGAPLTEAAVEGALRKKLADTNRWCRRLKALDAHPALYLLRHSLSTPRLMYQLRCSPAFRRRDLLHCFDEILRETLQSLLNVDLKDRSWTQAALPVSAGGLGVRKSVDIALSCYLGSLSEVKKLVVAIGAPSTESWIAVSTQAALANFRDQWDSVPEHITQGSLDRIVVSRLQRDLENQVPDSSGRARLKACFDQTSGKWLQALPSPQLGTMLDNNTLRIVSGLRLGEVVCAPHPCSLCRAPVSATGEHALSCRYSAGRHSRHFAINDVIFRALHSAHIPAVKEPVGLSQNSQLRPDGKTLTPWARGRLLVWDVTVSCTLAKSYVQNTSREVGAGARLAENRKVTKYQELASQFIVQPIAIETFGPFGPESMKFIKELGRKVIAATQDPRASEHLLQRISIEVQRGNAAAVEGSLPSAAGLPEIP

SEQ ID NO: 6800 - protein, 962 aa, Dermanyssus gallinae
MPDNEIPNGSEADHAFVVGDPNRATCPVCRGVFTRRGLARHISVRHADNVNRPSTSHQARAEDFDVHTLLIDIQVNMRHAKLLRILPKSVRSTVAEELTKVFLNVAKDNDLSAWFSLFSFAPVVLRLPRARKDAQSLSILIRKNLRDFASGLRLRDLTHEGSGRKMMAHLEDDLPRRVKVKLSEGDISGAARLVSSQDMLATANENTEALRSKHPDAPTDLSMPTPPAVTLPSSTSREEILSAMKTFSRSSAAGLDFIRPRLLQDLLSGALGSTAGRLADAIAKVVDVLRWGSPPSCLLPLIFGARMFALKKKDGSLRPIACSSVVRRLAAKIGCYDNREAISATLGQHQLGFATPGGTEVVVHCARAFLQSRKLPTVMVKLDFRNAFNSVRRDHLLRAVKSWAPLLFHQTNLAYGSEPSHLVMPHNTMLSQTGLQQGDPLGPPLFCLCIKELVDSLQSPLNAWYLDDGILGGDLPTVLDDIRKVIEFGAISGLTLNPVKCEVHVTAYNEVEPVDLTNLFDLLPGCRVVDKVNLELLGVPLLPEGIAKALDSRRDKLDFAASRLPRLGAHCGLFLLRSCFSATRLTHLLRGCNLFLSQELLQPFNGLSLDILEIILNLKLTAAAREQVMLPVSLGGLGVPDAVMTAGPAIVSSLTQAADRVKALLDSDGWDAYNRELQRLTDELSLLFDSPPDDRANQGNWTTPLQEKRLANLINRAPSVADKVRLRAVSSQGAGAWLHALPCPRIGTLLDDETTRISAGLRLGVDLVVPHRCRCGDFVDALAHHGLSCALSAGRRARHSALNDTFSRALRSAGFPCVLEPPGLSRDDGRRPDGLTLTPFERGRMLVWDATVTDSLAPSMVGAGADRAGHASRLAEANKCRKYSSVDYPHEFCPLAFETMGTAGPLTLKLIQRVGRSLNLSTGDSRASEFLRQRLSLDIQRGNAASVRGTLLNWANPGLENP

SEQ ID NO: 6801 - protein, 957 aa, Dermanyssus gallinae
MPDNENSKDTFVVGDPNRATCPVCRAVFTRRGLARHISVRHADAVNRPSTSHQAVAEEFDVNTLLTDIQANMRHAKLIRILPKSVRPTVAEELTKVFLNVAKDNDLFAWYSLFSFVPVVLRLPRARKDAQSLSVLVRKNLRDFTSGLRLKDLTHEESGRKVMAHRDDDLPRRVRVKLSEGDISGAARLVSSQDTLASDNENTEALRSKHPDAPLDLSMPTPPAVTLPSSTSREEILSAMKTFSRSSAAGLDFIRPRLLQDLLSGALGSTASRLADAIAKVVDVLRWGSPPSSLLPLIFGARMFALKKKDGSLRPIACSSVVRRLAAKIGCYDNKVAISATLGQHQLGFATPGGTEVVVHCARAFLQSRKMPTVMVKLDFRNAFNSVRRDHLLRAVKSWAPLLFHQTNLAYGSGPSHLVMPQSIMPSQTGLQQGDPLGPPLFCLCIKELVDSLQSPLNAWYLDDGILGGDLPTVLDDIRKVIDFSVISGLTLNPVKCEVYVTAPKEFEPLDLTDLFNLLPGCRVVDKVNLELLGVPLLPDGIAKALDSQKDKLDFATGRLPQLGAHCGLFLLRSCFSATRLTHLLRGSNLFLSPELLQPFNGLSLDILEIILNLKLTDAAREQVMLPVSLGGLGIPDAVMMAGPAIVASLTQAADRVKSLLDSDGWDAYNVELKKLTEELSLLFDSPPEDRANQGSWTAPLHEKRLAGLINRAPSVADRARLRAVSSQGAGAWLQALPCPRIGTLLDDETTRISAGLRLGVDLGVPHRCRCGDFVDALAHHGLSCALSAGRRARHSALNDTFSRALRSAGFPCVLEPPGLSRDDGKRPDGLTLTPFERGRMLVWDATVTDSLAPSMVGAGADRAGHASRLAEANKCRKYSNVDYPHEFCPLAFETMGAAGPLTLKLIQRVGKSLNLSTGDSRASEFLRQRLSLDIQRGNAASVRGTLLNWANPGLESP

SEQ ID NO: 6802 - protein, 962 aa, Dermanyssus gallinae
MPDNEIPNGSEADHAFVVGDPNRATCPVCRGVFTRRGLARHISVRHADAVNRPSTSHQARAEDFDVNTLLSDIQANMRHAKLLRILPKSVRSTVAEELTKVFLNVAKDNDLSAWYSLFSFAPVVLRLPRARKDAQSLSVLIRKNLRDFSSGLRLRDLTHEGSGRKMMAHLEDDLPRRVKVKLSEGDISGAARLVSSQDMLATANENTEALRSKHPDAPTDLSMPTPPAVTLPSSTSREEVLSAMKTFSRSSAAGLDFIRPRLLQDLLSGALGSTAGRLADAIAKVVDVLRWGSPPSCLLPLIFGARMFALKKKDGSLRPIACSSVVRRLAAKIGCYDNREAISATLGQHQLGFATPGGTEVVVHCARAFLQSRKLPTVMVKLDFRNAFNSVRRDHLLRAVKSWAPLLFHHTNLAYGLEPSHLVMPHNAMLSQTGLQQGDPLGPPLFCLCIKELVDSLQSPLNAWYLDDGILGGDLPTVLDDIRKVIEFSAISGLTLNPVKCEVYVTAHNEVEPLDLTNLFDLLPGCRVVDKVNLELLGVPLLPEGIAKALDSRRDKLDFAASRLPQLGAHCGLFLLRSCFSATRLTHLLRGCNLFLSQELLQPFNGLSLDILEIILNLKLTAAAREQVMLPVSLGGLGVPDAVMTAGPAIVSSLTQAADRVKALLDSDGWDAYNGELQRLTDELSLLFDSPPDDRANQGNWTTPLQEKRLANLINRAPSVADKARLRAVSSQGAGAWLHALPCPRIGTLLDDETTRISAGLRLGVDLVVPHRCRCGDFVDALAHHGLSCALSAGRRARHSALNDTFSRALRSAGFPCVLEPPGLSRDDGKRPDGLTLTPFERGRMLVWDATVTDSLAPSMVGAGADRAGHASRLAEANKCRKYSSVDYPHEFCPLAFETMGTAGPLTLKLIQRVGRSLNLSTGDSRASEFLRQRLSLDIQRGNAASVRGTLLNWANPGLENP

SEQ ID NO: 6803 - protein, 957 aa, Dermanyssus gallinae
MPDNENSNDTFVVGDPNRATCPVCRAVFTRRGLARHISVRHADAVNRPSTSHQAVAEEFDVNTLLTDIQANMRHAKLIRILPKSVRPTVAEELTKVFLNVAKDNDLFAWYSLFSFVPVVLRLPRARKDAQSLSVLVRKNLRDFTSGLRLKDLTHEESGRKVMAHRDDDLPRRVRVKLSEGDISGAARLVSSQDTLASDNENTEALRSKHPDAPLDLSMPTPPAVTLPSSTSREEILSAMKTFSRSSAAGLDFIRPRLLQDLLSGALGSTASRLADAIAKVVDVLRWGSPPSSLLPLIFGARMFALKKKDGSLRPIACSSVVRRLAAKIGCYDNKVAISATLGQHQLGFATPGGTEVVVHCARAFLQSRKMPTVMVKLDFRNAFNSVRRDHLLRAVKSWAPLLFHQTNLAYGSGPSHLVMPQSIMPSQTGLQQGDPLGPPLFCLCIKELVDSLQSPLNAWYLDDGILGGDLPTVLDDIRKVIDFSVISGLTLNPVKCEVYVTAPKEFEPLDLTDLFNLLPGCRVVDKVNLELLGVPLLPDGIAKALDSQKDKLDFATGRLPQLGAHCGLFLLRSCFSATRLTHLLRGSNLFLSPELLQPFNGLSLDILEIILNLKLTDAAREQVMLPVSLGGLGIPDAVMMAGPAIVASLTQAADRVKSLLDSDGWDAYNVELKKLTEELSLLFDSPPEDRANQGSWTAPLHEKRLAGLINRAPSVADRARLRAVSSQGAGAWLQALPCPRIGTLLDDETTRISAGLRLGVDLVVPHRCRCGDFVDALAHHGLSCALSAGRRARHSALNDTFSRALRSAGFPCVLEPPGLSRDDGKRPDGLTLTPFERGRMLVWDATVTDSLAPSMVGAGADRAGHASRLAEANKCRKYSNVDYPHEFCPLAFETMGAAGPLTLKLIQRVGKSLNLSTGDSRASEFLRQRLSLDIQRGNAASVRGTLLNWANPGLENP

SEQ ID NO: 6804 - protein, 957 aa, Dermanyssus gallinae
MPDNENSNDTFVVGDPNRATCPVCRAVFTRRGLARHISVRHADAVNRPSTSHQAVAEEFDVNTLLTDIQANMRHAKLIRILPKSVRPTVAEELTKVFLNVAKDNDLFAWYSLFSFVPVVLRLPRARKDAQSLSVLVRKNLRDFTSGLRLKDLTHEESGRKVMAHRDDDLPRRVRVKLSEGDISGAARLVSSQDTLASDNENTEALRSKHPDAPLDLSMPTPPAVTLPSSTSREEILSAMKTFSRSSAAGLDFIRPRLLQDLLSGALGSTASRLADAIAKVVDVLRWGSPPSSLLPLIFGARMFALKKKDGSLRPIACSSVVRRLAAKIGCYDNKVAISATLGQHQLGFATPGGTEVVVHCARAFLQSRKMPTVMVKLDFRNAFNSVRRDHLLRAVKSWAPLLFHQTNLAYGSGPSHLVMPQSIMPSQTGLQQGDPLGPPLFCLCIKELVDSLQSPLNAWYLDDGILGGDLPTVLDDIRKVIDFSVISGLTLNPVKCEVYVTALKEFEPLDLTDLFNLLPGCRVVDKVNLELLGVPLLPDGIAKALDSQKDKLDFATGRLPQLGAHCGLFLLRSCFLATRLTHLLRGSNLFLSPELLQPFNGLSLDILEIILNLKLTDAAREQVMLPVSLGGLGIPDAVMMAGPAIVASLTQAADRVKSLLDSDGWDAYNVELKKLTEELSLLFDSPPEDRANQGSWTAPLHEKRLAGLINRAPSVADRARLRAVSSQGAGAWLQALPCPRIGTLLDDETTRISAGLRLGVDLVVPHRCRCGDFVDALAHHGLSCALSAGRRARHSALNDTFSRALRSAGFPCVLEPPGLSRDDGKRPDGLTLTPFESGRMLVWDATVTDSLAPSMVGAGADRAGHASRLAEANKCRKYSNVDYPHEFCPLAFETMGAAGPLTLKLIQRVGKSLNLSTGDSRASEFLRQRLSLDIQRGNAASVRGTLLNWANPGLENP

SEQ ID NO: 6805 - protein, 957 aa, Dermanyssus gallinae
MPDNENSNDTFVVGDPNRATCPVCRVVFTRRGLARHISVRHADAVNRPSTSHQAVAEEFDVNTLLTDIQANMRHAKLIRILPKSVRPTVAEELTKVFLNVAKDNDLFAWYSLFSFVPVVLRLPRARKDAQSLSALVRKNLRDFTSGLRLKDLTHEESGRKVMAHRDDDLPRRVRVKLSEGDISGAARLVSSQDTLASDNENTEALRSKHPDAPLDLSMPTPPAVTLPSSTSREEILSAMKTFSRSSAAGLDFIRPRLLQDLLSGALGSTASRLADAIAKVVDVLRWGSAPSSLLPLIFGARMFALKNKDGSLRPIACSSVVRRLAAKIGCYDNKVAISATLGQHQLGFATPGGTEVVVHCARAFLQSRKMPTVMVKLDFRNAFNSVRRDHLLRAVKSWAPLLFHQTNLAYGSGPSHLVMPQSIMPSQTGLQQGDPLGPPLFCLCIKELVDSLQSPLNAWYLDDGILGGDLPTVLDDIRKVIDFSVISGLTLNPVKCEVYVTAPKEFEPLDLTDLFNLLPGCRVVDKVNLELLGVPLLPDGIAKALDSQKDKLDFATGRLPQLGAHCGLFLLRSCFSATRLTHLLRSSNLFLSPELLQPFNGLSLDIIEIILNLKLTDAAREQVMLPVSLGGLGIPDAVMMAGPAIVASLTQAADRVKSLLDSDGWDAYNVELKKLTEELSLLFDSPPEDRANQGSWTAPLHEKRLAGLINRAPSVADRARLRVVSSQGAGAWLQALPCPQIGTLLDDETTRISAGLRLGVDLVVPHRCRCGDFVDALAHHGLSCALSAGRRARHSALNDTFSRALRSAGFPCVLEPPGLSRDDGKRPDGLTLTPFERGRMLVWDATVTDSLAPSMVGAGADRAGHASRLAEANKCRKYSNVDYPHEFCPLAFETMGAAGPLTLKLIQRVGKSLNLSTGDSRASEFLRQRLSLDIQRGNAASVRGTLLNWANPGLENP

SEQ ID NO: 6806 - protein, 962 aa, Dermanyssus gallinae
MPDNENPNGREADHAFVVGDPNRATCPVCRGIFTRRGLARHISVKHADAVNGPSTSHQALAEDLDVNTLLIDIQANMRHAKLLRILPKSVRSTVAEELTKVFLNVAKDNDLFAWYSLFSFAPVVLRLPRARKDAQSLSVLVRKNLRDFSSGLRLRDLTHEGSGRKVIAHLDNDLPRRVKVKLSEGDISGAARLVSSQDILAPANENTEALRSKHPDAPTDLSMPTPPAVTLPSSTSREEILSAMKTFSRSSAAGLDFIRPRLLQDLLSGALGSTAGRLADAIAKVVDVLRWGSPPSCLLPLIFGARMFALKKKDGSLRPIACSSVIRRLAAKIGCYDNRDTISAALGQHQLGFATPGGTEVVVHCARAFLQSRKVPTVMVKLDFRNAFNSVRRDHLLRAVKSWAPVLFHQTNLAYGSEPSHLVMPHSTMLSQTGLQQGDPLGPPLFCLCIKELVDSLQSPLNAWYLDDGVLGGDLPTVLDDIRKVIEFGAISNLTLNPIKCEVYVTTHNEVEPLDLTNLFDLLPGCRGVDKVNLELLGVPLLPEGIAKALDSRKDKLDFAAGRLPQLGAHCGLFLLRSCFSATRLTHLLRGCNLFLSRELLQPFNGLSLDILEIILNLKLTAEAREHVMLPVYLGGLGVPDAVITAGPAIVSSLTQAAERVRALLDNDGWEAYSVELQELTDRLSSLFDSPPVERNKQNSWTAPLQEKRLASLIDRAPTLADKARLRAVSSEGAGAWLHALPCPRIGTLLDDETTRISTGLRLGVDLVVPHRCRCGYFVDALAHHGLSCALSAGRRARHSALNDTFSRALRSAGFPCILEPPGLSRDDGKRPDGLTLTPFERGRMLVWDATVTDSLAPSMVGAGADQAGHASRLAEANKCRKYSGVGYPHQFCPLAFETMGGPGPLTLKLIQRVGRNLNLSTGDSRASEFLRQRLSLDIQRGNAASVRGTLLNWANPGLENP

SEQ ID NO: 6807 - protein, 956 aa, Dermanyssus gallinae
MPDNENSNDTFVVGDPNRATCPVCRAVFTRRGLARHISVRHADAVNRPSTSHQAVAEEFDVNTLLTDIQANMRHAKLIRILPKSVRPTVAEELTKVFLNVAKDNDLFAWYSLFSFVPVVLRLPRARKDAQSLSVLVRKNLRDFTSGLRLKDLTHEESGRKVMAHRDDDLPRRVRVKSEGDISGAARLVSSQDTLASDNENTEALRSKHPDAPLDLSMPTPPAVTLPSSTSREEILSAMKTFSRSSAAGLDFIRPRLLQDLLSGALGSTASRLADAIAKVVDVLRWGSPPSSLLPLIFGARMFALKKKDGSLRPIACSSVVRRLAAKIGCYDNKVAISATLGQHQLGFATPGGTEVVVHCARAFLQSRKMPTVMVKLDFRNAFNSVRRDHLLRAVKSWAPLLFHQTNLAYGSGPSHLVMPQSIMPSQTGLQQGDPLGPPLFCLCIKELVDSLQSPLNAWYLDDGILGGDLPTVLDDIRKVIDFSVISGLTLNPVKCEVYVTAPKEFEPLDLTDLFNLLPGCRVVDKVNLELLGVPLLPDGIAKALDSQKDKLDFATGRLPQLGAHCGLFLLRSCFSATRLTHLLRGSNLFLSPELLQPFNGLSLDILEIILNLKLTDAAREQVMLPVSLGGLGIPDAVMMAGPAIVASLTQAADRVKSLLDSDGWDAYNVELKKLTEELSLLFDSPPEDRANQGSWTAPLHEKRLAGLINRAPSVADRARLRAVSSQGAGAWLQALPCPRIGTLLDDETTRISAGLRLGVDLVVPHRCRCGDFVDALAHHGLSCALSAGRRARHSALNDTFSRALRSAGFPCVLEPPGLSRDDGKRPDGLTLTPFERGRMLVWDATVTDSLAPSMVGAGADRAGHASRLAEANKCRKYSNVDYPHEFCPLAFETMGAAGPLTLKLIQRVGKSLNLSTGDSRASEFLRQRLSLDIQRGNAASVRGTLLNWANPGLENP

SEQ ID NO: 6808 - protein, 962 aa, Dermanyssus gallinae
MPDNEIPNGSEADHAFVVGDPNRATCPVCRGVFTRRGLAKHISVRHADAVNRPSTSHQARAEDFDVNTLLSDIQANMRHAKLLRILPKSVRSTVAEELTKVFLNVAKDNDLSAWYSLFSFAPVVLRLPRARKDAQSLSVLIRKNLRDFSSGLRLRDLTHEGSGRKMMAHLEDDLPRRVKVKLSEGDISGAARLVSSQDMLATANENTEALRSKHPDAPTDLSMPTPPAVTLPSSTSREEVLSAMKTFSRSSAAGLDFIRPRLLQDLLSGALGSTAGRLADAIAKVVDVLRWGSPPSCLLPLIFGARMFALKKKDGSLRPIACSSVVRRLAAKIGCYDNREAISATLGQHQLGFATPGGTEVVVHCARAFLQSRKLPTVMVKLDFRNAFNSVRRDHLLRAVKSWAPLLFHHANLAYGLEPSHLVMPHNAMLSQTGLQQGDPLGPPLFCLCIKELVDSLQSPLNAWYLDDGILGGDLPTVLDDIRKVIEFSAISGLTLNPVKCEVYVTAHNEVEPLDLTNLFDLLPGCRVVDKVNLELLGVPLLPEGIAKALDSRRDKLDFAASRLPQLGAHCGLFLLRSCFSATRLTHLLRGCNLFLSQELLQPFNGLSLDILEIILNLKLTAAAREQVMLPVSLGGLGVPDAVMTAGPAIVSSLTQAADRVKALLDSDGWDAYNGELQRLTDELSLLFDSPPDDRANQGNWTTPLQEKRLANLINRAPSVADKARLRAVSSQGAGAWLHALPCPQIGTLLDDETTRISAGLRLGVDLVVPHRCRCGDFVDALAHHGLSCALSAGRRARHSALNDTFSRALRSAGFPCVLEPPGLSRDDGKRPDGLTLTPFERGRMLVWDATVTDSLAPSMVGAGADRAGHASRLAEANKCRKYSSVDYPHEFCPLAFETMGTAGPLTLKLIQRVGRSLNLSTGDSRASEFLRQRLSLDIQRGNAASVRGTLLNWANPGLENP

SEQ ID NO: 6809 - protein, 949 aa, Dermanyssus gallinae
MVLLSVTPTGQHVLCVEVSSRGGVSPDIYRSDTPMPSTGRPHPTRLGQKTLMLNTLLSDIQANMRHAKLLRILPKSVRSTVAEELTKVFLNVAKDNDLSAWYSLFSFAPVVLRLPRARKDAQSLSVLIRKNLRDFSSGLRLRDLTHEGSGRKMMAHLEDDLPRRVKVKLSEGDISGAARLVSSQDMLATANENTEALRSKHPDAPTDLSMPTPPAVTLPSSTSREEVLSAMKTFSRSSAAGLDFIRPRLLQDLLSGALGSTAGRLADAIAKVVDVLRWGSPPSCLLPLIFGARMFALKKKDGSLRPIACSSVVRRLAAKIGCYDNREAISATLGQHQLGFATPGGTEVVVHCARAFLQSRKLPTVMVKLDFRNAFNSVRRDHLLRAVKSWAPLLFHHTNLAYGLEPSHLVMPHNAMLSQTGLQQGDPLGPPLFCLCIKELVDSLQSPLNAWYLDDGILGGDLPTVLDDIRKVIEFSAISGLTLNPVKCEVYVTAHNEVEPLDLTNLFDLLPGCRVVDKVHLELLGVPLLPEGIAKALDSRRDKLDFAASRLPQLGAHCGLFLLRSCFSATRLTHLLRGCNLFLSQELLQPFNGLSLDILEIILNLKLTAAAREQVMLPVSLGGLGVPDAVMTAGPAIVSSLTLAADRVKALLDSDGWDAYNGELQRLTDKLSLLFDSPPDDRANQGKWTTPLQEKRLANLINRAPSVADKARLRAVSSQGAGAWLHALPCPRIGTLLDDETTRISAGLRLGVDLVVPHRCRCGDFVDALAHHGLSCALSAGRRARHSALNDTFSRALRSAGFPCVLEPPGLSRDDGKRPDGLTLTPFERGRMLVWDATVTDSLAPSMVGAGADRAGHASRLAEANKCRKYSSVDYPHEFCPLAFETMGTAGPLTLKLIQRVGRSLNLSTGDSRASEFLRQRLSLDIQRGNAASVRGTLLNWANPGLENP

SEQ ID NO: 6810 - protein, 962 aa, Dermanyssus gallinae
MPDNEIPNGSEADHAFVVGDPNRATCPVCRGVFTRRGLARHISVRHADAVNRPSTSHQARAEDFDVNTLLSDIQANMRHAKLLRILPKSVRSTVAEELTKVFLNVAKDNDLSAWYSLFSFAPVVLRLPRARKDAQSLSVLIRKNLRDFSSGLRLRDLTHEGSGRKMMAHLEDDLPRRVKVKLSEGDISGAARLVSSQDMLATANENTEALRSKHPDAPTDLSMPTPPAVTLPSSTSREEVLSAMKTFSRSSAAGLDFIRPRLLQDLLSGALGSTAGRLADAIAKVVDVLRWGSPPSCLLPLIFGARMFALKKKDGSIRPIACSSVVRRLAAKIGCYDNREAISATLGQHQLGFATPGGTEVVVHCARAFLQSRKLPTVVVKLDFRNAFNSVRRDHLLRAVKSWAPLLFHHTNLAYGLEPSHLVMPHNAMLSQTGLQQGDPLGPPLFCLCIKELVDSLQSPLNAWYLDDGILGRDLPTVLDDIRKVIEFSAISGLTLNPVKCEVYVTAHNEVEPLDLTNLFDLLPGCRVVDKVNLELLGVPLLPEGIAKALDSRRDKLDFAASRLPQLGAHCGLFLLRSCFSATRLTHLLRGCNLFLSQELLQPFNGLSLDILEIILNLKLTAAAREQVMLPVSLGGLGVPDAVMTAGPAIVSSLTQAADRVKALLDSDGWDAYNGELQRLTDELSLLFDSPPDDRANQGNWTTPLQEKRLANLINRAPSVADKARLRAVSSQGAGAWLHALPCPRIGTLLDDETTRISAGLRLGVDLVVPHRCRCGDFVDALAHHGLSCALSAGRRARHSALNDTFSRALRSAGFPCVLEPPGLSRDDGKRPDGLTLTPFERGRMLVWDATVTDSLAPSMVGAGADRAGHASRLAEANKCRKYSSVDYPHEFCPLAFETMGTAGPLTLKLIQRVGRSLNLSTGDSRASEFLRQRLSLDIQRGNAASVRGTLLNWANPGLENP

SEQ ID NO: 6811 - protein, 957 aa, Dermanyssus gallinae
MPDNENSNNTFVVGDPNRATCPVCRAVFTRRGLARHISVRHADAVNRPSTSHQALAEEFDVNTLLTDIQANMRHAKLLRILPKSVRPTVAEELTKVFLNVAKDNDLFAWYSLFSFVPVVLRLPRARKDAQSLSVLVRKNLRDFTSGLRLKDLTHEESGRKVMAHRDDDLPRRVRVKLSEGDISGAARLVSSQDTLASANENTEALRSKHPDAPLDLSMPTPPAVALPSSTSCEEILSAMKTFSRNSAAGLDFIRPRLLQDLLSGALGSTASRLADAIAKMVDVLRWGSPPASLLPLIFGARMFALKKKDGSLRPIACSSVVRRLAAKIGCYDNKEAISATLGQHQLGFAAPGGTEVVVHCARAFLQSRKMPTVMVKLDFRNTFNSVRRDHLLRAVKSWAPLLFHQTNLAYGSGPSHLVMPQSVMASQTGLQQGDPLGPPLFCLFIKELVVSLQSSLNAWYLDDGILGGDLPTVLDDIRKVHDFSAISGLTLNPAKCEVYVTAPKEFEPLDLSNLLNLLPGCRVVDKVDLELLGVPLLPDGIAKALDSQRDKLDFATGRLPQLGAHFGLFLLRSCFSATRLTHLLKGSNLFLSPELLQPFNGLSLDILEIIINLKLTDAAREQVMLLVSLGGLGVPDAVMMAGPAIVASLTQAADRVRTLLDSDGWDAYNVELQKLTEELSLLFDSPPEDRSNQGSWTAPLHEKRLAGLINRAPSAADRARLRAVSSQGAGAWLQALPCPRIGTLLDDETTRISAGLRLGVDLVVPHRCRCGDFVDALAHHGLSCALSAGRRARHSALNDTFSRALRSAGFPCVLEPPGLSRDDGKRPEGLTLTPFKRGRMLVWDATVTDSLAPSMVGAGADRAGYASRLAEANKCRKYSSVDYPHEFCPLAFETMGAAGPLTLKLIQRVGKSLNLSTEDSRASEFLRQRLSLDIQRGNAASVRGTLLNWANPGLENP

SEQ ID NO: 6812 - protein, 962 aa, Dermanyssus gallinae
MPDNENPNGREADHAFVVGDPNRATCPVCRGIFTRRGLARHISVKHADAVNGPSTSHQALAEDLDVNTLLIDIQANMRHAKLLRILPKSVRSTVAEELTKVFLNVAKDNDLFAWYSLFSFAPVVLRLPRARKDAQSLSVLVRKNLRDFSSGLRLRDLTHEGSGRKVIAHLDNDLPRRVKVKLSEGDISGAARLVSSQDILAPANENTEALRSKHPDAPTDLSMPTPPAVTLPSSTSREEILSAMKTFSRSSAAGLDFIRPRLLQDLLSGALGSTAGRLADAIAKVVDVLRWGSPPSCLLPLIFGARMFALKKKDGSLRPIACSSVIRRLAAKIGCYDNRDTISAALGQHQLGFATPGGTEVVVHCARAFLQSRKVPTVMVKLDFRNAFNSVRRDHLLRAVKSWAPVLFHQTNLAYGLEPSHLVMPHSTMLSQTGLQQGDPLGPPLFCLCIKELVDSLQSPLNAWYLDDGVLGGDLPTVLDDIRKVIEFGAISNLTLNPIKCEVYVTTHNEVEPLDLTNLFDLLPGCRVVDKVNLELLGVPLLPEGIAKALDSRKDKLDFAAGRLPQLGAHCGLFLLRSCFSATRLTHLLRGCNLFLSRELLQPFNGLSLDILEIILNLKLTAEAREQVMLPVYLGGLGVPDAVITAGPAIVSSLTQAAERVRALLDNDGWEAYSVELQELTDQLSSLFDSPPVERNKQNSWTAPLQEKRLASLIDRAPTLADKARLRAVSSEGAGAWLHALPCPRIGTLLDDETTRISTGLRLGVDLVVPHRCRCGYLVDALAHHGLSCALSAGRRARHSALNDTFSRALRSAGFPCILEPPGLSRDDGKRPDGLTLTPFERGRMLVWDATVTDSLAPSMVGAGADQAGHASRLAEANKCRKYSGVGYPHQFCPLAFETMGGPGPLTLKLIQRVGRNLNLSTGDSRASEFLRQRLSLDIQRGNAASVRGTLLNWANPGLENP

SEQ ID NO: 6813 - protein, 886 aa, Dermanyssus gallinae
MRHAKLLRILPKSVRSTVAEELTKVFLNVAKDNDLFAWYSLFSFAPVVLRLPRARKDAQSLSVLVRKNLRDFSSGLRLRDLTHEGSGRKVIAHLDNDLPRRVKVKLSEGDISGAARLVSSQDILAPANENTEALRSKHPDAPTDLSMPTPPAVTLPSSTSREEILSAMKTFSRSSAAGLDFIRPRLLQDLLSGALGSTAGRLADAIAKVVDVLRWGSPPSCLLPLIFGARMFALKKKDGSLRPIACSSVIRRLAAKISCYDNRDTISAALGQHQLGFATPGGTEVVVHCARAFLQSRKVPTVMVKLDFRNAFNSVRRDHLLRAVKSWAPVLFHQTNLAYGSEPSHLVMPHSTMLSQTGLQQGDPLGPPLFCLCIKELVDSLQSPLNAWYLDDGVLGGDLPTVLDDIRKVIEFGAISNLTLNPIKCEVYVTTHNEVEPLDLTNLFDLLPGCRVVDKVNLELLGVPLLPEGIAKALDSRKDKLDFAAGRLPQLGAHCGLFLLRSCFSATRLTHLLRGCNLFVSRELLQPFNGLSLDILEIILNLKLTAEAREQVMLPVYLGGLGVPDAVITAGPAIVSSLTQAAERVRALLDNDGWEAYSVELQELTDQLSSLFDSPPVERNKQNSWTAPLQEKRLASLIDRAPTLADKARLRAVSSEGAGAWLHALPCPRIGTLLDDETTRISTGLRLGVDLVVPHRCRCGYLVDALAHHGLSCALSAGRRARHSALNDTFSRALRSAGFPCILEPPGLSRDDGKRPDGLTLTPFERGRMLVWDATVTDSLAPSMVGAGADQAGHASRLAEANKCRKYSGVGYPHQFCPLAFETMGGPGPLTLKLIQRVGRNLNLSTGDSRASEFLRQRLSLDIQRGNAASVRGTLLNWANPGLENP

SEQ ID NO: 6814 - protein, 957 aa, Dermanyssus gallinae
MPDNENSNDTFVVGDPNRATCPVCRAVFTRRGLARHISVRHADAANRPSTSHQAVAEEFDVNTLLTDIQANMRHAKLIRILPKSVRPTVAEELTKVFLNVAKDNDLFAWYSLFSFVPVVLRLPRARKDAQSLSVLVRKNLRDFTSGLRLKDLTHEESGRKVMAHRDDDLPRRVRVKLSEGDISGAARLVSSQDTLASDNENTEALRSKHPDAPLDLSMPTPPAVTLPSSTSREEILSAMKTFSRSSAAGLDFIRPRLLQDLLSGALGSTASRLADAIAKVVDVLRWGSPPSSLLPLIFGARMFALKKKDGSLRPIACSSVVRRLAAKIGCYDNKVAISATLGQHQLGFATPGGTEVVVHCARAFLQSRKMPTVMVKLDFRNAFNSVRRDHLLRAVKSWAPLLFHQTNLAYGSGPSHLVMPQSIMPSQTGLQQGDPLGPPLFCLCIKELVDSLQSPLNAWYLDDGILGGDLPTVLDDIRKVIDFSVISGLTLNPVKCEVYVTAPKEFEPLDLTGLFNLLPGCRVVDKVNLELLGVPLLPDGIAKALDSQKDKLDFATGRLPQLGAHCGLFLLRSCFSATRLTHLLRGSNLFLSPELLQPFNGLSLDILETILNLKLTDAAREQVMLPVSLGGLGIPDAVMMAGPAIVASLTQAADRVKSLLDSDGWDAYNVELKKLTEELSLLFDSPPEDRANQGSWTAPLHEKRLAGLINRAPSVADRARLRAVSSQGAGAWLQALPCPRIGTLLDDETTRISAGLRLGVDLVVPHRCRCGDFVDALAHHGLSCALSAGRRARHSALNDTFSRALRSAGFPCILEPPGLSRDDGKRPDGLTLTPFERGRMLVWDATVTDSLAPSMVGAGADRAGHASRLAEANKCRKYSNVDYPHEFCPLAFETMGAAGPLTLKLIQRVGKSLNISTGDSRASEFLRQRLSLDIQRGNAASVRGTLLNWANPGLENP

SEQ ID NO: 6815 - protein, 962 aa, Dermanyssus gallinae
MPDNEIPNGSEADHAFVVGDPNRATCPVCRGVFTRRGLARHISVRHADAVNRPSTSHQARAEDFDVNTLLSDIQANMRHAKLLRILPKSVRSTVAEELTKVFLNVAKDNDLSAWYSLFSFAPVVLRLPRARKDAQSLSVLIRKNLRDFSSGLRLRDLTHEGSGRKMMAHLEDDLPRRVKVKLSEGDISGAARLVSSQDMLATANENTEALRSKHPDAPTDFSMPTPPAVTLPSSTSREEVLSAMKTFSRSSAAGLDFIRPRLLQDLLSGALGSTAGRLADAIAKVVDVLRWGSPPSCLLPLIFGARMFALKKKDGSLRPIACSSVVRRLAAKIGCYDNREAISATLGQHQLGFATPGGTEVVVHCARAFLQSRKLPTVMVKLDFRNAFNSVRRDHLLRAVKSWAPLLFHHTNLAYGLEPSHLVMPHNAMLSQTGLQQGDPLGPPLFCLCIKELVDSLQSPLNAWYLDDGILGGDLPTVLDDIRKVIEFSAISGLTLNPVKCEVYVTAHNEVEPLDLTNLFDLLPGCRVVDKVNLELVGVPLLPEGIAKALDSRRDKLDFAASRLPQLGAHCGLFLLRSCFSATRLTHLLRGCNLFLSQELLQPFNGLSLDILEIILNLKLTAAAREQVMLPVSLGGLGVPDAVMTAGPAIVSSLTQAADRVKALLDSDGWDAYNGELQRLTDELSLLFDSPPDDRANQGNWTTPLQEKRLANLINRAPSVADKARLRAVSSQGAGAWLHALPCPRIGTLLDDETTRISAGLRLGVDLVVPHRCRCGDFVDALAHHGLSCALSAGRRARHSALNDTFSRALRSAGFPCVLEPPGLSRDDGKRPDGLTLTPFERGRMLVWDATVTDSLAPSMVGAGADRAGHASRLAEANKCRKYSSVDYPHEFCPLAFETMGTAGPLTLKLIQRVGRSLNLSTGDSRASEFLRQRLSLDIQRGNAASVRGTLLNWANPGLENP

SEQ ID NO: 6816 - protein, 957 aa, Dermanyssus gallinae
MPDNENSNDTFVVGDPNRATCPVCRAVFTRRGLARHISVRHADAVNRPSTSHQAVAEEFDVNTLLTDIQANMRHAKLIRILPKSVRPTVAEELTKVFLNVAKDNDLFAWYSLFSFVPVVLRLPRARKDAQSLSVLVRKNLRDFTSGLRLKDLTHEESGRKVMAHRDDDLPRRVRVKLSEGDISGAARLVSSQDTLASDNENTEALRSKHPDAPLDLSMPTPPAVTLPSSTSREEILSAMKTFSRSSAAGLDFIRPRLLQDLLSGALGSTASRLADAIAKVVDVLRWGSPPSSLLPLIFGARMFALKKKDGSLRPIACSSVVRRLAAKIGCYDNKVAISATLGQHQLGFATPGGTEVVVHCARAFLQSRKMPTVMVKLDFRNAFNSVRRDHLLRAVKSWAPLLFHQTNLAYGSGPSHLVMPQSIMPSQTGLQQGDPLGPPLFCLCIKELVDSLQSPLNAWYLDDGILGGDLPTVLDDIRKVIDFSVISGLTLNPVKCEVYVTAPKEFEPLDLTDLFNLLPGCRVVDKVNLELLGVPLLPDGIAKALDSQKDKLDFATGRLPQLGAHCGLFLLRSCFSATRLTHLLRGSNLFLSPELLQPFNGLSLDILEIILNLKLTDAAREQVMLPVSLGGLGIPDAVMMAGPAIVASLTQAADRVKSLLDSDGWDAYNVELKKLTEELSLLFDSPPEDRANQGSWTAPLHEKRLAGLINRAPSVADRARLRAVSSQGAGAWLQALPCPRIGTLLDDETTRISAGLRLGVDLVVPHRCRCGDFVDALAHHGLSCALSAGQRARHSALNDTFSRALRSAGFPCVLEPPGLSRDDGKRPDGLTLTPFERGRMLVWDATVTDSLAPSMVGAGADRAGHASRLAEANKCRKYSNVDYPHEFCPLAFETMGAAGPLTLKLIQRVGKSLNLSTGDSRASEFLRQRLSLDIQRGNAASVRGTLLNWANPGLENP

SEQ ID NO: 6817 - protein, 789 aa, Dermanyssus gallinae
MMAHLEDDLARRVKVKLSEVDISGAARLVSSQDMLATANENTEALRSKHPDAPTDLSMPTPPAVTLPSSTSREEILSAMKTFSRSSAAGLDFIRPRLLQDLLSGALGSTTGRLADAIAKVVDVLRWGSPPSCLLPLIFGARMFALKKKDGSLRSIACSSVVRRLAAKIGCYDNREAISATLGRHQLGFATPGGTEVVVHCARAFLQSRKLPTVMVKLDFRNAFNSVRRDHLLRAVKSWAPLLLHQTNLAYGSEPSHLVMPHNTMLSQTGLQQGDPLGPPFFCLCIKELVDSLQSPLNAWYLDDGILGGDLPTVLDDKRKVIEFGAISGLTLNPVKCEVHVTAHNEVEPVDLTNLFDLLPGCRVVDKVNLELLGVPLLPEGIAKALDSRRDKLDFAASRLPRLGAHCGLFLLRSCFSATRLTHLLRGCKLFLSQELLQPFNGLSLDILEIILNLKLTAAAREQVMLPVSLGGLGVPDAVMTAGSAIVSSLTQAADRVKALLDSDGWDAYNRELQRLTDELSLLFDSPPDDRANQGNWTTPLQEKRLANLINRAPSVADKARLRAVSSQGAGAWLHALPCPRIGTLLDDETTRISAGLRLGVDLVVPHRCRCGDFVDALAHHGLSCALSAGRRARHSALNDTFSRALRSAMCLSRDDGKRPDGLTLTPFERGRMLVWDATVTDSLAPSMVGAGADRAGHASRLAEANKCRKYSSVDYPHEFCPLAFETMGTAGPLTLKLIQRVGRSFNLSTGDSRASEFLRQRLSLDIQRGNAASVRGTLLNWANPGLENP

SEQ ID NO: 6818 - protein, 957 aa, Dermanyssus gallinae
MPDNENSNDTFVVGDPNRATCPVCRAVFTRRGLARHISVRHADAVNRPSTSHQAVAEEFDVNTLLTDIQANMRHAKLIRILPKSVRPTVAEELTKVFLNVAKDNDLFAWYSLFSFVPVVLRLPRARKDAQSLSVLVRKNLRDFTSGLRLKDLTHEESGRKVMAHRDDDLPRRVRVKLSEGDISGAARLVSSQDTLASDNENTEALRSKHPDAPLDLSMPTPPAVTLPSSTSREEILSAMKTFSRSSAAGLDFIRPRLLQDLLSGALGSTASRLADAIAKVVDVLRWGSPPSSLLPLIFGARMFALKKKDGSLRPIACSSVVRRLAAKIGCYDNKVAISTTLGQHQLGFATPGGTEVVVHCARAFLQSRKMPTVMVKLDFRNAFNSVRRDHLLRAVKSWAPLLFHQTNLAYGSGPSHLVMPQSIMPSQTGLQQGDPLGPPLFCLCIKELVDSLQSPLNAWYLDDGILGGDLPTVLDDIRKVIDFSVISGLTLNPVKCEVYVTAPKEFEPLDLTDLFNLLPGCRVVDKVNLELLGVPLLPDGIAKALDSQKDKLDFATGRLPQLGAHCGLFLLRSCFSATRLTHLLRGSNLFLSPELLQPFNGLSLDILEIILNLKLTDAAREQVMLLVSLGGLGIPDAVMMAGPAIVASLTQAADRVKSLLDSDGWDAYNVELKKLTEKLSLLFDSPPEDRANQGSWTAPLHEKRLAGLINRAPSVADRARLRAVSSQGAGAWLQALPCPRIGTLLDDETTRISAGLRLGVDLVVPHRCRCGDFVDALAHHGLSCALSAGRRARHSALNDTFSRALRSAGFPCVLEPPGLSRDDGKRPDGLTLTPFERGRMLVWDATVTDSLAPSMVGAGADRAGHASRLAEANKCRKYSNVDYPHEFCPLAFETMGAAGPLTLKLIQRVGKSLNLSTGDSRASEFLRQRLSLDIQRGNAASVRGTLLNWANPGLENP

SEQ ID NO: 6819 - protein, 957 aa, Dermanyssus gallinae
MYNGREADHAFVVGDPNRATCPVCRGIFTRRGLARHISVKHADAVNGPSTSHQALAEDLDVNTLLIDIQANMRHAKLLRILPKSVRSTVAEELTKVFLNVAKDNDLFAWYSLFSFAPVVLRLPRARKDAQSLSVLVRKNLRDFSSGLRLRDLTHEGSGRKVIAHLDNDLPRRVKVKLSEGDISGAARLVSSQDILAPANENTEALRSKHPDAPTDLSMPTPPAVTLPSSTSREEILSAMKTFSRSSAAGLDFIRPRLLQDLLSGALGSTAGRLADAIAKVVDVLRWGSPPSCLLPLIFGARMFALKKKDGSLRPIACSSVIRRLAAKIGCYDNRDTISAALGQHQLGFATPGGTEVVVHCARAFLQSRKVPTVMVKLDFRNAFNSVRRDHLLRAVKSWAPVLFHQTNLAYGSEPSHLVMPHSTMLSQTGLQQGDPLGPPLFCLCIKELVDSLQSPLNAWYLDDGVLGGDLPTVLDDIRKVIEFGAISNLTLNPIKCEVYVTTHNEVEPLDLTNLFDLLPGCRVVDKVNLELLGVPLLPEGIAKALDSRKDKLDFAAGRLPQLGAHCGLFLLRSCFSATRLTHLLRGCNLFLSRELLQPFNGLSLDILEIILNLKLTAEAREQVMLPVYLGGLGVPDAVITAGPAIVSSLTQAAERVRALLDNDGWEAYSVELQELTDQLSSLFDSPPVERNKQNSWTAPLQEKRLASLIDRAPTLADKARLRAVSSEGAGAWLHALPCPRIGTLLDDETTRISTGLRLGVDLVVPHRCRCGYLVDALAHHGLSCALSAGRRARHSALNDTFSRALRSAGFPCILEPPGLSRDDGKRPDGLTLTPFERGRMLVWDATVTDSLAPSMVGAGADQAGHASRLAEANKCRKYSGVGYPHQFCPLAFETMGGPGPLTLKLIQRVGRNLNLSTGDSRASEFLRQRLSLDIQRGNAASVRGTLLNWANPGLENP

SEQ ID NO: 6820 - protein, 962 aa, Dermanyssus gallinae
MPDNEIPNGSEADHAFVVGDPNRATCPVCRGVFTRRGLARHISVRHADAVNRPSTSHQARAEDFDVNTLLSDIQANMRHAKLLRILPKSVRSTVAEELTKVFLNVAKDNDLSAWYSLFSFAPVVLRLPRARKDAQSLSVLIRKNLRDFSSGLRLRDLTHERSGRKMMAHLEDDLPRRVKVKLSEGDISGAARLVSSQDMLATANENTEALRSKHPDAPTDLSMPTPPAVTLPSSTSREEVLSAMKTFSRSSAAGLDFIRPRLLQDLLSGALGSTAGRLADAIAKVVDVLRWGSPPSCLLPLIFGARMFALKKKDGSLRPIACSSVVRRLAAKIGCYDNREAISATLGQHQLGFATPGGTEVVVHCARAFLQSRKLPTVMVKLDFRNAFNSVRRDHLLRAVKSWAPLLFHHTNLAYGLEPSHLVMPHNAMLSQTGLQQGDPLGPPLFCLCIKELVDSLQSPLNAWYLDDGILGGDLPTVLDDIRKVIEFSAISGLTLNPVKCEVYVTAHNEVEPLDLTNLFDLLPGCRVVDKVNLELLGVPLLPEGIAKALDSRRDKLDFAASRLPQLGAHCGLFLLRSCFSATRLTHLLRGCNLFLSQELLQPFNGLSLDILEIILNLKLTAAAREQVMLPVSLGGLGVPDAVMTAGPAIVSSLTQAADRVKALLDSDGWDAYNGELQRLTDELSLLFDSPPDDRANQGNWTTPLQEKRLANLINRAPSVADKARLRAVSSQGAGAWLHALPCPRIGTLLDDETTRISAGLRLGVDLVVPHRCRCGDFVDALAHHGLSCALSAGRRARHSALNDTFSRALRSAGFPCVLEPPGLSRDDGKRPDGLTLTPFERGRMLVWDATVTDSLAPSMVGAGADRAGHASRLAEANKCRKYSSVDYPHEFCPLAFETMGTAGPLTLKLIQRVGRSLNLSTGDSRASEFLRQRLSLDIQRGNAASVRGTLLNWANPGLENP

SEQ ID NO: 6821 - protein, 962 aa, Dermanyssus gallinae
MPDNEIPNGSEADHAFVVGDPNRATCPVCRGVFTRRGLARHISVRHADNVNRPSTSHQARAEDFDVNTLLIDIQANIRHAKLLRILPKSVRSTVAEELTKVFLNVAKDNDLSAWYSLFSFAPVVLRLPRAKKDAQSLSILIRKNLRDFASGLRLRDLTHEGSGRKMMAHLEDDLPRRVKVKLSEGDISGAARLVSSQDMLATANENTEALRSKHPDAPTDLSMPTPPAVTLPSSTSREEILSAMKTFSRSSAAGLDFIRPRLLQDLLSGALGSTAGRLADAIAKVVDVLRWGSPPSCLLPLIFGARMFALKKKDGSLRPIACSSVVRRLAAKIGCYDNREAISATLGQHQLGFATPGGTEVVVHCARAFLQSRKLPTVMVKLDFRNAFNSVRRDHLLRAVKSWAPLLFHQTNLAYGSEPSHLVMPHNTMLSQTGLQQGDPLGPPLFCLCIKELVDSLQSPLNAWYLDDGILGGDLPTVLDDIRKVIEFGAISGLTLNPVKCEVHVTAYNEVEPVDLTNLFDLLPGCRVVDKVNLELLGVPLLPEGIAKALDSRRDKLDFAASRLPQLGAHCGLFLLRSCFSATRLTHLLRGCNLFLSQELLQPFNGLSLDILEIILNLKLTAAAREQVMLPVSLGGLGVPDAVMTAGPAIVSSLTQAADRVKALLDSDGWDAYNRELQRLTDELSLLFDSPPDDRANQGNWTAPLQEKRLANLINRAPSVADKARLRTVSSQGAGAWLHALPCPRIGTLLDDETTRISAGLRLGVDLVVPHRCRCGDFVDALAHHGLSCALSAGRRARHSALNDTFSRALRSAGFPCVLEPPGLSRDDGKRPDGLTLTPFERGRMLVWDATVTDSLAPSMVGAGADRPGHASRLAEANKCRKYSSVDYPHEFCPLAFETMGTAGPLTLKLIQRVGRSLNLSTGDSRASEFLRQRLSLDIQRGNAASVRGTLLNWANPGLENP

SEQ ID NO: 6822 - protein, 962 aa, Dermanyssus gallinae
MPDNENPNGREADHAFVVGDPNRATCPVCRGIFTRRGLARHISVKHADAVNGPSTSHQALAEDLDVNTLLIDIQANMRHAKLLRILPKSVRSTVAEELTKVFLNVAKDNDLFAWYSLFSFAPVVLRLPRARKDAQSLSVLVRKNLRDFSSGLRLRDLTHEGSERKVIAHLDNDLPRRVKVKLSEGDISGAARLVSSQDILAPANENTEALRSKHPDAPTDLSMPTPPAVTLPSSTSREEILSAMKTFSRSSAAGLDFIRPRLLQDLLSGALGSTAGRLADAIAKVVDVLRWGSPPSCLLPLIFGARMFALKKKDGSLRPIACSSVIRRLAAKIGCYDNRDTISAALGQHQLGFATPGGTEVVVHCARAFLQSRKVPTVMVKLDFRNAFNSVRRDHLLRAVKSWAPVLFHQTNLAYGLEPSHLVMPHSTMLSQTGLQQGDPLGPPLFCLCIKELVDSLQSPLNAWYLDDGVLGGDLPTVLDDIRKVIEFGAISNLTLNPIKCEVYVTTHNEVEPLDLTNLFDLLPGCRVVDKVNLELLGVPLLPEGIAKALDSRKDKLDFAAGRLPQLGAHCGLFLLRSCFSATRLTHLLRGCNLFLSRELLQPFNGLSLDILEIILNLKLTAEAREQVMLPVYLGGLGVPDAVITAGPAIVSSLTQAAERVRALLDNDGWEAYSVELQELTDQLSSLFDSPPVERNKQNSWTAPLQEKRLASLIDRAPTLADKARLRAVSSEGAGAWLHALPCPRIGTLLDDETTRISTGLRLGVDLVVPHRCRCGYLVDALAHHGLSCALSAGRRARHSALNDTFSRALRSAGFPCILEPPGLSRDDGKRPDGLTLTPFERGRMLVWDATVTDSLAPSMVGAGADQAGHASRLAEANKCRKYSGVGYPHQFCPLAFETMGGPGPLTLKLIQRVGRNLNLSTGDSRASEFLRQRLSLDIQRGNAASVRGTLLNWANPGLENP

SEQ ID NO: 6823 - protein, 960 aa, Dermanyssus gallinae
MPDNNNPSGTEAAQTSPFLDTSNRATCPVCKGVFTKRGLARHISARHADAANRPFTAHRASTEEIDISTLLVDIQANMRQAKLLRILPKSVRPTVAEELTNVFSNVAKDNDFSAWYSLFSFAPVVLRLPRAEKDARSLSVVIRKNLREFSAGKRLRDLTHESSGSKAYLDDDLCRRVRVKLSEGDISGAARLVSSEDILAPVNENTEALRSKHPQAPRDLTMPTPPAVTLPSSTSRDEILNAMKTFSRSSAAGLDFMRPRLLQDLLSGALGSTAERLADAIAKVVDVLRWGSPPSCFIPLIFGARMFALKKKDGSLRPIACSSVVRRLAAKISCQDNKGAVLAALGDHQLGFASPGGTEVAVHCARTFLQSRKVPTVMVKLDFRNAFNSVRRDHLLQSVKSWVPLLFHQTNLAYGQSSHLVMPHNTMLSQTGLQQGDPLGPPLFCLCIKDMVDTLRSPLNVWYLDDGVLGGDLPTVLDDIRKVIDFGVISGLNLNPGKCEVYVTDHNGIEPLDLTDLLSLLPGCRVVDKADLELLGVPLLPDGVPKALAARKDKLNFATGRLSQLGAHCGMFLLRCCFSATKLTHLVRGCNLSSSPELLQPFNDLSLDILEEILNLQLTAVARDQVMLPISLGGLGMPDAVMMAGPAIVSSLTQASERVRALLDEDGWEAYNAELQKLTDRLLSLFDSPPDERTKQSSWTDPLQEKRLTSLIDRAPTVADKARLRAVSSQGAGAWLHALPCPRIGTLLDDETTRISTGLRLGVDLVVPHRCRCGYLVDALAHHGLSCALSAGRRARHSALNDTFSRALRSAGFPCVLEPPGLSRDDGKRPDGLTLTPFERGRMLVWDATVTDSLAPSMVGAGADQAGHASRLAEANKCRKYSGVSYPHQFCPLAFETMGGPGPLTLKLIQRVGRSLNLSTGDSRASKFLRQRLSLDIQRGNAASVRGTLLNWANPGLDNP

SEQ ID NO: 6824 - protein, 960 aa, Dermanyssus gallinae
MPDNNNPSGTEAAQTSPFLDTSNRATCPVCKGVFTKRGLARHISARHADAANRPFTAHRASTEEIEIDTLLVDIQANMRQAKLLRILPKSVRPTVAEELTNVFSNVAKDNDFSAWYSLFSFAPVVLRLPRAEKDARSLSVVIRKNLREFSAGKRLRDLTHEDSGSKAYLDDNLCRRVRVKLSEGDISGAARLVSSEDILAPVNENTEALRSKHPQAPRDLTMPTPPAVTLPSSTSRDEILNAMKTFSRSSAAGLDFMRPRLLQDLLSGALGSTAERLADAIAKVVDVLRWGSPPSCLIPLIFGARMFALKKKDGSLRPIACSSVVRRLAAKISCQDNKDAVLAALGNHQLGFATPGGTEVAVHCARTFLQSRKVPTVMVKLDFRNAFNSVRRDHILQSVKSWVPLLFHQTNLAYGQSSHLVMPHNTMLSETGLQQGDPLGPPLFCLCIKDMVDTLRSPLNAWYLDDGVLGGDLPTVLDDIRKVIDFGVISGLNLNPGKCEVYVTDHNGIEPLDLTDLFSILPGCRVVDKADLELLGVPLLPDGVPKALAARKDKLNFATGRLSQLGAHCGLFLLRSCFSATKLTHLVRGCNLSSSPELLQPFNDLSLDILEEILNLQLTAVARDQVMLPISLGGLGMPDAVMMAGPAIVSSLTQASERVRALLDKDGWEAYNAELQKLTDRLLSLFDSPPDERTKQSSWTDPLQEKRLTNLIARAPTVADKARLRAVSSQGAGAWLHALPCPRIGTLLDDETTRISTGLRLGVDLVVPHRCRCGYIVDALAHHGLSCALSAGRRARHSALNDTFSRALRSAGFPCVLEPPGLSRDDGKRPDGLTLTPFERGRMLVWDATVTDSLAPSMVGAGADQAGHASRLAEANKCRKYSGVSYPHQFCPLAFETIGGPGPLTLKLIQRVGRSLNLSTGDSRASEFLRQRLSLDIQRGNAASVRGTLLNWANPGLDNP

SEQ ID NO: 6825 - protein, 960 aa, Dermanyssus gallinae
MPDNNNPSGTEDAQTSPFLDTSNRATCPVCKGVFTKRGLARHISARHADAANRPFTAHRASTEEIDISTLLVDIQANMRQAKLLRILPKSVRPTVAEELTNVFSNVAKDNDFSAWYSLFSFAPVVLRLPRAEKDARSLSVVIRKNLREFSAGKRLRDLTHEGSGSKAYLDDNLCRRVRVKLSEGDISGAARLVSSEDILAPVNENTEALRSKHPQAPRDLTMPTPPAVTLPSSTSRDEILNAMKTFSRSSAAGLDFMRPRLLQDLLSGALGSTAERLADAIAKVVDVLRWGSPPSCFIPLIFGARMFALKKKDGSLRPIACSSVVRRLAAKISCQDNKGAVLAALGDHQLGFATPGGTEVAVHCARTFLQSRKVPTVMVKLDFRNAFNSVRRDHLLQSVKSWVPLLFHQTNLAYGQSSHLVMPHNTMLSQTGLQQGDPLGPPLFCLCIKDMVDTLRSPLNAWYLDDGVLGGDLPTVLDDIRKVIDFGVISGLNLNPGKCEVYVTDHNGIEPLDLTDLLSLLPGCRVVDKADLELLGVPLLPDGVPKALAARKDKLNFATGRLSQLGAHCGMFLLRSCFSATKLTHLVRGCNLSSSPELLQPFNDLSLDILEEILNLQLTAVARDQVMLPISLGGLGMPDAVMMAGPAIVSSLTQASERVRALLDKDGWEAYNAELEKLTDRLLSLFDSPPDERTKQSSWTDPLQEKRLTSLIDRAPTVADKARLRAVSSQGAGAWLHALPCPRIGTLLDDETTRISTGLRLGVDLVVPHRCRCGYLVDALAHHGLSCALSAGRRARHSALNDTFSRALRSAGFPCVLEPPGLSRDDGKRPDGLTLTPFERGRMLVWDATVTDSLAPSMVGAGADQAGHASRLAEANKCRKYSGVSYPHQFCPLAFETMGGPGPLTLKLIQRVGRSLNLSTGDSRASEFLRQRLSLDIQRGNAASVRGTLLNWANPGLDNP

SEQ ID NO: 6826 - protein, 961 aa, Dermanyssus gallinae
MPDNNNPNYGTEAANASLVLDNSNKATCPVCKGVFTKRGLARHISARHADAATGPFTSNRALTEEIDIDNLLVDIQANMRQAKLLRILPKSVRPTVAEELTNVFSNVAKENDLYAWYSLFSFAPVVLRLPRAHKDARTLSVLIRKNLREFLAGKRLKDLANEGPVSKAYFNDDLSRRVRVKLSEGDISGAARLVSSEDILAPMNENTDALRAKHPHAPRNLTMPTPPTVTLPSSASRDEILKAMKTFSRSSAAGLDFMRPRLLQDLLSGALGSTAERLADAIAKVVDVLRWGSPPSCFMPLIFGARMFALKKKDGSLRPIACSSVVRRLAAKIGCQDNKHAVLAALGDHQLGFATPGGTEVAVHCTRAFLQSRKGPTVMVKLDFQNAFNSVRRDHLLRSVKSWAPLLFHQTNLAYGQSSHLVMPHNTMLSQTGLQQGDPLGPLLFCLCIKEMVDALRSPLNVWYLDDGVLGGDLLTVLDDIRKVIDFGVISGLTLNPGKCEVYVTTHNEIEPLDLTGLLGLLPGCRIVNKADLELLGVPLLPDGIAKALAGRKDKLDFATDRLPQLGAHCGLFLLRSCFSATRLTHLVRGCNLSSSPELLQPFNDLSLATLEKILNIQLTAVARDQVMLPVSLGGLGMPDAVMMAGPAIVSSLTQATERVRALLDNDGWETYNVELQELTDGLSSLFDSPPVERTKQSSWITPLQEKRLATLIDTAPTLADKARLRAASSQGAGAWLHALPCPRIGTLLDDETTRISTGLRLGADLVVPHRCRCGYLVDALAHHGLSCALSAGRRARHSALNDTFSRALRSAGFPCILEPPGLSRDDGKRPGGLTLTPFERGRMLVWDATVTDSLAPSMVGAGADQAGHASRLAEANKCRKYSDIGYPHQFYPLAFETMGGPGPLTVNLIQRVGRCLNLSTGDSRASEFLRQRLSLDIQRGNAASVRGTLLNWANPGLENP

SEQ ID NO: 6827 - protein, 947 aa, Dermanyssus gallinae
MPDNNNPNYGTEAAHASLILDNSNKATCPVCKGVFTKRGLARHISARHADAATGPFTSNRALTEETNIDNLLVDIQANMRQAKLLRILPKSVRPTVAEELTNVFSNVAKENDLYAWYSLFSFAPVVLRLPRAHKDARSLSVLIKKNLREFSAGKRLKDLANEGPVSKAYFNDDLSRRVRVKLSEGDISGAARLVSSEDILAPMNENTDALRAKHPHAPWNLTMPTPPTVTLPSSTSRDEILKAMRPRLLQDLLSGALGSTGERLADAIAKVVDVLRWGSPPSCFMPLIFGARMFALKKKDGSLRPIACSSVVRRLAAKIGSQDNKHAVLAALGDHQLGFATPGGTEVAVHCTRAFLQSRKGPTVMVKLDFQNAFNSVRRDHLLRSVKSWAPLLFHQTNLAYGQSSHLVMPHNTMLSQTGLQQGDPLGPPLFCLCIKEIVDALRSPLNVWYLDDGVLGGDLPTVLDDIRKVIDFGVISGLTLNPGKYEVYVTTHNEIEPLDLTGLLGLLPGCRIVDKADLELLGVPLLPDRIAKALAGRKDKLDFATDRLTQLGAHCGLFLLRSCFSATRLTHLVRECNLSASPELLQPFNDLSLATLEKILNIQLTAVARDQVMLPVSLGGLGMPDAVMMAGPATVSSLTQTTERVRALLDNDGWETYNVELQELTDRLSSLFDSPPVERTKQSSWITPLQEKRLATLIDTAPTLADKARLRAVSSQGAGAWLHALPCPRIGTLLDDETTRISTGLRLGADLVVPHRCRCGYLVDALAHHGLSCALSAGRRARHSALNDTFSRALRSAGFPCILEPPGLSRDDGKRPDGLTLTPFERGRMLVWDATVTDSLAPSMVGAGADQAGHASRLAEANKCRKYSDVGYPHQFYPLAFETMGGPGPLTLNLIQRVGRCLNLSTGDSRASEFLHQRLSLDIQRGNAASVRGTLLNWANPALENP

SEQ ID NO: 6828 - protein, 1006 aa, Dermanyssus gallinae
MSMNTRYMALLIAIALFRAIHIYIYIYIYIYISSIRREAQSLYIIMPDNNNPNYGTEAANASLVLDNSNKATCPVCKGVFTKRGLARHISARHADAATGPFTSNRALTEEIDIDNLLVDIQANMRQAKLLRILPKSVRPTVAEELTNVFSNVAKENDLYAWYSLFSFAPVVLRLPRAHKDARSLSVLIRKNLREFSAGKRLKDLANEGPVSKAYFNDDLSRRVRVKLSEGDISGAARLVSSEDILAPMNENTDALRAKHPHAPRNLTMPTPPTVTLPSSTSRDEILKAMKTFSRSSAAGLDFMRPRLLQDLLSGALGSTAERLADAIAKVVDVLRWGSPPSCFMPLIFGARMFALKKKDGSLRPIACSSVVRRLAAKIGCQDNKHAVLAALGDHQLGFATPGGTEIAVHCTRAFLQSRKGPTVMVKLDFQNAFNSVRRDHLLRSVKSWAPLLFHQTNLAYGQSSHLVMPHNTMLSQTGFQQGDPLGPLLFCLCIKEMVDALRSPLNVWYLDDGVLGGDLPTVLDDIRKVIDFGVISGLTLNPAKCEVYVTTHNEIEPLDLTGLLGLLPGCRIVDKADLELLGVPLLPDGIAKALAGRKDKLDFATDRLPQLGAHCGLFLLRSCFSATRLTHLVRGCNLSSSPELLQPFNDLSLATLEKVLNIQLTAVARDQVMLPVSLGGLGMPDAVMMAGPAIVSSLTQATERVRALLDKDGWETYNVELQELTDRLSSLFDSPPVERTKQSSWITPLQEKRLATLIDTAPTLADKARLRAVSSQGAGAWLHALPCPRIGTLLDDETTRISTGLRLGADLVVPHRCRCGYLVDALAHHGLSCALSAGRRARHSALNDTFSRALRSAGFPCILEPPGLSRDDGKRPDGLTLTPFERGRMLVWDATVTDSLAPSMVGAGADQAGHASRLAEANKCRKYSDVGYPHQFYPLAFETMGGPGPLTLNLIQRVGRCLNLSTGDARASEFLRQRLSLDIQRGNAASVRGTLLNWANPGLENP

SEQ ID NO: 6829 - protein, 903 aa, Dermanyssus gallinae
MPDNNNGTEAAQTSPFLDTSNRATCPVCKGVFTKRGLARHISARHADAANRPFTAHRASTEEIDISTLLVDIQANMRQAKLLRILPKSVRPTVAEELTNVFSNVAKDNDFSAWYSLFSFAPVVLRLPRAEKDARSLSVVIRKNLREFSAGKRLRDLTHESSGSKAYLDDDLCRRVRVKLSEGDISGAARLVSSEDILAPVNENTEALRSKHPQAPRDLTMPTPPAVTLPSSTSRDEILNAMKTFSRSSAAGLDFMRPRLLQDLLSGALGSTAERLADAIAKVVDVLRWGSPPFCFIPLIFGARMFALKKKDGSLRPIACSSVVRRLAAKISCQDNKGAVLAALGDHQLGFASPGGTEVAVHCARTFLQSRKVPTVMVKLDFRNAFNSVRRDHLLQSVKSWVPLLFHQTNLAYGQSSHLVMPHNTMLSQTGLQQGDPLGPPLFCLCIKDMVDTLRSPLNVWYLDDGVLGGDLPTVLDDIRKVIDFGVISGLNLNPGKCEVYVTDHNGIEPLDLTDLLSLLPGCRVVDKADLELLGVPLLPDGVPKALAARKDKLNFATGRLSQLGAHCGMFLLRCCFSATKLTHLVRGCNLSSSPELLQPFNDLSLDILEEILNLQLTAVARDQVMLPISLGGLGMPDAVMMAGPAIVSSLTQASERVRALLDEDGWEAYNAELQKLTDRLLSLFDSPPDERTKQSSWTDPLQEKRLTSLIDRAPTVADKARLRAVSSQGAGAWLHALPCPRIGTLLDDETTRISTGLRLGVDLVVPHRCRCGYLVDALAHHGLSCALSAGRRARHSALNDTFSRALRSAGFPCVLEPPGLSRDDGKRPDGLTLTPFERGRMLVWDATVTDSLAPSMVGAGADQAGHASRLAEANKCRKYSGVSYPHQFCPLAFETMGGPARTS

SEQ ID NO: 6830 - protein, 883 aa, Dermanyssus gallinae
MRQAKLLRILPKSVRPTVAEELTNVFSNVAKDNDFSAWYSLFSFAPVVLRLPRAEKDARSLSVVIRKNLREFSAGKRLRDLTHEGSGSKAYLDDNLCRRVRVKLSEGDISGAARLVSSEDILAPVSENTEALRSKHPQAPRDLTMPTPPAVTLPSSTSRDEILNAMKTFSRSSAAGLDFMRPRLLQDLLSGALGSTAERLADAIAKVVDVLRWGSPPSCFIPLIFGARMFALKKKDGSLRPIACSSVVRRLAAKISCQDNKGAVLAALGDHQLGFATPGGTEVAVHCARTFLQSRKVPTVMVKLDFRNAFNSVRRDHLLQSVKSWVPLLFHQTNLAYGQSSHLVMPHNTMLSQTGLQQGDPLGPPLFCLCIKDMVDTLRSPLNAWYLDDGVLGGDLPTVLDDIRKVIDFGVISGLNLNPGKCEVYVTDHNGIEPLDLTDLLSLLPGCRVVDKADLELLGVPLLPDGVPKALAARKDKLNFATGRLSQLGAHCGMFLLRSCFSATKLTHLVRGCNLSSSPELLQPFNDLSLNILEEILNLQLTAVARDQVMLPISLGGLGMPDAVMMAGPAIVSSLTQASERVRALLDKDGWEAYNAELQKLTDRLLSLLDSPPDERTKQSSWTDPLQEKRLTSLIDRAPTVADKARLRAVSSQGAGAWLRALPCPRIGTLLDDETTRISTGLRLGVDLVVPHRCRCGYLVDALAHHGLSCALSAGRRARHSALNDTFSRALRSAGFPCILEPPGLSRDDGKRPDGLTLTPFERGRMLVWDATVTDSLAPSMVGAGADQAGHASRLAEANKCRKYSGVSYPHQFCPLAFETMGGPGPLTLKLIQRVGRSLNLSTGDSRASEFLRQRLSLDIQRGNAASVRGTLLNWANPGLDNP

SEQ ID NO: 6831 - protein, 960 aa, Dermanyssus gallinae
MPDNNNPSGTEDAQTSPFLDTSNRATCPVCKGVFTKRGLARHISARHADAANRPFTAHRASTEEIDISTLLVDIQANMRQAKLLRILPKSVRPTVAEELTNVFSNVAKDNDFSAWYSLFSFAPVVLRLPRAEKDARSLSVVIRKNLREFSAGKRLRDLTHEGSGSKAYLDDNLCRRVRVKLSEGDISGAARLVSSEDILAPASENTEALRSKHPQAPRDLTMPTPPAVTLPSSTSRDEILNAMKTFSRSSAAGLDFMRPRLLQDLLSGALGSTAERLADAIAKIVDVLRWGSPPSCFIPLIFGARMFALKKKDGSLRPIACSSVVRRLAAKISCQDNKGAVLAALGDHQLGFATPGGTEVAVHCARTFLQSRKVPTVMVKLDFRNAFNSVRRDHLLQSVKSWVPLLFHQTNLAYGQSSHLVMPHNTMLSQTGLQQGDPLGPPLFCLCIKDMVDTLRSPLNAWYLDDGVLGGDLPTVLDDIRKVIDFGVISGLNLNPGKCEVYITDHNGIEPLDLTDLLSLLPGCRVVDKADLELLGVPLLPDGVPKALAARKDKLNFATGRLSQLGTHCGMFLLRSCFSATKLTHLVRGCNLSSSPDLLQPFNDLSLDILEEILNLQLTAVARDQVMLPISLGGLGMPDAVMMAGPAIVSSLTQASERVRALLDKDGWEAYNAELQKLTDRLLSLFDSPPDERTKQSSWTDSLQEKRLTSLIDRAPTVADKARLRAVSSQGAGAWLRALPCPRIGTLLDDETTRISTGLRLGVDLVVPHRCRCGYLVDALAHHGLSCALSAGRRARHSALNDTFSRALRFAGFPCVLEPPGLSRDDGKRPDGLTLTPFERGRMLVWDATVTDSLAPSMVGAGADQAGHASRLAEANKCRKYSGVSYPHQFCPLAFETMGGPGPLTLKLIQRVGRSLNLSTGDSRASEFLRQRLSLDIQRGNAASVRGTLLNWANPGLDNP

SEQ ID NO: 6832 - protein, 960 aa, Dermanyssus gallinae
MPDNNNPSGTEAAQTSPFLDTSNRATCPVCKGVFTKRGLARHISARHADAANRPFTAHRASTEEIDIDTLLVDIQANMRQAKLLRILPKSVRPTVAEELTNVFSNVAKDNDFSAWYSLFSFAPVVLRLPRAEKDARSLSVVIRKNLRKFSAGKRLRDLTHEGSGSKAYLDDNLCRRVRVKLSEGDISGAARLVSSEDILAPVNENTEALRSKHPQAPRDLTMPTPPAVTLPSSTSRDEILNAMKTFSRSSAVGLDFMRPRLLQDLLSGALGSTAERLADAIAKVVDVLRWGSPPSCFIPLIFGARMFALKKKDGSLRPIACSSVVRRLAAKISCQDNKDAVLAALGDHQLGFATPGGTEVAVHCARTFLQSRKVPTVMVKLDFRNAFNSVRRDHLLQSVKSWVPLLFHQTNLAYGQSSHLVMPHNTMLSQTGLQQGDPLGPPLFCLCIKDMVDTLRSPLNAWYLDDGVLGGDLPTVLDDIRKVIDFGVISGLNLNPGKCEVYVTDHNGIKPLDLTDLLSLLPGCRVVDKADLELLGVPLLPDGVPKALAARKDKLNFATGRLSQLGAHCGMFLLRSCFLATKLTHLVRGCNLSSSPELLQPFNDLSLDILEEILNLQLTAVATDQVMLPISLGGLGMPDAVMMAGPAIVSSLTQASERVRALLDKDGWEAYNAELQKLTDRLLSLFDSPPDERTKQSSWTDPLQEERLTSLIDRAPTVADKARLRAVSSQGAGAWLHALPCPRIGTLLDDETTRISTGLRLSVDLVVPHRCRCGYLVDALAHHGLSCALSAGRRARHSALNDTFSRALRSAGFPCVLEPPGLSRDDGKRPDGLTLTPFERGRMLVWDATVTDSLAPSMVGAGADQAGHASRLAEANKCRKYSGVSYPYQFCPLAFETMGGPGPLTLKLIQRVGRSLNLSTGDSRASEFLRQRLSLDIQRGNAASVRGTLLNWANPGLDNP

SEQ ID NO: 6833 - protein, 960 aa, Dermanyssus gallinae
MPDNNNPSGTEAAQTSPFLDTSNRATCPVCKGVFTKRGLARHISARHADAANRPFTAHRASTEEIEIDTLLVDIQANMRQAKLLRILPKSVRPTVAEELTNVFSNVAKDNDFSAWYSLFSFAPVVLRLPRAEKDARSLSVVIRKNLREFSAGKRLRDLTHEDSGSKAYLDDNLCRRVRVKLSEGDISGAARLVSSEDILVPVNENTEALRSKHPQAPRDLTMPTPPAVTLPSSTSRDEILNAIKTFSRSSAAGLDFMRPRLLQDLLSGALGSTAERLADAIAKVVDVLRWGSPPSCLIPLIFGARMFALKKKDGSLRPIACSSVVRRLAAKISCQDNKDAVLAALGNHQLGFATPGGTEVAVHCARTFLQSRKVPTVMVKLDFRNAFNSVRRDHILQSVKSWVPLLFHQTNLAYGQSSHLVMPHNTMLSETGLQQGDPLGPPLFCLCIKDMVDTLRSPLNAWYLDDGVLGGDLPTVLDDIRKVIDFGVISGLNLNPGKCEVYVTDHNGIEPLDLTDLFSILPGCRVVDKADLELLGVPLLPDGVPKALAARKDKLNFATGRLSQLGAHCGLFLLRSCFSATKLTHLVRGCNLSSSPELLQPFNDLSLDILEEILNIQLTAVARDQVMLPISLGGLGMPDAVMMAGPAIVSSLTQASERVRAFLDKDGWEAYNAELQKLTDRLLSLFDSPSDERTKQSSWTDPLQEKRLTNLIARAPTVADKARLRAVSSQGAGAWLHALPCPRIGTLLDDETTRISTGLRLGVDLVVPHRCRCGYIVDALAHHGLSCALSAGRRARHSALNDTFSRALRSAGFPCVLEPPGLSRDDGKRPDGLTLTPFERGRMLVWDATVTDSLAPSMVGAGADQAGHASRLAEANKCRKYSGVSYPHQFCPLAFETIGGPGPLTLKLIQRVGRSLNLSTGDSRASEFLHQRLSLDIQRGNAASVRGTLLNWANPGLDNP

SEQ ID NO: 6834 - protein, 883 aa, Dermanyssus gallinae
MRQAKLLRILPKSVRPTVAEELTNVFSNVAKDNDFSAWYSLFSFAPVVLRLPRAEKDARSLSVVIRKNLREFSAGKRLRDLTHEGSGSKAYLDDNLCRRVRVKLSEGDISGAARLVSSEDILAPVNENTEALRSKHPQAPRDLTKPTPPAVTLPSSTSRDEILNAMKTFSRSSAAGLDFMRPRLLQDLLSGALGSTAERLADAIAKVVDVLRWGSAPSCFIPLIFGARMFALKKKDGSLRPIACSSVVRRLAAKISCQDNKGAVLAALGDHQLGFATPGGTEVAVHCARTFLQSRKVPTVMVKLDFRNAFNSVRRDHLLQSVKSWVPLLFHQTNLAYGQSSHLVMPHNTMLSQTGLQQGDPLGPPLFCLCVKDMVDTLRSPLNAWYLDDGVLGGDLPTVLDDIRKVIDFGVISGLNLNPGICEVYVTDHNGIEPLDLTDLLSLLPGCRVVDKADLELLGVPLLPDGVPKALAARKDKLNFATGRLSQLGAHCGMFLLRSCFSATKLTHLVRGCNLSSSPELLQPFNDLSLDILEEILNLQLTAVARDQVMLPISLGGLGMPDAVMMAGPAIVSSLTQASERVRALLDKDGWEAYNAELQKLTDRLLSLFDSPPDERTKQSSWTDPLQEKRLTSLIDRAPTVADKARLRAVSSQGAGAWLHALPCPRIGTLLDDETTRISTGLRLGVDLVVPHRCRCGYLVDALAHHGLSCALSAGRRARHSALNDTFSRALRSAGFPCVLEPPGLPRDDGKRPDDLTLTPFERGRMLVWDATVTDSLAPSMVGAGADQAGHASRLAEANKCRKYSGVSYPHQFCPLAFETMGGPGPLTLKLIQRVGRSLNLSTGDSRASEFLRQRLSLDIQRGNAASVRGTLLNWANPGLDNP

SEQ ID NO: 6835 - protein, 961 aa, Dermanyssus gallinae
MPDNNSPNYGTEAANASLVLDNSNKATCPVCKGVFTKRGLARHISARHADAATGPFTSNRALTEEIDIDNLLVDIQANMRQAKLLRILPKSVRPTVAEELTNVFSNVAKENDLYAWYSLFSFAPVVLRLPRAHKDARSLSVLIRKNLREFSAGKRLKDLANEGPVSKAYFNDDLSRRVRVKLSEGDISGAARLVSSEDILAPMNENTDALRAKHPHAPRNLTMPTPPTVTLPSSTSRDEILKAMKTFSRSSAAGLDFMRPRLLQDLLSGALGSTAERLADAIAKVVDVLRWGSPPSCFMPLIFGARMFALKKKDGSLRPIACSSVVRRLAAKIGCQDNKHAVLAALGDHQLGFATPGGTEVAVHCTRAFLQSRKGPTVMVKLDFQNAFNSVRRDHLLRSVKSWTPLLFHQTNLAYGQSSHLVMPHNTMLSQTGLQQGDPLGPLLFCLCIKEMVDALRSPLNVWYLDDGVLGGDLPTVLDDIRKIIDFGVISGLTLNPGKCEVYVTTHNEIEPLDLTGLLGLLPGCRIVDKADLELLGVPLLPDGIAKALAGRKDKLDFATDRLPQLGAHCGLFLLRSCFSATRLTHLVRGCNLSSSPELLQPFNDLSLATLEKILNIQLTAVARDQVMLPVSLGGLGMPDAVMMAGPAIVSSLTQATERVRALLDKDGWETYNVELQELTDRLSSLFDSPPVERTKQSSWITPLQEKRLATLIDTAPTLADKARLRAVSSQGAGAWLHALPCPRIGTLLDDETTRISTGLRLGADLVVPHRCRCGYLVDALAHHGLSCALSAGRRARHSALNDTFSRALRSAGFPCILEPPGLSRDDGKRPDGLTLTPFERGRMLVWDATVTDSLAPSMVGAGADQAGHASRLAEANKCRKYSDVGYPHQFSPLAFETMGGPGPLTLNLIQRVGRCLNLSTGDSRASEFLHQRLSLDIQRGNAASVRGTLLNWANPGLENP

SEQ ID NO: 6836 - protein, 960 aa, Dermanyssus gallinae
MPDNNNPSGTEDAQTSPFLDTSNRATCPVCKGVFTKRGLARHISARHADAANGPFTAHRASTEEIDISTLLVDIQANMRQAKLLRILPKSVRPTVAEELTNVFSNVAKDNDFSAWYSLFSFAPVVLRLPRAEKDARSLSVVIRKNLREFSAGKRLRDLTHEGSGSKAYLDDNLCRRVRVKLSEGDISGAARLVSSEDILAPVNENTEALRSKHPQAPRDLTMPTPPAVTLPSSTSRDEILNAMKTFSRSSAAGLDFMRPRLLQDLLSGALGSTAERLADAIAKVVDVLRWGSPPSCFIPLIFGARMFALKKKDGSLRPIACSSVVRRLAAKISCQDNKGAVLAALGDHQLGFATPGGTEVAVHCARTFLQSRKVPTVMVKLDFRNAFNSVRRDHLLQSVKSWVPLLFHQTNLAYGQSSHLVMPHNTMLSQTGLQQGDPLGPPLFCLCIKDMVDTLRSPLNAWYLDDGVLGGDLPTVLDDIRKVIDFGVISGLNLNPGKCEVYVTDHNGIEPLDLTDLLSLLPGCRVVDKADLELLGVPLLPDGVPKALAARKDKLNFATGRLSQLGAHCGMFLLRSCFSATKLTHLVRGCNLSSSPELLQPFNDLSLDILEEILNLQLTAVARDQVMLPISLDGLGMPDAVMMAGPAIVSSLTQASERVRALLDKDGWEAYNAELQKLTDRLLSLFDSPPDERTKQSSWTDPLQEKRLTSLIDRAPTVADKARLRAVSSQGAGAWLHALPCPRIGTLLDDETTRISTGLRLGVDLVVPHRCRCGYLVDALAHHGLSCALSAGRRARHSALNDTFSRALRSAGFPCVLEPPGLSRDDGKRPDGLTLTPFERGRMLVWDATVTDSLAPSMVGAGADQAGHASRLAEANKCRKYSGVSYPHQFCPLAFETMGGPGPLTLKLIKRVGRSLNLSTGDSRASEFLRQRLSLDIQRGNAASVRGTLLNWANPGLDNP

SEQ ID NO: 6837 - protein, 961 aa, Dermanyssus gallinae
MPDNNNPNYGTEAANASLVLDNSNKATCPVCKGVFTKRGLARHISARHADAATGPFTSNRALTEEIDIDNLLVDIQANMRHAKLLRILPKSVRPTVAEELTNVFSNVAKENDFYAWYSLFSFAPVVLRLPRAHKDARSLSVLIRKNLREFLAGKRLKDLANEGPVSNAYFNDDLSRRVRVKLSEGDISGAARLVSSEDILAPMNENTDALRAKHPHAPRNLTMPTPPTVTLPSSTSRDEILKAMKTFSRCSAAGLDFMRPRLLQDLLSGALGSTAERLADAIAKVVDVLRWGSPPSCFMPLIFGARMFALKKKDGSLRPIACSSVVRRLAAKIGCQDNKHAVLAALGDHQLGFATPGGTEVAVHCTRAFLQSRKGPTVMVKLDFQNAFNSVRRDHLLRSVKSWAPLLFHQTNLAYGQSSHLVMPHNTMLSQTGLQQGDPLGPLLFCLCIKEMVDALRSPLNVWYLDDGVLGGDLLTVLDDIRKVIDFGVISGLTLNPGKCEVYVTTHNEIEPLDLTGLLGLLPGCRIVNKADLELLGVPLLPDGIAKALAGRKDKLDFATDRLPQLGAHCGLFLLRSCFSATRLTHLVRGCNLSSSPELLQPFNDLSLATLEKILNIQLTAVARDQVMLPVSLGGLGMPDAVMMAGPAIVSSLTQATERVRALLDNDGWETYNVELQELTDGLSSLFDSPPVERTKQSSWITPLQEKRLATLIDTAPTLADKARLRAASSQWAGAWLHALPCPRIGTLLDDETTRISTGLRLGADLVVPHRCRCGYLVDALAHHGLSCALSAGRRARHSALNDTFSRALRSAGFPCILEPPGLSRDDGKRPDGLTLTPFERGRMLVWDATVTDSLAPSMVGAGADQAGHASRLAEANKCRKYSDIGYPHQFYPLAFETMGGPGPLTVNLIQRVGRCLNLSTGDSRASEFLRQRLSLDIQRGNAATVRGTLLNWANPGLENP

SEQ ID NO: 6838 - protein, 961 aa, Dermanyssus gallinae
MPDNNNPNYGTEAANASLVLDNSNKATCPVCKGVFTKRGLARHISARHADAATRPFTSNRALTEEIDIDNLLVDIQANMRQAKLLRILPKSVRPTVAEELTNVFSNVAKENDLYAWYSLFSFAPVVLRLPRAHKDARSLSVLIRKNLREFLAGKRLKDLANEGPVSKAYFNDDLSRRVRVKLSEGDISGAARLVSSEDILAPMNENTDALRAKHPHAPRNLTMPTPLTVTLPSSTSRDEILKAMKTFSRSSAAGLDFMRPRLLQDLLSGALGSTAERLADAIAKVVDVLRWGSPPSCFMPLIFGARMFALKKKDGLLRPIACSSVVRRLAAKIGCQDNKHAVLAALGDHQLGFATPGGTEVAVHCTRAFLQSRKGPTVMVKLDFQNAFNSVRRDHLLRSVKSWAPLLFHQTNLAYGQSSHLVMPHNTMLSQTGLQQGDPLGPLLFCLCIKEMVDALRSPLNVWYLDDGVLGGDLPTVLDDIRKVIDFGVISGLTLNPGKCEVYVTTHNEIEPLDLTGLLGLLPGCRIVDKADLELLGVPLLPDGIAKALAGRKDKLDFATDRLPQLGAHCGLFLLRSCFSATRLTHLVRGCNLSSSPELLQPFNDLSLATLEKILNIQLTAVARDQVMLPVSLGGLGMPDAVMMAGPAIVSSLTQATERVRALLDNDGWETYNVELQELTDRLSSLFDSPPVERTKQSSWITPLQEKRLATLIDTAPTLADKARLRAASSQGAGAWLHALPCPRIGTLLDDETTRISTGLRLGADLVVPHRCRCGYLVDALAHHGLSCALSAGRRARHSALNDTFSRALRSAGFPCILEPPGLSRDDGKRPDGLTLTPFERGRMLVWDATVTDSLAPSMVGAGADQAGHASRLAEANKCRKYSDIGYPHQFYPLAFETIGGPGPLTLNLIQRVGRCLNLSTGDSRASEFLRQRLSLDIQRGNAASVRGTLLNWANPGLENP

SEQ ID NO: 6839 - protein, 961 aa, Dermanyssus gallinae
MPDNNNPNYGTEAANASLVLDNSNKATCPVCKGVFTKRGLARHISARHADAATGPFTSNRALTEEIDIDNLLVDIQANMRQAKLLRILPKSVRPTVAEELTNVFSNVAKENDLYAWYSLFSFAPVVLRLPRAHKDARSLSVLIRKNLREFSAGKRLKDLANEGPVSKAYFNDDLSRRVRVKLSEGDISGAARLVSSEGILAPMNENTDALRAKHPHAPRNLTMPTPPTVTLPSSTSRDEILKAMKTFSRSSAAGLDFMRPRLLQDLLSGALGSTAERLADAIAKVVDVLRWGSPPSCFMPLIFGARMFALKKKDGSLRPIACSSVVRRLAAKIGCQDNKHAVLAALGDHQLGFATPGGTEVAVHCTRAFLQSRKGPTVMVKLDFQNAFNSVRRDHLLRSVKSWAPLLFHQTNLAYGQSSHLLMPHNTMLSQTGLQQGDPLGPLLFCLCIKEMVDALRSPLNVWYLDDGVLGGDLPTVLDDIRKIIDFGVISGLTLNPGKCEVYVTTHNEIEPLDLTDLLGLLPGCRIVDKADLELLGVPLLPDGIAKALAGRKDKLDFATDRLPQLGAHCGLFLLRSCFSATRLTHLVRGCNLSSSPELLQPFNDLSLATLEKILNIQLTAVARDQVMLPVSLGGLGMPDAVMMAGPAIVSSLTQATERVRALLDNDGWETYNVELQELTDRLSSLFDSPPVERTKQSSWITPLQEKRLATLIDTAPTLADKARLRAVSSQGAGAWLHALPCPRIGTLLDDETTRISTGLRLGADLVVPHRCRCGYLVDALAHHGLSCALSAGRRARHSALNDTFSRALRSAGFPCILEPPGLSRDDGKRPDGLTLTPFERGRMLVWDATVTDSLAPSMVGAGADQAGHASRLAEANKCRKYSDVGYPHQFYPLAFETMGGPGPLTLNLIQRVGRCLNLSTGDSRASEFLRQRLSLDIQRGNAASVRGTLLNWANPGLENP

SEQ ID NO: 6840 - protein, 960 aa, Dermanyssus gallinae
MPDNNNPNYGTEAANASLVLDNSNKATCPVCKGVFTKRGLARHISARHADAATGPFTSNRALTEEIDIDNLLVDIQANMRQAKLLRILPKSVRPSVAEELTNVFSNVAKENDLYAWYSLFSFAPVVLRLPRAHKDARSLSVLIRKNLREFLAGKRLKNLANEGPVSKAYFNDDLSRRVRVKLSEGDISGAARLVSSEDILAPMNENTDALRAKHPHAPRNLTMPTPPTVTLPSSTSRDEILKAMKTFSRSSAAGLDFMRPRLLQDLLSGALGSTAERLADAIAKVVDVLRWGSPPSCFMPLIFGARMFALKKDGSLRPIACSSVVRRLAAKIGCQDNKHAVLAALGDHQLGFATPGGTEVAVHCTRAFLQSRKGPTVMVKLDFQNAFNSVRRDHLLRSVKSWAPLLFHQTNLAYGQSSHLVMPHNTMLSQTGLQQGDPLGPLLFCLCIKEMVDALRSPLNVWYLDDGVLGGDLLTVLDDIRKVIDFGVISGLTLNPGKCEVYVTTHNEIEPLDLTGLLGLLPGCRIVNKADLELLGVPLLPDGIAKALAGRKDKLDFATDRLPQLGAHCGLFLLRSCFSATRLTHLVRGCNLSSSPELLQPFNDLSLATLEKILNIQLTAVARDQVMLPVSLGGLGMPDAVMMAGPAIVSSLTQATERVRALLDNDGWETYNVELQELTDGLSSLFDSPPVERTKQSSWITPLQEKRLATLIDTAPTLADKARLRAASSQGAGAWLHALPCPRIGTLLDDETMRISTGLRLGADLVVPHRCRCGYLVDALAHHGLSCALSAGRRARHSALNDTFSRALRSAGFPCILEPPGLSRDDGKRPDGLTLTPFERGRMLVWDATVTNSLAPSMVGAGADQAGHASRLAEANKCRKYSDIGYPHQFYPLAFETMGGPGPLTVNLIQRVGRCLNLSTGDSRASEFLRQRLSLDIQRGNAASVRGTLLNWANPGLENP

SEQ ID NO: 6841 - protein, 961 aa, Dermanyssus gallinae
MPDNNNPNYGTEAANASLVLDNSNKATCPVCKGVFTKRGLARHISARHADAATGPFTSNRALTEEIDIDNLLVDIQANMRQAKLLRILPKSVRPTVAEELTNVFSNVAKENDLYAWYSLFSFAPVVLRLPRAHKDARSLSVLIRKNLREFLAGKRLKDLTNEGPVPKAYFNDDLSRRVRVKLSEGDISGAARLVSSEDILAPMNENTDALRAKHPHAPRNLTMPTPPTVTLPSSTSRDEILKAMKTFSRSSAAGLDFMRPRLLQDLLSGALGSTAERLADAIAKVVDVLRWGSPPSCFMPLIFGARMFALKKKDESLRPIACSSVVRRLAAKIGCQDNKHAVLAALGDHQLGFATPGDTEVAVHCTRAFLQSRKGPTVMVKLDFQNAFNSVRRDHLLRSAKSWAPLLFHQTNLAYGQSSHLVMPHNTMLSQTGLQQGDPLGPLLFCLCIKEMVDALRSPLNVWYLDDGVLGGDLPTVLDDIRKVIDFGVISGLTLNPGKCEVYVTTHNEIEPLDLTGLLGLLPGCRIVNKADLELLGVPLLPDGIAKALAGRKDKLDFATDRLPQLGAHCGLFLLRSCFSATRLTHLVRGCNLSSSPELLQPFNDLSLATLEKILNIQLTAVARDQVMLPVSLGGLGMPDAVMMAGPAIVSSLTQATERVRALLDNDGWETYNVELQELTDGLSSLFDSPLVERTKQSSWITPLQEKRLATLIDTAPTLADKARLRAASSQGAGAWLHALPCPRIGTLLDDETTRISTGLRLGADLVVPHRCRCGYLVDALAHHGLSCALSAGRRARHSALNDTFSRALRSAGFPCILEPPGLSRDDGKRPDGLTLTPFERGRMLVWDATVTDSLAPSMVGAGADQAGHASRLAEANKCRKYSDIGYPHQFYPLAFETMGGPGPLTVNLIQRVGRCLNLSTGDSRASEFLRQRLSLDIQRGNAASVRGTLLNWANPGLENP

SEQ ID NO: 6842 - protein, 960 aa, Dermanyssus gallinae
MPDNNNPSGTEAAQSSPFLDTSNRATCPVCKGVFTKRGLARHISARHADAANRPFTAHRASTEEIDIDTLLVDIQVNMRQAKLLRILPKSVRHTVAEELTNVFSNVAKDNDFSAWYSLFSFAPVVLRLPRAEKDARSLSVVIRKNLREFSAGKRLRDLTHEGSGSKAYLDDNLCRRVRVKLSEGDISGAARLVSSEDILAPVNENTEALRSKHPQAPRDLTMPTPPAVTLPSSTSRDEILIAMKTFSRSSAAGLDFMRPRLLQDLLSGALGSTAERLADAIAKVVDMLRWGSPPSCFIPLIFGARMFALKKKDGSLRPIACSSVVRRLAAKISCQDNKDAVLAALGDHQLGFATPGGTEVAVHCARTFLQSRKVPTVMVKLDFRNAFNSVRRDHLLQSVKSWVPLLFHQTNLAYGQSSHLVMPHNTMLSQTGLQQGDPLGPPLFCLCIKDMVDTLRSPLNAWYLDDGVLGGDLPTVLDDIRKVIDFGVISGLNLNPGKCEVYVTDHNGIEPLDLTDLLSLLPGCRVVDKADLELLGVPLLPDGVPKALAARKDKLNFATGRLSQLGAHCGMFLLRSCFSATKLTHLVRGCNLFSSPNLLQPFNDLSLDILEEILNLQLTAVARDQVMLPISLGGLGMPDAVMMAGPAIVSSLTQASERVRALLDKDGWEAYNAELQKLTDRLLSLFDSPPDERTKQSSWTDPLQEKRLTSLIDRAPTVADKARLRAVSSQGAGAWLHALPCPRIGTLLDDETTRISTGLRLGVDLVVPHRCRCGYLVDALAHHGLSCALSAGRRARHSALNDTFSRALRSAGFPCVLEPPGLSRDDGKRPDGLTLTPFEHGRMLVWDATVTDSLAPSMVGAGADQAGHASRLAEANKCRKYSGVSYPHQFCPLAFETMGGPGPLTLKLIQRVGRSLNLSTGDSRASEFLRQRLSLDIQRGNAASVRGTLLNWANPGLDNP

SEQ ID NO: 6843 - protein, 960 aa, Dermanyssus gallinae
MPDNNNPSGTEAAQTSPFLDTSNRATCPVCKGVFTKRGLARHISARHADAANRPFTAHRASTEEIDIDTLLVDIQANMQQAKLLRILPKSVRPTVAEELTNVFSNVAKDNDFSAWYSLFSFAPVVLRLSRAEKDARSLSVVIRKNLREFSAGKRLRDLTHEGSGSKAYLDDNLCRRVRVKLSEGDISGAARLVSSEDILAPVNENTEALRSKHPQAPRDLTMPTPPAVTLPSSTSRDEILNAMKTFSRSSAAGLDFMRPRLLQDLLSGTLGSTAERLADAIAKVVDVLRWGSPPSCFIPLIFGARMFALKKKDGSLRPIACSSVVRRLAVKISCQDNKDAVLAALGDHQLGFATPGGTEVAVHCARTFLQSRKVPTAMVKLDFRNAFNSVRRDHLLQSVKSWVPLLFHQTNLAYGQSSHLVMPHNTMLSQTGLQQGDPLGPPLFCLCIKDMVDTLRSPLNAWYLDDGVLGGDLPTVLDDIRKVIDFGVISGLNLNPGKCEVYVTEHNGIEPLDLTDLLSLLPGCRVVDKDDLELLGVPLLPDGVPKALAARKGKLNFATGRLSQLGAHCGMFLLRSCFSATKLTHLVRGCNLSSSPELLQPFNDLSLDISEEILNLQLTAVARDQVMLPISLGGLGMPDAVMMAGPAIVSSLTQASERVRALLDKDGWEAYNAELQKLTDRLLSLFDSPPDERTKQSSWTDPLQEKRLTSLIDRAPTVADKARLRAVSSQGAGAWLHALPCPRIGTLLDDETTRISTGLRLGVDLVVPHRCRCGYLVDALAHHGLSCALSAGRRARHSALNDTFSRALRSAGFPCVLEPPGLSRDDGKRPDGLTLTPFERGRMLVWDATVTDSLAPSMVGTGADQAGHASRLAEANKCRKYSGVSYPHQFCPLAFETMGGPGPLTLKLIQRVGRSLNLSTGDSRASEFLRQRLSLDIQRGNAASVRGTLLNWANPGLDYP

SEQ ID NO: 6844 - protein, 897 aa, Dermanyssus gallinae
MPDNNNPSGTEAAQTSPFLDTSNRATCPVCKGVFTKRGLARHISARHADNANRPFTAHRASTEEIDIDTLLVDIQANMRQAKLLRILPKSVRPTVAEELTNVFSNVAKDNDFSAWYSLFSFAPVVLRLPRAEKDARSLSVVIRKNLSEFSAGKRLRDLTHEGSGSKAYLDDNLCRRVRVKLSEGDISGAARLVSSEDILAPVNENTEALRSKHPQAPRDLTMPTPPAVTLPSSTSRDEILNAMKTFSRSSAAGLDFMRPRLLQDLLSGALGSTAERLADAIAKVVDVLRWGSPPSCFIPLIFGARMFALKKKDGSLRPIACSAVVRRLAAKISCQDNKDAVLAALGDHQLGFATPGGTEVAVHCARTFLQSRKVPTVMAKLDFRNAFNSVRRDHLLQSVKSWVPLLFHQTNLAYGQSSHLVMPHNTMLSQTGLQQGDPLGPPLFCLCIKDMVDTLRSPLNAWYLDDGVLGGDLPTVLDDIRKVIDFGVISGLNLNPGKCEVYVTDHNGIEPLDLTDLFSLLPGCRVVDKADLELLGVPLLPDGVPKALAARKDKLNFATGRLSQLGAHCGLFLLRSCFSATKLTHLVRGCNLSSSPELLQPFNDLSLDILEEILNLQLTASARDQVMLPISLGGLGMPDAVMMAGPAIVSSLTQASERVRALLDQDGLEAYNAELQKLTDRLLSLFDSPPDERTKQSSWTDSLQEKRLTSLIDRASTVADKARLRAVSSQGAGAWLHALPCTRIGTLLDDETTRISTGLRLGVDLVVPHRCRCGYLVDALAHHGLSCALSAGRRARHSALNDTFSRALRSAGFPCVLEPPGLSRDDGKRPDGLTLTPFERGRMLVWDATLTDSLAPSMVGAGADQAGHASRLAEANKCRKYSGVSYLSLLALKLSSL

SEQ ID NO: 6845 - protein, 960 aa, Dermanyssus gallinae
MPDNNNPSGTDAVQTSPFLDTSNRATCPVCKGVFTKRGLARHISARHADAANRPFTAHRASTEEIEIDTLLVDIQANMRQAKLLRILPKSVRPTVAEELTNVFSNVAKDNDFSAWYSLFSFAPVVLRLPRAEKDARSLSVVIRKNLREFSAGKRLRDLTHEDSGSKAYLDDNLCRRVRVKLSEGDISGAARLVSSEDILAPVNENTEALRSKHPQAPRDLTMPTPPAVTLPSSTSRDEILNAMKTFSRSSAAGLDFMRPRLLQDLLSGALGSTAERLADAIAKVVDVLRWGSPPSCLIPLIFGARMFALKKKDGSLRPIACSLVVRRLAAKISCQDNKDAVLAALGNHQLGFATPGGTEVTVHCARTFLQSRKVPTVMVKLDFRNAFNSVRRDHILQSVKTWVPLLFHQTNLAYGQSSHLVMPHNTMLSETGLQQGDPLGPPLFCLCIKDMVDTLRSPLNAWYLDDGVLGGDLPTVLDDIRKVIDFGVISGLNLNPGKCEVYVTDHNGIEPLDLTDLFSILPGCRVVDKADLELLGVPLLPDGVPKALAARKDKLNFATGRLSQLGAHCGLFLLRSCFSATKLTHLVRGCNLSSSPELLQPFNDLSLDILEEILNLQLTAVARDQVMLPISLGGLGMPDAVMMAGPAIVSSLTQASERVRALLDKDGWEAYNAELQKLTDRLLSLFDSPPDERTKQSSWTDPLQEKRLTNLIARAPTVTDKARLRAVSSQGAGAWLHALPCPRIGTLLDDETTRISTGLRLGVDLVVPHRCRCGYIVDALAHHGLSCVLSAGRRARHSALNDTFSRALRSAGFPCVLEPPGLSRDDGKRPDGLTLTPFERGRMLVWDATVTDSLTPSMVGAGADQAGHASRLAEANKCRKYSGVSYPHQFCPLAFETIGGPGPLTLKLIQRVGRSLNLSTGDSRASEFLRQRLSLDIQRGNAASVRGTLLNWANPGLDNP

SEQ ID NO: 6846 - protein, 961 aa, Dermanyssus gallinae
MPDNEIPNGSEADHAFVVGDPNRATCPVCRGVFTRRGLARHISVRHADAVNRPSTSHQARAEDFDVNTLLSDIQANMRHAKLLRILPKSVRSTVAEELTKVFLNVAKDNDLSAWYSLFSFAPVVLRLPRARKDAQSLSVLIRKNLRDFSSGLRLRDLTHEGSGRKMMAYLEDDLPRRVKVKLSEGDISGAARLVSSQDMLATANENTEALRSKHPDAPTDLSMPTPPAVTLPSSTSREEVLSAMKTFSRSSAAGLDFIRPRLLQDLLSGALGSTAGRLADAIAKVVDVLRWGSPPSCLLTLIFGARMFALKKKDGSLRPIACSSVVRRLAAKIGCYDNREAISATLGQHQLGFATPGGTEVVVHCARAFLQSRKLPTVMVKLDFRNAFNSVRRDHLLRAVKSWAPLLFHHTNLAYGLEPSHLVMPHNAMLSQTGLQQGDPLGPPLFCLCIKELVDSLQSPLNAWYLDDGILGGDLPTVLDDIRKVIEFSAISGLTLNPVKCEVYVTAHNEVEPLDLTNLFDLLPGCRVVDKVNLELLGVPLLPEGIAKALDSRRDKLDFAASRLPQLGAHCGLFLLRSCFSATRLTHLLRGCNLFLSQELLQPNGLSLDILEIILNLKLTAAAREQVMLPVSLGGLGVPDAVMTAGPAIVSSLTQAADRVKALLDSDGWDAYNGELQRLTDELSLLFDSPPDDRANQGNWTTPLQEKRLANLINRAPSVADKARLRAVSSQGAGAWLHALPCPRIGTLLDDETTRISAGLRLGVDLVVPHRCRCGDFVDALAHHGLSCALSAGRRARHSALNDTFSRALRSAGFPCVLEPPGLSRDDGKRPDGLTLTPFERGRMLVWDATVTDSLAPSMVGAGADRAGHASRLAEANKCRKYSSVDYPHEFCPLAFETMGTAGPLTLKLIQRVGRSLNLSTGDSRASEFLRQRLSLDIQRGNAASVRGTLLNWANPGLENP

SEQ ID NO: 6847 - protein, 926 aa, Dermanyssus gallinae
MRGLFVRAEQSICENRATCPVCKGVFTKRGLARHISARHADAANRPFTAHRASTEEIDIDTLLVDIQANMRQAKLLRILPKSVRPTVAEELTNVFSNVAKDNDFSTWYSLFSFAPVVLRLPRAEKDARSLSVVIRKNLREFSAGKRLRDLTHEGSGSKAYLDDNLCRRVRFRLSEGDISGAARLVSSEDILAPVNENTEALRSKHPQAPRDLSMPTPPAVTLPSSTSHDEILNAMKTFSRSSAAGLDFMRPRLLQDLLSGALGSTAERLADAIAKVVDVLRWGSPPSCFTPLIFGARMFALKKKDGSLRPISCSSVFRRLAAKISCQDNKDAVLAALGNHQLGFATPGGTEVAVHCARTFLQSRKVPTVMVKLDFRNAFNSVRRDHLPQSVKSWVPLLFHQTNLAYGQSSHLVMPHNTMLSETGVQQGDPLGPPLFFLCIKDMVRSPLNAWYLNDGVLGGDLPTVLDDIRKVIDFSVISGLNLNPGKCEVYVTDHNGIEPLDLTDLLSLLPGCRVVDKADLELLGVPLLPDGVPKALAARKDKLNFATGRLFQLGAHCGLFLLRPCFSATKLTHLVRGCNLSSSPELLQPFNDLSLDILEEILNLQLTAVARDQVMLPISLGGLGMPDAVMMAGPAIVSSLTQASERVRALLDKDGCEAYNAELQKLTDRLLSLFDSPPDERTKQSSWTDPLQEKRLTSLIDRAPTVADKARLRAVSSQGAGAWLHALPCPRIGTLLDDETTRISTGLRLGVDLVVPHRCRCGFIVDALAHHGLSCALRAGRRARHSALNDTFSRALRSAGFPCVLEPPGLSRDDGKRPDGLTLTPFERGRMLVWDATVTDSLAPSMVGAGADQAGHASRLAEANKCRKYSGVSYPHQFCPLAFETIGGPGPLTLKLIQRVGRSLNLSTGDSRASEFLRQRLSLDI

SEQ ID NO: 6848 - protein, 908 aa, Dermanyssus gallinae
MPDTNNPSGTEAAQTSPFLDTSNRATCPVCKGVFTKRGLARHISARHADAANRPFTAHRASTEEIDISTLLVDIQANMRQAKLLRILPKSVRPTVAEELTNVFSNVGKYNDFSAWYSLFSFAPVVLRLHRAEKDARSLSVVIRKNLREFSAGKRLRDLTHEGSGSKAYLDDNLCRRVRVKLSEGDISGAARLVSSEDILAPVNENTEALHSKQPQAPRDLTMPTPPAVTLPSSTSRNEILNAMKTFSRSSAAGLDFMRPRLLQDLLSGALGSTAERLADAIAKVVDVLRWGSPPSCLLPLIFGARMFALKKKDGSLRPIACSSVVRGLAAKISCQDIKGAVLAALGDNQLGFATPGGTEVAVHCARTFLQSRKVSTVMVKLDFRNAFNSVRRDHLLQSVKSWVPLLFHQTNLAYVQSSHLVMPHNTMLSQTGLQQGDPLGPPLFCLCIKDMVDTLRSPLNAWYLDDGVLGGDLPTVLDDIRKVIDFGVISGLNLNPGKCEVYVTDHNGIEPLDLTDLSSLLLGCRVVDKADLELLGVPLLPDGVPKALAARKDKLNFATGRLSQLGAHCGMFLLRSCFSATKLTHLVRGCNLSSSPELLQPFNDLSLDILEEILNLQLTAVARDQVMLPILGGLGMPDAVMMAGPAIVTSLTQASERVRALLDKDGWEAYNAELQKLADRLLSLFDSPPDERTKQSSWTDPLQEKRITSLIDRAPTVADKARLRAVSSQGAGAWLHALPCPRIGTLLDDETTRISTGLRLGVDLVVPHRCRCGYLVDALAHHGLSCALSAGRRARHSALNDTFGRALRSAGFPCVLESPGLSRDDGKRPDGLTLTSFERGRMLVWDATVTDSLAPSMVGAGADQAGHASRLAEANKYRKYSGVSYPHQFCPLAFETMGGPGPLTLKLI

SEQ ID NO: 6849 - protein, 1064 aa, Eupelmus urozonus
MTGCGRSFPSKIGLGVHRRKAHSALADQMGVEKALARVNTKDRWSSEERSMLARKEAELTIRGGIPHMNLELMKYSPRTQESIKAIRRRADYKELVQEFVKELRVSSATLCQPVRAEASTQPQSSRSLRSKRGALPPERASEEPLPNIAEASDLPEPEEEDEDDLFVDAETVRNSEIPPDEFLRYFGSLETPEDDKFAAQRLHTICGMTLWRSKEEVLKELEYYLLELFPPKSQNQRAIRPTPPEPTNRKARRRAEYKKVQDVWRKDKTRCIKMIVNEENAPRPTVHREIMEPFWTSTFTRTPVPAPVLPPPERLLDGIWQPITPRETWGCFPPNNTAAGPDGLKVGELKKVPRAVIARIFNLFMWCGKLPEHLCGARTILIPKVNGANDPKKFRPITVKSVLVRAFHKTLASRVTRVVPMDPRQRGFIESDGCAENVMILDLMLKYHHERHRQLHMAAVDLEKAYDSVTHEAIREVLTTKGLPPQFIEYFMKTYEDSYTVLQYGGWESGRIHPTCGVQQGDPLSPPIFNMVVDEMLKRLPAHIGADLDGWFVNATAFADDLNLFAQTERGLQALIDASTAFLGECGLRANPDKCHTLSIMTVPKEKRTVIDARPKFKIGNAVIPAVNRTDVWRYLGVDFTADGRVISDAKGKLSQHLELLTKAPLKPQQRMWALRVVLIPGLLYRSVLGRTTLGYLRSIDGFIRHYVRTWCRLPNDCPNGYIHAAIEDGGLGIPPLRWKATLDRLTRLKELEKSSYISGLAAGRYLLREISACENRLKQADGVIINSPEMLQEMQKNILCKSFDGAPLANSSKVKGQHRWVGEPTRFLKGADYINCVRARIAALPTKARCARGRFKDKHCRAGCENVETLNHVLQFCPRTHGARIKRHNAVTDYVKRSLEKRGVEQILEEHEMLIGDEKLKPDLIIVRQDRAIVVDAQILGDQRDTEKAHDDKCKKYGGEEYKEKVRQLTGKDIVHSTSVTLNWRGLWESKSVADLLSQDVIRRADIKILSTRVLIGAVIGFRWHSSSTVMATTGGEYRERRGRQVTTRDVRRWRRQDRAGVG

SEQ ID NO: 6850 - protein, 1039 aa, Eupelmus urozonus
MGVEKVLARVNTKDRWSDEERSITARKEAELTIRTGALNMNIKLLKYTTRTLESVKGIRRRADYKQLVQQLITELRDSEPTLSQPARMEASKRVHPTSRSMRSRRRALSPESPTQELLTDTTTVAGSHPLEEVEEEDEDLFVDAETVRNSKVPPDEFTRYFQNLEPPEDDKFGAQRLHTICDMALWRSKEEVLQELGHYLLELFPPKTQNHRAGRPTPPEPRNRKQRRRAEYKKVQDLWRKDKTRCVKMILNEDIAHSESVHREIMEPFWTSTFTRTPVPAPVLPPPERILDGIWHPISPNNIKGCFPPHNTAAGPDGLKVEDLKKVPLSVLARIFNLFMWCGSLPGHLCAARTILIPKVNGANDPRKFRPITVKSVLVRAFHKTLASRVTEVVPMDPRQRGFIESDGCAENVMILDLMLQYHHERHRPLHMAAVDLEKAYDSVTHGAIREVLTTKGLPPQFIEYFMKVYEDNYTVLQYGGWESGRIHPTCGVQQGDPLSPPIFNMVIDEMLKRLPTHIGADLDGWLVNASAFADDLNLFAQTERGLQALLDASTAFLGDCGLRANPDKCHTLSIITVPKEKRTVVDARPKFKIGSAVIPAVNRTDEWTYLGVNFTANGRVISDAKKKLNHHLELLTKAPLKPQQRMWALRVVMIPGLLYRSVLGRTTLGYLRSIDGLIRHYVRTWCRLPHDSPNGYIHAAIEDGGLGIVPLRWKATLDRLIRLKNLQKSSYISGLAAGRYLVREISACENRLKVGDGRIMTSPQMLRELQKTILCKAHDGAPLAISSEVKGQHQWVGEPTRFLKGADYISCIRARIAALPTKSRCARGRFKDKHCRAGCEYVETLNHVLQFCPRTHGARIKRHDAITKHVKKSLEKRVEQVIEEPEMRVGDEKLKPDLIIVREDRAIIVDAQVLGDQRDMAKAHEDKCRKYGSADVKQQVRQITGKNLVHSTSLTLNWRGLWEPKSVADLLSQDVIRRKDIKIISTRVLIGAVMGFRWHSSSTAMATSGGGYQGRQGNKGTTTRDVRRWRRRERTGVG

SEQ ID NO: 6851 - protein, 1035 aa, Eupelmus urozonus
MGMEKILARVNTKDRWSNEERSVIARKEAELTVRGHVLNMNINLLKYTARTLESVKSVRRRADYKELVLKFVTELRTRDPALSQPRLEASKKPSSSRSLRSKRVALPRKSTLQEPSQNIATGSQPPNILEEEDEDVFVDAETVRNSEIPPDEFTKYFQSLETPEDDKFAAQRLHTICGMTLWRTKEEVLRELGLYLLEIFPPKSQNHRADRPTPPEPKNRKQRRRAEYKKVQDLWRKDKTRCVKMIINEDTASGVSVHREIMEPFWTSTFTRTPAPPPVLPPPERMLEGIWHPITPREIKGCFPPHNTAAGPDGLKVADLQKIPLAVMARIFNLFMWCGKLPEHLCGARTILLPKVNGANDPKKFRPITVKSVLVRSFHKTLASRVARVVPMDPRQRGFIESDGCAENVMILDLMLKYHHERHRPLHMAAVDLEKAYDSVTHGAIREVLTTKGLPPQFIDYFMQTYEDNYTILQYGGWESGRIHPTCGVQQGDPLSPPIFNMVVDEMLKRLPNHIGADLDGWHVNASAFADDLNLFAQTERGLQALIDAATAFLGECGLRANPDKCHTLSIANVPKEKRTVVDARPKFKIGSAVIPAVNRTDVWRYLGVDFTANGRVISDAKSRLKQHLELLTKAPMKPQQRMWALRVVVIPGLLYRSVLGRTTLGYLRSIDGMIRHFVRAWCRLPNDCPNGYIHAAIEDGGLGISPLRWKATLDRLTRLKNLEKSSYISGLAAGRYLTREISACENRLKQPDGIIIASPEMLQEMQKNILCKSCDGAPLANSNKVKGQHRWVGEPTRFLKGADYINCVRARIAALPTKSRCARGRLKDKHCRAGCNYVETLNHVLQFCPRTHGARIKRHNAVIDYVKKSLEKRGVEQIFEEPEMRVGDEKLKPDLIIVRQDRAIVVDAQILGDQRDMGKAHEDKCKKYGGVECKAMVRQLTGKDLVHTTSMTLNWRGLWESKSADDLLSQNVIRKADIKVLSTRVLIGAVIGFRWHSSATVMATTGGEYRERRGRGVTTRDVRRWRRRDRTGVG

SEQ ID NO: 6852 - protein, 1163 aa, Bregmaceros cantori
MPRSSSPGTPVKRRKVGSPGILSMSLDRYKGISRASLRYGAKIRPKSTYCTPTRKADGTTEILCEQQVWSVTTGEARRGRESIPSRRFLRKRLFDTEPDSSVVVMSLDGGEQSKDRLADVFYPFNTTFCQICNDSLESAAEAIFHLRSKHKITRVGHVCGKCGRSLESTRSAATHAGRCKRKSYPKYVRIGAGFDCNWCTRDFKSQRALDQHCRTSHSAMEKEVVLEAGTSTSVQPDENTVITPIVTRHDPREGGLEADDSDPEPVDLTESPEPPDDRPNLADCIKRSLRSKGPILPDGARLLTRKQIRQAVKEFVCADAKRNRKRRAARFKFVGYRKHKDALHRRWRTKPREVAGIVLNDNVDAMCGIPKAMVEKEYAAIWEKEFPFRNLKGFKIKFGYDGSYMEHPVTAEEVEFVYKRTNKKSAPGPDGVRYSSLPKWDPTFQKHARLFNSMIVRKYVPKSMLRSRTVLLPKVKDRVLLKEIGNWRPITISSSLLRIFTGILVRRMSEALPTSLRQKGFKRLAGCSENIALLQGIVDRCKETRAPLAVVFIDLAKAFDCVSHDHILHVLKKRKADPTLISIISGMYNKSSTTIETSRWRSRSIQIRSGVKQGDPMSPLLFNLAIDPLITTLEERGRGVGIDGHKITAMAYADDLVIMSDSHDGMVENLRILEEFSVRTGLCAKPEKCKALFLNQKRSKRDRQVGAPWRINGVELQMVRKGHEAKYLGLQVDGKGTFVKQDTQTIVKDLCDRIRKAKLKPRQKIQLLKNYAIPRLYYRAVHGQVTAFGLGTNLSRADQCIRNLVRQSLHLEPTITNGLIHSKMAMGGLGVPCLYRTIPAQMVKRIHKLYFSEDPLVRHLSRHTVPRDKFDKIVTMAGWEPSEVPTEIDPETGKKPSPWRGLQPYSEKAFEEWLALPVQGAGLQLFDHKVSNNWLAPWRNEQWSEATFIKALQMRTNTLPTMEFLLRGLKNTAGLNSDCRNCGMAIETQHHILCECVSTKKLRIERHNAIVRKLSAFAHPDWEVRTEVAVSHGGRYVAKPDMIFFNKLDKSVMVLDVAVVTDHYDGNLKAAKLRKEKKYKGFKQPILDMYPGASQCSFTGFIVGARGAWPKTNDNTLLELVIFKTKANRLAHLLVSEVLRRSVTMFQAFLTEARSGPRDQDET

SEQ ID NO: 6853 - protein, 1163 aa, Bregmaceros cantori
MPRSSSPGTPAKRRKVGSPGILSMSLDRYKGISRASLRYGAKSRPKSTYCTPTRKADGTTEILCEQQVWSVTTGEARRGRESIPSRRFLRKRLFDTEPDSSVVVMSLDGGEQSKDRLADVFYPFNTTFCQICNESLESAAEAICHLRSKHKITRVGHVCTKCGRSLESTRSAAIHAGRCKRKSYPKYDRIGAGFDCKWCTRDFKSQRALDQHCRTSHSAMEKEVVLEAGTSTSVQPDESVVITPVVTRHDPREGSPEAGDSDPEPVDPAESPEPPESRPNLADCIKRSLRLRGPVLPDGVRLLTRKQIRRAVKEFVCADAKRNRKRRAARFRLRGYRKHKDALHRRWRTKTKEVAGIVLDDKVNAWCDIPKVAVEKEYAAIWEKVFPFRNLKGFKIKFGYDGSYLEHPVTAEEVEFVYKRTNKKSAPGPDGVRYSSLPKWDPTFQKHARLFNSMIVRKYVPKRMLRSRTVLLPKVKDRVLLKEIGNWRPITISSSLLRIFTGILARRMSEALPTSPRQKGFKRMAGCSENIALLQGIVDRCKETRAPLAVVFIDLAKAFDRVSHDHILHVLKKRKADPTLISMIKEMYNKSSTTIETSYWKSRSIQIRSGVKQGDPMSPLLFNLAIDPLITTLEERGRGVGIDGHKITAMAYADDLVIMSDSHDGMVENLRILEEFSVRTGLCAKPEKCKALFLNQKRSKRDRQVCAPWRINGVELQMVGKGNEAKYLGLQVDGRGVFVKQDTQTIVKDLCDRIRKAKLKPRQKIQLLKNYAIPRLYYRAVHGQVTAFGLGTNLSRADQRIRNLVRQSLHLEPTITNGLIHSAMAKGGLGVPCLYRTIPALMVKRIHKLYFSEDPLVRHLSRHTVPREKFDKIVVMAGWEPSEVPTEIDPDTGKKPSPWRGLQPYSEKAFEEWLALPVQGAGLQLFDNKVCNNWLAPWRNEKWSEATFIKALQMRTNTLPTMEFLLRGLKVAAGLNSDCRNCGMAIETQHHILCECISTKKLRIERHNAVVKKLSAFAHPDWEVRTEVEVTHGGRHVAKPDMIFFNKTDKSVMVLDVAVVTDHYDGNLKAAKLRKEKKYKGFKQPILDMYPGASQCSFTGFIVGARGAWPKANDNTLLKLVIFKTKANRLAHLLVSEVLGRSVTMYQAFSTEARSGPKNLDKT

SEQ ID NO: 6854 - protein, 1216 aa, Callosobruchus maculatus
MVNSPMKMENQMESLGKKSLPGGDRQGTSGAGAGRGSMRDTGPMVLTRRAPRNQGATAHLKALNDNASITAQPSNEEHTCEGAARLSPTLPDSLPGPARMANAAVRRDKPSRIRWSSEMNKDVIKTFYYVTKCSDIAPPGWRAQLHTEFDKLYPELRLTEQNVVDRKNVILKKGYLTLTEISEIKREVGNTISSQEEQALMDPQPEPVNSNEHNMSRPEDNLNHEQRELETLESRFISNVRFFEYSDPLARPKLPKLIFKPSTSLILKNTNKILQRQLQDSGNCLSKVHLLLYVAAATVLESNNQPLDNSTTEHSCRQNRTCEAWKRRLTSEIDKFRAKADLITTYLKGVRTEKIRWQIEKVLRAINIRHDSANVNEKLIEYRDEMRQRAKAKGARLKRYNEATKRKRQNALFSSNQRKFYRTLSTDAEADISVQLDDQRFSQYWENLWSNSSKCNLAASWIEQIEGAADNINCMEATKITKEDIAAALKGSSNWRAPGPDNIQNFWIKSFTVLHEHLASSYNECMEDPNLLPPFLAVGTTHLIYKKGNPEDPQNYRPITCLSVIYKLLTAILNNSLYRHCEANNIISPLQKGCSRGSKGCKELLTIDAIIAAQVRQKRRDFYACYIDYSKAFDSVPHSWLLKVLQIYKVHPKAQSLLKHLMSSWKVNLTINNKHLGKVHINKGIYQGDSLSPTWFCLALNPLATLLDNTRVGYRLDTTSNVRINHMMYMDDLKLMAETKNQIKSLISTAKMFSKDIKMDFGLEKCAVVCIKRGKIQNIDEITTEMKCLGEEEQYKYLGFEQLQGLNHTSLKRALTEKYKKRVTKLLNTNLNSKNLTSAINTWAVPTLIYSFGIVKWSLTDLEELDRMTRKLLTKFRGLHPSSAVERLYLPRSQGGRGLVNISELCRAQVDRLRHYFLNHSWQLIKEATKADINATPLKLANITETRPPVKSADLITNWKAKALHGRFPNQLHNGSTDVKSSVLYLQKGYLHPETEGFISAIQDKCIRTRNYERHILKTNVTDRCRRCDCIGETIEHVTAGCSSMAGDAYLGRHNSVAAIIHQTLGLRSGLLKRSVPFYKYVPTAVMENDASLLYWDRPIITDRHIQHHRPDIIYINKKEKTAIIIDIALPLTVNLRKTEDEKSIKYQDLALELKRLWKLSEVTIVPIVISVEGVVTNRFSKYLDNAALPKQLLAPIQKAAILATCRLVRKFLALG

SEQ ID NO: 6855 - protein, 1140 aa, Callosobruchus maculatus
MKWTTEINIFIMRTYYQLTRLETDMTAYRERLHQAFLEKYPSISVTAQRIADQKRAIIRNNLICHEQIEQIKREVAEEQGCNGASASDRQNSEDNVESTMVADGEIHGEVADVANVNSDAQQGTQEKKELQIGLEEGLRIAMQEYMGTDPTKRPMIPRQRTSRKFARIVETFNVTIIPKYLNSVHSFEELHGLIYCTALAAARSNGARIAGTTQQNTTNRRHGIPSWKRRLMRRIEQIRAEIAQLLQFNKGSPSRRLQRKVDLIIRKHRVHTSRDPHNVGLTELLDTLKQKLAAFSTRLQRYSKCSRRKHQNNQFNSNEKQFYRILKTNGQTNQINGNDNLPTSDEITTFWSTLWSNSVGYHQNSDWIKVEQNKMNTITPMERPVITEKLFKDVISRLHNWRCPGSDNIHNFWYKKLTSVHNIMMRYVNEFLTTPDIMPLFLTEGRTHLIPKGEVSMDPSKYRPITCLQTFYKITTSCIAELLTAHLESKNIMTEQQKGCRRGGKGCKEQLVIDAVILKQAQRKNRNISCCYIDYQKAYDSIPHEWLIRAMDIYKVHPLLINFIKNGMKSWRTVISLSNKQCTITTPEVKISRGIFQGDALSPLLFCLALNPLSNMLNMTGKGYRLKSDEGDHTVSHLLYMDDLKLYGESYEQLKQLIGVVEHFTNDINMKFGLDKCRIVNIKKGKIEATGFETGQGELIEAMGENDCYKYLGYEQSRRINHTTTKTTLLNEYSARVRALCRTDLNSKNLFKAISTFATSVLTYSFGIITWSDTDLENIMRCTRVELTKHRKHHQKASMLRLTLPRSEGGRGLTDVKNLHNNQVRQLRKYFHNRKEDSTLHRIVCYSDKKYTPLNLADDDMQSREKIYSTLEKHHDWRSMALHGRHPHDLDQIYVDKEASNAWLRRGELFPESEGFCIAIQDQVVCTNNYLKHIIKDPRVSDDRCRRCHDKPETIQHILSACSTLAQSDYLHRHNQVAAIIHQHMAINLKLLPSSEPYYKYHPAAVLESNGCSLYYDRSIITDRSVPNNRPDIVLHNRNLKTALIVDIAVPNTHNILNTIAEKKRKYLDLGDEIKRMWKLDKVTIVPIVLSTTGIIPKQLLENLKILDIDNNVYMLLQKAVILNTVHIVRKFMSQDCEST

SEQ ID NO: 6856 - protein, 909 aa, Callosobruchus maculatus
MRRIEQIRAEIAQLLQFDKGSPSRRLKRKVDLIIRKHRVHTSRDPHNVGLTELLDTLKQKLAAFSTRLQRYSKCSRRKHQNNQFNSNEKQFYRVLKTNGQTNQINGNDNLPTSDEITTFWSTLWSNSVGYHQNSDWIKVEQNKMNTITPMERPIITEKLFKDVISRLHNWKCPGSDNIHNFWYKKLTSVHNIMMRYVNEFLTTPDIMPLFLTEGRTHLIPKGEVSMDPSKYRPITCLQTFYKITTSCIAELLTAHLESKNIMTEQQKGCRRGGKGCKEQLVIDAVILKQAQRKNRNISCCYIDYQKAYDSIPHEWLIRAMDIYKVHPLLINFIKNGMKSWRTVISLSNKQCTITTPEVKISRGIFQGDALSPLLFCLALNPLSNMLNMAGKGYRLKSDEGDHTVSHLLYMDDLKLYGESYEQLKQLIGVVEHFTNDINMKFGLDKCRIVNIKKGKIEATGFETGQGELIEAMGENDCYKYLGYEQSRRINHTTTKTTLLNEYSARVRALCRTDLNSKNLFKAINTFATSVLTYSFGIITWSDTDLENIMRCTRVELTKHRKHHQKASMLRLTLPRSEGGRGLTDVKNLHNSQVRQLRKYFHNRKEDSTLHRIVCYSDKKYTPLHLADDDMQSREKIYSTLEKHHDWRSMALHGRHPHDLDQIYVDKEASNAWLRRGELFPESEGFCIAIQDQVVCTNNYLKHIIKDPRVSDDRCRRCHDKPETIQHILSACSTLAQSDYLHRHNQVAAIIHQHMAINLKLLPSSEPYYKYHPAAVLESNGCSLYYDRSIITDRSVPNNRPDIVLHNRNLKTALIVDIAVPNTHNILNTIAEKKRKYLDLGDEIKRMWKLDKVTIVPIVLSTTGIIPKQLLENLKILDIDNNVYMLLQKAVILNTIHIVRKFMSQDCEST

SEQ ID NO: 6857 - protein, 1783 aa, Caenorhabditis becei
MGPNPTPTSAQVRWRDLENTPMPVRVCPVPLWLQRVFCLGSELTPKTVMSCSGPSGLQRELCLESSITPMPSVACPVPLRLQRELCLGSGGTGKTVATRFGQTEVWSELEAAPKTVVTFPEQIKFWSELEAAPKTVVTFPEQIKFWSELEAAPKPLVACPTPLWLQRELCWGSGGTSKTVVTFPGQTEIWSELETAPKTVVTCPEQIKFCLELETAPKTVVTCPEQIKFWSELGAAAGLPSLRGGGTERPEREAGKPLKMVPLKRESNQLYLRVAYPSEEKLECPLCTSVTSKLGLGADGVRYMNTHIRKVHNVEPKWSYKCSLCRMMPPGNQQVAWMRAHLEEEHGIIVKAPKEQQTLYVKTLAKLEAEAPSLAVIKKKPVKLVTPTKTQPVTTSTVLTRSMTKSLSVEKQETRPLVDRSSKALDTITEESVAPKNPARRSLAAMMKPSVIESRRSSIGLKPTNQPAQTDTIGVRRWVKAPMRAPVRPVAKREIIVAPQVKQAEPKKVVPPKVITVSPDKGPVKRRFNTWCLDHEETKDAWLDDEVIKFSIERMVAKKSEYMLIDPCLWSMYKLTKDHELIKRLMDGGSTSIFPVCESGHWVLIIMDQTSAWFLDPYGKEPQGLVKQFIDSMGKERKWYDSPAPVQRDTVNCGVHVCLAAKSVVNKEFWYSREDVKTFRKKTAEMLKQTDYELFSERPAELNQIIEFEEEVWENEEEKVVLQVSPQESSVGTGKDDLGIDKRAWEEEHSKMWESEHEKNEKWEVETDQKDVKVTEEVAEPKPAPPAGNGTSGRKKKEQKKKSKVPSGVPDVLRTKVVEWYEREFNLYLEEGRSFQRLEWLTGVLTAAIFKASVGDTHAIDLIEKRCAPPEVEEGCMSTQTDKKKKKECEKKTPGRTQFCTESLVSLYCKNKGKTYNKIVGLENVQCEIPIKDLERFFKGTTSRTNVPKEVLKEMASNIPSVNIGGWMVDNFTADEVAQAMKKTKDTAPGVDGLRYFHLEWFDPNSSLLTKLYNECKEHRRIPAHWKEAETVLLYKSGDKNKPENWRPISLMPTIYKLYSSLWNRRIRSVKGVMSKCQRGFQERDGCNESIGILRTAIDAAKGRRDNLSVAWLDLTNAFGSVPHELIGHTLESFGFPVMVKDIVMDMYKGAAIRVKNKTDKSGPIEIRSGVKQGDPISPTLFNMCLENVIRRHLATAEGHKTMGTRIKVLAFADDMAILASSAGQLQKEIRKMDEDCTPLNLIFKPAKCASLIIEGGKVREEKEIVLKGQPIRSLDTRATYKYLGVLTGVQERVSELDLIARVTREVEMVKQSTLAPHQKLDCLKTFVLPKMTYMYANATPPLDEMRGFARMLTRAVKAIHNLSDRKVPCEYLQLPISKGGLGVSCPRMTYLITYLVSCMKKLWSPDRYVKHLYDMYLHEVITVETDDRWGPTEIPDFLSDDMRPLNTNFGFNMFSRMRDACRGLSKNKDSPLKMLKIVHGEDGNYAIKVQSTAKSEVVTYTSAHVMKLQQLLKAHVNEALLARFLNEKPVKSMVVRVLQQYPRSNSFVRTGKMSIAAQRWVHSARLNDLQCNYNTFEDTKSKECRRCGYENESQWHILQSCRYGLPKIITERHDAVLSRISKMIKKGTKRDWTMKIDETVHFGTRLRPDLYLESPDGKEVILADVTVPYENGLEAMRDAWDRKVIKYEPLCDLFRAQGKKASILPLVVGALGCWWAPTTVSLEKLGVNRTMSRKEIPEITTMVVEFSKNCYWNHIFGDGFTPAPNGYGTGKPIRREWKKGKN

SEQ ID NO: 6858 - protein, 1290 aa, Ormyrus pomaceus
MDHVISREGSIIIRLPPPLDEKIGCPLCTVRRGTYTYPYSGARKIENLGRHVKEQHPELPLNYCCRGCGYMAPEGTKCPRKLVNTHIASCPAINARIPTPDQGIRRRNIRRVLLGQQETPTGTQPPTARTGAAMPLPNGSGLPPGPPMREQDIRNVRTEAPAATSTQLECPASPSSTPRRNGSRNRLALRDRNRLINGSSQPPHRDIPQGHLDPASATQTQATETATPRYPPPSPERVATPASQGSSNQGPRETPTAVGAQPTRQTDMNTPSPHVPSPPSTPQEQLTRPNTSSDEDEFESPQGQIFNPASPVIAQRYEGAAEPIADDIEQARTPASPAFATVNAPAPDPIVNTEAATNRSRYPTRAQRELITLIEKVNTVEQLEVATRKTAIFLSRLIKTSTSSNDSARRHNRNGRRTRNRIESAKRIQRLYRQNKKRAIQEIVSGPARTCPVSKNEVEEYFSELATEREGEREWPRVLQQQRAPDRSSNENLIQPPNREEVVSELRHRANSAPGPDGLRYEDLKKADPGSYVTAALFKIIWERQIVPDSWKNSETTLIFKKGDEGNLANWRPIALGDTLPKLFAAILANRLKKWAKENQRFSPAQKGFLEFEGCFEHNFVLQQAIQNARNSKKELLIAWLDLTSAFTSVPHASIHRALELHGVPEETRELIRALYKDARTRIKTAEGLTDPIVLKSGVKQGCPLSPIVFNLVMEIILRHVENKGVGLPMGEEWVSSLAYADDIALLTDSASKLKQLIRAAEESAHAIGLRFNARKCATLHLANGNEVRQSVFEIEREQVRALGNGEHYEHLGSPTGYQIKQTPVNTLMEMLEDVRKIDESLLAPWQKLDATGTFILPRLDFVMQGAEIEKEYLNEADKIIKKTAKRWMNLPQRASPELLFISPSQGGGGLLPLGDLYDIYTVAHAYKILHTEDALVRKLAEEALKKTVAERLKKRQASSIDIARYLSGDLDIPRSHSKTSFWARVRNAARSARKKLGIRWIWCEEKEQLNIAVSNEQTITPDGKAKTYRLLRQQLIVKYAKSLRAKPDQGKVFDITSRCRQSNHFTRSGQNTRFCDWRFIHRARLDVLPVNGAKRWQPNGDKRCRVCGHPSETLPHVLNHCGRHAGARQKRHNNVQNRLVRAVKGPEYRERQDIEVRVNQTVAGTRGDCSAQRPDIVVRNEEKKTVEIIDVCVPFENRQESFEEAKKEKKRKYEPLAQQLRQQGYRVTVSAFIVGALGGWERGNEKVIFNLGINPSYARMMKRFMISDTISWSRDIYTEHVTGHRQYAE

SEQ ID NO: 6859 - protein, 1210 aa, Triatoma infestans
MERRLRNRIIRPLPEDRQGTSGASAGSDSMRTTGGRGPSRRAPPGEPERASAARVETSASLEPSQETTSRRLRRMKWTNEMNTFIMRNYFAITENETIQVGYRQELHRRFRTRYPELDVTEQRIADQRRAIVARNLLPQQILQQLREETAREIASVAASQVTDDELPAMSSPQAESNIESEGQQSQRGHSSEPGSERSQQDDQLLSRLRSEFSVAYEQAIGLEPRDRRPIPRIGWSRFLAKCVRLLNEQVILDNINNFTGFYEIHAAVYAAGIAAVTLVTGVCPLHVERQSVFRPRRDPPWLRRLERRVEELRKDIGRLTRFLRGEGGRRLKAKINTIMRKAQFHPGTPITRNRRRAEFLDTLRQRLSVYVARIRRYKKSMNRRADKKRFQQNERAFYRSLSRKPQEEEGTPPTQPDFEQFWGDVWSNPVQHNEQAYWIRDVTTRFASLPEMAYEGITLESFNQVLSKTLNWKTPGPDGIQNYWWKKLTTLHAGLLRSLNAFVMSPSEFPTFLAEGVTYLQFKGGDRSNPTNYRPITCLNAVYKILTSCVAEAIYQAVESRQMIAETQKGCARGTYGCKELLTVDSVVTEQAIRKKRNLYIVYIDYRKAFDSVPHSWLLEVLKRHKIHAQLVEFLQRAMQCWSTTLVLDNSRNAAPRALLPVRRGIFQGDSLSPLWFILALNPLSDMLDSSGYGYNLREGDGHPVLLTHLLYMDDLKIYAGRGSHLQSQLNIVERFSKDIGMSFGFKKCRTQTLIRGKVVPTGCTLEDGAQIEALAENDVYKYLGLVQANGIDHAAVKGVLRKQFAGRLKAVCGTGLESKSLIRAINCYCVSLLVYSFGIIKWSRTDIEGLQRLVRTTLTTFRKHHPRSAVERIVLPRSEGGRGVIELQQLHDCQIARMQAYFQSRNAVPLIQAIINADRKYTPLDLSRAPDNAEENPLVRVRELVCDWKNKPLHGQFPTMLDNRAVDKQASVAWLMEGRLFAETEGFMLAIQDQVIPTRYYLARIVGDPNVQDVSCRLCGTSTETIYHLISACPAMAQHEYLKRHNNVAKIVHSALARQVDLLPNASPYYLYSPDRVLESDRHLLYWDRTVLSDRLVAHNRPDIIWHDKQTRKVCLVDVAIPNSNNLTSSYEEKRRKYCELAQVILAQWRQVDQVDILPIIISAQGLVPHTLHTSLAKLGLNGGLIKVMQQAVILSTCHIVRIALGQPE

SEQ ID NO: 6860 - protein, 981 aa, Lysiphlebus fabarum
MYLAGSNSNNPASDATVSDAVDLTGEPSGSSGPAINNGVPPLVFDSFSCTFPGCERSFRSSRGVKIHEQKVHKDFYDAQILASNTRALDNNSGKARWTDEESNIMARKEALFFREGVKFMNKQLASAFPGRTLEAIKKQRQNPRYKDQVKIFIEELEEDVEEEELSFHSLESETDPVQNDIITFIQNLPPEESNSHSCHSLINICNNIRVWSIERIFEELALYIKTVWPVIKKVNKVKGRTPMETSGRFKRRKDYSETQNLWSKNPCLCLRKILKDKRSSHIPTKEVMVPFWRAIMTQQGVTSPGIDNRKPVCDELWRPISEEEVREAWPDRGTAPGPDGLTARNFRSTPIGIVVRIFNLFILVGKLPEQLLESQTTLIPKKEEASDPGDFRPITVSSVIARSFHKVLAKRVLKLVELDNRQKAFRQIDGCAENIFLTDLVLRHHRKYFKSVFMASMDMAKAFDSVTHQTLEDTMVSMGFPHRMVEYIMYTYHNGKTRLSCDGWKSDLLHPSCGVKQGDPLSPMLFILVIQRMLEALPKNVGVQVGHLTLNAEAFADDLVFYATTSEGLQQTIDSSTRFLSKCGLYINVNKCFTISIRGLAKQKKTAVDVNSIFTCQGQNLPALRRSDTWKYLGVHFTAEGCINREPLKPLKDKIALLTKAPLKPQQRLFALKNVVLPSLYHQLTLGKIHIGILKKADKLSREAIRRWLNLPHDVVTPYFHASVIDGGLGIPSLRWSMPFNRLNRLRNLDLSKSTVSSLANIFLENEIKETLHRLEDQGQSFDTANKISKRWATLLHSSHDGLALKKSNVVPQQHRWVSDGTKFLTGRDYCNMIKFRINALPVKARTSRGRTLDRRCRAGCPASETINHVVQQCHRTHGARILRHNAIVNYIARSLKNKWDVFEEPKLKLGDIVLKPDLLAVKGDRAVVVDASIRSEQTDLTKAHLEKVEKYKVLENVIKRQHKVISVAFTAAIISSRGLW

SEQ ID NO: 6861 - protein, 935 aa, Aphidius gifuensis
MARKEAELQRAGVKFLNMELAAAFPRRTLEAIKGQRRTEGYKAQVLRCIAELEEEVEEEELSFCGLESETDPAVNEVLTFLESLPPLKDNSHSCHSLSNICNHVRIWSIERIFEELSLYMQTVWPVANAIHKEKKRRPVELSGRAKRRKEYAETQRLFGKNPCLCLRKLLKDKSSSQVPAKEVMVPFWQAIMTQVGVTSPGIGDRKPVRNGLWSPISEEEIQNAWPDRGTAPGPDGLTARNFRSTPIGIVVRIFNLFILVGKLPEQLLESKTTLIPKKEGACEPGDFRPITVSSVIARSFHKVLAKRVLKLVDLDNRQKAFRQVDGCAENIFVTDLVLRHHRKYFKSAFMASMDMAKAFDSVTHQTLEDTMINMGFPQSMVRYVMYTYQNSKTRLSCDGWESDLLHPTCGVKQGDPLSPILFILVIQRMLDAMPGDVGVKVGHLMLNAEAFADDLVFFATTSDGLQASIDSAARFLSDCGLFINANKCFTIAINGLAKQKKTAVNANTVFTCQGQNLPALQRSVIWKYLGVHFTAEGCTIREPLRSLRESIVKLTKAPLKPQQRLFALRNVVLPSVYHQFTLGKTSIGILKKADKLSREAVRKWLNLPHDVVTPYFHADATDGGLGIPSLRWNMPLNRLVRLKNLDLNNSVDSSLATDFLEYEINLCLRRLEVDGQSMDSANKISRRWATLLHSSHDGLALKKSNVVPQQHKWVTEGTKLVSGRDYLNMIKFRINALPVKARTTRGRTADRRCRAGCPASETLNHVVQQCHRTHGARILRHNAVVNYLARALNNKWTVFEEPNFRTSTGVLKPDLLAVQGESAIVVDASIPSEQADLSKAHQDKVVKYKVLESVIKQQHKVKNVTFTAAIISSRGIWCSRSVNELVDLKVIRKREIKILSTRVLIGGLTAFNAFNKMTSTLTARTDKRIDRIGIG

SEQ ID NO: 6862 - protein, 1037 aa, Lysiphlebus fabarum
MYLAGSNSNKSASDATVSDAVDITGEPSGSSGPAINNGIPPVAFDSFYCTFPGCERSFRSSRGVKIHEQKVHKDFYDAQVLASKTRVDSTSGKVRWTNEESNIMARKEALFAREGVKFMNKELASAFPGRTLEAIKKQRQTSGYKEQVKVFIEELEADVEEEELSFGSSDSETDPVPNDILMFIENLPPEESNSHSCHSLNNICNNIRTWSIERIFEELALYIKTVWPVVKKVDKVKKRTPVETSGRFKRRKDYSETQNLWSKNPCLCLRKILKDKRSSHIPAKEVMVPFWRAIMTQQGVTSPGIDNKKPVCDSLWGPISEEEVRDAWPDRGTAPGPDGLTARNFRSTPIGIVVRIFNLFILVGKLPEQLLESQTTLIPKKEEASDPGDFRPITVSSVIARSFHKVLAKRVLKLVDLDNRQKAFRQVDGCAENIFLTDLVLRHHRKYFKSVFMASMDMAKAFDSVTHQTLEDTMVSMGFPHKMVEYIMYTYHNGKTRLSCDGWKSDLLHPSCGVKQGDPLSPMLFILVIQRMLGALPKSVGVQVGHLTLNAEAFADDLVFYATTTEGLQQTIDCSTRFLSKCGLYINVDKCFTISIRGLAKQKKTAVDVNTIFTCQGRNLPALRRSDTWKYLGVHFTAEGCINKEPLKPLKEKIALLTKAPLKPQQRLFALKNVVLPSLYHQLTLGKIHLGVLKKADKLSREAVRRWLNLPHDIVTPYFHASVIDGGLGIPSLRWCMPFNRLNRLRNLDLSKSNVSSLANIFLENEIKETVHRLEDQGQNYDTANKISRRWATLLHASHDGLALKKSNIVPQQHRWVSDGTKFLTGRDYCNMIKFRINALPVKSRTSRGRTLDRRCRAGCPASETLNHVVQQCHRTHGARILRHNAVVNYLARSMKNKWDVFEEPKLKLGDIVLKPDLPAVKGDKGIVVDASIRSEQADLAKAHLEKVGKYKVLDNIIKRQYKVNSVAFTAAIISSRGLWCSRSVNELVDLGVIKKKDIKILSTRALIGGLTAFNAFNRMTCTFSTSTNKIHRKGIG

SEQ ID NO: 6863 - protein, 1059 aa, Aulacorthum solani
MEANLSCASVHLWVAFPFVRNIAGSIRLNPASDAVASDAVDTTGELSGSTGPANDEIPPVSSNQFFCTFPGCERSFQTSRGPPLHEQKAHKDFYDAKVLAKNNIDATGRKIAGKTRWSDEEVNIMARKEAMMTRDGVKFLNLELAAAFPRRTLEAIKKQRQSRGYKAQVLKFIEELEEEVEDEELSNHSLESETDPILDGISMFLENLPPLNINSHSCHSLINICRHIRIWSKERIFEELALYIQTVWPVTDRIRKERERSPMATSRRQKRKQEYAETQRMFGKNPCLCLRRLLKDKSSSQIPTKEVMVPFWKAIMTQEGITSPGIGAKNRIHDGLWSPILEEEILKSWPDRGTAPGPDGLTARLFRSTPIGIIVRLFNLFILVGKLPEQLLESKTTLIPKKEGACEPGDFRPITVSSVIARSFHKILAKRILKLVDIDNRQKAFRQIDGCAENIFVTDLVLRHHRKYFKSAFMASMDMAKAFDSVTHQTLEDTMINIGFPQNMVDYIMHVYRNSKTRLSCDGWESELIHPTCGVKQGDPLSPILFILVIQRMLEAMPKDVGVKVGHLILNAEAFADDLVFFATTVDGLQASIDSASRFLSKCGLYINANKCFTIAISGLAKQKKTAVNRNTVFTCQGQNLPALQRSTIWKYLGVYFTAEGCTIREPLKSLKENISKLTKAPLKPQQRLFALKNVVLPSVYHQFTLGKTSIGILKKADKVCREAIRKWLNLPHDVLTPYFHADINDGGLGIPSLRWCMPLNRLARLKNLDLNNSVDSSLATTFLEDEIKICLRRLEDNGQYIDSANKLSRRWANLLHSSHDGLALKMSCVVPQQHKWVADGTKLVSGRDYINMIKFRINALPVRARTTRGRTADRRCRAGCPASETLNHVVQQCHRTHGTRVLRHNAIVNYLARNLKNKCTVFEEPKFGTSTGVLKPDLLAIDGESAIVVDASIPSEQADLSKAHRDKVNKYKVLERVIKEEHRVKNVTFTAAIISSRGIWCSRSVNELVDLKVIKKREIKILSTRVLIGGLTAFNAFNRMTSNLTSRTAERIDRIGIG

SEQ ID NO: 6864 - protein, 1252 aa, Actinia equina
MRLVTIILVLVISNMPPKKTTNTQHIRNQTEARQRIETTNDERHRVRTKWTQEMNTALIDSRTEAEHLYNSEDCPRKDNGRKIGIMELTKRIFDEKGYAYLQKSKGNLNDQYANLMKSTKTCTKAITKEMLEQKNPEDSKDQECSQSPTRERQKKQTQQEQRPDITPQSNITPVFNDLSKLANSIYLEIKDDNKEFKNRQQTTFIKRQPNKEDLQVLNKIAQALVTSQPDINPSQYLWQLNCAIYATAVAWKNYTGNKSKSKPNTATTDQKPRRLRVIENKITQLRKQASQITEEIRRLTKNGRLTPKLRKNRKWMRSEIKRKITKQLLQELKEKKINQLRIKKIQRKRKLVSHNRRTANKQFDRCEAKFYDHCKNIIKSDPNNDRPTYKDKIPQHPTTANSSLTANDFNDFWRPIWETEKETNLEAEWIHTVTEAMTSTMTTPVEDTVNIEEKDIHSSLRKKKNWSSPGNDRITNYWIKTLTTTHKGLAKAISTIFDNDIPLPDWLVGGKCIMIPKKEDPQAKDHRPITLLNTMYKTITSVVDSKLKEHQEKHQYMQLDQRGCSTNSMGCIDNLIIDKTTLEEARDRKKNLSCVWIDVKKAFDSINHEWLALTLQIHNVPTKIKNFIKNTMKKWSITLEVKIEDKKEKIGPIRLKQGILQGDSFCVRLFTLCLNPIAWWLRTTEGYTYSHNKQEKLTHLLYVDDLKTYHKSAQKALLITKTTKSMFEDIGLFWGLDKCATVNILRGKIEINEESVKISDNEELKVLDTNDYYKFLGKYENSTQLEEQVYNEASKEYLKRLSVIWSSNISMPRKVHATKTFALPGLQYHMWTSDWKINQLKDIDRRTREIVRKEGGMHHHESIKLLYLPEELGGSGMKSVEDTFKLTTIKMANYINNSKDKRIKHARTLEMNRIAQGRRSIFKQATKYAAEYNITCDFDDTGTKIPTSKDPTPANEIKTITSPSPKSIKELLRSKITEKYIKETKQQTWLGAYTNQQLQDKQISPTANQILQKWKNIPDIVYSVNKNIRQQLLPTKTYQQSKAQMTITDTKCRMCHMATESTTHVLSGCSKIAQSLYTARHDRMLRPIYHCLLEKYNFQESDNGKPWYQQSLPSAVLQNEKAKIYWNVPFQLEKAPENSANKPDIVVQDKETNAWTLFEGTVCQVGKIAERTVEKQEKYTELRAGIKKECKSSSVNQINIVFDFLAGHHEQLRKDLRTITNTDREVNFLIERCQKWILSQNVNIVKKFYEYA

SEQ ID NO: 6865 - protein, 860 aa, Papilio polyxenes
MVLAKTLSGCIQNCISENSESCWQNLFTFAFSHLHFNKSVSKSVTTQLKSNSFQNLNSLPCPSITKPFRKFDLKKVVESKVMDGDLKNASRILFCNDTLAPHNDETLKNLRLKHPSGNPSSPLPPPPDSSFQALQISDRDTFDAIMSFSSGSAGGIDGLTPQHLKDLVSASAGDAGRVLLNDITKLCNFMFSGKVNSKFVPILYGARLCAFKKKDGGIRPIAIGATFRRLASKLACRHITSSLTSKFQPVQLGFGVKGGCEAAVHSVRTFVTKYDYDVLLKVDLKNAFNSIERSALLKEVASHAPEIYHYVWQCYSQNSNLFYQNDIIDSAVGVQQGDPLGPALFSLGIQPIISKLKSKLNVWYLDDGTLGGNFDDVHKDLFQIINDFKNIGLDLNNSKCEIFFSEKISVSDKYRFSQFFSKITPGFKEVCADSLYLLGASLLPQGLEPLLKAKFDQFSNHANKLSLLNSHIALTILKHCVFVPKFTYLLRSSPAWKCTDILNKIDLSLKTTLEKILNISLNESSWTQATLPIRFGGIGVRKVSNIALPAFLASVHSVTDLCKRILNHNLDLSYAEEARTSWLAFCPNGSIPLEVHLQKQWDTPLVQRVHQDLLQAFNSDTDRARFLGVSSKESSHWLHALPSCNFGTLLDGESLRVAVGIRLGAPICQPHICPCGVRVNEFGTHGLACQKSAGRFSRHGSLNDVIRRALTSINFPSILEPYGIFRADGKRPDGLTLIPWERGKALVWDATCVDTLAASHLRGTSVRAGAASEAAEVSKCRKYESISADYVFVPLAMETLGPWGPRTNKFLKEIFHKINIVTGDKRAGSFLAQRLSITIQRGNAASVLGTIPRGVGLLDL

SEQ ID NO: 6866 - protein, 952 aa, Parnassius apollo
MNIIAPIHSQPDFLRCQNCTDGRLFKGKKGLNIHIKRCHSKNISASQPTVEIHDSSDNIPNDTNSSLFSKQLYNLYSNVPVVKRIPRGARMQLAKALSLTIQNCLTNCEKSWQKLFTFAYSHFHFSKTINKSITSQLKENSFQNLNYPINTHFPRPYPKFDLKKVVESKVMDGDLKNASRILFSDDILAPRNVETLEGLRQKHPSVNPSQNLPLPPNTSMQPLQVSEKDTLDAILSFSNGSAGGIDGITPQHLKDLVSVSAGDAGRVLLNDITKLCNFMLSGNVNPNFIPYLYGARLCAFKKKDNGIRPIAVGSTFRRLTSKLACRHIISNLKTKFQPTQLGFGTKGGCEAAVHSVRTFLTNSDTDVLLKVDLRNAFNSIDRITLLKEVANNTPEIYHYVWQCYSQNSNLFYQNHIIESAVGVQQGDPLGPALFSLGIQPIISNLKSKLNVWYLDDGTLGGKADDVLNDLTHIFQNFKNIGLEPNTNKCEIFISNNLSNSKRDTLIQNFNQISPGIKTVNSESLYLLGAPLFFDSIKPVLKTKFDQFLNHVDKLYILNPHIALTILKYCVLVPKFTYLLRSSPVWKCSDILKDIDNSLKITLENILNLRLNAIAWNQATLPIKFGGIGIRNISSVALPAFLASVHSVNDLCNTILNIKVDLCFAAEAKQIWLTLCPGENVPLEVNQQKQWDIPLVRSVHKNLFQNFHIQQDQARLLAVSTKESSHWLHALPSSNLGTLLDGESLRIAVGIRLGVAICQPHQCPCGSSVDEFGLHGLSCQKSAGRFSRHGSLNEIIRRALVSINIPSVLEPCGIFRDDGKRPDGMTLVPWERGKALVWDATCVDTLAASHLKGTCCRAGAASEAAEFSKWRKYESLRNDYIFVPFAVETIGPWGPRAMKFLKELYPRLVVAAGDKRAGSFLAQRLSIAIQRGNAASVLGTIPRGAGLFDDLNF

SEQ ID NO: 6867 - protein, 947 aa, Parnassius apollo
MNIIAPIHSQPDFLRCQNCTDGRLFKGKKGLNIHIKRCHSKNISASQPTVEIHDSSDNIPNDTNSSLFSKQLYNLYSNVPVVKRIPRGARMQLAKALSLTIQNCLTNCEKSWQKLFTFAYSHFHFSKTINKSITSQLKENSFQNLNYPINTHFPRPYPKFDLKKVVESKVMDGDLKNASRILFSDDILAPRNVETLEGLRQKHPSVNPSQNLPLPPNTSMQPLQVSEKDTLDAILSFSNGSAGGIDGITPQHLKDLVSVSAGDAGRVLLNDITKLCNFMLSGNVNPNFIPYLYGARLCAFKKKDNGIRPIAVGSKFRRLTSKLAGRHIISNLKTKFHPTQLGFGTIGGCEAAVHWVRTFLTNSDADVLLKVNLRNAFNSIDRITLLKKVANNTPEIYHYVWQCYSQNSNLFYQNHIIESAVGVQQGDPLGPALFSLGIQPIISNLKSKLNVWYLDDGTLGGKADDVLNDLTHIFQNFKNIGLEPNTNKCEIFISNNLSNSKRDTLIQNFNQISPGIKTVNSESLYLLGAPLFFDSIKPVLKTKFDQFLNHVDKLYILNPHIALTILKYCVLVPKFTYLLRSSPVWKCSDILKDIDNSLKIALENILNVRLNAIAWNQATLPIKFGGIGIRNISSVALPAFLASVHSGNDLCNTILNIKVDLCFAAEAKQIWLTLCPGENVPLEVNQQKQWDIPLVRSVHKNLFQNFHIQQDQARLLAVSTKESSHWLHALPSTNLGTLLDGESLRIAVGIRLGVAICQPHQCPCGSSVDEFGLHGLSCQKNAGRFSRHGSLNEIIRRALVSINIPSVLEPCGIFRDDGKRPDGMTLVPWERGKALVWDATCVDTLAASHLKGTCCRAGAASEAAEFSKWRKYESLRNDYIFVPFAVETIGPWGPRAMKFLKELYPRLVVAAGDKRAGSFLAKKAKYSYSARKRSQRSWHYTTGSRSF

SEQ ID NO: 6868 - protein, 949 aa, Papilio antimachus
MNISAPLHSQPDFLQCQNCTDGRLFKGKRGLNIHIKRCHSKSISASQPTVEIHNSISNSSNDTNFSLFSEQIYNYHRNVPVVKRIPRGARMQLAKALSCTIQNCFTNSEKSWQKLFTFAYSHFHFDKTINKSITSQLKETSFQNLDYPINTHLSRPRPKFDLKKVVESKVMDGDLKNASRILFSDDILAPRNVETLESLRQKHPSVNPSQGLPLPPKTSMQPLQISEKDTLEAIMSFSNGSAGGIDGITPQHLKDLVSASAGDAGGVLLNDITKLCNFMLSGNVNPNFIPFLYGARLCAFKKKDNGIRPIAVGSTFRRLTSKLACRHIISNLKTKFQPTQLGFGTRGGCEAAVHSVRTFLTNSDADVLVKVDLRNAFNSIDRVTLLKEVANNTPEIYHYVWQCYSQNTNLFYENHVIDSAVGVQQGDPLGPALFSLGIQPIISNLKSKLNVWYLDDGTLGGRADDVLSDLTYIFRNFKNIGLEPNSNKCEIFFSNNLSTSHRDTLIQNFNHISPGIKTVSTESLYLLGAPLFFDSIKPVLKTKFDQFLNHVDKLYKLSPHIALTILKYCLLVPRFTYLLRSSPVWKCSDILKDIDNNLKIAIEKILNLTLNTTAWTQATLPIKFGGIGVRNLSSVALPAFLASVHSVSNLCNIILNNKVDLCFATEAGQTWQTLCPGENVPLEVNQQKQWDIPLVQRVQKDLFHNFHSDQDKARLLAVSTKESSHWLHALPSSNLGTLLDGESLRIAVGIRLGAAICQPHQCPCGSSVDKFGLHGLSCKKSAGRFSRHGSLNDVIRRALVSINVPSVLEPCGIFRDDGRRPDGMTLVPWERGKALVWDATCVDTLAASHLRGTSFRAGAASEAAELSKWRKYESLRDDYIFVPFAVETIGPWGPRAVKFLKELHPRLVVAAGDKRAGSFLAQRLSIAIQRGNAASVLGTIPRGVGLYDN

SEQ ID NO: 6869 - protein, 862 aa, Parnassius apollo
MQLAKALSLTIQNCLTNCEKSWQKLFTFAYSHFHFSKTINKSITSQLKENSFQNLNYPINTHFPRPYPKFDLKKVVESKVMDGDLKNASRILFSDDILAPRNVETLEGLRQKHPSVNPSQNLPLPPNTSMQPLQVSEKDTLDAILSFSNGSAGGIDGIAPQHLKDLVSVSAGDAGRVLLNDITKLCNFMLSGNVNPNFIPYLYGARLCAFKKKDNGIRPIAVGSTFRRLTSKLACRHIISNLKTKFQPTQLGFGTKGGCEAAVHSVRTFLTNSDADVLLKVDLRNAFNSIDRITLLKEVANNTPEIYHYVWQCYSQNSNLFYQNHIIESAVGVQQGDPLGPALFSLGIQPIISNLKSKLNVWYLDDGTLGGKADDVLNDLTHIFQNFKNVGLEPNTNKCEIFISNNLSNSKRDTLIQNFNQISPGIKTVNSESLYLLGAPLFFDSIKPVLKTKFDQFLNHVDKLYILNPHIALTILKYCVLVPKFTYLLRSSPVWKCSDILKDIDNSLKIALENILNLRLNTIAWNQATLPIKFGGIGIRNISSVALPAFLASVHSVNDLCNTILNNKVDLCFTAEAKQIWLTLCPGENVPLEVNQQKQWDIPLARSVHKNLFQNFHIQQDQARLLAVSTKESSHWLHALPSSNLGTLLDGESLRIAVGIRLGVAICQPHQCPCGSSVDEFGLHGLSCQKSAGRFSRHGSLNEIIRRALVSVNIPSVLEPCGIFRDDGKRPDGMTLVPWERGKAQVWDATCVDTLAASHLKGTCCRAGAASEAAEFSKWRKYESLRKDYIFVPFAVETIGPWGPRAMKFLKELYLRLVVAAGDKRAGSFLAQRLSIAIQRGNAASVLGTIPRGAGLFDDLNF

SEQ ID NO: 6870 - protein, 955 aa, Parnassius apollo
MNIIAPIHSQPDFLRCQNCTDGRLFKGKKGLNIHIKRCHSKNISASQPTVEIHDSSDNIPNDTNSSLFSKQLYNLYSNVPVVKRIPRGARMQLAKALSLTIQNCLMNCEKSWQKLFTFAYSHFHFSKTINKSITSQLKENSFQNLNYPINTHFPRPYPKFDLKKVVESKVMDGDLKNASRILFSDDILAPRNVETLEGLRQKHPSVNPSQNLPLPPNTSMQPLQVSEKDTLDAILSFSNGSAGGIDGITPQHLKDLVSVSAGDAGRVLLNDITKLCNFMLSGNVNPNFIPYLYGARLCAFEKKDNGIRPIAVGSTFRRLTSKLACRHIISNLKTKFQPTQLGFGTKGGCEAAVHSVRTFLTNSDADVLLKVDLRNAFNSIDRITLLKEVANNTPEIYHYVWQCYSQNSNLFYQNHIIESAVGVQQGDPLGPALFSLGIQPIISNLKSKLNVWYLADGTLGGKADDVLNDLTHIFQNFKNIGLEPNTNKCEIFISNNLSNSKRDTLIQNFNQISPGIKTVNSESLYLLGAPLFFDSIKPVLKTKFDQFLNHVDKLYILNPHIALTILKYCVLVPKFTYLLRSSPVWKCSDILKDIDNSLKIALENILNLRLNTIAWNQATLPIKFGGIGIRNISSVALPAFLASVHSVNDLCNTILNNKVDLCLAAEAKQIWLTLCPGENVPLEVNQQKQWDIPLVRSVHKNLFQNFHIQQDQARLLAVSTKESSHWLHALPSSNLGFWGTLLDGESLRIAVGIRLGVAICQPHQCPCGSSVDEFGLHGLSCKKSAGRFSRHGSLNEIIRRALVSINIPSVLEPCGIFRDDGKRPDGMTLVPWERGKALVWDATCIDTLAASHLKGTSFRAEAASEAAEFSKWRKFESLRNDYIFVPFAVETIGPWGPRAMKFLKELYPRLVVAAGDKRAGSFLAQRLSIAIQRGNAASVLGTIPRGAGLFDDLNF

SEQ ID NO: 6871 - protein, 900 aa, Parnassius apollo
MTLLIIYLMTQILHFFSKQLYNLYSNVPVVKRIPRGARMQLAKALSLTIQNCLTNCEKSWQKLFTFAYSHFYFSKTINKSITSQLKENSFQNLNYPINTHFPRPNPKFDLKKVVESKVMDGDLKNASHILFSDDILAPRNVETLEGLRQKHPSVNPSQNLPLPPNTSMQPLQVSEKDTLDAILSFSNGSAGGIDGITPQHLKDHVSVSAGEAGRVFVNNITKLCNFMLCGNVNPNFIPYLYGARLCAFKKKDNGIRPIAVSSTFRHLTSKLACRHIISNLKTKFRPTQLGFGTKGGCEAAVHSVRTFLTNSDGDVLLKVDLRNAFNSIDRIILLKEVANNTPEIYHYVWQCYSQNSNLFYQIHIIESAVGVQQGDPLGPAVFSLGIQPIISNLKSKLNVWYLDDGTLGGKADDVLNDLTHIFQNFKNIGLEPNTNKCEIFISNNLSNSKRDTLIQNFNQISPGIKTVNSESLYLLGAPLFFDSIKPVLKTEFDQFLNHVDKLYILNPHIALTILKYCVLVPKFTYLLRSSPVWKCSDIFKDIDNSLKIALENILNLRLNTIAWNQATLPIKFGGIGIRNISSVALPAFLASVHSVNDLCNTILNNKVDLCFAAEAKQIWLTLCPGENAPLEVNQQKQWDIPLVRSVHKNLFQNFHIQQDQARLLAVSTKESSHWLHALPSSNLGTLLDGESLRIAVGIRLGVAICQPHQCPCGSSVDEFGLHGLSCQKSAGRFSRHGSLNEIIRRALVSINIPSVLEPCGIFRDDGKRPDGMTLVPWERGKALVWDATCVDTLAASHLKGTCCRAGAASEAAEFSKWRKYESLRNDYIFVPFAVETIDPWGPRAMKFLKELYPRLVVAAGDKRAGSFLAQRLSIAIQRGNAASVLGTIPRGAGLFDDLNF

SEQ ID NO: 6872 - protein, 952 aa, Atrophaneura dixoni
MNIIAPIHSQPDFLRCQNCTDGRLFKGKKGLNIHIKRCHSKNISASQPTVEIHDSSDNIPNDTNSSLFSKQLYNLYSNVPVVKRIPRGARMQLAKALSLTIQNCLTNCEKSWQKLFTFAYSHFHFSKTINKSITSQLKENSFQNLNYPINTHFPRPYPKFDLKKVVESKVMDGDLKNASRILFSDDILAPRNVETLEGLRQKHPSVNPSQNLPLPPNTSMQPLQVSEKDTLDAILSFSNGSAGGIDGITPQHLKDLVSVSAGDAGRVLLNDITKLCNFMLSGNVNPNFIPYLYGARLCAFKKKDNGIRPIAVGSTFRRLTSKLACRHIISNLKTKFQPTQLGFGTKGGCEAAVHSVRTFLTNSDADVLLKVDLRNAFNSIDRITLLKEVANNTPEIYHYVWQCYSQNSNLFYQNHIIESAVGVQQGDPLGPALFSLGIQPIISNLKSKLNVWYLDDGTLGGKADDVLNDLTHIFQNFKNIGLEPNTNKCEIFISNNLSNSKRDTLIQNFNQISPGIKTVNSESLYLLGAPLFFDSIKPVLKTKFDQFLNHVDKLYILNPHIALTILKYCVLVPKFTYLLRSSPVWKCSDILKDIDNNLKIALENILNLRLNTIAWNQATLPIKFGGIGIRNISSVALPAFLASVHSVNDLCNTILNNKVDLCFAAEAKQIWLTLCPGENVPLEVNQQKQWDIPLVRSVHKNLFQNFHIQQDQARLLAVSTKESSHWLHALPSSNLGTLLDGESLRIAVGIRLGVAICQPHQCPCGSSVDEFGLHGLSCKKSAGRFSRHGSLNEIIRRALVSINIPSVLEPCGIFRDDGRRPDGMTLVPWERGKALVWDATCVDTLAASHLKGTCFRAGAASEAAEFSKWRKYESLRNDYIFVPFAVETIGPWGPRAMKFLKELYPRLVVAAGDKRAGSFLAQRLSIAIQRGNAASVLGTIPRGAGLFDDLNF

SEQ ID NO: 6873 - protein, 949 aa, Parnassius apollo
MLEMGHIDKCEFIKIHICRYEIKVKKGLNIHIKRCHSKNISASQPTVEIHDSSDNIPNDTNSSFFSKQLYNLYSNVPVVKRIPRGARMQLAKALSLTIQNCLTNCEKSWQKLFTFAYSHFHFSKKINKSITSQLKENSFQNLNYPINTHFSRPYPKFDLKKVVESKVMDGDLKNASRILFSDDILAPRNVETLEGLRQKHPSVNPSQNLPLPPNTSMQPLQVSEKDTLDAILSFSNGSAGGIDGITPQHLKDLVSVSAGDAGRVLLNDITKLCNFMLSGNVNPNFIPYLYGARLCAFKKKDNGIRPIAVGSTFRRLTSKLACRHIISNLKTKFQPTQLGFGTKGGCEAAVHSVRTFLTNSNADVLLKVDLRNAFNSIDRITLLKEVANNTPEIYHYVWQCYSQNSNLFYHNHIIESAVGVQQGDPLGPALFSLGIQPIISNLKSKLNVWYLDDGTLGGKADDVLNDLTHIFQNFKNIGLEPNTNKCEIFISNNLSNSNRDTLIQNFNQISPGIKTVNSESLYLLGAPLFFDSIKPVLKTIFDQFLNHVDKLYILNPHIALTILKYCLLVPKFTYLLRSSPIWKCSDILKDIDSNLKIALENILNLRLNTIAWNQATLPIKFGGIGVRNISSVALPAFLASVHSVNDLCNTILNNKVDLCFASEAKQTWLTLCPDENIPLEVNQQKQWDIPLVRSVQKNLFQNFHIQQDQARLLAVSTKESSHWLHALPSSNLGTLLDGESLRIAVGIRLGVAICQPHQCPCGSSVDEFGLHGLSCKKSAGRFSRHGSLNEIIRRALVSINIPSLLEPSGIFRDDGKRPDGMTLVPWERGKALVWDATCVDTLAASHLKGTSFRAGAASEAAEFSKWRKYESLRNDYIFVPFAVETIGPWGPRAMKFLKELYPRLVVAAGDKRAGSFLAQRLSIAIQRGNAASVLGTIPRGAGLFDDLNF

SEQ ID NO: 6874 - protein, 950 aa, Parnassius imperator
MNIAPTNSQPEFLQCRNCSDGRLFKGKRGLNIHIRRCHPQSISVSQPPVPSHGTIRDINQTNFQNFSDQIHYYHRNVPILRRIPRGARMQLAKALSNTIQNCFTFNTVTSWQKLFYFAYFHFHFDKTGRKSITSQLKNNSFQNFDSPIDTSIAPRPHNFDLKKVVESKVMDGDLKNASRILFSDDILAPHNADTLESLHQKHPKANSSLLLPSPPDPSYQPLQVSEKDTLEAIMSFSNGSAGGIDGITPQHLKDLVSASAGDAGRILLGDITKLSNFMLSGNVNPNFVKIIYGARLCAFKKKDNGIRPIAVGSTFRRLTSKLACRHITSDLKSKFQPIQLGFGSRGGCEAAVHSVRTFLTNCQTDVLLKVDLRNAFNSLDRSTLLKEVAKHTPEIYHYVWQCYSQNSNLFYENHLIDSAVGVQQGDPLGPALFSLGIQPIISKLKSKLNVWYLDDGTLGGKPDDVQNDLQKIIQNFKNIGLELNNTKCELFIPDRLSSHRHSLFQNFNNISPGIKVTEADSLYLLGAPLFIESMKPLLKVKFDQFLEHVNKLYILNSHIALTILKYCVLVPKFTYLLRSSPAWKCSDFLKQIDLNLKIALEKILNLSLVSSSWTQATLPVRFGGIGIREVSNIALPAFLASVHSVHDLSRKILKNDLDLTFATEAREAWLRLCPGEDIPLEPNSQKRWDIPLVQNVQKCLLNNFHCDRDRARFLGVSTKESSYWLHALPSSNLGTLLDNESLRIAVGIRLGASICQPHRCPCGSDVDELGLHGLSCQKSAGRLSRHGSLNEIIRRALVSINIPSVLEPCGIFREDGKRPDGLTLVPWERGKALVWDATCVDTLAASHIKGTSIRAGAASEAAESGKWRKYESLKGDYIFVPFAVETIGPWGPRAMQFLKELYPRLIVAAGDKRAGSFLAQRLSLAIQRGNAASVLGTMPRGVGLYDYNSF

SEQ ID NO: 6875 - protein, 950 aa, Troides rhadamantus
MNIAPTNSQPEFLQCRNCSDGRLFKGKRGLNIHIRRCHPRSISVSQPPVPSHGTIRDINQINFQNFSDQIHYYHRNVPILRRIPRGARMQLAKALSNTIQNCFTFNTVTSWQKLFYFAYFHFHFDKTGRKSITSQLKNNSFQNFDSPIDTSIAPRPHNFDLKKVVESKVMDGDLKNASRILFSDDILAPHNADTLESLHQKHPKANSSLLLPSPPDPSYQPLQVSEKDTLEAIMSFSNGSAGGIDGITPQHLKDLVSASAGDAGRILLGDITKLNNFMLSGNVNPNFVKIIYGARLCAFKKKDNGIRPIAVGSTFRRLTSKLACRHITSDLKSKFQPIQLGFGSRGGCEAAVHSVRTFLTNCQTDVLLKVDLRNAFNSLDRSTLLKEVAKHTPEIYHYVWQCYSQNSNLFYENHLIDSAVGVQQGDPLGPALFSLGIQPIISKLKSKLNVWYLDDGTLGGKPDDVQNDLQKIIQNFKNIGLELNNTKCELFIPDRLSSHRHSLFQNFNNISPGIKVTEADSLYLLGAPLFIESMKPLLKVKFDQFLEHVNKLYILNSHIALTILKYCVLVPKFTYLLRSSPAWKCSDFLKQIDLNLKIALEKILNLSLVSSSWTQATLPVRFGGIGIREVSNIALPAFLASVHSVHDLSRKILKNDLDLTFANEAREAWLRLCPGEDIPLEPNSQKRWDIPLVQNVQKCLLNNFHCDRDRARFLGVSTKESSYWLHALPSSNLGTLLDNESLRIAVGIRLGASICQPHRCPCGSDVDELGLHGLSCQKSAGRLSRHGSLNEVIRRALVSINIPSVLEPCGIFREDGKRPDGLTLVPWERGKALVWDATCVDTLAASHIKGTSIRAGAASEAAESGKWRKYESLKGDYIFVPFAVETIGPWGPRAMQFLKELYPRLIVAAGDKRAGSFLAQRLSLAIQRGNAASVLGTMPRGVGLYDYNSF

SEQ ID NO: 6876 - protein, 950 aa, Papilio alexanor
MNIAPTNSQPEFLQCRNCSDGRLFKGKKGLNIHIRRCHPQSISVSQPPVPSHGTIRDINQTNFQNFSDQIHYYHRNVPILRRIPRGARMQLAKALSNTIQNCFTFNTVTSWQKLFYFAYFHFHFDKTGRKSITSQLKNNSFQNFDSPIDTSIAPRPHNFDLKKVVESKVMDGDLKNASRILFSDDILAPHNADTLESLHQKHPKANSSLLLPSPPDPSYQPLQVSEKDTLEAIMSFSNGSAGGIDGITPQHLKDLVSASAGDAGRILLGDITKLSNFMLSGNVNPNFVKIIYGARLCAFKKKDNGIRPIAVGSTFRRLTSKLACRHITSDLKSKFQPIQLGFGSRGGCEAAVHSVRTFLTNCQTDVLLKVDLRNAFNSLDRSTLLKEVAKHTPEIYHYVWQCYSQNSNLFYENHLIDSAVGVQQGDPLGPALFSLGIQPIISKLKSKLNVWYLDDGTLGGKPDDVQNDLQKIIQNFKNIGLELNNTKCELFIPDRLSSHRHSLFQNFNNISPGIKVTEADSLYLLGAPLFIESMKPLLKVKFDQFLEHVNKLYILNSHIALTILKYCVLVPKFTYLLRSSPAWKCSDFLKQIDLNLKIALEKILNLSLVSSSWTQATLPVRFGGIGIREVSNIALPAFLASVHSVHDLSRKILKNDLDLTFATEAREAWLRLCPGEDIPLEPNSQKRWDIPLVQNVQKCLLNNFHCDRDRARFLGVSTKESSYWLHALPSSNLGTLLDNESLRIAVGIRLGASICQPHRCPCGSDVDELGLHGLSCQKSAGRLSRHGSLNEVIRRALVSINIPSVLEPCGIFREDGKRPDGLTLVPWERGKALVWDATCVDTLAASHIKGTSIRAGAASEAAESGKWRKYESLKGDYIFVPFAVETIGPWGPRAMQFLKELYPRLIVAAGDKRAGSFLAQRLSLAIQRGNAASVLGTMPRGVGLYDYNSF

SEQ ID NO: 6877 - protein, 928 aa, Birgus latro
MSAHTTVGAVEEDNNGVEENQDEENDPAEEEWLLRNFLPMVNELIRTPDWEAFEGLLDTMTQQVQSAFNIDATHQHRKKNPTDINDCKTIQRIYRKNRRRAVRLITSGPGERCQIPKDDIEQHFTERMRVPDQHVEAVNYLPPPPDNRPQFDTTSFSEAEVDRRLAAAENTSPGKDGISYRQWKKADPGCRVLTGVFNICLAAKKIPKAWKSSYSILIPKSGDKNNIANWRNITLCNTLYKLYTGCLAARLRNWCTDNNILNPGQKCSLPADGVLEHNYLLQYYLDRARREQEDLCIAFLDISDAFGSVSHSLIKASLNRLGAGPHLAAVVEDLLTDCTTQFRTAEGDTEEIQVQRGVRQGCPISALLFNIAIEPLLHTITQAGLHIDAAHPHPCLAYADDITIIARKKDTLQHLLSATSNTCASLGLSLNPAKCSTLHVTGQAPRGTRDTTFSINGQPITAKRDGEPTTFLGRPVGFHLLPDMSSVDQLVDLGTTILTSKLAPWQRIDALKSFVLPSAVFAMRTWQLRKADWKHLDDALRPLIKKTLYLQARASNEYIYGSSRAGSCAIPLAAEDSDIFLIDTAFKLLTSKDQALEQIAWKDVQNIAAQRTRGEPSIQDACRFLSKDEMGNRASDHQTLWSRARDASGRLKVQWSVDDDNDLRIQTEDQVLCKRHRRKIASTIHTQRRLHRDEMLHRKPDQRKVMKVVAQEKASSAFLRDGSFTTFADWRFIHRARLNLLPLNGARHQGGTNQQCRRCHHQQETLPHVLNHCMRHAAAMQHRHNALVTRVKRAAEGRNWEVLRENQRVPGTNDTGRPDLVLRKGREVMIVDITCPFENGEEAFHEARRRKEHKYADLARELRVTHERVSVEAFVVGPLGSYDPSNERLMRRLASKSYLKLFRKLCVSDVISWSRKIYIEHITGAQQF

SEQ ID NO: 6878 - protein, 1277 aa, Paralithodes camtschaticus
MDDDPESYMSTPSPPPLTQANRTPQVWRPTPTHSEGSPSEGDDVHDFFLSREIPVEDLIPSGDQTSFGSSDEETALAQINEEELAPDRQPHREGTTLYLWFPSPPLYLCTERGCTWKSTSILWSNQRQSLERHLLEYHEIRIEEKRQTCAGCRAQLGYHPTTHNARCPASQRIRNEPVIQPFQCLTCDFSCSTKQGLKNHTNKHKRENLRRRAENTPPRNGNNPADNEAESPPPQNVHEERALSPLSLRSQPPSPTASTVSSTDSEGRLIIDEQAANDPTNSIHARNHENPEDEDPIENEPENQGSQNLLRRARTPSQEHGVRSTQSTPNNNLPSQADSEGSQTPQASPLTPQPSPEVSINEEAPQEDQPLIEPDPAEQRWLLEEFYPEINELLRTPNWNAFEDLLARITERVQEDNGIDLNRRQRPRNPVDVTDCKVIQRIYRSNRRRAVRLITSGEGERCQIPKNIIEDHFTQRMRERQGNQHAVDTLPQPPENQPTVDLTHFSTREVEQKVNSAENTSPGQDGISYRQWKKADPGCRVLTGIFNICLSAKQIPNQWKSSLSILIPKNGDPNQITNWRNITLCNTIYKLYTGSLATRLRTWCIDNNILNPGQKCSLPTDGVLEHNYLLQHYMDKARREQQDACVAFLDLSDAYGSVPHPIISATLERLGAGEEFVRIATDLLSQCTTKFLTTEGESTEIPVQCGVRQGCPISGLLFNIAIESLLHNITQTGRQQDHLHPHPCLAYADDITLIARNPEHLQNLIDVAVITCEELGLTINPTKCSTIHLSGRIPRGTRETVFSIREQQITTRRDGEPTKFLGKPVGFHLLPSATSINEFINLGTKILTSKLAPWQRLDALKTFVLPATVYAQRTWQLRKTDWIRLDNALKPLIKNTLYLQARASNEYLYGSSSTGSCAIPLAAEDSDIFLIDSAFKLLTSRDHALKEIAEIDVQAIAARRTQRDPSMADACQFLSKEELNNRAGDHQTLWSKTREASGRLEVKWSIDNDENIRISANDITLNSTSRRKIASTIRNQMRERRDAALHGKPDQGKVMKLVAKERASSSFLRDGSFTTFADWRFIHKARLNLLPLNGARRHGQNNRQCRRCHFRQETLPHVINHCMRHADAMQQRHNKLVDRVRRAAVGRNWQILRANQRIPGVQDNGRPDLVIVKHREVIIVDITCPFENGEDAFSAARTAKETKYRDLASELRQNYDRVSVEAFIVGPLGAYDPKNERLMRRLASKQYLKLFRKLCVSDVIGWSRKIYIEHITGHRQY

SEQ ID NO: 6879 - protein, 1230 aa, Aleiodes sp.
MAPWTQEECQLIHDFLDQHPGAIGREEYEELTRVIPGNRTWKAVKSKVVEIRKLRRGFVPDRALAAEPWTTEEERRLATRFLEAPGRSRRHRIQLIQAEFPNRSEKAIVLRLKTKYPQIYHLMSGVPEEWREGEEPPDGDANAQFGGNEDVVAGKEEAAPQGSLGDSPNLTAGNLNIPSPQTPLTPEPPPLPYKYEGLRRRYNRLWRAIVAKKSPRRRIKRIDVKINAELKQAVDIMLQMAVNEVRSQGMSDANERKQLKSAIYAAGAILSSETVLKKEQTPNFVRTERKVMKLRTKLDRVKQLMAWRRKNLSRSLKRQVKKLKDLKTTPAQFIKIGGAKIKMMEAKATVQRSMAEAINLRRRFQNKPSIEILQPRDAEEPPGVKETEEYFKKLYSEERAQHREETPVFNKWLNRMKSYKRTLNPGATPNEAKIGEHIEAALKKARPWKAPGNDCIPPAIYKILPTAKEILKQFVINTLIGTSKITPEDVKARVVLIHKDGPRDEPANYRPIAVLNADYKLLTATITRFIEDGLAEWMIPKEQLARKGVWGTTHGLLWDKACSQMARLRRSPSHYSTWYDFTKAYDSIHHWQLRRLVDALPVHQQITNTIKAAMSMWSVEIEVGSVKTAPIPVRKGVYQGDTMSPLLFILITACIIDAINTDGTILRASRGKQQVAAFMDDIKCHTPTGQAARIVTNTLRGAADELGLQLNVKKCGVYNRAENQPIDLEDADGNEEQQHQTAEELQVPFLPMIRNGYKYLGLIQLERDTMENMGKIKEKTLEKTRLIMQSTLSVHQKITIFNSTVSAAATYVLGNLYPNESRPSTLKRCSDLDLDIRKILREENMLGKAGTVASVYLPIQRGGLGLHSVKLETEIQYVRRGIYLQCHKDIQDTRSRFVKLDNAAWRNPLSEMRFVLEKYNIEYPGRTAREELGDYCRRIIKLVKEEQVRRLMNKRGAGLIYGRLVEGEKSAIMFPYMTSLDLENWMVSVLLSAAEEHVWGLGANPLTRRQCRKGCRAEETAYHVTSSCVVPAYTVGHDMVVFWVLKSILQGTRAPLEIEAKLRFGTASICEEFQSGGRNITIRAGPKLMTEAPLYHNRPDVVIITTNPSRVHVLEIAISHLQNIRLQEKIKRTRYAINSTVHVTNENVDGLPRSHNLVDELRNTYRCPVELAVLVLGTFGEVLITPEHAKAMEMLKEIGVSSQGTKWLINKCSYSASRATAQIVLDRLST

SEQ ID NO: 6880 - protein, 1192 aa, Dolichomitus sp.
MVMSTPRAIGSEASDGEGSGSESSQNRRDLNDDEPANIGSMSIVVGVPLAEGATMCEVCVRQNRHRAFLSLADLARHLREQHQQVRVSLRCNWCAREFPGLPNWYGHKARCKGPPRVAEGPWEFPCEICDRGFDTLKGKSQHERHDHPVLRNEKRAEGLRREGKPGRTAYVWSEEETARLRELNEQYRGTVRHINKFLERFFPGKTNRQISEKRRLIEAEMARVDLQEQEEVSEELEDGHTREDRLEQGEAQEREAQVAGEEGAYSEAREGEAHSSETPVEEEATRVRDNSSDDDEFLSADEGDQGPPLSQASWRAEAEALIRAIPLEGDSRVTRIGVDLRATWEDLRGEPVEVGAAVEVALAELMVALLPEEEDREGAGVGRLRQGPPRQKKAKKPVNRTRRTKFAYARCQDLFNNCPKKLAEMAVNGDFSYTEMRREPPKAESIRKLYGELWGHSGPECRQREISNSRSMEEGFGVITVQEVVSRIKKLSASSAAGLDGVKKVHLTGAGVGPVLAVLFNILVLEGYYPNAWKKNRTTLIPKEGKDDRDVRNWRPITVGSMVGRVFSGIIDSKLRAYVRQSPRQKGFTAEDGCSLNILILNEAIAAAKEHEGGVVSVLDVSKAFDTIPHKSIKPGLRRKGVPSLLCDYIEKMYCGCNTVIKGCDGEVEIELKRGVKQGDPLSPLLFNLALDELVERLNSETSGIKIGVEGISVLAFADDLVLLGKDRCEAQRQLRIVGAYLGRLGMSLATSKCSTFQITSKSKTWYVSDPKISLGGVRVPSVGADETLRYLGIKVGPWRGLMKGSEVESIVRAVRNVRRLKLKPCQKVELLQTYVLPRFIYSLSNNRPAKGTLRMIDQQIRSEVKEILHLVTSTATGFFYTAKANGGLGLIKFERTIQLAAIKAHLKVTRSNDVALQDIAARGKLESEARKAARSLACPWPESLVDVETIKARLVKRETDEWASLPCQGQGVADFRFDKIGNSWLKNTELLKSNRFSDAIRLRTNTFGTRVVLARTKVGMDVFCRKCRRCPETLGHILGSCQHTKDARINRHNSINSYIAEQVSKRHAVFVEPTVNELGELKKPDLVIRFSEDEVIVGDVTVRYENRDYLAAAAREKEEKYRITAELIKVRLGCTKATVLPIVIGSRGNLPRKTVAGLKRLGLKKSDLLTISLLAFRSSIEIANEFLDNAE

SEQ ID NO: 6881 - protein, 1095 aa, Microvelia longipes
MCTAILDGSTQYILDYLDVKKLYISKTVFAIFKPSRSHELLLIIDYINDEHYLFNPTTLTENISHVKISNMLLVKINEIRETENHAITLGHCPHDTRGSGLFSKMLLCAFIRNFAHDRPLINLNLREIGDVIKCLLPIVIEEKNIAVEDNLKININLSVKQTLAERKIRADKLLQELQDENSDSIIDTIQRNITIHNTKAVSHKPYLGNKLNDTKLSKGQLRAKFMKNMKKTVMSILNNNKTTTYPNIDDIINHFSHSKPEPKNWNSVLKVCKTSDIPLNLEMVSALEVMFEIKRADNTSPGYDGIYYRDLALFDPEGKLLAFLYNKIITSGTIPQCWMSFKTILIPKPDKEDQYDDIASWRPIALLSVIYKVFASILARRLTQWININDLLHVGQKGGSEHEGCVEHNSILLAALEHSKYSKDTPLTIAWLDIKDAFGSVPHKYMWELLGYIGVSNEFIQLLESLYSNTKSFYCCGSLVTPNIPIFKGVKQGCPISMILFSIAINPVLESISSCEVPAFNINSSKIQTLAYADDIALIANNDIDLQTIINKAVEIAEIIGFQYRPEKCAFIQLPCNTDSSKIMISDKYIKKLMTAEFYQYLGVPVGENNDQSPYEIIDGVITDANKLASSDLCGWQKLKAYKIFLHPRLIFPFRTRQIKSCALSDPHGNLRSNGNNCSKLRSQLRNILNLSVNSETFYLYNSIENGGAGCVDLLDEYHCQSIVQYFRLLTSKCDYTRQIFTDSLCLVARSRIGISCPSLLESFQWINGKISIKNPESKKTHFQRPRTSIEYFKRTHNITIFFDMMDKEPILNISTKIRGTYIISANYRKDVAKIIHNSIVDAYFERWEKSCNSNFLITAIKSNSNVNKIIFKSKLDEFEWNFIHQARTNSLTTRARPFHTKMEDRLCRRCQHEEETLAHILQTCNINKSLIAKRHNSCLDLIVKHLKSRKLIVVVDRKCSLIPDFNGRIDLTITNEERKTIFLVDIKCPIDSEANFKTVDNLNLEKYKELKVAIQKNKPDYKVELKTCIIGSLGSIPSETNSLLESIGITKSKSQKLLEYCAISNISHSAKIWHFHKTGTIAYTQHDSTSLCDL

SEQ ID NO: 6882 - protein, 902 aa, Salarias fasciatus
MRNHLRERIKTLRRAECKRRDRRQRAKERAKFTQGPFKYLSRLLGDKRSGVLEASKEEIEEYLQRMHSDPKREEELELGDLLCYPEEPNEPFDNAEPRWQEVNDFIRKARGRSAPGPNGIPYGLYKNCERLRRRLWRLLKVAWRKKHLPESWLVAEGCFIPKEENSTSIQQFRTVSLLNVEGKVFFGILARRLTHFLMSNKYIDVSVQKGGVPGVSGCIEHNSVISKIIEDAKRNRGDLAVLWLDLTNAYGTMPHKLVDATLKAYHVPDSIQRLLQNYFGRFKMRFSSGNLTTKWQRLEVGIVTGCTISVILFAAAMNLLVKSVEKPRRGAVLSTGIQQVPIRAFMDDLTITARSVPEGRWILEDLVKVTKAARMQFKPSKSRSLVLKKGRVQDRFRFRIGEEIVPSVMEKPVKSLGKWYRAELNDKVSVKEMLNQAEAWMRALEKSGLPGKYKAWGYQHGVLPRLLWPLLIYEVPLSTVELLERKINNYLRRWLSVPRSFCSIGLYSAGSKLQLPLTSVVEEFKTAKVRLAMMLRDSDDDAVRQADIRVRTGRKWSASQALCEAEERLQHSDVVGTVNVGRLGFGCVTRSSWRGADHKERRSMVQKEVRAGEEETRLARAVAMKQQGRWTRWEGVRGRSLKWTELWNMEEHRIKFLLCSVYDVLPTPANLQKWRLTENPQCELCGKTASLEHILSACQAGLADGRYRWRHDQVLAQLAEGLERERKKKRTSHEGKGPRFISFLKPGEVVGKHIASTGIFATAEDWDMRVDLGRQLKFPGEIIDTNFRPDIVIWSKVTRQVVLLELTVPWEERIEEAHERKRGKYQPLISEIQQKGWKAWNFPVEVGCRGFPGQSLWTALGALGMKGPVRKTLIGNVTKQAETASRWLWLKKAEQWRNPASR

SEQ ID NO: 6883 - protein, 973 aa, Pimephales promelas
MSTIIWNMGVERFGTEQRQTKGPQHAGENRRSREIAKLRADLRRLRKIFRHALEDKKPAIKEMRDNVRERIKILRRAECQRRDRRRREKERVKFTKNPFKYMSGLLGAKRSGVLKAPKEEVEEHLRKVHSDPRREEELDMEGKLYSPEEPTISFDDREPRWQEVNDFLRKARGRSAPGPNGISYKVYKNCERLRRRLWKLLKVVWRKNHLPDSFLIAEGCFIPKQEDSSSLKDFRTISLLNVEGKLFFGILAKRLTQFLINNKYIDTSVQKGGVPGVPGCIEHNSVISKIIEDAKRNQGDLAVLWLDLTNAYGTVPPKLVDHTLRAYHVPQKVRMLLQNYFGHFKMRFTSGDFTTNWQRLEVGIVTGCTISVILFAAAMNLLVKSVEKPRRGAVLSSGVQQVPVRAFMDDLTITARSVPEGRWILEDLVKLATAARMEFKPSKSRSLVLKRGRVQDRFRFKIGEDTIPTVSEKPVKSLGRWYRADLTDKASVKEMLNQAEEWLKALERSGLPGKYKVWGYQHGILPRLLWPLLVYEVPLTTVEGLERKINNFLRRWLSVPKSFCSIGLYSSGSKLQLPITSVMEEFKTAKVQLAMMLRDSNDQAVRQANIVVKTGRKWKASEALREAEERLKHADIMGTVTQGRLGLGVITRASWNEAKAKDRKEMVQKEIRAVEEESRQARAVAMKQQGSWTRWGSVRGRAISWKDIWNMEGHRIKFLLSSVYDVLPTPTNLQRWRLTEDPSCALCKRPANLDHILSSCRAGLTEGRFRWGHDQVLSQLAEGLEKEMKRKRTKGQDRGPRFICFLRPGEKAGKEDRCLGILGTAEDWEMRVDLGRQLKFPEEIAVTSLRPDIVVWSQATRQVALIELTVPWEERIEEAHERKLGKYQSLITESQQRGWRAWNLPVEVGCRGFPGQSLWRALGTLGVRGAARKNLVNKIAEQAETASRWLWLKRSERWLNQAGREGGGQSGVV

SEQ ID NO: 6884 - protein, 1131 aa, Ophraella communa
MNQDVMKIYFHVTQCERFKTNYRRRLHQGFMEKYPELTNITEQNLADRRSAIVTRGLLPQSTIDNLKTEIMQEITDNNTNGITNRNGNDLTINNTGNQGNTQEEEDNPGTQNNEITNDTDTEIEVSNNDDLKQEILYELKEARTKWEGIPLENRPNLPIQSNSKKLALITHVCNTEVIQGEIENIKSLEEVQNTIYLLATAIIKCNGGKIYDSQQENHRRQTTSKWEERIQNQIKQLRASIAQLLEYKRGNQSRRVKNQISRILKRYGKHTRYDPPNENINEVMDTIKQKLKVHSHRLKRYKKSNSRKSDNRYFQNNQKNFYKRISQQNIEVQETANIQSIETYWKNIWSNPEQHNNQFEMLKEVENECINIPEMANNSISEEILSIQLNKIQNWKCPGPDKIHNFWIKKFTKLHPKILELINEILSDPSKISAKICEGITYIKPKTSGTSNPANFRPITCLNTIYKVITGCINQIITNHCTVHNILAEEQKGSRAGTLGCKEQLTIDSIVMNQAIKKKRNLYTCFIDYAKAYDKIPHSWILKVLQLYKINPIYTTFIQTVMAKWKTTIKLRSNPTPSGIAINLKTRKIPINRGIFQGDSLSGLLFCLCLNPLSSILRKNVKGFKIKTKDTEHALTHLFYVDDLKIYTNSENELQSAIKITEKFSSEIKMEFGTKKCKIQAIKKGKQITNPEYTTTNTEKILSMEHNEYYKYLGFEQCKTIDHTIVKNKLKEVFCTRLKTLLKTYLNSKNLTKAINTYAVPILTYSFGIIKWTQTDLKEIETSIRTSFTKTNKHHPKSAIERMTIPRRQGGRGLVDITHLHNKQVNNMKQYFRQKEHSELVKAIIQADTNYTPLNLSNPELANINTIDTKLERWRSKELHGRYPSEISHDYVDIQESLKWLTEGRLFPETEGFFISIQDQVVATKNYRKYITKEPNMPNDLCRWCNTYSETTQHILAGCPKLSQNEYTIRHDNMGKIIHQAVEEETFKSTTEIPYWKYTATPVKENEENTLYWNRSIHTDRKVANNRPDTTLWKKKEKTVHLIDYAVVNSHNIQTTYNEKTQKYQNLAQEIKQIWNVEKVKIHPIIISTTGVVPRTTTKHVKDLGLPQHIISTMQHSVILSVCSLFRKTLS

SEQ ID NO: 6885 - protein, 848 aa, Ophraella communa
MDTIKQKLKVQSHRLKRYKKSNSRKSDNRNFQNNQKNFYKRISQQNIEVQETANIQSVETYWKNIWSNPEQHNNQFEMLKEIENECINIPEMANNSISEEILAIQLNKIQNWKCPGPDKIHNFWIKKFTKLHPKILEPINEVLSDPSKISAKICEGITYIKPKTSGTSNPANFRPITCLNTIYKVITGCINQIITNHCTVHNILAEEQKGSRAGTLGCKEQLTIDSIVMNQAIKKNRNLYTCFIDYAKAYDKIPHSWIVKVLQLYKINPIYTTFIQTVMAKWKTTIKLRSNPTPSGIAINLKTRKIPINRGIFQGDSLSGLLFCLCLNPLSSILRKNVKGFKIKTKDTEHALIHLFYVDDLKIYTNSENELQSAIKITEQFRSEIKMEFGTKKCKIQAIKKEKQITNPEYTTTNTEKILSMEHNEYYKYLGFEQCKTIDHTMVKNKLKEVFRTRLKTLLRTYLNSKNLTKAINTYAVPILTYSFGIIKWTQTDLKEIETSIRTSFIKTNKHHPKSAIERMTIPRRQGGRGLVDITHLHNKQVNNMKQYFRQKEHSELVKAIIQADTNYTPLNLSNPELANINIIDTKLERWRSKELHGRYPSEISHDYVDIQESLKWLTEGRLFPETEGFFISIQDQVVATKNYRKYITKESNMPNDLCRWCNTYSETTQHILAGCPKLSQNEYTIRHDNMGKIIHQAVEEETFKSTTEIPYWKYTATPVKENEDNTLYWNRSIHTDRKVANNRPDTTLWKKKEKTVHLIDYAVVNSHNIQTTYNEKTQKYQNLAQAIKQIWNVEKVKIHLIIISTTGVVPSTTTKHVKDLGLPQHIISTMQHSVILSVCSLFQKTLS

SEQ ID NO: 6886 - protein, 1056 aa, Spirometra erinaceieuropaei
MMSSNEVSPPASAGVSATSGLICVHCGRAYRSAAGLKCHLRRCQPESVLSPSVSVPAEPSPRNFVCDHCGRGFSSQRGRSLHVKSAHPAAYFAERSRLAPSRTTWTTQEDALFRRCASAVLQASGPLALRALAREVGIQFPTRSVEAVFKRLSKLDKDEPLFTPPVSLSAVGPSSSSPSPAPPAVCEPDQVEFYRTSLLHSAVKLLTDSPCQALASGDLLSVASDLLMGEAQLSDSAARLDAHAAVVFPRRWRPGVNRRPTVVARPTASHKLRRAQYAEVQARLAKNAKAGAQFILSGNWRNAPCPEAPLPPGTLEFWRELTERPSEPDQRPIQPPTAVAWEILEPITATDVTGNLRLMQGSAAGIDGLSAKDLLKWSPSAIAGYLNIILAIGHLPAQHCTCRTTLVPKVSTPTLPSEYRPIAVSNIIPRLLTRILAHRWSRLCPTARFQFGFQERDGTAEATSLLHGMLRYAVSAPRSIAVAVLDVAKAFDSVNHGTLLRAAEANGAPPLLTTLLASTYSRATTYILDAEVRCQRGVRQGDPLSPLLFNCALSEALSYSDRQLGFDLAGVTVDSIAYADDLVLFAESPHRLQQRLDGLANGLSLAGMVLNSAKCLSFYVQALGKEKSACLCPCDVSIGGSVLRSLGPTDTFKYLGVPFSYRGKVTVGHRSALSGMLEELTRAPLKPQQRITLLKRHCVPKLLHKLVLGAVHRNTLKRLDVQVRQSVRRWLKLPADTPTSFLHAPIVDGGLGIPCLSVLVPFAKRRRLDSVLSSAEPVVRAAATMPSAISGLRLAAQPVRMGHTVLASKDDARNYWRNELYNSADGRPLAQFAKSACASHWLSSPARVFPWLYLRGIQLRAGVLSTKSRRSRGAGITDVLCRGQCGQRETLFHILQCCQVTHRARVWRHNLAMKLLASKLIARGHEVLVEPHIPEGQTFKKPDIVVCADDRLTVVDVAVADEDLMDTVYAGKTRHYSTVEVEGNLRRILGKPADFPVSHAPAIFSSRGALSPRSEASLKLLGLSKFDLSDLCLAVIRGSLKAYDVYVRGAGNGENQ

SEQ ID NO: 6887 - protein, 972 aa, Schistocephalus solidus
MKSAHPAAYFSERGRLAPSRANWTAQEDALLRRCAVAVVQTTGPLALRVLAREVGVKFPTRSVEAVFKRLSKLHKDEPLFSLSGHVPPVGPTSPTPPAAPICETDQVQCYQSSLLHSAVKLLTDSPCQALASSELLSLALDLLMGGEHLPDAAPRLDAHALTVFPRRWRPGVSRRPTAAARPTASRKIRRAQYAEVQARLAKNPKAGAQFVLSGDWRKAPCPETPLPDGTLDFWRELTERPSAPDQRPVIPPSAVAWEILDPISAADVTQNLRLMQGSAAGIDGLSARDLLQWSPGAIAGYLNIILATGHLPAQHCICRTTLVPKVATPILPSDFRPIAVSNVIPRLLNRILAQRWSRLCPTARFQFGFQERDGTAEATSLLHGILRHAVSAPRSIAVAVLDVAKAFDSVNHGTLLRAAEANGAPPLLLRLLASSYSRTTTFILGTEVRCQRGVRQGDPLSPLLFNCALSEAINYSDRQLGFDLAGTTVDSIAYADDLVLFAESPLRLQQRLDGLANGLSLAGMVLNSAKCASFYVQALGKEKSACLHPCEVSIGGSVLRSLGPLDTFKYLGVPFSYRGKVTVGHRPILAGMLDELSRAPLKPQQRVSLLKRHLLPSILHELILGAVHRNTLKRLDTQVRQSVRRWLRLPSDTPAAFLHAPVNDGGLGVPCLTVLVPFAKRRRLDSVLASKEPAVRAAATVPSALSGVRLAAQPVRLGHSVLASKEDARVYWKSALYSSADGRPLAAFAKSACASYWLSSPVRVFPWLYLRGIQLRAGVLSTKSRRNRRTGSTDILCRGQCGQPETLFHILQCCQLTHQARVWRHNQVMKLLASKLVKRGHEVLVEPHIPEGQTYRKPDIVLCAESGITVVDIAVAGEDLMETVYAGKIRHYSTVEVQDNLRRILGRPVGFPIAHEPAIFSSRGALHPRSEARLRLLGLSTLDLSDLCLTVVRGSLKAYDVYMRGAGGCVNR

SEQ ID NO: 6888 - protein, 1067 aa, Spirometra erinaceieuropaei
MSFVDDQLPNSVGIPASSGIQCPGCDLLCRSTAGLKLHMRAKHPTMPAPVPVSVPTASSSGDCLCQQCSCRFVTGRGLSLHVKSAHPEVYFSERRRLAPSRSNWTPQEDSYLRRCASAVLEASGPLALRSLAREVVVHFPTRSAEALFKRLSKLNKDQPLLAAPVSEPVVDPSLPLSSNTSTIEPDQTQVHRTSLLHSAATLLEDSPCEALATEELLSLVLDLLMEEGSLPEAAVRLDSHATVVFPKRWSPGVNRRPAAAARPTASRRDQYTEVQARLAENHNAGAQFILSGDWHNAPCPDQPLPAGMLEFWRELIERPSDPDQRPTPNPSTVAWGIIDPISSTEVSQNLRLMQASEAGIDGLFAKDLLRWPPAAIAGYLNVILATGHLPTQHCICRTTLIPKVQRPHLPSEYRPIAVSNIILRLLNRILANRWSRLCPTARFQFGFEERDGTAEATALLHGMLRHAVSAPRSIAVAVLDVAKAFDSVNHDTLLRAATVHGAPPLLLDLLSSSYARNTTQIFDIEVRCPRGVRQDDPLSPLLFSFALSEAISYSDRQLGFELDGVTVDCIAYADELVLFAESPHRLQQRLDGLANGLSLAGMVLNSAKCVSFYLQALGKQKSTCLQPCDVSIGGMVLRSLGPTDTFDYLGVPFSYRGQVTVGHRPVPHNMLEEITRAPLKPQQRLTLLKRHCLPELLHQLVLGAVHRSTLRRLDVQVRQAVRKWLKLPADTSISFLHAAIRDGGLGVPCLAVLVPFAKRRRLDSVLSSKEPAVRAAAAVPSAFPGMRLAAQPVRLGQSVLPSKEDVRNYWRSSLYASADGRPLAHFAESAGANHWLSSPDRVFPWLFLRGIHLRAGVLSTKARKSRRTGSEDVLCRGQCGQRETLFHILQCCEVTHHARVWRHNLVMTLLAELLMRNGRNLLIEPHVPEGSSFCKPDIVISTENSITVIDVAVAREDIMDRVYADKERRYSTEEVQVNLRRILSKPANTPVYHIPAVFSARGTISSRSESLLGSLGLSTSDLSDLCLAVIRGSLKAYDVYARGAGGVGANRREETREPYEAGVGDEH

SEQ ID NO: 6889 - protein, 942 aa, Paramacrobiotus metropolitanus
MVFICDLCGKSLVTNHGLKSHRDSGVCRTARAKTLQAPVPAGASTAAVPTQTLEERIFAGRRQHAILRRIPVGARRACAEAYTKIVEDVCARNDEDSWSKLLLFAFDNLHAPPGKSGRGPSLASAVKANLAGKPLDAQKAARKSRKKRSSDEALRKAVDTKLQDGDISGAVKILTSEDTIADLSEEVIRALKEKHPDPPADLDTTVCDVPHVTHDVSVDDILCAVKSFPAGSSAGPDGLRPQHIKDMLSVPGETSSHLSSALAKLAKVVLAGKMPAATRKVFFGAILTPLKKKSGGIRPIACGCTLRRLFSKLIGQRVQDQMGELFRPVQLGYGTRGGAEVAVHSARKFLEKEADGVQVLQKIDFANAFNTVRRDVMLKKTAEVIPQYYAFLHAAYGGSSFLFCGENIILSANGIQQGDPLGPLLFCLCTDELSKGMRSPFNVWYLDDATMGGSAICVLSDFRTVVNCALEIGLQINPNKCELFMTGGTLAEQEEIFQMFSEVAPGIQWVTEDKLELLGAPLTDWAIGRVLDGKIGQIQRLTDLLGVLPAHQSLYLLKNSLSLPRLLFTLRCSPCWKCPEKLHEFDNAIKKKAEEVTNVQMLEITWKQASLPDRLGGLGLPRAEEISMPAYLSSRYATKALVTAIVPGDAEGDIELCLDKFCEKYAETPPPEQQRRYQSAWTAIVYAKEHRSLLESADVIDKARLLAISMKESAAWLSALPVASLGNLLDDAAVRIAVALRLGAIICSEHRCICGNMVDQFGRHGLSCKRSKGRIPRHEHLNDVVQRALGSAKITSIREPSGLERNGKRPDGLTHYPWKNGKALVWDVTVADTFAMTYIGQTSDHAGAAAEAAEHRKCGKYADFLDQYNFQPVALETMGSCGPLTMDFINDLARRIREQTGETRAKHFLLQRLSIEIQRGNAACVLGTVEKQHQLDGLFLIC

SEQ ID NO: 6890 - protein, 944 aa, Paramacrobiotus metropolitanus
MAFICDLCGKPLVTNHGLKLHRDSGVCRTARAKNLRAPLQTSVPAPVVPLQTLEERILAGRKQHAILRRIPVGARRACAEAYTRIVEDVCTHNDEGSWSKLLLFAFENLHAPPGKSGRGPSLATSVKANLAGKPLDNRKTPRKSRKKRSSDEALRKAVNTKLQDGDISGAVKILTSEDTVAELSEGVLRALKDKHPDPPADLDTTVCDVAPITHDVSVDDILCAAKSFPAGSSAGPDGLRPQHLKDMLSVQGDTSTHLLSALAKLAKVVLAGKIPAATKRVFFGGILTPLRKKSGGIRPIACGCTLRRLFSKLIGHRVQDQMGELFRPVQLGYGTRGGAEVVVHSARKFLDQEINGVKVLLKVDFANAFNTVRRDVMLKKVAEIIPEYYAFLYAAYGSSSSLFCGENIILSAHGIQQGDPLGPLLFCLCTDELSKGMQSCFNAWYLDDATFGGAVVSVLSDFQTIVHCASELGLQINSEKCELFMSGGTVTEQEEIFRMFSEVAPGIQWIREEQLDLLGAPLTDWAIGRVLDGKIGQIERLTDLLGVLPAHQSLYLLKNSLSLPRLLFTLRCAPCWKCPEKLHEFDERVRKKAEEITNVQMSEAVWKLASLPDRMGGIGLPKAQEISLPAYLSSRYATEALVAKIVPADGEDDMKLCVEKFQEISGEPAPPEVHRRYQSAWTAIVYAKEHRYLVENADVIEKARLLAISTKESAAWLSALPVASLGNLLDDVAVRIAVALRLGAPICSEHKCICGHIVDKFGRHGLSCKRSKGRIPRHEHLNDITQRAIGSAKISSIREPPGLDRKNGKRPDGLTHYPWKNGKALVWDVTVADTFAQTYIGQTSDHAGAAAEAAEHRKCGKYADFADRYIFQPVALETMGSCGPLTMDFFHEVARRIREQTGEIRAKHFLLQRFSIEIQRGNAACVLGTVEKQLDLDDVFLVCV

SEQ ID NO: 6891 - protein, 1702 aa, Trichonephila clavata
MPKHKADIRASTPRRHSRGSPVAHRTRRQISFRRAIELGLCKMCFRTFPCPQTLWDHLRESHASSPRREHCLNAFPLEYHFYSNDASAALVDREFFFGPGRLFSHQSSGPPTHCSEPVSPATSSHDIQIDLTERGLLFESTVNILSKSHSLGSLVVTGQSQCVNDVPLRATSLPCGLDLSKVASSPLPPLSLRHNHRPCELSPPAEDANARSSPGSQGVANHDSSSESPNSLQIALDDVVHGQVPLVPVVHGEQLVSKSASPTDTTFPTNESARESRPPTCELSPCQEDAGSVVVNTEPVPVGQSDPVCVQRSCELSQPLEAACQSTVQVETVVSPPSPDILQIVLGGDVSLPASPDLSALREEWGDQITGSPPSPAFSSQTYAQVLKKGQSSAQRAALLECTSCKRKFYTESGRRVHVCAAIKTSPGLDDFCKNSSKPLQTNTTQTKKQVKGTKPSGGNKKPPVPSKASLQPHVEENSSPPPFEARSVKVKCQFCEKPFNSETALQSHMAHLHKVTPTPGASRLRPVSSPPRNGRWCPFCVGYVFDNLPKTTHEETFHPLQIVVKKSTLGPLACDSCSFVAKSKKGMVYHKRTFHNSTSTTLTDQANVAPVQLANTTEKSATPPSDSVAPLVPAASSSVNDHPDQLRDITLAGDNLTFSFPISRVFCCPIENCSFRCKTKNWYTSNTSLKRHLGVFHKRRDLISQTFCKSCKTNFKTRPSKHPCLRESGLFLSSKTVTFQWVCQECGVDFPTKIGLDNHSSSHKKELIAARSDKLQLPIPPKARRENRRKRVARHSEGSPSNAPLAAPAPPRRTPEVVNEVNAPSIGNVESEVPTPDERTLVDIPETRILSSFREPLNQLIEHDDLENADETFFRISEDLVSVVRDHYHIKGPNQNIGQQGPRTSQIDLLDPQAVQRCYGRNRRKLIRHLTEANSHRCNLPRETISNFFQTVWQAPSEELLSEETERPDRPPVVHTFTPKFVSTCLQSAENSAPGPDGIMYKHWREIDPGSTVLCAMFNICIKLKKVPPSWKAATTVLIHKKGAVDNIDNWRPIALSNTIYKLFTKCLARSLSDWFETFEVLSPSQKGFTPFDGVIEHNFLLSQHIESARTRKSESLVAWLDLSNAFGSVPHQAIFSALANEGADQDFIDLVANLYDGASSSILTNEGPTEQIPILRGVKQGCPLSGALFNLVINKTLKEVQGAADEKKILAFADDLVLLANDQGELQSLLDLTCASLRKLQLSLNPDKCATLHLSGQTPVGSRPTRFHINEVEIRSLNDGESFQYLGKPVGFWIGRNYSSVNDAIRDGHKIAISKLSPWQKIDALKSFFFPALNFAMRTAQFPKGDWRLVQNALTKELKEILSLPPKASVSYIFGDKAQGGCGVPEITKDCDFYLVDTAFKLLTSADEEIAVKALGQLTKTVRHRIRREPTNGDLASFLSGAMEEVEDTSNAVQNTWTLARMASKRQNITWTFTEDLPSLSFDGNTITGTNRKKVLKTLHRVHHIERLLSLKSQGKAMECVSAHPASNHFLSTGRFTRFADWRFIHPARLNLLPVNGAKQWTEGSSKRCRRCGAPNETLPHVLNHCRVSSAAWTRRHNAVLQRIRKAVAFRGQILSENKMVGKTGLRPDLVAKVDDKLFIIDVTIPFDNRLASFEVARRTKTDKYAPFSSTSNRLAIVKCKSFPSSLALWGDGMLRMTNF

SEQ ID NO: 6892 - protein, 1765 aa, Trichonephila clavata
MNMPNKSRKSFSQPLFRSTPRRHSRGSPVAHRTRRQISFRRAIELGLCKMCFRTFPDSQTLWDHLRDFHASSPRRDHCLNAFPLEYHFYSNDANAAQVDREFFFGPGRLFSHQPPGPPMHCSEPVSPATSPHDVQIDLTERGLLRESSVNILSRSRSLDSIMETGLSQGVKDVSLHATSLPCGIDSAKVVSSPLPPLSLRQSHRPCDLSPSAEDAKACTSPGSQGVLIHDSPESPNRIRKAWNDATHEQVSLVPVVHEEQSNSDNVPLAGPASPTHKPAQASQPPICELSPRQEDAGSVAVNSEQVAAGQSDPDPVQRTRELSQHMEAACQSTPQVDSVASPPSPDILEIVLGGDVSLPVSPDLSALREKWGNQITGSPPSPAFSSKTYAQVVKKGQTSAQRAALLECTSCKRKFYTESGRRVHACAAINSSPGLDDFCKYPPRSLPTNTAQTKKSVKGSKLGGGSKKPPVSSKASSQARQPRVKVNPSPPHFEARSVKVRCQFCEKLFNSEAALQSHMTHLHKITPTPGTSRLRPVSSPPKNGRWCPFCVGYVFDNLPKATHEETFHPLQIVVKKSTLGPLACDSCSFVAKSKKGLVYHKRSFHNPASTTLNDQAIDDPVQLAISSEQPTTSSSVSVAPPIAAASSSDNSHPDQRDITLSGSNLTFSFPISRVFCCPIENCSFRCKTKNWYTSNTSLKRHLGVFHKRRDLVSQTFCKSCKTSFKTRPSKHTCLRESGLFLSGNLVTFQWVCQECGVDFPTKIGLDNHSSSHKKELIAARNVKLQLPIPPKARRESRRKRVARHAEGSPSNAPLAAPAPPRRTPEVVNEAHASNSGNVEPEVPTPEERGLVDIPETRILSSFREPLNQLIEHDDLQDADETFFRISEDLISVVRDHFRIKKPNQNSGQQGPRTSEIDLLDPQAVQRCYGWNRRKLIRHLTEANSHRCNLPRETISSHFQTIWQAPSEELLSEETERPDRPPVVHTFTPKFVSECLQSAENSAPGPDGIMYKHWREIDPGSTVLCAIFNICIKLKRVPPSWKAATTVLIHKKGAVENIDNWRPIALSNTMYKLFTKCLARRLSDWFETFEVLSPSQKGFTPFDGVIEHNFLLSQHIESARTHKTESLVAWLDLSNAFGSVPHQAIFSALANEGVDQDFIDLVSNLYDGASSSILTNEGPTDQIPILRGVKQGCPLSGALFNLVINKTLKEVQGAADEKKILAFADDLVLLANDQDELQSLLDLTCTSLQKLQLSLNPDKCATLHLSGQTPVGSRPTRFLINEVEIRSLNDGESFQYLGKPVGFWIGRNYSSVNDAIRDGHKIATSKLSPWQKLDALKSFFFPALNFAMRTAQFPKGDWRLVQNALTKELKEILSLPPKASISYLFGDKAQGGCGIPEITKDCDFYLVDTAFKLLTSADEEIAVKALGQLTKTVRHRIRREPTNGDLASFLSGAMEEVEDTSNAVQNTWTLARVASRRQNITWTFTEDLPSLSFDGNTITGTNRKKILKTLHRVHREDHIERLLSLKSQGKAMECVSAHPASNHFLGTGRFTRFADWRFIHPARLNLLPVNGAKQWTDGSSKRCRRCGAPNETLPHVLNHCRVSSAAWTRRHNAVLQRVRKAVAFRGQILSENQTVGKTGLRPDLVAKIDDKLCIIDVTIPFDNRLASFEVARRTKTDKYAPLLQHFKSLGHREVQIVPIVVGSLGGWDVANDQFLKTIATKSYLTILRKLCVSDSIRWSRDIYVEHMTGHRQFDNEHGANFEPSIL

SEQ ID NO: 6893 - protein, 1169 aa, Trichonephila clavata
MVYHKRTFHNPSTVAHQDQLTGPHVQVPNITEQPATSTESVAPLAAAASLCENDHSGQLRDITLSGKILTFSFPISRVFCCPIENCSFRCKTKHWFTSNTSLKRHLGVYHKRRDLVSQTFCKTCKANFKTRPSKHPCLKESGLFLSGQLVTFQWVCQECGVDFPTKIGLDNHSSSHKKEHIAARSDKLQLPIPPKARRESRRKRVARHSEGPPSNAPLAAPAPPRRAPAAVHEAPVPSIGNHDPEVPIPDERTLVDIPEARILSSFREPLNQLLEHDDLENADDTFFRISEDLVSVVRDHFHIKGPNQNSGQQGPRTSQIDLLDPQAVQRCYGWNRRKLIRHLTEANSHRCNLPRETISRHFQTVWQAPSEELLSEETERPDRPPIVHTLTPKFVSECLQSAENSAPGPDGIMYKHWREIDPGSTVLCAIFNICIKLKKVPPTWKTASTVLIHKKGAVENIDNWRPIALSNTIYKLFTKCLARSLSVWFETFEVLSPSQKGFTPFDGVIEHNFLLSQHIESARTRKSESLVAWLDLSNAFGSVPHQAILNALTNEGADQDFIDLVANLYDGASSEILTNEGPTEQIPILRGVKQGCPLSGALFNLVINRTLKEVQGSAEEKKILAFADDLVLLANDQSELQFLLETTCDSLRKLQLSLNPDKCATLHLSGQTPVGSRPTRFSINGVEIRSLSDGEAYQYLGKPVGFWIGRNYSSVNDAIRDGHKIATSKLSPWQKLDALKSFFFPALNFAMRTAQFPKGDWRLVQNAMTKELKEILSLPPKASISYIFGDKAQGGCGVPEITKDCDFYLVDTAFKLLTSSDEEIALKALGQLTKTVRHRIQREPTNGDLASFLSGAMEEVEDTSNAVQNTWTLARVASRRQNITWTFTEDLPSLSFDGNIMTGTNRKKVLKTLHRVHREDHIERLLSLKSQGKAMECVSAHPASNHFLATGRFTRFADWRFIHPARLNLLPVNGAKQWTEGSAKRCRRCGAPNETLPHVLNHCRVSSAAWTRRHNAVLQRIKKAVAHRGQILSENKTVGKTGLRPDLVAKVDDQLCIIDVTIPFDNRLASFEVARQTKIHKYAPLLQYFKSLGHSQVQIFPIVVGSLGGWDVANDQFLKTIATKSYLATLRKLCVSDSIRWSRDIYIEHMTGHRQFDNEHGANLEPSML

SEQ ID NO: 6894 - protein, 1779 aa, Trichonephila clavata
MNMPNKSRKSFSQPSFSSTPRRHSRGSPVAHRTRRQISFRRAVELGLCKMCFRTFPNPQTLWDHLRDSHASSPRREHCLNAFPLEYHFYSNDASAALDDREFFFGPGRLFSHQSSGLPTHCSEPVSPATSLHDIQVDLTERGLLLETANNVPSMSRSLGSLVEIGKSQSVNEVCLRSTSLPSGLDTSKIVSSPLPPLSLRQNHRPCELSLVVEDASKVPLHPCELSLCAEDANAGKSTSPGSQEVTTHDSSSESPNRPQINVGDAVHGQVSLAPVSHEEQLNSQSASPAEPTVPTCEPTCAGSPSCVGSPDDAPSSSYQQDSRLQKSFVKKVKRKDSSKNQDSASACSTPLVTTTECPQSTKTARPVVTGGSEPPSPNILDIVLAGDISIPSSPELSSLVAEWGDRITGSPPAPAFPGPTYAQVAAKASEGMTKRATLLSCEVCRRKFYTESGLKVHKCFTTKTVDRSSSNQVEPTKNEVVTQPRHESQRFSSKVKRSVVPLSTTRTAVEVNSAPVQKVSGQVLMKKVVPPAKFKCQFCEKPFRTEAGRVTHTAKIHGIPTEAGLSRLKSVSSPPKEGRWCPWCVGYVFDNFNKQKHDELYHSVQAQTSSGTLGPLACGACSFVAKSRKGLYYHKRNFHPQDTTRQVSQDNSTLKSAGKFPKAALASPQSVTQKSGTQSATNTKVQVPSCELPDISLSGDILSYSFPLSRIFKCPVDNCSFKCKTKNWFTSNTSIKRHLATFHRKRNTTVAFQCKICQAKFKSKPSRHGCLKESGLFSEQTSGPLNWVCNECGVDFPSKIGLANHSLSHKKFEIRENEVPLFIPAPPKEKRVSRRQRVQQHSEGPPSAAPLAAPASPRQDPVGEQGVEESVLVDIPETRILASFREPLNQLLEHDDLEGASEDFFKITEDLVSVVKDHFRIRSTDNVQRPNAGRTGQIDLLDPQAVQKCYGWNRRKLIRHLTAAQSDRCAISKAAIAQHFNTLWQAPENDLPDIELDCPDRPPVVHHFTPKFVASCLQSAENSAPGPDGVMYKHWREIDPGSTVICAVFNICLKLKKVPPEWKKASTVLIHKSGDLGDVDNWRPIALSNTLYKLFAKCLARSLADWFETYEVLSPAQKGFTPFDGVIEHNFLLSQHIDHARTNKTESLVAWLDISNAFGSVPHKAIFQALARVGVDHDLIDLISDLYNNASSSILTNEGPTDQIVIKRGVKQGCPLSGALFNLVINETLNEVQGNEQEKRILAFADDLVLLAKTQAQLQDLIDLTCASLEKLQLKVNPQKCATLHLSGHTPVGSRPTHFVMNDQEIRALGDGEHFRYLGKPVGFWIGRDYSSINDAIADGHKIANSKLSPWQKIDALKAFFFPALNFAMRTAQFPKGDWTRIQGSMVKEVKEILSLPQKASVSYLFGDRAQGGCGIPESSKDSDYYLIDTAFKLLTSNDEEIAVKALAQLIKTVRHRIKRPPTNGDLASYLSGAMEEMEDTTNVLQNAWTVARSASKRQHITWAFHDDLPSLSFHGHTITATNRKKILKTLHTFNREEHIEKLLSLRSQGKAIECVAAHPASNHFLGSGKFTRFADWRFIHPARLNLLPVNGAKQWTDNALKRCRRCGAPSETLPHVLNHCRISSAAWTKRHNAVLERIRKAVAFRGRILSQNKAVGSTGLRPDLVAEIDGKIFVIDVTIPFDNRLQAFEVARKTKIDKYQPLIPVFRAMGHQEVKIVPIVVGSLGAWDATNDQFLKTVATKSYLALLRKLCVSDSIRWSRDIYTEHMTGHRQYENEAR

SEQ ID NO: 6895 - protein, 1047 aa, Tomocerus maximus
MSVKSNKGPAQSPVKTGVDSGKDNGYCCNVEQCCKSFQTKRGLGVHRAKAHGLKQMVTPSGRKRWCLEELRIMCRLEYNVNMPDVSLQRLLHKKMAEMGYTRTINAVRNVRKTKKYWELRRSLFAEWKETSDRSQISNGANEGNSSIEETQVPVDDENGEVEGEPLSGSVKAMLTYLAVQDWGECDEVYSSECMDQMVLDALDDRNVDVALNKYFENWASNYEGTLKLPKPKSGRVGKPVSRKNQKRLAHKRLQQSWKRSRAKTARNILNGKLDVKGRPEDIEGFFEHWSNTFTKDPTVHVDVSNMEPNGKSYEVWKVIGSKELASALKTMDLDTATGPDGVPLRVLRNMPVHILVKAFNLIIYSGKMPVCLKRSNTVFIPKEDVCTQPNHFRPISITSTILRLFNKIMAKRIIANSGFDYRQKGFLPIDGCRDNVVLLEALITKSRRDLRDLFIANLDMRNAYGSVYHEAVISALSCNGASEAVIEYVRDLYTDFATTIVNKGNAETIRVERGVLQGDPLSPVLFNMVIDQMLKKIPEEIGFMLDDITKVNGMAFADDCNLIAQSSQGLETSLGTFEKTGAPWGLEFNEKKCSYLAMVSNRGRRIEVETTHSFLINGTPIRGMQDGEPTRYLGAYLSSRGLRSGPETINVLLSRLKSVPLKPQQKLYVLRVHLIPKLIHAFVMGKATRQQLECCDRTIRMSLKGKNGILHLPGRNIPNDFFYASVKDGGLGLLRFRHSIPAMILRRFSNFKQSERTICVAASLVANTKRVSSAEAKIVAFEDCIGTNAKAIASINRKRLMRYHDAKALKYANQVSYVHEWVSDGVACMPGYDFVDALRLRINAFPTRTKTAYGDSTKLRLCRAGCNRPESNAHVIQVCFRSHGARVKRHDAVVGILAKALEKKKYTVLTAYRAQTGVGLRKPDLIAISKDKVHVIDPTICGVYEHPNFFHDLKVSKYGNNPELRAQLETEYPNKEIIFGSLVINFVGIVSKKSAEYLRALGISKGTIKSCVLSTIRGSIKCYRQFVNSTAVARGNGNQGQPTGPYA

SEQ ID NO: 6896 - protein, 1548 aa, Nephila pilipes
MICSKTIILEDLLQHLYQHKPCPLRAKCLEGFRSCFPPNKIPTKKSSSSNKPQEITPIEVTFREKFPELPIFKKQNSLNNSSSDESVLLEKMDSPPTGPPPISPFKKALYSRVVKKGLFYCQFCEKAYVSETRAIQHKKEVHGISPHKTVTSIFPDCPPEMCRVCCKGPAPYSTIADHYKFVHNLAISTTSSTGTISSIVIPSNNFVSTTKKHARNFITKLPPSENPKSNQYSQSTLKNPPASNSIKSQVYSNLKIVARPELRGAGPSKIVSFPTTAICKKSSPSPIVHPQISVQAEVHHRNNSQIPQNNSPRKCTLCPFIAIKQIGLRLHYFKNHGLRKIPSGITNPQNILQQNHDKQTNSPLPGTITQVNYAIPAPSKIVHHKTRINQTKNCSSIKKPSLISPEIATQIYTANPTPPGAQVSNEPPNPMISSLPIVPFVSMQNSILQYSFPLQTRTSCQTRHYSLQLDTEVWFTTNSSIKKHLNVFHNQKPSKVKYHCSICNSTIAKNPAKHSCLVDNLILPPPAIDGDHWVCHICECFSANTQLAKKNHLDAHNRETIKNNSSHLIIPTASKLKKKLKSKRIQELSEGPPGNLPLAPPLSEVNHNNLPISEEIEHIQKIDVEHNSILSSFAEPLDALFELDDMENTQLIFENLLKDLTSVIENHFHLSPSPNNNNKPSATTSKNNRTDSQNAQLIQKQYRWNRKKCVRNIVNPSTSFCPINKECIKAHFSNIWAPPPQTYQFPSCSPPSLPQVIDIITPESAAACLRRCENSAPGPDKISYQHWKTIDPNCTIISKIFNICLKLNNIPSPWKDSNCILIPKKGDLSTIENWRPITLSNSIYKLFTKCLAYKLQDWCGTYEVLSPCQKGFTPFDGVVEHNFVIGQHLEAARRSHTEAFLVWLDIANAFGSIPHNIIFEAMSSVGIDSDFILLIKNIYNNSSTKIITNNGLTDPIPLSCGVKQGCPLSGCLFNIAINHILSSIQNKSENHNILAFADDIVLLGNNLEKTQDSLNLAISLLQQIGLKVNPSKCASLHLSGAAPTGARDSEFFIQDCPLKCLSEAEYYSYLGKPIGFNISPEFQSVNEAISMAHLISTSKLAPWQKLDALKTFFYPSLCFAMRTAQIGKKDWNMVDMCLLKEIKETLYLPSNASNSYIFGETKHGGCGVPSAAVDSDFYLVDSAFKMLTSKDGEVVNLAIGQLSRTIKPRIKRNPSDSNFSSFLSDSMEENYGKTTNAMSNIWTKARAASRRIGVTWSFSDGCPSLTFDEVVITSSQRRKLMKIFHQSHRLRNIEDLIKAPSQGKAIDCIALHPASSHFIADGAYTRFADWRFIHKARLNLTPLNASKTWKGPLHDSRCRKCGDFDETLPHVLNHCMAYSEAMQNRHNAILDRVNKAEAFRGKVLSCNQSVGDSGLRPDLVVSIGNKLYIIDVTIPFENRHNSFVRARNHKIHKYQPLLSFFKTKGYSSVEIVPIPVGALGAWDPENDRFLKKICTNSYLKLMRKLCVSDSIMWSRDIYIQHLTGKKQYSSSSDGVGNLLNGAPDEELD

SEQ ID NO: 6897 - protein, 1788 aa, Nephila pilipes
MEKASPQESISLNPQEENPSPNSLNKNNLPNTTKSVPENRETSSSLPESTETHAKSANNDITISNSPPEEIIACIKELLDSITHINAKSCNVLPATSSLLELQEDLLLNTSSSSEDSVINASTPIPNIPNSQPHLSYKFNSNNSLVQEQLSSPIIIQANILNPASVKNITSSSSCLKKEKEKDISILDLILTNSQESLDGELNNNLSPPPKPVSSPANNNSGHKNNSRNKFLSAAKEGLCMICSKTIILEDLLQHLYQHKPCPLRAKCLEGFRSCFPPNKIPTKKSSSSNKPQEITPIEVTFREKFPELPIFKKQNSPNNSSSDESVLLEKMDSPPTGPPPISPFKKALYSRVVKKGLFHCQFCEKAYVSETRAIQHKKEVHGISPHKTVTSIFPDCPPEMCRVCCKGPAPYSTIADHYKFVHNLAISTTSSTGTISSIVIPSNNFVSTTKRHARNFITKLPPSENPKSNQYSQSTLKNPPASNSIKSQVYSNLKIVARPELRGAGPSKIVSMPTTAICKKSSPSPIVHPQISVQAEVHHRNNSQIPQNNSPRKCTLCPFIAIKQIGLRLHYFKNHGLRKIPSGITNPQNILQQNHDKQTNSPLPGTITQVNYAIPAPSKIVHHKTRINQTKNCSSIKKPSLTSPEIATQIYTANPTPPGAQVSNEPPNPMISLLPIVPFVSMQNSILQYSFPLQTRLQCPIEGCNASFGTKSLFTTNSSIKKHLNVFHNQKPSKVKYHCSICNSTIAKNPAKHSCLVDNLILPPPAIDGDHWVCHICECFSANTQLAKKNHLDAHNRETIKNNSSHLIIPTASKLKKKLKSKRIQELSEGPPGNLPLAPPLSEVNHNNLPISEEIEHIQKIDVEHNSILSSFAEPLDALFELGDMENTQLIFENLLKDLTSVIENHFHLSPSPNNNNKPSATTSKNNRTDSQNAQLIQKQYRWNRKKCVRNIVNPSTSFCPINKECIKAHFSNIWAPPPQTYQFPSCSPPSLPQVIDIITPESAAACLRRCENSAPGPDKISYQHWKTIDPNCTIISKIFNICLKLNNIPSPWKDSNCILIPKKGDLSTIENWRPITLSNSIYKLFTKCLAYKLQDWCGTYEVLSPCQKGFTPFDGVVEHNFVIGQHLEAARRSHTEAFLVWLDIANAFGSIPHNIIFEAMSSVGIDSDFILLIKNIYNNSSTKIITNNGLTDPMPLSCGVKQGCPLSGCLFNIAINHILSSIQNKSENHNILAFADDIVLLGNNLEKTQDSLNLAISLLQQIGLKVNPSKCASLHLSGAAPTGARDSEFFIQDCPLKCLSEAEYYSYLGKPIGFNISPEFQSVNEAISMAHLISTSKLAPWQKLDALKTFFYPSLCFAMRTAQIGKKDWNMVDMCLLKEIKETLYLPSNASNSYIFGETKHGGCGVPSAAVDSDFYLVDSAFKMLTSKDGEVVNLAIGQLSRTIKPRIKRNPSDSNFSSFLSDSMEENYGKTTNAMSNIWTKARAASRRIGVTWSFSDGCPSLTFDEVVITSSQRRKLMKIFHQSHRLRNIEDLIKAPSQGKAIDCIALHPASSHFIADGAYTRFADWRFIHKARLNLTPLNASKTWKGPLHDSRCRKCGDFDETLPHVLNHCMAYSEAMQNRHNAILDRVNKAEAFRGKVLSCNQSVGDSGLRPDLVVSIGNKLYIIDVTIPFENRHNSFVRARNHKIHKYQPLLSFFKTKGYSSVEIVPIPVGALGAWDPENDRFLKKICTNSYLKLMRKLCVSDSIMWSRDIYIQHLTGKKQYSSSSDGVGNLLNGAPDEELD

SEQ ID NO: 6898 - protein, 885 aa, Nephila pilipes
MQNHFHLAPPTDSRKAPHSISSNRVKSDPENAQLIQRQYRWNRRKCVRNIVNPSSSFCQIEKNILHSHFSETWAPPSILHTLPDCSPPTHPPVLELLHSDAIASCLQACENSAPGPDRLSYQHWKSIDPRCIIISKIFNICIKFKDVPSSWKHSTCILIPKKGDASSIHNWRPITLSNSIYKLFSKCLARRLQDWCGMHDILSPCQKGFTPFDGVVEHNFVIGQHLEAARRSHTESFLIWLDISNAFGSIPHNILFSAMSSVGIDQDFIHLIQKLYSNSSTQIITNQGLTDPIPLQCGVKQGCPLSGALFNLAINHILIAIQNKSDSHSILAFADDLVLLGKDKTSVQDSLNQTVSLLRDIGLEVNIAKCASLHLSGAAPTGARDTEFFVNNSPIRCLSEAEYYSYLGKPIGFNIAPEFKSVNEAINLAHTIAGSKLAPWQKLDALKSFFYPSLCFAMRTAQINKESWSRVDSSLLKEIKEILYLPSNAANSYIFGESKLGGCGVPSAAVDSDFYLVDSAFKLLTSKDGEVVALAIGQLSRTIKPRLKRHPTDADLSSYLSGSMEEGYGTSTNAISNIWTKARAASRRLGVTWSFSDSCPSLTFDEVVITSSQRRKLMKIFHQSHRLRNTENLIKAPSQGKAIECVALHPSSSHFIANGAYTRFADWRFVHKARLNLTPLNASKTWKGPLHDKRCRKCGEFDETLPHVINHCMAYSEAMQNRHNAILDRVKKAVAFKGKVLSCNQAVGDSGLRPDLVASIGSKLYIIDVTVPFENRRNSFVRARNNKINKYRPLLSFFNTQGYSSVEIVPILVGALGAWDPENDAFLKKICAPAYLKLMRKLCVSDSIMWSRDIYIQHLTGKKQYANASDGVGGTSSDGELEELD

SEQ ID NO: 6899 - protein, 627 aa, Nephila pilipes
MSSVGIDSDFILLIKNIYNNSSTKIITNNGLTNPIPLSCGVKQGCPLSGCLFNTAINHILSSIQNNSEKHNILAFADDIVLIGNNQEKTQESLNQAISLLQQIGFKVNPSKCASLHLSGAAPTGARDTEFFIQDCPLKCLSEAEYYSYLGKPIGFNISPEFQSVNEAISMAHLISTSKLAPWQKLDALKTFFYPSLCFAMRTAQIGKKEWNLVDTCLLKEIKETLYLPSNASNSYIFGEAKHGGCGVPSAAVDSDFYLVDSAFKMLTSKDGEVVNLAIGQLSRTIKPRIKRNPSDGDFSSFLSGSMAEDYGKTTNAMSNIWTKARAASRRIGVTWSFSDGCPSLTFDEVVITSSQRRKLMKIFHQSHRLRNIEELIKAPSQGKAIDCIALHPASSHFIADGAYTRFADWRFIHKARLNLTPLNASKTWKGPLHDSRCRKCGDFEETLPHVLNHCMAYSEAMQNRHNAILDRVKKAAAFRGKVLSCNQAVGDSGLRPDLVVSLGNKLYIIDVTIPFENRHNSFVRARNHKITKYQPQLSFFKTKGYSSVEIVPILVGALGAWDPENDRFLKKICTSSYLKLMRKLCVSDSIMWSRDIYIQHLTGKKQYSSSSDGVAHLLNGAPDEELD

SEQ ID NO: 6900 - protein, 1905 aa, Nephila pilipes
METSKLSKDSLSPSDSASQGDLSSTPVALRTRLNSTQISYRDAALIGQCKICCFMFEDVSKLRVHVMNHKRNTKRRKALEAIDSVCHSTATPKKVPTIHTSQPPANTQLFDKFKSVFPEMFNEEENIFPVTSTPKILQFPTIQQTMPSPPSIRTSSPLQEDIISTLNQIVSSVSKHIDKTTSICAQNSSLLVSPSVQSLNNSSQLPTVSLSPTPSAVPESQKENSNDNIISSSHTHLSSNVEVTENFNSMESSNSSQKKPCNITIFDEIENIIKSYSESPDERHSPDILELILPSSQESMDENLIVPDEPLPGETDFNFLKRVSPPLNGPPKTPAFPKTSYAQAVKNVLAKCPFCEKKFYSQMTCNRHIEDIHRPGNILASEDLNLKHCPSSSPNLQPKLPILKNSSSNSKSSKIQVPSKNQTTPAIISKSLNPRALFNKPSNTSCPAKSSSSINIPKSSDPKNSERKIVKIKDPPKKIVTPTFMPVLPDYKFFCRHCSDYFPSNLSLIDHIRKSHSITIKSYNSSFRSKTINLSPNSPPAASTVDTQFKGDDVSVPHIEDHQDLLPPLTAALKNFYVPDPNNISAKISPAPVIRQNIERIISSSTVTDSPKNNSEPRMNTIEVDIHPSASSSSSTSPPRNCNLCPFIAKNRKGLKLHFFRKHKYQKISNNCSNTDPDHITILPSSQSVTNNNSKKPSDSATVDVGTLNPVVGKKKVTFQAPFISDSQDFTEVDNSRFKKMNEESVSNRQLETPFVSFKDSNLKYAFPLPTKLNCPIDGCSAVFGTKFWYRTNNSIKRHLNFFHKQKPKKVLYFCSVCDSTIKKNPAKHSCLMGNLILPTIINDDNVWECHLCENFSATSELGKNNHLAAHRKEEIKKRALPLIIPPSTKLLKKKRFHKIRSNSDGYPGDIPLAMPLQEDNSSSCQETERIVHHKIDVERISILDSFAEPLDALIEVDDIDDAFPKFEKLLADLSSVIQEHFHLTKTNSSQSKKPAASVASKAFDPQNAQAVQKLYKWNRRRCIRNIVNPNFSRCPAPKENIFSHFKNSWAPPKSNYNLPLSPNLDLPPVIDFMSPETIASSLQGCENSAPGPDLITYHHWKTCDPRCFILSKIFNICLKFKSIPSEWKISNCILLPKKGDPALLENWRPITLSNTIYKLFSKCLARRLQDWCEMHEVLSPCQKGFTPFDGVIEHNFVIGQHLEAARRNHSQSFLVWLDISNAFGSVPHDVIFSAMANAGIDSEFIELIKNMYIESSTKIFSNEGTTDPIPISCGVKQGCPLSGILFNLSINHILQELQKNECSHSILAFADDLVLLGKDQEDVQEMINKVVLMLQDIGLHLNIRKCASLHLSGEAPTGARDSVFFINNVSIKALSEAESFSYLGKPIGFNIVSDFKNINEAIEMANAISRSKLAPWQKLDALKTFFYPSLCFAMRTSQIAKTDWLKIDSALVKEIKEILYLPVNASNAYLFGESKHGGCGVPSAAVDSDCYLVDTAFKLLTSKDDEITALALSQLNRTVKPRIRRDPADGDLSSFLSGCMEDTFSTTTNTCSNIWTKARSASRRLNVTWAFSEGSPSLTFGEITLTGSQRKKIMKSFHTSHRLDNIEKLIACPSQGKAMHCVAMHPASSHFIADGAYTRFADWRFVHKARLNLCPLNGYKKWKGQNFDSRCRRCGDKDETLPHVLNHCWAYSDALQKRHNAIVERVRKVCAFKGKVLSMNQAVGDTKLRPDLVAVIDEKLYIIDITIPFENRQGSFQKARATKFNKYKCLIDYFRNLGYKTIQIVPILVGSLGAWDPENDRFLRQVATMSYLKLMRKLCVSDAIKWSRDIYLQHLTGKKQYGDLPPSSGVASYGGSGLSRCFADSSFHILFIFCSIDLILFLYFSVFSCFFLSFPVIFVFLCKV

SEQ ID NO: 6901 - protein, 1028 aa, Nephila pilipes
MGNLILPTVINDENVWECHLCENFSASPELEKNNHLAAHRKEEIKNKSPPLIIPPSSKMMKKKRFQKILKNSDGYPGDLPLATPLQEDNSSPGQEPDRVLHQKIDVESISILDSFSEPLDAILEVDDIDDAFPKFEKLLADLSSVIQEHFNLFKTISTQSKKPLASGASFKAFDPKNAQAVQKLYKWNRRRCIRNIVNPNFSRCPAPKENIFNYFKNSWAPPNSKYNLPLTPKLDLPPVIDFLTPETIASCLQGCENSAPGPDLITYHHWKASDPRCFILAKNFNICLKFKSIPSEWKSSNCILIPKKGDTALLENWRPITLSNTIYKLFSKCLARRLQDWCEMHEVLSPCQKGFTPFDGVIEHNFVIGQHLESARRNHSQSFLVWLDISNAFESVPHEIIFSAMANAGIDSEFIDLTRNMYTESSTKIFSNEGSTDPIPISCGVKQGCPLSGILFNIFINHILQEIQQNECSHSILAFADNLVLLGNDQESVQEMLNKIVLMLKDIGLHLNIRKCASLHLSGEAPTGARDSVFLIDELPIKALTEAESFSYLGKPIGFNIVSDFKNINEAIEMANAISRSKLDPWQKLDALKTFFYPSLCFAMRTSQIAKTDWIKIDSALVKEIKEILYLPINASNAYLFGEGKHGGCGVPSAAVDSDCYLVDTAFKLLTSKDEEISALALSQLHRTVKPRIRRDPADGDLSSFLSGSMEDTFSITTNACSNIWTKARAASRRLNVTWAFSEGSPSLTFNEITLTGSQRKKIMKSFHTSNRLDNIEKLIASPSQGKAMHCVTMHPASSHFIADGAFTRFADWRFVHKARLNLCPLNGYKKWKGPTFDSRCRRCGDKDETLPHVLNHCWAYSDALQKRHNAIVERVRKVCAFKWKVLSMNQAVGDTKLRPDLVATIDDKLFIIDIIIPFENRQGSFQKARSAKINKYKCLIDFFRNLGYKSVQIVPILVGSLGAWDPENDRFLRQVATMSYLKLMRKLCVSDAIKWSRDIYLQHLTGKKQYGDLPPSSGVASDTEDLD

SEQ ID NO: 6902 - protein, 1859 aa, Nephila pilipes
MDKSKTSFSSDTTAPSCSEMQKEKTSNKDSSGTPIALRTRSTETQISYREAALLGLCKICNFKCKEPSKLRTHIINHRPNTKRRKALEAVDAICHSFETPKPNLPIYSSSPPSKTCLFDKFKNVYPEFFTEETTSSCAKLPSVSRITHKSPVIQSPILTTSDSKLISSIRPSSPLHDDIANVLNQIIQSVSSHIERSSILEQSTKSSFLATPTCVPRQDANVPTSKEFVNLSHSVYKDLNKDNIYSLYEDPTVNSIKHPSGDCRPFSSTTISSGVTLIHDNEIFSEKKSPVKDFEEIISSCCPDSNVASEIESLVKKLENDNSDRHSPDILDIIMPSSQDLSDDLLSSTPLTLTSRDFIISDTKNVLPGPPIKPAFKKSSYAQVVKNILASCAYCEKKFYFTRSRDIHILDFHGPDNILNSNSSKSSSLIIIPVDSSEKTNPSTQSGKKSSSRASPSANPKFSKLPFKDRKIIAIQDPIKKKIQPKLFPAVPEHRFFCRHCQDFFPSNSSLSEHLKLQHNIKVQTFRRSPKTSEIPISQEKSPPSSASTTILGQSSIIVPHVNDHQDLMCPVTATLKNFYVPDPNKIKVNDIKETSIVQNLSRRISTQDSSDSPLDPINVCADIHIPPTDLSQNSQSKSPPRICNICNYKAKNRNALKLHFYRKHKYKIIPPAPQFQDCNKEEISVLPPSGNCLPSIQANVPKKKLIDSFVFPSSQQDLQDFVPPPVEFNINVPVDTSICNNNTDSNLISNKPFVSFNNSVLQYSFPVSNRMSCPIKDCAASFGTKNWFHTNTSIKRHLNVFHKQKPNKVTYHCSICDSMISKNPSKHGCLIKNLILPETFPDDDVWICPSCPDFSAVNPLAKQNHLAFHNRMKIKEQASKLVIPPSYKSSKKKKLKRVRQLADGLPGDIPLAPPIPFGENVEVPVDDPPPVIHAKIDIERVKILDSFCEPLDSLFEVDDIEEAMVKFENILQDLTVVLQEHYHLSVPSAPSSTQKKNSKTNPFDANNAQAVQKLYKWNRRRCIRNIVNPNSDRCQVPTSEVQKYFQTNWSPPRMVPKLLPPADSDLPPIVDLLSPETVASCLQGCENSAPGPDLITYAHWRNVDPRCFILSKIFNICLKFKAIPQYWKTSNCILLPKKGDLKELSNWRPISLSCTIYKLFTKCLARRLQDWCEMNNTLSSCQKGFTPFDGVVEHNFVIGQHLEVARRSHSESFLVWLDISNAFGSISHDVLFSAMAHMGIDSEFIQLIKNIYLNSSSKIFSVDGSTEPIPIRCGVKQGCPLSGILFNIAINNILLAIQKGNDKHSILAFADDLVLLSDSEEKTQEILNLTISLLEEIGLEVNPNKCASLHLSGATPTGARDTQFSINGSFIRHLSEAEAYTYLGKPTGFHIAPDFENVNEALQLASAISKSKLAPWQKLDAMKTFFYPSLCFAMRTSQISKSDWLKVDQSLIKEIKEILYLPLHASNSYIFGENKNGGCGVPSAAVDSDFYLIDTAFKLLTSRDEEIVALALGQLSRSVKFRIHRDPADGDLASYLSGSMEDTFSRTTNFGSNIWSKARSASRRIGVTWSFSEGSPSLTFDEVTITSSHRKRVMKLFHQAHRLNQIEKLIQAPSQGKAMHCVAMHPASSHFISDGSYTRFADWRFVHKARLNLTQLNACKPWKGPEVDRRCRKCGQVDETLPHVLNHCFAYADAITKRHNAILERVRKVVAYKGKVLSVNLSVGDSGLRPDIVALVDNKLFIIDVTIPFDNRPGAFKKARDAKIKKYECLRKYFVSQGYTAISIVPIVVGSLGSWDPENDKFLRTVASTSYLKLMRKLCVSDCIKWSRDIYIQHLTGKKQYGNPPPSSGVVSDMEELD

SEQ ID NO: 6903 - protein, 1860 aa, Nephila pilipes
MDKSKTSFSSDTTAPSCSEMQREKTSNKDSSGTPIALRTRSTESQISYREAALLGLCKICNFKCTEPSKLRTHIINHRPNTKRRKALEAVDAICHSFETPKPNMSIYSSSPPSKTCLFDKFKNVYPEFFTEETTSSCAKLPSVSRITHKSPVNQSPILTPSDSKLISTMRSSSPLNDDIANVLNQIIQSVSSHIERSSILEQSTKSSFMATPTCVPRQDANVQFSKEYVNLSHSANKDLNKDNSYSQSEDPTVNSSKLPSGECGPFSSTPISSGVDLIHDNKIFSEKKSPVKDFEEIISSCCPDSNVASEIESLVKKLENYNSDRHSPDILDIIMPSSQDLSDDLLSSTPLTLTPRDFIISDTKNALPGPPIKPAFKKSSYAQAVKNILASCAYCEKKFYSTRSRDIHILDFHGPDNILNSNSSKSSSQIIIPVDSSEKINPPTQSGKKSSSRTSPSANPKFSKPPVKDRKILAIQDPIKKKIKPKLFPAVPEHRFFCRHCQDFFPSNSSLSEHLKLQHNIKVQTFRRSPKTSEIPISQEKSPPSSESTTILGQSSIIVPHVNDHQDLMCPVTATLKNFYVPDPNKIKVNDIKEASIVQNLSRRISTQDSSDSPLDPINVCADVHIPPTDLSQNSQSKSPPRICNICNYKAKNRNALKLHFYRKHKYKIIPPAPQFQDCNKEEISVLPSSGNCLPSIIANVPKKKLIDSDFVFPSSQQDLQDFVPPPVEFNINMPVDTSICNNNTDSNLISNKPFVSFNNSVLQYSFPVSNRMSCPIKDCAASFNTKNWFHTNTSIKRHLNVFHKQKPNKVTYHCSICDSMISKNPSKHGCLIKNLILPETFPDDDVWICPSCPEFSAVNPLAKQNHLAFHNRMKIKEQASKLVIPPSYKSTKKKKLKRVRQLADGLPGDIPLAPPIPFGENVEVQVDDPPPVIHAKIDIERVKILDSFCEPLDSLFEVDDIDEAMVKFENILQDLTVVLQEHYHLSVPSTSSSTQKKISKINPFDANNAQAVQKLYKWNRRRCIRNIVNPNSDRCQVPTSEVQKYFQTNWSPPRMVPKLLPPADSDLPPIVDLLSPETVASCLQGCENSAPGPDLITYAHWRNVDPRCFILSKIFNICLKFKAIPQYWKTSNCILLPKKGDLKELSNWRPISLSCTIYKLFTKCLARRLQDWCEMNNTLSSCQKGFTPFDGVVEHNFVIGQHLEVARRSHSESFLVWLDISNAFGSISHDVLFSAMAHMGIDSEFIQLIKNIYLNSSSKIFSVDGSTEPIPIRCGVKQGCPLSGILFNIAINEILLAVQKGNDKHSILAFADDLVLLSDSEEKTQEILTMTISLLEEIGLEVNPNKCASLHLSGATPTGARDTQFSIHGSFIKHLSEAEAYTYLGKPTGFHIAPDFENVNEALQLASAISKSKLAPWQKLDAMKTFFYPSLCFAMRTSQISKSDWLKVDQSLIKEIKEILYLPLHASNSYIFGENKNGGCGVPSAAVDSDFYLIDTAFKLLTSRDEEIVALALGQLSRSVKFRIHRDPADGDLASYLSGSMEDTFSRTTNFGSNIWSKARSASRRIGVTWSFSEGSPSLTFDEVTITSSHRKRVMKLFHQAHRLNQIEKLIQAPSQGKAMHCVAMHPASSHFISDGSYTRFADWRFVHKARLNLTSLNACKPWKGPEVDRRCRKCGQVDETLPHVLNHCFAYADAITKRHNAILERVRKVVAYKGKVLSVNLSVGDSGLRPDIVALVDNKLFIIDVTIPFDNRPGAFKKARDAKIKKYECLRKYFVSQGYSAISIVPIVVGSLGSWDPENDKFLRTVASTSYLKLMRKLCVSDCIKWSRDIYIQHLTGKKQYGNPPPSSGVVSDMEELD

SEQ ID NO: 6904 - protein, 886 aa, Nephila pilipes
MISIIQNHFHLAPLTDSKKVPSSNSSNQVKTDSQNAQLIQRQYRWNRRKCVRNIVNPTSSFCQIEKEILHSHFTKTWAPPSSQYSYPDCSPPTLPPVLELLPPDSIAACLQSCENSAPGPDRLSYQHWKTIDPSCIIIAKIFNICIKLKDIPSSWKNSNCILIPKKGDLSSINNWRSITLSNSIYKLFSKCLARKLQDWCGNHDILSSCQKGFTPFDGVVEHNFVIGQHLEAARRSHNESFLVWLDISNAFGSIPHNILFSAMSSVGIDKDFIHLIQKLYSNSSTRLITNKGLTDPIPLQCGVKQGCPLSGCLFNIAINHILIAIQNKSESHSILAFADDLVLLGKDQESIQASLNHTVSLLRDIGLEVNVSKCASLHFSGAAPTGARDTEFFINNLPIKCLSEAEYYSYLGKPIGFNIAPEFKSVNEAINLAHSISGSKLAPWQKLDALKSFFYPSLCFAMRTAQINKNSWSKIDTSLLKEILYLPSNAANSYIFGDSKLGGCGVPSAAVDSDFYLVDSAFKLLTSKDGEVVALAIGQLSRTIKPRLKRNPSDGDFSSYLSGSMEEGYGTSTNAISNISTKARAASRRIGVTWSFSDGCPSLTFDEVVITSSQRRKVMKIFHQSQRLRNLENLIKAPSQGKAIECVALHPASSHFIADGAYTRFADWRFIHKARLNLTPLNASKTWKGLLHDKRCRKCGEFDETLPHVINHCLAYSEAMQKRHNSILDRVKKAVAFKGKVLSCNQAVGDSGLRPDLVASIGKKLYIIDITVPFENRRNSFVRARNNKINKYRPLLSFFNSQGYSSVEIVPILVGALGAWDPENDGFLKKICSPSYLKLMRKLCVSDSIMWSRDIYIQHLTGKKQYLNSSDGVGGASSDGDLEELD

SEQ ID NO: 6905 - protein, 1002 aa, Polistes metricus
MRSAHLEVANAAISVEREKKRWSPEELRLLARVEAQGILRKVRFINEFILSQGLGDRTLDSIKGVRRRADYKHLVAAAIQELRAVKSPDDVGSSGGNASAPLSQGLSEDRSRLPGEPLRNANTQESTRNEIELEIEHLISKIDETAGFNNEILVRIARQHINGVDVAESINAWLQSVFPPASRRSGGGRPSMHAPVDSNDIPSWRKRRRAYARTQNQFGKNPGQVAREVLDGASGPRPPSLQLMADYWGPILARESMPYTLAADKKNKTDPQGLWRPVSQVEVERTNVPLNSAVGIDGVSARQWRSVPVIVRTLLYNIIMARGGFPTEMLASRTIFLPKKHVATNAADFRPISIASVIVRQMHKILAIRLRSANLIDVRQRCLDDGCTENIAVLASLLDDAKRRLRELHIVSLDCAKAFDSVSHEAITAVLRESNLPESMIEYISSTYSRSKTCLEVGGSRSEPIHVGRGVRQGDPLSTLIFCLVLDKVIRPLPSDVGYDLGGTRINTLLYADDTILVASTIQGMGVLVKTIEERAEGVGLEFNTSKCSALSVVPSGKAKKFKVLTNPQFELKSAKIAQLSPSQEWRYLGVDFRPIGPKKVGGTLTVELQRITKAPLKPQQRLYIMRSFLLPRLYHRLVLAGTTLGTLKSLDRQVRASARKWLRLPPDVPIAYFHAPTREGGLGLPSFETAVPCRIIERLDSMAQSTSPAARAAHDEAWVQHRVRWASCALTKNNGEVLGSKQDVDRWWSEALHKSVDGRELRESAKVAASSSWVQWGMALTGRDFIQYHHVRINALATKIRTSRGVRRIGADISCRAGCQATETAAHVIQSCHRTHGGRIMRHNAICAVLKSGLRDQGWDVESEPRIRTSQGVRKPDLVATRSGVVSVIDAQVVSGATALNCSHERKCAYYADNQDLRSEIGRKYNVRPSDIHFRSCTLSWRGIWSANSANGLLAMGLSRKLLGFITLRAIRGSHTNWSRWNRMTGITIRSGETLPRAGIG

SEQ ID NO: 6906 - protein, 1080 aa, Polistes metricus
MGSKSTKKVYFQQRGNPVRTAGPTDPLYHANASSQHAEPVPNESQEATSTQNATDFVHQCQLCPRSFATKRGLDVHKRAAHLEAANDAIAVERVKKRWSPEELRLLARVEAQGVLSKVKFINEFILSQGLGDRTLESIKGVRRRTDYKHLVEAAVRELQTIKSQEGLNSSNGNACALPNQGLSEDRSGLPGEPLDDLNTLERPRNEIVLEIEHLISKIDVSDGYDADVLVSIARRFLNGVDVAEAINAWLKSVFPPPSRRSGDSRPQMHSPVDSNDIPAWRMRRRRYARTQNQFGKNPGRVAREVMNGASGPRPPSLQLMADYWGPTLARESVPYTLAADKHNKTEPQGLWRPVSQVEVERTNVPLNSAVGIDGVSARQWRSVPVMVRTLLYNIIMARGGFPTEMLASRTIFLPKKHEAKNAADFRSISIASVIVRQMHKILAIRLRRTDLIDVRQRCLDDGCTENIAVLASLLDDAKRRLRELHIVSLDCAKAFDSVSHEAITAVLRESNLPEGMIKYISSTYSRSKTYLEVGGSRSEPIHVGRGVRQGDPLSTLIFCLVLDKVIRPLPSDVGYDLGGTRINTLLYADDTILVASTIQGMGVLVKTIEERAEGVGLEFNTSKCSALSVVPSGKAKKSKVLTNPQFELKSAKIAQLSPSQEWRYLGVDFRPIGPKKVGGTLTVELQRITKAPLKPQQRLYILRSFLLLRLYHRLVLAGTTLGTLKSLDRQVRSSARKWLRLPPDVPNAYFHAPTREGGLGLPSFETAVPCRIIERLDGMAQSTSPAARAAHDEAWVQHRVRWASRALTKNNGEALGSKQDVDRWWSEALHKSVDGRELRESAKVAASSSWVQWGMALTGRDFVQYHHVRINALATKIRTSRGVRRIGSDISCRAGCQATETAAHVIQSCHRTHGGRIMRHNAICAVLKSESGLRDQGWGVELEPRIRTSQGVRKPDLVATRNGVVSVIDAQVVSGATALNCSHERKCAYYADNQDLRSEIGKKYNVRPSDIHFRSCTLSWRGIWSANSANGLLAMGLSRKLLGFITLRAIRGSHTNWSRWNRMTGITIRSGETLPRAGIG

SEQ ID NO: 6907 - protein, 1181 aa, Acipenser ruthenus
MSMESTSQKTSSRSAVNKDMELQVCVCGWSKATTVRGLKIHQGRMKCLREKGQGPRIDQYFLRSQSSQSNEIQRQEANHSSQDISTPVIDVRRTCMDTVSDEPNDPCEPGQTNQHKREKNLNGHKPGVKWPRACEKTAWDTVNTDLCVALERLSGTVEKKLDKFGDIIYAYGSERFGVEKKKRKEKVQTIPGKSRRQQEIERLVRERRQLRNQWRRAEQSQKEGLNLLQRVIKDKLATLRRAERLRKRYKKKERARANFYKDPFKFVKKLFTSEKNGTLKASKVELERYLEETHTDSKRQEPMSIPSDIPPINPPEYQMEDCAPKWKEIEQAVKKARASSSPGPNGVPYRVYKSASGVLRILWKLMKVAWEKQVVPRAWRRAGGVFIPKEKDSTSISQFRPISLLNVEGKIFFSIIAQRLSAYLLKNCFIDTSIQKAGIPGFPGCLEHINVIWQQIQSAKKERKELHVTFLDLANAYGSVPHELLWAAFDFFSVPMTITNLVKAYFGDLQFSFSTSEFSTTWQCLEVGIMAGCTISPLAFTMAMEVIIRASKWVVGGERLASGMRLPPIRAYMDDMTTMTTTVACTNRLLGKLTNNIEWARMQFKPTKSRRISIIKGKVVDKTFFINGEAIPTVSEKPVKSLGRWYDGDLKDTVRVGEVRQQAVEGLKSIDSCALPGKLKLWCFQFGLLPRLLWPLTVYEVSLTTVEKLEALISSYIRKWLGVPRCLSRVGLYGKGILQLPVSALTEEFKCAKVRLEMTLVESRDKCVREAAPVLKTGRKWAAKKAVEDAKAALRIGDIMGQVQHGRGGLGFSSTPPTWHKAAPAQRRKLVVNEVQKQEERMRCIKAISQAKQGEWMRWESVEQCKIGWQDLWSMEQSRISFLIRSTYDVLPSPQNLNLWVGEDPSCPLCSSPATLRHILTGCKVALSQGRFTWRHDQVLRCLALALEDKRNMTNKLPPVPSKHYTQKTTFLRPGEQPPRKGVKTNPRPGQLEAARDWNMLADVGQRLIFPPEIATTNLRPDIVLWSGSARLVHLVELTVPEDAVTVCLGRIQGACRFTGSWVFYWSNLGKVPCSGYAAVSPPGMNPRPSGERKNYSNCARYAQLATEAEQRGWRVRVYPVEVGCRGFVAHSTTRFLRDVGFSGQELRRTVKNLSEAAERSSNWLWLRRKDSGWGQVSKLG

SEQ ID NO: 6908 - protein, 976 aa, Acipenser ruthenus
MDTVSDEPNDPCEPGQTNKHKREKNLNGHKPGVKWPRACEKTAWDTVNTDLCVALERLSGTVEKKLDKFGDIIYAYGSERFGVEKRKEKVQTIPGKSRRQQEIERLVRERRQLRNQWRRAEQSQKEGLNLLQKVIKDKLATLRRAERLRKRYKKKERARANFYKDPFKFVKKLFTSEKNGTLKASKVELERYLEETHTDSKRQEPMSIPSDIPPINPPEYQMEDCAPKWKEIEQAVKKARASSSPGPNGVPYRVYKSASGVLRILWKLMKVAWEKQVVPRAWRRAGGVFMPKEKDSTSISQFCPISLLNVEGKIFFSIIAQRLSAYLLKNCFIDTSIQKAGIPGFPGCLEHINVIWQQIQSAKKERKELHVTFLDLANAYGSVPHELLWAAFDFFSVPMTITNLVKAYFGDLQFSFSTSEFSTTWQCLEVGIMAGCTISPLAFTMAMEVIIRASKWVVGGERLASGMRLPPIRAYMDDMTTMTTTVACTNRLLGKLTNNIEWARMQFKPTKSRSISIIKGKVVDKTFFINGEAIPTVSEKPVKSLGRWYDGDLKDTVRVGEVRQQAVEGLKSIDSCALPGKLKLWCFQFGLLPRLLWPLTVYEVSLTTVEKLEALISSYIRKWLGVPRCLSRVGLYGKGILQLPVSALTEEFKCAKVRLEMTLVESRDKCVREAAPVLKTGRKWAAKKAVEDAKAALRIGDIMGQVQHGRGGLGFSSTPPTWHKAAPAQRRKLVVNEVQKQEERMRCIKAISQAKQGEWMRWESVEQRKIGWQDLWSMEQSRISFLIRSTYDVLPSPQNLNLWVGEDPSCPLCSSPATLRHILTGCKVALSQGRFTWRHDQVLRCLALALEDKRNMTNKLPPVPSKHYTQKTTFLRPGEQPPRKGVKTNPRPGQLEAARDWNMLADVGQRLIFPPEIATTNLRPDIVLWSGSARLVHLVELTVPWEDAVDEAYERKKLRYIQLATEAEQRGWRVRV

SEQ ID NO: 6909 - protein, 1134 aa, Acipenser ruthenus
MSMESTSQKTSSRSAVNKDMELQVCVCGWSKATTVRGLKIHQGRMKCLREKGQGPRIDQYFLRSQSSQSNEIQRQEANHSSQDISTPVIDVRRTCMDTVSDEPNDPCEPGQTNQHKREKNLNGHKPGVKWPRACEKTAWDTVNTDLCVALERLSGTVEKKLDKFGDIIYAYGSERFGVEKRKEKVQTIPGKSRRQQEIERLVRERRQLRNQWRRAEQSQKEGLNLLQRVIKDKLATLRRAERLRKRYKKKERARANFYKDPFKFVKKLFTSEKNGTLKASKVELERYLEETHTDLKRQEPMSIPSDIPPINPPEYQMEDCAPKWKEIEQAVKKARASSSPGPNGVPYRVYKSASGVLRILWKLMKVAWEKQVVPRAWRRAGGVFIPKEKDSTSISQFRPISLLNVEGKIFFSIIAQRLSAYLLKNCFIDTSIQKAGIPGFPGCLEHINVIWQQIQSAKKERKELHVTFLDLANAYGSVPHELLWAAFDFFSVPMTITNLVKAYFGDLQFSFSTSEFSTTWQCLEVGIMAGCTISPLAFTMAMEVIIRASKWVVGGERLASGMRLPPIRAYMDDMTTMTTTVACTNRLLGKLTNNIEWARMQFKPTKSRSISIIKGKVVDKTFFINGEAIPTVSEKPVKSLGRWYDGDLKDTVRVGEVRQQAVEGLKSIDSCALPGKLKLWCFQFGLLPRLLWPLTVYEVSLTTVEKLEALISSYIRKWLGVPRCLSRVGLYGKGILQLPVSALTEEFKCAKVRLEMTLVESRDKCVREAAPVLKTGRKWAAKKAVEDAKAALRIGDIMGQVQHGRGGLGFGSAPPTWHKAAPAQRRRLVVNEVQKQEERMRCIKAISQAKQGEWMRWESVEQRKIGWQDLWSMEQSRISFLIRSTYDVLPSPQNLNLWVGEDPSCPLCSSPATLRHILTGCKVALSQGRFTWRHDQVLRCLALALEDKRNMTNKLPPVPSKHYTQKTTFLRPGEQPPRKGVKTNPRPGQLEAARDWNMLADVGQRLIFPPEIATTNLRPDIVLWSGSARLVHLVELTVPWEDAVDEAYERKKLRYAELATEAEQRGWRVRVYPVEVGCRGFVAHSTTRFLRDVGFSGQELRRTVKNLSEAAERSSNWLWLRRKDSGWGQVSKLG

SEQ ID NO: 6910 - protein, 1037 aa, Acipenser ruthenus
MKSSDRKQTTVRRISAPVIDVRRTCMDTVSDEPNDPCEPGQTNQHKREKNLNGHKPGVKWPRACEKTAWDTVNTDLCCALERLSGTVEKKLDKFGDMIYAYGSERFGVEKRKEKVQTIPGKSRRQQEIERLVRERRQLRKQWRRAEQSQKEGLNRLQRVIKDKLATLCRAERLRKRYKKERARANFYKDPFKFVKKLFTSEKNGTLKASKVELERYLEETHTDSKRQEPMSIPSDIPRISPPEYQMEDCAPKWKEVEQAVNKARASSSPGPNGVPYRVYKSASGVLRILWKLMKAAWEKQVVPRAWCRAGGVFIPKEKDSTSISQFRPISLLNVEGKIFFSIIAQRLSTYLLKNCFIDTSIQKEGIPGFPGCLEHINVIWQQIQSAKKERKELHVTFLDLANAYGSVPHELLWAAFDFFSVPMTITNLVKAYFGDLQFSFSTSEFSTTWQCLELGIMAGCTISPLAFTMAVEVIIRASKWVVGGERLASGMRLPPIRAYMDDMTTMTTTVACTNRLLGKLTNNIEWAQMQFKPTKSRSISIIKGKVVDKTFFINGEAIPTVSEKPVKSLGRWYDGDLKDTVRVGEVRQQAVEGLKSIDSCALPGKLKLWCFQFGLLPRLLWPLTVYEVSLTTVEKLEALISSYIRKWLGVPRCLSRVGLYGKGILQLLVSALTKEFKCAKVRLEMTLVESRDKCVREAAPVLKTGRKWAAKKAVEDTKAALRIGDIMGQVQHGRGGLGLISAPPTWHKAALAQRRKLVVNKVQKQEERMRCIKAISQAKQGEWMRWESVEQRKIGWQDLWSMEQSRISFFIRSTYDVLPSPQNLNLSVGEDPSCPLCSSPATLRHILTGCKVAFSQGRFTWRHDQVLRCLALALEDKRNMTNKLSPIPSKHYTQKTTFLCPGEQPPRKGVKTNPRPGQLEAARDWKMLADVGQWLIFPPEIATTNLRPHIVLWSGSARLVHLVELTVPWEDAVDEAYERKKLRYAQLATEAGTARMESPGLPSGSGLSRICGTLYNPVSQRRRIQWPRVALHSEEII

SEQ ID NO: 6911 - protein, 832 aa, Acipenser ruthenus
MSVPSDIPPINPPEYQMEDCAPKWKEVEQAVKKARASSSPGPNGVPYRVYKSASGVLRILWKLMKVAWEKQVVPRAWRRAGGVFIPKEKDSTSISQFRPISLLNVEGKIFFSIIAQRLSAYLLKNCFIDTSIQKAGIPGFPGCLEHINVIWQQIQSAKKERKELHVTFLDLANAYGSVPHELLWAAFDFFSVPMTITNLVKAYFGDLQFSFSASEFSTTWQCLEVGIMAGCTISPLAFTMAMEVIIRASKWVVGGERLASGMRLPPIRAYMDDMTTMTTTVACTNRLLGKLTNNIEWAQMQFKPTKSRSISIIKGKVVDKTFFINGAAIPTVSEKPVKSLWRWYDGDLKDTVRVGEVRQQAVEGLKSIDSCALPGKLKLWCFQFGLLPRLLWPLTVYEVSLTTVEKLEALISSYIRKWLGVPRCLSRVGLYGKGILQLPVSALTEEFKCAKVRLKMTLVESRDKCVREAAPVLKTGRKWAAKKAVEDAKAALRIGDIMGQVQHGRGGLGFSSAPPTWHKAAPAQRRKLVVNEEQKQEERMRCIKAISQAKQGEWMRWESVEQRKIGWQDLWSMEQSRISFLIRSTYDVLPSPQNLNLWVGEDPSCPLCSSPATLRHILTGCKVALSQGRFTWRHDQVLRCLALALEDKCNMTNKLPPVPSKHYTQKTTFLRPGEQPPRKGVKTNPHPGQLEAARDWKMLADVGQRLIFPPEIATTNLRPDIVLWSGSARLVHLVELTVPWEDAVDEAYERKKLRYAQLATEAEQRGWRVRVYPVEVGCRGFVAHSTTRFLRDVGFSGQELRRTVKNLSEAAETSSNWLWLRRKDSGWGSQAQ

SEQ ID NO: 6912 - protein, 1091 aa, Acipenser ruthenus
MSMESTSQKTSSRSAVNKDMELQVCVCGWSKATTVRGLKIHQGRMKCLREKGQGPHIDQYFLRSQSSQSNEIQRQEANHSSQDISTHVIDVRRTCMDTVSDEPNDPCEPGQTNQHKREKNLNGIKPGVKWPRACEKTAWDTVNTDLCVALERLSGTVEKKLDKFGDIIYAYGSERFGVEKRKEKVQTIPGKSRRQQEIERLVRERRQLRNQWKRAEQSQKEGLNLLQRVIKDKLATLRRAERLRKRYKKKERARANFYKDPFKFVKKLFTSEKNGTLKASKVELERYLEETHTDSKRQEPMSVPSDIPPINPPEYQMEDCAPKWKEVEQAVKKARASSSPGPNGVPYRVYKSASGVLRILWKLMKVAWEKQVVPRAWRRAGGVFIPKEKDSTSINQFRPISLLNVEGKIFFSIIAQRLSAYLLKNCFIDTSIQKAGIPGFPGCLEHINVIWQQIQSAKKERKELHVTFLDLANAYGSVPHELLWAAFDFFSVPMTITNLVKAYFGDLQFSFSTSEFSTTWQCLEVGIMAGCTISPLAFTMTMEVIIRASKWVVGGERLASGMRLPPIRAYMDDMTTMTTTVACTNRLLGKLTNNIEWARMQFKPTKSRSISIIKGKVVDKTFFINGEAIPTVSEKPVKSLGRWYDGDLKDTVCVGEVRQQAVEGLKSIDSCALPGKLKLWCFQFGLLPRLLWPLTVYEVSLTTVEKLEALISSYIRKWLGVPRCLSRVGLYGKGILQLPVSALTEEFKCAKVRLEMTLVESCDKCVREIAPVLKTGRNWAAKKAVEDAKAALRIGDIMGQVQHGRGGLGFSSAPPTWHKAAPAQRRKLVVNEVQKPEERMRCIKDISQAKQGEWMRWESVEQRKIGWQDLWSMEQSRISFLIRSTYDVLPSPQNLNLWVGEDPSCPLCSSPATLRHILTGCKVALSQGRFTWRHDQVLRCLALALEDKRNMTNKLPPVPSKHYTQKTTFLRPGEQPPRKGVKTNPRPGQLEAARDWKMLADVGQRLIFPSEIATTNLRPDIVLWSGSARLVHLVELTVPWEDAVDEAWGGRRGVMLGRQNHHRALLRCRGLVVETPRMEGAHLKTPEMYPT

SEQ ID NO: 6913 - protein, 1091 aa, Acipenser ruthenus
MKCLREKGQGPRIDQYFLRSQSSQSNEIQRQEANHSSQDISTPVIDVRRTCMDTVSDEPNDPCEPGQTNQHKREKNLNGHKPGVKWPRACEKTAWDTVNTDLCVALERLSGTVEKKLDKFGDIIYAYGSERFGVEKRKEKVQTIPGKSRRQQEIERLVRERRQLRNQWRRAEQSQKEGLNLLQRVIKDKLATLRRAERLRKRYKKKERARANFYKDPFKFVKKLFTSEKNGTLKASKVELERYLEETHTDSKRQEPMSIPSDIPPINPPEYQMEDCAPKWKEIEQAVKKARASSSPGPNGVPYRVYKSASGVLRILWKLMKVAWEKQVVPRAWRRAGGVFIPKEKDSTSISQFRPISLLNVEGKIFFSIIAQRLSAYLLKNCFIDTSIQKAGIPGFPGCLEHTNVIWQQIQSAKKERKELHVTFLDLANAYGSVPHELLWAAFDFFSVPMTITNLVKAYFGDLQFSFSTSEFSTTWQCLEVGIMAGCTISPLAFTMAMEVIIRASKWVVGGERLASGMRLPPIRAYMDDMTTMTTTVACTNRLLGKLTNNIEWARMQFKPTKSRSISIIKGKVVDKTFFINGEAIPTVSEKPVKSLGRWYDRDLKDTVRVGEVRQQAVEGLKSIDSCALPGKLKLWCFQFGLLPRLLWPLTVYEVSLTTVEKLEALISSYIRKWLGVPRCLSRVGLYGKGILQLPVSALTEEFKCAKVRLEMTLVESRDKCVREAAPVLKTGRKWAAKKAVEDAKAALRIGDIMGQVQHGRGGLGFSSTPPTWHKAAPAQRRKLVVNEVQKQEERMRCIKAISQAKQGEWMRWESVEQRKIGWKDLWSMEQSRISFLIRSTYDVLPSPQNLNLWVGEDPSCPLCSSPATLRHILTGCKVALSQGRFTWRHDQVLRCLALALEDKRNMTNKLSPVPSKHYTQKTTFLRPGEQPPRKGVKKPILAQDNWKLLETGKCWQMLVNGLFFHLRLPPLTFDQILSCGSGSARLVHLVELTVPWEDAVDEAYERKKLRYAQLATEAEQRGWRVRVYPVEVGCRGFVAHSTTRFLRDVGFSGQELRRTVKNLSEAAERSSNWLWLRRKDSGWGQVSKLG

SEQ ID NO: 6914 - protein, 913 aa, Acipenser ruthenus
MEGLNLLQRVLKDKLPILCRAERQRKRYKKKERAKTNFYKDPFKFVKKLFTSEKNGTLKTSKFELERYLEETHTDSKRQEPMSIPSDITPINPPEYQMEDCAPKWKEVEQAVKKARASSSPGPNGVPYRVYKSASGVLRILWKLMKVAWEKQVVQRAWRRAGGVFIPKEKDSTCISQFRPISLLNVEGKIFFSIIAQRLSTYLLKNCFIDTSIQKAGIPGFPGCLEHINVIWQQIQSAKKERKELHVTFLDLANAYGSVPHELLWAAFDFFSVPMTITNLVKAYFGDLQFSFSTSEFNITWQCLEVGIMAGCTISPLAFTMAMEVIIRASKWVVGGECLASGMRLPPIRAYMDDMTTMTTTVACTNRLLGKLTNNIEWARMQFKPTKSRSISIIKGKVVDKTFFINGEAIPTVSEKPVKSLGRWYDGDLKDTVRVGEVRQQAVEGLKSIDSSALPGKLKLWCFQFGLLPRLLWPLTMYEVSLTTVEKLEALISSYIRKWLGVPRCLSRVGLYSKGILQLPVSALTEEFKCAKVRLEMTLVESRDKCVREAAPVLKTGRKWAAKKAVEDAKAALQIGDIMGQVQHGRGGLGLSSAPPTWHKAAPAQQRKLVVNEVQKQEERMRCIKAISQAKQGEWMRWESVEQRKIGWQDLWSMEKSRISFLIRSTYDVLPSPQNLNLWVGEDPSCPLCSSPATLRHILTGCKVALSQGRFTWRHDQVLRCLALALEDKRNMTNKLPPVPSKHYTQKTTFLRPGKQPPRKGVKTSPRPGQLEAARDWKMLADVGQRLIFPPEIATTNLRPDIVLWSGSARLLHLVELTVPWEDAVDEAYERKKLLYAQLATEAEQRGWRVRVYPVEVGCREFVAHSTTRFLRDVGFSGQELRRTVKNLSEAADRSSNWLWLRRKDSGWGSQAQ

SEQ ID NO: 6915 - protein, 1134 aa, Acipenser ruthenus
MSMESTSQKTSSRSAVNKDMELQVCVCGWSKVTTVRGLKIHQGRMKCLREKGQGPRIDQYFLRSQSSQSNEIQRQEANHSSQDISTPVIDVRRTCMDTVSDEPNDPCEPGQTNQHKREKNLNGHKPGVKWPRACEKTAWDTVNIDLCVALERLSGTVEKKLDKFGDIIYAYGSERFGVEKRKEKVQTIPGKSRRQQEIERLVRERRQLKNQWRRAEQSQKEGLNLLQRVIKDKLATLRRAERLRKRYKKKERARANFYKDPFKFVKKLFTSEKNGTLKASKVELERYLEETHTDSKRQEPMSVPSDIPPINPPEYQMEDCAPKWKEIEQAVKKARASSSPGPNGVPYRVYKSASGVLRILWKLMKVAWEKQVVPRAWRQAGGVFIPKEKDSTSISQFRPISLLNVEGKIFFSIIAQRLSAYLLKNCFIDTSIQKAGIPGFPGCLEHINVIWQQIQSAKKERKELHVTFLDLANAYGSVPHELLWAAFDFFSVPMTITNLVKAYFGDLQFSFSTSEFSTTWQCLEVGIMAGCTISPLAFTMAMEVIIRASKWVVGGERLASGMRLPPIRAYMDDMTTMTTTVACTNRLLGKLTNNIEWARMQFKPTKSRSISIIKGKVVDKTFFINGEAIPTVSEKPVKSLGRWYDGDLKDTVRVGEVRQQAVEGLKSIDSCALPGKLKLWCFQFGLLPRLLWPLTVYEVSLTTVEKLEALISSYIRKWLGVPRCLSRVGLYGKGILQLPVSALTEEFKCAKVRLEITLVESRDKCVREAAPVLKTGRKWAAKKAVEDAKAALRIGDIMGQVQHGRGGLGFSSTPPTWHKAAPAQRRKMVVNEVQKQEERMRCIKAISQAKQGEWMRWESVEQRKIGWQDLWSMEQSRISFLIRSTYDVLPSPQNLNLWVGENPSCPLCSSPATLRHILTGCKVALSQGRFTWRHDQVLRCLALVLEDKRNMTNKLPPVPSKHYTQKTTFLRPGEQPPRKGVKTNPRPGQLEAARDWNMLADVGQRLIFPPEIATTNLRPDIVLWSGSARLVHLVELTVPWEDAVDEAYERKKLRYAQLATEAEQRGWRVRVYPVEVGCRGFVAHSTTRFLRDVGFSGQELRRTVKNLSEAAERSSNWLWLRRKDSGWGQVSKLG

SEQ ID NO: 6916 - protein, 1134 aa, Acipenser ruthenus
MSMESTSQKTSSRSAVNKDMELQVCVCGWSKATTVRGLKIHQGRMKCLREKGQGPRIDQYFLRSQSSQSNEIQRQEANHSSQDISTPVIDVRRTCMDTVSDEPNDPCEPGQTNQHKREKNLNGHKPGVKWPRACEKTAWDTVNTDLCVALERLSGTVEKKLDKFGDIIYAYGSERFGVEKRKEKVQTIPGKSRRQQEIERLVRERRQLRNQWRRAEQSQKEGLNLLQRVIKDKLATLRRAERLRKRYRKKERARANFYKDPFKFVKKLFTSEKNGTLKASKVELERYLEETHTDSKRQEPMSIPSDIPPINPPEYQMEDCAPKWKEIEQAVKKARASSSPGPNGVPYRVYKSASGVLRILWKLMKVAWEKQVVPRAWRRAGGVFIPKEKDSTSISQFRPISLLNVEGKIFFSIIAQRLSAYLLKNCFIDTSIQKAGIPGFPGCLEHINVIWQQIQSAKKERKELHVTFLDLANAYGSVPHELLWAAFDFFSVPMTITNLVKAYFGDLQFSFSTSEFSTTWQCLEVGIMAGCTISPLAFTMAMEVIIRASKWVVGGERLASGMRLPPIRAYMDDMTTMTTTVACTNRLLGKLTNNIEWARMQFKPTKSRSISIIKGKVVDKTFFINGEAIPTVSEKPVKSLGRWYDGDLKDTVRVGEVRQQAVEGLKSIDSCALPGKLKLWCFQFGLLPRLLWPLTVYEVSLTTVEKLEALISSYIRKWLGVPRCLSRVGLYGKGILQLPVSALTEEFKCAKVRLEMTLVESRDKCVREAAPVLKTGRKWAAKKAVEDAKAALRIGDIMGQVQHGRGGLGFSSTPPTWHKAAPAQRRKLVVNEVQKQEERMRCIKAISQAKQGEWMRWESVEQRKIGWQDLWSMEQSRISFLIRSTYDVLPSPQNLNLWVGEDPSCPLCSSPATLRHILTGCKVALSQGRFTWRHDQVLRCLALALEDKRNMTNKLPPVPSKHYTQKTTFLRPGEQPPRKGVKTNPRPGQLEAARDWNMLADVGQRLIFPPEIATTNLRPDIVLWSRSARLVHLVELTVPWEDAVDEAYERMKMRYAQLATEAEQRGWRVRVYPVEVGCRGFVAHSTTRFLRDVGFSGQELRRTVKNLSEAAERSSNWLWLRRKDSGWGQVSKLG

SEQ ID NO: 6917 - protein, 832 aa, Acipenser ruthenus
MSVPSDIPPINPPEYQMEDCAPKWKEVEQAVKKARASSSPGPNGVPYRVYKSASGVLRILWKLMKVAWEKQVVPRAWRRAGGVFIPKEKDSTSTSQFHPISLLNVEGKIFFSIIAQRLSTYLLKNCFIDTSIQKAGIPGFPGCLEHINVIWQQIQSAKKERKELHVTFLDLANAYGSVPHELLWAAFDFFSVPMTITNLVKAYFGDLQFSFSTSEFSTTWQCLEVGIMAGCTISPLAFTMAMEVIIRASKWVVGGERLASGMRLPPIRAYMDDMTTMTTTVACTNRLLGKLTNNIEWARMQFKPTKSRSISIIKGKVVDKTFFINGEAIPTVSEKPVKSLGRWYDRDLKDTVRVGEVRQQAVEGLKSIDSCALPGKLKLWCFQFGLLPRLLWPLTVYEVSLTTVEKLEALISSYIRKWLGVPRCLSRVGLYGKGILQLPVSALTEEFKCTKVRLEMTLVESRDKCVREAAPVLKTGRKWAAKKAVEDAKAALRIGDIMGQVQHGRGGLGFSSAPPTWHKAAPAQRRKLVVNEVQKQEERMRCIKPISQAKQGEWMRWESVEQRKIGWQDLWSMEQSRISFLIRSTYDVLPSPQNLNLWVGEDPSCPLCSSPATLRHILTGCKVALSQGRFTWRHDQMLQCLALALEDKRNMTNKLPPVPSKHYTQKTTFLRPGEQPPRKGVKTNPRPGQLEAARDWKMLADVGQRLIFPPEIATTNLRPDIVLWSGSARLVHLVELTVPWEDAVDEAYERKKLRYAQLATEAEQRGWRVRVYPVEVGCRGFVAHSTTRFLRDVGFSGQELRRTVKNLSEAAERSSNWLCLRRKDSGWGSQAQ

SEQ ID NO: 6918 - protein, 1037 aa, Acipenser ruthenus
MDTVSDEPNDPCEPGQTNQHMREKNLSGHKPGVKWPRACEKTAWDTVNTDLCFALERLSGTVEKKLDKFGDIIYAYGSERFGVEKRKEKVQTIPGKSRRQQEIERLVRERRQLRKQWRRAEQSQKEGLNLLQRVIKDKLATLRRAERLRKRYKKKERARANFYKDSFKFVKKLFTSEKNGTLKTSKVELERYLEETHTDSKRQEPMSIPSDTPPINPQEYQMEDCAPKWKEVEQDVKKARASSSPGPNGVPYRVYKSASGVLRILWKLMKVAWEKQVVPRAWRRAGGVFIPKEKDSTSISQFRPISLLNVEGKIFFSIFAQRLSTYLLKNCFIDTSIQKAGIPGFPGCLEHINVIWQQIQSAKKDRKELHVTFLDLANAYGSVPHELLWAAFDFFSVLMTITNLVKAYFGDLQFSFSTSEFSTTWQCLEVGIMAGCTISPLAFTMAMEVIIRASKWVVGGERLASGMRLPPIRAYMDDMTTMTTTVACTNRLLGKLTNNIEWARMQFKPTKSRSISIIKDKVVDKTFFINGEAIPTVTENPVKSLGRWYDGDLKDTVRVGEVRQQAVEGLKSIDSCALPAKLKLWCFQFGLLPRLLWPLTVYEVSLTTVEKLEALISSYTRKWLGVPRCLSRVGLYGKGILQLPVSALTEEFKCAKVRLEMTLVESRDKCVREAAPVLKTGRKWAAKKAVEDAKAALRIGDIMGQVQYGRGFLGLSSAPPTWHKAAPAQRRKLVVNEVQKQEEMMRCIKAISQAKQGEWMRWESVEQHKIGWQDLWSMEQSRISFLIRSTYDVLPSPQNLNLWVGEDPSCPLCSSPATLRHILTGCKVALSQGRFTWRHDQVLRCLALALEDKRNMTNKLPPVPSKHYTQKTTFLRPGEQPPKKGVKTNPRPGQLAAARDWKMLADVGQRLIFPPEIATTNLRPDIVLWSGSARLVHLVELTVPWEDAVDEAYERKKLRYAQLATEAEQRGWRVRVYPVEVGCRGFVAHSTTRFLRDVGFSGQELRRTVKNLSEAAERSSNWLWLRRKDSGWGSQAQ

SEQ ID NO: 6919 - protein, 982 aa, Acipenser ruthenus
MDRKGLSGTVEKKLDKFGDIIYAYGSERFGVEKRKEKVQTIPGKSRRQQEIERLVRERRQLRKQWRRAEQSQKEGLNLLQRVIKDKLATLRRAERLRKRYKKKERARANFYKDPFKFVKKLFTSEKNGTLKASKVELDRYLEETHTDSKRQEPMSIPSDIPPINLPEYQMEDCAPKWKEVEQAVKKARASSSPGPNGVPYRVYKSASGILRILWKLMKVAWEKQVVPTAWCRAGGVFIPKEKDSTSISQFRPISLLNVEGKIFFSIISQRLSTYLLKNCFIDTSVQKAGIPGFPGCLEHISVIWQQIQSAKKERKELHVTFLDLANAYGSVPHELLWAAFDFFSVPMTITNLVKAYFGDLQFSFSTSEFSTTWQCLEVGIMARCTISPLAFTMAMEVLIRASKWVVGGERLASGMRLPPIRAYMDDMTTMTTTVACTNRLLGKLTNNIEWARMQFKPTKSRSISIIKGKVVDKTFFINGEEIPTVSEKPVKSLGRWYDGDLKDTVRVGEVRQQAVEGLKSIDSCALPGKLKLWCFQFGLLPRLLWPLTVYEVSLTTVEKLEALISSYVRKWLGVPRCLSRVGLYGKGILQLPVSALTEEFKCAKVRLEMTLVESRDKCVREAAPMLKTGRKWAAKKAVEDAKAALRISDIMGQVQHGRGGLGLSSAPPTWHKAAPAQRRKLLVNEVQKQEERMRCIKAISQAKHGEWMRWESVEQCKIGWQDLWSMEQSRISFLIRSTYDVLPSPQNLNLWVGEDPSCPLCSSPATLRHILTGCKVALSQGRFTWHHDQVLRCLALALEDKRNMTKKLPPVPSKHYTQKTTFLRPGQQPPRKGVKTNPRPGQLEAARDWKMLADVGQRLIFPPEIATTNLRPDIVLWSGSARLVELTVPWEDAVDEAYERKKLRYAQLATEAEQRGWRVRVYPVEVGCRGFVAHSTTRFLRNVGFSGQELRRTVKNLSEAAERSSNWLWLRRKDSGWGSQAQ

SEQ ID NO: 6920 - protein, 835 aa, Acipenser ruthenus
MSIPSDIPPINPPEYQMEDCAPKWKEIEQAVKKARASSSPGPNGVPYRVYKSASGVLRILWKLMKVAWEKQVVPRAWRRAGGVFIPKEKDSTSISQFRPISLLNVEGKIFFSIIAQRLSAYLLKNCFIDTSIQKAGIPGFPGCLEHINVIWQQIQSAKKERKELHVTFLDLANAYGSVPHELLWAAFDFFSVPMTITNLVKAYFGDLQFSFSTSEFSTTWQCLEVGIMAGCTISPLAFTMAMEVIIRASKWVVGGERLASGMRLPPIRAYMDDMTTMTTTVACTNRLLGKLTNNIEWARMQFKPTKSRSISIIKGKVVDKTFFINGEAIPTVSEKPVKSLGRWYDGDLKDTVRVGEVRQQAVEGLKSIDSCALPGKLKLWCFQFGLLPRLLWPLTVYEVSLTTVEKLEALISSYIRKWLGVPRCLSRVGLYGKGILQLPVSALTEEFKCAKVRLEMTLVESRDKCVREAAPVLKTGRKWAAKKAVEDAKAALRIGDIMGQVQHGRGGLGFSSTPPTWHKAAPAQRRKLVVNEVQKQEERMRCIKAISQAKQGEWMRWESVEQRKIGWQDLWSMEQSRISFLIRSTYDVLPSPQNLKNLWVGEDPSCPLCSSPATLRHILTGCKVALSQGRFTWRHDQVLRCLALALEDKRNMTNKLPPVPSKHYTQKTTFLRPGEQPPRKGVKTNPRPGQLEAARDWNMLADVGQRLIFPPEIATTNLRPDIVLWSGSARLVHLVELTVPWEDAVDEAYERKKLRYAQLATEAEQRGWRVRVYPVEVGCRGFVAHSTTRFLRDVGFSGQELRRTVKNLSEAAERSSNWLWLRRKDSGWGQVSKLG

SEQ ID NO: 6921 - protein, 1136 aa, Acipenser ruthenus
MDMSMESTSQKTSSRSAVNKDMELQVCVCGWSKATTVRGLKIDQGRMKCLREKGQGPRIDQYFLRSQSSQSNEIQRQEANHSSQDISTPVIDVRRTCMDTVSDEPNDPCGPGQTNQHKREKNLNGHKPGVKWPRACEKTAWDTVNTDLCVALERLSGTVEKKLDKFGDIIYAYGSERFGVEKRKEKVQTIPGKSRRQQEIERLVRERRQLRNQWRRAEQSQKEGLNLLQRVIKDKLATLCRAERLRKRYKKKERARANFYKDPFKFVKKLFTSEKNGTLKASKVELERYLEETHTDSKRQEPMSVPSDIPPINPPEYQMEDCAPKWKEIEQAVKKARASSSPGPNGVPYRVYKSASGVLRILWKLMKVAWEKQVVPRAWRRAGGVFIPKEKDSTSISQFRPISLLNVEGKIFFSIIAQRLSAYLLKNCFIGTSIQKAGIPGFPGCLEHINVIWQQIQSAKKERKELHVTFLDLANAYGSVPHELLWAAFDFFSVPMTITNLVKAYFGDLQFSCSTSEFSTTWQCLEVGIMAGCTISPLAFTMAMEVIIRASKWVVGGERLASGMRLPPIRAYMDDMTTMTTTVACTNRLLGKLTNNIEWARMQFKPTKSRSISIIKGKVVDKTFFINGEAIPTVSEKPVKSLGRWYDGDLKDTVRVGEVRQQAVEGLKSIDSCALPGKLKHWCFQFGLLPRLLWPLTVYEVSLTTVEKLEALISSYIRKCLGVTRCLSRVGLYGKGILQLPVSALTEEFKCAKVRLEMTLVESRDKCVREAAPVLKTGRKWAAKKAVEDAKASLRIGDIMEQVQHGRGGLGFSSTPPTWHKAAPAQRRKLVVNEVQKQEERMRCIKSISQAKQGEWMRWESVEKRKIGWQDLWSMEQSRISFLIRSTYDVLPSPQNLNLWVGEDPSCPLCSSPATLRHILTGCKVALSQGRFTWRHDQVLRCLALALEDKRNMTNKLPPVPSKHYTQKTTFLRPGEQPPRKGVKTNPRPGQLEAARDWNMLADVGQRLIFPPEIATTDLRPDIVLWSGSARLVHLVELTVPWEDAVDEAYERKKLRYAQLATEAEQRGWRVRVYPVEVGCRGFVAHSTTRFLRDVGFSGQELRRTVKNLSEAAERSSNWLWLRRKDSGWGQVSKLG

SEQ ID NO: 6922 - protein, 1136 aa, Acipenser ruthenus
MDMSMESTSQKTSSRSAVNKDMELQVCVCGWSKATTVRGLKIHQGRMKCLREKGQGPRIDQYFLRSQSSQSNEIQRQEANHSSQDISTPVIDVRRTCMDTVSDEPNDPCEPGQTNQHKREKNLNGHKPGVKWPRACEKTAWDTVNTDLCVALERLSGTVEKKLDKFGDIIYAYGSERFGVEKRKEKVQTIPGKSRRQQEIERLVRERRQLRNQWRRAEQSQKEGLNLLQRVIKDKLATLCRAERLRKGYKKKERARANFYKDPFKFVKKLFTSEKNGTLKASKVELERYLEETHTDSKRQEPMSVPSDIPPINPPEYQMEDCAPKWKEIEQAVKKARASSSPGPNGVPYRVYKSASGVLRILWKLMKVAWEKQVVPRAWRRAGGVFIPKEKDSTSISQFRPISLLNVEGKIFFSIIAQRLSAYLLKNCFIGTSIQKAGIPGFPGCLEHINVIWQQIQSAKKERKELHVTFLDLANAYGSVPHELLWAAFDFFSVPMTITNLVKAYFGDLQFSCSTSEFSTTWQCLEVGIMAGCTISPLAFTMAMEVIIRASKWVVGGERLASGMRLPPIRAYMDDMTTMTTTVACTNRLLGKLTNNIEWARMQFKPTKSRSISIIKGKVVDKTFFINGEAIPTVSEKPVKSLGRWYDGDLKDTVRVGEVRQQAVEGLKSIDSCALPGKLKHWCFQFGLLPRLLWPLTVYEVSLTTVEKLEALISSYIRKWLGVTRCLSRVGLYGKGILQLPVSALTEEFKCAKVRLEMTLVESRDKCVREAAPVLKTGRKWAAKKAVEDAKASLRIGDIMGQVQHGRGGLGFSSTPPTWHKAAPAQRRKLVVNEVQKQEERMRCIKSISQAKQGEWMRWESVEKRKIGWQDLWSMEQSRISFLIRSTYDVLPSPQNLNLWVGEDPSCPLCSSPATLRHILTGCKVALSQGRFTWRHDQVLRCLALALEDKRNMTNKLPPVPSKHYTQKTTFLRPGEQPPRKGVKTNPRPGQLEAARDWNMLADVGQRLIFPPEIATTDLRPDIVLWSGSARLVHLVELTVPWEDAVDEAYERKKLRYAQLATEAEQRGWRVRVYPVEVGCRGFVAHSTTRFLRDVGFSGQELRRTVKNLSEAAERSSNWLWLRRKDSGWGQVSKLG

SEQ ID NO: 6923 - protein, 1134 aa, Felis catus
MSMESTSQKTSSRSAVNKDMELQVCVCGWSKATTVRGLKIHQGRMKCLREKGQGPRIDQYFLRSQSSQSNEIQRQEANHSSQDISTPVIDVRRTCMDTVSDEPNDPCEPGQTNQHKREKNLNGHKPGVKWPRACEKTAWDTVNTDLCVALERLSGTVEKKLDKFGDIIYAYGSERFGVEKRKEKVQTIPGKSRRQQEIERLVRERRQLRNQWRRAEQSQKEGLNLLQRVIKDKLATLRRAERLRKRYKKKERARANFYKDPFKFVKKLFTSEKNGTLKASKVELERYLEETHTDSKRQEPMSIPSDIPPINPPEYQMEDCAPKWKEIEQAVKKARASSSPGPNGVPYRVYKSASGVLRILWKLMKVAWEKQVVPRAWRRAGGVFIPKEKDSTSISQFRPISLLNVEGKIFFSIIAQRLSAYLLKNCFIDTSIQKAGIPGFPGCLEHINVIWQQIQSAKKERKELHVTFLDLANAYGSVPHELLWAAFDFFSVPMTITNLVKAYFGDLQFSFSTSEFSTTWQCLEVGIMAGCTISPLAFTMAMEVIIRASKWVVGGERLASGMRLPPIRAYMDDMTTMTTTVACTNRLLGKLTNNIEWARMQFKPTKSRSISIIKGKVVDKTFFINGEAIPTVSEKPVKSLGRWYDGDLKDTVRVGEVRQQAVEGLKSIDSCALPGKLKLWCFQFGLLPRLLWPLTVYEVSLTTVEKLEALISSYIRKWLGVPRCLSRVGLYGKGILQLPVSALTEEFKCAKVRLEMTLVESRDKCVREAAPVLKTGRKWAAKKAVEDAKAALRIGDIMGQVQHGRGGLGFSSTPPTWHKAAPAQRRKLVVNEVQKQEERMRCIKAISQAKQGEWMRWESVEQRKIGWQDLWSMEQSRISFLIRSTYDVLPSPQNLNLWVGEDPSCPLCSSPATLRHILTGCKVALSQGRFTWRHDQVLRCLALALEDKRNMTNKLPPVPSKHYTQKTTFLRPGEQPPRKGVKTNPRPGQLEAARDWKMLADVGQRLIFPPEIATTNLRPDIVLWSGSARLVHLVELTVPWEDAVDEAYERKKLRYAQLATEAEQRGWRVRVYPVEVGCRGFVAHSTTRFLRDVGFSGQELRRTVKNLSEAAERSSNWLWLRRKDSGWGQVSKLG

SEQ ID NO: 6924 - protein, 1134 aa, Acipenser ruthenus
MSMESTSQKTSSRSAVNKDMELQVCVCGWSKATTVRGLKIHQGRMKCLREKGQGPRIDQYFLRSQSSQSNEIQRQEANHSSQDISTPVIDVRRTCMDTVSDEPNDPCEPGQTNQHKREKNLNGHKPGVKWPRACEKTAWDTVNTDLCVALERLSGTVEKKLDKFGDIIYAYGSERFGVEKRKEKVQTIPGKSRRQQEIERLVRERRQLRNQWRRAEQSQKEGLNLLQRVIKDKLATLRRAERLRKRYKKKERARANFYKDPFKFVKKLFTSEKNGTLKASKVELERYLEETHTDLKRQEPMSIPSDIPPINPPEYQMEDCAPKWKEIEQAVKKARASSSPGPNGVPYRVYKSASGVLRILWKLMKVAWEKQVVPRAWRRAGGVFIPKEKDSTSISQFRPISLLNVEGKIFFSIIAQRLSAYLLKNCFIDTSIQKAGIPGFPGCLEHINVIWQQIQSAKKERKELHVTFLDLANAYGSVPHELLWAAFDFFSVPMTITNLVKAYFGDLQFSFSTSEFSTTWQCLEVGIMAGCTISPLAFTMAMEVIIRASKWVVGGERLASGMRLPPIRAYMDDMTTMTTTVACTNRLLGKLTNNIEWARMQFKPTKSRSISIIKGKVVDKTFFINGEAIPTVSEKPVKSLGRWYDGDLKDTVRVGEVRQQAVEGLKSIDSCALPGKLKLWCFQFGLLPRLLWPLTVYEVSLTTVEKLEALISSYIRKWLGVPRCLSRVGLYGKGILQLPVSALTEEFKCAKVRLEMTLVESRDKCVREAAPVLKTGRKWAAKKAVEDAKAALRIGDIMGQVQHGRGGLGFGSAPPTWHKAAPAQRRRLVANEVQKQEERMRCIKAISQAKQGEWMRWESVEQRKIGWQDLWSMEQSRISFLIRSTYDVLPSPQNLNLWVGEDPSCPLCSSPATLRHILTGCKVALSQGRFTWRHDQVLRCLALALEDKRNMTNKLPPVPSKHYTQKTTFLRPGEQPPRKGVKTNPRPGQLEAARDWNMLADVGQRLIFPPEIATTNLRPDIVLWSGSARLVHLVELTVPWEDAVDEAYERKKLRYAELATEAEQRGWRVRVYPVEVGCRGFVAHSTTRFLRDVGFSGQELRRTVKNLSEAAERSSNWLWLRRKDSGWGQVSKLG

SEQ ID NO: 6925 - protein, 1057 aa, Acipenser ruthenus
MSMESTSQKTSSRSAVSKDMELQVCVCGWSKATTVRGLKIHQGRMKCLREKGQGPRIDQYFLRSQSSQSNEIQRQEANHSSQDISTPVIDVRRTCMDTVSDEPNDPCEPGQTNQHKREKNLNGHKPGVKWPRACEKTAWDTVNTDLCVALERLSGTVENKLDKFGDIIYAYGSERFGVEKRKEKVQTIPGKSRRQQEIERLVRERRQLRNQWRRAEQSQKEGLNLLQRVIKDKLATLRRAERLRKRYKKKERARTNFYKDPFKFVKKLFTSEKNGTLKASKVELERYLEETHTDSKRQEPMSFPSDIPPINPPEYQMEDCAPKWKEVEQAVKKARASSSPGPNGVPYRVYKSVSGVLRILWKLMKVAWEKQVVPRAWRRASGVFIPKEKDSTSISQFHPISLLNVEGKIFFSIIAQRLSAYLLKNCFIDTSIQKAGIPGFPGCLEHINVIWQQIQSAKKERKELHVTFLDLANAYGSVPHELLWAAFDFFSVPKTITNLVKAYFGDLQFSFSTSEFSTTWQCLEVGIMAGCTISPLAFTMAMEVIIRASKWVVGGERLASGMRLPPIRAYMDDMTNMTTTVACTNRLLGKLTNNIEWARMQFKPTKSRSISLNKGKVVDKTFFINGEAIPTVSEKPVKSLGRWYDGDLKDTVRVGEVRQQAVEGLKSIDSCALPGKLKLWCFQFGLLPKLLWPLTVYEVSLRSYIRKWLGVPRCLSRVGLYGKGILQLPVSALTEEFKCAKVRLEMTLVESRDKCVREAAPVFKTGREWAAKKAVEDAKAALRIGDIMGQVQHGRGGLGFSSTPPTWHKAAPAQRRKLVVNEVQKQEERMRCIKAISQAKQGEWMRWESVEQRKIGWQDLWSMEQSRISFLIRSTYDVLPSPQNLNLWVGEDPSCPLCSSPATLRHILTGCKVALSQGRFTWRHDQVLRCLALALEDKRNMTNKLPPVPSKHYTQKTTFLRPGEQPPRKGVKTNPRPGQLEAARDWKMLADVGQRLIFPPEIVTTNLRPDIVLWSGSARLVHLVELTVPWEDAVDEAYERKKLWYAQLATEAEQQGW

SEQ ID NO: 6926 - protein, 1133 aa, Acipenser ruthenus
MSMESTSQKTSSRSAVNKDMELQVCVCGWSKATTVRGLKIHQGRMKCLREKGQGPRIDQYFLRSQSSQSNEIQRQEANHSSQDISTPVIDVRRTCMDTVSDEPNDPCEPGQTNQHKREKNLNGHKPGVKWPRACEKTAWDTVNTDLCVALERLSGTVEKKLDKFGDIIYAYGSERFGVEKRKEKVQTIPGKSRRQQEIERLVRERRQLRKQWRREEQSQKEGLNLLQRVIKDKLATLRRAERLRKRYKKKERARANFYKDPFKFVKKLFTSEKNGTLKASKVELERYLEEIHTDSKRQEPMSIPSDIPPINPPEYQMEDCAPKWKEIEQAVKKARASSSPGPNGVPYRVYKSASGVLRILWKLMKVAWEKQVVPRAWRRAGGVFIPKEKDSTSISQFRPISLLNVEGKIFFSIIAQRVSAYLLKNCFIDTSIQKAGIPGFPGCLEHINVIWQQIQSAKKERKELHVAFLDLANAYGSVPHELLWAAFDFFSVPMTITHLVKAYFGDLQFSFSTSEFSTTWQCLEVGIMAGCTISPLAFTMAMEVIIRASKWVVGGERLASGMRLPPIRAYMDDMTTMTTTVACTNRLLGKLTNNIEWARMQFKPTKSRSISIIKGKVIDKTFFINGEAIPTVSEKPVKSLGRWYDGDLKDTVRVGEVRQQAVEGLKSIDSCALPGKLKLWCFQFGLLPRLLWPLTVYAVSLTTVEKLEALISSYIRKWLGVPRCLSRVGLYGKGILQPVSALTEEFKCAKVRLEMTLVESRDKCLREAAPVLKTGRKWTAKKAVEDAKAALRIGDIMGQVQHGRGGLGFSSTPPTWHKAAPAHRRKLVVNEVQKQEERMRCIKAISQAKQGEWMRWESVEQRKIGWQDLWSMEQSRISFLIRSTYDVLPSPQNLNLWVGEDPSCPLCSSPATLRHILTGCKVALSQGRFTWRHDQVLRCLALALEDKRNMTNKLPPVPAKHYTQKTTFLHPGEQPPRKGVKTNPRPGQLEAARDWNMLADVGQRLIFPPEIATTNLRPDIVLWSGSARLVHLVELTVPWEDAVDEAYERKKLRYAQLATEAEQRGWRVRVYPVEVGCQGFVAHSTTRFLRDVGFSGQELRRTVKNLSEAAERSSNWLWLRRKDSGWGQVSKLG

SEQ ID NO: 6927 - protein, 836 aa, Acipenser ruthenus
MSIPSDIPPINPPEYQMEDCAPKWKEIEQAVKKARASSSPGPNGVPYRVYKSASGVLRILWKLMKVAWEKQVVPRAWRRAGGVFIPKEKDSTSISQFRPISLLNVEGKIFFSIIAQRLSAYLLKNCFIDTSIQKAGIPGFPGCLEHINVIWQQIQSAKKERKELHVTFLDLANAYGSVPHELLWAAFDFFSVPMTITNLVKAYFGDLQFSFSTSEFSTTWQCLEVGIMAGCTISPLAFTMAMEVIIRASKWVVGGERLASGMRLPPIRAYMDDMTTMTTTVACTNRLLGKLTNNIEWAQMQFKPTKSRSISIIKGKVVDKTFFINGEAIPTVSEKPVKSLGRWYDGDLKDTVRVGEVRQQAVEGLKSIDSSALPGKLKLWCFQFGLLPRLLWPLTVYEVSLTTVEKLEALISSYIRKWLGVPRCLSRVGLYGNGILQLPVSALTEEFKCAKVRLEMTLVESRDKCVREAAPVLKTGRKWVAKKAVEDAKAALRIGDIMGQVQHGRGGLGFSSTPPTWHKGGPSSKKEAGSQRGAKAGGEDEVCIKAISQAKQGEWMRWESVEQRKIGWQDLWSMEQSRISFLIRSTYDVLPSPQNLNLWVGEDPSCPLCSSPATLRHILTGCKVALSQGRFTWRHDQVLRCLALALEDKRNMTNKLPPVPSKHYTQKTTFLRPGEQPPRKGVKTNPPRPGQLEAARDWKMLADVGQRLIFPPEIATTNLQPDIVLWSGSARLVHLVELTVPWEDAVDEAYERKKLRYAQLATEAEQRGWRVQVYPVEVGCRRFVAHSTTRFLRDVGFSGQELRRTVKNLSEAAERSSNWLWLRRKDSGWGQVSKLG

SEQ ID NO: 6928 - protein, 835 aa, Acipenser ruthenus
MSIPSDIPPINPPEYQMEDCAPKWKEIEQAVKKARASSSPGPNGVPYRVYKSASRVLRILWKLMKVAWEKQVVPRAWRRAGGVFIPKEKDSTSISQFRPISLLNVEGKIFFSIIAQRLSAYLLKNCFIDTSIQKAGIPGFPGCLEHINVIWQQIQSAKKERKELHVTFLDLANAYGSVPHELLWAAFDFFSVPMTITNLVKAYFGDLQFSFSTSEFSTTWQCLEVGIMAGCTISPLAFTMAMEVIIRASKWVVGGERLASGMRLPPIRAYMDDMTTMTTTVACTNRLLGKLTNNIEWARMQFKPTKSRSISIIKGKVVDKTFFINGEAIPTVSEKPVKSLGRWYDGDLKDTVRVGEVRQQAVEGLKSIDSCALPGKLKLWCFQFGLLPRLLWPLTVYEVSLTTVEKLEALISSYIRKWLGVPRCLSRVGLYGKGILQLPVSALTEEFKCAKVRLEMTLVESRDKCVREAAPVLKTGRRKWAAKKAVEDAKAALRIGDIMGQVQHGRGGLGFSSTPPTWHKAAPAQRRKLVVNEVQKQEERMRCIKAISQAKQGEWMRWESVEQRKIGWQDLWSMEQSRISFLIRSTYDVLPSPQNLNLWVGEDPSCPLCSSPATLRHILTGCKVALSQGRFTWRHDQVLRCLALALEDKRNMTNKLPPVPSKHYTQKTTFLRPGEQPPRKGVKTNPRPGQLDAARDWKMLADVGQWLIFPPEIATTNLRPDIVLWSGSARLVHLVELTVPWEDAVDEAYERKKLRYAQLATEAEQRGWRVRVYPVEVGCRGFVAHSTTRFLRDVGFSGQELRRTVKNLSEAAERSSNWLWLRRKDSGWGQVSKLG

SEQ ID NO: 6929 - protein, 1045 aa, Acipenser ruthenus
MRRTCMDTVSDEPNDPCEPGQTNQHKREKNLNGHKPGVKWPRACEKTAWDTVNTDLCVALERLSGTVEKKLDKFGDIIYAYGSERFGVEKRKEKVQTIPGKSRRQQEIERLVRERRQLRNQWRRAEQSQKEGLNLLQRVIKDKLATLRRAERLWKRYKKKERARANFYKDPFKFVKKLFTSEKNGTLKASKVELERYSEETHTDSKRQEPMSVPSDIPPINPPEYQMEDCAPKWKEIEQAVKKARASSSPGPNGVPYRVYKSASGVLRILWKLMKVAWEKQVVPRAWRRAGGVFIPKEKDSTSISQFHPISLLNVEGKIFFSIIAQRLSAYLLKNCFIDTSIQKAGIPGFPGCLEHISVIWQQIQSAKKERKELHVTFLDLANAYGSVPHELLWAAFDFFSVPMTITNLVKAYFGDLQFSFSTSEFSTTWQCLEVGIMAGCTISPLTFTMAMEVIIRASKWVVGGERLASGMRLPPIRAYMDDMTTMTTTVACTNRLLGKLTNNIEWARMQFKPTKSRSISIIKGKVVDKTFFINGEAIPTVSEKPVKSLGRWYDGDLKDTVRVGEVRQQAVEGLKSIDSCALPGKLKLWCFQFGLLPRLLWPLTVYEVSLTTVEKLEALISSYIRKWLGVPRCLSRVGLYGKGILQLPVSSLTEEFKCAKVRLEMTLVESRDKCVREAAPVLKTGRKWAAKKAVEDAKAALRIGDIMGQVQHGREGGLGFSSTPPTWHKAAPAQRRKLVVNEVQKQEERMRCIKAISQAKQGEWMRWESVEQRKIGWQDLWSMEQSRISFLIRSTYDVLPSPQNLNLWVGEDPSCPLCSSPATLRHILTGCKVALSQGRFTWRHDQVLRCLALALEDKRNMTNKLPPVPSKHYTQKTTFLCPGEQPPRKGVKTNPHPGQLEAARDWNMLADVGQRLIFPPEIATTNLRPDIVLWSGSARLVHLVELTVPWEDAVDEAYERKKLRYAQLATEAEQRGWRVRVYPVEVGCRGFVAHSTTRFLRDVGFSGQELRRTVKNLSEAAERSSNWLWLRRKDSGWGQVSKLG

SEQ ID NO: 6930 - protein, 836 aa, Acipenser ruthenus
MSIPSDIPPINPPEYQMEDCAPKWKEIEQAVKKARASSSPGPNGVPYRVYKSASGVLRILWKLMKVAWEKQVVPRAWRRAGGVFIPKEKDSTSISQFRPISLLNVEGKIFFSIIAQRLSAYLLKNCFIDTSIQKAGIPGFPGCLEHINVIWQQIQSAKNERKELHVTFLDLANAYGSVPHELLWAAFDFFSVPMTITNLVKAYFGDLQFSFSTSEFSTTWQCLEVGIMAGCTISPLAFTMAMEVIIRASKWVVGGERLASGMRLPPIRAYMDDMTTMTTTVACTNRLLGKLTNNIEWARMQFKPTKSRSISIIKGKVVDKTFFINGEAIPTVSEKPVKSLGRWYDGDLKDTVRVGEVRQQAVEGLKSIDSCALPGKLKLWCFQFGLLPRLLWPLTVYEVSLTTVEKLEALISSYIRKWLGVPRCLSRVGLYGKGILQLPVSALTEEFKCAKVRLEMTLVESRDKCVREAAPVLKTGRKWAAKKAVEDAKAALRIGDIMGQVQHGRGGVLVSVQLLLHGTRRPPSSKEEAGSQRGAKAGGEDEVYKGHFPGQAGRMDEMGESVEQHKIGWKDLWSMEQSRISFLIRSTYDVLPSPQNLNLWVGEDPSCPLCSSPATLRHILTGCKVALSQGRFTWRHDQVLQCLALALEDKRNMTNKLSPVPSKHYTQKTTFLRPGEQPPRKGVKTNSRPGQLEAARDWKMLADVGQRLIFPPEIATTNLRPDIVLWSGSARLVHLVELTVPWEDAIDEAYERKKLRYAQLATEAEQRGWRVRVYPVEVGCRGFVAHSTTRFLRDVRFSGQELRRTVKNLSEAAERSSNWLWLRRKDSGWGQVSKLG

SEQ ID NO: 6931 - protein, 1000 aa, Acipenser ruthenus
MFSMFSRLSGTVEKKLDKFGDIIYAYGSERFGVEKRKEKVQTIPGKSRRQQEIERLVRERRQLRNQWRRAEQSQKEGLNLLQRVIKDKLATLRRAERLRKRYKKKERARANFYKDPFKFVKKLFTSEKNDTLKASKVELERYLEETHTDSKRQEPMSVPSDIPPINPPEYQMEDCAPKWKEVEQAVKKARASSSPGPNGVPYRVYKSASGVLRILWKLMKVAWEKQVVPRAWRRAGGVFIPKEKDSTSISQFRPISLLNVEGKIFFSIIAQRLSAYLLKNCFIDTSIQKAGIPGFPGCLEHINVIWQQIQSAKKERKELHVTFLDLANAYGSVPHELLWAAFDFFSVPMTITNLVKAYIGDLQFSFSISEFSTTWQCLEVGIMAGCTISPLAFTMAMEVIIRASKWVVGGECLASGTRLPPIRAYMDDMTTMTTTVACTNRLLGKLTNNIEWARMQFKPTKSRSISIIKGKVVDKVDKTFFINGEAIPTVSEKPVKSLGRWYDGDLKDTVRVGEVRQQAVEGLKSIDSCALPGKLKLWCFQFGLLPRLLWPLTVYEVSLTTVEKLEALISSYFRKWLGVPRCLSRVGLYGKGILQLPVSALTEEFKCAKVRLEMTLVESRDKCVREAAPVLKTGRKWAAKKAVEDAKAALRIGDILGQVQHGRGGLGFSSAPPTWHKAAPAQRRKLVVNEVQKQEERMGCIKAISQAKQGEWMRWESVEPCKIGWQDLWSMEQSRISFLIRSTYDVLPSPQNLNLWVGEDPSCPLCSSPATLRHILTGCKVALSQGRFTWRHVQVLRCLALALEDKRNMTNKLPPVPSKHYTQKTTFLRPGEQPPRKGVKTNPCPGQLKAARDWKMLADVGQRLIFPPEIATTNLRPDIVLWSGSARLVHLVELTVPWEDAVDEAYERKKLRYAQLATEAEQRGWRVRVYPVEVGCRGFVAHSTTRFLRDVGFSGQELHRTVKNLSEAAERSSREEQQLAVVKTERFWLGISSTIERKKR

SEQ ID NO: 6932 - protein, 1123 aa, Acipenser ruthenus
MSMESTSQKTSSRSAVNKDMELQVCVCGWSKATTVRGLKIHQGRMKCLREKGQGPRIDQYFLRSQSSQSNEIQRQEANHSSQDISTPVIDVRRTCMDTVSDEPNDPCEPGQTNQHKREKNLNGHKPGVKWPRACEKTAWDTVNTDLCVALERLSGTVEKKLDKFGDIIYAYGSERFGVEKRKEKVQTIPGKSRWQQEIERLVRERRQLRNQWRRAEQSQKEGLNLLQRVIKDKLATLRRAERLRKRYKKKERARANFYKDPFKFVKKLFTSEKNGTLKASKVELERYLEETHTDSKRQEPMSIPSDIPPINPPEYQMEDCAPKWKEIEQAVKKARASSSPGPNGVPYRVYKSASGVLRILWKLMKVAWEKQVVQRAWRRAGGVFIPKGKDSTSISQFRPISLLNVEGKIFFSIIAQRLSAYLLKNCFIDTSIQKAGIPGFPGCLEHINVIWQQIQSAKKERKELHVTFLDLANAYGSVPHELLWAAFDFFSVPMTITNLVKAYFGDLQFSFSTSEFSTIWQCLEVGIMAGCTISPLAFTMAMEVIIRASKWVVGGERLASGMRRLPPIRAYMDDMTTMTTTVACTNRLLGKLTNNIEWARMQFKPTKSRSISIIKGKVVDKTFFSNGEAIPTVSEKPVKSLGRWYDGDLKDTVRVGEVRQQAVEGLKSIDSCALPGKLKLWCFQFGLLPRLLWPLTVYEVSLTTVEKLEALISSYIRKWLGVPRCLSRVGLYGKGILQLPVSALTEEFKSRDKCVREAAPVLKTGRKWAAKKAVEDAKAALRIGDIMGQVQHGRGGLGFSSTPPTWHKAAPAQRRKLVVNEVQKQEERMRCIKAISQAKQGEWMRWESVEQRKIGWQDLWSMEQSRISFLIRSTYDVLPSPQNLNLWVGEDPSCPLCSSPATLRHILTGCKVALSQGRFTWRHDQVLRCLALALEDKRNMTNKLPPVPSKHYTQKTTFLRPGEQPPRKGVKTNPRPGQLEAARDWKMLADVGQRLIFPPEIATTNLRPDIVLWSGSAHLVHLVELTVPWEDAVDEAYERKKLWYAQLATEAEQRGWRVRVYPVEVGCRGFVAHTTTRFLRDVGFSGQELRRTVKNLSEAVERSSNWLWMRRKDSGWGQVSKLG

SEQ ID NO: 6933 - protein, 947 aa, Acipenser ruthenus
MNLMILVNPVRQTSIRENLNGHKPGVKWPRACEKTAWDTVNTDLCVALERLSGTVEKKLDKFGDIIYAYGSERFGVEKRKEKVQTIPGKSRRQQEIERLVRERRQLRNQWRRAEQSQKEGLNLLQKVIKDKLATLRRAERLRKRYKKKERARANFYKDPFKFVKKLFTSEKNGTLKASKVELERYLEETHTDSKRQEPMSIPSDIPPINPPEYQMEDCAPKWKEIEQAVKKARASSSPGPNGVPYRVYKSASGVLRILWKLMKVAWEKQVVPRAWRRAGGVFIPKEKDSTSISQFRPISLLNVEGKIFFSIIAQRLSAYLLKNCFIDTSIQKAGIPGFPGCLEHINVIWQQIQSAKKERKELHVTFLDLANAYGSVPHELLWAAFDFFSVPMTITNLVKAYFGDLQFSFSTSEFSTTWQCLEVGIMAGCTISPLAFTMAMEVIIRASKWVVGGERLASGMRLPPIRAYMDDMTTMTTTVACTNRLLGKLTNNIEWARMQFKPTKSRSISIIKGKVVDKTFFINGEAIPTVSEKPVKSLGRWYDGDLKDTVRVGEVRQQAVEGLKSIDSCALPGKLKLWCFQFGLLPRLLWPLTVYEVSLTTVEKLEALISSYIRKWLGAAKKAVEDAKAALRIGDIMGQVQHGRGGLGFSSTPPTWHKAAPAQRRKLVVNEVQKQEERMRCIKAISQAKQGEWMRWESVEQRKIGWQDLWSMEQSRISFLIRSTYDVLPSPQNLNLWVGEDPSCPLCSSPATLRHILTGCKVALSQGRFTWRHDQVLRCLALALEDKRNKTNKLPPVPSKHYTQKTTFLRPGEQPPRKGVKTNPRPGQLEAARDWNMLADVGQRLIFPPEIATTNLRPDIVLWSGSARLVHLVELTVPWEDAVDEAYERKKLRYAQLATEAEQRGWRVRVLPSGSGLSRICGTLYNPVSQRRRIQWPRVASHSEELI

SEQ ID NO: 6934 - protein, 906 aa, Ladona fulva
MPPRRTGAARPLEMRQTMALPEAVLPKRTQAAPLTTEDPTDDQMVWLLQFGILETGHMSELEHILVEIIEKAASSTNAKPRSTAPKRRKAISALPASDLQRLYRMDKRRAFKSVTEAPSPDCPSPLCDLIAHFSCPAIAINPGPPPSTVPEMTLLRVPGEEEKLLRPVTPTEVTERLRRCSNTTPGQDGIPYRAWRKIDPGGKILSAIFNYCLQEEQIPANWKKSRTILLHKGGEEEDIGNWRPVALQPTIGKIFAGILADRLYEWAMRGRRLSFPLQKGFIPGTEGCFEHNFALNCALEDARRNSREIAIAWLDLADAFGSVPHEHIIRTLVEMAMPSTLVRLISEMYKGVSTRIEASSGTTPSIEITRGVRQGDPLSPLLFNLAIEPMLRAASVRKETAGYQLGLTKLCVLAYADDVVLIARSAGALDTLLHAVSTAATWSGLRFKPRKCATLHLRHTWNKRQVMPTIFRIQGGGMRPLAMGESYRHLGAPKGWRINETPTEVLRDLVKDLSAFNNTTLAPWQRLDAIRTFLLPRLDFHLRIADFPKSTLVETEKKLIEAARAGMFLPMRGSREVAFLPPHLGGAGFFPPTVLKDVVTVSHAYTMLTCRDPFIRDMAWYCLRDMVHRKVGRANPEPSNDTLTSFLTGSMENRLGADVGEAASLWSRARRATRSLKKYCGLSWEWNDTHHSLSLRLRHPTPASEVLVIPANQRHLVFHLIRSTIEEGWRRSLAAQPDQGKVHHAASRHPVSHHFLRDGRHTRFCDWRFIHRARLNLLPLNAARRGISRGDTRCRRCGMAAETLPHVLNHCTPHSAAWTERHNEIQRLLIESLPKDWSIRIDRRIPGDASLLRPDIVASEGPSGPFHIVDVTIPFDNQQDALDAARTLKREKSPSVSGCGTRWMSI

SEQ ID NO: 6935 - protein, 1057 aa, Ladona fulva
MLSRNRSTPRAAPTDTDPVSAEPEEQGPPQPTPRAEGIHNGVGAGEVVAPVIRENAPMAGTPSAQTRRGAERPRGDTLIAALPEVVLPRRQIQHPVGEQEPTDDQMIWAIRAGVLQEGDIAGLEALVQDITEAAATATNAKPRTTAPRRRKAITIRDAAEVQKLYRINKRRAFKSITEAPSPDCPIALPDLEAHFSCPPPRINTGPAPSSIPEISVVRIPGEEEKLLRPITPAEVLDRLKRASNSTPGPDGIQYRAWKRIDPNGRVLAAIYNFCLQEERIPEGWKGSRTILLHKSGDENTISNWRPIALQPTLYKVFAGILADRVYEWAMKGRRISFPFQKGFIPGTEGCFEHNFALNTALEDARRNGKEIAVAWLDLADAFGSVPHTQIQRTLAEMAMPSSLIRLIQEIYRGVTTRIEAGSGTSPPIDVLRGVRQGDPLSPLLFNLAIEPMLRAALAKRATAGYLVGQTRWCVLAYADDVVLIAHSAGALVALLHAVSTAASWSGLTFKPQKCASLHLDHTRGMRRVLPTSFSIQGGTIRTLGEGEPYLYLGAPKGWKIKETPTEVFAAFERDLAAVRTSNLAPWQRLDAIRTFLLPRLDYHLRVANFPKKALTSIDKRLVEAAREGLAIPIRSSREVAALPPQLGGAGLFPPTTRKDLLCVVQAFKMLTCRDPFIQDMAWHSLRDVVHRRTGRARAPPSNHMLMLFLTGSRQDRLDAETGEATSLWSRARMSTKALCKLCGIKWEWSDVHHNICIRLRHPTPTSDTIGIQASHRHLVGQLIRQSIEEGWRRNLVAKPDQGKVFHAATRHLASSHFLRDGRHSRFCDWRFIHRARLNLLPLNAARRGVARGDTRCRRCGTAEETLPHVLNHCATHSAAWTERHNTIQGLLLGSLAAEWTVRVDRRIPGEPSLLRPDIVAAEGPGGPFDIVDVTVPFENRYDALDAARAAKREKYQAVAERLRERQNTVVHLDALVVGALGSWDGANDALLRRLRIPARKMPTLQRKMVSAAIKWSRDIYVEHVTGVRQYCTTTARMGADGEPMDDPLERRPDDNND

SEQ ID NO: 6936 - protein, 1094 aa, Centruroides sculpturatus
MSPESTTRDPRPCPRVPTGPRKTRRKTYGVDEDYLASQDATTTTETGDPTSQSNTPDPAASPAAQPPTYASVAASTPPTRINNWTIGPSQPTTRDNNSPPPLIRRPRRPRRRQASSPPNTSCPAEPILTTSPTNSTSRSITPPPNQPPDHQPMDSPAHNDSAPQPSVQPTQPPPPDADDSAPPSWVIAWRDRFSCALDVDMLEVMVEVLINLAQHMAPRRQDRTSNRPRRQCPPTTQRNNRPPRYNAAEASRIQRLYRVNKRKAFDEITRGTGRFCQLGKTALTDHFSKIYSRCTNAESSEIVLPLSPEPTTDDPLSETFTPTEVANRLAKCQNMAPGPDGIRYYTWRCLDPQGHILAALFNAVLRIGVIPAAWKTSNTILIHKKGDPNDVSNWRPIALANTLGKLYSACIANRLLRWCEQYNIISTAQKGFMRFEGCSEHSFMLQSVIQDARRKNKQCHVAWLDLANAFGSVPHSAIINSLQWCGLATSAIQHIENLLSGCCTRIRTNSGFTNPIPISAGVKQGCPLSPILFNLVKEPALRMVSDLQVGYNISTLAYADDITVASPTPAGLQQQLDVLSSWARHNGLSFNPTKCATVSVSGKYQCSDRNTFKIQGADIPQLRKDDHYMHLGIPTGFTIGRSAAVVIEGILKDLKHVDNSCLAPWQKIDCINTFLTSRLTFHMTLGNVPKKALNNVDKAIKRHVKKWMNLPQRASPEVVHMTNNQGEANVTPCAIIANVAQVSHATNLFLSRDTNISSLASKTLSMVVEKRLKRTPSGADLCTYLAGSMENEFGSDPYDIPSLWTRLRMATRRLRTHIDLNWHPNDDGTLTPTIDGKLLNKSNTASIITNAVKSTFLTSLLRKPNQGKAYRLTAGNHNSNHFVRNGNFISFSDWRFVHRARLSVVPLRGLRRFGNASQNCRRCQRHRETLAHVINHCPPNFTLITKRHNAILNHLLNTFDCKHSKVYTNQRVLGYTGNCRPDIVIVNKTPKTATIIDVATPFENGEEAFRRVREEKTKKYEDLATYYRSRGYETFIDAFIVGALSGYDAAYESVIQRLGISRRYAKLMRYLMVCDCIKWSKDIYLQHVGSRNHH

SEQ ID NO: 6937 - protein, 1179 aa, Centruroides sculpturatus
MASTNNLAFVTLLVPLRPPYHCPACLPVYRDYVDHGGLSRHLRRVHGGRLSFECRICGTQSEKLKEIKLHQSKSDNCSAQLPTMSPSSARDPKERQKIPTASGRAKRRQKDYGLDEAYLASQNVSSQAPVNNCQHQPPVHNTREATTPANTTSYDSPTIGDTSIIPPNTQDEESSNTPPLVRRPRRRTRQRRRRTSSTDESTTPTQTNTPTAAASYAEVVRNSPPSANVPATTGNPTHLTAEVTPEAHPPASPTPPTISSTEPPSWVIAWCTRFNCAMDEDMLEIMVQDLVQLAQQLVPQQRQPNSHHQHRRRPPPTHRNRQRRYNPAAASRIQRLYRINKSKAFDEITRGTERFCEIGKNLLTNHFKDIYSHSTSTEPPSHLLPPPLTPTSDDPLCEAFTPTEVAYKLSRCHNTAPGPDGIRYYIWRRLDPQGHILAALFNAVQRIGTIPASWRTSTTILIHKKGDRSDVHNWRPIALANTLGKLYSACIANRLLRWCEQNNTISTAQKGFMRYEGCSEHTFVLQSVIQDARRRNKECHVAWLDLANAFGSVPHSTIIRCLKWCGLGAPSIQIIEDLLTGCHTRIRSSSGLTEPITISAGVKQGCPLSPILFNLVVEPALRLVTDLQVGYPIHDCNISALAYADDITITSSTAAGLQQQLDLLSSWAHHCGLTFNPSKCATLSIAGKYRCADNHTFKIGEANIPRLGKNDHYMHLGIPTGFTIGQSAATVIDGILKDLKSIDNSCLAPWQKIDSINTFLTTRLTFHLTLGNVPKKLLNNLDKSIKRCAKRWMNLPQRASPEIIHMTNSQGGANITSCGILADASQVSHAVNLFLSRDQNVTNLAVKTLKQVVEKRIKREPSGSDLCTYLAGSMENEFGCDPYDVPSLWTRLRMATRRLRTRIDICWHPNEDGTLVPSVNGKLLTKANAASTIATAVKTTFSTALLRKPDQGKAFRLTAQNPNSNHFLREGNFTKFADWRFIHRARLSVVPLRGLRRFGNVSQNCRRCQRHRETLAHVINHCPPNLAQITKRHNAILNRLINAFDHKNLQIFSNQQIPDFTSNCRPDLVIINNNPKTATIIDVATPFENGEDAFTQAREEKVRKYEALAAHYRNLGYETFIDAFVVGALGGYDAANESVIQRLGISRKYARMMRHLMVSDCISHSREIYMRHLGNRPHN

SEQ ID NO: 6938 - protein, 853 aa, Centruroides sculpturatus
MLEVMVDDLIGLAQHMAPQQRPQNPNRQQRRQPPPSWRNNNRRPRYSAAEASRIQRLYRLNKSKAFDEVTRGTERFCQIGKASLANHFTNIYSQPASTRPPSDQLPPPLSPSTDDPLSDPFTPTEVANKLARCHNTAPGPDGVRYHTWRRLDPQGHILAALFNAVQRIGVIPSSWRTSTTILIHKKGDRNDVNNWRPIALANTLGKLYSACIANRLLRWCEQNNTISTAQKGFMRFEGCSEHTFMLQSAIQDARRRNREIHVAWLDLANAFGSVPHSTIIDCLKWCGLGAPSIYIIKNLLTGCHTCIRSSTGLTDPISISAGVKQGCPLSPILFNIVVEPALRLVSDLQVGYNLHGQSISALAYADDITIASSSADGLQKQLDLLSTWARNNGLLFNPSKCATLSTAGKYRCANNTGFTIQEASIPQLRKEDHYMHLGIPTGFTVGRSAATVVEGILNDLKRIDASCLAPWQIIDSVNTFLTSRLTFHLALGSVSKKLLNNLDKNIKRFVKRWMNLPQRASPEIVHMTNSQGGANVTSCAILADAAQVSHAVNLFSSRDPAVSNLAIKTLEKVVEKRIRRTPTSTDLCTYLSGSMENEFGCDPYDIPSLWTRLRMATRRLRTRIDLSWNPNDDNTLTPSIDGKPLTKANAARVISDAVKSTFLTALLRKPDQGKAFRLTAGNTNSNHFLREGNFTTFADWRFIHRARLSVVPLRGLRRFGNASQNCRRCQRHRETLAHVINHCPPNLVHITKRHNAVLNRLLNAFNHKNLTIYCNQQIPDFASNCRPDLVVLNSNPKTATIIDVATPFENGEDAFSRAREEKIQKYNNLANHYRNLGYDTFIDAFIVGGPWRL

SEQ ID NO: 6939 - protein, 1099 aa, Mnemiopsis leidyi
MSNTSHSKLNLKMDNKLKTSLETPSGVRADSIITRVRTSSNRGEHSNGVTYPRCEQGVAPLDTHGGICDAPPQVTVPATETDKQKKCEYCEFTYLKPRQIGTHMRKRHPQEWNDIKRTKFLSEKRQKRWLDEDFELLCIGQEEYLVLSSIGKQGKGINQYIQTKYFPTLSTDAIKSQRKSRRFSEYSEKRSRELQPCNTSSDPEELPNEAVTENSPLSFDPLDRDVVKKISSKDHGDQILLVQEHLINGRYQEANTLAKAIFEKLSGKFPNLKTGDHRPGKQQTARKVGKKRVRGSGKKLSPSKQNRRELYAIVQKQWRTKKRSKVINQILTGNLNKEQSYTHTPDQLAQFWSTLFGRVSPRDDRPINHRRSVIPELDKPLSVEEVEAALKGAKDAATGIDGVPISHLKHLGSAALTILYNGLYVTGSIPDPWKRARTILIPKSNPPASPGDYRPISISSYFYRIYTSAISKRLASAVSLDDRQKGFIKEDGIRDNLSLIDTLINETKAGSKSLFMTFMDVKKAFDSVSHYAIARSLEWAGVPDGMRSVIADLYQDCTTDICGRSVKVTRGVKQGDPLSSTLFNLVIEMVMSNVPERLGIQFQGHRLFYLAFADDLVLLTRGPTANQKLVSLVHEQLARVGLELHPGKCKSIAIMADPKRKTTFVDQGSSVLIGGEPVSSLGPQEWYKYLGIKLGSGGMPQGIYRDQLADLLAKTDSAPLKPQQRLYILRSHILPKFNHRLMFERVTCQTLEGLDKLIRTHVRKWLKLPKDTPGPAFYADKGSGGLGLITLRYRVPLLKLRRHKKMADSPDPVIRLIPNAEPTISLLARWTKMCSLYGKQYQHKSELSKIIRDKYWTMCDGKGLRTEVPPDTAKKTLSLLFEDRTPLKPGQLIGAIGVRLNTLGTPARNNRAKGYSPEANICDKCPGNRQATLGHISQTCPATHGRRVKRHDKIVNRIAKALKERGSVKNILTEPHLRHDKLPLRKPDLIVHTEKSVEIIDVQVVADQGISRHEDEDQQKKIVKYDVDGYKRAAYKMLGIDYGSIPCNVSAFTITWRGNLAPHSLKLASRLQFSPVLKYIVADSLVDTWGAFLIWGKTS

SEQ ID NO: 6940 - protein, 833 aa, Periplaneta americana
MIIDKSLIRNTEAVRLDQVRQEIQLFSKKFEALLEKDPCPGEFNTIYNDFVEALTEMNHKLPGPKHPSVRFYEMRKQNKKIFTTNDRRYHDSSNPQKQSKRDRKKRNEKYKYELLQYQYFNERKRCVRSILNNNNTNNNERCQIPIQDLKNAMENKWGIPNNCTLDNYVTFHSSLPNDELQQEFKISIEVIQKCLNKMRTDSAPGPDKVLIRTLKLTECSPIISLILDIMLKWKIVPDKMREAKTILIYKGKGKKNDSNNWRPISICSVIRRLIERVLDSTLRQFVNLNENQRGFVSQPGTFINTSLVNGCLKKAKKEKKDVSMVMLDVRQAFDSIGFEHVTNCLKSLPIPVSLRELVQALVVGNFTRIHSSNQISDPIVLQKGVFQGSPLSPLIFNMSIDFILKELTEKQVSDKFGFEVSENLDNLTMAAFADDLVVIGKDMSAAQDLVLMVKELLEGIGLHINPNKSTSINIVKGKLREEDLILYEDCSIRGIKQDETIRYLGVSFNEEITFDREAFMLSLKNDLENLVSTSMLRPDQKLNIVNQYIWPKLIYPLQMAPIHQLPGTFLEDIDKLIRSSVKQMLMLPSDTPTSMLYASKNYRGLGLVRASWEAFLQHCNICITLILNENPYVNSMRPLMSELNSSCQHLSLPCPVELRKSVTRKLREELRNAEFESWKIMPGRGRGVELYSQVPKANAWIFNKSGLSTSEWVTCLKMNANLAAVRGVPGRSLDGSRCRHGCPETETLAHVQGQCNRGLLLRNSRHHHVRSLFATVLRKKSWIVEEEVFCLAANGSSRRIDIIAYSQTTKKGYIIDPTIRIGTGSSQPEDVNK

SEQ ID NO: 6941 - protein, 920 aa, Periplaneta americana
MIIDKSLIRNTEAVRLDQVRQEIQLFSKKFEALLEKDPCPGEFNTIYNDFVEALTEMNHKLPGPKHPSVRFYEMRKQNKKIFTTNDRRYHDSSNPQKQSKRDRKKRNEKYKYELLQYQYFNERKRCVRSILNNNNTNNNERCQIPIQDLKNAMENKWGIPNNCTLDNYVTFHSSLPNDELQQEFKISIEVIQKCLNKMRTDSAPGPDKVLIRTLKLTECSPIISLILDIMLKWKIVPDKMREAKTILIYKGKGKKNDSNNWRPISICSVIRRLIERVLDSTLRQFVNLNENQRGFVSQPGTFINTSLVNGCLKKAKQEKKDVSIVMLDVRQAFDSIGLEHVTNCLKSLPIPVSLRELVQSLVVGNFTRIHSSNQISDPIVLQKGVFQGSPLSPLIFNMSIDFILKELTEKQVSDKFGFEVSENLDNLTMAAFADDLVVIGKDMSAAQDLVLMVKELLEGIGLHINPNKSTSINIVKGKLREEDLILYEDCSIRGIKQDETIRYLGVSFNEEITFDREAFMLSLKNDLENLVSTSMLRPDQKLNIVNQYIWPKLIYPLQMAPIHQLPGTFLEDIDKLIRSSVKQMLMLPSDTPTSMLYASKNYRGLGLVRASWEAFLQHCNICITLILNENPYVNSMRPLMSELNSSCQHLSLPCPVELRKSVTRKLREELRNAEFESWKVMPGRGRGVELYSQVPKANAWIFNKSGLSTSEWVTCLKMNANLAAVRGVPGRSLDGSRCRHGCPETETLAHVQGQCNRGLLLRNARHHHVRSLIATALRKKSWIVEEEVFCLATNGSSRRIDIIAYSQTTKKGYIIDPTIRIETGSSQPEDVNQEKINICLPTVDYFKAKYQLEDIEVIGLLIGARGVIPKFFELFRKTFELPQTLTADIITSVLKRSCQILSHHIHFNFFYSLSIHICLF

SEQ ID NO: 6942 - protein, 1699 aa, Trichinella murrelli
MCSTKTPALKSGRRRGNEVTDGGQTVRKERRRGSRDSTSATDLGTRMVTRGRKKLMEASVREAVHHEEASTSTVVVDVVKPTKKITGRTARRTRRAPSGDGERRESGPSGAICGQADSYSGNAVTDRAEAKSRRSPNVMNSGQHNVKASTSSPPTTIPTPSSSPRTPCLSKRGARSKIPSTPDTPSTSGGSGKQRVSVSPLLRTEKLPDLEVLQRTEEQVTVRATFPIAQAVICPLGCEKPYTAVRPDGQFAHQTLTRHFVRVHNCHSVQWHYRCRNCNTDFLPADHRYPLRVVNTHVRSCVSRWEITRKLGESEDLHGVRCDLCDYVGVSKRAVGMHRRRHANEYIMQNTGTAAQIEALSKQVGEIRVAGDYSQFKFGKRVRQYVAPTQRRDGLDDEEVREAEEEEVPAESRTILGEPSTATAIGAGEISATGPVRADTAAQQMICRIGQWCVWPQDYHSIPAPQCWTDTLMDLMIEQIVLQRYPDGAGVSVMSCSAVSAALHHEISAEFAAQVMPSHDASLFYIIPVNVCNHWQMIVLDVAERVVHYYCSLREHNTVVLSSLLSLVELSGKHTGCTSWKIETHDGAPVQTNAFDCGPFSCLFLKHLLHGIDMNFSDRESAALRTDLKFMIDAVTTPVVPATDKLKRTDGSPAQLTQFQQKFLSASDNWQSADVDLQAVYDEMVESIVSGHNEPSSRSTSRLQKKSPGKGGKGQVRLRSAVTRDPAWLKSASAVQKAFNSAPARTVNAILRRPNACPSFTATQVADHYFNLRPAVTSLAPEVIDILPPPATDHSMLVAELSESEVWEKMQKAPNSAPGADRITIRMVQVADPGALVLTRFYRVCLSRKWVPLQWKQSVCKLLYKDGDKERLANWRPIALEPVLQRVLSAVVASRVTNWARANGLISLEAQKGFQPADGTSEHNFVMEVAIQEARRTNAQLAISWLDISNAFGTVSHEVLFSLLEHYGLEPTFTTFIKNLYKDATIVVKGANGTHVTARWSVGVRQGDPCSGILFCLFVEPLLRSVLPVLPCEAETTAVNVFGQPITALAYADDIALFAPSIGVMQQQLCKIQGMASAMGFRFNPKKCASLYLNRAVVNAATFTISGEEIPALVHGDTFRYLGVAAGLGKPQTPFSLLRENLREAELIFRSKLAPWQKMDAYRSYVLPRLTFQLMIAKFNNIKQSAGQYDRAILRLVKRCFQLPVETSTDFIRAPRQCGGLGVPSLRELYATAKVSRALKMLWSPCRVVSSLAASQLQRVASAYFAKRLRDVEAADLSTFMNAARSTPLDRSGYPTCLWMDARKQMSYLTKVAGVDCYFLVGEAGTSFFIRNGLGQTVSVLSPLRKNKVMSVLGGAIQTRHLDAWLQCKRQGKTASCVVLDRSSSRFITTGRYTSFAAMRFALPARLDLLPCRARSSMRSYQNCRRCGYDRETLPHILQHCRQFSAPAYQARHDAVQGRLETVMRRRFPNLRVNRALPEIGSNKRPDLVVVDEEKRFVILLDVAIVFENTAAAFVDARTRKWAHYEKEILAYRLRGYSVTYDAIVVGALGTWDPKNDAILKRIGVVSQRYLRLMKVLVVSEMLEHSSRIYRRHLGLRDLLPDTGAKRRPVGTTETDPPGGDLRQKKRNSISARASGGKCLERRFTSPVGTPSQRGELQCQPCPGPRRPALAGTAPIPPRVQPRPPPRHHQKPAAKSKAP

SEQ ID NO: 6943 - protein, 1698 aa, Trichinella murrelli
MCSTKTPALKSGRRRGNEVTDGGQTVRKERRRGSRDSTSATDLGTRMVTRGRKKLMEASVREAVHHEEASTSTVVVDVVKPTKKITGRTARRTRRAPSGDGERRESGPSGAICGQADSYSGNAVTDRAEAKSRRSPNVMNSGQHNVKASTSSPPTTIPTPSSSPRTPCLSKRGARSKIPSTPDTPSTSGGSGKQRVSVSPLLRTEKLPDLEVLQRTEEQVTVRATFPIAQAVICPLGCEKPYTAVRPDGQFAHQTLTRHFVRVHNCHSVQWHYRCRNCNTDFLPADHRYPLRVVNTHVRSCVSRWEITRKLGESEDLHGVRCDLCDYVGVSKRAVGMHRRRHANEYIMQNTGTAAQIEALSKQVGEIRVAGDYSQFKFGKRVRQYVAPTQMRNGLDDEDVREAEEEEVPAESRTILGEPSTATAIGAGEISATGPVRADTAAQQMICRIGQWCVWPQDYHSIPAPQCWTDTLMDLMIEQIVLQRYPDGAGVSVMSCSAVSAALHHEISAEFAAQVMPSHDASLFYIIPVNVCNHWQMIVLDVAERVVHYYCSLREHNTVVLSSLLSLVELSGKHTGCTSWKIETHDGAPVQTNAFDCGPFSCLFLKHLLHGIDMNFSDRESAALRTDLKFMIDAVTTPVVPATDKLKRTDGSPAQLTQFQQKFLSASDNWQSADVDLQAVYDEMVESIVSGHNEPSSRSTSRLQKKSPGKGGKGQVRLRSAVTRDPAWLKSASAVQKAFNSAPARTVNAILRRPNACPSFTATQVADHYFNLRPAVTSLAPEVIDILPPPATDHSMLVAELSESEVWEKMQKAPNSAPGADRITIRMVRVADPGALVFTRFYRVCLSRKWVPLQWKQSVCKLLYKDGDKERLANWRPIALEPVLQRVLSAVVASRVTNWARANGLISLEAQKGFQPADGTSEHNFVMEVAIQEARRTNAQLAISWLDISNAFGTVSHEVLFSLLEHYGLEPTFTTFIKNLYKDATIVVKGANGTHVTARWSVGVRQGDPCSGILFCLFVEPLLRSVLPVLPCEAETTAVNVFGQPITALAYADDIALFAPSIGVMQQQLCKIQGMASAMGFRFNPKKCASLYLNRAVVNAATFTISGEEIPALVHGDTFRYLGVAAGLGKPQTPFSLLRENLREAELIFRSKLAPWQKMDAYRSYVLPRLTFQLMIAKFNNIKQSAGQYDRAILRLVKRCFQLPVETSTDFIRAPRQCGGLGVPSLRELYATAKVSRALKMLWSPCRVVSSLAASQLQRVASAYFAKRLRDVEAADLSTFMNAARSTPLDRSGYPTCLWMDARKQMSYLTKVAGVDCYFLVGEAGTSFFIRNGLGQTVSVLSPLRKNKVMSVLGGAIQTRHLDAWLQCKRQGKTASCVVLDRSSSRFITTGRYTSFAAMRFALPARLDLLPCRARSSMRSYQNCRRCGYDRETLPHILQHCRQFSAPAYQARHDAVQGRLETVMRRRFPNLRVNRALPEIGSNKRPDLVVVDEEKRFVILLDVAIVFENTAAAFVDARTRKWAHYEKEILAYRLRGYSVTYDAIVVGALGTWDPKNDAILKRIGVVSQRYLRLMKVLVVSEMLEHSSRIYRRHLGLRDLLPDTGAKRRPVGTTETDPPGGDFRQKKRNSISARASGGKCLERRFTSPVGTPSQRGELQCQPCPGPPDPAFAGKAPIPPKVQPKRPPRHHQKPAPKQKS

SEQ ID NO: 6944 - protein, 1699 aa, Trichinella murrelli
MCSTKTPALKSGRRRGNEVTDGGQTVRKERRRGSRDRTSATDLGTRMVTRGRKKLMEASVREAFHHEEPSTSTVDVDVVKPTKKITGKTARRTRRAPSGDGQRRESGPSGAACGQADSYSGNAVTDRAEAKSRRSPNVMNAGQPTAKASTTSPPTTIPTPSSSPRTPCLSKRGARSKIPSTPDTPSTSGGSGKQRVSVSPLLRTEKLPDLEVLQRTEEQVTVRATFPIAQAVICPLGCEKPYTAVRPDGQFAHQTLTRHFVRVHNCHSVQWHYRCRNCNTDFLPADHRYPLRVVNTHVRSCVSRWEITRKLGESEDLHGVRCDLCDYVGVSKRAVGMHRRRHANEYIMQNTGTAAQIEALSKQVGEIRVAGDYSQFKFGKRVRQYVAPTQRRNGLDEEDVREAEEEEVPAESRTILGEPSTATAIGAEEISATGPVRADTAAQQMICRIGQWCVWPQDYHSIPAPQCWTDTLMDLMIEQIVLQRYPDGAGVSVMSCSAVSAALHHEISAEFAAQVMPSHDASLFYIIPVNVCNHWQMIVLDVAERVVHYYCSLREHNTVVLSSLLSLVELSGKHTGCTSWKIETHDGAPVQTNAFDCGPFSCLFLKHLLHGIDMNFSDRESAALRTDLKFMIDAVTTPVVPATDKLKRTDGSPAQLTQFQQKFLSASDNWQSADVDLQAVYDEMVESIVSGHNEPSSRCASRLQKKSPGKGGKGQVRLRSALTRDPAWLKSASAVQKAFNSAPARIVNAILRRPNACPSFTATQVADHYFNLRPAVTSLAPEVIDILPPPATDHSMLVAELSESEVWEKMQKAPNSAPGADRITIRMVRVADPGALVFTRFYRVCLSRKWVPLQWKQSVCKLLYKDGDKERLANWRPIALEPVLQRVLSAVVASRVTNWARANGLISLEAQKGFQPADGTSEHNFVMEVAIQEARRTNAQLAISWLDISNAFGTVSHEVLFSLLEHYGLEPTFTTFIKNLYKDATIVVKGANGTHVTARWSVGVRQGDPCSGILFCLFVEPLLRSVLPVLPCEAETTAVNVFGQPITALAYADDIALFAPSIGVMQQQLCKIQGMASAMGFRFNPKKCASLYLNRAVVNAATFTISGEEIPALVHGDTFRYLGVAAGLGKPQTPFSLLRENLREAELIFRSKLAPWQKMDAYRSYVLPRLTFQLMIAKFNNIKQSAGQYDRAILRLVKRCFQLPVETSTDFIRAPRQCGGLGVPSLRELYATAKVSRALKMLWSPCRVVSSLAASQLQRVASAYFAKRLRDVEAADLSTFMNAARSTPLDRSGYPTCLWMDARKQMSYLTKVAGVDCYFLVGEAGTSFFIRNGLGQTVSVLSPLRKNKVMSVLGGAIQTRHLDAWLQCKRQGKTASCVVLDRSSSRFITTGRYTSFAAMRFALPARLDLLPCRARSSMRSYQNCRLCGYDRETLPHILQHCRQFSAPAYQARHDAVQGRLETVMRRRFPNLRVNRALPEIGSNKRPDLVVVDEEKRFVILLDVAIVFEHTAAAFVDARTRKWAHYEKEILAYRLRGYSVTYDAIVVGALGTWDPKNDAILKRIGVVSQRYLRLMKVLVVSEMLEHSSRIYRRHLGLRDLLPDTGAKRRPVGTTETDPPGGDLRQKKRNSISTRASGGKGLERRFTSPVGTPSQRGELQCQPCPGPPDPAFAGKAPIPPKVQPKRPPRHHQKPAAKSKAP

SEQ ID NO: 6945 - protein, 1697 aa, Trichinella nativa
MPSGKTPALKSGRRRGNEVINEGQTERMERRRGSRDSASATDLGMRMVTRGRKKLMEALVSEAVHHEEPSTSTVVVDVVKPTKKTTGRTARRTRRAPSGDEERHESGQSGATCGQADSYSGNAVTDRAEAKSRRSPNIAGQPNVKASTPSPRTRKPTTSSSPRTPKLSKRGARSKIPSTPDTPSTSGGSGKQRVLVSPLLRTEKLPDLEVLQRTEEQVTVRATFPIAQAVICPLGCEKPYTAVRPDGQFAHQTLTRHFMRVHNCHSVQWHYRCRNCNTDFLPADHRYPLRVVNTHVRSCVSRWEITRKLGESEDLHGVRCDLCDYVGVSKRAVGMHRRRHANENIMQNTGTAAQIEALSKQVGEIRVAGDYSQFKFGKRVRQYVAPTQRRDGLDDEDVREAEEEEVPAEPRTILGEPSTATAIGAEEISATGPVRADTAAQQMICRIGQWCVWPQDYHSIPAPQCWTDTLMDLMIEQIVLQRYPDGAGVSVMSCSAVSAALHHEISAEFAAQVMSSHDASLYHIIPVNVCNHWQMIVLDVAERVVHYYCSLREHNTVVLSSLLSLVELSGKHTGCTSWKIETHDGAPVQTNAFDCGPFSCLFLKHLLHGIDMNFSDRESAALRTDLKFMIDAVTTPVVPATDKRKQSDGSPAQLTQFQQKFLSASDNWQSADVDLQAVYDEMVESIVSGHNEPSSRNASRLQKKSPGKGGKGQVRRRSAVTRDPAWLKSASAVQKAFNSAPARTVNAILRRPNACPSFTATQVADHYFNLRPAVTSLAPEVIDILPPPATDHSMLVAELSESEVWEKMQKAPNSAPGADRITIRMVRVADPGALVLTRFYRVCLARKWVPLQWKQSVCKLLYKDGDKERLANWRPIALEPVLQRVLSAVVASRVTNWARANGLISLEAQKGFQPADGTSEHNFVMEVAIQEARRTNAQLAISWLDISNAFGTVSHEVLFSLLDRYGLDPVFTAFIKNLYKDATIVVKGANGTHVTARWSVGVRQGDPCSGILFCLFVEPLLRSVLPVLPCEAETTAVNVFGQPITALAYADDIALFAPSIGVMQQQLCKIQGMASAMGFRFNPKKCASLYLNRAVVNAATFTISGEEIPALVHGDTFRYLGVAAGLGKPQTPFSLLRENLREAELIFRSKLAPWQKMDAYRTYVLPRLTFQLMIAKFNNIKQSAGQYDRAILRLVKRCFQLPVETSTDFIRAPRQCGGLGVPSLRELYATAKVSRALKMLWSPCRVVSSLAASQLQRVASAYFAKRLSDVEAADLSTFMNAARSTPLDRSGYPTCLWMDARKQMSYLTKVAGVDCYFLVGEAGTSFFIRNGLGQTVSVLSPLRKNKVMSVLGGAIQTRHLDAWLQCKRQGKTASCVVLDRSSSRFITTGRYTSFAAMRFALPARLDLLPCRARSSMRSYQNCRRCGYDRETLPHILQHCRQFSAPAYQARHDAVQGRLETVMRRRFPSLRVNRALPEIGSSKRPDLVVVDEEKRFVILLDVAIVFENTAAAFVDARTRKWAHYEKEILAYRLRGYSVTYDAIVVGALGTWDPKNDAILKRIGVVSQRYLRLMKVLVVSEMLEHSSRIYRRHLGLRDLLPDTGAKRRPVGTTETDPPGGDLRQKKRNSISARASGGKCLERRFTSPVGTPSQRGELQCQPCPGPRRPALAGTAPIPPRVQPRPPPRQHQKPDVKSKAP

SEQ ID NO: 6946 - protein, 1697 aa, Trichinella nativa
MPSGKTPALKSGRRRGNEVINEGQTERMERRRGSRDSASATDLGMRMVTRGRKKLMEALVREAVHHEEPSTSTVVVDVVKPTKKTTGRTARRTRRAPSGDEERHESGQSGATCGQADSYSGNAVTDRAEAKSRRSPNIAGQPNVKASTPSPRTRKPTTSSSPRTPKLSKRGARSKIPSTPDTPSTSGGSGKQRVLVSPLLRTEKLPDLEVLQRTEEQVTVRATFPIAQAVICPLGCEKPYTAVRPDGQFAHQTLTRHFMRVHNCHSVQWHYRCRNCNTDFLPADHRYPLRVVNTHVRSCVSRWEITRKLGESEDLHGVRCDLCDYVGVSKRAVGMHRRRHANENIMQNTGTAAQIEALSKQVGEIRVAGDYSQFKFGKRVRQYVAPTQRRDGLDDEDVREAEEEEVPAEPRTILGEPSTATAIGAEEISATGPVRADTAAQQMICRIGQWCVWPQDYHSIPAPQCWTDTLMDLMIEQIVLQRYPDGAGVSVMSCSAVSAALHHEISAEFAAQVMSSHDASLYHIIPVNVCNHWQMIVLDVAERVVHYYCSLREHNTVVLSSLLSLVELSGKHTGCTSWKIETHDGAPVQTNAFDCGPFSCLFLKHLLHGIDMNFSDRESAALRTDLKFMIDAVTTPVVPATDKRKQSDGSPAQLTQFQQKFLSASDNWQSADVDLQAVYDEMVESIVSGHNEPSSRNASRLQKKSPGKGGKGQVRRRSAVTRDPAWLKSASAVQKAFNSAPARTVNAILRRPNACPSFTATQVADHYFNLRPAVTSLAPEVIDILPPPATDHSMLVAELSESEVWEKMQKAPNSAPGADRITIRMVRVADPGALVLTRFYRVCLARKWVPLQWKQSVCKLLYKDGDKERLANWRPIALEPVLQRVLSAVVASRVTNWARANGLISLEAQKGFQPADGTSEHNFVMEVAIQEARRTNAQLAISWLDISNAFGTVSHEVLFSLLDRYGLDPVFTAFIKNLYKDATIVVKGANGTHVTARWSVGVRQGDPCSGILFCLFVEPLLRSVLPVLPCEAETTAVNVFGQPITALAYADDIALFAPSIGVMQQQLCKIQGMASAMGFRFNPKKCASLYLNRAVVNAATFTISGEEIPALVHGDTFRYLGVAAGLGKPQTPFSLLRENLREAELIFRSKLAPWQKMDAYRTYVLPRLTFQLMIAKFNNIKQSAGQYDRAILRLVKRCFQLPVETSTDFIRAPRQCGGLGVPSLRELYATAKVSRALKMLWSPCRVVSSLAASQLQRVASAYFAKRLSDVEAADLSTFMNAARSTPLDRSGYPTCLWMDARKQMSYLTKVAGVDCYFLVGEAGTSFFIRNGLGQTVSVLSPLRKNKVMSVLGGAIQTRHLDAWLQCKRQGKTASCVVLDRSSSRFITTGRYTSFAAMRFALPARLDLLPCRARSSMRSYQNCRRCGYDRETLPHILQHCRQFSAPAYQARHDAVQGRLETVMRRRFPSLRVNRALPEIGSSKRPDLVVVDEEKRFVILLDVAIVFENTAAAFVDARTRKWAHYEKEILAYRLRGYSVTYDAIVVGALGTWDPKNDAILKRIGVVSQRYLRLMKVLVVSEMLEHSSRIYRRHLGLRDLLPDTGAKRRPVGTTETDPPGGDLRQKKRNSISARASGGKCLERRFTSPVGTPSQRGELQCQPCPGPRRPALAGTAPIPPRVQPRPPPRQHQKPDVKSKAP

SEQ ID NO: 6947 - protein, 1671 aa, Trichinella papuae
MCKKTTPALKQRRRPVNEVTLAAPVTPSTSKLLEKSGRRGSRSPNGSTGTSATNMETRMVTRGQKKKSSVPVEDGRHGKHGATTSENLVGMATRTRRRMAPKNTGTEDCAQDKRRAHCGGRSSGHQTPIRPPHTNTPATQTPQTSPRTPPLSKRGARTKLPSTPDEVTPSSSGGSGQQRLLVSPLLRTEELPDLEVLHRTEEQVTVRATFPIAQAVVCPLGCEKPYTAVRPDGQFAHQTLTRHFVRVHGCHSVQWQYRCRKCNTEFLPADHRYPLRVVNTHVRNCVSRREITRKLGEREDLHGVRCDLCDYVGVSKRAVGMHRRRHANENIMQITGTAAQIEALSKQVGDIRVAGDYSQFKFGKRVRQYVAPTQRQRMEEDLPEEEEVPAEPRTILGEPSTATTIVDEEISAKIPSRADPTAPQMICRIGQWCVWPQDYHSIPAPQCWTDTLMDLMIEQIVLQQYPEHGAVGVMSCAAVSAALHHEITAEFATQVMSPHDASMFLVIPVNLRNHWQMIVLDVKEQIVHYYCSLHQHEFVVLSSLLSLVELSGKHIGCTSWRVETHDGAPMQTNAFDCGPFACLFLKHLLHAIDMNFSDRESAALRTDLKFMIDAVASPVVPATGNLKSVKPDGSTTQLTQFQQKFLDASVAWQSTDVDLQAVYNEMVESIVSGHNEPSSPKASRLQRKSPGKGGKGQVRQRSAVTNIPAWLNSASAVQKAFNSAPARTVNAILRRPNACPSFTATQVADHYFNLRPAVTSLAPEVVDILPPPATDHSMLVAELSESEVWEKMQKAPNSAPGADRINIRMLRAADPGALILTRFYRCCLLKNWVPLQWKQSVCKLLYKDGDKERLANWRPIALEPVLQRVLSAVVASRVTNWARANGLISLEAQKGFQPADGTSEHNFVMEVAIQEARRTNAQLAISWLDISNAFGTVSHQVLFSLLERYGLDPLHLGFIKNLYTDATIAVKGANGTHVTARWSVGVRQGDPCSGILFCLFVEPLLRSVLPTLPRDAEKTAVNVLGQHITALAYADDIALFAPSIGVMQQQLCKIQGMASAMGFRFNPKKCASLYLKRAVVNAATFTISGEQIPALVHGDSYRYLGVAAGLGKPQTPFSLLRENLREAELIFRSKLAPWQKMDAYRTYVLPRLTFQLTIAKFHNIKQSAGEYDRAILRLVKRCFQLPVETSTDFVRAPRSCGGLGVPSLRELYATAKVTRALKMLWSPCQVVSTLATRQLRTVASAYFAKRSKEVEAADLSTFMNAARSTPLDRSGYPTCLWMDARKQMAYLTKVAGVDSYFLVGETGTSFIIRNGLGQTVSVLSPMRKNKVMSVLGGAIQTRHLDAWLQCKRQGKTASCVVLDRSSSRFITTGRYTSFAALRFALPARLDLLPCRARSSKRSYQNCRRCGYDRETLPHILQHCRQFSAPAYQARHDAVQGRLETVMRRRFPNLRVNRALPEIGSNKRPDLVVVDEDARSVILLDVAIVFENTAAAFVDARIRKWAHYEKEILAYRLQGYSVTYDAIVVGSLGTWDPKNDAILKRIGVVSERYLRLMKVLVVSEMLEHSSRIYRRHLGLRDLLPKTDTNRRPVGTTETDPPGGDLRQKKRNSICAKLSRVICLEGRNTSPVGMPLQRGELQCQPSIGPLRPALAGTVPVPPRVQPAPTRLNQ

SEQ ID NO: 6948 - protein, 1256 aa, Trichinella zimbabwensis
MICRIGQWCVWPQDYHSIPAPQCWTDTLMDLMIEQIVLQQYPEHGAVGVMSCAAVSAALHHEITAEFATQVMSPHDASMFLVIPVNLRNHWQMIVLDVKEQIVHYYCSLHQHEFVVLSSLLSLVELSGKHIGCTSWRVETHDGAPMQTNAFDCGPFACLFLKHLLHAIDMNFSDRESAALRTDLKFMIDAVASPVVPATGNLKSVKPDGSTTQLTQFQQKFLDVSAAWQSTDVDLQAVYNEMVESIVSGHNEPSSPKASRLQRKSPGKGGKGQVRQRSAVTNIPAWLNSASAVQKAFNSAPARTVNAILRRPNACPSFTATQVADHYFNLRPAVTSLAPEVVDILPPPATDHSMLVAELSESEVWEKMQKAPNSAPGADRINIRMLRAADPGALILTRFYRCCLLKNWVPLQWKQSVCKLLYKDGDKERLANWRPIALEPVLQRVLSAVVASRVTNWARANGLISSEAQKGFQPADGTSEHNFVMEVAIQEARRTNAQLAISWLDISNAFGTVSHQVLFSLLERYGLDPLHLGFIKNLYTDATIAVKGANGTHVTARWSVGVRQGDPCSGILFCLFVEPLLRSVLPSLPRDAEKTAVNVLGQHITALAYADDIALFAPSIGVMQQQLCKIQGMASAMGFRFNPKKCASLYLKRAVVNAATFTISGEQIPALVHGDSYRYLGVAAGLGKPQTPFSLLRENLREAELIFRSKLAPWQKMDAYRTYVLPRLTFQLTIAKFHNIKQSAGEYDRAILRLVKRCFQLPVETSTDFVRAPRSCGGLGVPSLRELYATAKITRALKMLWSPCQVVSTLATRQLRTVASAYFAKRSKEVEAADLSTFMNAARSTPLDRSGYPTCLWMDARKQMAYLTKVAGVDSYFLVGETGTSFIIRNGLGQTVSVLSPMRKNKVMSVLGGAIQTRHLDAWLQCKRQGKTASCVVLDRSSSRFITTGRYTSFAALRFALPARLDLLPCRARSSKRSYQNCRRCGYDRETLPHILQHCRQFSAPAYQARHDAVQGRLETVMRRRFPNLRVNRALPEIGSNKRPDLVVVDEDARSVILLDVAIVFENTAAAFVDARIRKWAHYEKEILAYRLQGYSVTYDAIVVGSLGTWDPKNDAILKRIGVVSERYLRLMKVLVVSEMLEHSSRIYRRHLGLRDLLPKTDTNRRPVGTTETDPPGGDLRQKKRNSISAKASGGKCLERRNTSPVGMPLQRGELQCQPSNGPRRPALAGTAPVPPRVQPAPTRQNQKPEPTPEES

SEQ ID NO: 6949 - protein, 1509 aa, Trichinella zimbabwensis
MCKKTTPALKQRRRPVNAVTLAAPVTPSTSKLLEKSGRRGSRSPNGSTGTSATNMERRMVTRGQKKKLSVPVEDGRQEKNGATTSENLVGMATRTRRRMATKNTGIEDCAQDKRRAHCGGRSSGHQTPNRPPHTNTPATQTPSTSPRTPPLSKRGARTKLPSTPDEVTPSSSGGSGQKRLLVSPLLRTEELPDLEVLQRTEEQVTVRATFPIAQAVVCPLGCEKPYTAVRPDGQFAHQTLTRHFVRVHGCHSVQWQYRCRKCNTEFLPADHRYPLRVVNTHVRNCVSRREITRKLGEREDLHGVRCDLCDYVGVSKRAVGMHRRRHANENIMQITGTAAQIEALSKQVGDIRVAGDYSQFKFGKRVRQYVAPTQRQRVEEDLPEEEEVPAEPRTILGEPSTATTIVDEEISAKIPSRADTTAPQMICRIGQWCVWPQDYHSIPAPQCWTDTLMDLMIEQIVLQQYPEHGAVGVMSCAAVSAALHHEITAEFATQVMSPHDASMFLVIPVNLRNHWQMIVLDVKEQIVHYYCSLHQHEFVVLSSLLSLVELSGKHIGCTSWRVETHDGAPMQTNAFDCGPFACLFLKHLLHAIDMNFSDRESAALRTDLKFMIDAVASPVVPATGNLKSVKPDGSTTQLTQFQQKFLDVSAAWQSTDVDLQAVYNEMVESIVSGHNEPSSPKASRLQRKSPGKGGKGQVRQRSAVTNIPAWLNSASAVQKAFNSAPARTVNAILRRPNACPSFTATQVADHYFNLRPAVTSLAPEVVDILPPPATDHSMLVAELSESEVWEKMQKAPNSAPGADRINIRMLRAADPGALILTRFYRCCLLKNWVPLQWKQSVCKLLYKDGDKERLANWRPIALEPVLQRVLSAVVASRVTNWARANGLISSEAQKGFQPADGTSEHNFVMEVAIQEARRTNAQLAISWLDISNAFGTVSHQVLFSLLERYGLDPLHLGFIKNLYTDATIAVKGANGTHVTARWSVGVRQGDPCSGILFCLFVEPLLRSVLPSLPRDAEKTAVNVLGQHITALAYADDIALFAPSIGVMQQQLCKIQGMASAMGFRFNPKKCASLYLKRAVVNAATFTISGEQIPALVHGDSYRYLGVAAGLGKPQTPFSLLRENLREAELIFRSKLAPWQKMDAYRTYVLPRLTFQLTIAKFHNIKQSAGEYDRAILRLVKRCFQLPVETSTDFVRAPRSCGGLGVPSLRELYATAKITRALKMLWSPCQVVSTLATRQLRTVASAYFAKRSKEVEAADLSTFMNAARSTPLDRSGYPTCLWMDARKQMAYLTKVAGVDSYFLVGETGTSFIIRNGLGQTVSVLSPMRKNKVMSVLGGAIQTRHLDAWLQCKRQGKTASCVVLDRSSSRFITTGRYTSFAALRFALPARLDLLPCRARSSKRSYQNCRRCGYDRETLPHILQHCRQFSAPAYQARHDAVQGRLETVMRRRFPNLRVNRALPEIGSNKRPDLVVVDEDARSVILLDVAIVFENTAAAFVDVRIRKWAHYEK

SEQ ID NO: 6950 - protein, 1256 aa, Trichinella zimbabwensis
MICRIGQWCVWPQDYHSIPAPQCWTDTLMDLMIEQIVLQQYPEHGAVGAMSCAAVSAALHHEITAEFATQVMSPHDASMFLVIPVNLRNHWQMIVLDVKEQIVHYYCSLHQHEFVVLSSLLSLVELSGKHIGCTSWRVETHDGAPMQTNAFDCGPFACLFLKHLLHAIDMNFSDRESAALRTDLKFMIDAVASPVVPATGNLKSVKPDGSTTQLTQFQQKFLDVSAAWQSTDVDLQAVYNEMVESIVSGHNEPSSPKASRLQRKSPGKGGKGQVRQRSAVTNIPAWLNSASAVQKAFNSAPARTVNAILRRPNACPSFTATQVADHYFNLRPAVTSLAPEVVDILPPPATDHSMLVAELSESEVWEKMQKAPNSAPGADRINIRMLRAADPGALILTRFYRCCLLKNWVPLQWKQSVCKLLYKDGDKERLANWRPIALEPVLQRVLSAVVASRVTNWARANGLISSEAQKGFQPADGTSEHNFVMEVAIQEARRTNAQLAISWLDISNAFGTVSHQVLFSLLERYGLDPLHLGFIKNLYTDATIAVKGANGTHVTARWSVGVRQGDPCSGILFCLFVEPLLRSVLPSLPRDAEKTAVNVLGQHITALAYADDIALFAPSIGVMQQQLCKIQGMASAMGFRFNPKKCASLYLKRAVVNAATFTISGEQIPALVHGDSYRYLGVAAGLGKPQTPFSLLRENLREAELIFRSKLAPWQKMDAYRTYVLPRLTFQLTIAKFHNIKQSAGEYDRAILRLVKRCFQLPVETSTDFVRAPRSCGGLGVPSLRELYATAKITRALKMLWSPCQVVSTLATRQLRTVASAYFAKRSKEVEAADLSTFMNAARSTPLDRSGYPTCLWMDARKQMAYLTKVAGVDSYFLVGETGTSFIIRNGLGQTVSVLSPMRKNKVMSVLGGAIQTRHLDAWLQCKRQGKTASCVVLDRSSSRFITTGRYTSFAALRFALPARLDLLPCRARSSKRSYQNCRRCGYDRETLPHILQHCRQFSAPAYQARHDAVQGRLETVMRRRFPNLRVNRALPEIGSNKRPDLVVVDEDARSVILLDVAIVFENTAAAFVDARIRKWAHYEKEILAYRLQGYSVTYDAIVVGSLGTWDPKNDAILKRIGVVSERYLRLMKVLVVSEMLEHSSRIYRRHLGLRDLLPKTDTNRRPVGTTETDPPGGDLRQKKRNSISAKASGGKCLERRNTSPVGMPLQRGELQCQPSNGLRRPALAGTAPVPPRVQPAPTRQNQKPEPTPEES

SEQ ID NO: 6951 - protein, 1247 aa, Trichinella zimbabwensis
MICRIGQWCVWPQDYHSIPAPQCWTDTLMDLMIEQIVLQQYPEHGAVGAMSCAAVSAALHHEITAEFATQVMSPHDASMFLVIPVNLRNHWQMIVLDVKEQIVHYYCSLHQHEFVVLSSLLSLVELSGKHIGCTSWRVETHDGAPMQTNAFDCGPFACLFLKHLLHAIDMNFSDRESAALRTDLKFMIDAVASPVVPATGNLKSVKPDGSTTQLTQFQQKFLDASAAWQSTDVDLQAVYNEMVESIVSGHNEPSSPKASRLQRKSPGKGGKGQVRQRSAVTNIPAWLNSASAVQKAFNSAPARTVNAILRRPNACPSFTATQVADHYFNLRPAVTSLAPEVVDILPPPATDHSMLVAELNESEVWEKMQKAPNSAPGADRINIRMLRAADPGALILTRFYRCCLLKNWVPLQWKQSVCKLLYKDGDKERLANWRPIALEPVLQRVLSAVVASRVTNWARANGLISSEAQKGFQPADGTSEHNFVMEVAIQEARRTNAQLAISWLDISNAFGTVSHQVLFSLLERYGLDPLHLGFIKNLYTDATIAVKGANGTHVTARWSVGVRQGDPCSGILFCLFVEPLLRSVLPSLPRDAEKTAVNVLGQHITALAYADDIALFAPSIGVMQQQLCKIQGMASAMGFRFNPKKCASLYLKRAVVNAATFTISGEQIPALVHGDSYRYLGVAAGLGKPQTPFSLLRENLREAELIFRSKLAPWQKMDAYRTYVLPRLTFQLTIAKFHNIKQSAGEYDRAILRLVKRCFQLPVETSTDFVRAPRSCGGLGVPSLRELYATAKITRALKMLWSPCQVVSTLATRQLRTVASAYFAKRSKEVEAADLSTFMNAARSTPLDRSGYPTCLWMDARKQMAYLTKVAGVDSYFLVGETGTSFIIRNGLGQTVSVLSPMRKNKVMSVLGGAIQTRHLDAWLQCKRQGKTASCVVLDRSSSRFITTGRYTSFAALRFALPARLDLLPCRARSSKRSYQNCRRCGYDRETLPHILQHCRQFSAPAYQARHDAVQGRLETVMRRRFPNLRVNRALPEIGSNKRPDLVVVDEDARSVILLDVAIVFENTAAAFVDARIRKWAHYEKEILAYRLQGYSVTYDAIVVGSLGTWDPKNDAILKRIGVVSERYLRLMKVLVVSEMLEHSSRIYRRHLGLRDLLPKTGTNRRPVGTTETDPPGGDLRQKKRNSISAKASGGKCLERRNTSPVGMPLQRGELQCQPSNGPRRPALAGTAPVPPRVQPAPTRQNQ

SEQ ID NO: 6952 - protein, 1256 aa, Trichinella zimbabwensis
MICRIGQWCVWPQDYHSIPAPQCWTDTLMDLMIEQIVLQQYPEHGAVGAMSCAAVSAALHHEITAEFATQVMSPHDASMFLVIPVNLRNHWQMIVLDVKEQIVHYYCSLHQHEFVVLSSLLSLVELSGKHIGCTSWRVETHDGAPMQTNAFDCGPFACLFLKHLLHAIDMNFSDRESAALRTDLKFMIDAVASPVVPATGNLKSVKPDGSTTQLTQFQQKFLDVSAAWQSTDVDLQAVYNEMVESIVSGHNEPSSPKASRLQRKSPGKGGKGQVRQRSAVTNIPAWLNSASAVQKAFNSAPARTVNAILRRPNACPSFTATQVADHYFNLRPAVTSLAPEVVDILPPPATDHSMLVAELSESEVWEKMQKAPNSAPGADRINIRMLRAADPGALILTRFYRCCLLKNWVPLQWKQSVCKLLYKDGDKERLANWRPIALEPVLQRVLSAVVASRVTNWARANGLISSEAQKGFQPADGTSEHNFVMEVAIQEARRTNAQLAISWLDISNAFGTVSHQVLFSLLERYGLDPLHLGFIKNLYTDATIAVKGANGTHVTARWSVGVRQGDPCSGILFCLFVEPLLRSVLPSLPRDAEKTAVNVLGQHITALAYADDIALFAPSIGVMQQQLCKIQGMASAMGFRFNPKKCASLYLKRAVVNAATFTISGEQIPALVHGDSYRYLGVAAGLGKPQTPFSLLRENLREAELIFRSKLAPWQKMDAYRTYVLPRLTFQLTIAKFHNIKQSAGEYDRAILRLVKRCFQLPVETSTDFVRAPRSCGGLGVPSLRELYATAKITRALKMLWSPCQVVSTLATRQLRTVASAYFAKRSKEVEAADLSTFMNAARSTPLDRSGYPTCLWMDARKQMAYLTKVAGVDSYFLVGETGTSFIIRNGLGQTVSVLSPMRKNKVMSVLGGAIQTRHLDAWLQCKRQGKTASCVVLDRSSSRFITTGRYTSFAALRFALPARLDLLPCRARSSKRSYQNCRRCGYDRETLPHILQHCRQFSAPAYQARHDAVQGRLETVMRRRFPNLRVNRALPEIGSNKRPDLVVVDEDARSVILLDVAIVFENTAAAFVDARIRKWAHYEKEILAYRLQGYSVTYDAIVVGSLGTWDPKNDAILKRIGVVSERYLRLMKVLVVSEMLEHSSRIYRRHLGLRDLLPKTGTNRRPVGTTETDPPGGDLRQKKRNSISAKASGGKCLERRNTSPVGMPLQRGELQCQPSNGPRRPALAGTAPVPPRVQPAPTRQNQKPEPTPEES

SEQ ID NO: 6953 - protein, 954 aa, Sitophilus oryzae
MQANNAIKMLKGDQQLNLTDINNIMYAAASVIAGEIKERCEPKAKHKSKEPAWKMRIKKTIEELRQEISIIVEYKKGVTTAQVQKKVDTLIQKYRKDKCITEIEQTIKMKLQAKAQRLRRYTKRSNHYHHNKMFNEDTKKFYRQLNNENNVIKHPPTQQQIEEFWRGILENEVIHNENALWIRAEREKYQHIKSDSWQDFTTEEIATVIKKLNNWKAPGPDKLQNVWLKQFTSLHADLTNAINETIKNPNNAPQWLTTGNTFLLSKGKDTKDPKNYRPITCLPTIFKVLTAAITNRIYSHLIAHKILPDEQKGCRRASRGCKDQLLLSKMVVSTAKKRMRGLGLAWIDYKKAFDSVPHSWISTMMQLCGINPTISQFINKSMQTWKTEMLLFYEEGHIQTEPIKIKRGIFQGDSLSPLLFCMALIPLTNMLNSQNIGFKLDDSTEISHLFYMDDLKLFTKDESQLRLALSTVKEFSDDIRMAFGLDKCATAIYKGGKLIKIDNVKLDEKTSIRNLDIGESYKYLGVEEMDGIDNNKMKTKISKEYYRRVRKILGTELNATNKIKAINTLAVPLMTYSFGIVDWPRSELGKVDCKTRKLLTISGLHHPKADVHRLYIKRRNGGRGLIEIESAFNSAITSLSNYIALNRDKYCKAIATHDEKKAKYSIQKEAINILAKFSKQETTTQNIENLKHSIERNKIESLEQKRLHGQFYRNLHKPTVDREGSTAWLRSSGLKGETESLIIAAQDQALKTRYYQKNILKQSIDSKCRMCNRAEEHISHLVAGCSTLAPTEYTHRHNKVAAYIHWIICRELGVQVQDKYYEHVPEKVLNINDTVVLWDVPIITDRTILANRPDLVFHDKKNSICLLIDMSVPDDNNISAKEAEKISKYKDLEIEISRMWNTKSKVVPVVVGALGMLTKGHSNFIKLIPGHPSTNEVQKIALLGTAHILRKVLG

SEQ ID NO: 6954 - protein, 673 aa, Bembecia ichneumoniformis
MLSGKVHPEILPILHGANLISLTKKDGGVRPIAVGSTLRRLASKICSKHILEKLKSKFEPIQLGFGTKGGCEAATHALRTFIDNVECEVLLKVDLKNAFNSVNRDTLLKEVYTNTPEIYNYLAQSYGNPTKLMFREHEICSATGCQQGDPLGPAIFSLAINSIIHELNSKFNVWYLDDGTLGGKAESVLSDFSKLLSAFPTIGLELNLNKCELFVSEKLTSSTKIEIIEKFKVLAKDIKLIGKDSLSLLGSPIFEEAVIPILEEKITKFKTYSKRLVCINSHSALFILKFCLFVPKFTFLLRSSPVWKYQNLLNKIDDLVKQNLEIILNINLKEQSWTQASLPVRFGGIRIRKISNVALPAFLSSVHATRNLIGKILGPVLLNNEVAYQKESLTAWNMAFPSRNPPNSPERQRSWDELQCQTIYDNLLESFSGPDLARLREVKSRESGFWLHAVPSPNLGTFLDNNTLRLAIGLRLGTEVCIPHTCPCGRDVDRLGHHGLSCINSAGRISRHASINSIIHRSLATINIPSMLEPNGIMRDDGKRPDGMSLVPWRMGRPLVWDATCVDTLAPSHLHGTLTTAGAAAEAAEKLKIHKYRDIGTGYIFIPFGVESLGPWGPNALKFFNSLSKRLVDITGDYRAGHYLGQQISIAIQRGNAASMLGTLPRGPNLYNL

SEQ ID NO: 6955 - protein, 673 aa, Bembecia ichneumoniformis
MLSGKVHPEILPILHGANLISLTKKDGGVRPIAVGSTLRRLASKICSKHILEKLKSKFEPIQLGFGTKGGCEAATHALRTFIDNEECEVLLKVDLKNAFNSVNRDTLLKEVYTNTPEIYNYLAQSYGNPTKLMFREHEICSATGCQQGDPLGPAIFSLAINSIIHELNSKFNVWYLDDGTLGGKAESVLSDFSKLLSAFPTIGLELNLNKCELFVSEKLTSSTKIEIIEKFKVLAKDIKLIGKDSLSLLGSPIFEEAVIPILEEKITKFKTYSKRLVCINSHSALFILKFCLFVPKFTFLLRSSPVWKYQNLLNKIDDLVKQNLEIILNINLKEQSWTQASLPVRFGGIGIRKISNVALPAFLSSVHATRNLIGKILGPVLLNNEVAYQKESLTAWNMAFPSRNPPNSPERQRSWDELQCQTIYDNLLESFSGPDLARLRAVKSRESGFWLHAVPSPNLGTFLDNNTLRLAIGLRLGTEVCIPHTCPCGRDVDRLGHHGLSCINSAGRISRHASINSIIHRSLATINIPSMLEPNGIMRDDGKRPDGMSLVPWRMGRPLVWDATCVDTLAPSHLHGTLTTAGAAAEAAEKLKIHKYRDIGTGYIFIPFGVESLGPWGPNALKFFNSLSKRLVDITGDYRAGHYLGQQISIAIQRGNAASMLGTLPRGPKLYNL

SEQ ID NO: 6956 - protein, 673 aa, Bembecia ichneumoniformis
MLSGKVHPEILPILHGANLISLTKKDGGVRPIAVGSTLRRLASKICSKHILERLKSKFEPIQLGFGTKGGCEAATHALRTFIDNEECEVLLKVDLKNAFNSVNRDTLLKEVYTNTPEIYNYLAQSYGNPTKLMFREHEICSATGCQQGDPLGPAIFSLAINSIIHELNSKFNVWYLDDGTLGGKAESVLSDFSKLLSAFPTIGLELNLNKCELFVSEKLTSSTKIEIIEKFKVLAKDIKLIGKDSLSLLGSPIFEEAIIPILEEKITKFKTYSKRLACINSHSAIFILKFCLFIPKFTFLLRSSPVWKYQNLLNKIDDLVKQNLEIILNINLKEQSWTQASLPVRFGGIGIRKISNVALPAFLSSVHATRNLIGKILGPVLLNNEVAYQKESRTAWNMAFPSRNPPNSPERQRSWDDLQCQTIYDNLLESFSGPDLARLRAVKSRESGFWLHAVPSPNLGTFLDNNTLRLAIGLRLGTEVCIPHTCPCGRDVDRLGHHGLSCINSAGRISRHASINGIIHRSLATINIPSILEPNGIMRDDGKRPDGMSLVPWRMGRPLVWDATCVDTLAPSHLHGTLTTAGAAAEAAEKLKIHKYRDIGTGYIFIPFGVESLGPWGPNALKFFNNLSKRLVDITGDYRAGHYLGQQISIAIQRGNAASMLGTLPRGPKLYNL

SEQ ID NO: 6957 - protein, 1172 aa, Nysson spinosus
MLRITDTSEFDWELIETISYMLTMNINTHKEKASDTESPDPGGSVTDLSVRQGINNEDTAHPMINDLVLTITLPLQAGGIKCPVCEDEGRSMLFLQDKALGEHISSQHTEKTFVWKCGKCDKPWVKLHGWKCHYPKCKGPKIETITEFQCDTCGIYFKSAIGRSQHERSAHPQARNARRKEAAERPKSQPGRKTSVWTSEEIARLLELDIQYKDHSQRNKQIQKHVPNKTAKQISDKRLGLLRQAKTERPKNIEQHESSSSSSSDYEDALDEPCISTQPEHETTPQINWQETLTGHSLISEIPITKRDIYQKLYKISQASDESQIANEIDIYITDTLTPHLLQTNKPNKQKPNKHPTAQKPTKRNTRQNKAKSPNRDQRHRQKYARCQDLYNNCPKKLVDMILNGDTTHILVPPKTPKAGDIKALYEALWGVAGPPQVRSETNRTPNIENQHLFTPITHKEINDKIKQIVNKSAQGPDGIKKQHLTTEGTDKILALLYNTLLRVKHFPKPWLENRTTLIPKAGKNADEVKNWRPITISSMISRIYTALIDRRVRSVIKQIDSQKGFTEENGCQSNITLLKRSLAEMKENKGGVVTVVDVSKAFDTLPHSILERSLKRKGISNEMTTLVKKMYDGCHTTFKTEDKEVVTIQLKRGVKQGDPLSPLLFNLGIEPILEKIEETSDGICIEGGKMTILAFADDIVLIGKDRDEGQKQLATLHRELLKLGMELSIPKCSTFQIKPAHKSWYITDPKLEIDQNQIQFTEPDETFLYLGAKMGPWKGCYQGVVVQDVIKLIDRTQKLQLKPHQKVGIIQTYILPKFIHSLLTCPPSGSTLKLLDSEIRQKIKDILHLSSSTTSHFLYTPKKDGGLGFPRLEHIIKIASLKGGIKMQNSQDPKIAAIAKSSKYDKYLKETANSLRINWPATLSEIERAKSLIKGRASREWEALKSQGQGAKDFRNDPIGNSWLSRPSTLKASRYIDAIKLRTNTFGTRVALKRAKMIPDVICRRCKGQAESLGHVLGNCTFTKPMRIRRHDEIKEFLADKLSKKFEVTVEPSIQTSKGLRKPDLIIQNKERVAVVDVSVRYEDREYLQNAMDEKVEKYADLAESIKNSANKKEGTVIPIIVGCRGTIPYKTRKHLKDLGLNKQDAIVIALKALTSSIEIANAFIDYDKIA

SEQ ID NO: 6958 - protein, 1080 aa, Andrena haemorrhoa
MNDVPAARPPPPQRFCPYRRPSTVPPTPMSPPTISGTDPGPSGVRSPRLGLPCPYCDRSFPTAIGLGVHRRHAHPDQANAEVNVERAKKRWCAEELRLMAREEALAVVQNVQFINQHLMNALPMKRTLEAIKGARRKAEYKDLVVHALHDLQTSEGADDGQNNSDPSLRSATDELGDNPPRSDGASVLTPSTSPARPPSPRSTWGSDTRCNGFTLAMQELIPVARCIRGFGSLTLVRIADNFIRGSDVTTQLCAWVREVFPVPPPRRPRPLLDPHATIKVPKKRLRRREYARVQQLMKTHMSRAAKEILDGRPEARTPDVATMAAHWGPFVSQESFPVAEIRRTPPSPSLEYMWHPVTCDEVMEVTMAISSAPGIDGITTRQWKAVPASIKALFFNIVLASGGFPPEMLTSRTVFVPKRDGAGEPSDFRPISIASVTVRHLHKILAKRLREAGLVDVRQRCLDDGCAENISMMATLLEDARTHLKEIHVVSLDVAKAFDSVSHQAISAVLGRTGLPEEFSNYTARLYANSTTMFEVEGVRSEPFHVRRGVRQGDPLSSLLFCLVVDEVLRSVPRDVGYEIGGCRINAFAYADDIILISSTGLGMAAALREVETRAGEQGLSFNARKSVCLSIVPAGKQKKYKVLVDPQYRLADGEPVKQLSPSEQWRYLGVDFRPVGLKRAGSVLNTEMDRLTRAPLKPQQRLKILRSFLIPRYYHALVLSGTTLGKLRALDRQVRVAIRKWLRLPHDTAVGYFHTPCRMGGLGIPSFTTTIPGLMLTRLSNLATSSSPAVRVIAASGWVDRRLSWAKRALTLDGEYLPSKERRDEWWARRLYRTVDGYELRECGVSNLSNWWVDAGSYGVPGRDYVQYHHVRVNSLPTRIRTSRGIRRETRELRCRAGCRVTETAAHIIQACHRTHGGRIKRHDAVCKVLASGLRDAGWTVTVEPRFHTSAGLRKPDLVAKRGERISVIDAQVVSGARSLDDQHERKRSYYADNPDITRTLAEESRVSPRDISFSSCTLSWRGVWSSKSADYLQGLGLPKRLLCGITTRVLQGSHTNWVRWNRMVDMGTREGHPRVGVG

SEQ ID NO: 6959 - protein, 1080 aa, Andrena haemorrhoa
MNDVPAARPPPPQRFCPYRRPSTVPPTPMSPPTISGTDPGPSGVRSPRLGLPCPYCDRSFPTAIGLGVHRRHAHPDQANAEVNVERAKKRWCAEELRLMAREEALAVVQNVQFINQHLMNALPMKRTLEAIKGARRKAEYKDLVVHALHDLQTSEGADDGQNNSDPSLRSATDELGDNPPRSDGASVLTPSTSPARPPSPRSTWGSDTRCNGFTLAMQELIPVARCIRGFGSLTLVRIADNFIRGSDVTTQLCAWVREVFPVPPPRRPRPLLEPHATIKVPKRRLRRREYARVQQLMKTHMSRAAKEILDGRPEARTPDVATMAAHWGPFVSQESFPVAEIRRTPPSPSLEYMWHPVTCDEVMEVTMAISSAPGIDGITTRQWKAVPASIKALFFNIVLASGGFPPEMLTSRTVFVPKRDGAGEPSDFRPISIASVTVRHLHKILAKRLREAGLVDVRQRCLDDGCAENISMMATLLEDARTHLKEIHVVSLDVAKAFDSVSHQAISAVLGRTGLPEEFSNYTARLYANSTTMFEVEGVRSEPFHVRRGVRQGDPLSSLLFCLVVDEVLRSVPRDVGYEIGGCRINAFAYADDIILISSTGLGMAAALREVETRAGEQGLSFNARKSVCLSIVPAGKQKKYKVLVDPQYRLADGEPVKQLSPSEQWRYLGVDFRPVGLKRAGSVLNTEMDRLTRAPLKPQQRLKILRSFLIPRYYHALVLSGTTLGKLRALDRQVRVAIRKWLRLPHDTAVGYFHTPCRMGGLGIPSFTTTIPGLMLTRLSNLATSSSPAVRVIAASGWVDRRLSWAKRALTLDGEYLPSKERRDEWWARRLYRTVDGYELRECGVSNLSNWWVDAGSYGVPGRDYVQYHHVRVNSLPTRIRTSRGIRRETRELRCRAGCRVTETAAHIIQACHRTHGGRIKRHDAVCKVLASGLRDAGWTVTVEPRFHTSAGLRKPDLVAKRGERISVIDAQVVSGARSLDDQHERKRSYYADNPDITRTLAEESRVSPRDISFSSCTLSWRGVWSSKSADYLQGLGLPKRLLCGITTRVLQGSHTNWVRWNRMVDMGTREGHPRVGVG

SEQ ID NO: 6960 - protein, 977 aa, Ampulex compressa
MAKEEALAIARGGIRFMNQHLMAVLPNNRSLEAVKGARRAAAYKELVEAALRETRTASDSADSDSSFHSAHEEPLEDLPSRDITGSSPFLQPTRHLPSPAMQPPDIFCQDFRSAISDLLPIVECIQGFETLSLVGIARNYLQGFENAHELGGWLRAVFPPRPLILPRLPCRHNSIRLSRKRQRRLDYAHVQRLFKTNMSRAATEILDGPIEAHAPDVATMAAYWGPFVTTESGQVPKKKRKSPDASLGYVWHPVTEVEARKVAISISSAPGIDGVTARQWRAVPASVKTLFFNIILATGGFPPDMLVSRTVFVAKKPGATQPSDFRPISIASVVVRHLHKILALRLREGALVQTWQRCLEDGCAENISVVASLLDDSRRCLKELHILSLDVASAFDAVSHHAITNALIRTGLPEGFVRYVDRLYARSSTKFEVRGVHSESFKVCRGVRQGDPLSSLLFCLVVDEVLRAVPSDVGYEIGDGRVNTLAYADDILLIASTKNGLDVSLQAVEARAKEQGLLFNPRKCVCLSIVPSGKQKKYKVLAAPQCSLADGSQVHQLTPSEQWRYLGVDFRPVGPKRAGGTINTELDRLTKAPLKPQQRLKILRCFLIPRYYHTLVLAGTTLGKLKALDRQVRTAIRRWLRLPPDATNAYFHTPCRMGGLGIPSFSTTIPGLMLTRLKKLANSTSPAVRAAAQSAWVEMRLKWAERGLTKDGNVLSTPDARDRWWAQQLYRSVDGFELQESGKTGLSTRWIDAGSYGIPGRDYVQYHHIRINSLPTRIRTSRGIRRENRELRCRAGCHVTETAAHIIQACHRTHGGRIKRHNAICKVVAAGLRDAGWSVMVEPRIQTGEGLRKPDLVAHRDRQVEVIDAQIVSGATSLDDAHERKRRYYADNLDISRNVAQQADTIPSKVSFSTCTLSWRGVWSFRSAEDMIRLGLSSRLLSGITTRVLQGSHTNWMRWNKMTGLGAPEGRLRAGIG

SEQ ID NO: 6961 - protein, 1080 aa, Andrena haemorrhoa
MNDVPAARPPPPQRFCPYRRPSTVPPTPMSPPTISGTDPGPSGVRSPRLGLPCPYCDRSFPTAIGLGVHRRHAHPDQANAEVNVERAKKRWCAEELRLMAREEALAVVQNVQFINQHLMNALPMKRTLEAIKGARRKAEYKDLVVHALHDLQTSEGADDGQNNSDPSLRSATDELGDNPPRSDGASVLTPSTSPARPPSPRSTWGSDTRCNGFTLAMQELIPVARCIRGFGSLTLVRIADNFIRGSDVTTQLCAWVREVFPVPPPRRPRPLLEPHATIKVPKKRLRRREYARVQQLMKTHMSRAAKEILDGRPEARTPDVATMAAHWGPFVSQESFPVAEIRRTPPSPSLEYMWHPVTCDEVMEVTMAISSAPGIDGITTRQWKAVPASIKALFFNIVLASGGFPPEMLTSRTVFVPKRDGAGEPSDFRPISIASVTVRHLHKILAKRLREAGLVDVRQRCLDDGCAENISMMATLLEDARTHLKEIHVVSLDVAKAFDSVSHQAISAVLGRTGLPEEFSNYTARLYANSTTMFEVEGVRSEPFHVRRGVRQGDPLSSLLFCLVVDEVLRSVPRDVGYEIGGCRINAFAYADDIILISSTGLGMAAALREVETRAGEQGLSFNARKSVCLSIVPAGKQKKYKVLVDPQYRLADGEPVKQLSPSEQWRYLGVDFRPVGLKRAGSVLNTEMDRLTRAPLKPQQRLKILRSFLIPRYYHALVLSGTTLGKLRALDRQVRVAIRKWLRLPHDTAVGYFHTPCRMGGLGIPSFTTTIPGLMLTRLSNLATSSSPAVRVIAASGWVDRRLSWAKRALTLDGEYLPSKERRDEWWARRLYRTVDGYELRECGVSNLSNWWVDAGSYGVPGRDYVQYHHVRVNSLPTRIRTSRGIRRETRELRCRAGCRVTETAAHIIQACHRTHGGRIKRHDAVCKVLASGLRDAGWTVTVEPRFHTSAGLRKPDLVAKRGERISVIDAQVVSGARSLDDQHERKRSYYADNPDITRTLAEESRVSPRDISFSSCTLSWRGVWSSKSADYLQGLGLPKRLLCGITTRVLQGSHTNWVRWNRMVDMGTREGHPRVGVG

SEQ ID NO: 6962 - protein, 981 aa, Ampulex compressa
MMAREEAQALARGGVRFMNQHLFRVLQGGRTLEAIKGARRGAGYKEMVETALRDIASTVDDVDRGSDSSFHSASSEPSMDCRCETGRSSPITSRRATDTPLAPLTQPCNTLHLNFNSAIEDLIPIVEGMERFEAPFLAGIAHNYLRGEAISSDLCAWLRQVFPVPPLKHPRLPRSHEHVKVSSKRQRRLDYARIQRLFKTNMSRAAVTILNGSVEAQIPDVTNMGDYWGPFVSRESDPVPKSKRKPPAPSLDYVWHPVTYREIEKVAISNSSAPGIDGITARQWRAVPTSIKALFFNIVLATGGFPADMLVSRTVFVPKKPDAQQPSDFRPISIASVTIRHLHKILARRLSEASLVKVWQRCLDDGCAENVSVVASLLEDSRRRLKELHILSLDVTAAFDAVSHHAISDALARTGLPEGFTNYVAQLYANSSTMFEVKGARSGLYRVRRGVRQGDPLSSLLFCLVIDVVLGTVPDDVGYEINGSRINALAYADDILLIASTTNGLNASLQVVEARAREQGLSFNARKCVCLSIVPSGKQKKYKILAAPQCVLSDGSQVDQLTPSQQWRYLGVDFRPIGPKQAGGTVNIELDRLTKAPLKPQQRLKILRCFLIPRFYHALVLAGTTLGKLRALDRQVREAIRRWLRLPHDTANAYFHTPCRMGGLGIPPFATAIPGLMLTRLEHLANSSSPSVRAVAGSTWVLKRVNWARRALTKDGNVLSTADVRAQWWAQQLYKSVDGFELRECGRNNLSTWWIDGGSYGIPGRDYVQHHHVWVNSLPTRIRTSRGIRRQTYELQCRAGCRTTETAAHVIQACHRTHGGRIKRHDAICGTIASGLRDVGWTITREPQIQTVIGMRKPDLVAMKDERVVVVDAQVVSGATSLDEAHVRKRNYYADNIDIRRKLAQRMGVPQQSVSFSTCTISWRGVWSSKSADDLIELGLSRRLLSGITTRALQGSHTNWTRWNKMTGLGERGRHPRVGVG

SEQ ID NO: 6963 - protein, 1186 aa, Adalia bipunctata
MAKWKPTEIDVVISILREKSGPITIEDHKIIQVKLPHRSLPAIKKKCLELKHNPAPNPRSTKWTEDEVGRLVREYNNAEEQQIGTRIRSIKHLFPGRTEKAIATKLRENYPDVYYRRTIISDQPTTDQTENAGQQISVTTQEDSLPVAGQSQADLQRDRGANQIEVNFDVNNDEEVDVQLLAHYNRIYANVGEKRKKIRKFYLRTGNENIVKSIDKILERRIHQILHAVSNTTTKRKQCKRAIYCAGILLRDTLVGSKNDVPQFKKTEAKIKKLKEHNLKAQKILNWRGGKFGEDLKNEAKQMRRLGMRPRIYIKANQDRIKLLERQLQSQKKRHDIQNLRSKFRESPSIRTIQSKANISPRNIENVENFFTKLYKSEEEPESTPCLNELLKKYQRSTAGLQFDEQLEEGIIRNIVDENLKASSPWKAPGEDNIPNYIYKIFSSARTYLTSFVSDSILGRYRIEEKDCRAEVILVYKKGDENNPANYRPISLLNTDYKILTATITTILMKNLPEWAIPVEQLARKNVWGTIQGLLIDKSITQRARMSRKKHYSAWYDFHKAYDSISHQQLRRLIGVLPLNVKVRNLLRTLLTQWSIRVRVGKTRTNPIYIKRGMYQGDTISPLLFILLTASVLHHVKTNKRVIRDTCGKFDIIAFMDDLKFHTSSKKGLKTLTQELERSAVELGLRLNKEKCGIYSRVAEPDEEEETPFLPAIKNGYKYLGIEQLERDTNTNYETVREKTIRTTEEIFKSALTTPQKTQLFNTTVVPSIIYIMGNLYPEEKRATTLKKCRDIDKDIRKILVNENIKGKTTSNDHVYLPNTKGGIGLKSVEVEAEIHMVRKGIYIRSHPDMKMAQENFETLKKGGWRNPLSDYEFVIAKYKCPAITCTADNIRKNCSILKKYIEETFHKQLQESWTKNMHYGRVFKKEENNIEVPAYMSPLMDGWRFSLLHSAAEEQLHGLGCISGRNRTCRRGCNQTETAYHVSSACIQDAYTSRHDYVVHWLLRSLLSGLNAPESIQLQFGKASLSVDFTGARRVEIRAGGKILTEKRLHHNKPDIFVHLYDPEEIIVLEVSVAHLQNYRLQEKIKRTRYAINGSIHIDHRNVDEVDRDQHLVGELRSSYNCPVHLGIFVVGCFGEIVNTEEHKNFKKLLNNIGLSNLGIKILINKSSYSVAVSTSNIILKHLSS

SEQ ID NO: 6964 - protein, 1181 aa, Coccinella septempunctata
MATWNEDEIGVVRALLAEKRGPITIEDHKNIQGSLPGRSLAAIKKKCLELKNSSAPGRMSTKWTKDEVERLIREYNKTTEQQIGNRIKSIIHLFPGRTEKAIATKLRETYPQIYYRRVPIPEETPTESVSTETAENQNPAADLEEHTRQFQMTLNEDQGETNAEIPEEEEINSELLTIYEGILGKVGEDRRKIKKFYLRKGNKKIVSQVNKILEKRIHLILQGTSDENTKRKQCKKAIYCAGILLRNSLIKSEHEKPQFEKTEAKIKKLQNHNIKARKIQKWKGGKFGEELKNEARQMRKLGMRPKQYIKMNEDRIKVLERQLENQKKRHNLQNLRSRYKESPSIRIIQERENSGPKDLKKVEEFFSKLYKNEEEMETTPCLNKLLSRYRKTTAGKQYKEQLNEENIKIEVEENLKASSPWKAPGEDRIPNYIYKILDSAREYLKSFVTDTILGRYQLEEKDSRAEVILIHKKGDEENPASYRPIALLNTDYKMLTATITSILKKNLPEWAIPVEQLARKNVWGTTHGLLTDKAITQQARMSRKKHYSAWYDFQKAYDSISHRQLKRLIAVLPLNKNIKNILKTLLKQWSIRIRLGKKRTKPIYIKKGVYQGDTMSPLLFILLTASILLHVLSSGRVARDTSGKFHILAFMDDFKCHTNSKKGLKTLTQELERSAAELGLRLNKEKCGMYSRVTEPIEEEETPFLPEVRNGYKYLGIEQLERDTTANFETVSEKAIQTTEQIFKSPLTTPQKAHLFNSTVIPSIIYVMGNLYPDEKRATTLKKCRDLDKEVRKILIKENIKGKTTSNDHVYLPTNMGGVGLRSIEVDTEIQMVKKGIYLRSHPEMQATCKSYEALQRGGWRNPLTDHDFVISKYNCPDVEYTQQKITKNCKNLKQHIEKTFFEQVQQEWGKNMHYGKVITKELPNIEFPAYSSPLMDSWRFSLLHSAAEEQVHGLGAIPGRRRNCRKGCSQTETAYHVSAACIQDAYNTRHDFVVHWTLKALLKGLGAPEEIRLHFGKASLNVDFLGKRRTEIRAGGKILTEKRLHHNKPDILIHLYDPEEIIIFEVSVAHLQNYRTQEKIKKVRYSVNGSMHIDHRNVDEANRDLNLIGELRSLYHCPVRLGVFVVGCFGEIVNTEEHKNFKKILANIGLTNLNIRILINRSSYSAAVSTSNIILRHLSS

SEQ ID NO: 6965 - protein, 884 aa, Adalia bipunctata
MRKLGMKPKQYIKMNEDRIKLMEKQLENQKKRHKIQNLRLRYKESPSIRIVQEKENICPKEVREVEQFFSELYKKEEQVEPSPCLDELLKRYQSYTAGKQYKEQLDAENIRIKVEESLKTSPPWKTPGEDRIPNYLYKILGSAKEYLNSFVTDAIMGKYRLIEKDSRAEVILIHKKGDENNPANYRPIALLNTDYKILTATITSTLKEKLPEWAIPVEQLARKNIWGTTQGLLIDKAITQQARMTRKKHYSAWYDFQKAYDSISHRQLRRLIGVLPLNNNIRDVLKTLMKQWSIRIRVGKKKTKPIYVKRGVYQGDTISPLLFILLTASILLHVKSNRKVIKDTSGKFHILAFMDDFKCHTTSKKGLQTLTQELERGAAELGLKLNKEKCRMYSRVPEPIEEEEPPFLPTVRDGYRYLGIEQLERDTSTNYENVSDKTIKTTEQIFKSSLTTPQKSQLFNSTVVPSVIYVMGNLYPDEKRATTLKKCRDLDKEVRKVLVKENIKGKTTSNEHVYLPTSRGGIGLRSFEIETEIQMVRKGIYLRSHPEMQATCKNYEALQRGGWRNPLTDHDFVISKYNCPDVEYIHEKITKNCKTLKQHIENTFLEQLQEEWGKNMHYGRVLKKDVSNIELPAYLSPLMDSWRFSLLHSAAEEQVHGLGSIPDRTRNCRKGCNQQETAYHVSSACIQDAYNTRHDFVVHWVLRSLLSGLGAPDEIKLQFGKASLNVDFLGKRRTEIRAGGKILTEKRLHHNKPDILIHLYDPEEIVILEISVAHLQNYRTQEKIKKVRYSVNGSIHIDHRNVDEANRDLNLIGELRSLYNCPVRLGVFVVGCFGEIVGTEEHKNFKKIMANMGLSNLNIKILINRSSYSVAVSTSNIILKHLSS

SEQ ID NO: 6966 - protein, 879 aa, Harmonia axyridis
MKPKQYIKINEDRIKLLEKQLENQKKRHKVQNLRSKYKESPSIRTIQEKENTGPKDLVKVEKFFSKLYKKEEEMETTPCLNELLSRYRKTTAGKQYKEQLNEENIRIEVEESLKTSSPWKAPGEDRIPNYIYKILDTAKEYLKSFVTDTLLGRYQLEEKDSRAEVVLVHKKGDEDNPANYRPIALLNTDYKILTATVTSILKKNLPEWAIPVEQLARKNIWGTTQGLLMDKAITQQARMSRKIHYSAWYDFQKAYDSISHRQLKRLIEVLPLHKNIKNTLKILLKQWSIRIRVGKEKTKPIYIKKGVYQGDTISPLLFILLTASILLYVRSNRDVMRDTSGRFHILAFMDDFKCHTSSKKGLKTLTQELERSAAELGLKLNKEKCGMYSRVTEPIEEEETPFLPAVRNGYKYLGIEQVERDTTTNFERVSKKAIQTTEQIFKSSLTTPQKAHLFNSTVIPSIIYVMGNLYPDEKRATTLKKCRDLDKEVRKILIKENIKGKTTSNDHVYLLTNKGGIGLRSIEVETEIQMVKKGIYVRSHPEMQATCKSYEALKRGGWRNPLTDHDFVTSKYNCPDVEYTQEKITKNCKILKQHIENVFFKQIQEEWTKNMHYGKVLIKEQPNVEFPAYSSPLMDSWRFSLLHSAAEEQVHGLGAIPGRRRNCRKGCCQTETAYHVSAACIQDAYNTRHDFVVHWVLKALLNGLKAPEEIKLQFGKASLNVDFLGKRRTEIRAGSKILTEKRLHHNKPDILIHLYDPEEIIILEISVAHLQNYRTQEKIKKVRYSINGSMHIDHQNVEEANRDLNLIGELRSLYHCPVRLGVFVVGCYGEIVNTEEHKNFKKILANIGLTNLNIRILINRSSYSVAVSTSNIILKHLSS

SEQ ID NO: 6967 - protein, 1193 aa, Coccinella septempunctata
MATWKQTEIDVLLSILARKTGPITSEDHKSIQTQLPHRSLPAIKKKCLELKDNKVHTVRTTKWTPEEIERLKTEYANRGESLINKRIQSIKHLFPGRTEKAIATKLREAYPEVYYRRQHNAGGHPSNVENQQPPVCSGEVASEEPPEPVPEGPSSEIPSAVNDEEREQGDEEQPNMEENNPELSLMEVEYNRILEKVSEKKRHKIKRFYLRKGNHRTVSMINYILEKRIHQILQEAPNQTAQRNKCKKAIYCAGILLRNTLTGGKNNQPKYKSTESKIMKLKEHNRRATKILNWRGGKFGVSLINEARQIRKLGMRPKQYIRANEDRIKLLEKQLENQKRRHEVSELRSKFKETPSIQTIRQGEKPTCPLNIQDVGHFFEDLYARESQTAPTPCLDEMLKKYQRVTTGNTYSDQLNEAEIKKLVEESIKNSSPWKATGEDCIPNYIYKILDSARNYLTKFVTDTLQGRYQLQETDSRGEAILFYKKGDQKSPSNYRPIVLLNTDYKILTATITSILRSNLPDWAVPAEQLARKNIWGTVQGLLTDKSITQKARMNRARHYSAWYDFHKAFDSISHQQLKRLIGTLPLHRHIKDLLRTLMKQWSIRVRVGKQKAKPIYIKRGLYQGDSISPLLFIILTACIIMHLKTNKRVQRDTAGRFQVLAFMDDIKCHTSTKKGLQTITRELERSAKELGLQLNTGKCGMYSRTDEQDEEGTSFLPEVRNGYKYLGIEQLERDTDKNYETIKTKALETTKEICKSSLTTPQKSQLYNTAVIPSIIYIMGNLYPDEKRATTLKKCRDIDGEVRKVLVENNIKGKTTSNDHVYLPISRGGLGMKSVEVETEIHMVKKGIYIKSHPEMREVQESFSQLQRGGWRNPLTDHDFVASKYNCPNVEYTRAKITKNCKILKKHIEYIFYEQLQKEWAKNMHYGKIFIQEQPNVEVPAYTSPLMDSWRFSLLHSAAEEQVHGLGSIPGRRRNCRRGCDKCETAYHVSSACIQDAYNTRHDFVVHWVLKSLLSGLGAPEETRLQFGKACLCVDLLGRRRAEIRAGGKILTEKRIHHNKPDIFIHLHDPEEIIILEISVAHLQNYKLQEKIKKVRYSVNGCTHIDHRNVEEIGRDLNLVEALRSNYHCPVRLGIFVVGCFGEIVTTEEHKNFRKLLTSMGLSNLNIRILLNRSSYSVAVSTNNIILKHLGS

SEQ ID NO: 6968 - protein, 1196 aa, Coccinella septempunctata
MARWKQDEIDALLSILREKTGQITTKDHAIIQRKLPHRSLPAIKKKCLELKDNPTLTVKTTKWTSEEIGRLTTEYANRNENKIGERIQAIKHLFPERTEKAIATKLREAYPEIYYRRPYDNSDPPANTESTQVAPNEEISREPPQPVPGSPQTESPPEVNEEVQERRNQEQTIVDENDQELLALVAEYSKLLQTVSEKNRNKIKKFYVRKGNRKTVSLIDSILQKRIHQISQEVSHPVTRRSKCKKAIYCAGLLLRNTLNKSQKTQPKYKFTEDKITKLKEHNIRAMKILNWKGGKFGESLINEARQMRKLRMRTSQYIKANEDRIKILEKQLENQKKRHEIGKLRSKFSETPSIQTIRREEKPTSPLNIQDVENYFERLYSREDRIEPTPCFDEIIKKYQKATANKTYNDQLNEEDIQRIVNENLKSSSPWKAPGEDGITNYIYKIFESARRYLSSFVTDALLGRYQLEEKDSRAEAILIYKKGDEKVPSNYRPIAILNTDYKILTAAITTILRANLPDWAVPVEQLVRKNVWGTIQGLLIDKAITQRARLNRKKHYSAWFDFNKAFDSIGHQQLKRLIGTLPLHRQIKNLLKTLIKQWSIRIRVGRNKTKPIYIKKGLYQGDSLSPLLFILITASIIVHLKSSKKVCKDTAGRIQIQAFMDDIKCHTATKKGLQTITREIGRSARELGLRLNTAKCGMYSRSEEQDEEGSSFLPDVRNGYKYLGIEQLERHTSENYENIKTKVLDTTKQIFGSMLTTPQKAQLYNSTVIPNILYIMGNLYPDEKRATTLKNCREVDKEVRKVLIENNIQGKTTSNNHIYLPVSRGGIGMKSIEVEAEIHMVKKGIYIRSHPEMQEAHESYIQLQRSGWRNPLSDHDFVSTKYGCPDVEYTQTKITKNCKTMKKHIEKSFYEQLEKEWIMNMHYGRIFVKEQPNIEVPAYTSPLMDSWRFSLLHSAAEEQVHGLGAIPGRRKNCRRGCSQSETAYHVSSACIQDAYNTRHDYVVHWVLKSLLSGLNAPEDIQLQFGKATLSVDFVGKRRVEIRAGTKILTEKRIHHNKPDIYLHLYDPEEIIILEISVAHLQNYRLQEKIKKVRYSVNGSAHIDHTNVDEACRDLNLMGELRSTYRCPVHLGVFVVGCFGEIVTTEEHKNFRKILTKIGVSNLNMRILINRSSYSVAVSTSNIILKHLSTENLRC

SEQ ID NO: 6969 - protein, 1204 aa, Coccinella septempunctata
MATWKRDEIDALCRKLDEIRGPITTEDHRDIQQHLPHRSLAAIKKKCLEIRNNGVPTTQTTTKWTNDELERLVNAYSGREEGQIGSRIKAIKNLFPGRTEKAIATKLREKYPEIYYRQPQTVSEPPINIEPPTNIESCEPPTDTAPYEPPTNIESEPTVSIATEHPETIQEQSHELKNETNAYTTNEEENSSELNMLENQYQLIWEKVGEKQRKKIHKFYLRKGNEKSVQLVDQILERRIHQILDEFPNQNTSRSKCKKAIYCAAALLKKTLIKERNQQPKFKLTESKILKLKEHNNRAQKILNWKGGKFGASLIDEARQMRRLGMRPKQYIKANEDRIRLLEGQLEAQKKRHEIATLRSKFRESPSIRTIQAETRTCPTNVNDVEHYFQGLYGKVEKEAPTPCLDEMLKRYQKETAGKNYDEQLNEETVRKFFEQSLQNTSPWKAAGEDRIPNYIYKIFRSARKYLFRFVADTLEGRYQIEEKDSRAEVILIYKKGDKNEPSNYRPIALLNTDYKILTATITNILRSNLPDWAVPVEQLARKSVWGTIHGLMIDKSITQQARMNRKKHYSAWYDFNKAVDSISHKQLKRLIGALPLHPNIRKLLKTLMQQWSIRVRVGKEKTRPIYIKRGMYQGDSMSPLLFILLTACIIMYLKKNKKVIRDTSGKFQLLAFIDDIKCHTTTKKGLQTITRELQRSARELGLELNTGKCGMYGGAGEEEEDEASFLPEVRNGYKYLGIHQLERDTDANYEIVMVKAIQISEQIFESALTTPQKAQLYNSTVVPSIIYVMGNLYPDEKRASTLKKCRDIDKEIRKVLVRENIKGKTTSNDHVYLPTSKGGIGLKSIEVETEVQMMKRGIYIRSHAEMKEAEEKYLALQRAGWRNPLSDQEFVMDKYGCPQIIYQQQNIRKNCSLLKKHIETVFHDRLQDGWARNMNYGRIFTKEQDIKVPAFLSPLMDGWRFSLLHSAAEEQLHGLGSIPGRRRDCRKGCNKAETAYHVSSACITPAYTARHDYVVHWLLKTLLKSLGAPETIGTNLQFGKASLNVDFVGKRKVEIRAGTKILTEKRLHHNKPDVFIHLWEPEEIVILEVSVAHLQNYRLQEKIKRARYTINSCYHIDHQNVEEITRDLNLVSELQSLYNCPVHLGIFVIGCFGEIVATEEHENFKKLLAKIGATSLDMNILVNKCSYSVAVSTSNILLKHLSL

SEQ ID NO: 6970 - protein, 1236 aa, Propylea japonica
MASWKRDEIDVLCKKLEEIRGPITIEAHRDIQQQLPHRSLAAIKKKCLEIKNKGVPNTQTTTKWTNDELERLVNAYSSRDDKLIGKRIKAIISLFPGRTEKALATKLRETYPEVYYRQPQNISEPPTNTAPCEPPINAVPCANTENEQAAANVAHENEQLEPIQEEYQEPPTNAPPCESSANIGNEEQPTVSIAHEQPEPIQEEFHESNNETNANPINAEENNREFNMLETQYQLIWEKVGEKQRKKIHKFYLRKGNEKYVKMIDQILEKRIHQIFNEVPNQNANRSKCKKAIYCAGILLRKTLIKERNQQPKFKLTESKINKLKEHNNRAQKILNWRGGKFGASLIDEARQMKRLGMKPKQYIKSNEDRIRLLEKQLEAQKNRYEIANLRSKFKESPSMRTIQTETRTYPVDVRGVENYFQDLYGKVEKEAPTPCLNEMLKIYQRSTAGKNYDEQLNEENINKFIEESLKNVSPWKASGEDRIPNYIYKIFRSAKDYLFKFVTDTLTGKYQVEEKDSRAEVILIYKSGDENEPSSYRPIALLNTDYKILTATITNILKSNLPDWAVPVEQLARKGIWGTIQGLLIDKSITQQARMNRRKHYSAWFDFHKAFDSISHKQLKRLIGTLPVHHNIRKLIKTLMQQWSIRVQVGKKKTRPIYIKKGVYQGDSMSPLLFILLTACIIMHLKTNKKVIKDTSGRFQLLAFMDDFKCHTATKKGLQTVTRELERSARELGLKLNAGKCGMYGGADEDEEGEASFLPEVRNGYKYLGIQQLERDTDANYEIVKVKAIQTTEQIFKSVLTTPQKAQLYNSTVVPSVIYVMGNLYPEEKRASTLKKCRDIDKEVRKVLVKNNIKGKTTSNDHVYLPTNKGGIGLMSVELETEIQMVRKGIYIRSHPEMKETEERYLALQRGGWRNPLSDQQFVLDKYECPQITYQTQNIRKNCSLIKKHIETTFVCQLQEGWARNMSYGRIYIKEEDIEVPAALSPLMDGWRFSLLHSAAEEQIHGLGSIPGRRKNCRRGCNATETAYHVSSSCITPAFTTRHDYAVYWTLKALLKGLGAPEAIQTNLQFGKATLNVDFEGKRKVQIRAGMKFLTEKRLHHNKPDVFLHLWDPEEILILEVSVAHLQNYRLQEKIKKARYAINSCLHVDHRNVSEISRDLNLVGELQSLYNCPVHLGIFVIGCFGEIVATDEHKHFKELLSKVGVSNLDTKILLNKCSYSVAVSTSNIILKHLSS

SEQ ID NO: 6971 - protein, 676 aa, Clostera curtula
MLSGNVHPEITDVLYGANLIALRKKDGGIRPIAVGCTYRRMVSKVCCKHYFEPLSKLFQPLQLGFGSKGGCEAAIHALSTFLDSGKGEVILKIDLKNAFNSVNRDDLLTQVKKETPEIFSYLWQCYRYPTKLIYKNHLIHSAVGCQQGDPLGPAIFSLAINPIIKKLQSKFNVWYLDDGTLGGDVETVLKDLILLKSELQSIGLELNNSKSELFFTDPTTTSSAIDQFNAVAPNITVLNKNTLRLLGAPILEESFSPFIDEKIQNYADVSVRLSEINVHSAFTIIRFCLFMPKFIYYIRCSPLWKFNSQLEKIDEIIRVSVQSVLNLDFNDRAWLQTTMPIRLGGLGIRKISSISLPAFLSSVFGTEKLVKNILGRSLNNFEVPFTQEALQTWKIACPNSQLPAFPSSQRQWDAPLCSLVRNSLLNSYTNSADRARLLAVGEWEAGLWLKVIPSPNVGTLLDNNTFRLATSLRLGIQCIAPHRCRCGNNVDLLGHHALSCCRSAGRIPRHASINDIIRRALVSVGVPAALEPNGLVRSDGKRPDGMSLMPWKMGRLLVWDATCVDTLAPSHLPSTSVAPGTAAAEAENIKRHKYSSLTSGYIFVPFGVETLGAWGPNAQSFYKDLAKRLFDCTRDQKSGLYFAERISIAIQRGNAASLLGTFANPCSAEDTVPSLI

SEQ ID NO: 6972 - protein, 987 aa, Clostera curtula
MLYLFSFIVVCIFILLFWYTCLILKPRDCQMFPNDDDKAEEQPSTSHQHLVKCPQCPEPRFFKGDRGLKIHHSKSHKHINSSPINDVFENNPISNSSLLFWQKISHLKNSLPIVKRIPRGSRATVAQCLIDSIQAVLSDNSISSWENLLTFPYRILHINNTPVNKKSLTCRIKDNCINHQAIQVGNRFLSHKKSFSHLVESKLYDGDIGGASRLLFSSDSVAPFCDETLNSLLSKHPLPRPDLSFPGPPNSCDSTLSATTEDVASAISSFRKGSAGGLDGLTPQHLKDLLCPGTGEASISLLKALTALTNLMLSGNVHPEITDVLYGANLIALRKKDGGIRPIAVGCTYRRMVSKVCCKHYFEPLSKLFQPLQLGFGSKGGCEAAIHALSTFLDSGKGEVILKIDLKNAFNSVNRDDLLTQVKKETPEIFSYLWQCYRYPTKLIYKNHLIHSAVGCQQGDPLGPAIFSLAINPIIKKLQSKFNVWYLDDGTLGGDVETVLKDLILLKSELQSIGLELNNSKSELFFTDPTTTSSAIDQFNAVAPNITVLNKNTLRLLGAPILEESFSPFIDEKIQNYADVSVRLSEINVHSAFTIIRFCLFMPKFIYYIRCSPLWKFNSQLEKIDEIIRVSVQSVLNLDFNDRAWLQTTMPIRLGGLGIRKISSISLPAFLSSVFGTEKLVKNILGRSLNNFEVPFTQEALQTWKIACPNSQLPAFPSSQRQWDAPLCSLVRNSLLNSYTNSADRARLLAVGEWEAGLWLKAIPSPNVGTLLDNNTFRLATSLRLGIQCIAPHRCRCGNNVDLLGHHALSCCRSAGRIPRHASINDIIRRALVSVGVPAALEPNGLVRSDGKRPDGMSLMPWKMGRLLVWDATCVDTLAPSHLPSTSVAPGTAAAEAENIKRHKYSSLTSGYIFVPFGVETLGAWGPNAQSFYKDLAKRLFDCTRDQKSGLYFAERISIAIQRGNAASLLGTFANPCSAEDTVPSLI

SEQ ID NO: 6973 - protein, 987 aa, Clostera curtula
MLYLFSFIVVCIFILLFWYTCLILKPRDCQMFPNDDDKAEEQPSTSHQHLVKCPQCPEPRFFKGDRGLKIHHSKSHKHINSSPINDVFENNPISNSSLLFWQKISHLKNSLPIVKRIPRGSRATVAQCLIDSIQAVLSDNSISSWENLLTFPYRILHINNTPANKKSLTCRIKDNCINHQAIQVGNRFLSHKKSFSHLVESKLYDGDIGGASRLLFSSDSVAPFCDETLNSLLSKHPLPRPDLSFPGPPNSCDSTLSATTEDVASAISSFRKGSAGGLDGLTPQHLKDLLCPGTGEASISLLKALTALTNLMLSGNVHPEITDVLYGANLIALRKKDGGIRPIAVGCTYRRMVSKVCCKHYFEPLSKLFQPLQLGFGSKGGCEAAIHALSTFLDSGKGEVILKIDLKNAFNSVNRDDLLTQVKKETPEIFSYLWQCYRYPTKLIYKNHLIHSAVGCQQGDPLGPAIFSLAINPIIKKLQSKFNVWYLDDGTLGGDVETVLKDLILLKSELQSIGLELNNSKSELFFTDPTTTSSAIDQFNAVAPNITVLNKNTLRLLGAPILEESFSPFIDEKIQNYADVSVRLSEINVHSAFTIIRFCLFMPKFIYYIRCSPLWKFNSQLEKIDEIIRVSVQSVLNLDFNDRAWLQTTMPIRLGGLGIRKISSISLPAFLSSVFGTEKLVKNILGRSLNNFEVPFTQEALQTWKIACPNSQLPAFPSSQRQWDAPLCSLVRNSLLNSYTNSADRARLLAVGEWEAGLWLKAIPSPNVGTLLDNNTFRLATSLRLGIQCIAPHRCRCGNNVDLLGHHALSCCRSAGRIPRHASINDIIRRALVSVGVPAALEPNGLVRSDGKRPDGMSLMPWKMGRLLVWDATCVDTLAPSHLPSTSVAPGTAAAEAENIKRHKYSSLTSGYIFVPFGVETLGAWGPNAQSFYKDLAKRLFDCTRDQKSGLYFAERISIAIQRGNAASLLGTFANPCSAEDTVPSLI

SEQ ID NO: 6974 - protein, 689 aa, Clostera curtula
MTLLKELTALTNLMLSGNVHPDITDVLYGANLISLRKKDGGIRPIAVGCTYRRLVSKVCCKQFFDPLSKLFQPLQLGFGSKGGCEAAIHALSTFLDSGKGEVILKIDLKNAFNSVNRDALLTQVKKEIPEIFSYLWQCYRYPTKLIFKNHLIHSAVGCQQGDPLGPVIFSLAINPIIKKLQSKFNVWYLDDGTLGGDVETVLKDLVFLKSELQSIGLELNNSKSEIYITDPTTTSSTIDQFSAVAPNITVLNKNTLRLLGAPILEESFPHFIDEKIQNYADVSARLSEINVHSALTIIRFCLFMPNCIYYLRCSPFWKFNSQLEKIDEIIRVSVQSVLNLDINDRAWLQATMPIRLGGLGVRKISSISLPAFLSSVFGTEKLVKNILSRSLNNFEVPFTEEALQTWKIACPNSKLPAFPSSQRQWDAPLCSLVRNRLLNSYTNSADRARLLAVGEWEAGLWLKAFPSPNVGTLLDNNSFRLATSLRLGIQCIAPHRCRCGNNVDLLGHHALSCCRSAGRIPRHASINDIIRRALVSVGVPAVLEPNGLVRNDGKRPDGMSLMPWKMGRLLVWDATCVDTLAPSHLPSTSVAPGSAAAEAENMKRHKYSSLTSGYIFVPFGVETLGAWGPNAQSFYKDLAKRLFDCTHDQRSGLYFAERISISIQRGNAASLMGTFANHCSAEDAVHSLI

SEQ ID NO: 6975 - protein, 987 aa, Clostera curtula
MLYLFSFIVVCIFILLFWYTCLILKPRDCQMFPNDDDKAEEQPSTSHQHLVKCPQCPEPRFFKGDRGLKIHHSKSHKHINSSPINDVFENNPISNSSLLFWQKISHLKNSLPIVKRIPRGSRATVAQCLIDSIQAVLSDNSILSWENLLTFPYRILHINNTPANKKSLTCRIKDNCINHQAIQVGNRFLSHKKSFSHLVESKLYDGDIGGASRLLFSSDSVAPFCDETLNSLLSKHPLPRPDLSFPGPPNSCDSTLSATTEDVASAISSFRKGSAGGLDGLTPQHLKDLLCPGTGEASISLLKALTALTNLMLSGNVHPEITDVLYGANLIALRKKDGGIRPIAVGCTYRRMVSKVCCKHYFEPLSKLFQPLQLGFGSKGGCEAAIHALSTFLDSGKGEVILKIDLKNAFNSVNRDDLLTQVKKETPEIFSYLWQCYRYPTKLIYKNHLIHSAVGCQQGDPLGPAIFSLAINPIIKKLQSKFNVWYLDDGTLGGDVETVLKDLILLKSELQSIGLELNNSKSELFFTDPTTTSSAIDQFNAVAPNITVLNKNTLRLLGAPILEESFSPFIDEKIQNYADVSVRLSEINVHSAFTIIRFCLFMPKFIYYIRCSPLWKFNSQLEKIDEIIRVSVQSVLNLDFNDRAWLQTTMPIRLGGLGIRKISSISLPAFLSSVFGTEKLVKNILGRSLNNFEVPFTQEALQTWKIACPNSQLPAFPSSQRQWDAPLCSLVRNSLLNSYTNSADRARLLAVGEWEAGLWLKAIPSPNVGTLLDNNTFRLATSLRLGIQCIAPHRCRCGNNVDLLGHHALSCCRSAGRIPRHASINDIIRRALVSVGVPAALEPNGLVRSDGKRPDGMSLMPWKMGRLLVWDATCVDTLAPSHLPSTSVAPGTAAAEAENIKRHKYSSLTSGYIFVPFGVETLGAWGPNAQSFYKDLAKRLFDCTRDQKSGLYFAERISIAIQRGNAASLLGTFANPCSAEDTVPSLI

SEQ ID NO: 6976 - protein, 676 aa, Clostera curtula
MLSGNVHPEITDVLYGANLIALRKKDGGIRPIAVGCTYRRMVSKVCCKHYFEPLSKLFQPLQLGFGSKGGCEAAIHALSTFLDSGKGEVILKIDLKNAFNSVNRDDLLTQVKKETPEIFSYLWQCYRYPTKLIYKNHLIHSAVGCQQGDPLGPAIFSLAINPIIKKLQSKFNVWYLDDGTLGGDVETVLKDLILLKSELQSIGLELNNSKSELFFTDPTTTSSAIDQFNAVAPNITVLNKNTLRLLGAPILEESFSPFIDEKIQNYADVSVRLSEINVHSAFTIIRFCLFMPKFIYYIRCSPLWKFNSQLEKIDEIIRVSVQSVLNLDFNDRAWLQTTMPIRLGGLGIRKISSISLPAFLSSVFGTEKLVKNILGRSLNNFEVPFTQEALQTWKIACPNSQLPAFPSSQRQWDAPLCSLVRNSLLNSYTNSADRARLLAVGEWEAGLWLKAIPSPNVGTLLDNNTFRLATSLRLGIQCIAPHRCRCGNNVDLLGHHALSCCRSAGRIPRHASINDIIRRALVSVGVPAALEPNGLVRSDGKRPDGMSLMPWKMGRLLVWDATCVDTLAPSHLPSTSVAPGTAAAEAENIKRHKYSSLTSGYIFVPFGVETLGAWGPNAQSFYKDLAKRLFDCTRDQKSGLYFAERISIAIQRGNAASLLGTFANPCSAEDTVPSLI

SEQ ID NO: 6977 - protein, 987 aa, Clostera curtula
MLYLFSFIVVCIFILLFWYTCLILKPRDCQMFPNDDDKAEEQPSTSHQHLVKCPQCPEPRFFKGDRGLKIHHSKSHKHINSSPINVVFENNPISNSSLLFWQKISHLKNSLPIVKRIPRGSRATVAQCLIDSIQAVLSDNSISSWENLLTFPYRILHINNTPANKKSLTCRIKDNCINQQAIQVGNRFSSHKKSFSHLVESKLYDGDIGGASRLLFSSDSVAPYCDETLNSLLSKHPLPRPDLSFPGSPNSCDSTLSATTEDVASAISSFRKGSAGGLDGLTPQHLKDLLCPGTGEASISLLKALTALTNLMLSGNVHPEITDVLYGANLIALRKKDGGIRPIAVGCTYRRMVSKVCCKHYFEPLSKLFQPLQLGFGSKGGCEAAIHALSTFLDSGKGEVILKIDLKNAFNSVNRDDLLTQVKKETPEIFSYLWQCYRYPTKLIYKNHLIHSAVGCQQGDPLGPAIFSLAINPIIKKLQSKFNVWYLDDGTLGGDVETVLKDLILLKSELQSIGLELNNSKSELFFTDPTTTSSAIDQFNAVAPNITVLNKNTLRLLGAPILEESFSPFIDEKIQNYADVSVRLSEINVHSAFTIIRFCLFMPKFIYYIRCSPLWKFNSQLEKIDEIIRISVQSVLNLDFNDRAWLQTTMPIRLGGLGIRKISSISLPAFLSSVFGTEKLVKNILGRSLNNFEVPFTQEALQTWKIACPNSQLPAFPSSQRQWDAPLCSLVRNSLLNSYTNSADRARLLAVGEWEAGLWLKAIPSPNVGTLLDNNTFRLATSLRLGIQCIAPHRCRCGNNVDLLGHHALSCCRSAGRIPRHASINDIIRRALVSVGVPAALEPNGLVRSDGKRPDGMSLMPWKMGRLLVWDATCVDTLAPSHLPSTSVAPGTAAAEAENIKRHKYSSLTSGYIFVPFGVETLGAWGPNAQSFYKDLAKRLFDCTRDQKSGLYFAERISIAIQRGNAASLLGTFANPCSAEDTVPSLI

SEQ ID NO: 6978 - protein, 987 aa, Clostera curtula
MLYLFSFIVVCIFILLFWYTCLILKPRDCQMFPNDDDKAEEQPSTSHQHLVKCPQCPEPRFFKGDRGLKIHHSKSHKHINSSPINDVFENNPISNSSLLFWQKISHLKNSLPIVKRIPRGSRATVAQCLIDSIQAVLSDNSISSWENLLTFPYRILHINNTPANKKSLTCRIKDNCINHQAIQVGNRFSSHKKSFSHLVESKLYDGDIGGASRLLFSSDSVAPYCDETLNSLLSKHPLPRPDLSFPGPPNSCDSTLSATTEDVASAISSFRKGSAGGLDGLTPQHLKDLLCPGTGEASISLLKALTALTNLMLSGNVHPEITDVLYGANLIALRKKDGGIRPIAVGCTYRRMVSKVCCKHYFEPLSKLFQPLQLGFGSKGGCEAAIHALSTFLDSGKGEVILKIDLKNAFNSVNRDDLLTQVKKETPEIFSYLWQCYRYPTKLIYKNHLIHSAVGCQQGDPLGPAIFSLAINPIIKKLQSKFNVWYLDDGTLGGDVETVLKDLILLKSELQSIGLELNNSKSELFFTDPTTTSSAIDQFNAVAPNITVLNKNTLRLLGAPILEESFSPFIDEKIQNYADVSVRLSEINVHSAFTIIRFCLFMPKFIYYIRCSPLWKFNSQLEKIDEIIRVSVQSVLNLDFNDRAWLQTTMPIRLGGLGIRKISSISLPAFLSSVFGTEKLVKNILGRSLNNFEVPFTQEALQTWKIACPNSQLPAFPSSQRQWDAPLCSLVRNSLLNSYTNSADRARLLAVGEWEAGLWLKAIPSPNVGTLLDNNTFRLATSLRLGIQCIAPHRCRCGNNVDLLGHHALSCCRSAGRIPRHASINDIIRRALVSVGVPAALEPNGLVRSDGKRPDGMSLMPWKMGRLLVWDATCVDTLAPSHLPSTSVAPGTAAAEAENIKRHKYSSLTSGYIFVPFGVETLGAWGPNAQSFYKDLAKRLFDCTRDQKSGLYFAERISIAIQRGNAASLLGTFANPCSAEDTVPSLI

SEQ ID NO: 6979 - protein, 957 aa, Clostera curtula
MFPNDDDKAEEQPSTSHQHLVKCPQCPEPRFFKGDRGLKIHHSKSHKHINSSPINDVFENNPISNSSLLFWQKISHLKNSLPIVKRIPRGSRATVAQCLIDSIQAVLSDNSISSWENLLTFPYRILHINNTPANKKSLTCRIKDNCINHQAIQVGNRFLSHKKSFSHLVESKLYDGDIGGASRLLFSSDSVAPFCDETLNSLLSKHPLPRPDLSFPGPPNSCDSTLSATTEDVASAISSFRKGSAGGLDGLTPQHLKDLLCPGTGEASISLLKALTALTNLMLSGNVHPEITDVLYGANLIALRKKDGGIRPIAVGCTYRRMVSKVCCKHYFEPLSKLFQPLQLGFGSKGGCEAAIHALSTFLDSGKGEVILKIDLKNAFNSVNRDDLLTQVKKETPEIFSYLWQCYRYPTKLIYKNHLIHSAVGCQQGDPLGPAIFSLTINPIIKKLQSKFNVWYLDDGTLGGDVETVLKDLILLKSELQSIGLELNNSKSELFFTDPTTTSSAIDQFNAVAPNITVLNKNTLRLLGAPILEESFSPFIDEKIQNYADVSVRLSEINVHSAFTIIRFCLFMPKFIYYIRCSPLWKFNSQLEKIDEIIRVSVQSVLNLDFNDRAWLQTTMPIRLGGLGIRKISSISLPAFLSSVFGTEKLVKNILGRSLNNFEVPFTQEALQTWKIACPNSQLPAFPSSQRQWDAPLCSLVRNSLLNSYTNSADRARLLAVGEWEAGLWLKAIPSPNVGTLLDNNTFRLATSLRLGIQCIAPHRCRCGNNVDLLGHHALSCCRSAGRIPRHASINDIIRRALVSVGVPAALEPNGLVRSDGKRPDGMSLMPWKMGRLLVWDATCVDTLAPSHLPSTSVAPGTAAAEAENIKRHKYSSLTSGYIFVPFGVETLGAWGPNAQSFYKDLAKRLFDCTRDQKSGLYFAERISIAIQRGNAASLLGTFANPCSAEDTVPSLI

SEQ ID NO: 6980 - protein, 1217 aa, Mythimna impura
MGVKNNEQTEIFKKNEQKTVGATMEDKNSIDENRETEHTSGSSLSASEALVGLLESLTSSEREWPQQALLSVITRFGRMPRGGWARAKDVFCGKFGSSVSSEEFKKRAQKALTTSSGRQCSNREFKEEATKRRKTILTLFEENSLLEAKVHSETEKIFREKISLLKKLKVDEAERTRKIPSPKVDPLRLGAVIKSVETYTGEHPPRNMSDVARILQAAQICYQEVTRKEAKPSVWKESILKKVDSFQTKVKLLSKVREFGELSEEEKREAKKIMREVNLKMCLKHDLSEAIAIFNEKSAVYSKKLEVSQKRKEYRQHNQSFELYRSNFYRQLGGTQQNDHQVSVDDIKSFWSTMWNKNDNIEESDSFDEYLLSYLPGPEEQITFPAYAEFQDIIKYLPNWKAAGCDGIYNFFLKKCSALHPFLYDIIREICLDGKTPESWFYKGITYLIPKGTPTRGSDFRPITCMSNLYKLTTKCTTKVLQLIVESRGLLSENQLGTVRLVQGAKEQAMLNIAINKEHFNLLKTMWIDVKKAYDSVDHLYLLSCIERLNLPQWIGNFLQATIKQWHIEIKSGSETIIDKKIERGILQGDSLSPLLFVLCMDPLSRKLNSKYPKIGVQIDSQSFVTNHLLFIDDLKLLAENDGNLKAMCEETKKFFKTVGLEMNKEKSATNCIGCQEDAVVLEGLQGYKYLGITEDSSSATKRETFEKVKAEIVKRVERLCMTKLNGVNMFRAINEHAISVINYHVGLLKLEPADFKGLDFEIRQVLIRHHIHLQPACKERLYLPREEMGRGLACVEHRSESMLLNMFNSLIGSRNSSLRRAALLKVEEESRSHLSQIVGYLRTKYELAGIVTPKMLVESQRSKLYNEIKIKTNHGKLYKARDHELVSIKGSSTWLVKGNNQARSEASFCFLQDRNIFCGQVGQCPHCRSHRKSVDHLATKCDRMLGFDYMRRHNEVVRCLHLLLCKKYGFKKTNKIRSHSVQEVMSNDNAEIRVDTRISTDIKVSHNKPDIFVLDKKRKEILIVEVGITNQDLLTVVENEKLRKYDLLANELGLMYKAKTKIIPYVMTWDGVVTSYHRKYIQELNVQPTLEAYIQSVVLKKTLESISLDRRRGLDQEEAGEEEMEKALENLVWSSAGGAREREGGEVEKRTGGDLVSEPILIPGKLLDPEETVLASDRTEPQVPGIKLNPEDPKSNCGITELLTHLYNTATDESLE

SEQ ID NO: 6981 - protein, 1217 aa, Mythimna impura
MGVKKNEQTEIFKENEQKTVGATMEDKNSIDENRETEHTSGSSLSASEALVGLLESLTSSEREWPQQALLSVITRFGRMPRGGWAKAKDVFCGKFGSSVSSEEFKKRAQKALTTSSGRQCSNREFKEEATKRRKTILTLFEENSLLEAKVHSETEKIFREKISLLKKLKVDEAERTRKIPSPKVDPLRLGAVIKSVETYTGEHPPRNMSDVARILQAAQICYQEVTRKEAKPSVWKESILKKVDSFQTKVKLLSKVREFGELSEEEKREAKKIMREVNLKMCLKHDLSEAIAIFNEKSAVYSKKLEVSQKRKEYRQHNQSFELYRSNFYRQLGGTQQNDHQVNVDDIKSFWSTMWNKSDNIEESDSFDEYLLSYLPGPEEQITFPAYAEFQDIIKYLPNWKAAGCDGIYNFFLKKCSALHPFLYDIIREICLDGKTPESWFYKGITYLIPKGTPTRGSDFRPITCMSNLYKLTTKCTTKVLQLIVESRGLLSENQLGTVRLVQGAKEQAMLNIAINKEHFNLLKTMWIDVKKAYDSVDHLYLLSCIERLNLPQWIGNFLQATIKQWHIEIKSGSETILDKKIERGILQGDSLSPLLFVLCMDPLSRKLNSKYPKIGVQIDNQSFVTNHLLFIDDLKLLAENDGNLKAMCEETKKFFKAVGLEMNKEKSATNCIGCKEDAVVLEGSQGYKYLGITEDSSSATKRETFEKVKAEIVKRVERLCMTKLNGVNMFRAINEHAISVINYHVGLLKLEPADFKGLDFEIRQVLIRHHIHLQPACKERLYLPREEMGRGLACVEHRSESMLLNMFNSLIGSRNSSLRRAAILKVEEESRSHLSQIVGYLRTKYELAGIVTPKMLVESQRSKLYNEIKIKTNHGKLYKARDHELVSIKGSSTWLVKGNNQARSEASFCFLQDRNIFCGQVGQCPHCRSHRKSVDHLATKCDRMLGFDYMRRHNEVVRCLHLFLCKKYGFKKTNKIRSHSVQEVMSNDNAEIRVDTRISTDIKISHNKPDIFVLDKKRKEILIVEVGITNQDLLTVVENEKLRKYDLLANELGLMYKAKAKIIPYVMTWDGVVTSYHKKYIQELNVQPTLEAYIQSVVLKKTLESISLDRRRGLDQEEAGEEEMEKALENLVCSSAGGVREREGGEVEKRTGGDLVSEPILIPGKPLDPEETVLVSDRTEPQVPGNKLNPEDPKSNCGITELLTHLYNTATDESLE

SEQ ID NO: 6982 - protein, 1213 aa, Mythimna impura
MSDIMGVKNNKQTEILKENEKKTVGAAVEDKSSIEDNRETEHTSGSSLSTSEALVGLLESLTSSEREWPQQALLSVITRFGRMPRGGWAKAKDVFCGKFGSSVSSEEFKKRAQKALTTSSGRQCSNREFKEEATKRRKTILTLFEENSLLEAKVYSETEKIFREKISLLKKFKVDEAERTRKIPSPKVDPLRLDAVIKSVETYTGEHPPRNMSDVARILQTAQICYQEVTRKEAKPSVWKESILKKVDSFQTKVKLLSKVREFGELSEEEKREAKKIMREVNLKMCLKHDFSEAIAIFNEKSAVYSKKLEVSQKRKEYRQHNQSFELYRSNFYRQLEGTQQNDHQVSVDDIKSFWSTMWNKNDNIEESDSFDEYLLSYLPGPEEQITFPAYAEFQDIIKYLPNWKAAGCDGIYNFFLKKCSALHPFLYDIIREICLDGKTPESWFYKGITYLIPKGTPTRGSDFRPITCMSNLYKLTTKCTTKVLQLIVESRGLLSENQLGTVRLVQGAKEQAMLNIAINKEHFNLLKTMWIDVRKAYDSVDHLYLLSCIERLNLPQWIGNFLQATVKRWHIEIKSGSETIIDKKIERGILQGDSLSPLLFVLCMDPLSRKLNSKYPKVGVQIDNQSFVTNHLLFIDDLKLLAENEGNLKAMCEETKKFFKTVGLEMNKEKSATNCIGCKEDAVVLEGSQGYKYLGITEDSSSATKRETFEKVKAEIVKRVERLCMTKLNGVNMFRAINEHAISVINYHVGLLKLEPADFKGLDFEIRQVLIRHHIHLQPACKERLYLPREEVGRGLACVEHRSESMLLNMFNSLIGSRNSSLRRAAILKVEEESRSHLSQIVGYLRTKYELAGIVTPKMLVESQRSKLYNEIKIKTNHGKLYKARDHELVSIKGSSTWLVKGNNQARSEASFCFLQDRNIFCGQVGQCPHCRSHRKSVDHLATKCDRMLGFDYMRRHNEVVRCLHLLLCKKYGFKKTNKIRSHSVQEVMSNDNAEIRVDTRISTDIKVSHNKPDIFVLDKKRKEILIVEVGITNQDLLTVVENEKLRKYDLLANELGLMYKAKTKIIPYVMTWDGVVTSYHKKYIQELNVQPTLEAYIQSVVLKKTLESISLDRRRGLDQEEAGEEEMEKALENLVCSRAGGPGVGEKGGEEKPEPRIKTGEVEDPVEERKETSLPEPKVPGKNLNPEDPESDCGIKEIPEALIRDADNITY

SEQ ID NO: 6983 - protein, 1217 aa, Mythimna impura
MGVKNNKQTEIFKKNEQKTVGATMEDKNSIDENRETEHTSGSSLSASEALVGLLESLTSSEREWPQQALLSVITRFGRMPRGGWARAKDVFCGKFGSSVSSEEFKKRAQKALTTSSGRQCSNREFKEEATKRRKTILTLFEENSLLEAKVHSETEKIFREKISLLKKLKVDEAERTRKIPSPKVDPLRLGAVIKSVKTYTGEHPPRNMSDVARILQAAQICYQEVTRKEAKPSVWKESILKKVDSFQTKVKLLSKVREFGELSEEEKREAKKIMREVNLKMCLKHDLSEAIAIFNEKSAVYSKKLEVSQKRKEYRQHNQSFELYRSNFYRQLGDTQQNDHQVSVDDIKSFWSTMWNKNDNIEESDSFDEYLLSYLPGPEEQITFPAYAEFQDIIKYLPNWKAAGCDGIYNFFLKKCSALHPFLYDIIREICLDGKTPESWFYKGITYLIPKGMPTRGSDFRPITCMSNLYKLTTKCTTKVLQLIVESRGLLSENQLGTVRLVQGAKEQAMLNIAINKEHFNLLKTMWIDVKKAYDSVDHLYLLSCIERLNLPQWIGNFLQATIKQWHIEIKSGSETILDKKIERGILQGDSLSPLLFVLCMDPLSRKLNSKYPKIGVQIDNQSFVTNHLLFIDDLKLLAENEGNLKAMCEETKKFFKTVGLEMNKEKSATNCSGCQEDAVVLEGSQGYKYLGITEDSSSATKRETFEKVKAEIVKRVERLCMTKLNGVNMFRAINEHAISVINYHVGLLKLEPADFKGLDFEIRQVLIRHHIHLQPACKERLYLPREEMGRGLACVEHRSESMLLNMFNSLIGSRNSSLRRAALLKVEEESRSHLSQIVGYLRTKYELAGIVTPKMLVESQRSKLYNEIKIKTNHGKLYKARDHELVSIKGSSTWLVKGNNQARSEASFCFLQDRNIFCGQVGQCPHCRSHRKSVDHLATKCDRMLGFDYMRRHNEVVRCLHLLLCKKYGFKKTNKIRSHSVQEVMSNDNAEIRVDTRISTDIKVSHNKPDIFVLDKKRKEILIVEVGITNQDLLTVVENEKLRKYDLLANELGLMYKAKTKIIPYVMTWDGVVTSYHKKYIQELNVQPTLEAYIQSVVLKKTLESISLDRRRGLDQEEAGEEEMEKALENLVCSSAGGPGVGDKGGEVVKEKGGEEKPEPRIKTGEVEDPVEERKETSLPEPKVPGKNLNPEDPESDCGIKEILEALIRDADNITY

SEQ ID NO: 6984 - protein, 1010 aa, Pachythone gigas
MSDVARILQAAQICYQEVTRKEAKPSVWKESILKKIESFQTKVKLLSKVREFGELLEEEKREAKKIMREVNLKMCLNHDLSEAIATFNEKSAVYSKKLEVSQKRKEYRQHNQSFELYRSNFYRQLGGTQQNDHQVSVDDIKSFWSTMWNKNDNTEESNSFSEYLLSYLPGPEEQTTFPAYAEFQDIIKYLPNWKAAGGDGIYNFFLKKCSALHPFLYDIIREICLDGKTPESWFYKGITYLIPKGTPTRGSDFRPITCMSNLYKLTTKCTTKVLQLIVESRGLLSENQLGTVRLVQGAKEQAMLNIAINKEHFNLLKTMWIDVKKAYDSVDHLYLLSCIERLNFPQWIGNFLQATIKRWHIEIKSGSEKILDKRIERGILQGDSLSPLLFVLCMDPLSRKLNSKYPKVGVQTDNQSFVTNHLLFIDDLKLLAENDGNLKAMCEETKKFFKTVGLEMNKEKSATNCIGCQEDAVVLEGSQGYKYLGITEDSSSATKRETFEKVKTEILQRVERLCMTKLNGVNMFRAINEHAISVINYHVGLLKLEPADFKGLDFEIRQVLIKHHIHLQPACKERLYLPREEMGRGLACIEHRGESMLLNMFSSLIGSRNSSLRRAAILKVEEESRSHLSQIVGYLRTKYELAGIITPKMLVESQKSKLYNDIKNKTNHGKLYKARDHELVSIKGSSTWLVKGNNQARSEASFCFLQDRNIFCGQVGQCPHCRSHRKSVDHLATKCDRMLGFDYMRRHNEVVRCLHLLLCKKYGFKKTNKIRSHSVQEVMSNDNAEIRVDTRISTDIKISHNKPDIFVLDKKRKKILIVEVGITNQDLLTVVENEKLRKYDLLANELGLIYKAKTKIIPYVMTWDGVVTSYHKKYIQELNVQPTLEAYIQSVVLKKTLESISLDRRRGLDQEEVGEEEMEKALENLVCSSTRGPGVGEKGGEVGKEKGGEEKPEPRIKTGEVKDPVEKRKETNLPEPKVPGENLNPEDPKSDGGLKEILEALIHDADSKTH

SEQ ID NO: 6985 - protein, 1427 aa, Pheosia tremula
MMMNMEKVNKSRYDLRSLPGGRRGTSGADAGCHSMRTIGDEGPSRRAPLDKYATADHISEAGSSSSPSLFPSIASTPPSYCVSPTPSSSIIIGLMDVAQETNSVREPVPTTSGKKIRRKWSTEMNEFILRTYLHLTNMETDTKSYLLPLHTKFIEKFPDMQVSRQRIGDQRRAIVQKKLLPQEQIDTIYNDVRTDLQSINTQVTNFTQTFNTQPDQRLKWTNEYNETIIRIYYKITHLETNKTAYRKYLHKEFINLFPHLEHISEQRVADQRRAIINNKYISDDRIKLIKNEVARELQINLTSLQSENSNTEHIMLSSSTNFTSRVINSENTTVTTNENAELRTVYTPLIQEIADIAISDTPITHTQIQTSSITCNQSDNISRLSPENSIMMHTYNSDIPQTHIDAEEFTITLERNHEIDETFKEVLQNFTNTNPSQRTYIPKQKATKKLAITVQYINKVLLPEHLHENTEFITFQTILYSAAWTAAQINGTKLSLSPHNPNTRISHKPKWQIRLEKKLEDLRVKIGRLTQYINGNRNINIIKHVKLIFDQYKIHSQHEESNTELTHFLDTLKQKLSAVTNRLKRYKKCTLRKTQNTQFKTNEKQFYRSITNPSSHNPTTSNNSSHNTHSRPTPEELHGFWAKIWDTPVEHNTEAAWIENVQARSVQQMEFIDIPLDIFNKVIKRLHNWKAPGSDHIHNYWYKKFTYIHSHLRNYINNFILSPNTIPSYITAGTTHMLPKDPSDTANPAKYRPITCLQTIYKIITSCIAETIYTHINTNNILLEEQKGCRKLSQGCKEQLTIDAVVSKQALTKKTDIFTMYIDYQKAFDSVPHSWLTRVLDLYKIHPTLTHFLKHAMQNWSTVLKLTNEGTVMETEPIRIRRGIFQGDALSPLWFCLALNPLSHLLNSSNNGYKIVNDNINYTLSHLMYMDDIKLYANTLNELNELVEVAQTFSEDIHMQFGIDKCKIQSVSKGRIEANHYQLQNGQTIDPVDNNSGYKYLGYQQSQQIHQKETKQTLEEKFRARLHKILNTQLNSRNTIKAINTYAVPILTYSFGIIRWSQTDLKRLQRIINTLLTKYRKHHPRACVQRLTLPRAEGGRGLIDVQNLHNKQITTLRTFFKNQTERSTLHRVITHTDKKFTPLNLSDHSTQKNENITSNTQKLDTWIQKSLHGRHRHDLVRPNVDKSASNAWLERGELFAETEGFMIAIQDQTIDTKNYRKYIIKDRTLVSDVCRHCHSSPETIQHITGACKSIAQTDYKHRHDQVAAIIHQHLAYKHSLITQKVPYYKYTPQTILESNSFKLYWDRTIITDKTIHYNRPDILLYDKNNSTIHLIDIAIPNTHNLASTYTEKIAKYTDLSIELKNQWRVQTVKTIPIVLSSTGVIPHTLHTSLAFLGIHQLIYTLLQKATVLNTCRIVRKFLSIDQT

SEQ ID NO: 6986 - protein, 1427 aa, Pheosia tremula
MMMNMEKVNKSRYDLRSLPGGRRGTSGADAGCHSMRTIGDEGPSRRAPLDKYATADHISEAGSSSSPSLFPSIASTPPSYCVSPTPSSSIIIGLMDVAQETNSVREPVPTTSGKKIRRKWSTEMNEFILRTYLHLTNMETDTKSYLLPLHTKFIEKFPDMQVSRQRIGDQRRAIVQKKLLPQEQIDTIYNDVRTDLQSINTQVTNFTQTFNTQPDQRLKWTNEYNETIIRIYYKITHLETNKTAYRKYLHKEFINLFPHLEHISEQRVADQRRAIINNKYISDDRIKLIKNEVARELQINLTSLQSENSNTEHIMLSSSTNFTSRVINSENTTVTTNENAELRTVYTPLIQEIADIAISDTPITHTQIQTSSITCNQSDNISRLSPENSIMMHTYNSDIPQTHIDAEEFTITLERNHEIDETFKEVLQNFTNTNPSQRTYIPKQKATKKLAITVQYINKVLLPEHLHENTEFITFQTILYSAAWTAAQINGTKLSLSPHNPNTRISHKPKWQIRLEKKLEDLRVKIGRLTQYINGNRNINIIKHVKLIFDQYKIHSQHEESNTELTHFLDTLKQKLSAVTNRLKRYKKCTLRKTQNTQFKTNEKQFYRSITNPSSHNPTTSNNSSHNTHSRPTPEELHGFWAKIWDTPVEHNTEAAWIENVQARSVQQMEFIDIPLDIFNKVIKRLHNWKAPGSDHIHNYWYKKFTYIHSHLRNYINNFILSPNTIPSYITAGTTHMLPKDPSDTANPAKYRPITCLQTIYKIITSCIAETIYTHINTNNILLEEQKGCRKLSQGCKEQLTIDSVVSKQALTKKTDIFTMYIDYQKAFDSVPHSWLTRVLDLYKIHPTLTHFLKHAMQNWSTVLKLTNEGTVMETEPIRIRRGIFQGDALSPLWFCLALNPLSHLLNSSNNGYKIVNDNINYTLSHLMYMDDIKLYANTLNELNELVEVAQTFSEDIHMQFGIDKCKIQSVSKGRIEANHYQLQNGQTIDPVDNNSGYKYLGYQQSQQIHQKETKQTLEEKFRARLHKILNTQLNSRNTIKAINTYAVPILTYSFGIIRWSQTDLKRLQRIINTLLTKYRKHHPRACVQRLTLPRAEGGRGLIDVQNLHNKQITTLRTFFKNQTERSTLHRVITHTDKKFTPLNLSDHSTQKNENITSNTQKLDTWIQKSLHGRHRHDLVRPNVDKSASNAWLERGELFAETEGFMIAIQDQTIDTKNYRKYIIKDRTLVSDVCRHCHSSPETIQHITGACKSIAQTDYKHRHDQVAAIIHQHLAYKHSLITQKVPYYKYTPQTILESNSFKLYWDRTIITDKTIHYNRPDILLYDKNNSTIHLIDIAIPNTHNLASTYTEKIAKYTDLSIELKNQWRVQTVKTIPIVLSSTGVIPHTLHTSLAFLGIHQLIYTLLQKATVLNTCRIVRKFLSIDQT

SEQ ID NO: 6987 - protein, 1426 aa, Pheosia gnoma
MMMNMEKVNKSRYELRSLPGGRRGTSGADAGCHSMRTIGDEGPSRRAPLDKYATADHISEAGSSSSPCLFPSITSTTPSYCVSPTPSSSTIIGLMDVAQETNSVREPVPTTSGKKIRRKWSTEMNEFILRTYLHLTNMETDTKSYLLPLHTKFIEKFPDMQVSRQRIGDQRRAIVQKKLLPQEQIDIIYNDVRTDLQSINTQVTNFTQTFNTQPDQRLKWTNEYNETIIRIYYKITQLETNKTAYRKYLHKEFINLFPHLEHISEQRVADQRRAIINNKYISDDRIKLIKNEVARELQINLTTLQSENSNTEQIMLSSSINFTSRVINSENTTVTTNENAELRTVYTPLIQEIADIAISDTPITHTQIQTSSITCNQTDNISLLSPENSIMMHTYNSDIPQTHIDAEEFTITLERNHEIDETFKEVLQNFTNTNPSQRTYIPKQKATKKLAITVQYINKVLLPEHLDENTEFITFQTILYSAAWTAAQINGTKLSLSPHNPNTRISHKPKWQIRLEKKLEDLRVKIGRLTQYINGNRNINIIKHVKLIFDQYKIHSQHEESNTELTHFLDTLKQKLSAVTNRLKRYKKCTLRKTQNTQFKTNEKQFYRSITNPSSHSSTTSNNSSHNHSRPTPEELHGFWAKIWDTPVEHNTEAAWIENVQARSVQQMEFIDIPLDIFNKVIKRLHNWKAPGSDHIHNYWYKKFTYIHSYLRNYINNFILSPNTIPSYITAGTTHMLPKDPSDTANPAKYRPITCLQTIYKIITSCIAETIYTHINTNNILLEEQKGCRKLSQGCKEQLTIDAVVSKQALTKKTDIFTMYIDYQKAFDSVPHSWLTHVLDLYKIHPTLTHFLKHAMQNWSTVLKLTNEGTVMETEPIRIRRGIFQGDTLSPLWFCLALNPLSHLLNSSNNGYKIVNDNINYTLSHLMYMDDIKLYANTLNELNELVEGAQTFSEDIHMQFGIDKCKIQSVSKGRIEANHYQLQNGQTIDPVDNNSGYKYLGYQQSLQIHQKETKQTLEEKFRARLHKILNTQLNSRNTIKAINTYAVPILTYSFGIIRWSQTDLKRLQRIINTLLTKYRKHHPRACIQRLTLPRAEGGRGLIDVQNLHNKQITTLRTFFKNQTERSTLHRVITHTDKKFTPLNLSDHSTQKNENITSNTQKLDTWIQKSLHGRHRHDLVRPNVDKSASNAWLERGELFPETEGFMIAIQDQTIDTKNYRKYIIKDRTLVSDVCRHCHSSPETIQHITGACKSIAQTDYKHRHDQVAAIIHQHLAYKHSLITQKVPYYKYTPQTILESNSFKLYWDRTIITDKTIHYNRPDILLYDKNNSTIYLIDIAIPNTHNLASTYTEKIAKYTDLSIELKNQWRVQTVKTIPIVLSSTGVIPHTLHTSLAFLGIHQLIYTLLQKATVLNTCRIVRKFLSIDQT

SEQ ID NO: 6988 - protein, 1367 aa, Deilephila porcellus
MNMSNRRYNLRSLPGGRRGTSGADAGCSSMRTIGDEGLNRRTPVEEYTTADENNSPSPSSSPKSLFPSTPSSPSSYLAYSPTSSCSSAKDVVQEADYATQPVPAEARRKRKKWTNEMNIFILRSYFILTSIETDTSSYLGQLHDLFSKQYPNMKVSRQRVGDQRRAIIRSKLLSDEKIKEIKEEAQSYLNSNSNSQNSITHNIIETTQHNSQNRQRMRWTQNYNISILYNYYKITSLESNRTGYRPLLHNAFITEFPELSHLSEQRISDQLRVIKNNKLLNENQIQTIKDKVAIELSSQRTIQNNTSIDNIFPQLEYLQTTDEVEDTNRNTLLLTQNIVHNPGSSGPRTVTNPTQTLSPEQKTSVEEFFMQAVREYENTCPTTRPYIPKQKTTKKLASVVQFLNQSVLPKCITSDTNFQTLHTTLYCAALTAAKHNGSKIRTTPEQITHKKSIPHWQLRLQNRIEILRSHIGKLTEYINGNHSDKLKRTVEDIMMRYKIHSKHEAENTELLHFLDTLKQKLNALASRLRRYKTTTLRKTQNRLFINNEKAFYRSLVNDQTDDTQYIESPCPEPQTLHKYWSDIWSNPVEHSTDADWIQSHKETLTQLPNMEFEEINLDLLKFVIGKTHNWKATGSDNIHNYWIKKFTYIHPILLSHINTFIKSPETLPDYITRGTTYMLPKDKKDLKNPAKYRPITCLQNIYKIITSCISELVYKHAENNQILAEQQKGCRRKSQGCKEQLIIDAVVSKHALRNKNNIYTMYIDYQKAFDSVPHSWLLYILQHYKIHHTLIQFLKITMSSWCTVLKTKQGNQTIETESISIRRGIFQGDSLSPLWFCLALNPLSSLLNNTNSGYKLAYNNSEYFLSHLMYMDDIKLYSNSLEGLYKLADVTQQFSHSICMSFGIDKCKTQCVRAGRIENNCYKLNETDQIDPVDSVTGYKYLGYQQSQQIHQKETKHTLSQKFKSRLHKVLKLHLNARNTIKAINTYAVPILTYSFGIINWSQTDLKKHQRTINTHMTKYRKHHPKSCIERLTLPKSEGGRGIIDINNLHNKQVNSLRSFFHNRSINSQLHLSIVKTDQKFTPLNLHDVTPQKNETIIDNQQKIDRWKQKSLHGRHYLDLNSSNVDKTASNAWLKRGELFPETEGFMLAIQDQVIDTKNYRKYIIKDNRFTSDLCRHCHHSPETIQHITGACHSISQTDYKHRHDQVAAIIHQKLALKYGFIKEKTAYYKYKPQVILDNTNYKLYWDRTIITDKTINCNRPDITFYDKKNKEVYLIDIAIPNTHNLASTFTEKLAKYTDLAIELKTQWQAQTVKTIPIIVSSTGVIPHTLHTSLKSLDMPPLTYTQLQKAAILNTCRIVRKFLSINN

SEQ ID NO: 6989 - protein, 1255 aa, Deilephila porcellus
MNTFILRSYFILTSIETDTSSYLGQLHDMFSKQYPNMQVSRQRIGDQRRAIIRSKLLSEEKIKEIKEEAINYLNSNTHTQHNQINNTKESDPTTTQTNTKNKQRMRWSQNYNMSILYNYYKITNLETNRTGYRPLLHRAFITDYPELSHLSEQRISDQLRVIKNNKLLSENLIETIKNRVTIELSSHNINQIDTDINNICSQSQNVETIGEVENINIHITEDTQNTIYSPRDNRCPELINNPPQNLLTEQKNSIEEFFTQTFKEFENTCPTSRPYIPKQKPTKKLASIVQLLNQSILLNYIKPDSNFQTLHTALYCAAFAAAKYNGSKIRTHQEQTSYEKVTPPWQRRLQNRIDILRSQIGKLTEYINGNRSKKLKRTIDDILIRYKIHSKHETENTELTHFLDTLKQKLNALASRLRRYKTTTLRKTQNKIFTNNEKSFYRSLMSDQTDGTQNLASECPEPEELHKYWSDIWSAPIEHNADADWIHLDRETLSELPTMDFDKIDLDLLQFVIGKTHNWKATGSDSIHNYWFKKFTYIHPILLTHINTFIKSPETLPNYITRGTTYMLPKDKLDLKNPAKYRPITCLQNLYKIITSCISELIYRHAEHNKILAEEQKGCRRRSQGCKEQLVIDSVVSNQAVRNKRNIYTMYIDYQKAFDSVPHTWLLYILEHYKIHPILVQFLKTAMSNWSTVLKTKKGNQTLATEAIQIRRGIFQGDSLSPLWFCLGLNPLSNLLNKRNAGYDIQYDNLQHTISHLMYMDDIKLYSNTLDGLHKLADITQEFSRSICMRFGIDKCKLQCVRAGKTENNIYKVNDLEQIDPVDNVNGYKYLGYQQTQRIHQKETKATLTDKFKSRLHKILKLHLNARNTIKAINTFAVPILTYSFGIIHWSQTDLKKHQRAINTHMTKYRKHHPKACIERMTLPKNEGGRALIDITNLHNKQITSLRSFFHKYSEQSQLHLSIVKADQKLTPLNLKDLCPQKNESLFSLQQKTDRWKQKSLHGRHYLDLNNSNVDKIASNAWLKRGELFPETEGFMLAIQDQVIDTKNYRKYIIKDTRFTSDLCRHCHHSPETIQHITGACHSITQTDYKHRHDQVAAIIHQKLALKYGLIKEKTAYYKYKPQVILDNSEFKLYWDRTIITDKTIHFNRPDITFHDKKNKVVYLVDIAVPNTHNLTSTFTDKLTKYTDLAIEIKTQWQVQTVKTVPIIISSTGVIPHTIHNSLKILDMHPLTYIQLQKAAILNTCRIVRKFLSID

SEQ ID NO: 6990 - protein, 1356 aa, Laothoe populi
MKMNNRRYNLRSLPGGRRGASGADAGCSSIRSIGDVGLNRRALVEEYGTADDHPSSLSSSPKSLFPSAPSSPLSYLIHSPSSSRSSTEDVVQEAIHAEQSVPVEVNRTRIKWNDEMNIFILRSYYILTSLETDTTSYVAHLHEEFSKQYPNIQVSRQRIGDQRRSIIRNKLLSDKKIKEIKQEAQLYLNTQKTTQHNTTHNIIAISQTNTRQRMRWTQNLNQSILRNYYKITNLETNRTGFRQLLHQAFTTEFPHLSHLSEQRISDQLRVIKNNRLLSEHQMQMIRNEVVSELSKQITNQNTTQNTQEGETIEVHNITNQTLSQTHNTQHVQTVNHLGIVKNSPQNLLLDNKKDIDETFAQAISDYEHTCATNRPYIPKQRSTKKLAAIIHYLNESVLPKYIHSEINFQTLHTTLYCAALTAAKHNGSKIRSTQEGPARLNSIPSWQRRLQNRIETLRSQIGKLTAYITGNNNDSLKREIIDIKTRHKIHSKHETENTDLSHFLDTLKQKLNALASRLRRYKMTTLRKTQNKHFSSNEKGFYRSLSNEHNNDTRNLNSELPEPDSFRQYWSNIWSRPVEHTDTDWIKADKNAQIDIPYMEFEEISLDLLKTVIGKLHNWKATGSDNIHNFWYKKFTCTHPLLLSHINTFIKSPETLPNYLTQGITYMLPKDKLDPKNPAKYRPITCLQSLYKIITSCISELIYNHAENQNILAEEQKGCRRKSKGCKEQLVIDAVVSKQAFRNKNNIYTLYVDYQKAFDSVPHTWLIYILEHYKVHPTVVQFLKTTMSKWSTILKSKKNNCILETDPIQICRGIFQGDTLSPLWFCLALNPLSSLLNNSDCGYKIDYNNTQYSLSHLMYMDDIKLYANSLENLNKLIDITQQFSKDICMTFGLDKCKIQSVRAGRVENNSYQLNDVERIDPVDNITGYKYLGYQQTRQIHQKETKTTITQKFKSRLHKLLNLHLNSRNTIKAINTYAIPILTYSFGIIQWSQTDLKKQQRLINTHLTKYRKHHPKSCVERLTLPKHEGGRAIIDITNLHNKQIISLRSFFHNQSQRSQLHLCIVYSDQKLTPLNLQDILTQKNESITTMQQKLDKWRQKSLHGRHYLDLNNPNVDKIASNAWLKRGELFPETEGFIIAIQDQIIDTKNYRKFIIKDSRFTSDLCRHCHHSSETIQHITGACQSITQTDYKHRHDQVSAIIHQKIAFKYGLIKDKTPYYKYTPQVIIDTPDYKMYWDRTIITDKTIHYNRPDITFYDKKKRLVYLIDIAIPNTHNLASTFTDKLAKYTDLAIELKTQWQAQTVKTIPIIISSTGVIPHTLHNSLKTLDMHPLTYIQLQKAVILNTCRIVRKFLSIDQ

SEQ ID NO: 6991 - protein, 1397 aa, Deilephila porcellus
MQELLQNTQNQQSAFTFPKLTVPNPILMKMNNNRYDLRSLPGGRRGASGAGAGCSSMRTIGDEGLNRRTPVEEYTTADDNNSSLSSSPKSLFPSTPSSPVSFLPSSPTSSCSSAKDVVWEANYAAQPVPAEARRRRKKWTDEMNTFILRSYFILTSIETDTSSYLGQLHDMFSKQYPNMQVSRQRIGDQRRAIIRSKLLSEEKIKEIKEEAINYLNSNTHTQHNQINNTKESDPTTTQTNTKNKQRMRWSQNYNMSILYNYYKITNLETNRTGYRPLLHRAFITDYPELSHLSEQRISDQLRVIKNNKLLSENLIETIKNRVTIELSSHNINQIDTDINNICSQSQNVETIGEVENINIHITEDTQNTIYSPRDNRCPELINSPPQNLLTEQKNSIEEFFTQTFKEFENTCPTSRPYIPKQKPTKKLASIVQLLNQSILPNYIKPDSNFQTLHTALYCAAFTAAKYNGSKIRTHQEQTSYEKVTPPWQRRLQNRIDILRSQIGKLTEYINGNRSKKLKRTIDDILIRYKIHSKHETENTELTHFLDTLKQKLNALASRLRRYKTTTLRKTQNKIFTNNEKSFYRSLMSDQTDGTQNLASECPEPEELHKYWSDIWSAPIEHNADADWIHLDRETLSELPTMDFDKIDLDLLQFVIGKTHNWKATGSDSIHNYWFKKFTYIHPILLTHINTFIKSPETLPNYITRGTTYMLPKDKLDLKNPAKYRPITCLQNLYKIITSCISELIYRHAEHNKILAEEQKGCRRRSQGCKEQLVIDSVVSNQAVRNKRNIYTMYIDYQKAFDSVPHTWLLYILEHYKIHPILVQFLKTAMSNWSTVLKTKKGNQTLATEAIQIRRGIFQGDSLSPLWFCLGLNPLSNLLNKSNAGYDIQYDNLQHTISHLMYMDDIKLYSNTLDGLHKLADITQEFSRSICMRFGIDKCKLQCVRAGKTENNIYKVNDLEQIDPVDNVNGYKYLGYQQTQRIHQKEAKATLTDKFKSRLHKILKLHLNARNTIKAINTFAVPILTYSFGIIHWSQTDLKKHQRAINTHMTKYRKHHPKACIERMTLPKNEGGRALIDITNLHNKQITSLRSFFHKYSEQSQLHLSIVKADQKLTPLNLKDLCPQKNESLFSLQQKTDRWKQKSLHGRHYLDLNNSNVDKIASNAWLKRGELFPETEGFMLAIQDQVIDTKNYRKYIIKDTRFTSDLCRHCHHSPETIQHITGACHSITQTDYKHRHDQVAAIIHQKLALKYGLIKEKTAYYKYKPQVILDNSEFKLYWDRTIITDKTIHFNRPDITFHDKKNKVVYLVDIAVPNTHNLTSTFTDKLTKYTDLAIEIKTQWQVQTVKTVPIIISSTGVIPHTIHNSLKILDMHPLTYIQLQKAAILNTCRIVRKFLSID

SEQ ID NO: 6992 - protein, 834 aa, Laothoe populi
MTTLRKTQNKHFSSNEKGFYRSLSNEHNNDTRNLNSELPEPDSFRQYWSNIWSRPVEHTDTDWIKADKNAQIDIPYMEFEEISLDLLKTVIGKLHNWKATGSDNIHNFWYKKFTCTHPLLLSHINTFIKSPETLPNYLTQGITYMLPKDKLDPKNPAKYRPITCLQSLYKIITSCISELIYNHAENQNILAEEQKGCRRKSKGCKEQLVIDAVVSKQAFRNKNNIYTLYVDYQKAFDSVPHTWLIYILEHYKVHPTVVQFLKTTMSKWSTILKSKKNNCMLETDPIQICRGIFQGDTLSPLWFCLALNPLSSLLNNSDCGYKIHYNNTQYSLSHLMYMDDIKLYANSLENLNKLIDITQQFSKDICMTFGLDKCKIQSVRAGRVENNSYQLNDVERIDPVDNITGYKYLGYQQTRQIHQKETKTTITQKFKSRLHKLLNLHLNSRNTIKAINTYAIPILTYSFGIIQWSQTDLKKQQRLINTHLTKYRKHHPKSCVERLTLPKHEGGRAIIDITNLHNKQIISLRSFFHNQSQRSQLHLCIVYSDQKLTPLNLQDILTQKNESITTMQQKLDKWRQKSLHGRHYLDLNNPNVDKIASNAWLKRGELFPETEGFIIAIQDQIIDTKNYRKFIIKDSRFTSDLCRHCHHSSETIQHITGACQSITQTDYKHRHDQVSAIIHQKIAFKYGLIKDKTPYYKYTPQVIIDTPDYKMYWDRTIITDKTIHYNRPDITFYDKKKRLVYLIDIAIPNTHNLASTFTDKLAKYTDLAIELKTQWQAQTVKTIPIIISSTGVIPHTLHNSLKTLDMHPLTYIQLQKAVILNTCRIVRKFLSIDQ

SEQ ID NO: 6993 - protein, 1247 aa, Laothoe populi
MTMSNRRYNLRSLPGGRRGASGADAGCSSMRSIGDVGLNRRAPVEEYGTADDNHSSLSSSPKSLFPSTPSSPPFYLTHSPLSSSSSAEDVVQEALHAEQLVPVEACHTRKKWSDEMNISILRSYFIHTLLETDTTSYLGKLHDSFLKQYPNIQVSRQRIGDQRRAIIRNKLLSVEKINEIKEEARSYLNTVNTPENNTLHNTVVLSQHNTDNNKPRMRWTQTLNQSILRNYYRITQLETNRTGYRQLLHQAFIREHPQLAHLSEQRISDQLRIIKNNRLLSENQRDVIRNEVVLELSTQSTNQYMSQDESPCTVSHDEISDTVICDPFTNTNTQTHSASHTNISDIFSLSLEKKTEIEETYIQATIEYENTCPTKRPYIPKQKTSKTLASVVHLLNQSILPKYLTLDVDFQTLQTGLYCAALTAAKYNGSKIKLTHERSTRPKSLPPWQFRLQQRINNLRSQIGKVTEYINGNNSDSLKRQIEEIKIRHTIHSKHEQENTELTHFLDTLKQKLNALASRLRRYKTTTLRKTQNKQFIYNEKAFYRSLNEQADTAENTSPTYPEPEHLHIYWSNIWSKPIEHTNADWIKSDTQTLTETTSMDFEEVNLDLLRTIIGKTHNWKATGSDNLHNYWYKKFTYLHPILLSHINTFIRLPNTLPKYITQGTTYMLPKDRQDSTNPAKYRPITCLQNIYKIITSCISELIYKHAENNNILAEQQKGCRKRSQGCKEQLIIDTVVSKQAIHNKSDIYTMYIDYQKAFDSVPHTWLIYILEHYKIHPTVIQFLKIAMSNWFTVLKSRTQTGMVESTPIQISRGIFQGDSLSPLWFCLALNPLSNLLNRNNSGYRIEYNNTEYTLSHLMYMDDIKLYGNSLQALHQLADITQQFSEDICMTFGIDKCKIQSVRAGKIEINSYQLNDVKRIEPVDNITGYKYLGYQQTQQIHQKETKATLTQKFKSRLNKILKLHLNARNTTKAINTYAIPILTYSFGIIQWSQTDLKKHQRTINTHMTKYRKHHPKSCVERLTLPKNEGGRAIIDIANLHNKQIYTLRTFFHNQAQRSELHLSIVKADHKLTPLNLQDIMPQKNEIITTIHKKLDRWKQKSLHGRHYLDLSNPIVDKIASNTWLRRGELFPETEGFMLAIQDQVIDTKNYRKFILKDSRFTSDLCRHCHHSPETIQHITGACHSITQTDYKHRHDQVAAIIHQKLAFKYGLIKDVTAYYKYQPQVVIDTADYKLYWDRTIITDKTIH

SEQ ID NO: 6994 - protein, 1397 aa, Deilephila porcellus
MQELLQNTQNHQSAFTFPKLTVPNPILMKMNNNRYDLRSLPGGRRGASGAGAGCSSMRTIGDEGLNRRTPVEEYTTADDNNSSLSSSPKSLFPSTPSSPVSFLPSSPTSSCSSAKDVVREANYAAQPVPAEARRRRKKWTDEMNTFILRSYFILTSIETDTSSYLGQLHDMFSKQYPNMQVSRQRIGDQRRAIIRSKLLSEEKIKEIKEEAINYLNSNTHTQHNQINNTKESDPTTTQTNTKNKQRMRWSQNYNMSILYNYYKITNLETNRTGYRPLLHRAFITDYPELSHLSEQRISDQLRVIKNNKLLSENLIETIKNRVTIELSSHNINQIDTDINNICSQSQNVETIGEVENINIHITEDTQNTIYSPRDNRCPELINNPPQNLLTEQKNSIEEFFTQTFKEFENTCPTSRPYIPKQKPTKKLASIVQLLNQSILPNYIKPDSNFQTLHTALYCAAFTAAKYNGSKIRTHQEQTSYEKVTPPWQRRLQNRIDILRSQIGKLTEYINGNRSKKLKRTIDDILIRYKIHSKHETENTELTHFLDTLKQKLNALASRLRRYKTTTLRKTQNKIFTNNEKSFYRSLMSDQTDGTQNLASECPEPEELHKYWSDIWSAPIEHNADADWIHLDRETLSELPTMDFDKIDLDLLQFVIGKTHNWKATGSDSIHNYWFKKFTYIHPILLTHINTFIKSPETLPNYITRGTTYMLPKDKLDLKNPAKYRPITCLQNLYKIITSCISELIYRHAEHNKILAEEQKGCRRRSQGCKEQLVIDSVVSNQAVRNKRNIYTMYIDYQKAFDSVPHTWLLYILEHYKIHPILVQFLKTAMSNWSTVLKTKKGNQTLATEAIQIRRGIFQGDSLSPLWFCLGLNPLSNLLNKSNAGYDIQYDNLQHTISHLMYMDDIKLYSNTLDGLHKLADITQEFSRSICMRFGIDKCKLQCVRAGKTENNIYKVNDLEQIDPVDNVNGYKYLGYQQTQRIHQKETKATLTDKFKSRLHKILKLHLNARNTIKAINTFAVPILTYSFGIIHWSQTDLKKHQRAINTHMTKYRKHHPKACIERMTLPKNEGGRALIDITNLHNKQITSLRSFFHKYSEQSQLHLSIVKADQKLTPLNLKDLCPQKNESLFSLQQKTDRWKQKSLHGRHYLDLNNSNVDKIASNAWLKRGELFPETEGFMLAIQDQVIDTKNYRKYIIKDTRFTSNLCRHCHHSPETIQHITGACHSITQTDYKHRHDQVAAIIHQKLALKYGLIKEKTAYYKYKPQVILDNSEFKLYWDRTIITDKTIHFNRPDITFHDKKNKVVYLVDIAVPNTHNLTSTFTDKLTKYTDLAIEIKTQWQVQTVKTVPIIISSTGVIPHTIHNSLKILDMHPLTYIQLQKAAILNTCRIVRKFLSID

SEQ ID NO: 6995 - protein, 880 aa, Phalera bucephala
MQYKTHSKHEEPNTDHAHFLDTLKQKLSATTNRLKRYKKCTLRKAQNMKFNTNEKQFYRNITNSNLSNSPTNRNTTCTNNIPSSEEFQTYWANIWDNPIEHNAHAAWTINLQANSPSLEQMEFRNIPLEIFQKVINRVHNWKTPGSDNIHNYWLKKFTHLHSYLHKFINNFIYNPDSVPDYITSGITLMLPKDPNDTSNPAKYRPITCLQTTYKIMTSCIAETIYMHVNTNNILYEEQKGCRKQSQGCKEQLTIDAIVSKQAYTNKKDIFTMYIEYQKAFDSVPHSWLLYVLNFYKIHPTLIHFLKSAMLNWSTFLKINSHGTIVMTEPIKIRRGIFQGDALSPLWFCLALNPLSYLLNSSEKGYKIVNSTNAEYTLSHLMYMDDIKLYASSLHEIHTLADKAETFSRDIQMQFGIDKCRIQSVRNGNLELNNYELQDGQSIDPVDNNTGYKYLGYHQTRQLHQKETKIILECNFKARLHKILNTHLNSKNIIKAINTYAIPTLTYSFGIIHWSQTDLKRLQRIINTLLTKYRKHHPRACIQRLTLPRGEGGRGLIDIQNLHNKQITTLRTYFANKSEKSELHKAILYTDKKFTPLNLSNPIPQKNETLTNITQKLDAWMQKSLHGRHRQDLLKPNVDKSASKAWLERGELFPETEGFMIAIQDQTIDTRNYRKYIIKDRTLTSDICRHCQSSPETIQHITGACKSITQTDYKHRHDQVAAIIHQDLAFKHLLITEKTSYYKYTPETILESADYKLYWDRTIITDKTIHYNRPDILLQDKRNNTIYLIDIAIPNTHNLAHTYTEKITKYTDLSIELQKQWKVQNVKTVPIVLSSTGVIPHTLHTSLQLLGLHKYTYYLLQKATILNTCRIVRKFLAIPDP

SEQ ID NO: 6996 - protein, 1421 aa, Phalera bucephala
MDKGKNSRYNLRSLPGGRRGTSGAGAGCCSMRTIGDEGSNRRDPLDKLATADQFSVTGSSARSLFPSTSSTTLSYCVSPTPSSTTSISHVDVAQETNSIVNEPGPTTSGIKTRRKWSTEMNVFILRTYLHLTNMETDIKGYLLPLHTKFAEKYPNIQTSRQRLGDQRRAIIQNKLLPQDQIDRIYEDVRNELESIQTQVTQFSQSHNTQVGQRMRWTNEYNEAIIRIYYKITQLETNKTSYRKYLHRDFINLFPHLAHISEQRVADQKRAIINNRYISDDRLKVIKQEIAKDLQMTVTDRQRNENNMEQITQNMHETNMYPTVFASNVPIMSNVFTQSTPEPPIQTTMSPFTSQRSVEPILTTHNITYTNTTLQPSTQADISITLLHNPNGSQTSIDTDQLYNTRERNEQIDKTFRETLQHFTNTDPTKRPFIPKQKTSIRLASIVQYINSILLPDYLDENTDFETFHTIVYSAAVTAAKINGTKISLVPYNPNRPTNTKPKWQERLERKVEDLRAKIARLSQYINGNRNRNIIKHVKTIYMQYKTHSKHEEPNTDHAHFLDTLKQKLSATTNRLKRYKKCTLRKAQNMKFNTNEKQFYRNITNSNLSNSPTNRNTTCTNNIPSSEEFQTYWANIWDNPIEHNAHAAWTINLQANSPSLEQMEFRNIPLEIFQKVINRVHNWKTPGSDNIHNYWLKKFTHLHSYLHKFINNFIHNPDSVPNYITSGITLMLPKDPNDTSNPAKYRPITCLQTTYKIMTSCIAETIYMHVNTNNILYEEQKGCRKQSQGCKEQLTIDAIVSKQAYTNKKDIFTMYIDYQKAFDSVPHSWLLYVLNFYKIHPTLIHFLKSAMLNWSTFLKINSHGTIVMTEPIKIRRGIFQGDALSPLWFCLALNPLSYLLNSSEKGYKIVNSTNAEYTLSHLMYMDDIKLYASSLHEIHTLADKAETFSRDIQMQFGIDKCRIQSVRNGNLELNNYELQDGQSIDPVDNNTGYKYLGYHQTRQLHQKETKIILECNFRARLHKILNTHLNSKNIIKAINTYAIPTLTYSFGIIHWSQTDLKRLQRIINTLLTKYRKHHPRACIQRLTLPRGEGGRGLIDIQNLHNKQITTLRTYFANKSEKSELHKAILYTDKKFTPLNLSNPIPQKNETLTNITQKLDAWMQKSLHGRHRQDLLKPNVDKSASNAWLERGELFPETEGFMIAIQDQTIDTRNYRKYIIKDRTLTSDICRHCQSSPETIQHITGGCKSITQTDYKHRHDQVAAIIHQDLAFKHLLITEKTSYYKYTPETILESADYKLYWDRTIITDKTIHYNRPDILLQDKRNNTIYLIDIAIPNTHNLAHTYTEKITKYTDLSIELQKQWKVQNVKTVPIVLSSTGVIPHTLHTSLQLLGLHKYTYYLLQKATILNTCRIVRKFLAIPDP

SEQ ID NO: 6997 - protein, 1421 aa, Phalera bucephala
MDKGKNSRYNLRSLPGGRRGTSGAGAGCCSMRTIGDEGSNRRDPLDKLATADQFSVTGSSARSLFPSTSSTTLSYCVSPTPSSTTSISHVDVAQETNSIVNEPAPTTSGIKTRRKWSTEMNEFILRTYLHLTNMETDIKGYLLPLHTKFAEKYPNIQTSRQRLGDQRRAIIQNKLLPQDQIDRIYEDVRNELESIQTQVTQFSQSHNTQVGQRMRWTNEYNEAIIRIYYKITQLETNKTSYRKYLHRDFINLFPHLAHISEQRVADQKRAIINNRYISDDRLKVIKQEIAKDLQMTVTDRQRNENNMEQITQNMHETNMYPTVFASNVPIMSNVFTQSTPEPPIQTTMSPFTSQRSVEPILTTHNITYTNTTLQPSTQADISITLSHNPNGSQTSIDTDQLYNTRERNEQIDKTFRDTLQHFTNTDPTKRPFIPKQKTSKRLASIVQYINSILLPDYLDENTDFETFHTIVYSAAVTAAKINGTKISLVPNNPNRPTNTKPKWQERLERKVEDLRAKIARLSQYINGNRNRNIIKHVKTIYMQYKTHSKHEEPNTDHAHFLDTLKQKLSATTNRLKRYKKCTLRKAQNMKFKTNEKQFYRNITNSNLSNSPTNRNTTCTNNIPSSEEFQTYWANIWDNPIEHNAHAAWTINLQTNSPSLERMEFRNIPLEIFQKVINRVHNWKTPGSDNIHNYWLKKFTHLHSYLHKFINNFIHNPDSVPNYITSGITLMLPKDPNDTSHPAKYRPITCLQTTYKIMTSCIAETIYMHVNTNNILYEEQKGCRKQSQGCKEQLTIDAIVSKQAYTNKKDIFTMYIDYQKAFDSVPHSWLLYVLNFYKIHPTLIHFLKSAMLNWSTFLKINSHGTIVMTEPIKIRRGIFQGDALSPLWFCLALNPLSYLLNSSEKGYKIVNSTNAEYTLSHLMYMDDIKLYASSLHELHTLADKVETFSRDIQMQFGIDKCRIQSVRNGNLELNNYELQDGQTIDPVDNNTGYKYLGYHQTRQLHQKETKIILECNFRARLHKILNTHLNSKNIIKAINTYAIPTLTYSFGIIHWSQTDLKRLQRIINTLLTKYRKHHPRACIQRLTLPRGEGGRGLIDIQNLHNKQITTLRTYFANKSEKSELHKAILYTDKKFTPLNLSNPIPQKNETLTNITQKLDAWMQKSLHGRHRQDLLKPNVDKSASNAWLERGELFPETEGFMIAIQDQTIDTRNYRKYIIKDRTLTSDICRHCQSSPETIQHITGACKSITQTDYKHRHDQVAAIIHQDLAFKHLLITEKTSYYKYTPETILESADYKLYWDRTIITDKTIHYNRPDILLQDKRNNTIYLIDIAIPNTHNIAHTYTEKITKYTDLSIELQKQWKVQNVKTVPIILSSTGVIPYTLHTSLQLLGLHKYTYYLLQKATILNTCRIVRKFLAIPDP

SEQ ID NO: 6998 - protein, 1421 aa, Phalera bucephala
MDKGKNSRYNLRSLPGGRRGTSGAGAGCCSMRTIGAEGSNRRDPLDKLATADQFSVTGSSARSLFPSTSSTTLSYCVSPTPSSTTSISHVDVAQETNSIVNKPGPTTSGIKTRRKWSTEMNEFILRTYLHLTNMETDIKGYLLPLHTKFAEKYPNIQTSRQRLGDQRRAIIQNKLLPQDQIDRIYEDVRNELDSIQTQVTQFSQSHNTQVGQRMRWTNEYNEAIIRIYYKITQLETNKTSYRKYLHRDFINLFPHLAHISEQRVADQKRAIINNRYISDDRLKVIKQEIAKDLQMKVTDRQRNENNMEQITQNMHETNMYPTVFASNVPIMSNVFTQSTPEPPIQTTMSPLTSQRSVEPILTTHNITYTNTTLQPSTQADISITLSHNPNGSQTSIDTDQLYNTRERNEQIDKTFRETLQHFTNTDPTKRPFIPKQKTSKRLASIVQYINSILLPDYLDENTDFETFHTIVYSAAVTAAKVNGTKISLVPNNPSRPTNTKPKWQERLERKVEDLRAKIARLSQYINGNRNRNIIKHVKTIYMQYKTHSKHEEPNTDHAHFLDTLKQKLSATTNRLKRYKKCTLRKAQNMKFKTNEKQFYRNITNSNLSNSPTNRNTTCTNNIPSSEEFQTYWANIWDNPIEHNAHAAWTINLQANSPSLEQMEFRNIPLEIFQKVINRVHNWKTPGSDNIHNYWLKKFTHLHSYLHKFINNFIHNPDSVPNYITSGITLLLPKDPNDTSNPAKYRPITCLQTTYKIMTSCIAETIYMHVNTNNILYEEQKGCRKQSQGCKEQLTIDAIVSKQAYTNKKDIFTMYIDYQKAFDSVPHSWLLYVLNFYKIHPTLIRFLKSAMLNWSTFLKINSHGTIVMTEPIKIRRGIFQGDALSPLWFCLALNPLSYLLNSSEKGYKIVNSTNAEYTLSHLMYMDDIKLYASSLHEIHTLADKAETFSRDIQMQFGIDKCRIQSVRNGNLELNNYELQDGQTIDPVDNNTGYKYLGYHQTRQLHQKETKIILECNFRARLHKILNTHLNSKNIIKAINTYAIPTLTYSFGIIHWSQTDLKRLQRIINTLLTKYRKHHPRACIQRLTLPRGEGGRGLIDIQNLHNKQITTLRTYFANKSEKSELHKAILYTDKKFTPLNLSNPIPQKNETLTNITQKLDAWMQKSLHGRHRQDLLKPNVDKSASNAWLERGELFPETEGFMIAIQDQTIDTRNYRKYIIKDRTLTSDICRHCQSSPETIQHITGACKSITQTDYKHHHDQVAAIIHQDLAFKHLLITEKTSYYKYTPETILESADYKLYWDRTIITDKTIHYNRPDILLQDKRNNTIYLIDIAIPNTHNLAHTYTEKITKYTDLSIELQKQWKVQNVKTVPIVLSSTGVIPHTLHTSLQLLGLHKYTYYLLQKATILNTCRIVRKFLAIPDP

SEQ ID NO: 6999 - protein, 1421 aa, Phalera bucephala
MDKGKNSRYNLRSLPGGRRGTSGAGAGCCSMRTIGDEGSNRRDPLNKLATADQFSVTGSSARSLFPSTSSTTLSYCVSPTPSSTTSISHVDVAQETNSIVNEPGPTTSGIKTRRKWSTEMNEFILRTYLNLTNMETDIKGYLLPLHTKFAEKYPNIQTSRQRLGDQRRAIIQNKLLPQDQIDRIYEDVRNELESIQTQVTQFSQSLNTQVGQRMRWTNEYNEAIIRIYYKITQLETNKTSYRKYLHRDFINLFPHLAHISEQRVADQKRAIINNRYISDDRLKVIKQEIAKDLQMTVTDRQRNENNMEQITQNMHETNMYPTVFASNVPIMSNVFTQSTPEPPIQTTMSPFTSQRSVEPILTTHNITYTNTTLQPSTQADVSITLSHNPNGSQTSIDTDQLYNTRERNEQIDKTFRETLQHFTNTDPTKRPFIPKQKTSKRLASIVQYINSILLPDYLDENTEFETFHTIVYSAAVTAAKINGTKISLVPNNPNRPTNTKPKWQERLERKVEDLRAKIARLSQYINGNRNRNIIKHVKTIYMQYKTHSKHEEPNTDHAHFLDTLKQKLSATTNRLKRYKKCTLRKAQNMKFKTNEKQFYRNITNSNLSNSPTNRNTTCTNNIPSSEEFQTYWANIWDNPIEHNAHAAWTINLQANSPSLEQMEFRNIPLEIFQKVINRVHNWKTPGSDNIHNYWLKKFTHLHSYLHKFINNFIHNPDSVLNYITSGITLMLPKDPNDTSNPAKYRPITCLQTTYKIMTSCIAETIYMHVNTNNILYEEQKGCRKQSQGCKEQLTIDAIVSKQAYTNKKDIFTMYIDYQKAFDSVPHSWLLYVLNFYKIHPTLIHFLKSAMLNWSTFLKINSHGTIVMTEPIKIRRGIFQGDALSPLWFCLALNPLSYLLNSSEKGYKIVNSTNAEYTLSHLMYMDDIKLYASSLHEIHTLADKVETFSRDIQMQFGIDKCRIQSVRNGNLELNNYELQDGQTIDPVDNNTGYKYLGYHQTRQLHQKETKRILECNFRARLHKILNTHLNSKNIIKAINTYAIPTLTYSFGIIHWSQTDLKRLQRIINTLLTKYRKHHPRACIQRLTLPRGEGGRGLIDIQNLHNKQITTLRTYFANKSEKSELHKAILYEDKKFTPLNLSNPIPQKNETLTNITQKLDAWMQKSLHGRHRQDLLKPNVDKSASNAWLERGELFPETEGFMIAIQDQTIDTRNYRKYIIKDRTLTSDICRHCQSSPETIQHITGACKSITQTDYKHRHDQVAAIIHQDFAFKHLLITEKTSYYKYTPETILESADYKLYWDRTIITDKIIHYNRPDILLQDKRNNTIYLIDIAIPNTHNLAHTYTEKITKYTDLSIELQKQWKVQNVKTVPIILSSTGVIPHTLHTSLQLLGLHKYTYYLLQKATILNTCRIVRKFLAIPDP

SEQ ID NO: 7000 - protein, 1421 aa, Phalera bucephala
MDKGKNSRYNLRSLPGGRRGTSGAGAGCCSMRTIGDEGLNRRDPLDKLATADQFSVTGSSARSLFPSTSSTTLSYCVSPTPSSTTSISHVDVAQETNSIVNEPGPTTSGIKTRRKWSTEMNEFILRTYLHLTNMETDIKGYLLPLHTKFAEKYPNIQTSRQRLGDQRRAIIQNKLLPQDQIDRIYEDVRNELESIQTQVTQFSQSHNTQVGQRMRWTNEYNEAIIRIYYKITQLETNKTSYRKYLHRDFINLFPHLAHISEQRVADQKRAIINNRYISDDRLKVIKQEIAKDLQMTVTDRQRNENNMEQITQNMHETNMYPTVFASNVPIMNNVFTQSTPEPPIQTTMSPFTSQRSVEPILTTHNITYTNTTLQPSTQADISITLSHNPNGSQTSIDTDQLYNTRERNEQIDKTFRDTLQHFTNTDPTKRPFIPKQKTSKRLASIVQYINSILLPDYLDENTDFETFHTIVYSAAVTAAKINGTKISLVPNNPNRPTNTKPKWQERLERKVEDLRAKIARLSQYINGNRNRNIIKHVKTIYMQYKTHSKHEEPNTDHAHFLDTLKQKLSATTNRLKRYKKCTLRKAQNMKFKTNEKQFYRNITNSNLSNSPTNRNTTCTNNIPSSEEFQTYWANIWDNPIEHNAHAAWTINLQANSPSLERMEFRNIPLEIFQKVINRVHNWKTPGSDNIHNYWLKKFTHLHSYLHKFINNFIHNPDSVPNYITSGITLMLPKDPNDTSHPAKYRPITCLQTTYKIMTSCIAETIYMHVNTNNILYEEQKGCRKQSQGCKEQLTIDAIVSKQAYTNKKDIFTMYIDYQKAFDSVPHSWLLYVLNFYKIHPTLIHFLKSAMLNWSTFLKINSHGTIVMTEPIKIRRGIFQGDALSPLWFCLALNPLSYLLNSSEKGYKIVNSTNAEYTLSHLMYMDDIKLYASSLHEIHTLADKVETFSRDIQMQFGIDKCRIQSVRNGNLELNNYELQDGQTIDPVDNNTGYKYLGYHQTRQLHQKETKIILECNFRARLHKILNTHLNSKNIIKAINTYAIPTLTYSFGIIHWSQTDLKRLQRIINTLLTKYRKHHPRACIQRLTLSRGEGGRGLIDIQNLHNKQITTLRTYFANKSEKSELHKAILYTDKKFTPLNLSNPIPQKNETLTNITQKLDAWMQKSLHGRHRQDLLKPNVDKSASNAWLERGELFPETEGFMIAIQDQTIDTRNYRKYIIKDRTLTSDICRHCQSSPETIQHITGACKSITQTDYKHRHDQVAAIIHQDLAFKHLLITEKTSYYKYTPETILESADYKLYWDRTIITDKTIHYNRPDILLQDKRNNTIYLIDIAIPNTHNLAHTYTEKITKYTDLSIELQKQWKVQNVKTVPIILSSTGVIPHTLHTSLQLLGLHKYTYYLLQKATILNTCRIVRKFLAIPDP

SEQ ID NO: 7001 - protein, 1293 aa, Typhedanus ampyx
MNEFILRTYFQLTSLETDTKSFLPILHAKFLEKFPNIQVSRQRIGDQRRAIVQNKLLPQEYIDKIYNEVSTELKTSQSHIPQNSQSVITQTSTSQRMRWSNEYNEAIIRIYYKITQLENNQTSYREHLHQEFINLFPHLSHISKQRVSDQRRAIINNKFITDERLKVIKKEVAEELQINYSERHTNNNNHERTYPSQNIHIIHQSNDNSHTQTTESSPINTQTSSAISQTTLQTTSNQMDVNATLSSDTQTSTITYSNNPTDISQIQLDVEELVGQPTLDNNELIDHIFKEALENFSSLSPNNRIYIPKQKATKKLAIIVQYINNVILPKYLNNNIDFDTFQTTLYSAAWTVAKCNGSKISFTQQTKNARPHNNRPKWQIRLERKVEDLRCKIGRLTQYINGNRSKHVIRSVELICEEYKLHSRHEELNIELTQFLDTLKQKLSATTSRLKRYKTCTLRKTQNTRFKSNEKHFYRTLTQTTSHTYTHASLNHQPQPSPQDLQQFWSNIWDSPVEHDHQAEWLKTLQLSTTDIPEMVFTEIPIDNFQKVVKRLHNWKAPGTDYIHNYWYKKFTYIHPHLHKFINYFIRNPSKLPSYITNGITYMIPKNPTDTIDPAKYRPITCLQTIYKILTSCLAETIYSHININNILSEEQKGCKRFSQGCKEQLTIDAVISKHAYKNKRNIYTMYIDYKKAFDSVPHSWLVFVLKLYKIHPTLTLFLENTMQTWTTALKLVTDGTAIETEEIRIRRGIFQGDALSPLWFCLSLNPLSYLLNNSNTGYEILNNSEQHTLSHLMYMDDIKLYASTLDQLHKQAEIAEIFSKNIHMEFGIDKCKIQSVRKGKIEPNRYILQSGDAIDPVDNDTGYKYLGYQQTQHIHHKITKQTLEQKFKTRLHKILNTNLNSRNTIKAINSYAIPVLTYSFGIIQWSQTDLKRLQRIINTLLTKYRKHHPRSCTQRLTLPRTEGGRGLIDVQNLHNKQITTLRTFFQNQSKKSSLHKSIVSADKKFTPLNLSDSATQLNQKITPIPQKLDTWMQKSLHGRHRHDLLKPNVDKSASNAWLVRGELFSETEGFMIAIQDQIIDTRNHRKHNIKDRTLITDTCRHCQSSPETIQHITGACKSITQTEYKHRHDQVAAIIHQHLAYKHSLITQKAPYYKYSPQTILESATHKMYWDRTIITDKTIHYNRPDILLHDKVNSLIYLIDIAIPNTHNLATTYTEKIAKYSELAIELKNQWRVETVRTIPIIISSTGVIPHTLHTSLSSLGIHRLTYTLLQKATILNTCRIVRKFLSIDQT

SEQ ID NO: 7002 - protein, 1311 aa, Hestina assimilis
MNIFIWRTYLIITKCETIHKNNYLEPLHIQFTQKYPEFLISRQRLGDQRRAILRRKLIPDNILDEIRKEVTEHIQSEKETDNTNYRQEQTLHSSLRSQTSHTRMKWTNEYNEAIMTIYYKITHLERNKTAYRKSLHQEFVNLFPHLENISEQRIADQRRAIVNNKYVPDSRLKIKKEEVARQLELTNDEVERQNDTSALLTSSRNTGPGAAIAKEPILSQNCKDLHTMTTCTLSDISRSSIHNHTQNTMPIHTQINTPALTILTSLANTHHSQEDCNEIYISNVAEPPHRNKEIDDCFGEAFQHFSNTNPPERPYIPKQKATRKLAIIVHYINKIILPEQINENTDFNSFQTIIYTSAWVAAKTNGAKLNLLPTQTKKPPNSKAKWQIRLERKIEDLRVNIGRLTMYIQGNRSSRLRKHVKNICKKYEIHARHEDVNSELTHFLDTLKQKLSAVTSRLKRYNKCTLRKLQNNQFRSNEKQFYRSFATQSHNYTTPNTPHMHPPQINLAQQNGNSTLTLEELQRFWKALWDDPVKHNANGSWSEILHAKYLDIPQMDFTDISRDTFDRVIRKLHNWKAPGSDHIHNYWFKKFTYIHSYLHSFINKFIQNPNVMPKYITTGTTFMLPKDSNDMTNPSKYRPITCLQTTYKILTSCIAETIYAHTKTNNILHEEQKGCRKQSQGCKEQLTIDAVVSNQAFVQKRDIHTMYIDYQKAFDSVPHSWLTHILELYKIHPTIIHFLKTSMQSWSTKLQLVLNNTKAVTSEINIRRGIFQGDALSPLWFCLALNPLSSLLNNTSKGFEIQSNIRNHTISHLMYMDDIKLYADTLENLHHLVDVTQTFSKDICMQFGIDKCKIQSVRNGQIEFNQYTLQSSEIIDPVDTSTGYKYLGYQQTQKIHQKQTKTTLENNFITRLHKILNTQLNAKNLIKAINTYAIPALTYSFGIIQWSQTDLKRLQRKINTLLTKYRKHHPRACLQRQTLPKSEGGRGLIDIQNLHNKQITTLRTFFHNQADRSPLHTCITHADKKLTPLNLGDHHTQKNENIITIEKKLEDWIQKSLHGRHRQDLLKPNVDKNASNAWLVRGELFPETEGFMIAIQDQTIDTKNYRKYIIKDRTITSDICRHCHSSPETIQHITGACKSIAQTDYKHRHDQVAAIIHQYLAHNHSLIAQKVPYYKYTPDTVLESSEYKLYWDRTIITDKTIHFNRPDILLYDKAKSTIYLIDIAIPNTHNLTSTHTEKIAKYTDLAIELKTQWRVQTVRTIPIIISSTGIICHTLHTSLAVLGIHHLTYTLIQKATILNTCRIVRKFLSLD

SEQ ID NO: 7003 - protein, 1376 aa, Clostera curtula
MEYMENRRYSLRPLPGGRRGASGADAGCHSMRTIGGEGLNRRAPTDKNATADKSPYHTHSSPSSSCNSLFPSPSSSPYHPQSSSPSSSSNRSVNVVQEAGATNFESITDNKSARKKWTKDMNIFIWRTYLTLTKLESNTRGYLPLLHEKFSHNFPNMNVSRQRVGDQRRSIVNNKLLPQTTLDRIKHEVSINLEQDDQSTPLNPQPTGRMCWSKEINETILRIYYKITELEQNCTGYRKMLREQFIEAYPNLTHLTEQRVSDQRRAIVNNKMIPAHRIEQIKDEVRCHLLHTRQAEPQSSVETYTTQQQNTSMETNLEIRPITPQIYDSQTSFVQQEEHTQLPESIRDDTNTHTNTDNYTLQTRDFSIVDEQASTIFLEALHYYQTVEPTKRTYIPKQKTSRKLAILVQYFNETILPNHVDSSTSFSTFQTVLYSAAWAISKLNGARISLSSCNKTHHTVRKQKWQIRLERKIKDLRTKISRLTHYIHGNRTFHLTSHVNKIFEQYKIHSRHEDSNTDLTQFLDTLKQKLSAASGRLRRYNKCTLRKTQNAHFKSNEKQFYRNLKDTSNNNSNQSNPSTPNPEELHRFWTNVWDVETEHNQNAGWLDDIKINSYNIPGMEFTQVTPDILENVIKKLHNWKTPGSDQIHNYWYKKFTCLHPYLLKYINEFITNPTLIPNYITIGTTYMIPKDNSNINDPAKYRPITCLQNLYKIITSCIAEIIQNHINTNNILAEEQKGCRRYTQGCKEQLIIDTITSKHVLNKKKDIFTMYIDYQKAFDSVPHSWLLFVLKLYKIHPALIDFLKNTMHNWKTLLKLNTDSEALENAPIHIRRGIFQGDALSPIWFCLALNPLSHLLNISHMGYRISYDTTEYTLTHLMYMDDIKLYGSTLQDLYELADITHTFSQDIQMTFGIDKCKTYSMRKGKPESNSYTLFDGNSIDPVDAETGYKYLGYQQTLQIHHKTIKSTLQEKFKNRLHKILNTQLNSKNIIKAINSYAIPILTYSFGVIQWSQTDLKKLQRLINTLLTKYRKHHPRSCVQRLTLPRFEGGRGLIDIQNLHNRQIARLRNFFWNQIDRSLLHKTIVNADRKSSPLNLSDRNTQKNEAITTFQQKLEIWSQKSLHGRHRADLLKPTVDKKASNAWLERGELFPETEGFMCAIQDQTIDTRNYRKYIIKDRNLTTDTCRHCHSSSETIQHITGACKSIAQTDYKHRHDQVAAIVHQYLAFKYSLTSKKEPYYKYKPQTVLESRDYKLYWDRTIITDKTIHYNRPDILLHDKQNKTVYLIDIAIPNSHNITTTYTEKIAKYTDLSIELKTQWRVQAVRTIPIILSSTGIIPQNLHTSLEALGIHKLTYTLLQKATILNTCRIVRKFLAIEP

SEQ ID NO: 7004 - protein, 1376 aa, Clostera curtula
MEYMENRRYSLRPLPGGRRGASGADAGCHSMRTIGGEGLNRRAPTDKNATADKSPYHTHSSPSSSCNSLFPSPSSSPYHPQSSSPSSSSNRSVNVVQEAGATNFESITDNKSARKKWTKDMNIFIWRTYLTLTKLESNTRGYLPLLHEKFSHNFPNMNVSRQRVGDQRRSIVNNKLLPQTTLDRIKHEVSINLEQDDQSTPLNPQPTGRMCWSKEINETILRIYYKITELEQNCTGYRKMLREQFIEAYPNLTHLTEQRISDQRRAIVNNKMIPAHRIEQIKDEVRCHLLHTRQAEPQSSVETYTTQQQHTNMETNLEIRPITPQIYDSQTSFVQQEEHTQLPESIRDDTNTHTNTDNYTLQTRDFSIVDEQASTIFLEALHYYQTVEPTKRTYIPKQKTSRKLAILVQYFNETILPNHVDSSTSFSTFQTVLYSAAWAISKLNGARISLSSCNKTHHTVRKQKWQIRLERKIKDLRTKISRLTHYIHGNRTFHLTSHVNKIFEQYKIHSRHEDSNTDLTQFLDTLKQKLSAASGRLRRYNKCTLRKTQNAHFKSNEKQFYRNLKDTSNNNSNQSNPSTPNPEELHRFWTNVWDVETEHNQNAGWLDDIKINSYNIPGMEFTQVTPDILENVIKKLHNWKTPGSDQIHNFWYKKFTYLHPYLLKYINEFITNPTSIPNYITIGTTYMIPKDNSNINDPAKYRPITCLQNLYKIITSCIAEIIQNHINTNNILAEEQKGCRRYTQGCKEQLIIDTITSKHVLNKKKDIFTMYIDYQKAFDSVPHSWLLFVLKLYKIHPALIDFLKNTMHNWKTLLKLNTDSEALENAPIHIRRGIFQGDALSPIWFCLALNPLSHLLNISHMGYRISYDTTEYTLTHLMYMDDIKLYGSTLQDLYELADITHTFSQDIQMTFGIDKCKTYSMRKGKPESNSYTLFDGNSIDPVDAETGYKYLGYQQTLQIHHKTIKSTLQEKFKNRLHKILNTQLNSKNTIKAINSYAIPILTYSFGVIQWSQTDLKKLQRLINTLLTKYRKHHPRSCVQRLTLPRFEGGRGLIDIQNLHNRQIARLRNFFWNQIDRSLLHKTIVNADRKSSPLNLSDRNTQKNEAITTFQQKLEIWSQKSLHGRHRADLLKPTVDKKASNAWLERGELFPETEGFMCAIQDQTIDTRNYRKYIIKDRNLTTDTCRHCHSSSETIQHITGACKSIAQTDYKHRHDQVAAIVHQYLAFKYSLTIKKEPYYKYKPQTVLESRDYKLYWDRTIITDKTIHYNRPDILLHDKQNKTVYLIDIAIPNSHNITTTYTEKIAKYTDLSIELKTQWRVQTVRTIPIILSSTGIIPQNLHTSLEALGIHKLTYTLLQKATILNTCRIVRKFLAIEP
